United States Patent Application Publication US 2020/0157537 A1 - sequence listing, part 14

SEQ ID NO: 28215 - DNA, 1193 bp, Mus musculus
tgcctgatttgtgtgatttgtgagaaacctctccatggtcgacatgcatggaattctctctttaggagaacttaaaaataggtcaggtcagccccgatggattggacaggttaaggtgtgagtttcctctgtgggagagagcccagctgggtattttcagggtctcccattagcctgtgatcctaagattccacttatgggcactttctatgtctgtcatttttaaagctggttaacttggtggcttcattatttcccatcccctcccaattccccacgggggctctaactaaatcagaccacatttggagtctgtgtttctctctgggcagcacatttcaaagggccattggcctgttccaccttcagagagcagagccaagacaaatgggtggaagtcgctcagagacacattttgactccatataagaaagcctcgtcccgaggacgggaggaggtagtgggtgctccgggaacaccaggggaaatgatgtctcaaaggctcatgtaggtttctttaaaacctcgctaatgtccagactcaagtactagatctatggagcccaacagaaactgtccactgttcggaggcgccttctccgccatcctccctacaggggccattgatgtgagtgacctccgaccggtgccagacaaccaagaagttttctgccatcctgtgaccgaccagagtctgatcatagaacttctggagctgcaggcccacgtgcagggcgaagcggctgcgcggtaccattttgaggacgttggccgggtgcagggggctagggctgtgcacgtgctatctgtgcagcctctctgtttggagaacttatccctgagaggatgctgtcaggatgcctggtccctttctggcaagcagcaggtagctaaagaaaaccagcaggtagcaaaggatgtcacactgcatcaggccttgctgcggctgccccggtgtcacagcaggtctcttggccctgaaaatctgtcatgtccaccttggagcctgagtaactttgaacagctggtaactagtttgactcttcatgatcccaacctctttggtccccagtaaagatcgttgagacacaacgtgctactgaggactcggggacccagttctgagagggggagtttctttctgcttcttccctggatgtaaacataagacacttcctctgcagaaataaact

SEQ ID NO: 28216 - DNA, 1120 bp, Mus musculus
ctctgcagtttctctgcaggagccagtcagacctggaacttgttggaagcttccggtcgaggtgatggttgcctctgggcggcagccctggttagctgatcacacccaggtgtcatgatgccaacatcctaggttcctagtttttggttttggtaacttagtgcgtagctccaggtgccgcatctactcgccaatctaactcatgttctcagatcggtgctatggggtttcctgtgctgtgtaatgtactcttttaagccccttgggtcctctccttttggatcccataatgttgtggaagagtttctctcacaactgataagcaagaggaagacgccttcatagtaacaaggattctcttccaagacatttttgtttttgcacatttgaaaatgccacccgtggatcaaaatatacccaaacattttttctttttttttctttttttttttttttttttttttactttcttagcaagacttgaaaaatatgtgtagcgtgggcccaatttgtatcttatctcttccttcagccggagttgttggaaccactttatagtcaagatgaaagcattgaatttcgcttcaaaggactgactgcacatgtgcagaagaaaccctgcaggaccctattaggagcagatggtggccagccaaccagtccgtcagggaggcaaaaaggctcagtcccatcattgccaaaaaagaaaaaaaaaaaaataataataaacgagccaacctgaaggaagggtcaagggctccaggcggcacccagtttctgagggttgccctgatcaaaggcaatgactggggatgagggggggacgggtggttgttggcttggctttggcaagcttggtctcttgacttacccctgggcaggtagctttcttctgtaggtgctttgccaaattttcaaggggacatgtctagtgaagcctgaaggggctgccctgagtggagggagcattatggccaaagtggcccctgtgcacaggcccagtggagtgtgctgagctgctacactgagcttagcagagtggagcgtgggagggcgtcttagagcctggttgagaggttggaggagtgcttccctctgtcttccttccagtgagcctttc

SEQ ID NO: 28217 - DNA, 1071 bp, Mus musculus
ggctgggtctatggacatgtgttgtcggataaatggtgatggcgccctcaagtggctagaaggcttcactgcatattgtctgttgaggcttttgtcctccgagatcagagtactcaagagagactcctgacatctgtcctctccagtgtcacatttatgagcatctccactgtgctaggcctgtcccaggacactatatgaccacaccctctctcatcggtgtgtttctgtagcaagtcttcatatttgtttccaacaatggtgtctctgcgttcatgttgaagacagagatggggtaagaagactatccgtgcatgaagtagagaactgttggtttgtttctttttttttttttaaaggagaagctatttgtaagccactgcacaaagacgttttatatacactgcagagacctgtagtaaattatgttgacaatacgctgtttacattttctggagtctgatggcctcctacccctcactgaagcagccacctcctgctgtgggactgtgctcagtgggtggcctggagttttgctcttggcactgatgtaccagattcaagttttacacgctgtagcttttctatgcatgccctcacccaacctaaattatgtttttttgtataaatgataaaaaaaaactttctcaagacacttttgccacatgctgaaatgtatcacaactctacacctaccagttaagagtgcagccctggagctgtgacacaggtgccccccgggcctgctaggcagactgggaagctggctttgctatgggttatgtgactagttttcctttggtgggaaatttggggtaagaagacaccagtgagaatagccttccagctcacagggcctctgctgccgagacccaactgcccttcccaagccccgctaatgctcatgaatggaagtggacaacaggcatgagaataggagatggacagtccaggtggtgagacttggacaccagttactactgtgggtgattgacagatgccaactgagaaacattggaatattgcaagccctagaggtgaccacacttagttgggtctttggagttcata

SEQ ID NO: 28218 - DNA, 1195 bp, Mus musculus
tgcttcaggccagggcatttctggaccaccaccaccatatcctaagatccctccctggcggcattgtggatacagacaggccaacatcatctttcaaaactctgccattgccttgtagtattagttacttctcttgctgcaaacaccttaaggaagggtttattttggtttgcagtttaaggatacacagtccgccatggtagggaaagcctggcagcaagagctttaggtagctggtaacattgtatctacaatgtaacctcaaaccagggagcagagggatgaatactaatctggtcactttctcctttttatttactctgggcccccaggtcatcccatagttaggatgggtcttctcatctcagacaccctaatctagaagctccctcatagacatgctcagataattgtctcctaagtgaccccagatcctgtcaagttgacaatcgatacgagttatcacacttgctgaaagccctcatggttccctgtatctccaggaactggcttaaaattgagtttactattagagtctaaaaggactctaaggatgtttgaaactggaatctctgatgcgggtcctatgatcttgaggtgactgaccgatagttaaccattgtcaacttgacttggcattacctaggaaatgtctgcagaaatgagtcattgatgagtttctagagaggcttaactggggatggaagccctatcctgagagtgagccacaccattccatagactagggtcctggaccaaataaaaaggcaaattggagagagaaggcacaggcaccaacattcatctctccctgcttcctgactacagatgcaatgtggcctcatggccttgctgccacaccctcctgccatcaccaagtgtttcccctttcaaaccacctcccaaaacaaatccttcccccattaagttgcttcttttcaagcatctggccacagcaaacaaacaaacaaaaacccaagtaactaataacaaataaacaagtaaccggtacccggccagatgtcctctgatctcatcctgtgtaaacaccaaggccaagaaggagggagcatcaagtcggcctgagctcaccatctttctcttatttgagaaagggtctcactatgtagggctggtcctgaatgcattgagatctacctgcttacatcccaagtgatttacatcccaatgagta

SEQ ID NO: 28219 - DNA, 1144 bp, Mus musculus
ttccatgtgtgtctgacttagtgctgatttcatttgcagacctacatggtggttctgtgccttcccctactcccttctcatctttgtgtatgacgaggtgcggaagctcattatcaggcggcgccctggcggtaagtgggacaggcagggctggacttcctcccgtcaggtcacaggtacgcggccacggacacaactgtgctaaggtagaaacacaccgtggtttttaagaccttaaaaagtgcaaggcaaatgtagagaaagccttaacataaacctaataataataatattcttagagagagctaattagctacatctgaggtctcagatacacatatgcatacatgcgagcgtgtatacacacacacacacacacacacacgattatccttagcgagtccctgtcctggtttttcccaaaagaggactcactacctatggctctctctctctctctctcaggctgggtggagaaggaaacctactactagcccactgccctgcacgccgtggaacattgtgccacacactgcacccacccctaccccctctttgtgtacttcaagtcttggagctcggaactctaccctggtaggaaagcaccaaagcatgtggggatgcagacgtcctggaatgaagcatgtagctgtaacggggggcggggcgggggggagggctgcctgagaaacaccgtgtacggggacgacagcgggcaaggtttatacgtgcctttttgtttttgtaaaaaaggaaaacctggaaagactgaaagattacgttttatatctggatttttacaaataaagatggctattataacggaatttgcttttgagtccttgtcgtttcttgtggcagaggttgaatgtgacaagctgtgcggtgtttccaggtggatcccaggccgtcagctctgaagcatctcctgggccttgttaggaaaggcagcccagccctgacaaggctgtcagctgcgttaataagctccccaggtgactgacacccacatctgagagccaggggccaagaggaaactgttcccattcttctggtccacgagctcccctgacccactttcctggacagtgccctggttcccgcagccaccgccccacctgttccttggctctgggcttctttg

SEQ ID NO: 28220 - DNA, 2103 bp, Mus musculus
cggtactgaaggccaagtctggggtgtcttatgtcttagaatgatagaaccctatgacacagttacagcaggatatctgttctgtgttcattgtcaaagaagctcctaagaatgtccgccctggtgctcagtaacagtgactagataggaagagacggcttcagtttcccagataaggtacttagatattcatcacactgcagcccagtggtgtggtgctaagagctaatgttgtcagctcagtgtcccccacattgagtactctgtcccttggtaactctttctggagaagtctgtcttccagccactcttgttctttccctgactctgtcttactcgtacactttcacatttaacatgcaacccaagatgttgaagggctgcagtgacccccactgtctaaggcacggggaacctaacaggtgtgtgctctccttcgtaggtttctgccacctcctcctgcctgacgaacagtttcccgaaggcttccagtttgacactgacgatgtcaatttccccgtggataacctctgcttcgtgggtcttatctccatgattgaccctccccgagctgctgtccccgatgctgtgggcaaatgccgcagcgctgggattaaggtagggcctctgtgtctcctgactccatcacagagccgtgggtcctgttctcaacagtgccccaggtctaggcagcttctctctctctctctctcagatactcttaaaaggttgggtaaagagcagatgtgcagttggaggcaaggaagcaccttacttagtctttgataaaagaaacacaaatgacaagaaaaagacaaaaagattgaggtttaaatttggaaatgcagtgaatggcgcattccccgtgttgtgagctgacttctcgttgattcggtctctgtctttttctgaggggctcaatactgtgctgctgcatttacgccctcttccgctgtcctcacgcttacgagaatgcctctctgagaagctgatagtaggacgttgtatttctaaacatgggctggggacacggcttagtggttaagtgacctgaattcgcaccacctcatgcagctcacaaccatccatgactcgggctcctgggagtctgatacctccaaggactcctgcacttggtgcactgtccccctaccccttgacacaaactcatacacacataatcaaaataaaatctatagttgttgtccttcagaaccgggcaagtgtgaaagtgctaaccagcaatatacatgtcatgatatatagtccaaccaatattaggctttctttcttcttttaatggttttagtagaatttgatttttatgtttctgtaagtatgatatatgcagtatggatgtggtcatgtgtcataaaatcttggtgttgggatgtgtttccgtaaaaccgtgtttatatttttcataagttgatacatgtcattcaacttcctgtttcaggtcatcatggttacaggagaccatccaatcacagcgaaagccattgccaagggggtaggcattatctcagaaggcaatgagactgtggaagacattgctgcccgcctcaacattccagtgaaccaggtgaaccccaggtacgacagacagaaagcttaagtatgggccctccttggctctgggccgattgtgtctcggcttgcaccaagggagtagtgagtgcacctgcactactagggaggagtcacacatccatggtgctcgatgtaatggtgtaagaggctgggagggaatcccacttgctgagcttggaagtagaggcttaagggatgttcagagtgcttggaactggagaagtcagatgataaatagtctggactagccactggaccgttcatgcctcgtcagtttccaggctgaaaaaataaatgagaaaggacaattgttcagatggctccggcaacaaagaagggagaggccatcgaagtagagagagcatgggtgaggtgctcaggcagtgaggtgcttgcctcatgagcctcatggcctgagtgatccctggagcacatctggaagtaggagagaaatgactcttaagttgttctcttggcttccatatgtgtggcttggcatgtgttcctgca

SEQ ID NO: 28221 - DNA, 1174 bp, Mus musculus
cactgtcacggtaagatgcccggggacagcagcagtggccatcgctctgatcagcttgtgtgggtacagggctcagccatgaacctcttgcagggagctgccaacgtctatatttatttctgtgcagtctttgattccacatcacatggtaaactttgacagagaaaaccttagcacaggtttatcagaaaccccaaagcatatcatgtttttaagttatcatgtaacccagctgagggcaatggaggaaaatagtaatttggaggtagtatggagggtagatagacttgataaattctgtttgttttgtttttgtttttttacattgtttattggagatgggaggaagtccctaccatcttcatgacatcatgacttggggagaaggctggagagattgaattctaaacagatttcttctgtattaagatgtggtggaatttgtccagcctggatgagtgatgtccgtttcttgcctgccctgtctgcaggtctgtctgacactcactgccaagcgcatggcgaggaagaactgcctggtgaagaacttggaagctgtggagaccttggggtccacatctaccatctgctcagacaagacgggaactctgactcagaaccggatgacagtggcccacatgtggtttgacaatcagatccatgaagctgacaccacggagaatcagagtggtaaggctggagcccaccttacgccgaagcgcctgctcaccttggcctatttattctgtgtatatgtgggcacaggcatgccattgcacacacgtggaggtcagagggcagcttgcaggagtctgttctcccctgctgtgtaggtcccagatcatcatgctggccttcactctctgagccttcctgcttgtttttaagcccatgacactgttttggtttttggtttaatacttattgttggatggagagagagggagaaaggagaccaatgaagctaccccatgcacatgattaagaaccactagaagctaatgtctttgattaggaagtgggatgtatcagttcagatttttatgagactttaatagaactggtaatatgccacagtctgcatagtgagcgagtcttgagctggagagatggttcagcagttaagagtgcttgttgatcttatggaggacctaggtttggttcctggaacctg

SEQ ID NO: 28222 - DNA, 1331 bp, Mus musculus
ccctccagatgtgttttctattctgtctgagctacctgactattccctctggggcctaacttgtctgtttttacttctagctgtacctcggggtggtgctctctgctgtagtcatcataactggctgtttctcctattatcaagaagcaaaaagctccaagatcatggaatccttcaagaacatggtccctcaggtacccactgcttcatccttcccttttgagagattgacagttctcacaatataagttagtgtgacattaagatagtccaagtatcaagtgacattgtccccgagagcaagggcagcgtcttgtgagaacagccctagggtaactgttgagctgcagtgtttttatataaacatgagtgatatctttgctgtggacccaggtaatttgggatacacgcatttttgtaacttggttttttaatttttgagctttacccttgctttgttgggctccctctaacggtgtcaaccatcttcccttctgaagcaagcccttgtgattcgaaatggagagaaaatgagcatcaatgcggaggatgtcgtcgtcggggatctggtggaggtgaaagggggagaccggatccctgctgatcttagaatcatatctgcaaacggctgcaaggtagctgaaccaggagacctctcttggctagctcggctcggcagacctgggtccgtggtgagactggggaatcacctgatgctattttccctcacatacaggtggataactcctcactcactggtgaatcagaaccccagactcggtccccggatttcacaaacgagaaccccttggagacaaggaacattgccttcttctcaaccaactgtgtggaaggtggggctatttaaggcactccttggcatgtctgagtattagtgtgggtattaacagaaagagggagagggggcagggcacagttcctcatttcattggctctgttctgacagctttccttagcagagagcagagagggaggcttcccctgctgccaggaaagcccaggaagtttttctttgatccacacagtggtctgtgctgatagcaacaggccagtgtgacttctctcctggcggtgtataccagtgctgtcaccagactctgctttaaaacagacagcaagctacccagaaagctggttctgtttaaataaaggacaggaatctgcatgtgtgtgttctctgaaaccaagcacattttctggcctctggctgacacgatcccctcacaccttctcttaaggaaccgcacgtggcatcgtcgtgtacactggggaccgcaccgtgatgggcaggattgccacgcttgcctctg

SEQ ID NO: 28223 - DNA, 1166 bp, Mus musculus
cctccataagcagtggaagcattcttgataccgcagtctacgcttgtctctgaaggatgctgctactgcagcctctttaagctaaggaggcttccgtgacttaacccatctctagccaacctggacagatgagggccccgtctagacaagtggttccccacctgtgggttgccatccatcttggggtcgaacggttctttcacgggggttacatatcaggtatttatttacagtatgattcataatagcaaaattacagttgtgaagtagtagtgaaaaaaacatcactgctggggaacgccacaacatgaggaactgaattaaagggtcacagcattaggaaggttgagagccacagtcctagacacccaagaggcattgggtttctctgactcaattcagcaaatgtcacccagcgttggagaggaagctgtctcaggagacagtcgtgagggtgatgcttagcctaggcagttgagggaaggaagtttcaatagggatgaggagtgagggtgctttttttccttttgattttaggatgtataattctttttctccccccttaggacgaccataaactcagcctggatgaactccatcgtaaatacggaacagatttgagccgagtaggtacccgtttgatgcctgccatagcaaatcatagttttccctgtggtattgtgttccaccttaggtcagaccttactaggaggattggactgacagctgccattggctgtgtgacatgcacagaacttggacttctctgttgccgtttcttccctgaaaccttgttggagtggacattagtttctctgtgttgcagagcacccggttttgtaggtggttccaaagccaggctccttcactcaaagtgtctatatttgtaaaacttgagagacatacagcagctgctagctgggtttttagcagttagtgtccttgtacttttctcagcctggctcatggtggtgtgtcagaacttctgtcaccctgaggtacgacttatgtacaaatctcaaaacacaccttccctccaaaatgtgttttgtatctttaagttctctcccactgctatgagaactcgtctgcgagtgctgtcacagtcacaatcagtacagtgactgagatggatgacactattttagtgacagtctgagtctttg

SEQ ID NO: 28224 - DNA, 1228 bp, Mus musculus
gtgagaggaccccaggacgaaggaatcaaagggaaagcaccatccgccgccgccgaaggatgccggcctggattctgcagagaggaatccctcggagtcgtgcagctgctgtccaaccccggcccctcgagaccccagaaaagctacgctgagcaagtagactagccccgactgcgccgcacccactgtggaccttccgcaccctactccgcaggctgctcactcaagtccccagtgttctgcaggcgggagcgctccgtagcccttgagagacccagacacccgcgtcctgggcaccggcgccctcctgccgggagcccagggcaggcagtcgctagcgcggtctgggcccggctgggaggggttagaggcggaggcggagctagctggagccggtgtcaggttgctccggtaacggtgacgtgcacgcgtgggcggagccatcacgcaggttgcatattttaggaagtgaggaggaggcacgggctcgagctgcggctgggtctggggcgcggagcctcggcgggaggaggcggacacgtggcagcggcggcagcagcggcggcagcagcggcggcctcggtccggggcgccggccgtcctccctctttcctcccgcggcagccctagttcccgcctctcggctcccccggctccgctctcccggccgggagctgctctcttctctttctagtctccagcaacaggacccggcgcggggcccgcagcgccgccaccatggggaagggggtgagtgtctggcgagcccgggccccgggcgggggcgcgggaggaagcggcttagagaccgggctctcggcaatggaggggcgggtgctgagcgcgggcagcggcccgggaggaggagcacccggggcggcatctctgagccgggcgcctgccctgcctgagccctctggtcgccttcaccgcgcgccttgcgcttcctttctccctcctcccaccgtgcccaggggaaggagcgctcctccccttcccccggggagctccgacagggccccctcgcggtggcggtcctcgccgcggcccggcgccggcgagggcagcctccgggtcgagactcccttctcctggaggcgctggggctcggccagctccccgcagaggcgaccgccctcccccaaaggaaaaaaactggcttccccttaggccgaaccagcccagcgaagctggtgccagaaagggtgtgacttcacagcccaaagat

SEQ ID NO: 28225 - DNA, 1099 bp, Mus musculus
aacaagagccccttgactccatctgtcccatttctacctaacttgctttgcctatgaaacgtgcttcactggtggattagagtggaacggagttttccagccccatagagagattcctggagcctgaggcagtgccggcaaggtggctttctcagaaaagtccaaagattcattcagcgagataaagacacttttgaattaactcccagggacaaatgtaacaacctccagagcttttatcttgagtctctgattcttttgaccgtgaaacagcattaggataaaagcatttgagcatgcaaattgtctggctttgcctgtctttctgtctctctgagccttcagacatggccaggtgcgttccctggtgaattcattcatgtagaacagtggttcccaaccttcctaaggctgtgaccctttaatacagtctctaatgttgtggtgattcccaaccatacatttattttggttgctacttcataacacaattttgctctgctatgaatcataatgtagacatctgtattttttccgatggtcttagaagattcctgagaaagatcattcaacccttccccaaaggggccatgacccaaaggttgagaactgctgatgtaggccttgccaaactgccagcctacaaaaacatcaaacaacagacccttgcctagagaattagttatggcgctgagacacctgatgcacagtgacaagttcagttcacgctatattataagtactgtagtggaagcatgtggcatagctaggagccaggaagggagatatagcccttgccttcaggtgctgttgcccctccgttatagacatgaaggaatagtcatctagtatgatcactgtgcctaaaaatgggaccacaaaaacctgtaatgttaataatatcttatttttataaaggttactccatgctttaacttttcagatcctctggaacaccaaaagtatgacctgcttaactaaagttaattttaagtgttcacagagtgtgggacaccagcaaggatgcagccatggcaggcactgtcccacccagggtatgaattgaactctgataaggatcagaccagagatacctggg

SEQ ID NO: 28226 - DNA, 1477 bp, Mus musculus
cacacacacacacatatagtgtaaccaggtgctttggtcttactttgaaacctttaggtcccttctactggaagttcctcaggatgtcttactcaggaaatattttaggagaacgaggtaaggggtgggcagtctgtgagagaccagctgtgtgtggagggtaatgtcacagcagagctgctccgccaccaacaccattcagttgttaagtgccataaatgtaagtactgcagcgttaaaggtaacatcttacagtactatgcttcctgctcctggttaaaccatgggtcttaaaggggttaaattggagccctgtgttggtatgtgcattcccagaagggcaaagaacggtttaaattaaggaattaatttattttccctcctggcccctctccatctcctttgcatagaacttcagacttcctgaaattattgttttggttgtaaattgaatatcgattttttttttcttcaaaatgcttaagtttgcatcgattcctgaaagaaaagccaaaatcacaagcaggatcctttaaagtctttgtgctcccagcgttttaccaggccgagttgacgtggaagcgaacggtgtagaggagagtttgcaaaagaaatgtgaagttgcagaaagctgcatcacacaactgaagacaataaagttttatttcatttcttggaccctcatagcctactctttttaaaggatgtaaattgctccccaaggctagtaggatacatgatcctattagaggacacaggattccattaccttaaacgtttatagattcccccccccctataacttctaacctaagttattaaaattctaacattaactgtggaagaactcaatgaagagtgtaggtctgagattgccgtctttcccgggtgattttcattatctacaaaggtagataagacaacttttgttcagaattgtgtgcttaaaaaaaaaaaaaagaaaaagcagtctttaatagtcctggaattgaatgctcaggaagtgggaattaaaatggactttaaggttatgaggctcacacatccttaggtaacccgtggggtcaaaactgtcttggctaaagttcataaagtaaatgcttacccaacatttatcatctcccttctttcctctaactcccttttgagatctgcaagaagacagattcttttttttttttttttttacttttgggtactttattgagttgttttccctactacccttcacctcccttatcccttccaatcccctgacactaggtaggagagagagaaggtgagagaagaaaggggacatcggaattcttaaaccacttcctgttgtttaggggtgttgaggtccttggtgcaggtccaatcttcatcatcatcatcatctggatataagaagacagattctttatagcacagagtatgaagtcagtggcctgggtatgtttgccttatcacaattcactgttagtgtgggcttttc

SEQ ID NO: 28227 - DNA, 1504 bp, Mus musculus
gaggaggctgtgacaaacgggttacgggatggaattgttttcgtccttaaatgcttggacttcagcctcgtggtcaatgtgaagaaaatcccattcattgtactctcagaagagttcatagaccctaaatctcacaagtttgttcttcgcttacagtctgagacatcagtctaaaatttctatacttgtggctttatgaaaaacaaaagaatatataaatatatatatatatatatgtccaggaggaagttcttttataaagattttttaaaattcttcaatgctgactcaaactggcagaggatagaccagtatccttcgaccatctgcactttatttggaaggaagcaggagatgcccaccccaacaagtgactgttggcatctgactttaatagatgggacttctgaagaagctgttccctggagtttctgtgacagctgtaaaccaaagtgtagctgctgtgtgtccttgggagcctcgccttacaactggtccctgcctgtggcccagtaccacacccgcctggacttctggtctaccacctcatagatcctaggggcctcactttattctgcttcaggaagccaaacactacacacccacttgcgtgtttgtgcatgtagttatccacatcaccacaccaccctggggagtggtgggcagtacaggaaatgtccaaccgcctgagtttttaatcatttgttgccttacattgcgaagagaaagaaactgataggaaatgtgcactgccgttttgcagctgttaagtgattggctttccattttcccctgagagagagcctacctgccctgtttttggccctgctcctctgttggcccttccctagccctgggattgcctacctgggcttcactctaacgcccactctccttagcatctggaccacagctgtacatggtgggcagcctggccaggctagcttggtcctccagagatgtcagggatttggctttccaagtatacccacagctctttgcacagcctctcccagtctttctcccgagaagtagggtatgactctggggatctattcagccgcagcacctcccttaggctgcagcaggagcccatccacccagtcctcctcagccctgcttcacacaaaccaggagagaccaacactgtgactcccagttggcaggtgccccatgtagccatctaatttcccagggagacaagtattcaacaaagctcatgtgccaagcttccctgccacgggaaaccaaacagtgcccaccaccctggcaactactgctgtcccatccctgaggtttgtgaccaccaccactgtgcaacttatcacaaggaaaagggtcgctgggaaagggagagttgagtcagccgtgcagtcccgaaggctccttctgtcagcatgttgtagctggtttcagaggacaatgcccttgatgtcccatttgtagacatagctgcttcctggcagagtcctgtgcaggggagtgcccaaggagtcatttcctg

SEQ ID NO: 28228 - DNA, 1216 bp, Mus musculus
atggggaatgccagagcctgggaaaggagaggaagccgccatagtgggagccatggggagtgtaggagccagcagactttcctgggagggctaccttgacttacaattgacctgactcagaaagacttctcatttcagccccactgaattccggtgaaaaccccgcattcatttttgccctcattttacagcatccagcgagcagccttggtggttctggaaaattactacaaggacttcaccatctataacccgaacctcctaacagcatccaaattccgagcagccaagcacatggctggcctgaaagtctacaatgtagatggtatgtgcttgaaaccgtttgggggggggggcgcacagttaggtggctctgtggcttaaacctcatagtacgtttgcttcaaccctgtattctgtgcttgccttacggtcttttctcactttagaacaatttatatttttagtttaaatgtagacaaacatttttttccgggggaatgtcagttacagtctatatatgtgtatatatatatcaagttcatccacttggagattttggtattggaaactgtagctgtgtttcctgcctcctgctgggaacactttagattgaaagtcctcggaaaggaatgtttttcaaagtctgagctgtttaccaaaagactgcgatgctctcagggctttcggcctagaatactccaccctggcctagaaacgtattcagcctagagagtcagctatctgggagctcctctctagtctctcagtcctggccaggaatggcaaccagaagctggaggcagactcaccaagtcagaggccagtttcattcagggtgtcagatgcttaagtgtgagaaacaggactccctcttacgtcttgctgggcacctgggctaagacaagagctttgcagactcccagagagattcatgttgtcagtaagacatctggtttacataggtatcagtttttggtattagtgttcaaatattttttttttttttaaatttggctatgtgaggggtatgactggtaagcctcacccttgattgggaaacttagttctctaaggcacccagaagaaagcattaggtcctggctgtgtctttgtgataagctaagttgggtcatgctcagggtgatacgggacttgtaggtcgattcacagatggggcggggcgtattgcggttgctgggctttggtgttgggg

SEQ ID NO: 28229 - DNA, 1245 bp, Mus musculus
ctgctctgtggagctactggggggcgggggtgtctggatgtgggctttgtaagcctagaacttagcatgggcggagtttactgcggtaagggtggctgttctcctgtagtggagtcagctcagctcagtctaacagctgctattaatgtcagagcagaaaggcctagacccagggcttcccagaacttttcaattcgagggatgacaaggtgtcatagtaatgaaatctcccaaacaaattgaaaggttagattgtgttttctgggttcaaagggcaaacataaaatatatggcgaaaatttcaatgaaaatagctatagttaaaaatgtccctgtattaaaagctgattctatgaacacttccaaaaaagttggctaattgaagtattttattttgttgtggcttttataaatcatcctcgttatcttctctgtcatcaggatgacaactggggagagaccaccaccgcaatcacaggcacctcagagcacagtatatcccaagaggacattgccaggattagcaaggacatggaggacagtgtggggctggattgcaagcgctatctgggcctcaccgttgcctcgttccttggactacttgtcttcctcacccccattgccttcatcctgctaccccaaatcctgtggagggaggagctgaaaccctgtggcgccatttgtgagggacttctcatttctgtatcattcaaactgcttattctgctcatcggaacctgggcacttttcttccgcaagcaaagagcggatgtgccgcgggtgtttgtgttccgagcgctgttactggtccttatctttctttttgtggtttcttactggcttttttatggggtccgcattttggactctcgggaccaaaattacaaggacatcgtgcaatacgcagtctctcttgtggacgcgctgcttttcatccactaccttgccatcgtcctgctggagctgaggcagctgcaacccatgttcaccctgcaggtggtccgctccaccgacggagagtcccgcttctacagcttgggacacttgaggtaaggggcatgcacacggagtaagcagaaaggatgactaataaccctagaagacagatgttattagtcggcaggggtgagatgaagccctagaggcagatgctaagactggagccccacccttctctggtgttactaagggcagtgtgagctgtggggtgtctgtgcctttcccgcgatgctaagactggggctt

SEQ ID NO: 28230 - DNA, 1179 bp, Mus musculus
tctcatcttggtttgctcatatgtcaggtttataaataattccttttgcactgtttgcccagatggactttggtttttgttcccatgttaactttcactccagctgctccccttgatgtttcccctaagggccccaagtgtgtactccacaaacccattcaggggtgggttcctttaccacttgtcagctgtcacagcaggtcccatcacagtgagagcattatcagtcagtctatttcagcagtgagcatggtgtccctttctttatctgccttctgttcccgtagcactcactacaaaggtctttgcatctagctttcagaggaatctctccattgcagtcctgagggtagagcaagctttcggtgccctgtgtcgtataaattctgcctggtgttagtgctgtgaaggcattgcagagctagcacattgaatggagaaagaatgtttcacacttgtgtgaagatgctaatatctcttgcaatgggtggaagtatttagtgtataaaattttagtatgaaattatattaactaataaaaacctttttgagaagatttgctcattttactgagaaatgagtctaagaagttgagctggaaaaaaaaaggaagtttagctgagcagtggcgatgtacacctgcaatcccagcacttggaaggcagaggcacatctcttgaattcgaggacatgcaggtttacctagtgagtcccaggagactacacagggagaccctgtcttgaaaaaagcaaaaagaagtataggagatttttttcacatattcacatacatagcaaccatggcaagtgttcatgacatagatgtcataagcagcttgcaattattcaatatattcagcagtataaacctttgaaaagcacattaacaacctattcattgcagaagtcctgaatgtataatttaccactgaagtctatttccatgtttcttaaaatgcacctaatgaaatagaaatttatggatggaatctggaatttacatcttaataatcattccagaaaacggcagtaccggtttaagaacatgtctgttagggctaggagatggctcagcaggtctaagtgcttaccatgaagtcagatggcctgagttcaattcctcagaacccacatgagggaaggagagaaccaacttctaaaaattaccttctgacctac

SEQ ID NO: 28231 - DNA, 1195 bp, Mus musculus
ctcacacttgtgtggcaagcattttaccactgcctgctcctctctaggtggctttctgagactttgtgagagcccagtctggaggggctcccaggagctggggctttccccctaactccagtaacaactcatggtacctcccaaaacagctgagagtcgggaaaaacaagaattatgaagctgctagccacacaacaaagcatactagtttacagtataagtaagagtatactaatgttcaaaaggcatagattactacgtaaaattgtaacaaccgcttattttcattatcagttatgcattttacataattgtatgtgctatgttcttacaggaccagcaccgtgggtttgtctacaccagcgtcaccataaagacatgactaatgcacctccctacaaattcactaccctgtgacatcactaggcaatagaaattgttcagttccattaaaacagaaccaccttcctatgtgtggcataatacagatcaaaggacattatgtggtatagaattagcctatgtaatctctatctcatcaagaggaaatatcaaacaaaacaaaactggggacactgacaaaataggtgactgacattcttcttctatcaaggaattaaagaccgagggctgatgttatcactcaactgttaagagaatatgctgctcttgcagaggactcaagtttgattcccaacacatcaggcagctcacaatcaattgtaattctagatccaggggatctgacatctggcctccatgaacgcccacatacatgtgcagtgtacatgtaaagacaccctcacacgcacacggaggaataaaatacatccaaaaagtaaaggcagaaatagaagagattggagaactaccgtagactgaggactgtggataaaggcagtggacagtcctaaatgtgatcctgagaaagaaaatggccattagtgaaaacccaggcagatttgtagttgatttgtattatcatgtcaaggttaattgcccaattttgaaaactgttcttttgttatataaaggtatgtgggagaagctggttgaagtgtttcttcctattctgataagtcctctgtaagtctaaaattacctcaaaactaatccatcgctgatgtctgatgaggcttagcatagtgtttgctttttaagatgcacatcctccactttccctgtgtttcacttt

SEQ ID NO: 28232 - DNA, 1126 bp, Mus musculus
atcagtgttttcttagcaagaaaaaggttttgaatgtccttagaaattaactaaacattgttagacaactctatggctaggaatttgtattggagatatttttgactcataattttcaaatttttttccctcataattttcaattttttccctaaggacttgagtgtgtgttgtgctacaatttttaaatttgaattaaatattgaataagacatttattgtgttaatttctgctaactttatgaatttaatctgcatgacttaccaaatagtattaagatattttcttaatctggtaattctaggttactagtttttatattaaccactattattttaaaattgcttcagtaatttaaagttaatgttaagaactttcactaagtgttgttttacctagtgttagtattgtttggggtttttttttgttttgtatacatagatctatatatattgactttttttttttaaacagatgagctttgatccaaaccttctccacaacaatggacacaatgggtaccccaatggtacttcagcagcacttcgtgaaactggggttattgaaaaactcttgacctcttacggattcattcagtgttcagaacggcaagctagacttttcttccactgttcacaatataatggcaacctccaagacttaaaagtaggaggtaatctgtcagctcacttttgaactttctactgtgtgtctgcttgttcctgataggacttttcagtctgttataagccagaaaagatgaacatattagttttgcttactactgaaatatgtgccctaatttttactatggcaatgtcattttgagatctgaaaaacttaactggtaaaaagatatatttgaggtttgttttttttttttctttagatacttagaagatttaaaggaatgaaattataagatttcttaaactaaaacaacaaaaaaaaatcccaagaggctagaaagatgccacagtagtttgaatacttgatactcttgtataggacctacgttcagttcctagcaccaacctcagcgcatacatactcagttgcaaggcatctgatggcctcttctggcctttgtgggcaccagtcaccaaatgttgtctgcatacatac

SEQ ID NO: 28233 - DNA, 1163 bp, Mus musculus
gatgctgggggtgcatgctgtttagcattattttgtttaatcctctcagcaatattgtatgttagaaattattccattttatagataaggaagctaaagtaagatgtttccaaatctgtattatcttatttgtaatgtatataaatgccatgaaaactaggtcatgatctatagctgcctcagtctaaaatagtctaagactaactcagtctaagtctgaaatgctcgtgtgtgtgtcagttggttggaaggctcaataaaatacacattgctgtacttgattccccagagtttgtctttacctaggtctgaagtgaggctcaagaatttgcatggtctcctaagtttccaggtaacgttgatgcttcgggcctaggaaccatactttgagaaccactggtttaaggcaactcagatattacacaccttagaggtcagatgcaagatgctgtttttcaagcattagtccaacaaacatgacacattctttattttagatgatgttgaatttgaagtatcatctgaccggaggactgggaaacctattgctattaaattggtgaagataaaaccagaaatacatcctgaagaacgaatgaacggacaagttagtgactttgatactttgtatttccttagggccccatatttgcatatttttcacattagaaaaggaagattgtcccttgcctcctcagtttgcacgaagagagctctagtatataaagataacttttaagattagatcagaagcactggcatttcttgacctgaactaaaaacatggtcaagactcagtttgggttttacatataaccctgagtctttacttacagtcaatttgcatactgtaagtttgaaacttggcagcatgacatcctcttgtggatcatattaaaatgcatccctgtatatagtatagaggatattagaactcagtttatattgcacagtgctgctcctgaaatgattagcaatggaaatttttttttttttgactggtaggttgtgtgcgctgttcctcacaacttagagagtaaatctccagctgccccgggtcagagtccaacagggagtgtatgctacgaacgtaatggggtaaacttgtgtatttttcttaaacctttgcctgatccatcatgtgatctataagcgtactttaa

SEQ ID NO: 28234 - DNA, 2698 bp, Mus musculus
taatcctagcactcaggcagtagaggcagatggatctctcttgagtttgaggccagcctggtctacagagttgagttcaggacaagccatagttgcacagagaaaccctgcctcaaaaaaataaaataataagataaattaagaggataggtactaagtttagtacttcccaataacagattttttattgttatcatcagttccttagtttataaagtgtaatactcaccctgctgtgaaaccagtgttctccaccttctttagaaggtatctactttggtaaagtcaggaatttatgaagaagaaaaaaaaaatccatgtatgaattttaagtctgaaagatggggagtttgaacaaagtttttatccagagaagattgggtatcataaaccttacatttgttcttaataatgagagaatttttaagacctaggaaactactttgtgattatagactcaatagtttctaacaacccagaggatttaaccttcatttttcatttcttctctagcactggtgctgtaagtgctcgtaatattatgctgttgaaaaagaagcaggctcgctgtcaaggagtagtttgtgccatgaaggtaatagttaataaacttgaaatgtttaggtttgctgtttggttttttaactgcttttaagctttgtactacaaacccaaaccacttgcttctcctgcctctgctttaagactatttccttgttaactaagttcatagagcttcttgattgcgagtctttaggtcaagtcttggtaaggtagactttacagagttgtactctttggcctatagtataattttaagataaagcttactgatttttttttaagttgtaatcatacatttgtatattgattggtaattaatgattttgtatttgggggctttttgctttaggaggcgtttggctttatcgaaagaggtgatgttgtaaaagagatattctttcactatagtgaatttaaaggtgacctagaaaccctacagcctggagatgacgtggaattcacaatcaaggacagaaatgtaagatgggtcattcactaactctaaattattgccctttttaaagattagtagtggattatatatttaagaaacgcttaaaattatgtgacccctgcccacttcaacctcttgatttagggtaaagaagttgcaacagatgtcagactattgcctcaaggaacagtcatttttgaagatatcagcattgaacattttgaaggaactgtaaccaaagttatcccaaaagtacccagtaaaaaccaggtaaattgtctttatcagcaatgtcttcttctgaccaatcagtacaatattatgatgatacactaaaggtggagtctgtttgattgatgtagttgtgtgtagtggggtgtatcttttaataggtattttaattaaaaaaaaaaaaaaaacaaaaaacaaaatagatgctgatggtgtggttcagtggcagagggctgacctagcatgcaaaaggcccccagtactgcagaaagaaaagagacactaatgaacggtaggttgatgggtatgtttttgcttatttgattttcactgagtgattaagattaaaagaaactgttacctgaactggggaaggtcctactgaattggactgcatgtgctacttctctgttcccccgtcttaccatttgttaactggtgggaagtaaggtgaaaggcatcattgctggataaatgtgagatccaaagggctgaaatgtttttccttagcagttcttgatatcacagtgcagtgttaacaacagtgcttgatttatggttgtcatgggaccttagatgatgaagcttttatattgggcttatattgtcagcacttttttccccttcaggctactactatattataaataagctatttactgtgtgttcttcttgtttgacttagagctaaaaggatgagaaatctccagctaaaatcgtttttccttctcatcagaatgacccattgccaggacgaatcaaagttgactttgtgattcctaaagaacttccctttggagacaaagacacaaaatccaaagtgaccctgctggaaggtgaccatgttaggtttaatatttcaacagaccgacgtgacaaattggaacgagcaaccaacatagaggttctatcaaatacatttcagttcactaatgaagccagagagatggtaagtgtttaagcattgctggaattttatctgacatttagggttcagtgatggactctgatttacactgttggctgggaacttcttaggctgatgactagtgaataaaggtgtctgttcccaagcctggtagcctgtgtcctagtctgcactgatggagaggccaagaagaacacacagaggcaagttgttagaggatatttcttgtaagctaatgcctgttgggaagtcactttattaagtagctaagaatcctacatatttgaattagtttgggcttagttctcttagctatcttggaaagacatataaattaattttaaattagaaaaccagataaggggattgctaatgaaatgtgaataagacatcaggaaatatattttcttaagatttcctctgtgatgtttagtaaacagtaagttaaacagcactaaattgatttcaccgcttttatggtaatagtttgctttttttaaagtgagtatatgtctgaatag

SEQ ID NO: 28235 - DNA, 1120 bp, Mus musculus
attttccaaggagtgggacctggaaattctttttttcgagacatggtttctctgtgtagccttggctgtcctggaacttagaaattcgcctgcctctgcctcccgcgtgctgggactaaaggtgtgcgccaccaccgcccggctttgatgttgttcttttttttaaaaaacaaaaacaaaacagaaaaacctatataaccagttaaaaatgttaatttgtgtttttattcagggtgtgattgctgccatgagagatggttttggtttcatcaagtgtgtggatcgtgatgctcgtatgttcttccacttcagtgagattctagatgggaaccagctccacattgcagatgaagtagagtttactgtggttcctgtgagtagctgttggggaaagtgttaagggttggtattctgctgtctcctttgtaattttaattttgttgattttgtttaatttgtaggatatgctctctgcccaaagaaatcatgctattaggattaaaaaacttcccaagggcacggtttcattccattcccattcagatcatcgttttctgggcaccgtagaaaaagaagccactttttccaatcctaaaactacaagcccaaataaaggcaaagacaaggcaagtgttaggtgatccagatggtttgtatgtcttttatctttgcctccagattgcattgtagctcatatagtgaagtatcgtctcctttttaaaaattctgtatacagcagtgtattagtcagggttctctagagtcacagaacttatgggtaatctctatatagtaaaggaatttattgatgcctcacagtctacaatgcaactcccaacaatggtcagtagcagctgtgaatgctcagtcccacacggcaagcactcgaaggaggggggggtggagagactcgcgcacactcttgagaccactcgccttccttcttccaatgtccttataatagtctccagcagaaggtgtagcccagattaaaggtgtgtgctaccacacctttaatcgaagatgaccttgaactcggagatctccctgtcttaatctggggtccatagccactaggcctcaagatccaggtcagaaacttgtatctcccagcctccag

SEQ ID NO: 28236 - DNA, 2590 bp, Mus musculus
tttgatttgtgctagtatttctttctctttttaattggggattgaacccagagctttggacttggtagacaagggctctgtcagtgggctacagccccagcccgatttgtgctagtttttaaaccaagttaatttctcacacattgataatagtgactaaaaacactgaagtgctctgggacagtaaagaggatattttcagctgctactttaagaatattaaagagttttcttcatgagaaaactaagcttcatgctccacaaaattttctcttggctagaaatgtcattctcagcttaattttctgataaaactgaaaggctcagtgatagtagattgaggcaactctgagtgaaggcaagcataccttttattcatgcattttgtcttgtgttgtttagagggtcctggaataaatttctgtggctctgccaattctttgtgttaaggattcctaagttactgtaattatatatcttccttccctttttctgttatcatttgttagtgttcttgaggatatttaattgtgttttatattttctttaggaggcagaagatggcattatagcttatgacgactgtggggtgaaactgacgattgcttttcaagccaaggatgtggaaggatctacttctcctcaaataggagataaggcaagatggttttacttacttgaagaaaggttaaaggttgtcttgattatatttgctagaggatggtttaaattttgctaagtttggctgcagcattttttcactggaaagatgaaatacataataaaacagggtcttgtagcttatgaaacatactgaatgataggtttttaggtttgagttctttttagagatgagtgtgtggcatacttgtaattctagcagttagtaggtaagtgccacaaccactagatacagtcagacaagtaagctaaaagtactcactaaaataaaaccagtataaaattacaccaaaaatttacattgcctactttttagacagcctctctatagaaattaaaactacaaagtgtacattgacaggcaaaacttaaatcatttatgaattgagacagcaagtgctttctgtaaatttttctgtcagagtaattacaaaatagatctggagtgaaaagcttggtctgggggatgttttgggtcagcttcttaaaggtacagagcttgtggaaatgacaatgatactaactatcatcctcatcgttttgtaggttgaatttagtattagtgacaaacagaggcctggacagcagattgcaacttgcgtgagacttttaggtcgtaattctaactccaaacgtctcttgggttatgtggcaactctgaaagataattttggatttatagaaacagctaatcatgataaggaaatatttttccactataggtaaggaatgccttttgggcagcaaactattcctattatattcttttatattaacgtttcaaagaatttaatataggttgatactttttggtaattacaatttttgagacccagcttttctatttgtaattatggcaagttacatacaggagttaggcatctgccataaacatagaaatgcatttacctgcctttacatatttttattatacatattggtactggtgtgataatacagttatagcatatagtaaaaaatacgggttcattgaaccaaaactaagtattttaattttgatctaggttctcccacttaatatgttactttcatcagattgtaactttttgatttctttaccttcaagctagaaatagtggtagctcagtttataggttcttgattgggggggggttgttttaaggatttaatgaatccgtaccttaaaacagtatcttaatatatgcagacctcccatggatgttggaaggagaaaaggctccatgctactattgatattagtgatagtggcttattttaatgtcactttattatcttttccctttagtgagttctctggtgatgttgatagcctggaactgggagacatggttgaatacagcttgtccaaaggcaaaggcaataaagtcagtgctgagaaagtaaacaaagcccactcaggtaatgagtcatgactcctattcatcctatgctttgacggcaggatacagggtcgggagaaggataaggccatacatgttctgtaacatttgctctcaggtacccagagcagcagtatatataccttcactgtttgtcaattattcatgttcttgacactaccaaattctgggcatgacagtttgtgcatgattttagtaacatttcagagataacattttgaatttggaggatgtggcagtttattaagagtcactatataaaaccttagctttcttggaactggctgtgttgatcaggctgacctcaaacttggaagaaattactggttctgccttccaagtgtgtgtgtgtgccgtcgtgcctggctggcatctgatctggggtgcagtggagttagggattatgcatctccagtaattaaagcccgtcctgctttcttttaatccgagaaatatacattctacatagaaataattcttaatggagttacagaaataggcattct

SEQ ID NO: 28237 - DNA, 1099 bp, Mus musculus
atttacttgcttgcttgcttgcttacttgtttatttttaagacatggtttctctatgctgttttggctgatctggaattcaccctcttgagtactggcatttaaactttcatggatgtctcagttttttagactttattgctttgggacaagggataaagtaacaacattagtgaggagaaaataagtgtgattattaataatgtcacttggtggggattgtcttagtcatgcttagaatagaatgaatggcagttgtttcagaggtatgactttcctgatgaattctatcatacaccagctgaatttagctcatcattagtaatgccatgttttctaagtcctttctaattagggttagcattatctttcaaagtgaattgctcttcctttctgtggtatgtgttctccattgtaaattttgttttgtgtgtgctctttttccagtttggctttattaactatgaagtaggagatagcaagaagctctttttccatgtgaaagaagttcaggatggcgttgagctacaggcaggagatgaggtggaattctcagtgatccttaatcagcgcactgggaagtgcagtgcctgtaatgtctggcgagtctggtgagtttctatggtttattatggttggaaataactgctctgagttcatccctcactcattcatgcattctgtgctttctttgccactctcctctggctgggtttagtaggaactattttacacttctatctctatctaattttgtctttttctgctagtcattgctttgtttgagataggtctcagttttatatccgtgacttaccttactttcagcttgctgccatgtgccaccatatctatttttctatctctggtatttattgtctggctttgagtcctataaccctgacctgagaaacacttaggtactatgatgcgttagcactgtgtgtgctgtagcttaaatactaaacggttatatgatccttgtacttaagagtttagcttattggctcgctctttctgtctactcacttttagactttgtgctgctgaaatgtttgagataggtctcagttttataccttagtcattctaacttatgc

SEQ ID NO: 28238 - DNA, 1374 bp, Mus musculus
tactttgttggccctatgaaattctgcactctagtcagtatatactctaccttcatgacttaacactcagctgcattcttttcctattttttccctgttcattatgctttaattctgaggaccatatgaaggtagaatatattacctttaaaaattgcaaaaatttatatagcaaacgatattcttaagttgatggccaaatgttaaaatgttattttcatatcatttataatcttgtcacaatccacttaacgaagtttgattacatttcagtgaaaattatcttcccgagtagtttttttttttttttcttcctgggatggggggggtaaataactttactacaattagtatgtgtggtgcagaatttcatgcaaatgaagtgtgccagcagtgtgataatttaaacatatttaaacaaaagacgaatgcacaaaattgctgctgcttagatcactgcagcttctaggacccagtttcttttactgatttaaaaacaaaatgaacaaaaaaataataataataaaaaagttgtgcctgaaatgaatcctgttttttttaataaatagccccgtggttccagtgccctgttcaatacaggcacttgatccttggtgtagcttctgttcaactttgtatcacgggaacggattggcctgatttctcggccttcatcttgaattggccccaaacagggtccctggcaagtggagtgaaggctttttgtctaacaatgacaagggtcagctcaggggttgtcggggagggcgctttcatcttccccgttgtcatttgaggttttgaactctgggtaaagaggccgtttatctttgtaaacacaaaacatttttgctttctccggttttatgttaatggcgaaagaatggaagcgaataaagttttactgatttttgagacactagcacctagcgctttcattattgaaatgggggcggggcggggctggactgggtgcggccggctgcaagactctagtcgtcggcccacgtggctggggcggggactggggcgccttgggcgcctagtgattacgtagcgggtggggccggaagtgccgctccctggcgggggctgttcatggcggtttcggggtctccaacagcttctcaggttgaagtccaaaagcctcccgaggcggggtctgcggagtttgaggtaaagctccggcctgcctggcgtcggacttctcagcgtgtgaacgcctggcggggcggggagacgcggagacttggcgagctgaaacaaaggcttgggtgggggactctggctggctctggggtgattttcggagccggaaaggggagtttcgggaagtggttgtgccaggcggaccccagagcttgggtttgcagg

SEQ ID NO: 28239 - DNA, 1374 bp, Mus musculus; identical to SEQ ID NO: 28238

SEQ ID NO: 28240 - DNA, 1067 bp, Mus musculus
tgcctattattcctgcttacagacttttgcctgatgcctgctgttagtgctacaaggataaagcttgtgtggttctcaccaggactggaagtacctggtgagctctggggtaagcctagatatctttacattttcagacccttattcttagccacgtggaaactgaagccagagtccatacctccatctccttccccccccaaaaaaattagattaatgttctttatatagcttttttaaagtatttaaaacatgtctataagttaggctgccaactaacaaaagctgatgtgtttgttcaaataaagaggtatccttcgctactcgagagaagaatgtaaaatgccattgattgttgtcacttggaggcttgatgtttgccctgataattcattagtgggttttgtttgtcacatgatacctaagatgtaactcagctcagtaattctaatgaaaacataaattggataccttaattgaaaaaagcaaacctaattccaaaatggccattttctcttctgatcttgtaatacctaaaattctgaggtccttgggattcttttgtttataacaggatcttgctgtgtagtcctagctggcctcaaactcacaatactcttcctggatcaatctcccaagtgctgggattacaggcacattccaccacacacacctgactgagctcgttcctaatgagttttcattaagcaaattccccatcaccttgaaactaatcagaagggggaagaaacatttgctatgctcctgagtgctaacactgggatcattcacatggggtttgcattcctaggcaaactaaactgctgccttttacaacaaggctcagtcatcttcctgaagctgctgagaccagcacttggtcttgttttgttttaatatgtctatatgactggtggtggatccctaaatagtttattaattaaactccagttaaggagaaagttactcaccttgacccgtttgaccatatcccgtgtgtgtgtgtgtgtgtgtgtgtgtgtgtgtgtgtgtgtgtgtgtgcacgcgtatgtacgtacgtatgtatg

SEQ ID NO: 28241 - DNA, 1754 bp, Mus musculus
atggagccaattcaggtttcagatgcccttactaacatatattcccacggggtgtgggttttggcacaacagtgacaaacttaaaagccaagtaagagccgggcgtggtggcgcacgcctttaatcccagcacttgggaggcagaggcaggcggatttctgagttctaggccatcctggtctacagtgagttccaggacagccagtgctacacagagaaaccctgtctcgaaaagccaaaaaaaaaaaaaaaaaaaaaaaaaaaaagccaagtaggtccagttggtatagtatcaaagtgtttttagagtaattagtgaaggtctgctttacctcaaagttgcagagcctctcttcctgagtttaagtgcctggccggcagtcacaaattaacatgttgctgtaaggcagttagttgaagctttgttcacacattggagagtatgaaaataaagtgttctaagagcgctgatactggatctgtgtaaacctggtaaatgccgtttgtccaggacttagcgtgtgtgagttggtagctcagtacgagtttactagttccgcagtgtgtacaatggaggcgggtttgttttagctggccacctgtagaatcagcctttaaactgctgtgaactttgtcatgacttgaatatgaagatagacaaaaactctgtaaagacaaatgtttgttttcccccttacagaacgtgtgagcttggttttatcttcctttgtatttagtcataacctctcaagctggcagctccgaccaaggatcagaagctgtgtgcgttccacctggtggaattagctcagctctatatgagaagtggagttaatggaaaacgtgttgactgggtggtttctatttaaaagagtgatgataattcttgaacagtagtttttattttgctatttctttaagctgactgatgtgccacaaaattattttaaggtatttgtgttttaagagtgttctcatgagattagttgtagatattttttaaaatacaactggtttttaaaatctgagtattgctctaagcaagtgtttagactcttacgggaaggtgggtggaagttgtttggcttccgtatttccatgcgtgccgtcagacataggtcagaacgccaactgtgcatcctgctgtttaaagacctcttggcctctgtgaccctcatgaaggggctgatattttaagttgactgtttgattgtaaattaatcctttctaatttttaaagacttgcttgactgttttccttgttaaataattttaaaaaaataaaaaactggaagttctttgcttaactgtattttccctactgccatagggtttctactgctgttaagagacaccatgaccacagcaactctgataaagaaaacatttagttgggctggcttacagtgtcagaggtttagtcagttatggtcacggtgggaaacatggcagcgtgcaggcagacatagtgctggagaaggagctgagagtactacatcttgatgtgaaagcagcataaaaagactgccacactagacctaaggagcaccttttggagaccttagagtctatccccacagtgatacacttcctccaacaaggccacacctctgtgggccaagcattcaaacacatgaatctgtgggggccattcctattcaaaccaccaaacccaccaaggtctgtattaggaaattatatttcagatattgatgttctttttgggcagtgcaggggagactcaagctcctcat

SEQ ID NO: 28242 - DNA, 1191 bp, Mus musculus
tactatgttatcaggagctcctgctgggtgaggtggcttatgcctgtagccagtgttgtagaggctggacggggattgcgactagtttgaggccagtctgggcttcagaataaaatgggcttcgtgtacacatgtacatacatacatacaatacaacttctgtgaagtttttgctatgatttttttttcacccacatgaggttaatttcttaatttaaaaaaagatttatttttttgcattagaccagggtttcttttcccgcaaagctaattttcctacaaactagtgagaatgttcacaaagacaaacatcacatgacttccttagtgtggaagctagaggggaaaaggagggcacaaaactaaagtaggagagctgggggtggggtggagtaagaaagagtagaggggtgagtgagatcaagtactttataagcgtgtatgaaaatgtcacaaggaactccattgtacaatgagcatacaggaggaaaaatgattttaaaaacttgtggacatgacttaagtgaaagtcatggaaatcctgaagtgcagcttctgtagcgagaataaagtgtgtgtgtgtgtgtgtgtgtgtgtgtgtgtgtgtgtgtgtgtgtgtgtgtgtgtgtgtgtgtgtacgcgtgtgcacatgagcctgcctgcctgcctgtctgtctgtctgtgtatgactggtccagttttgatcagctgtactgacagagctaggctaagatagtgtcctgcttgttaatcagggctaggcagaagcagcaggaggaaggatgaccctgcctcaggaagttttgaatggcttgttatttataaccagtatgcggtagagcgggagagcaggtctctgcttactgacaggaagagtttcagccggccagtgttcacatttgaggaagcggtttatggagctgactgattgaagctctgcggaaggaaggatgagaaaagtgactgcagatctgagtcagaggtagcagagatgtgggaaacccagccaggacagggtaaagggtgcctatgcctttggactgagtccctgtagcagcttgtgtgaaagtctgtgtgctaataggtcagctgaaataaatatatgacagactgatgttacctagcaacagaagacaggaggcgggaactagcttccagtgtgtttgtgaattggttcctgtctagacttgt

SEQ ID NO: 28243 - DNA, 1161 bp, Mus musculus
aacagctaaaataagatcattaaagaaaagactcatcttaggcttggggtttagctcagtagtaaagaacctacctcgcatgtacaaagatcagagcttgcccacaacactgccaaaaagagaaagaaaagtgtgttaggattttcctgctgtgaagagacaccatgaccaaggcaagtcttataaaggacaacatttaattgggctggcttacaggttcagttcattatcatcaaaagtaggagcatggcagcatccaggcaggcatgagagaggcagaactgagatttctacatcttcatctgaaggctgctagtggaagactgacttccagacagctaggttgagggtcttaaagcccacacccacagtgacacacctactctaacaagtccactccctgagccaagcatatacaaaccatcacaaaaaggaaaggtttaatttaactgttttccaggctggcatgttgaacagtctcactgatgtcttcttcgtaggtttgtttgaagtccgggctcttcaatatttggaaacaattcctgagtcggaacccagcggggtgaatagaattttacgtagtcttggtgagtcgctttgccctattggatgattaaccttgtggtataagtccccgagtcatgaccatgaagcctctctaggttgtactctttggggatacattttaaaaagtagttctatttaccagaaaataatgtatttatatatacagataaattttgcatataattctagggtgtccatggacttcagacttaaaatccttgggggctgggaagcagaagaggattgcctcggccttattctgcatttcataaacatgggtccttctgatttttaaattctggactgatgtgaggacagtggtgtgcctgtcacaagacaattgccttaaactctgggctttggaatgtatgctcctgattagaccctgtccttaactagctgagagaccgtgggcatttatgccgcaggctgtgatttcatccacaccttgggttagattagatcagatgataatctttagggactttagagaggtctcttttgagcatttagaattctctagggagtgagccaggtaatttgaaacttcagtccaattgaaaaccacttgagttagattatgtcttgagttct

SEQ ID NO: 28244 - DNA, 1167 bp, Mus musculus
acaatgcaaagatgagattgacagagaaataaggagaataatgagagtttcaggtactagggagacagacatggaggacaccatggtcacacgattctcatcactgaagcatcatattgctttaaatacgtggacggtttgtgctttctaattccagtactgtcaccattgattaaaccccccttttgtcccatgtcctatcttggagaatttcactcatgttagaactttaaaaaaaaagcagacaccaggcatggcctcctcagaacacgtgtcctgctgggatagcttgcttctcatatgtcagcattatgctttatggaatggagccaacattaaaatgtccttttaaggacatagctatctgagttttggtgtttacaatttgcagcactgtgataatctacatgtcatcttattcaagctttagatcagcttcatgatattctacaagaaactggagttcagagaagctaaggaatttggccagttatatacaagaaagaactaagccaaacacttgacttatgaacacatacaaagctggttagtcctacagctgtaaatgaactctttatagtgatgtttaaagttctctgtggagcacaccagagcttcctttttggctctgatgagacgttaagctatgggggtctagacaaggtttgttcctttgtttcttcttctgctgctggggataggacccagggccttttgtgtgctctgccacactggttatttttacatcggtgtgagtttttagtgtttcctaagcctcttcatcaaccagatgctgaaaatctaaagtaggagtagcacctgggaaagggagtttgtcagtgagggtacagttttcattgataagtgagaaatgttgtggtaaatgtcagttgttttctgtaacctttgcccactgctttacctggcatggaaaatactcattcagacttggaaagtgttgtttgttgtactgggatacaactcactgacttgtatagtattgtcattgtcactcatactagggtgtctgaatgaatccatttaagactggtgctgtgcaatatagttcccacacatgggtccagggaagagaactgagtctgtcctttcaaatgttagtgcagctcacccaggggagctcctcccagacagctctctcctttcctt

SEQ ID NO: 28245 - DNA, 1680 bp, Mus musculus
gcttgcttacggatttctgtcttcccggtctctccgttgcccacagcatcttctcaccatgctctccatcttgagatgccatgccggctcctttcacagctctctccacgctagtgctctttacatttgtcctggagatttagttacaggaaatagtggctaaggctatggggtttggtggtagtggtagtttgttttgtcaattccagaattttgtccatcgtgtaaacctctgcctgtgttcttttaatcttatgctgttttcctgtctcttctgtctccctgagtctcttgtttctgcttatttcttaaggtaactatcatgagacgattgttgggtaacttaagtaatgcagagagcccctgtgtacccttcccctgctttcccataacgttgttttttaatggaaagttaaaaatgttagtgcccatagtgaaactacatatgtttaaaataaactgtgcaagaaattttacatccgctcatttttccctcttctctctttttcctttgactctctttcctagctgggtgtcgctggtgagtaagaactatgagattgagcggacgattgtccagctggagaacgagatctatcagatcaagcagcagcacggggaggccaacaaggaaaacatccgccaagacttctaatgactcaggcgacgtgggctccgcagactcagcggggactttctcggagcgactgtggtggttacatggttagagaccatggactatgtaaactgttgtattgcttctgtgtgagtgtcttagcaaaataaagttgtcaacatgttgctgtttttatgctataaaaacctggttttcagaatgagtatgactttagaataattttgacatattttgtagcagaattttttttttaaggcttcaaattttgtaatgaagctcctttatttttaaggcatccaacatgttctggaagctggaaaccttgaatttgtgttttttgttgaataaagttacagttctaagcatttttatgtgtggctatagtgaactttattgatggtattcaaaagaatgaggctcccttctagggatctatgatagaaataggtgtagtgagaattgtggaattttggattcttttttaaaaatgcagaaatataagaatatgttttgggctggtgagatggctcagcgggtaagagcacccgactgctcttccgaaggtccggagttcaaatcccagcaaccacatagtggctcacaaccacccgtaatgagatctgattccctcttctggagtgtctgaagacagctacagtgtacttacatataataaataaataaatcttaaaaaaaaaaagaatatgttttcattttaatcccaggtgtgggtatatggggctgctttgaagcaactgatgtgcctcgtgctctagtagaggcatggtttgccagctgcaggtagtttctgcaattgggtgacatttgggataatggaaacttttcacagggatataaagtctaaggccccaagaggcagtgttggttgtggtttgtgagtagtcgtgttcaaagaagaagcaagaagaaaaattagattcaagtctctcgcacgctctttctcactcacctttccttctttcctaactagtgatagcggtgaaggccagaaggataaaaggtgggagaaagaagaacccaca

SEQ ID NO: 28246 - DNA, 1127 bp, Mus musculus
ttgagaggaaattatgaaacaaacttaattagaacccacatttgaagagataacatttgaagtaaaatagatgcgttttaaattcttgttctttcaaaggttacctattgattccgatattattcttttgttggcagaagtatttttaaatggaatttaaaaaggattaaacagactaaatgggggttggggatttagctcagtggtagacctcttgcctagcaagcgcaaggccctgggttcggtcctcagctctggaaaaaaaaaagataaacagactaaatgtagtaagtttaacactgaagtcagtagtgctagatatttgtacatcatattcatgctataggagtttgaaattgttctacagatgaataaactgggcttcatgagcttaatttaaattattaaatattgaattcagtctttatgacttctttagatctgataaagtagttaggtctattaaaacctaagtcatgcactttgacaaattttaactaggcactttatacaaattactttgtgaatttctgtaactgttgattcatagacataggttgagttgatgacctaatggtacatttctcttattcaggattaaagaagtaaatgagactaacaaacgtgtagaacaggaaattaaagtggccatcttcacccttatcaatgaaattaataagaaaggaaaatctctcttgcaacagctagaggtatggtttaaagcaaagattaaaaaatgcttctcctgctcttcagctgttctcagtggttactgaaagtgctcttaaatggtttgcaaaaggcaaatagaaaatgtcttttttgtttgtttgttaattttctattcagaatgagaattttatttagttactttgtagttcattttaatagcactggttggcttggaaatcatcatactagtcttgaacctatagaacctgtctcccaagtgctggaattaaaggtgtgtaccaccatgtctgacataaaacactggttttttgtttgtttgtttgttttaaagccatataacttggtaatagtgataaccattttaggaaagagttattactaaaacatgatgtaaatgaagacaaagcaagcactttgaatttatttccttccta

SEQ ID NO: 28247 - DNA, 1145 bp, Mus musculus
gtcttagaactcatttgtagactcagattctcctgactctgcctctgcccctctgcccctctgcctctacctctgcagtgctgagattaaaggtagactccaccaccacaaggcttatggaactggttttgattggaaaaatagtgcattgtaataaactataagtatgattgtttgtgtataatagtttaatttctgagtcatctaagtgaaccaatattagagggacaaaacccccaaaatcatgttagcatatgtaatggcaagttatttgtattcttttatttcactggtgtgatttacagaattttagtattaagtgtattcatgtagctttgtatatatattcatgtttgtatactgtatacatgtaagaattaaatgatttttttaattgtctttgttttcttgtagttgagcagtcctgagagtagtttgacaccacctctttcaactaaccttcacctagagagtgagctggatacattaacaggcctggagaaccacgtgaagactgaacctacagatatcagtgaaagctgcaaacagtcaggactcagtaacctagtcaatggaaagtctccaattcgaaacctcatgcacaggtcggcaaggattggaggggatggcaatagcaaagatgatgacccaaatgaagactggtgtgccgtctgccagaacggaggggatcttttgtgttgtgagaaatgtccgaaggtctttcatcttacctgtcatgttccaacacttctcagctttccaaggtaccagcaaaatagttcatttacgttcttgttattcccaaatctaaacatataacaaagttattcagggcttccctcaaagaaatcccattttaaagatcaagttctttaataaaaagctgcagatagtgaagctgataggatggatctagtctagtagttgagcatgtgcctagcgtacatgaggtccttgggttcaatctcaaacactaagatgggaaaagaaaactagctatatatataaacagtgccatatatatatttggttgtctttgtcttcttaattgtaatacctgcctcaatctcagagggtatgatttgctagtaatctaatgaggaatttccctttttttttattacattacttagttacttgtatga

SEQ ID NO: 28248 - DNA, 2361 bp, Mus musculus
tttgcagggtgattcagaagtagctaaggcagggaaagcagttgcattgtactttgaagataaactctcagagatctactcagacaggaccttcactcctttgccagagtttgagcaggacgaagatgatggtgaagtaacagaagactctgacgaagattttatacagcctcgtagaaaacgcctaaagtcagacgagagaccagtacatataaagtaaaatgactcggacttaaatcggttgttaagaagaaggaaacaaaacaaaacacccttttatttaagtgttgctggaatatcctgtgtacagtggttttacctccttacagaagctggtagctttcatacagtattagattgaaataatggaaacagaaaacattcttgtcaagaaaaggggagagaactctgtttgcaactttaagaacaaaattagaagtgaaaaaatttggggatttgctacaaatgaagacggttctctggctgttagaaatgtagatgatcatgtctgataattggtgcaggatactgagttgggcaagcctgcgagatgtgtctctgctggagcacacaggtactcaagataacttaaaagccttcccctccacagatacaaatgggttgttttctggttaaaagtgagtacatgagattccacttgaatgtcactaaagatgcattgaatcatgccactgcattttctctcattttgatctatttggccttagtttttaagttggtttaaagaactcagcagtagttttattttattcttagatgtagggtctaggaacataaccattgatcgtttagtcaacttcggtggtgtactaaaatgatgataacttttagtagtggatcatacagatttatggaagtcatttccagaaaaccctccaaacaattacacttactggtcaaatcatctgatcacgcagttagtcattcccctgaaagcaggacatttatttcagaattttctgtgtaggttaattagattgagaaggtgacaactttaacctagtcttcttcataccagtttccagtagaccactattggtaaacagaaatctgtcagctaccaaatgtgtacaattttctgtatttcactttgtcttatttgtaaatagtgagctcagacttctggcagatcagcaacatttgctgagcctgttttttaagctaatgtgtattcttactaatgttcctaccaagaatggatttgtaatatatgctgtctatttctaatgttcacattcatattttgaggttctatcttattttaatagagaacagacgtctcaaaaaatcttcagaagcagcttattattgaaatatcaaaatactgaaataaacccggtggggttagattactcatctgtccaccaagtgggacacgtgcatggactgggggctttgaatgacttagaagagacctttaagtaaatcctgagaacgagccaatccccacttgaatggtaattggaacaaacccaaccttgttactacctgacggcaggagccgacctgcagcagacaggtgtgctcgctcgggtttatcttcctcctctgcgttgtgacgctcagatcaagtgtgctctagactgtgtgcgcctctccgctggattaagagttgtagtcctacttctgtatggacacagtagaatataaagtgaccaaagtagaattcaacatcagaaacatttcaggtgtcagcagatgtgtggcaaatcatttgcctctcaaaaagttcaaagtaaggagttcagactgtagacctcctcagaaagctatttgacgtaaatgtcgaagaagtgaatatttttagtgtgcattgaatcaaataaagtgctctaaagaaattattacacagattcctttgggttgttttttcttaagggatgtgggtaaagaggaggagtatttaggccttttcatactgcacttaaaagagcttgatcgtgttattacctcatctcctggcttccatttagcttcccttataaattaaccttcaaatcatttatcattttattgaagtttcaagtttgttttttaggaggggaagaaaatttatttttaaaatgttttatttatatctatttcttttctttgatttccatgatttgactttgtaagtaaatgaatatctaagggtacatttttggcaagtgggggcgcagaggtttgacgtcatttcctgacacttctgggttccggtgttttttatttgcttctcatgtgagtcctttacaaacttcttagcagtaaattacaaacaatctctgttaagtggagcaaacacagattgttaagcaaatgtttctcaatatttgaaaccctgagagagcgtgtgttcca

SEQ ID NO: 28249 - DNA, 1174 bp, Mus musculus
ctcagaaccccttgcccagtggtagcaccccacagtgggctgggccttctcatatccaccattaatctagaaaatgcaccacagataatacctacaggccaatctgatggagtcaatttccttttttttcaggcttttttttttattagatattttcttcatttacatttcaaatgctatcctcaaagccccctataccctccccccaccctgctccccaacccacccactcctgcttcctggccctggcattcccctgtactggggcgtatgatcttcgcaagaccaagggcctctcctcccattgatggccgactaggccatcctctgctacacatgcaactagagacacagctctggggggggggggtactggttagttcatattgttgttccacctatagggttgcagatccctttagctccttgggtactttctctagctccttcattagaggccctatgtttcatccaatagatgactgtgagcatccacttatgtgtttgccaggcactggcatagggagtgatggtgcacaccggtaggatttgctgaaggaggcagaggcaggaggatcacgagttcgaggccagcctgggagacaatttcttaattgaggtttccccttcctgtgtggctttagtttatgtaagcttgatgagaactaactaccacaggctctgtttagtttatgtaagcttgatgagaactaactaccacaggctctgttacacgggcctgtttgctacatgcctgccagtccaatccaccttccaaacccttctgggaaccctcttcatcttaaggtgtctcccataggtttccatgtccccaaggtgcatcttccctcatattgatgtattgaaagtctcctaatggaggattggctgtgtccactgcctactttctactggagttgaactgggttaacctgggaaggtttcctggagaagttctaagtcattttttttctttttaatagtaggtacaacataacttgggaagggacacactatgccattgcttaggatttaagtactgattgttctggggaggtggaggtagtctacgttggaacagagggacagtgagtcacatattgagtggaaagaggcacagtgaacatggagggttaggaggatgctatgtggccatgctctcccacaaatgcta

SEQ ID NO: 28250 - DNA, 2813 bp, Mus musculus
atacaatagtatgcaaaatctctctctagaatgagatactggcactgataaacattgcctaagatttctatgaattttcaataatacacgtctgtgttttcctcatctctcccttctgtttcatgtgacttatttgaggggaaaactaaagaaactaaaaccagataagttgtgtatagcttttatactttaaagtagcttcctttgtatgccaacagcaaattgaatgctctcttactaagacttatgtaataagtgcatgtaggaattgcagaaaatattttaaaagtttattactgaatttaaaaatattttagaagttttgtaatggtggtgttttaatattttgcataattaaatatgtacatattgattagaagaaatataacaatttttcctctaacccaaaatgttatttgtaatcaaatgtgtagtgattacacttgaattgtgtatttagtgtgtatctgatcctccagtgttaccccggagatggattatgtctccattgtatttaaaccaaaatgaactgatacttgttggaatgtatgtgaactaattgcaattctattagagcatattactgtagtgctgagagagcaggggcattgcctgcagagaggagaccttgggattgttttgcacaggtgtgtctggtgaggagttgttcagtgtgtgtcttttccttccccctctcctctctccccttattgtagtgccttatatgataatgtagtggttaatagagtttacagtgagcttgccttaggatgaccagcaagccccagtgaccccaagctgttcgctgggatttaacagagcaggttgagtagctgtgttgtgtaaatgcgttcgtgttctcagtctccctaccgacagtgacaagtcaaagccgcagctttcctccttaactgccacctctgtcccgttccattttggatcttcagctcagttctcacagaagcattccctaacgtggctctctcactgtgccttgctacctggcttctgtgagagttcaggaagcaggcgagaagagtgacgccagtgctaaatatgcatatttgaaggtttgtgcatcacttaggatgggattccttttctctcctccatgtgatatgatagtcctttctgcatagctgtcgttcctggtaaactttgcttggctttttttttttgtttgttttttgttttttttttaaagcatgtaacagatgtgtttataccaaagagcctgttgtattgcttaatatgtccccatactacgagaagggttttgtagaactactggtgacaagaagctcacagaaaggtttcttaattagtgacgaatatgaaaaagaaagcaaaacctcttgaatctgaacaattcctgaggtttctttgggacaacatgttgttcttggggcccttcacactgtaaaattgtcctagtattcaacccctccatggatttgggtcaagttgaaggtactaggggtggggacattcttgcccgtgagggatttgtggggagaaggttaaccctaagctacagatgtggtccacctgaattaaattatatcagagtggtaattctaggattggttctgtgtaggtggtgtcagggaggtgcaggatggagatgggagatttcatggaacccggtcaggaaagctctgaaccaggtggaacaccgaggggctgtcaacgaacttggagtttcttcatcatggggaggaagagtttccagggcagggcaggtagtcagtttagcctgccggcaacgtggtgtgtgttgtcttttctttaatcattatattaagctgtgcgttcagcagtctgttggttgagataaccacgcatcattgtgtagtttgtcactagtgttataccgtttatgtcattctgtgtgtgatctttgtgtttcctttcccccaagcattctgggtttttcctatttaaatacagttctagtttctaggcaaacatttttttttttaaccttttctctataagggacaagatttattgtttttataggaatgagatgcagggaaaaaacaaaccaaccctgtccccacctcctcacctccctaatccaataagcagttattgaagatgggagtcttaaatttatgggaaaagaggatgcctaggagtttgcatcgttacctgagacatctggctagcagtgtgactttacagactttgaggttgtcactctgcaaactgacatttcagattttcctagataacccatctgtgtctgctgaatgtgtatgcgccagacatagttttacattcattctggcctggggcttaacattgactgcttgccctgatggcatggaggagagccctacgaacatagcgctgacctaggtcagcattgcctgaccttggaacagcttaaggctttaaaccttctcttagaacgtgcatttccagtttctcccttcccaggtgagagaggaactggaagggttgcataggcacacaccaggacacttagtcactccagagtccccagttgcaactaggaggtggttaccctgttaaccccaggaagaagaaccccatttcaaacagttccggccattgagagcctgcttttgtggttgctcatccgtcatcatccgctagaggggcttagccaggccagcacagtactggctgtcctattctgcattagtatgcaggaatttactagttgagatggtttgttttaggataggagatgaaattgcctctcggtgacaggaatggccaagcctgctttgtgtttttttttaactgatggatggtgcagcatgtctccacgtttccatggt

SEQ ID NO: 28251 - DNA, 1076 bp, Mus musculus
cgctgcccccacttctgctgctgcattgggctccaccagttccattgctcatctgttctccccccagggttcctcaaggcatgctgcagcttataccacacaccctagcactctggtgcatcaggttcctgtcagtgtcgggcccagcctcctcacttctgccagtgtggcccctgctcagtaccaacaccagtttgccactcagtcctacatcgggtcttcccgaggctcaacaatttacactggatacccgctgagtcctaccaagatcagtcagtattcttacttgtagttgatgagcacgaggagggctccgtggctgcctgctactagccctgagttcttaatgggctctggagagcacctccattatctcctcttgaaagttcctagccagcagcgcgttctgcggggcccactgaagcagaaggcttttccctggggaacagctctcggtgttgactgcattgttgcagtctcccaagtctgccctgtttttttaattctttattcttgtgacagcatttttggacgttggaagagctcagaagcccatcttctgcagttaccaaggaagaaagatcgttctgaagttaccctctgtcatacatttggtctctttgacttggtttctataaatgtttttaaaatgaagtaaagctcttctttacgaggggaaatgctgacttgaaatcctgtaacagatgagaaagagtcattactttttgtttgcttaaaaaactaaaacacaagacttccttgtcttttattttgaaagcagcttagcaaggctgtgcttatggcgtatggaaacagagtgatttcattttcatgtcgtgctgtccttactgggcagttgttagagttttagtacaacgagtactgaaacctgtgcagctgctgctgagctgctcgcagagcagcactgaacaggcagccagcgctgctgggaaggaaggtgagggtgaggactgtgcccaccaggattcattctaaatgaagaccatgagttcaagtcctcctcctctctctagtttaacttaaattctccttatagaaaagccagtgaggtggta

SEQ ID NO: 28252 - DNA, 1225 bp, Mus musculus
atactgggctacatatggccaagactctgcctcaaacaaatgaaaaacaaaaccagacctatagtgagaagtttgcttaaagacagaaacatttgagtctaaggaaacgataaaggagaaagaacagtgcttgaagactgtcactgtcggagctacagtgagaagagctaagaggcagcgggaactgtggactccaagatggttgtaccctaggtctgcgtgctgtctttcctattcattctttgtatgatcttgtataaactcctcgtctatgttttaatttccttatctacaatagggatgaggtaatattgtgcagggttgaaaagattccccagctagtgtgagaaagcagtgcctgatgcagactaatacttagcctctagctgctgtggtaactgtcatcattgttaggagagaccttcagaccaaggaaggcactgcttaaaagggcagttataactgtctgcattttcttctcctcagctcgagcctgaaggcgaggtctaatgtcatcagttatgtcactgtcaatgattctccagactctgactcctccctgagcagcccacatcccacagacactctgagtgctctgcggggcaacagtgggacccttctggagggacctggcagacctgcagcagatggcattggcacccgtactatcattgtgcctcctttgaaaacacagcttggcgactgcactgtagcaacacaggcctcaggtaaggaggatctttgaagttagaattgaattttccttggatgtgcatatatttaatatttagttatattatgctagtggttaaaactaagcatagatatttttaaatagtacttaattcagaaatcagttccctgtaataggaatttttgtttgatgaatttatcttcctacatttatttgcttggattaatatgggaatgaagttgttttgtgtcagcattagtgttttcaatatattcacctctggtgggaaaaattgagaagacatcctttagtagcaggaagcagtttggcttgccagacctgatttggatttaattatgtagagtagaaaggacttgataatactaaagatgactgggagctgaagatggtgagttagtagttaaaagtgcttgctctgctcctcttccagaggacctgaatttgatttctgttacccacatcaggcagcataccactgcctgtataactgcagctctaggggaagcaaga

SEQ ID NO: 28253 - DNA, 1198 bp, Mus musculus
cttctgcagtgcaaagaaactgaaaatagagccctctggctgggatgtttcaggacagagcagcaacgacaaatactatacccacagcaaaaccctcccagctacacaagggcaagccagctcctctcaccaggtagcaaatttcaatcttcctgcttacgaccagggcctccttctcccagctcctgccgtggagcatattgtggtaacagctgctgatagctcaggcagcgccgctacagcaaccttccaaagcagccagaccctgactcacaggagcaacgtttctttgcttgagccatatcaaaaatgtggattgaagagaaagagtgaggaagtggagagcaacggtagcgtgcagatcatagaagaacacccccctctcatgctgcagaacagaaccgtggtgggtgctgctgccacgaccaccactgtgaccaccaagagtagcagttccagcggagaaggggattaccagctggtccagcatgagatcctttgctctatgaccaacagctatgaagtcctggagttcctaggccgggggacatttggacaggtggcaaagtgctggaagcggagcaccaaggaaattgtggccattaagatcttgaagaaccacccctcctatgccagacaaggacagattgaagtgagcatcctttcccgcctaagcagtgaaaatgctgatgagtataactttgtccgttcttatgagtgttttcagcacaagaatcatacctgccttgtgtttgagatgttggagcagaacttgtacgattttctaaagcagaacaagtttagcccactgccactcaagtacataagaccaatcttgcagcaggtggccacagccctgatgaagctgaagagtcttggtctgattcatgctgaccttaaacctgaaaacataatgctagtcgatccagttcgccaaccctaccgagtgaaggtcattgactttggttctgctagtcatgtttccaaagccgtgtgttcaacctacctgcaatcacgctactacaggcaagtacaaaatactgtgcttaacacgcataggatagaactgtaactgttctacccaggagcctacttatttctagattccaagatggcagcaggatttgtctcagcttacgtgtatatgtgaagttcctataagtaacacacaattcttgcttcaatcctacttagtact

SEQ ID NO: 28254 - DNA, 1238 bp, Mus musculus
ccccggctcacattagcagagctgttcctctaactcctgagtccaggggcctggcgctaaaataccttctcactccagtgcatttcctccaagcaggcttctcttccaggaacttcgacaagcaagtggaaaaacaccagagagtacagcgtagcagtcctgcagttctgagcccggtggatgttggctagtgacaggaggtggcttgctgtcttcctttaaaagaaccctggggctcaccccagcagctcttctgaagcttttcatgaagtcctagtgcctatgagacccgtagctttatagtacactatattgtttattttaattttattatatttaagaaacagatttcattataaactattcagtgttcataagcacattaaaagttctaagaagttccatagcaatttaatttgttccacttggtttaacccagtttttctcaaacctttatcaacatgcagttcgttttgttttttgttttgttttgtttgagtggaaaaaatagagtctgaatcaaaaagaaccagtatattgttattaaatttgtcctgtccccatcctcaagtcccagataaaagatgtcggttatttgttttcagattgtaattcatggtgctggaggataaagtaggagtcctgttctaaccctgactgtcactgacttgctgtgacatgaccctaaccaaggaacttcctgtctttgcctctcggagcgaacaggaaaccatgaagaggcactgaaacagtgttaggaaaataacaccttccttcttcatgaaggggtttcgtaactgtcatgagacatccatctggaacatagccatttggaggttaggcaccacgcaccaagggggtacacggaataagctgaacattaagggttagagtatgtcagagctactggatgcttggagacactactttgttaaagctacagggatcaaatgtgctgccagatattctccaattgttcacatagctgggattttccccccacccccacaagtttgaattagggagccagagcacagagcttgtttgttttagtatccaggggagagaccaaggagccagctggctggaacgggtcagagtgtgcagttctaccctgtcctgctcataacctgacaaaatgccaaaccaataagcaagacagctgatagcacagccatgaggaaatgcggtctgggagggtgcaggcgaggaacggcctgggcctggaaccttgagcc

SEQ ID NO: 28255 - DNA, 1106 bp, Mus musculus
gccccaaactggctgtggtagtactggctgtaacctcagcacctgggaggtggagataagaagggtcagggttagggtcacccattcccacatgttcacttgaagctggcttgggactttgagacttgtctcaaaataaaacaaaatttcttctccggcctcttattttaaaagttggtaagattggttttcatgttttagattgtggaaaaaccctcacaacacataaaaaccttatgatacgtaaattctctgtccatagataaaagttttattggaatacaactgttcatttatatattgtctatataggtttttgcttttgttttttttgcattatagtagcaaactaggagtattgaggcagagatcatatgctctacaaagcctgctgtgttctttacagagaaagttggcaacctctgacttgaggcatggactgtgactaagagacatgttcccacacatcaccccagcatactcaatccaaattcaaatacaggataatttcagatactaccacttcagacgcctggcattgctcataaatagttaaaagtttggtatgtatatacttactccaaaattggaagtaaaatgattttcagagttgaggtaacatgcttgaaattttctaatggtagaactgaatattagactcttaagaaaaaccaaacacctcagagtccagtttgctctttctgctgtgctcattgattgatgtttataaaaacaatattaagatgtttgctttatcttattataagcagtatgcttcagcttacctaagtagctacttgtatcctttgatcttaatttctttctctcctttgttattgttcataaagcaaagatcaaagatagttcatcaaaagtaatagtttctttttaattgttgttggctggtaactatgatcttaatatattaaggaaagggtcagaagatgcttgcctagctcttaactccattgccattaaacttagaggattgctcttatgtggctcttcatagtcagcttttctgtttttcacttttgacctcttcctaactgctatcatgtggaagtgttttgtgagatacaaaagacactgggtgtgatggcata

SEQ ID NO: 28256 - DNA, 1163 bp, Mus musculus
cttagttgccagggatcctagctcactggccatatgcccaggaaattctcactaaaaagaagaaagacagaatacttaggaataattagtggtttgctttttggcatcagatttactcagttggtacatgttactgtgcttataaatgctgttcacagtctggcttgtgttactaattatttaaataactaacaaaaaattacatttattagaagttaatgcaagtgacagtgttgatcagtagttcttcttttttcactctctttgccagagtataatggttgattactgtgtttctacccttaacatacataaattcaacaagtatttacatgaggcatgttgcattgcagatacactgcagtgaatagtagacttaatatttaaacatgttgcctgttttctcctatgagtgctttaattgggggtaggtaaactttttctcttttgttttttgaattagggtttttctttgtagccctggctgtcttagaacttactctgtagagcaggctggccttgcactcaaaaatctatctgcctttatctatctttagtatttggaactagaagcattcaccaccatgcccagctggtaaacttttttctactaagaactgcatagtattttaggaccatactgcttctatttaaattggggtatataaacttttaatacaaagactgcataggatctgcctctatctcaagtacatactgcttcattctgccattgtgtgtaagtagaaatgaatgggtaggaggatttccagtccaatttggcaatcctgagtggtctgttagagatgttgtgtctagtcaaattaacagcttatgtttctttccttatcaaccatttgttaacttttaaaccagtgttttagtaaagatgcattctggataatttttcttctttttttcaaacctaatattcttggccattgtttgaaatgttaaaagttattgttgttgtctttcactgtggcttagttgctttctttttcctctttctctgtgtggtcctcctgtctcagctgtttttttttttttttgtttgacagtttatttacttgtctttactcaaatatttgtaacattttaatttttggacctttgtttctctatagttttttaagtcttagtaactttaaaattagactttc

SEQ ID NO: 28257 - DNA, 2165 bp, Mus musculus
ctgcaccagtcttactgatgagggctgccacagctgagcatcaaactaaggagaaactattcttgtgacttggcatctacttttgaaaacactttacaattttatcaggctaataatacctgggtttgttcattgttattcagtgttgctattttctaatagcaggcattagacttccatcctagtttcaggtaggctgaaacttagtgtctggatatttactttgttttccctttttcaaacagacctccttcatccaagtagtgtggctcttattttggaatgttcatgtgctatgcattatcctttctctagttatcaacttggtaggccttttgtttactaaaggaagagtactctccacacctgagaccagattcttgtatctacctggttacagtgcaatttgatttttttttcctggatggtgagatttgagttatttgcattaacataggcgaaagaaaaagatgctgctttgttatgtctgtcaccatggaaacttcgctgcatctttggaaatatcaaatatgaattttctctaaaatattctgaaataggttaaatcttatataaatattactttgtgcaatattgttgtgtagttaaatgcatattagcaaagtatagaggtcactgtgtaaaccgatagaaaagtaaccatcagcaaatactacagtgattagttagaatctgtattattccttatatatatgtatatgtgtgtattctctgttacaaaggatgaagacaaataaatagggaaacacttcaatgtaaaccatttatgaattggaagtgatgttgcttttagttatctttgtaaataaggtaattagaatggtatgaaaggtaatgtgattattacaggggtgtttttaaatcctgtgtataaattctagggtaaattctagtttatcaaactagtttttaagggacctttgagggtattttttgttgttattttgtggagaaaaggggcatatcacaaaatgaatgggtttgggttatttcttatttttatttttttctgtccagaagaatttcatagagctttaccaggctgtgcaaagaaaaattcttctcaggcaacatttgcttttaaaaataatcatgaagagaaaaagttgttaacgcaaaaagttttattttgtttttcttgtcttccaagatccgatttccccacctcccacttgccatccagcagatgccatcctgtcatctaagctggtcattactaatacacaaggagactgtctcctgacagccagcactgtgcaatcactcaggaaccagcggatctgcaaagacctacaatcaaacgcaaatctccattttccttttacaaagcattctaccctcacttccagtataaacatattaaaagaatataaaaatgttgaaaatcatgtactaatgaagtcattgtatattagattgcaatagaatggaaagacacatttagctagtaatgtacctggaaatcctgaatgtcctacgtgagtattagattttgatagcatgctttaaagactgatgaatataaaagcagaagcttcgagtttcctgctgctttcaaaactgtgtcctagttgagtgatacaaatgatcgcaagttttctaaatcattaaactatttggttggtggagtgaggcatggtctggtatcctctgatttgtaaaatagcgatggcagtgaagttgtaactgaaattgaagctgatcttcctttctggtatgttatctattgtgccagcccttgagattacttgcagaatgtggctataagttttagtagtttatggatcagagggatatttttaaaatatgctaatcgaaagaacctagtaaattaaatattcctaacagcaaatagaatgattttatggtaaccattaaaaagaataagtcttcccctgtcccagaggtcattctataattatcaagataggataagagttagggttacgattctgagagatgtcccaaattcataaagcaataataataacctttatattggttccctcttccaaagtttaactcttgagaaatgaattcttagtcttaattgtactttgcttattcagtacttacagttttacatgatttttactctaagacttttggaaagtgccctgcgccctcagaaacagtcggactat

SEQ ID NO: 28258 - DNA, 1149 bp, Mus musculus
tgagttgaatagttcaaaactgccatctttggaggctggacagatgactctgaagctaagagcatttgctgttcttgcataagacctgagtttgtttccacatcagtgtcgggcagttcgtgactacctatagctctggcttcaggggatctgaccctggtcatggcacatacacagactcttttacacagaaatttgaacataaaatctttaaacacccaaactgtgctgtgcatggcatctggttgtcctgtggtggaagccctctagggatgtctggatattcctgcttccagtttgcagatatttccaggaggctatttctcacttactcaggtctaatggtttagggactggttcactttattagttgttttagaaagcacagctactggaagcatgtgcgcttacaagagtgtgcttttctggaccttcactctgcagtcacagcggttgtgttgtatctcctgatgcctattgtgagcgccagtgaagtgcttggacccttgtgccttatgctactcatgggaactgtccactgtcagattgtgtcgactcagataacaaggccgtcaggaaacaatggaaatcggagaagaaggtaaggtgagcttgcctggagtggtgtgctttcttttttgttgcatatttgacgaaatgacagttgtttgatgctgagaacttatcagtgtttagtttcatgtgaccttttttacatagcacggtaggtttaaaaggaaaattactacttttccttagcatatttttcagtaatggttttgagaagcattctctggctggaatgtattggttggtgtagggtacttgtctcttatgagcatgtgcaagaccctagatagggtcagtgtgcaccatccctgaaaagagagagaagagaacagggcaaagtggaaggagaagggagatagtgtggtgatacgtgcgtgcctttaatcccaatccttgggagacagaggcaggtagatctctgtgtgttcaaggccaacctggtctccgcagcgtctcatcgaaaaccaatcaaccaaaacaagaaaaaccccaaaccaccaccaccactaacaacaaagctctgtaatgtttgtgaaaattcactatgggtaaaggatttctgtacactgggttagagct

SEQ ID NO: 28259 - DNA, 1183 bp, Mus musculus
gagatggagatatggaacttgaaggctcctggcctcatggggtcctgcctcattttggggaagaaggaagatggctaacagatgacccgaggctagtcattggtctgttgtcagacaacaggtacttactcaaaactaccatgtctgagcactgggcttggccctgggagacagttgtgaaaagtccctgccctgcatgtctacattgcaaggaggaggaagagggacttgcaatggtgaaataacctgttcacacctaacccaggtgacatgacgatggctgcaggtcagcagacagacttgagaatggtgagtttgagaacaaccatgtggcaggtgtttctagctccttctggggaagcagggatcttagtcattggccacttggtgacaggttcctcagggttttccgacactgggtgcagggtgcaaggctgggctgtggaaggactctttgccatggtggctgtggacttgtggcacttcctgacgtgagggaggagagatcacttcacgacagctcagcttggtgtggtgagggcatgtgtgtgacacagtgagggtcccaacaggaccagttgtctcactcattacaatacctcaagcagaagggtgctggatgactccgtagctggcgaggggattcatagctgctcagaccctagcagaaggataagggaagtagatattgaactgggaagaaagggcatatagagatggcttgtcttgaagaatctgagatggccaaggctggggcctcctaatgggggtgggacatgaggactgaacacagtgatcctaatctcttgctgtccatttttaagtggggttcccaatagcaaattccaatgagaagtcagtggacagaaattcaggaggggacgagcaaacgggaaacaccacatagactcaccataccgggacacagcaatctccatacagaaagatataccctccactgaataccatgggtcttctgtgagagcagctggctttgggaagggacagccaggccccagccctgatgtgtcttcttacttgcctctgcagcaggcacacggagttcctcagaacttctggtgccacaccctctctgctgagcatttgtcaccagggaggggagctgagcagagatgttcatgtccttcttctccctcacccaggcttctgtcggcccagtctt

SEQ ID NO: 28260 - DNA, 1229 bp, Mus musculus
ttccagagcccagcagtgttgccacagccctgtgagcacagaagatgacttatttcagcaaaatactttgatgacaaggaaaccaaagattggccttttttatgtttactctgttttcagtctccttcacgaatgtagcatattaagaagggaagtgtgctcttgggagtagatcacacaaaagttcctgtactctgtcaatttagtgtggttctgtctttatacaagtattatttaagccaaacagctttctgaatttttgatagcaaaaagctttatgtaaacaaagaatgttaacactaatgaaatgtcatgtgctttcagtctgtcctatgagtataataccagcttcctgctctcaacttttaaaggtgtctatttataagtaactgtatatatacagagttccaaactcacagcttcttagctttttgtcagaaagttcaggtgaatttctgacatttttttcccatgctttttttttcaaacctaagttttcttcctcagacagcagcactgtttgcttttgaaactttcgctttttatttaaacatgttttcttcatttccactttgaacatttaaaatgtatagtgctctcatctgtttagactgtatgccttcttttaggctgtattccaggttttttactggtatgacaaggcattaagagcctgctcccttggcactgctcgtgctggctgtgtgtctgagtcttactgatagaaagagactgtttattagctgctctaagctgctctccagttcccgccaggaaccaaagaggattgtgccacttgagtgaagagctgcctttgtgaactgttagctagatcaagggtgatgctgctccatctaacttgagctgtatttatcttgccaatacaagacttaacggtctaagacatgctcaggggaggaaaaaatgttctgcttctaaacactgtcagtaaacaaaaaactcacatccgaattggaaaagttgtcttttgtctggaagctgctgctcacaggaggctcaggatggaggtatacagcagctcatttatagctggccatcccactttgtctgtggtcagagttctgtgccctcacggagagcccagggtagtcagggtagagagcaggccttgacctggtcctctagaaacaccttacccaagatatcgcctccaagctccagctgtggcccttctgctgcggtgtccattggatctcctgagaattggg

SEQ ID NO: 28261 - DNA, 1171 bp, Mus musculus
gatgtagcgcaaggaaacaggcccggagggttccagcaacttcccagggtccccgagcccgggttccaggcccacatcggagtctaccagtgtccgtccattcaaaatgctgttcagtccccggactccgacggtccatcgccttcgccctctgcacctcagggtccgccctcagggcagtttttttttccccttttctcctccagagcctgaggggtgaggcccacgatggcgtccccggcacgcgccaaaagaagctaccccctcagagcgctgataaggatgtgcggggtctccgggccgcggcgccgggtcacgtggcgggaaggggggcgccggcgcgcgcgcccgagcgagcgagcgggcacgcgcagcccgcagcgtgtggaggcgcgagatgccgagctgggagtatgtatggcagggagggggcggcggccgggaaggccgactccaccccctgtgcgcatgctccggcccccgcgggttataaggcagccgcgcctgccccgccagacaaagtggcgagctgcgacgtgactggtcggtcgtgtaggtgcagcagccaaggagcccggcggcgggcaggggacacgagcgggacccccccggctccgaggaactgcggcccgcgccgccgcgtcacgcatactccgggcgccgcgagacacacataacggttagtccgggctgagcgggcagcgcgcggcacggaatccgcggtgcccttggtgccccggtggggtcgcggagccccgcgggcacgcggggactttcctccctggggcaagggtcggggcgagcgacgcggcatcctgggcgcgcggagccgcgtggcccggaacgtggcgtgggtgaaggggaccttgaggcgctgggcacagcgtctctcccggccgagctgcgggcccgtggtcaggtggcggccgccgggctgcgggagtcgggtcatggtgcccggtgaccttgggggagacgcttccagcgctgcctactctaggcgcctggagagatgcttaggtcgggaagagggacgacctgaggccgcttcacgtggtgcactcctgccgccttctgctggggcgggagttacttaggactcgtggcatacccgcccagcctccccggtctgccaatcggtgtcccaccaggtgacttgctagagtggtgt

SEQ ID NO: 28262 - DNA, 1381 bp, Mus musculus
taagcttcccagtatggatactgcaagaggaatacatgccttagccatgccccacttactctaatgtctttgcttagtaagtaattgaagagatacttctgtttatgacagtgtgtgctatctctgctcctttccctaggtcttgggcttgctttcaacttgaacccagctctgactatgattggcaagtatttctacaagaagcgaccactggccaacggactggccatggcaggcagccctgtgttcctctctaccctggctccacttaatcaggctttctttgatatttttgactggagaggaagcttcctaattcttgggggcctcctcctaaattgttgtgtagctggatccctgatgagaccaatagggcctgagcaagtcaagctagaaaaactcaagtccaaagaatctctacaggaagctggaaaatctgatgcaaatacagatctcattggaggaagtcccaaaggagaaaagctgtccgtcttccaaacaattaacaaattcctggacttgtcgctgtttacccataggggctttttactgtacctgtctggaaatgtggtcatgttttttggactctttacccctttggtctttcttagtagttatggtaagagtaaggatttttccagtgagaaatcagccttccttctttccattttggcttttgttgatatggtagccagaccgtccatgggacttgcagccaacaccaagtggatcagacctcggatccagtacttttttgctgcttctgttgttgcaaatggagtgtgccatttgcttgcccctttgtctacaacctacgttgggttctgtgtctacgccggagtctttggatttgcctttggttggctcagctctgtattatttgaaacattgatggacctcattggaccccagaggttctccagtgctgtgggcttggtgaccattgtggaatgctgccctgtcctcctagggccaccacttttaggtatagtatgtctccctacatttttgtttctgatccagttataaaactaggtgtgaaaagcatgtctacctttaaagcagagttgagagctgagctttgtaatagtgcacattgcagcagtagtcaggcaggcggaagacgtcctcttccgtggcatcaagtgtaccagccaccgtccttcctaacccctgtgcatcttggactcacaaagcttagggttattttagtagcagttccatagataattctgttcagttactttagtttatgagtcattatataatttgagagcttgggttactaaactttctctttgaatgttttagggttttttttgagggggggtagtgttggtttttttgtttgtttgtttgtttgtttgtttcaaagcaaagt

SEQ ID NO: 28263 - DNA, 1682 bp, Mus musculus
tatgtgccttaagttttagtttttagaactctttagagagccttaacttttaaaaccattctgctgaattcatttgttttaaatgtcattttaaaaggaaaaataacaactagcttgcttgaggtaactaaccttaatcttgttttgttgttgtttgtaatgctttgtcagacattgttactggaacatttatgaatagaggtattggttaaaagtcgcaggtttataaaatactgactaaagtatttttctagcattatagttgcctggcatatccacctgctaggtatatatttaagaaatttgaaacataaaattttgggaacatcttggcagttccagccacagcctgtcacctgctgggcacttctcaaatgcttactacagcctcgtgctgaagtgttatcactaaactgtcacctttgctcctattcagagacactgaaatcaactgcaaaaggttagtattaacatctacaaaacaactctttaacacgtctgatttaatgtatgcagtatttcaagcagcagctgaattcagtgtaggtttccccaaaccttagttacggtatgagaatcttaggtatgtgtgggtttgaggggctctgaggtgttggttcttaggtttgaacccagggccacaagcatgctaagtgcatgctgtaccactgagccacaacccacaggcaccctggaatccttctccttgacccctgaaaccttttctcttggtttttgatagttccatttataccactactagtttagagctgtatgtgggatgattcagtaccgactgaatggatgtgcttttgttttttttacattgtttttcagtatttgcaaaaccacgagggttagagtttggcctcagggaagccaataaagataaaatgggaggaagtttgctgagaacttgtatcatgctttacgattatttgacatagtcttacctccacaccttaactttcatgaccctttcactcacctgaaatgtagaaaaatgggttcagtgtaaggataagaggaaagatggaccagattggaactacagtgttttgggttttttttttttttaacctgatgtcttctgaatagaggcagaaaaaaataagacatatgacactgaattgtactcaatgtgtttaaaataccattgtaattgacagggtgaatatagatttaaaaccttgtgtaagaagctgactttttccaaataaaacatttattttatttttagaaaacagttcttccgcatgtttatttgtgagacatgttatttttgtcttcattcttactaatttttattttattttaacctttctaatattgaatcgtccatttatataccttgactcgtacatatggttcattttatgttgattttcctcctttagttaagacaagcagggaaggattttaagaccgcatcttgagctgagatcccctgatgctgttagccttaagacactgtgggaaccaccttgcaatataaagtgttgtggtgagaatgtggtgagaatttagagaggaaaccttgaaagtttacacagacatcaactggtttggactcttatcttctgtgaagccatgtcatacttctgtgaacctttctcttctataaaaatgaaagtctctgttgatggtggaattttgagctctgtgtgtgtgcgagcgcgcga

SEQ ID NO: 28264 - DNA, 1922 bp, Mus musculus
tgagaactcccactctgttcctttgcagcacagtgccgtttgctttgaacagtttccaggccccccaccctataactggctctgtcccacagaccttcacagcaggccttctgccctcttccgggctctgcgattctcttactcatctccaagtacccagtgtcttgtctgtacctccctggcagctttgtcccctagagcaggtctgtcaccgtggttcctcctaggcctatctgatctttaaagccctgtgtctgcactctaggtgggctctgtggaagagttccaaggccaagaacgcagcgtcatcctcatctccaccgtccgaagcagccagagctttgtacagctggatctagactttaacctcggtttccttaagaaccccaaggttggtaggcttgtgggtggcgtgagtccttccatggggcctgtccctttgatgacatcaccgcttcctccatccagaggttcaatgttgctgtgacccgagccaaggctttgctcatcgtagtgggcaaccccctcctcctaggccacgacccagactggaaaacgtaagtgttcccagcccccatagttgctcttagccaccgtgagccccagcctggggcaggtttgtcctcgacaagcactggcttacttctcccttagtcctcagagctgttggtgttaacaatgcccaccctgtattaataagtgaggtggagcaactctgcctcagatgtgacagtgccgagcagaggccgccagactcggctccttggcagttccccatgcatgccgatgttctgaaccccacaggttcctggagttctgtaaagaaaacgggggatataccgggtgcccctttcctgccaaactggacctgcagcagggacaggacttgctccaaggtctgagcaaactcagcccctctacctcaggtatggatgggccctgctgggccagggaggtgaagtgtgggaagccggcaggataaccaaggatgtctcttttttttctcccagggccccgccgtcaccagaatctcccccaggagcgggagggtgaagggggcctgcccttacaagtggagccagagtggagaaatgagctctgaggccacagccgcccgccttctcacaccagccaagccttattgctgcctatccctgacccagaacccagctctcctgtccctgcaagagatgggaaggccgggaagtttacagcccagaccattccgccccttcctctgctagggaagacaacccaagctgctaaaactcggaggaagggggaggaagaaagcttttttttttttttaaaccctctcctttgcagtgctggggatcgaacccagagcctcaaatatgctaggcaagcactctgcccctgagctgctttaagaaaaacaaaatgctgttctatgcaaaagcctcttgcgtgtgtctcatcagcctggtcttgcttcctgtgcccccaagatgaccctccaggagggtttctgcctagagccacgccccttcatagctgcttagcggggaggaaacccgatggacagggaaccaacccacaggcatctatgtttagccaatggtccagaccactcccctcacccacccaggcagtctgccaaacatgacctcatcctgtactagactccaccctgtcccctgctgcctccgcccccagccctgcctcagcagacaggggcccagcctagccagcaacttggaaatgaagaggaaaagatgggactccaggctcacagccaaggtaggccagtaaagacaggaagctgccacacacggtgcaacctttgacctttattcatgtccccaccaagttaagtcaaataacaaggctactacccaaagcagaaaccccagtccctaccctagactcctcctgtgagccaaaaatatataaagtgctgg

SEQ ID NO: 28265 - DNA, 1183 bp, Mus musculus
aaaggcaggcttgagatgggtgggtaaaagaacagctatacatatctagcaacccaagttgggtttccccaaccagtgagcccacttgaaaggcgagaactgactctacaaggttgtcctctgacctccacacccatggcatagcatgactgttcacaccactcagtgacaattgcagaagttctgtagatgcctctgggtcgatacttaatagttttgaggtgtaacataattaaagagtgatgacaatagatgataatctgtttgctggactatctttgtttggtaaacttaaacccgagaatggatcctaatttctaagtttgttaaaaggaatttaaaaggctgctgagtgagagccctagcctttggcttggctctctgtggtttgcagcacctgacagcaaacactgatggctgttactgggcatggctgaagggccagcgactagggtggggagcacttgaagcagagctccctacgaggtcttggatcttgctctctttcctcctgccacctaggtctcaccccaccatcctggacatccctaaccagctgtactacgacggagagctgcaggcctgcgcagatgtggtggatcgagaacggttctgccgctgggaggggctgcctcagcaggtgaggcctagcaggcagagcacagtctggaacccctgattctctagctgggttggaggattgggaggcagggagatgagcctgaaggtttcctcttatttcatggcgtccagggcttccccatcattttccatggtgtaatgggcaaagatgagagagaaggcaatagcccatccttcttcaaccctgaagaggctgctacagtgacgtcatacctgaaacaactcctggccccttcctccaagaagggtaaagcccgcctgagcccccgaaatgtgggcgtcatctccccgtaccggaagcaggtcaggccctcagtccaagcctaggacttccctctttgcccgccagcaccctggccagcagcctgcctctgccttcctcttgtgtgagggggatggcctaagagaagggcacctattcctccctccaggtagaaaaaatccgttactgcatcacaaaacttgaccgagaacttcgcggactggatgacatcaaagatttgaaggtaacctaactctcgatcatactccccttatctag

SEQ ID NO: 28266 - DNA, 2143 bp, Mus musculus
gaacctcaaccctcacaaatgctagacagtacccttagctctgagcttcatagatctcaatagttgaagaaagcaaagtacgggcggggtggcccagctgatgcacagccccgttgtacctacccatcgatcaatttgctctacctgtgctgcctttgcccaagagatgcccactcattcctcagagacctgcccctgccccagacagtcctcagtgccctggcttgggccagtgagctgctccaggcagtcagcaagtaggcaccatcaccgtgctggaacgtatgggtgctccctgagtgcttctcaaggcctggtcagatagcttggaacccagctgcaagtgcagtgcctggcacttaccatgccttcgtaagtgtgtgtgcagtggctgacactgcactccgggtgctgagccgtgaggctgtcctgctgaccacttttcctgtcttcacctctctaggcacaaagccaggcttttgatctcgggagaaggatcctttcccttcctgcttgggttccacctgcaccctttgacttccggtggaaactgctgtccgatccgctaccttgcccacaccctggacatctctgctctctctggcccctttctcagccctccccacagtctgggccctggccgttcctgtgagccgtcttttcagctttccctgggccttagctcttctcactgtactttttattttttatttttaatatcccaaaaatagttcccatctaaaaaaaaatctgtttttctctctgtcttccctcactcttcccagccaacagcccaatattggacttttctccacagtgctctttaagccgattattttgtgttggaaagctccaatgcctttgctttaagttgttaaagattcctaccacccctagccagagtctctgccatgagtcccatcctgcctcgaagcagggctgctgtgtcccttcataaagcagccctcgggccttccccagcatcgtctccacagccaccctgccttccctcacttcccagtatcctctgcttctggcagctatgggacccctgcccctggcttctcctccatgctgtatggaatgaagatcgcaaatctggccttcgtcaccaagactcgggtcaggttcttcaaactagaccgctgggctgatgtgcagttaccagaaaagaggcgaataaagccagggtcgaacatcagcaaacaacacagatcactgttggccaggatctttcacgacaggtgtgtggggggcagggagggcaagggaatggggtatctggtttaaaacacagtggctttccttgggctagggtagacccccaccccctcaagggaggaagagaggcagggaattaatcctaagccttcctcagggcaatttcagtccaaggttccccctcaccattccccctacttgcactctccccagggctgagtaccttcatgggaagcatggggtagacgtggaggtccaggggccccatgaagcccgagacgggcaactccttatccacctggatttgaaccgcaaggaggtactaaccctacggcttcggaacggcggaagcaaacctgtcaccctcactcacctattcccactgtgctggacgccccagtttgtcttctaccatggagaacaggacctgccctgcccactgggccccggtgagtggtctctgtccagcaggctcctgacttgtgatgggggtgctgggttaggttgctccttcactcagctaactttttccaggtgaaagctatgaactccacatctactgtaagaccagcattgtgggttacttcccagccactgtcctctgggaactcctgggacccggggagtcgggagcagaaggagcagaaactttctacattgcccgattcctggcggctgtcgcccacagtcccctggctgcccagttgaaacccacaactcccttcaaacgcccccctcggctcaccagaaactctgtgttgaccaaccggatcgaggaaggagagaggcccgaccggtaactagataggactgcttgggcacttgggaagactgagcaaggagagacagaacccccttccccatcttcaggtcactccctcctctgggtctcatccctttcatatcagaggagcaaggtgcg

SEQ ID NO: 28267 - DNA, 1192 bp, Mus musculus
catagtcaggaaagccggctgaggagcactgatgggagtggctggaattccttcggatgggtgactggactcagcatgggtgatcagtcttactggctgctgtcacaaaagtgagaaatggccaagtcagacacctgggtacttagcacagcacctcctaagtccttggagcagggagctgctggtagaagaggtgttgctgccttgcactgtaactacacttagtgtgacatacctaagggttagctaggtttgtgcaacatggagttgttagtagttggatctgtgtttggtagccccgcctatggaagggattgacccggcaaggaggagatagtcaaacaaagccagaagtacagtcaacagtaacagaacctagaaaaataacaacacggatatgaccaggcaggtgttagaggcaatacaactgacaagcttggtaaagtttatgtgtaatgtaatctcgtcacttgggaatctattcaagttcaaggctagtcagagctacacagtgagaccctgtcagctatgtaactgaccaaggaaataaaattttaaataaaatactttatttaaaaaaaaatgttaaactagccaggcatgtgtcacttgcttggtggaggaaggaggatcaggactttgaagctagcctgagctacaagagacctaatctcaaaatattttcttaaaaacaatgtaaaaagagccctttgatcccagcactcaggaggcagaggcaggcagatttctgagttcgaggccagcctggtctacaaagtgagttccaggacatccagagatacacagagaaaccctgtctcgaaaaaagcaaacaaacaaacaaacaaaaacaatgtaaaaaatataaatggttgagttgttccagtgttagggactagggaaagggcagtctgaaactcatactaatgagaacataaatttgcacagctggctaggaggcaattttgaatattctgttgtgcagggtatggtgacatatacctacaaatccagtatttgagaggatgagacagtaggatcctgagttagaggccagtttctctctccaaatggaaatttcctttttacctaagttgtacaatttttttggttttggggtgtgtcttagtcagggtttctattcttgcacaaacatcatgaccaagaggcaagttggggaggaaagggttta

SEQ ID NO: 28268 - DNA, 1099 bp, Mus musculus
tttgggggggggggaagctggtaggttacccatgttccagtgggtggcaccccagaggtcttggtggatgatgttttagggcagggagcagtctggggagagggctcagctgctaaggatacttactgccaagcctgagaacctgagttcaatcgctgggatctccttggtggaaggagagaaccaactcccaagagttgccctcttgcacacctctgctgccacgctgcacatacaataaagaaaagtgagtgtttaaacaaaattaagtaaagaaggcatatactggagaggaaggtgtgttggtagaaaattcagggaggtggagtagggggtgggtgtgatcaaaatatattgtacacatgtatgaaattctcaaagaacaaattatattcatgaaaagctggagagaaggctccgggattgagagagcacttgttgctctcacagaagacctgcattcaattcccaggacctgtagggcagctcacaactatctgtaactccagttctgggacctttctgtaccctctcctggtctctgcaggcaccgagcacaccaggactggtacacagacatacacagagcacaaaacacctgttcacatgaaataaaaataaatcttttttttttttaaatcaaaagcaagcagagagatggctcagtggttaagagcactgactactcttccagaggtcctaagttcaattcccagcaaccacatggtgactcacaatggtctgtaatgagatctggtgtcctcttctggcatgcaggtgtacgtgcagacagaatagtgtatacataataagtaagcctttttttttttttttttttctcgagacagggtttctctgtgtagtcctggctgtcctggaactcactttgtagatcaggctagcctcgaactcagaaatccgcctgcctctgcctcccaagtgctaggattaaaggcgtgcgccaccacacccggcaagtaactcttttttggcaagtaactctttttttttttttttttttttaaacaaaaacaaaaacaaatcaacaaaataaaatagactgacataataaaggttttagaaacaaaatacgggccag

SEQ ID NO: 28269 - DNA, 1149 bp, Mus musculus
tatagttggtgatatataatatttaaaagcttgctgacagtgaacttttatagctatcttttatccctgtgggtattacatgtatattttttgatttctgaaagccacatacttactgatgagacttgcacatcagtatgtggtatgcagctattctaaagtcaggtcctatgtaagagtcagtggaaagtgattgggcagtctgcccctcacagtgtgcaacacttaaatgcttccacagaagacatgcaacaaggaactggaggctccttttctagtttttcaccacttcataacatatggtctatgcacgagaaacaccaccctcttgtaggagcatgttaagaaaggatcggctcaggcttcgctgcagagtctgaatcagagtctgagtcctaacaagatccccagcttatcctgcatgcacttttaaagctcaagaagcctccttccaccaccaccaccagttattctggccaccaatgcgaggaattggaacaccaggatagcatgctgccttatcgggctggagaagtggctgccctgcagagtgcttatgagcaagactctggaaccaaactgctttgctctgatcccagctctgacaccgcctatgcaacctcatgtaagttatgcaatcttctctagtcttcgttgtaaagtaagaaatagtgctacataggtgttgttggggtaaatgtgtttaacgtatatcaactgtgtagaactattcctccacagtaagaagtaagtggatattattccctctgattgcaaatgatgttaccactaaagagagcctacctcttatgaggataacaagtgcaaaatgagttttcccacagtaattggaatataatgatagctggatgtcatttaaataataagaatatacaactgatacatcatgtgtgtgtgaaccacaaaaagaggggaaaatgtttccaattcttggttctggcaaactgttgtttagaacagaacattttggcaagttataaaccgtcagattatgacaatataaagtaaaagctgatgaaatgtatttgtcctgcttcttaataaggcaaagccacataagaaaacatgcaaattattattatttctccattttcctttcccatttctgctccctcttccccttctttt

SEQ ID NO: 28270 - DNA, 2425 bp, Mus musculus
ccctttgggacagactaccgaaatctggccagcactgccagcccaagaggtgacaccagccattcacccactccagggaaagtgtccagccctctgagccccctctctccaggaatcaagtccccaaccatccccagagctgagagaggaaaccctccaccaatcccgcccaaaaagcctggcctcaccccttcgcagtctgccaccactccagtaaccaagactcattcccaggcatcctccctggccgccacagaagacctcgccagcagctgctcccccagtgccgtggtggccaatggcaaagatgttgagatacttttgcctaccagcagctagtccctagggctgagtctccacatttgacattccatcagactcgggccaagagctcagcgttaaaccctggagtcaaatcatgttatttatttgatagtagctacagccatctgtataatacattcagtgtatttacctttttgtatttttttaagtagaaattgaatactttggatttttatgactcacctctttgtactaagctagaaggggacctcatagacatagcgcatctcaagctctgcacttgccagcgtgctgcgacgaggcggctgactggggaccaggcggtgctgctgccagtcggggagctagaattcattactcagcactcatttcaaattatgcagaagcggttcgtgcagatttttattccagatgaacatgttttaaaagtgcctgaaatcgcctgccacgggaatgtgattctgcggcagaaacaaaagacagagcatttcttgcagcaaatgagatcctctgtgaatctgaatgtcaaaaaaccaacactgcttttaatcctctctgactgtttaatgccagctttgtgttctgaaccgaggtttgcataagtagagtggaaatccttctgaagggcgggaactctgtcaggctgagctctgtaaagccctcaagaaaccctccagaacacttagcagttggggtgctgattttcttgtgcttttgaaaacttaagtcattctccgtttcctgcatcacttcttgagtagtgaagtcacgtctccattcaaatccaccctcaagcatcggccatgggaacttctgattctggttgcttttacttgaataggaaatgacataatgaactctttattctgtgatcaaaaagcaataacttaaaagtcagtctttgtaatactgtaagtcagaattatacagattttaccaaattgttacattcactctccatgctgccagcacttctatctatggaaccaaatgggcgtatatctgtatctgtatagtacacaccccttttacatgttcagcattctcacactcaagcacataagtattagtgcaattgtatctctggagcttgcagtgtagcataaaggacaaagtagaatcaatcgcatgttaagattacctaccaaagcaattagatgtgacttggagccagtcagtcaacaaagaaatccatttgacaaggaagtggacaatcccaaactaagctcacatcatcagcatcataggaaagcccattaaatcgtcctagtgccacagaactcagctagccatgtgagtgagtgagacagcacagcccctcaagtgctatccactcagccatagcatcctagccccgtgtaatggggccacccctttgagccccagctcctgtcatgcaaaaattgcagatggaggttaccaattctctaaacgttcatggaattgagattcccacaagaagattctcattctgattttaaatgttttttaaatgctgctgattagacaaacatggctgcaaatgactttagcttgcaggctaccaagctgcagcctctccctccctagaacctgtgctgtttcccttgtagtgagtttgtacagacagaaacccccaggcttctccactgtgtcagctacatctgaccaagtccacagagcaggacagccttgctcttggcaagcagaacccccgacacaccagctcaggacactggttacacagttttttatccagagtaagagagaggaaggccttggtgtctttacataaattgttctggccagcatctacccagaagcccctggcctactgtaaccgtttattgggaaggagaatgggtgatcattggaaacacctgatcatgtttgcaaaaccaaaggattcagtgggcccattcagatgagtcacaaggaattagaaattgattttcttcttgaaccacagagctgaaaacaaaaagtctccctaataatttagctaatagctcttagttatatttttattaaccctttgagtcagtgggcaagaggcaggtgattaaaatcttggtgggcaagtcaacaacagggtatactgttgactctccagcttacagtttaaatggttaaggtaaat

SEQ ID NO: 28271 - DNA, 1177 bp, Mus musculus
ccagagcaaaggtaataagtcttacttggaaggctcctcagacactcagttgaaagacactgaatgtactcctgtgggtggccctctctctctggaacaagttcagaatggaaatgataccccgactcaagtggagtatcaagaagcccctgaaacccaggtaaaggcaaggcataaagaaggcgctaaccaaaggtctaagcaaagtcggagaaacccagcacggcgttcttcttaccgagtacagtcagaaccccaggaagagagttggtatgactgtcacagggaaacaactgcaagtttttctgatacttaccaggattatgaggagtactggagagcgtattacagggcatggcaagagtattatgctgctgcttcccattcatactattggaatgctcagagacatccaagctggatggctgcctatcatatgaatacagtttatctacaagagatgatgcgtggtaaccaatgaggttagcatgtgcttcagactagtgactgtcaacggataattggatatgcattcttcacctagaacaagtggggtttggtggcattttggaggaacttgagaggacttgaggctttctactgggacacaattatttttcagattatttttagaacttggatctaaagacccccaaggtgccacttcatgtaggctgttcccaaaagaaatctttaagaaggtgacttatgccactccttacttaaaaagcaaaataaaaacagttaaaatttgaatctaatgtcagtttattctgtcgagtttcttacaaaaggattgcactacattttctttttaatatgtatagagcattctacctgtatgtatacctgcaggccgggagatggcaccagatctcattatagagagttacgaatcaccatatggttgctgggaattgaagtttgctctagaagaggtgccagtgctcttaacctctgagctatctctccaggacttatattacatttctatattgctgcattctttttttttttttttttttttttttggtttttcgagacagggtttctctgtatagccctggctgttctggacctcactttgtagaccaggctggcctcgaactcagaaatccgtctgcctctgcctctgcctcccgagtgttgggattaaaggcgtgcgccaccacgccca

SEQ ID NO: 28272 - DNA, 1195 bp, Mus musculus
tcccattcctctcacctctgagagccccgcctccaaatcttccccctccctaaggcatcaagtttctacaggattaggcacatcctctcccactgaggccagaaaaggcagttctctgctatatatgagggggccaggggatggggtgatgtggagttggttcagaccatcccaggggttcaggttagttgacactgttggtcttcctgtggggttgccattcctttcagttccttcagtctttcccctaactcttccataggggtccccagacctcagtccagtgcttggctgtatctacatctgtctcagtcagctgctgggagagcctctcagaggacagccatgctaagctcctgtctgcaagtccagtatagcatcagtaatagtgtcagggtatggttcccactcatgagatggatcccaagttggacctgtcactggtcagccatttgttcactctttgctccacttttgtccctgcatttcttttaggaacagttttgggtcagaaaatttgaaggtgggttggtgacctcatccctccacaggaggccctgtctaattactggaagtggtctcttgaggttccatatccccactgttaggcattttggctaagtatccaacatatataaagaactcaagaagttagactcaaaaagccaaataactcaattaaaaaatggggtacagagctaaacagaattctcaacagagaaatcttgaatggctgagaagtacttaaagaaatgttcagcatccttagacatcagggaaatgtaaataaaaatgaccccgagattcaactttataccaatcagaatggttaagagcactgactgctttcccagaggtcctgaattcaattcccagcaaccacgtggtggttcacaaccatctgtaatgggatctgatgccctcttttggtgtgtctgaagatagtgacagtgcacttacaaatataaaatacataaatataaaaacaaaaaaactcaagtgacagcacatgctggggagagtgtggagaaaggggaacaaacactcctccatagctggtcgacttgcaagctggtataaccactgttctatcagtggttcctggaagttcctcaagaaatagtttctacctgaacacccagctatactgctcctggccacatacccaaaagatgatacaccataccaaggacgt

SEQ ID NO: 28273 - DNA, 1160 bp, Mus musculus
aaggctttgtttcagcatttctggttctggaatctagatggcttgatttgatctgagccagccaaaactgtgccatctgtaaagggagggagaacagctgagttcccagaaagcacctagcactgtgtagcatgtaccagaggttccagggagtggccgcagagctcagtgtacaagggtcttggcaccagacagctctcatttcagatggtcaatagcaataacttgtacaaagcatttatcttattattctagtacatttaaaattgtgaacataaacttactttccctaaatgttctttttcaaataaagttaatcacttgtgaaaagttacagcatagttcaagtattttatgttcatttcagtgttgtagtgaaaagtactgcattacttaatgtagtttttaatgtagtaaatactagcattaaatagaaatatttaaccttttatatgttaatgagaggaggtcaaagcatcctttgtgtatgtctgtgcgtgtacatatcacaagtagtaatttttatgtgccttttagaatttcatatacttaatttacattttgagtcttttgtagtagcagttatggttacacagtgaggggttttggccttccttccctgggcacacggttttgagatgactggttaatttgtttcaaagttaaatgatcctaatgagtattaaacatataaggttagctttattcattattatgttctgatcagccaagcagttcagcaaagaactgtgccgtgctctcatttcttcttgaaagtaggcctttcagagtgaggggtccgatgtgcactcacacatgcaccaatataaaaagggaagttgtgtgattactaacgtaaaactaaaataagaaatggtgtactttcataagaggaataaaaatagtccttttagtattattttcagaagtacctgatgtacacctgggaaattaactgttttatgaaataaactttagttattatacaagtgagtgactttttaaaagagtacttaacttacttagagcatatcaattttctgtagataaatctgaaagaatctttttgtaagtcactctaatttttgccagtttttttttttttagcttatttagttcatattgataggatgaacaaaacttaaagcatgtaaatcatg

SEQ ID NO: 28274 - DNA, 2103 bp, Mus musculus
ctgatgatgccaagtagccttagtttctgttgcttgtgttcttcgcttacctctcaccatctggttagctctggtgttagttggtcttgttgtctctgactggagcttgtctctcctgtgggcctataagcctatgatcttaagtgtgtcagcactcctgaggagaccagctctatctgggcgggattcagatacagagagctgtgggtgcagctcaggggtgcagatgcagaccggaaggatcctgttcccagttgcttcattgttcctgtgcactgtgtgctcctggcacatccctctttggacagttattggagcaagtcgatgtctcacctgtaggcctaggtgtgagagtactcctgggagaccagctctgtccgggcgggattttgtaacagtatttcttagttaaatgtaaattatttcttaattctccccctcacccccagaataacattgccctggccttggaggtcacttaccgggaacggctacataaagcatataaggaggtaaagaatcgcctggactaccacatctctgtacagaacatgatgcgtcgcaaggaggaagaacacatgatagactgggtagaaaagcatgtggtgaagagcatttctgtacagcaggtacattatgaccttttgtatcttctctggttggacctgaaggttagcgttcacgtgctgtttagtatgtgtgtctgcgcgcacacagaatgcaggtacccatggaggccagaatcctcaaatcctatggagctggagttacagacagcaatgagccacctgatgtgggtactgagaaccatactcaggtcctctgaaagagtaggaagtgagtgcccatgcctcctgagccatctctccagccccagttgttttcattattaatatttctgtattgctggtgtttgttggctggtcttttttaaggagctatttttacccaaactaacaggtaaaagtagttataaacatttctggccttaagttttttgtaggttttgctcataaaagctgtggaccaggaaattttagctcacaggatttatttctatcctggaactcactcccaggatttatttctaaaataaattgcatctatccagtgtactataattcgtttttcttgtgattagtaagcttttctatattaagcaataatcttgatgttctagtaggaagtactttagaattatgtcaccctttcatgttcttgagagaactatatttctctttccttattacaggaaaaggagaccattgccaagtgcattgaagatctaaagctgcttgcaaagaaggctcaagctcagccaattatgtgaatatgtctttctcagttgtgatagccagagagagttaaatgggaactagtatatgtgaagaactctttctgtattgctatctattgaaataaaatgatcaaggtccacttagtggcttaaccctattggccagtaaggtatttctgatccttgctctgtatgcggagttatctgatcataatttgaataagcaacttgcagcaacttgctgcccaactgaaattaccaagttataatttaaacttgtaattaactaaagcatcttgcaataaaatgtttgaaacagaatttataagtttcatactctgaaatagcacttctttattatgtataagaattacatgatttaacagctggagataacttagtaaagggtttgctgtgcattcatgagaatcagacttcaaatgcccagaaccacgtaaaagctgggtacatcaagcatctgtaatcccagaagaggagagacagagttcccagaagcttctggaccaggatgctgtacacagcagcaaacaagaagcaagggccagcctggtctacagagtgagttccaggatagccagagctatatagagaaaccctgtctcaaaaaaaaacaaaaaacaaaacaacaaaaaaaagcaagacaaggcaagataaacaccaaaggtggtcttctggcctccacacatgaatatacttcacatgtatgtacatatatggtgaaaatgttttaaatgtcattgaactaattaataccttgtttatgagatgttccaggagtaaagagc

SEQ ID NO: 28275 - DNA, 1148 bp, Mus musculus
gctcatgagttcacatcccagcaaccacatggtggtttacaaccatttgtaattggatcagatggcctcttctggtttgtcagtgacagtgtgatcatatatataatataaatcttagaagtatttcaagacattttatgtaagcaaatatttactagtgtctgcatacctgggaagagacatcgtcactgaactgttatctaaataaggctctctgggaaccgattgcttaggacctgctttctggaagcactagaattgattttacatcttatttccctatctccaggagttttcctcataggcatctggcctgttaggaaagcagtagggtaacaaaaccaaacggcctggaagtcagctaagccgttagtgacgtggactttgcttttacagttggctcagtagcaattcttgcttgagtcctaggcaggagttcctgccttggtacaacccaggctcatgcttcccttgtctgcacctcaccccgctctgtccccaacaggtgctgttgaattgtgggagctagatgagaacgagacacttatagtcagcaagttctgcaagtatgagcatgatgacattgtgtctactgtcactgtcctgagctctggcacacaagctgtcagtggtagcaaagactgctggtgagtccctgttttcattatttctatatctagacttcctgtggatatcccatctatcctgttaatttcattatgtaaaatgctttgggctgtttttagtctagtgagtaatggcatgtctgtttcctaagagacttggtagtgcattgtaaataaaacagcaggagtctaggaaacagaagtgggacatgttgtatgggtatattttaatgttgatactgcaagttaatattcctattttttttttgcattgtagcatcaaaatttgggacctggctcagcaggtatcactgaattcataccgaggtaagtgttgagtcctgcctatagttatcttttctttcccctttgggatatttgaacagtgtttgggtaacagtagtagccagtctgggttcttttgattggtctttccttaccccaaaactacagtcaggttccattatctgcttcctgtccatttctttgtgctcccgtttcggttgatagtctcacagcctt

SEQ ID NO: 28276 - DNA, 2788 bp, Mus musculus
ggctagtgttccagcttgatttagggagccactttggagaagtggaacttggtgtagggtaaaaaaaggcactggatgggagacctgggtatgtatccctctgccataatttcccattgactgtggacattattgcttccttgttctgtccactgtgtcttcacctaagaaagtagactgggttggataatctaacacccactggcctggtaatggggctgtatagatggtaaaatgtgtcctgagtatgttactaggttttctttccaagtagtttctccctatctcacaccctgtttttcccccttttgttctaggtttagaagtcgagcccacagagactttgtgagagatgctacgtggtctccactcaatcactcccttcttaccacagttggctgggaccatcaggtcatccaccatgttgtgcccttagagcctctcccaaaccctggacctgacagtgttgtggagtagaatggatttcagaaaaaccaaaacaagccctccgtctgtaagcgactactcgattgcccctgccttccatgtgtgagagcacaggagccttgtagagcatgtttcctccctagccccgtgcagtaacaggcagattctcagcctgagggaggctgcatcccatagtgactcagaggaagaaacttcctctgtaaatggatgtatgtgagtacacgtgtgagtgcggtatatagtttggagtggagaaaattattcttcagctttcccaaagcaatgctctttacccctgacaaagtgaccagaggattttaatgcttcccatgtctgggaattggcgatgttagggatatggaatgtgggtatccctagatttttgggaatacttcatactactcagaggtgcgtaacttatttttatatagagtttaattcactattatgggaattacttccatatacaaaagtctagcccactgtaccttgagaagacaaaacagttttgtacaagtccctgttatactgagtcaaatccattttctgggtgaataaatttggccctgcagtgtagctcttgttcaccctttccttccttggtgttgtgtgtgagagatgagtgttttcctgtcctagatttcacagataagttgtagggatgatggaccacttaaaagtgtttcagtgaagtgggaaaattgacatggattgttacagagaaatctgtcatttttcccacctaaaaattgatctgggtaccttcctctggagagctgaagtctgaatgtatttttggactcctaagatttgagatccagcatcagggaaactgtcggaaatactaaaaggtgaaataaagacttttatccttgattttccctccccagagctgttacttattacctgcttcgcttaggtgaatcaccagtgtcagacttagctgcccactgtctttgtaatctactgtattccactccattagagactgtggatctgtaactgatcttattggagctttccaacttgggtttaggaaaagcacataaaatgggcgccctgaaggaatgtgatcgtcccttctagtcttgccagtcatgagcctctgttgtaattaccctcgagcaaaacgcttgagagtttgcagtcaaggtcacctggggttgggactgtggaagcaaggacttgcattgttactaaattcagggaaggcataagataggtaggatcagtttctgcttcttagagataaagcttgtgctttgtgtcacttaggtaaggacaggtagtgcatttacatggcctgctttgggggctaagactaatagaggaaaagcctgaaagaaatgagtaaatacgggttgtttccttttaggtctgtattggtaaaagtaatccacattgattaattcgtgccacagatgtccaacttagtcaaagccacagtaaatgacaggcataattctacatagtatattatgatatacaaggtaatatacctcaaatcagatcaggaatatgagttgtagcaagtcattatctcgagaatagttccagcactgcaagcctcagtgaggtaacactagggttattttgatcgttgaaaagcatttagtttttttcacgttagtgttaactgttcaaatgtgtgaacgagagtgaacacatttccttagctttgtttttcttacttagcctcactactattgaactgctgacctctggccagccaaggtctgagacttgttcctagagtggtgggtgctcgggagaagaaacattgaagatctgtgtagtctcgggtgatgacaggtgttactagttttctaggtatctcactctgtagcacagctggcccctggtgctctagtgaagagctagctatatggatgtttcttgtggctcactgtcatggcttcaaaaatacccagtgagggccaggagattgttcagtgggtaaaagtgttagccatcaagcctgggactgacatggcaaaaggactcttgactgcaagttgtctccatgtatgcacatgaataaaaaagtacccaaactcaaatctgcttgggggctctatctttttgcaatacataaggaaggacaggatattcagaaagaggccttctaaaagtcatcaacttcacacagcatcgtaacattgctgtttttagaatatacagctccgattttaaaaaggtattgtatgtggacagtgcataatgtcttgtattttctttgcgttttggtagttgtttggtttagctttaagcccacgaagtaaatgtgaatagaaaaagacatttttaatgtctgtgtatt

SEQ ID NO: 28277 - DNA, 1155 bp, Mus musculus
acacttttttcacctccggccaaaagccattgggtaaaccaaggagaaaatcttctcaagtctgggatgggggatgggactccagatttttgaaagttgtccaaagttcctcagggaggctgagactagtttataaaagaagcataaaagtcttccagagacgggggagctctttctggaccacaaatggcagtgctggagctgaagatagtgctccatgctagatagtgctccatgatagagtgcctgcttaacgtgggtacctgggtttagtccatcttagcaaacccactgcagtccttagtaaatccaggctgctctgtgcccctttgtgccctctgactcagtagtatgattaatttggggtttcaggccccattttaatcgcttttttgaacccgattactttaactttccatgaagatatatacttacagtaattttaatgaaactttttcttactgaattttgggaataattaaggctgagtcctagaaaattacccgaataattcaacattccagtccaatttccttccttagctccaccttccacattaaaaaaaaaaaaagtcaacaaaatagtgcctttgatctcctacaccaacattccaggttttaatccagagtgtattttaagcccaagtatggtttctttgtttgatctggaaatctgcacctttgttctgttttttaaacatgggcttctcatcctcttaaagcccatctctaatttttcttattaaaattcttaaagaaggatggcttagtttgggagaacgctccgtgaacgcaaccatggaaacatgatgcagatatgggtgttggtgggaaagatcaaagaaacagtcagcagaaggcaaaacacagaggaagagataattatatactccagaaatgtttttagtgaccatccatgggactgttttcaaggtctttggtggcaggattgatactcttgaaacgttgagggctagtgagtaatgctggtttggatagaagctcaacgttgcattttaagtcttgaaatcctgaacaagctaacctctttgaatttgtttcgaaagctataaaatgttattaatactattttacaagattgtttaggatcaagaatatttcttactgcagtgtatggtagctcgcacttacagtc

SEQ ID NO: 28278 - DNA, 1194 bp, Mus musculus
tgattgtagtcctcagaaggtcagactgtttgcgtttccatctttcagccagtggtacaaaaaaaagggaaactgaagagaggatatagcaggtgccagagaaatagaaagagcctgtgtaagtctgtgtgtaatcatatatccagcctgcaaggtaggaatgatttctgttaatgaagtgatccctacttttgttactctcaaacaaatcttaagactttgaaggaaaatgtctcctgttctcagtccatattgtgagccattggacttaaatagggcttctcacctgtcttgaaactggatcattttatctgaatagaaacttacattattaaatacaaaagtcattgtggtctccaaaaacatgtcttagggtagaagaaactggagaaaattagggacacagcacttcactttatggtgattattagagactgctgttccttcttataaggaaagtaaccgtaaataagtcgttttgtttcaaagaaaaaaagagactgaacctttactgagccctcaaagtttatagttttagtggaaagtagatagtaaccacttaaaatatctatttggtaaattctataaaggagtgggggctgtgatcacatgagaaagaactgcttgataaatgtgctaaaccaaaaagcaaaggagttcttcctgaaaaactgcctctgagctatattcctaactggatgctctttaaaataagaacaagagaagccttgaaatcttttggtcaatggcatctattagaacttaagtaaaacatcttcttaaaagtgtttgtttcactgtgcgatagcaagaaatcaatatttaaatgtccatataaaaagtctatactcgccaggcctggtggtgaacgcctttaatcccagcactcaggaggcagaggcgggtggatttctgagatcaaggccagcctggtctacaaagtgagttccaggacagccagggctacacagagaaaccctgtctcaaaaaacaaacaaacaaacaaaaagtctgtactctgaaaacatcttagtgttataaagataatgatatgtatgcttgtttggttctgggattgcagatgatattactggtgaagagaggggtggaaacactctctgcttacagggtttttttgtttggttatgttttgttgttattgttggttttttttgttttggtttttttttattt

SEQ ID NO: 28279 - DNA, 2608 bp, Mus musculus
tgtttccaatcttattagccatcagaatcccacattggatattcttttaaaattgttaaaattttattttatgcatatgggtgttttgcctgcatgtatgtctgcatacaacatgctggctgctctccagaggacccaggtttggttcccagcacctagtcccttgggatccaaaatcctccgctggcctccctgaatgttcattttaacagccccccccccccccccccgcttttttttcttctttttaaaaatttttttaatttagtactttagtgtaactgctttttatcttttcagaaactcaattaaaatgaatagaaagaaaatttcttaagtatgctatttatgcgttaaatatactggtaaaaataagattaagacatgatcacagcttcaaagtttattgaaagttaagcaatcatttagcttctagcaaatggttctacttaattgtggactagtgtttcctgtaaagaatttttcatacagaaacctaaatttttaatgtgtacttgtacaccatcaaactaaaggtagttttcctttcagaattaacctattaaattgtacatcctctggcttctataagcttttgttatatcttgaaggtggtaacctttttgtgactgactgactcacttagatcatttgatacatagcagtaaaaggtgtttttcagagtcatagtttatttaaaaattatgttatgggcagatgttcactgactttttctttaatcttttttttttttattaagttagctctttttagctgataaaattgcccattttgcaggcacagcttgaactgcagtttgtatccacataagaaccatttatcaaaacttctgttgaaatggaattatgagatcttctattgaagagggccttaatgacttaagtgaaaaaaaaaatagagacaatttctgaacttttttcccctcttgtctttgttacaaagtctggttttgaaatagaagtaaggtatgagaacaagaaccagagttagccttgttaattttctgattggggtgatgcccttaacagtgggaaatgatttcaggcaactacagtacgtggttaagcttgatgaagagttcttatgtgtataccttgaacagaattgaaaagtatgagtcctgaagtattttctgactgttaagcaaattgtgtgttttcttaacagtaacacctgctgtctatggtaacataggtaaaggtggtttgtaaatggctttgtagttttaacccctgactacctagtaatggagtagtccttattactccatataaataacaaaaataagcgtagaggggttaaaagtttgtctaaactccatctttctgttccacttttttagttatatttagaaggtattaattataaacctgcattttcctgaacatttggccatgcattagtcaggttttttttttttttttttttttttttttttttttaggataaacaatattttcagtcctctaatccttgataacagtcttttaaaaagtcaaaccctattgttttatttgttatttgtgtgttcatatagtaaatttatttcaaggtttgtgccagtggatattattggtgctttttgaagttaaagtggactatccaggaaggtcttgttaatactatgttcatctataatggcataggggaaatatatatatttttaatactgtaaacgtttgtactgaataacctttttttccccctcccgcaagcaaaactggtgaacagcggatgaagatacggaattcaaagctctaatggacctttttgaagagaagtggcttatgtggagtttacatgggcctctgatggaagaaagctaatctgtttagtattttgtgcattttactaaaatggcagcttaacattgtgtatctgctattgtgatgccaatgccggtgttttaagtggaaaaatgacctctttgctttgtgctgtgtacacaagatttctggaaaagtaaagaaaaaccctttttatggctcacacagcttaaaagtagctgtcactcaaacatgggctcacagttgagctgcttttgttttattctaaataaattgtttcttttgaggaaaatgtttttctgcctggaagtgaattgacggcaaaccttgacccctttgtttgcagcggagggggtacttgctgctgctcagattttgtatgtcttgagcaagaagcagggagatcatcagtttccttttgactatcacggtgtgtcaattctgaaggatcatagtgttacagtgaccccctttgtttgcagtgaaggggatcctttgcttctcggtcctcaacacgatgagggtgctgtttgctggcatgcaagaagccggggcaagcactctaagcctcaacacagtgcacgagtcgggggctttgctggtttgaagagccggagttcctgaaatttaagttttgatttattttgttcacccatcacgtttggctttagtttcattttttaatttgaagaaaagtttgaaattgcattatcttgcacttttaacatttgcaccaaattgccaaaagaaggagaaatgctccggttgccttttaaatgttaatgatgatgttaataaag

SEQ ID NO: 28280 - DNA, 1196 bp, Mus musculus
ttttgatcgttttggagtcatcacagaagtggacattaagaggccttctcgaggccagaccagtacctatggctttctcaaatttgagaatctagacatgtctcacagggccaaacttgcaatgtctggcaaaattataattcggaatccaatcaagattggttatggtaaagccacacccactacccgactttgggtgggtggtctgggaccctgggtgcctcttgctgccctggcacgagaatttgaccgatttggcaccattcgaaccatagactaccgtaaaggtgacagttgggcatatatacagtatgaaagtttggatgcagctcatgctgcctggacccatatgcgtggattcccacttggtggcccagatcgtcgcctcagggtagactttgcagacacagaacatcgttaccagcagcaatatcttcagcctctgcccttgacccactatgaactagtgacggatacttttggacatagagcacctgaccctttgaggagtgctcgggacaggacaccacccttactatacagagatcgtgatagggacctttatactgattctgactgggtgccacccccaccaccggttcgagaacgcagtgctcgggctgcaactagtgctgtcactgcttatgagccactagatagcttggatcgaaggagggatggctggtcactggacagggacagaggtgatcgggacttgcccagcagcagggaccagccaaggaagcgaaggctgcctgaggaaagtggaggacggcatcttgatagatcacctgagagtgaacggcctcgaaaacagcgtcactgcactccttctcctgaccgaagtccagaactgagcagtaacagagatcgctacaacagtgacaatgatcgatcatctcgtcttctcctcttggaaaggtcttccccagtcagagatagacggggcagtttggagaagagccagagcgacaagcgagaccgtaaaaactctgcatcagctgaacgggataggaagcatcggacagctgctcccacagagggaaaaaaccctctgaaaaaggaagaccgatctgatggcaatgcacccagtgccagcacttcttcatcaaagcagaagccaccttcccagaaacaggatggagggacagctcctgtggcagcatcctctcccaaactctgtttggcttggcagg

SEQ ID NO: 28281 - DNA, 1242 bp, Mus musculus
gctcagtttttgcccttctctggaattatgagaggctctaccatcaagtagaaggtcaattctcccatttaagcagggaaggaaccaagattcagacacataaactgtcttgccaaagccaccctgagtttccaacctccagatcattaatgctgatgtggatcatgctgtggcgctctggctggcacaggagccaaaagacttgcccacagcggaggaacataggcagaggccaattctgagctgttcctggacacacaagtgggaataagcaattcataaaaaagtggtggggggaacccagctcttcaccaagcatcctaattccggggttttgccatgaagataatacattaatctctattattcctaatgaacttaatacagtgcccatttaacagattgaggctggcagcaaataaaccactggtggcagggttgtgaatcaaagccagggctccttcgtacctaagcctttactcctgtaactgctacgtattcttcccactgaagaagctgatggcagggtggagcagtgcctagctgcttgctccagcctgcttggtgtcctgaggttctttccttctgtgaataaacatcaggaacccaggaaccaatgggactcagaagtcaaagggaacaccagaagggacacttgccctgttcctccttaagaccagagggtgcagtgtcacagagttctgcagtgtcatagagttctaaagctgcatttattttctccactgaccccaagttggcagaactgtcccccatgggagatctgtactgttgcataccaccaatcagctggagtttccccggaaggagtttgcaacactaggggtttgtagacttgaggcatcacctgggagggcacatgggggcagaggagtcgtgctctgggcctcgaggcatctctttacatacaacagcccagtcgtttgactagtgcgttatgacaggagcaaaacagacacaaacggaaagtgaactgagctaattaggaaagcctgttgcctagctactggcctggccatcagttggtccattcaggaaggttcctaggcaggacgatcacccctgctgacttcactagagtcactgctcctgcagttcagctcctgtggtttgagctgagtgcaggctggttctagcctcagcctctcacggacactgccctggggcagggcaaaggcttccttggatgttgtataacccagtacgaatcaggagggcctgggc

SEQ ID NO: 28282 - DNA, 2658 bp, Mus musculus
tatagtgaggttcagtccccagctctacagaaaaccaaattaacaaggtagtcagagaaaatgtgtatctaccaataaatgtaaagaactaagtatcttaaggttttagagaaggtgagcctcacctcaggagaaacccatgaacgaatccccagtctgggctgggggaagcttgggaagatgctgttggtgatctcagaaggcatgtttacatgtctgtctttctctttcagatactaatggacatagtacagtgaccagtccacatgaaccacgcaactctaatagagtattttttaagataacttttattttcttcttattactttccttttgattttttttttctatcatttcattgttgttttctcatctcatcatttgagttttgcagaccacacaggaacttgctccatagctctttaggtgaaactgaggtcaaaggtttctcacccaagtcactaaaaggggttaactctgctgcccagaaagttgattctttaaccatttctgggaactttgatcgtatttagttaccttattaacagaaaatgctaaggcatcttctatgtggaacaatctacagtgtctaaattgccttaaaagagcctgttcctagctgctggaactagtgctctttcacttcttcagaggagccaggatggtacttcccagccaggtaggttagatgtaggtggtgcatgtcagcttcccatagacactctaagccctgtttcctgtgtaaggtggcatgtctggcagagatgcgttgcttgttcaactcagtaggttcacttgggtttgtagtccagccttccaccagtctctctcattgttctagttttaactaaactgcattctagcaagttgaattttgtcccttagcatttatttctgttttatttcttttaattaagaaaaaaaattattgttaaccctgaggaacagctcaggtggttagttaccaacatctcgtttgaacctttgaagcaaagagtgaagagttgaggctagaaaaatactagtctcagactctgatgtttccagctcatagtttatagcatcagtgaactggagccataagcaaaatttctcagctctgcctcacgcagcttatgctgacggctgatttcttgagccattactcagtataaaacactgagccctatctttagggtttatcctttaagagcaaacttgtgggcatctgtgcttctgcaacctaaactatttgaagggaagtctatatagatggaagaaagaatgataaattggaccaaggtgaaacaaatataactatataatctgttcagaactgtagaccttgtctggtgttagttttatagaaatggtgccacttttgattgacacttgccacaaaaatagaaaataaaaattataaactgagatcttaaagaggacttggagaaagtacatcctgattcatgctctaagagaattccaagaggccctctaaaaatcagagagttattcccaggccacgcacctgcttgccaatatctctgcatggtcaaatgagcttcatgctcacaagctttaagtatataactatccaggattttaagtcctcaacgtgttctagcttgtgatccttcaaagatgggttatgtgttaatgataggtactagaaatgtttacttctctctttccactgatcagagaaacaggcattaaagacagaatgcaagaacggaaagcttttaccctgcaccttccttgcagggaacaattatcttgccaaaacgtctttccctttcatctcccatttctctgtacccagtcccttcctgctccttgccaatgtgatcatgctttcttctctataaatgctaacatttgaagacccctttcctagggcacttaaccatccagtcagaccatcacattcagtagggacttgtcttggctaacagcagtgtatccatctggtcagctctactgagggaaggggccaagttactgctgccctctaatctgccctctggtcctatatctattactgtgtccataggaataataggtaagggctagtctctgtcaagccatgtaacaaaggacactgcaaaatgtctggcatcagaggggacatttggagaccaacttgggaggaaaatattcattttgtattgaatgatttttaatgaatgcaatattaatccttgcagatgagcaataatcattaaaatcagttaaaaatgataagacatttagtagtcgtgtgtcttttttggttaaatagcaaaacttgattagaccctgtttcctaggatgagacaagccgtttgaagacaagatctgtcttacataagctggcctcagacttcttgaatcaagtcatcctaactcaatcttccaagtagctgggatatagcattaaaccagtgcaccctattatcattaattaataccttaagttgttatgatatggatattgaatatcctaaaatctgatgtcactgttgagtggtgcactggaacctttaggaggtaggaccaaatggaaggtgcttaggtcactggaagtgtgcccttgacaggaatggtatgccatcgcccactattgtttttgcatcctagctagtgagatgaacagttttgtttccaccttgaatttttgtcttattgttctgccttaca

SEQ ID NO: 28283 - DNA, 1172 bp, Mus musculus
cttgacgttggtgccattagaaccggggaaaggcagtggccaacctgtcttttctcttcccagggccgtttacttaatctgagctgctccacagtccctacctttgttctttccatcacggctacaacacaggtatgtggcaaggtgcctggttttcctccactgagaaggaaatgtggcacacacagatacgggctctgatgagtgtactgcctgttcttactgacctattaccttttctacggcctaagttactgaagttcacattgttcctttgaagtggtatttgtgattgtgtctctgtgcagcaatctgcacagctaaaattatagtgttccagcttagttatatttagtttgttcttttgttagaaactaaacaaaaatatcactttctcttatatcatctagcctttatctcagggcagagccctgggtgcactcagatgaccgatcattgtcatgcttatcctaaagtacttttaaatctagttttattttatgtccttgactaagaaatgcttggttctcctgctctgtgtcccaccttaggctttggcactgatagagctttacaacgccccggagggacgctacaaacaggatgtgtacttgcttcctaagaagatgggtgagtgaaaactgaagcctgcactgaccctagttggctgcatgaccctagttggctgcatgcttttataaaatgattttcctaaagcactagctgtagagtcaggcttctgattattcttctagtgccgggcctcagagacattctattaacaccatgagccttcattcttgtgagaagtaatttaagaatagtactatgtcgtttccagaattgtagtaagaatccaagctaagtaaggaagatgttcttattctcaagtcccttccagagctcaccagacttcccagtgcagctaagtacagcttagaccaaagtgagagaaacagaaacaagttgtattatccatctaatgtcttgattggcaaatcacctccaacccaacctctgtgcctcatgggaccacttacactttgctcatgtggcataaaccctgtcttgtcctttgcctttctacatactggcactcaccccatacttaagccagtccacatgcctggctttacactaaaaaaacagcttgcatattggagatgttggta

SEQ ID NO: 28284 - DNA, 1128 bp, Mus musculus
aaaccccacttccacaaggattggcagcagcgagtggacacttggttcaaccagcgggtgcgcaagatccgcaggcgcaaggcccggcagacgaaagcgcgtcgcatcgcccctcgccccgcgtctggccccatcaggcccatcgtgaggtgccctacagtgagataccacaccaaggtccgggctggcaggggcttcagcctggaggagctcagggtggctggcatccacaagaaaatggctcgcaccatcagcatctctgtagacccgaggaggcgaaacacgtccacggagtcactgcaggccaacgtgcagcgcctgaaggagtaccgctccaagctcatcctgttccccaggaagccttctgctccgaagaagggagacagttctgctgaagaacttaagctgacaggacccgtgatgcccatccggaatgtgtacaaaaaggaaaaggccagagttatcacagaagaagagaagaactttaaggcttttgccagtctccgaatggcccgtacccaatgcccgactctttggcatccgagcaaaaagggcgaagggagctgcagagcaagatgttgaaaagaaaaaataattccatgttggagagttgcaataaattttccataaagaaaaaaaaaaaaaagaataggtatgataagcgtggcttgtggctgttccttcatagcctgctgttataggcctcagaaaagaacccagaacccaggccattgaaagccctgctccatgagccctgtgcaggattcccagacaaggcctgatggaagataacagccgtggaacacgtctcttagggtgtgcttggatccagagccctgcaggtctctggggtttgtcactcttgaggctgacaatcctagggcttgaatgggcagctgtgacaccctgagtggagcccagcttctggcagagtcatggccttggggactcaaagcagattgtgctggcccatcagtttttactaaatgtggccatctgggctcgaaagcaccttagggcgagcactgctcttctctttctgactccctacagcactctctcagatagggtgctcacagatagcaaaggtgggcccctttgaactctcagagcctgtgtcctcgtcta

SEQ ID NO: 28285 - DNA, 1147 bp, Mus musculus
tctaccttacatttttgtgacagtgtctgtcactgaacctggagtagagagactggctagattcattggctagcaagcacagaaatcctcctgtttcttttcccatggtgctccaaggtactccctggttggtttgtttttttaatgtgggataccgaggatccacaatcaagtccccatgcttgcacatcaaagacttctaccctctgaaccatctccccagcctctacttcatcttttgagtctgcgttttaagaagaaaattgttagtgtgatcactagcttagatgacacatggaagtggttacaggacatacacatcagggattttaactctgcattaaatgtctaggtcagactgttcactctagaatctcaactgtatctaggatgcttagacaagtaataatagtttcagtgttgatgtgagagatcactatggtaacgaaggtcgttctgttggtaagatccgaaagcttggagaatcagtaacatggctccttactgaaggagatgttacagatctgaatgcaagactttaactcctgcttcaaaccccgtcttctccacctactggccactcacaaaatcgggactgcagcagactatcatgagctgtatgcgggtgtccataacttggttctccaaagtatccacacggatcctctcctcctctgtctctccacctgcagcacacacagaacactcagcatcccaacccagccaagccaaggagattgcctgatatgccctaccctgcaggcaaccccactcacacaggttgtgcttccggccaaggtagcgcaggatggcattgctctgggtgaccttgtgtgacccatcaattaagtagggcagctggatggacaagcagggaaggtcagatgggatatgaggtccctccatcccttccctgggtgagagcagacacagggcctggcactcagtgtgcctgccatgggaagccctccatgggcacagtgtgcattgaatgagagagctgggacacagcccatcacagaaacactgtgcagccaacagggatggagcaggagagcagaaacactgatcctaaaccctcagccaggccaggagatgaggtgagatcaccacgtcttccccaaacctccctttccctgcacttaca

SEQ ID NO: 28286 - DNA, 1198 bp, Mus musculus
gaagtcctcaccgcactagtaggtagagcacggcctgtttcctggacgatttcagttgtttgcttctgcctcatgtaaggtcagagttcagagccatgtgctcaaagccgtctcatgcacagtggtcctgacaatggtggtagagaccaggagacagggctgtatcctgttgggctgtctaatcattctaactaaatgcttggatatcatccctgactgaatctcatgtaggtgacttctcctctgcttgctggggcctgcacagccctgtgaggccagcctctgccagggggtctgtgtctgaaagtggtgacagttgttttctgcttcaggagaaaaagaagccagagtacttagagggtctccctgagaagatgaagctctactctgagtttctgggcaagcagccatggtttgcagggaacaaggtaaagggagggggtgggaaggaggggttgccatcctttccaagcatcaaattccagagcactcacccttggcttcctgcaggtcacctatgtggattttcttgtttatgatgtccttgatcaacaccgaatatttgagcccaagtgcctggatgccttcccaaacctgaaggacttcatgggtcgctttgaggtgatgccctgatctcacttcctcttgaatgccctacttccctcccctgtttccagactgcctttctactccttcaaatggaaacgaaaatgattagcttttgttaagcatggaactgtgttcagttctttcatctcttgcatggaatttcccatcacaccctgcgttttgtgtgaacttatcagctccattggatcgtgttgggagctgattgtgaagactgtcagcttttcagggaaccagtaccactggaaggggttgtggttttctcctgtgtgcttctcgtgaccaaaaaacaaaggcagtagatccacctgatgccaaaggagagaagtcataagttgtcatggagcctggattttccagccctgaagcctatggaaacccaggacatggccagagtgtgtagggtgtactattcaggattgatgtacagtaccaagatgctatatccatatggcctgtagaattctttgcttagtcgggtccctgactggggaagcactgggactcaggactacagctagtgctgcgtagacagttcactgctgctgcaggattttatcttaaattgttc

SEQ ID NO: 28287 - DNA, 1209 bp, Mus musculus
ttcagctctcactggaatctcctgcctgtagctctcagcgctcagtttacgcacttgggtggctgtgtgtgtgtgcgtgcgcgcgcgcgtatgtgtgtggtgtgcacatgcacgtgcggggtgacggcgtttgtgcagtgtgggaggtctcaacgggtgaagatgaagtcatacaaagaagtccccacaatgtctgacctctgtctcttctggtcatctctcccagctgacacacccgatccgcatgctcctggaatacacagactcaagctatgatgagaagagatacaccatgggtgacggtaatgccaccttcctggtcagacacctgcttccctcttacctatcaaactatgcctagatttcccgttatttagccctgctggtctccctctagctaaagatagaggctgctgcttccagaaacctctttgagagtgcagtttgattttccaatatagatcatggagaatggagttccttggtccatttgtatttataattcgacagaattcactactggggtcttattgggtccaggctgcctttattatcagttgttattcagacccttctccacattggaaagtaactctctgtaacaggttgcagaggccctgccttaggggttcttgctactggtcgataatctgtagaagggtgggacagtggggtaatgccttttcacatcttcttgtttacagctcccgactttgacagaagccagtggctgaatgagaagttcaagctgggcctggactttcccaatgtaggtgcaggggaggagaggtttggggaagacacggtgatctcacctcatctcctggcctggctgagggtttaggatcagtgtttctgctctcctgctccatccctgctggctgcacagtgttctgtgatgggctgtgccccagctctctcattcagtgcacactgtgcccatggagggcttcccatggcaggcacactgtcaggccctgtgtcttctctcacccagagaaaggattcaggtaccccatatcccatctgaccctccctgcttgtccatccagctgccttacttgatcgatggatcacacaagatcacccagagcaatgccatcctgcgctaccttgcccgaaagcaccacctgggtgagtggggctggccacagggtgggagatgggggataatctcctcggcttggcaaggttgggatgcctagtgta

SEQ ID NO: 28288 - DNA, 1192 bp, Mus musculus
catcgccacccaggtgtggaagctcagctcctgcgatatgtgcgagctggcccgtaacagcgtgctcatgagtggcttctctcacaaggtatggaactcagcctgcttggggctggccattacccttctcccttcctttgtatttggggtcctgaccttgtccctgtgataattggatctacctgcatctctgcctgttacctatacccctgcaggtgaaaagccactggctgggacccaactataccaaggagggccctgagggcaatgatatccgccgtaccaacgtgccagacatccgagtgggctaccgctatgagacgctatgccaggagctggcacttatcacacaggccgtccaaagtgagatgctggagaccatcccagaggaagtgggcattgtcatgagcccagggccttagtgcacctggtctgtgcagtgctcgtcccatctcagcgacttgactgtgaccgtgattagacccctcccacctgatgtggtctctgcatgtctccgtgctatgtttctgtcctgcatgtcttcgaccatgtcttgcctctgggccacctcagtgaaagcaagtccaggaatctgcttcattattgtctcggctcaggtggtacctggtggctgagatttaagagttggccctgctcgtgacccatctcagaattgtcagaagtctggctgtcctatggtatcctcagtgtccacaggggcttgggatggttgtgtagggctggccccttgagcaccgggaacccaggctttggttagagttcaagttgagtttccctcttgtttatgtggctgtgggacaggaggggctcgttatctctctgctgtggcactggctgctcagcctctgaagttccagctggtctgcgctgggcagagcaggacttaggctcactcacggccctggaggcctggcctgaggggctggcccactgtccctgctgagtcactgcccatcagccccgttcctccccagcccacgtgttcctttgttaccagcccccttgtatccctgtgggagggggcagctgccctgacctgtctcagttggaggctattgcagttggagggtgctggaactgttactagctctggaggtggcaccttctttgggggtttccaggtctttgaccagacccagttcccagccagcctcttgtgttatgttctaga

SEQ ID NO: 28289 - DNA, 2754 bp, Mus musculus
ggtgttgctttccgtaagtaaatgctgatggcctaacttagctgggtgcaggcagctgttacacttgacaatgttggtcgtctgcctcaggttccaatacatacgaagaggcagctgcttacattcagtgccagtttgaagatctgaaccgaagaaaagataccaaggaggtctacactcacttcacctgtgccacagacaccaaaaatgtgcagtttgtttttgatgctgttacggatgtcatcattaaaaacaacttaaaggaatgtgggctttattgagaggatggcatagtaaaaggtaaaacttgagacagtttagttaccactgggggcggggtagctttgtaaatgtttttctgattaacaatgtcttctcttttttagctattacagggaggagtgttgagaccagatgtcatctactgtctcttgggtcagcagcacgcatgacaggaccaaggaatggcagcaacacgcagaatcttagctagcgctctccagcagtcttctctattagggaatgtctaattggcatgagatgttcaaatcagacctgggattggacaactgtaaagtatgactggatcgtcagggcgtcgcttggactctgtaatctaatgtttagggcatattgaagttgaggtgctgccttccagaacttaaacatgtagctcactttcccccatctttttgacaaatgaccagtagttaatttctaaggtttttcttatcaagagaagaatacttaaaaactcttccttgtttgcaaaagaaacttctgaggactgagtcttaactatgcacacaatgtcaccagacatcttgaaactattcctcttagtaggaactgtttgtttttaactcttggaatggtcgggagtaatatttcaataattaaaattcttcctggttattgggactatattaatagagcttttcggaatgaaatttatgttactgtcatgtttaaagtaccacaatggtttctaaacagcattcaccttggagagttctacagtacgattcctgctctcattgctttacgcttacggttggaagttgtatttgtcggggttaaccttgtttgtgctgattaccaaattactagatgaatactgatgtagtgtgttaaactgcttcttggacacacgcaggatagccgtcaatgagatgcagatgctaaattgagaaccagtggcttgctgctacaggtctactaagttgaccacatggaatcttgcctgtttgtctcggtcatggggaggttttgaataagatgccccttgttttccatcttcgtggccttttttgttaggagacatctaaaagtgtattaacagtgcatgcttttcctttgtaaatgtggtgccaaatccctgtttgccatcgtttttactgtagcaatgttaactgtagtagtagtccttactatattctttttctaaaacttgcatttggggactttttccaccttgtcgtgtacagatttgaatctgttacagttggcagcagtattaaaacaaacggtgagtgaagagcctacggttgctccgtgcataactagttctttctggggatcctgtctgtctcttttttcccctgacctctgtctgagagtggatttattaggtagaaaagtgtctttgaaagtctagctccttgatgtaatagtattaccaagtcaggactgagggctttatgtgcagtccgtgtacaagaggaaagtcacaatccggctttcggatgtgtacagtttgcttgtgctgagagctacagtccttttgtacagtatatatcaaatgtcattaaacactgagtggacactgagggacagcaaacaatgcatttggagcatttcagatcagtagtttgatcagtgccttttgaggtccagtcgctgtggctcggatccattcatctctatgttacctcctactcgtttgaaagaaggttgatggtcagaactgcttcagaagcaagccacggtgatcagtgcctttgttggcagcttttacaatttttaattcttacgtgttttgcaaaatcattattatgcagacagtataactgttatcttacaaatatttcgttagggctaggaaaatgtcacttgaaagaaagaaaagtattgatttcaatcggcgattgactcaattcccacaatgtaggggctaataagtcttactctgaatttatctttcctttgttgtattctgtaatataagaacatctggtgaaatattgttttcataatttttctatactttgggtttaataaaatggtgttgataatctaaaatattagataatccaaatttaattttacttcagaatgcattttgtattttcatttgaatctgtctattttttaaacctttctgttaattaaaaatagaagttcttcacttctttgtctctgcacaccacttttatttgtcttgtttttacatgaaatcattcttaccttaccatccaggttccttcctttagaagtcccccaaagtctgaagacgatgtttctttcctggtgggcctttaacctgtaaggtctaaaacggttttctttaggtagactttcacatcactaatgtttattttgaagaacatttcttaggcaaaatcaaaatgtggggggattaaacatcgtattagcctggagggggacaaaaagattgatacttaaagaagccaaaagttaggtgttttctctggaaaatgctgatgtttcatgatggatattattcatattgag

SEQ ID NO: 28290 - DNA, 1174 bp, Mus musculus
gcagtataggggctggagcaccagttccagagacaaggtgtctgcttgcctatctcagatcctcttctcccagtggctcagaagcaaggcaggtgggattcagtagaggaatggggactagggggcagaagtattctcagtggacctcaccgggctttcctcagggatctagcatgactctctaaatacagcttgatgaacagaggtccctgcagtgcagaggggaactaactgttcttggcttttccaaagccctctctccggctcaagccatccagtgtgctgtgaacgtggaggggatggttacccggccacgtgaaagagaccctcttactagggtcactttgataaagggcgcccatctcctttcctcattaaggccagtgctgggggctccctagggtgggccaggtaaggttcagcagcttgttctcagagcacagaggcgatgccagaaagcctgagcctgcctgaggtgttgcctcctcccaggtggtgcgggggctggtgggcgggcgggcaggcgtgctgacagccggcagtttgcgtgggctgtgccatctgatgtctattcgcagccccgggaggaaggggagtcatttatattctgcaggaagaaaggacccagctgtcgcttcctctgaccagtgggcctggagggcatcggtgcagagcacagaggaagagtacaggtagtggtggtctcctgcttagggatctgaccgtagtgtagggggcagggcaccaggaggagcccttcttcctgttaggccagattggggcggggctttcttccctcccgtctttccatcctagggcagcagctggacagccattagtcctcagtgccagggtgcgcttcctccagctgggatctgtggctgccggctgcggatgcctcctggctgaatgctccctcttccccacacctgcccccttttgtagcttctaatgtctgaatactacctgggcttctcagtagcaaggaaggggccttagcaggaacacaaatggctgtcctttggccatgttccttgactagggaaagctagtagtagtcagcctgttttgcttttttcaaggggacactcaggatgttcaagatttttttaaaaattgccaatcatttgcacaaatttccatatcatgctaagttctgattccatatttgatg

SEQ ID NO: 28291 - DNA, 1195 bp, Mus musculus
gttcccctctgctggaagccaagtatggccggcaaccctgaatctgggctcttgttggtgtcttatgctaaacaaatggccaacgtatgggaaacatggctgcttgtctctgacagctccagggatggagggaccaggccatcaaggcagaccgcagcctcttggtttgggaagactctagtgctccctgtacaacctcactttaaaacaaagatttctcctaatcccccccacagaaggcgatacagagagagtcttcctttgctatgaggaagtgcaactgctagtgggttctagactaaagtgactttgtgtttgcaactccagacagaagcaagagattgaataagacagctcacctgccttccctcccctcctcctcccctgagcctgacagctgcctctctcttgtgggtgggctgtgtgctatgccgactcctgaacattctgtctgtcctttaggtgaagaggatgactataccacgtggctggcacactccacagaccctggagattacaaagacggctgcattttgggctataaagaacagttcctacggctacggaagtcatccgtctgtcagaatggtcgagactatgttgtggccaagcagccatccgtctgtccgtgttccctggaggacttcctctggtatcagcatttctcagatccctctgtcagcccctgtcccacattcggggaggtggaaaatagttgtcttatccagctaagaaatcctgacattcctctccaccagactaaataactcttgcctgctgtccacaaaagtgaagcccagagaaaggggaccaaacggtactaacacttcacagattactttatcatactggatagtcactggacacagactgtccagccttagaggtcgtgacatggacatggtgggaaggacagaaattaaataagaagaggcggtctggcgtgtaactcgggtggtacagggtttgcctagcatgcacggagccctgagtccaatccccaacatcaaataaagcatgtgtgttggtttatgcagtaatcccagcacgtgggggtaggagcagttcggtaatagcctggaatacataagactgtctcaaaactaaactaagggttgcaggggcagtctacaaaatgataaactaaaaacaacaggaacagtagctcagggccggggaggaaattggacttggc

SEQ ID NO: 28292 - DNA, 2113 bp, Mus musculus
gacatgatggctcaccactcactagaactctggttccagggaatccaatgccctcttctggcctcccatacatatataatgaaaataagtaaatctattttaagttaaaaaaaaatacacctgggaccaagttatgcatgagcccaaagcagcactggagtgacaagaggcgcagagcaagcaggtgattgctttcaaactagcttcctaacttgtcaataacgcgcacgtgtctttcttttcaggacctcctggaatagctcttcagaggagctgggactgcgtgtgcgtggagccacagtacctcctacactccctgaggctccgacttggggaaataaatttcccacctcgtcggccccagctctgtttctgccactcctgtccaagcccaaaggacctacactaaagaaagcaggatgggggtgggggaccccgactgacctcacagttggctctgaggagaggggggaaattttaaattctttaacatttttgtttcaatttctgtcttttgtaagactgtgggctttaggcttctcttggtttgttttgtgcattaagggacataacttgggactcaaagggattgtttcgctgaccccgctcttgtgtgttccctctggtgcccaccccagggcatctgccaactccagcatcaactcaactcccaccgcatacctggtgctgtccctgggctctgctggtcatgtgaggcagcctcggagaaggaagcagagggtgtaatgactggcacacctggacagcttttctccatccgcagacagccctgttcagagagtaccgagcaccagccctgtgcggcttcctcatccccacctcacccccaaccactactgtagggcacaatgacttttcttttcccgtttaattaggcaatacccttgttaattgcccgttggcaactaacttaatcatgtgcttccaacacactaaatagggaaaacttacagggcaatatttttaacttgtggcaagagggaggcagagaattgactagctctgacacctattaaagacaaaactggctgcttctgagctctttcaggctgtactttgtgctgtgccagtggctctgcccaggctccgccatccctttactggagttcattggtcagtgcacagtgcagccacaggactgaccgtcgtaggcttccatttttcccatcacccactgtaaaggctcagagttgaactaccactgtggctgcttattgcttcctcctaagttgctactgttcatagaactgggactgggaatgttttcaggttgatggactttttcaagctcaaagttatgttcccagactatcctcacccttcccctagttttgctgagttatttgttgtccagaacctgttggctaaccccactgaaggcacatttctagatgatgccgtgtgtggtcaatacattgctttcatgttttaaatttaaggaaaaattttatctgatatttttccaaattaaataagttagagaatgcaatcggcggatgtgggggcggccatctggtagtggaaagctgtagcgatctgagtacagcttagatgttagctggagaggaagatggtgtggcaggtctctggtctccctacccctgctgtgctgatcacagtccctcccagttaccactaggacattctctagtagatccattttgctgtcactttattctatggctagaaagtcagtggaaagtaaatgtgccaaactcacttgtcagaacacacgagcagatggcagagtcctcctccccagcaggaacaaacggcatcagggaaagagggggaggaagaggagggagaagaagaggagggagagccaaagagatgtcaactgcagctcagtgagtcatggaacgtcagttagaaaacgaagttagggtcgtttctgggaagagaatcaatacctgttagagccagaatgctccaagtcttttagcttgttcattttgtaatgattctaaaataattccaaagatatagcagctcataaatttatcaaaagttctgtccaccctcacctcctgccaaggggagagatctatttctactacacgctgtctctcccagtacatccccggattgg

SEQ ID NO: 28293 - DNA, 1340 bp, Mus musculus
tctggctcatttctcttgagcaccgcactattcttgccatagagagagcccaggagccaacgctgaatcaggtgcccggagtctttggagctctgaaactctcggctatgcaagaccccgggtccttgcagcagagcttctcatgggtggcttgctggggccgggccgaggactcctcagaggcgtttcctgcagagccattattttgacgcctttttgttttctttttgaaaaacaaaatattattcccctgcttcatggctgaaataaaaggtgatggtaactgggggcaccccctctccctgggatagccactgtcggggagcacaggaccagcctctggatcagtccctctctgccccttcacttctgtctctagctcactggctctgtgggcttgggctctgcccctacaacggctctcagaagcattcacacgcacagatgtgcaacctcagccagaagttgaagctctttaagccattttatttattttgttttttacagaatttgtgctttggtttgccctgcgcagccttggagcatcataagcctggctggtgggcatagttattctcagcattgtggtggcaaatgacgttggttctagagacttagagacttgggcaataggatttaacactgctaggtagctcagacatatcagaaaatccatagtggcctgagttgtaaatccaaaacatatttttgttggcttgggacgttaggggcttggggttttcctgaggcaagaggtcatggctgaatgggcctgtgccgtgaattgaatggaacactactttgaggcccttggagagtgacagcagctatagggtggactcaggagctgtcagtcttaacagctgagccttggaccccactgcctctgagtctacattctggcaggcagtcccatgctctgggccttacctctagtcccctgcctgctcacacctggtcccctagccttttctcttgggcagtgtagtagtatgggcgagccaccctcagctcttttattggccggggctataaaccatggctgggcataactattccgaactgtccccccatcaggatacaagatgctgagagggctgcagggccattccatcaagccccagggtgaaagggctggcatggcatcgctcattttattgctctgcaggtaaactgtataggtatagagtcctccagtgctctgaagagccctgcctctatgcacgcccccggcaaagggcttgtcagtaggtccccctcaactccatactcaacagggatgcacaggattgctaacagagggcggggcacacctcagttttctatcaccttcctaccag

SEQ ID NO: 28294 - DNA, 1688 bp, Mus musculus
tatggtaccctctgatggcagtagtctggtagaattgggcctctagaacacatgctggtgagaacagagaagctgtagggaaatttaggggtaaatgtaaatgaaagatgaatgtccctgggcatgttgaggcatgccctgcaaaccacccccacactcctaggatagactagagtgcagagagggggagggagagagggaaagagagacagagagagagagagagaaggcaggagggattttgaatttgagatcattctgtgctatagagttgagacattgtctcagaaaatgggagtagaactaagttttcctcacctaaaagcagttctcatggccaaaatggagtcagggttggggattgtccccgactcgccgacaggaatgccttctgctagctgttgtccagcatggtgccatatttgtttttcagtcatgaggaagaagacataacagtattagtgagtccagagaaaccacttcgacggggcctcgcccatcggagtaacccaaatgaagtagctcccgccctccagggtgtgcggtttagcttgggcccgctcagcccagagaagctggaagagattcttgatgaagccaaccgcctggcggctcagctggaggagtgtgccctgaaagatcgggagagggctggtacaggccctggaaggcccagccccagagggaaacccagtcctcggcgggagaccttcgtcctgaaggatagccctgtccgagatctgctgcccaccgtgagttcttggagcaccccacctccaagcagcctagctgggctccggagcagtgataaaaaggggtcagccagggctgtccgggtggcatccggaaagaagccctccagcataaagaaggtgagtgtggagagtggacatgcgtgcgtacacctagacaaggtgcaggagacactgaaggcgtagtgtcattcccatacagggcagaggaacacagttaattatcccctggaatttttaggattaagcaaattgggttggagacctggccaggtggctagagtttgcccagcctaaacaaagccctgggttggattcttcagcatcacaggaatggatgtggcaaatgtaaattcaaggtcagtcccagggggctatatgctgagcttgagaccaacctgggctacttgactccctcatttaaaacaaaacataataataataataacaataataataataataataagttggtgagatggctccgtgagtaacagcactttccatcagggatgatgaagctgagttcaagccttgtgacctacatgtgaggactgttgtctacgtgatgagcacactcccacatgctgtcctctgacttacacatgcatgttgccacatatgtgtatgtcacatacagtaaagaaataaatataaagtgactttaaaaaaaggaaagtagccgggtggcagtggtggcgcacgccattaatcccagcactctagaggcagaggcagccgaatctctgagtttgaggccagcctgatctacagagtgagttccaggacagccagggctacacagagagaccctgctttgaaagaggggggaggaggaaggaaggaaagaaggaaggaaggtaggtaggtaggtagatcttgctggctgatatcttccttataggttctagacaacgccctacctactatctcctc

SEQ ID NO: 28295 - DNA, 1476 bp, Mus musculus
acactactttcacgtagtgttaaggagggaatgccttgctttctacgtggctcatggttttaccttggtcaggaaacacataccttcatccagtctttctgatgacgtcagctgagcttcgttctaactcatctcttgttaatttccatcaagcctctgtttcccagaaaacaaaccttccaaccaccagtgcggctcgaggcaggaccaccagtgccgctcgaggcagggcgcagcccctcaggaaagctgcagtccctggaccgactaggtaaaactggtccctctgttctcatcacctgggcttccaagctgcggtgcacacagcatcctcgaattctgtgttgagtggggaggagaggggtgaggggtgctactctcccatcctgagggggtgtgagtttggctgggtaccagacaggctccggaggaagaaggtttttttaaagcacccccccccccctcttctttcaggtaagaagagcacgtcagcaaacaaagactcaatagcaagccactaccatcttagccatcaaagtctggactctcctctgccagtggtccctaactccagtagctctgtgcccagagatgggaggaagagatgcctccagggctgacctctgaagtagagactatgggggatcgggtgccttgagcttgaggggactcaaccccaccctaccctgccctgaaagaagaagagaggggcagaggtcatctgcccgtggagaaactcacaaacaaaataataaatgcaggcagagtgacctatctgtctccttccatcttgtggtcaggactagagagcttgatcttctaccacggttcactggccattcccatatgagcggccttaggagcccgccggctcagttctctatgacatgtcttcctgactggatactggtctgtttggaaaggccaggaggacagctgatgtacagaacttgtttcctatgaattctttgacttctcacaggtcaatcagttataagcttactcacatcttcatattttttcttaaataaatgaattaaaaaaatttttttctgtatatctgaaagtagattttaacagttttaaaataaacgtctgtgtaattctagtgagctctcagacataggccctagggatttgaacctccagctcctgcagccgtgactagtcccttggtgccggtcaattccaatcaagtctcctttctcctttcagtgtttacagatagtccagatcaaagttgactgaggtttcacctacagcgcctgaggctgttatggtaggaactaagtctactgttactccttagacttaactattatttgacaagacaatggaaccccttaggggatagaggccctttgttggtgttgcttctgaggttgcctctacctcacttcattagggttgcctgtgctctctctctgctcctctgctggatccgagggctggcatcacaatttagtaactctgact

SEQ ID NO: 28296 - DNA, 1134 bp, Mus musculus
gttgtaacacaagttgtcaggacaaggattgggattctctgtaaagttactcctgcctgaaggctgtgacgcgcttagagaccagtatgatggaaaagcctgctagcacgcacatacattccctaggaagggcttctcgcagagagaaggctgagtgtggtagctgacactcctccacaggagcccctaggttccaaagcacgcgctgtggttatgaacagcagcttccgtctttacagctgtccccgcgtggggagaggctcgccacatagcagtcacttgctgtagtgtcagaggcagggcagaggggtgcaggacgggtctgtcctcaggaactcccactgtgtcctaatagctgggcacctgcccccccgggaaggcagtagtcaggctttcttcaccagctctctttcatctgtgatctgtatcctccgctctaatgacaccttaggtcagtctggagcttgccttctagcaggttaaagcgcttcctctagatgctgccttttatcttcgtgtggccccagaaggtagggtgggggcatgattatacctgtcccagagtgggagaatgaggtagcgtggccaggtgggagtctggctcagagtgacttgcagaggttgggagctgagtatgaccctgcttgtgacagggcttcagctcagcccacctcaactgctttggcccagtaccaagcaagcaaagaggccgtgtgcttatttcttctagggagttggttaaccttgctcttggtaagcctgtcaaaactgggtgcctacaagggggaaacaccgaggctcttctgcctgctgtggcagctggctgcccaggcaggctccgtggccccttggcttcagccctgggaaacagcctggacaagaggacaaagagccaggctgctcccatttgtgattaattcacattcccataaccttaacattcagttagaagaaaagcagcttgaaccgtgatggggagactaggctgtcccgcttacaagtttgttaggaatagctaggtggtcctgtgttgtcttgggcctgacctaggtctccacagctgctccccccacccccgtcctctaacgcctgtagccttgggcacagacagggttctgccttcctgtatccgct

SEQ ID NO: 28297 - DNA, 1099 bp, Mus musculus
gtttttctgatcagctgactgacattaaacacagcttcgatctgcctggcactctgagctggtttctcttcgttggcagatggacttagaaatatttgttgagtgcataagatgttgtacatctgccagcattgaccatttaatatcattctgtgttttgcagttgttcagtaagtttttaggctcttcatttgcatgtttgtttttatgagtgttggatttcctgtcttgtttgttcgtttttatttgtgtgtttgtgtcagggtgctttggtcagtgctctacatagcccaagctgacctcaaacttaaggccctcatggttcagattcctaagtgctgggatttcttttaaactctcacaggggctcctctttagatagacctgttgcctcgctgttttagccttcaccccaagcattgctatatctttcctggggcttcggatgcagtctttcctcgcatgtatccctcctccaggtgattggcaaaggcagcgaaaagtcagatgacaactcctatgacgagaaatacttgattgccacctcagagcagcccatcgcggctctgcaccgggacgagtggctgcggccagaggatctgcccatcaagtacgctggcctctccacctgctttcgtcaggaagtgggctcgcatggccgtgacacccgtggtatcttccgagtccatcagtttgagaaggtgagtggaggggagggggagagtcagttccctgtgtgtccagatcgtctcaggaggagcgtgatctgcctgcccactggctgcagcttttacattcattaaggatttcttggtggggaagagcctagagaacgcatgcagtgctttgtgcacagactagagcaaggcttcctaaatctcctgtgccagttccaccacttactagctgggcgacccctgtaaagagagcaaatggcgggagccgcctccggaggctggctgaacaccaggctggttaggttagtgtgtgtcaggcacttactgcaatagctagcacaagatggtgatgctctatagacgccatcgtcctggctgttgtagtccagttgagaactgatctcctctgggacccagcctgg

SEQ ID NO: 28298 - DNA, 1186 bp, Mus musculus
tcctgcggagcgggagcttcccggcacaaagctgctcggagcccagcctttgttcccagacaccccagccgtggcggggcccatctgtgccgctttcattcattcccttgtgaacactgaactcacagccggctggggtgcggtggggccttggagcctgagcagaccgaggtcagggcctggagcccaccctcatgtggcccggagaccaatgagagcccacaaagaaaaagtcctgcattctcctctgtaccccaggtgatgccaattgtgagaggcggtgtcttgtgcagggtttttggaaagctatttaaaagggtaaagagagactatactgtagatttctgagcaagtcaaggctccaagtttgctgactggcactgcttctgtgactttgtgactttgtaactttcttgtctgtcagtagcaaattcccttcctccttggttgtacatgaggcccgaagctggtgctcggtttaatggatgcactcaaaggctccgctggtctctgctatatgccccttctccattgtttcctcaggacgcagacaacaaagtagaacgtatttggggagattgtacagtcaggaagaagtattcccatgtggacctggtggtgatggtagatggctttgaaggcgaaaagggagccgtggtggctggtagtcgggggtacttcctgaaggtaagagtggggagccagaaggaactataaatatgtatatatgtacatacacacacacacacacaaacaaataaatgcgagaagcatgatcatacttgaagaggctcacaaatcctctacttgaacccgatgcctgcttgtgaactcctggcaattagacacgattctctttctgaggcaagagagcgcttacccagattccatagaacaaaagccactcagtgatccttcataatgaatatgttttgctgactgaatcagaacagtctctgcctttgaggagctcagtgtaattggacagtcagacaagtaacaaagacgccgagcccagtgtggtaagcctgcgctctgaggcgacccagcatgctttgagctgtggtaggtgtgggcagctggcacagactaactggagcagagtgcatgtgaattcaggaattcttccaaaaggaaatggcagaataattttggaagtgttgcacacttcaacattgtatattta

SEQ ID NO: 28299 - DNA, 1470 bp, Mus musculus
ctgtttttaagccaccagtccatgtttgattccaatccaagattcacatggtggaagaagaaaaccaaccttagcaagtttgaccttcacgtgtgcaccatgatacactgctcagactctgccaataaataagtaaaaacacatgataaacgataaacgtctgtaagagtgttcctatgatgctctttacattttatataaaactagtacataataaggaagcagggatttatgcctacttgtaatcgcagcacccggaggctgaagtgggaaggatcttgagtgggataccaggttggataacttagactttcaaacaaaatgcaacaaaacttgatttatggaaatcaatcctgtgtcccccgggacctccgagccactaggtggcagaagagaatgctttggataaacaaggtatgcggaagccgcctgatcgctctgtggttcctcccagaatcctttgaggcaagaccgagtgtttaaaagagggtgccccagccacttcctcgcgagtgggagtgcggctggggctgtggatgtctgtgtgtggtattgtgtgacgtgaatggtgcctttgggctgaatgcgagtatggatattggagtgtgtgtgcgagcgactgggaggtgcaaggcgagtgtgtgtaccccccctcccctcccctcgcctacaccttgatcttatttgatcgggtcgtgacccccgccccgccgggccgccccgaaatgaaaagcagccctcctgcgaagccccctcggtggggcgctgtgcagcgaggccctctgggcggtggcggcgtcgcggttcccggggttccgggatcggtcctgcgggcccggcgctcagaagtgatgaattgatcagatagacgaggccgggtccgtcccagccgctgattaccgagcgattctgatctgagcccggccccagggcccggccgccgagccccggctcacgtctatagcttcgtgtgctggtgaagctcaagaggctcaaggtgaaagagcccagggcagacgtcacgccgccccttttggaggctttgttcccgcagcagtttttttttccccaccgtgtgcgtgcgtgtgttctcaccgtgtatgtttgtgtgttcttttagttgtttgtccttttagtctgggcttgtttgatctctcacacacatttgtttaatgtatatgagcctcctgttttgctgacacacatatggttgtgagccaccatgtggttgctgggaattgaactcatgacctctggaagagcagacagtgtttttaaccactgagccatctctccagccctgatctctttctactaacagagtttcacctagggctaaaaggtaccatgccctgtacagactcagttgaggaatgtgtccgttacagagcatacatttataaactactggatgcagggacttgtgggctgtgtacgatataaggctttaagagtggatgtattgttttg

SEQ ID NO: 28300 - DNA, 1393 bp, Mus musculus
ctgtcctggaactctctatggagagcaggctagcctcaaactcacagagagccgcctgcctctgccttctgaattagaggcaagtgccaggagataatttttcaggcttcattttcttcattggctaatttggatctggatctggtgaactgaagagagggagaggggctagatgagaactgggagttacgaaaggcgaaacaattgtttggctgttggagtgtgttctttctgtgcatctgggaacttgagagagggtggttctgcagagagaacagattgccacatgctggcagcctgagggatttctcaagagaacctgagtgcataggaaagccagggttatcagtaagaagcagtaacagaagcaagcaaggcagcagtcttccgcttaccagggtccccagagaagacttcactcaactgacagagaaaaggaaccaactctcgctatttcctaaagctttttaaacactttctaaatcacctagtgctaaatactgttactgggttttaaatacgaatgctgggggaggggactattaaaaaaatcattgattaatatttgaagttctggtagaagagataagtaaattagtatatcagttcatatactagtaagctcatctagtgtaagaatttgctgcgatgaaaatgtatgtagatgggagttttgccatgttataaaagacacaagcttgttctctaatctggtctccagcaagttttagttgtgtctctgccaactcttagtgttgtccatactgcagtatttcactctctgttaagaccatgagaaactgaaatgagaaaacccactgatactaacatttggtcagctcgtagaattcattaatgagtgtgtttctgaggaaagaaaaatgaagctttgcaactgagtgttgagggcttttcctcggagttgggggactcctgagcaggtgatgtcagatgtctctgcctttgaagggacgatttctcccttccctccttacacccgaaaaagactcagtttgtaaatgtgaagtctacaacagtggaacaaaaagtaggtctaatattatagtacacacgagccacacatgctcagtggaattgtgtgtcataaagcttgacagaacaagtgcaggggctcactcccagaagtgaaattcgcttttgtctgcacactgcaccagaacaggctgctgggaatcgcaggtcctgatgcagttgactgctgtgagggtctgcagcagtgtagaaagtcaccaagcacacgatgcatgtgtaaggctcgctaggaattggtccacaggcaaattgcaatgattgctgttttctggccattcctaaggatccttcctcaggagagagaaaaatttaatgggtctggagagatcttgtggatggg

SEQ ID NO: 28301 - DNA, 1784 bp, Mus musculus
aggagcagagaagtaggggtgatggagaagagaagaagcacaaagaagacaaggaggacagacgacacagagatgacaaaaaagagtccaagaaaaaacacagcagaagcaggagcagagagaggaaacacaggagcaggagcagaaacgcagggaagcggagcaggagcaggagcaaggacaagtcaagcagacataaaaacgaaagcaaggagaaggcaaataaaagaagcagaagtggcagtcaaggaagaactggcagtgttgaaaagagaaaacgagaacacagccctagcagagagaagtctagaaagcgcagcaggagccaagaccgttcccacaagagagagcataatgatagcaaggaccagtcagacagacaggatcatcagagcagccagagtggagagccagagagccaagaaaaggaacacaaaagcaaagatgagactgtgtgaagattgtgtaaacttggatcacattgaatcctataaatgttgattaaattctgcttttttccccccaagttgagattgtgcagtagttatgcactctgagctccccgtaggctgtgttttcttttgtgtagggaagtgcctttgtaatcccattacgcattgatgttttcaccctgttgagttgacacatgatgcacagaatgttcttgcatttttgtttgtttttaaaatgtacagtctgtacatacgtcctggaaaatgttttaattcctttggcatggttgccatgttggttaaatttgtataaggcaataaactgccactaattctatttttgttttgtaggtgtgagattatggttgtgtactgaagttagcatggctgtgcttttcataatagaatgctaaagactttgggaatggatcttggatgtttgtttaggagaattatgtgtttttcagtatacatggaggcaacagttggagggttaacattcttgtccactgtatattaccttggaagctcttgttaatatgttgttattctccacagttaatgttcgagagaatttttaagaggtttaaattaggcttagatttgatcagaagtccttttagcattctacctcaaagggacactgttagtatgcctaaaatttattactttcctttttacaatgtgcttccccctccctcttgaattctttctcagactttaaaagtactatattaaagtgtgtaagcctggcgttgtagcagccctatactaaggagtgattgggagagggcggggcgcaggagcaggcgagggcggggcgcaggagcagaggagcagtcaagcctaagcttccaaagcattttataatggagaatacttaaattatgaaacagcttgatatagtatccttttttaagaatttaaaactttttttattgataatgaagattgctgtttgagtttttaaacttaatctaggacagaaatattaccagtaatgcagtgctgcgttatttaagactatcagcaaattatttgatagattgttcttatgacttgtattctgatttcagaaaaccatcatgagtgtggaataaatactggattaaatcctttatcctgggtgttggtttccccccccccccatttgttaacatttaaagaaaattgtgggaactgataaaatgtcagcagttttctgtagaggagatcttgagcaaaagtgactatttaaaaagaacacattgctcagcctgtaaaggtgcttcccacccagccagacctgagttcacccctgggctgggaggagaaggctggcaacaatactat

SEQ ID NO: 28302 - DNA, 1068 bp, Mus musculus
atgtggattgagactgataacatgaagcccttaaggctgcaggaggggattatcagaccctagaaagagcatcatgataaagttccacctacctccctcctcataccatttatttagccctctaaaaatacccaatcttgtcattttattaaaccaatgagcacagttgctagaaatgcattctaatagtcattgtgataggtatttgtaattacaagctaatgtgaaccctgctcataaatagatgtctaccactaaagaaagtaaaggccatttgttaggacctggatggttttagtgtcagagaagatggatactctgttttaaacactaagtagaaaggtttctagagatgctgatatacttgactaaagttccatacataattcttgcttgtgaaatgggaccatacattgtgcaagtggggctcggagcccagtatggagctgaggatgactttggactcctgaagctcctgcctccaccttccaaatgctggagctaatagcactgtaccactgtgcccagcatagtttttgacaaaaccttacgcacgcacaactctgactttctaattgtaaacaaaaattcactcctgttatactaatcctgcattcttcagttaaaagctggaaacaacatgccaccttaaaggtaacaggggttttattatttggtgatgaaggggcagtgttacatactagaaagtctagagctgcccagaagaagcatctgcagtgtataacttcttgagtttgacgtagtaggcactcatttggacagccccattgtttatttccttaacactaatcgaatgtgacactttctggggtccccagaaagctgaatccatgacagtggcaaagacaagtgaactccttgtcatttggtcatttgggcagagagacgtggatgtaaaagataaaatggagttcaaggtgactgaaaggcacctgctgcaaacagctgcctggcatcctgtttacttccagccctgctgttatccctacagtttacctagtgctgaggaaagatggctcctaaggagcctttactaacaggccccac

SEQ ID NO: 28303 - DNA, 1367 bp, Mus musculus
ctggaaagcatgtagtataaagaaactcttgtatttctgtttcttttgtttaactgccggggttggggggggggcaataaatgtgatctttttataattggtccacgagctaatctgacacctccccatccctatcagtatgaaactgggagaaaggcaacatggtctgattacatttcagaaacttgcagaatgatttttaaagctgtttctttcagctggaattctctcaagtcttgagtgcctacctgtgcttccttatattctaacgttcatattgttagtaaggaagtggggcacaggagaagtattttaaataaccctgctctccttacgcttaattcacggagtgctaaatttgatgaaccttagtaaaatggcttaattttacagcctgcctaggcaattctgagagtgacaggagaaaaggtctgaaagtgaaatagtgatggggtgttaatatttttattttgactttcaagactgagccgagaaaacctatgttttataatataaatatttttgtgactcttgtaaagcagtctgatagggaaggttgctgaacctagcccaagggcggaccctttacctcttgtgctggctttatttaagcacaggtctaattctgtatgaaaggaacgcgagcactctaatctaataaaagttcctgtcttcagttcttcttagttcagacaactgtgaacagtgtgcatttggggagctcccttacaatgatgtgtgagtcagattgtcacatttacttcacatatttcctttccctcctttctgtggcaaataaaacggcattctcactttttatagctgaggtctttagacgttttgtgtgtggtctgtgagtttactataatgctgctacttgtcttggtgtcaaagctcctgcagaactcagcttcagaacagctcaaatgatgattaacatggttttgagctctagctgtgtaagacttaacgggtgtggaaaactgctgttcttaagtactattgaatttcactttttgtaaccttggttctgtttttggctttttaaaaacattgtatattaaattgctaaagtattaaaactaatttgctggggctctattttgaaggaaaaatacaaatataaaaccaccagtttcacaaaacaagcatattttgatatcagaatacttaacatcttttataaatgcttggtttagaggtttaaaaagttcctttggggtctcctatgtttttaatcaagctttcgcctatagtgattgctggtgattttgattagcctttctatagcaattcctgtagtatttaaatgtctggaatccttttctgcataattctgtaaatacaagtactatatccaccctccc

SEQ ID NO: 28304 - DNA, 1219 bp, Mus musculus
aacaggtagaagtccttaaagaggaaacacaaaaaatccctcaaggaattacaggagaacactgttaaacaggtagaagcccttaaagaggaaacacaaaactccctcaaggaataacaggagaatactgctaaacaagtagaagctcttaaagaggaaacacagaaaatccctcaaggaattacaggagaacactgctaaaaaggtagaagtccttaaagaactacaggcaaatgctgctaaacaggtagaagaaacacaaaagtcccttaaagaattacaggaaagtgggtgtgggcagcttttggagaaagccggaagcagctctgggtgagtgttaaagcactcatggcgctctccttcagtggggcaattgggctgacttttcttatgctgggatgtgccttggaggactatgacatttactggcccctgttcgtcttgattttctacgtcatctcccccatcccctacttcattgccaaaagggtcacatatgactctgacgcgaccagcagtgcctgtccggaattggtgtatttcttcaccactgggattgttgattctgcctttggacttcctgttattcttgctcgtgtggatgtgatcaagtggggagcctgtggtcttgtgttggccagcaacgctgtcattttcctcacaattctaggcttcttcctcgtctttgaaggaagagatgatttcagttgggaacagtggtagcccctcctccccatggaaagcattgagtcttagaatttgtactgaacgtatatgtgtgcacatgtgtttcagatttgaatatgctgagtttttttatacctttatatcatgatcatcttagggagatgttgtaaacaaaagatgagttttacttctggcacacaggtcactccattgactcaaagtgaattgtttttatcttctagcttccagaaagtctgttactatggccttgtagacagctgctcacttatccagggggatctaaaccttttgccttgggatatgcttaggagacactggggcagatctcctacagtccaaacataggtggcgctctctctgtacacttagactcatctcagaggaagtctcatccacacagagcatcagcatctgctaggagcatattggggatgcaggatcagacagggtacatttgatgagattgcacacttggcacatgcatattgacgggtgaggaggtttgttgtag

SEQ ID NO: 28305 - DNA, 1099 bp, Mus musculus
cggagtgtggtaatatttcttgtatatgtggatttcttcaacctaattcaggaacatgcttcctactttgtgttatatccaatttaggtggtgttctagttgcatttttgttgctgtgacaaatactctgacaaaaaaagcgtcttagtgaagaagaagggatttatttgtcttagaatttatagttcattgctgtggggaggtcaaggcatgaacttaaagcataatatccacagtcaagaggagagagaaagtagagccatagcttgcctagtctgagctagctttttcctattgtatgctgttcccatttcctaaggaatggtgctacccacatttgggctgatctcacattagtgaacagtcaagactaacattgtctaaatattctagatattgctttaagacttttcccaggtaattcaacattgtgtcaagttgataattaaaaattcagcacagttgttctatataagatgttgtaaaatttgactgggaaatgatctttttcttttaatagtaaatatattgaaaatgaacaagatttttataaaaaatccttaagatacaataagattgattgagtgcctttgacaagtagaaggatttgctttactctttgttttttcaaaacaagaaaactccaaaaacaaaatttaaatacacacacacacacgaaaagaataacaaataagacaagtttatctagttatatagttagtaaattatcttctagaaataagaacaattattccatcctgtatgattactaaaatttcccagaacagccagcttcaaattctacacatttaaattctgagaattttaaaatacatactaatgtattacccgttgatatttgttttctgtcttagaggttgattctagtgtattaatacagagagaaccaccaaggaagatgtcaatgtacaaatatttctagagtctagattctatctcagtgctaatcagaaccagtggaataatgtcttataagataattgagtttcccttagtaatagaaaggaacattgacaatttttttttagaaaaatagaaatccaagattttgtgggaattgttgctattataagtgctt

SEQ ID NO: 28306 - DNA, 1174 bp, Mus musculus
tgaaacaataggaccgcatgcttctagggggcagagatgtaaaatcttccacctgaaagatattcaagcagaagcacatacaaaaagctttgtccagcaattcctgctttatttatttctgaatatatgggcacagatgagatgcattggccccttcgtctgacttacttgtatatcccacactgatgtctatgggtttaattagtatatgaagcttgtctatgctgtggaaaatgaatactgttatgttctctctctgaaatgaaaatttagggaatcatatttttttcattataataagaggtttcaacattatttagagtatttcatagtgtatcagagaaaaacatacttactattgaaggaatgtttcatggaattaaagaacaactaccagcaactattttatacaaaaagaaataatctggtattcaaatacgtagttacagtgtgccttttagactagattcaagagaaatttatttttaaaagaacgtataaagttcatccaatcatatcatttgcatttgccgtatttttaaaattaataatttataatatctttatcctctggtataattgctcgggaggcttgaggcctttgttttcttcttttaaccttttcttttgatatgtttttagacttacagaagttgtacagggaattctgcatatggttcaatgatatttttcataattaacatttgaccagatttagttgcttgggctatatttttcttataaaacatatgtatgcgtttccacatctgaacatgcacataagtttttaatggatttgaacttagaaatggtgccctagaatttgagctttacactgatgctttgttagtaaggcatatctagggctacagggacttttgttattgaatgttttgaagaagaaagttcagtactttcttatttaaatgtgtttgacatttaaatgctattttttgaagaagataaacttttggatacatttttaatcacatctcctgttaatgtctcccatgtaccctatgctccacttatgctgagctaattacatttgctaaaaatgtctttcagacactctctggattcttttctatttaatgggggtaaattgatatctgatgaccatgctgtgcccaatcatgtatcagagaggaagctaatctcagatgagcttgcc

SEQ ID NO: 28307 - DNA, 1156 bp, Mus musculus
tgaagcactcttaggaagtgatttccagaggccacctcagtgattcagagctaacttagaatcaagacaaagtgattgtctagatagacaaagattgtctatcaggagtgttcgcagaaatgtaacagagaggcgtagccgttccattgaaatgtcaaataggtggggcttcagcgatgcactcatctttggtttatatttagccatttcctaactgcacagataacacagaaaacaaggtaggtctcctgtgctaagtattgatatatccaggtacttatgtggctttgctcagtttctcactcacatttttatgaagagaattttgcatgattttatgattgacagcatcttaaaatctagtttgtgatcctcctagcacggagaaggaatccttatctgggaaaagtctgtggtacagtagcaattcagtcttttctagtgactgtgtttttaaaagcccgtcagcaacactatgaagatccaagaagctgtggctgatctggttaggcttctggaaagtcagtggacactagtgatgccattgctatggggatactgacagactgcccccaaactgtttcctcctgtgctgtaagacgtttgctttgtaacttggtcacggatccaagcccatgctgggggaaatggcactagtgctccttacatccctctaaaaggcagttaggggaaactttcactggaagtcatggtagcgttgctcactggctgactgcgccagcgtgaagaacagagtgcctgccctcaggaccatcgtggggggcatcacctgccaagaagcacagatcgatgttcagctttaagtagtatctgatttacaacactgtgttttacttaaaccttgtcaatggaagaaatctacttcataaatagaagcctgtgccttcccacagctttgaacatgaatttgtaattctgattacgatgttggaaagcatgaaaaacaaaaacaatggttgcatatgcttttatacccccacgccttggggtatgttaagattctcgtgaaacagttacgaggaactcctagtagagagtagcaggcacagaccgaagctgcagctcactgcagaaagtgtacttggcagttgtggatttctgtaccgaccggtcttctgttgactttgtcctttcc

SEQ ID NO: 28308 - DNA, 1229 bp, Mus musculus
gccattctcgcacatcccgtgcagtggcggcgcagcacgtggccgcctgggcttttcagtgatgctgcctaaggcacagcggggatttgaggtcctttagggggttaatgctgaaggagcaggagcgggctgcactgcatccggggacgatagtgatgggcgatctgggtgggtgacagcgggccctgaaccagtcagccacgtctgcagagagccagcaggggtatctttcgtgagttcaggagataggacccctagctcagctagagatagatccccaagctttcagctcggactttccgcagcccccaagccccgcctcctccccgtaagcccctcccctgccggagtccccgcccccgcctcccgctttcccgtcccaggacgcgttgcgcggcccgggccggaagtcctcgaattcccgggtgtgtgtctgtgtctgtgtctcgcggcggtgccgcggcggtcaagcgctttggggtccgcgtttgaagcgtcaccgctgtcactgccgccaccataccgagtcacttctagagggacggagacccggcccttcgccgggtggagaagatgttgcccctgtccatcaaggatgatgaatacaaaccacccaagttcaatctgttcggcaagatctcaggctggtttaggtgcggggtgctgtgattgctgggagggggctgcccgggatgctgagacaaagctgggtgctaaggatggcctgaggtccagcatgggagcgtcaccctcctgctgtggtggaacgagcatgcggactgggtgggttttgaggggtccccgcaacccccttggctcctgcttgcttctgatcacctgtatcgtgcccaggtccatcctgtcggacaagacatcccggaacctgtttttcttcctgtgcctgaacctctctttcgcttttgtggaactactctacggcatctggagcaactggtaaccaaaggggaagatgattggggcggaagcagagggtgagggagacaagccactatttgcttagtgccacgtagctccttaccggcaggttcacgtcttacctttgccactaccacttttgctgagttgctctcagcgtactctcaccaaaagggaagggctgcagttctaagatcggggactctcatttcctgcaactccattaaacagaactgacaaacaggccccctcctcatattttttttttacttttttatttggcagatgcaatg

SEQ ID NO: 28309 - DNA, 1344 bp, Mus musculus
gttaacatctacgacggcatgcccttaaagtactccaacattatgatttcccagtttggttttccgtatgccaaccataaaagtaaaatgtgaaccggaaacaaagacaagcccaaaacaccgcgctgggttttcagtggcttctccatgctgtgtgtttttggttttatttttggttttttttttcaagcaacactatgaacttttatctagtccataagtctctataatagaaacaaaaaaaccatatgcggtacttctagaatataaaacacatggaccttcaaaagccaagaagttggccttaccgggataggatttcctgtgaagagcttttgtccaagatggtgacattattgtttacatctcgagactgctcctcagtttgtttgagccctggcatttgcctcaaggccctacagcaagctgcttccagagactcacaagagacaattttcagcttttcggtgaaggtcgattgtttttatttgaagcctgaaatgcctgcggtatagggaaaagccatgtgaggagagtttagtctgaactcagtgttgagagccaggaaaattcctggttgccggtgtctttctggtccatctcacagaactgactgagcccagcacggttctaacgaagctgtcagtgctggtgtctctgctgttacgcctgttggtgactgggagtgtaagttttcatggctgactgttgtttaattggtttttattggtttggtttggtttggtttttgtgtgagcctactctgcatggatcactgaaatgtgccagccatgtttcttatatgtaacttgtatgcaacaaggaatcagtgtgtccctgtaatctgtcaccgcatatgaccttgagaatctacattagttcttatattttacagaatgtgttgaataatgaataaatatgtataaaaataacttctggaagaatggttaagtagaagctagcagaaataaaaaactttagtatcaaagatctttattattaaagcataggctaccttgtgagtatttaataactgtattgcacaaaaatgtttccatacagaacccaggattttgttaggattttttttaagtcccaattcatgacgaaatttcaattacatggttgttgaaaataaaaaggactgagccatcatgtgagaaggcagtgggatgctctcaggagttcactgttcctaccacacacctctcgctgtgggagccagtgtctgtgtcttgcctgctgtcctttggtttgaccttgttcaccactactgaaaagaaataatctatcaggcctctgtgtatcacttttcttcttctcttcatataaggcgtgaaaata

SEQ ID NO: 28310 - DNA, 1151 bp, Mus musculus
aggcaggtgttcatgcattgagccatatgtccagcccatgaatactgttaagaaatggatgccagggccatgctgaggtcagaggacagctctctctcctcactgtttcctcggaattgaacttggatcatcggcgtagccttgggtaccttcactcgctgaaccatctcactggctccatagttaatatttttttagtggatagcaaacgacctatttttccccacttttgctttgaaacattgacgtttctcaagtttcataagattaaatagcattgagatccttcctgaaaagggcattggttaattccagacgcctgaaaataatgttacatcagtgctaattgggatatatcagttaaaggttttgattgattgtttttctgagacaaaatttcactctgtagctcaggctggccttgcacatgggacagttgtattgtaggttcccaagtgctggggtttcaagtatatgtcaccttattcagttcaggtaaagttggtgacttgggagtaatttgttgttatttattattgctcctgttttaggtgtgaatgcagacaaggttgggattgaagctgctgaaatgctattagcgaaccttagacacggtggcactgtggatgagtatctacaagaccaggtaacgacactgttaggatcaaaaccatgttcctgacagatttgaacataattatgttgcatataaatttcttttattgtgccatcaagtatccagacacatttgtctctcttgttctctcaaacacaaagggtctctagagttgacgcccattgggaggcggtgttgactctttggactgctactcttttgagacaaggtctcgttctctaccctcacattctccgtccttctggctctcctgcctactgtgggtggagtcttgtggttgctcctcagaagcaagaagagagggagaaggaagaggagggctcttcggtatttcttgaccattttctggagacagttttccttgtgtttagtcattttcttcttcctaaatttatgttcccaggaattctgtagactccatttatcttttaaaatgggatttttgaagagtataaaaacttgtcatgtacagcagcttcagaaatatttggtctaagtaagtgtatgagcgtcc

SEQ ID NO: 28311 - DNA, 1104 bp, Mus musculus
ttgtctcagttctcttctctctgcgagtatgtagcacctggtgattaataaatgttaactatttgaaatctggatgaaatgtaatggaaatattacatgtggggcaggagatcccttgaagaaattaagactcaggatatgacctcccagggttgggggaagaggaggcagcattgtcagaagccctggtgggtgcccactcgccggcagggaggaggtgttttctaaacctcctaccactgttgccagatcttccttccactatgagtgagtgaaagtttacccttgtttatttcttattctccattatttctaggctcttccccgatttgaccagaaaggagacgtttataaagcacagataatgaatgtgagctggtcagcggatcacagggtcatcgatggggccaccatgtcacgcttctctaatttgtggaaatcctacttagaaaacccagcgtttatgctgctggatctgaaataatggcaaacaggacatctgtgaacttttcgcatttccaaagagtgtgtgaggcctcgctgagccagcacatactctggttgcggctgcattagaaatggtttgtgctgccttggtagggctttaaagcacagtatttctcactgacacattgggctttctgctggaaaggagcggtgggtaaggctcccctgggtatcacattgtgtaggtcagagcggggcttccattatggtgctgagatctatgtgtcagtgagttgaaacaagcaacaaaacaaaattgatgtcactaaatgtcactaatgccactgaaggcgagtagcagtatacatgcagaacttgccctctttctttttaatttttaactgatttttttaatgaaacttttaaattatacttaatcggggaaaagactctgtatgcaagtatgttttcatttccctacaatcgaagtaactaatgtacaaaataagtgcaattctgtttatctcttcagcttatgagacatatacccttgccttatgtgtaaagtatcatctataaatgtcttatagctataaattagcattcttgaaaggggggagttataagttggtcttaattggaggttacaaccaaaaa

SEQ ID NO: 28312 - DNA, 1219 bp, Mus musculus
aaagcctttattccaagcacttgagaaacaaagacaagtggatctctgagttcgaggccagcctggtctacagagtgagttcacagacagccagagctatgtagagaaaccctgtatttaaaaagaaaaaggaaggaaggaaggaaggaaggaaggaaggaaggaaggaagaaagaaagaaagaaagaaagaaagaaagaaagaaagaaaggaagaaaagaaaagaaaagaaaagaaaagaaattcagtattttgaaatctaggtttggaggttttttccttctaatattatctaactaagtatatcatgaaaaaaattacttatctaaatgaaagttttgtggtagaaaaaatggtcattttaatgcctgtttgattttttccaaaaatggaactatgttataaatttagtaaatgctgtttggttggaaattcccatcatgaaacccattatttttacataaagaaaattaacaaaagaaaaccaattcccaataggcattttgtccgtagacctctaatccccacacaggcaggccttgttaggtccatagtgagacttcgtcggaaggagggaaaactacaggtagcgtggaggaaacacactgttatctataatctaaacattgttaacattctgatacatgtatctgtatacataggtaagtattcttttataaaaatgaaataatgtatctactattttataatttgattttttaaaaatttatccttatattatggatacctttatatgtcaataaacagttccacattatcatactttgtatgccttcatagtagttcactgtgtatatatatattcatatatatatacatatatatatgtgtgtgtacgtgtgtgtgtgtatttactattttgtgtgtgtgtgtgtgtgtgtgtgtgtgtgtgtgtgtatttactattttgtctgagtgtgagtgtgcgtgctcggaagtgccacagtgagtatatgaaagtcagaggacaacccatgggatttgcttctctccttccaccagcaacctctacctgctgagccatctcactggcccacctagtcagcgcctgttgtggttgtcgcatttcagtgcttctccccaaatcatgtattgctgttcgctttagctgacctatgcagagctgtctaggatttgaggatattaaggaacagatgggctacaggtgagtgctgcagacatcttcgctttcgtgcac

SEQ ID NO: 28313 - DNA, 1099 bp, Mus musculus
atgccacgagaaagaaaagcacatcaaccagctacaaacaaaagtggccgttttagaacaggagatcaaagataaagaccagcttgttctgagaacaaaagaagcattcgatacaatccaagagcaaaaggtcttttgtaaaagtttaaaaataaataaatcacatttcctacatgtactgttgatgcttcccataaacaaacacagtgtcttacttgtgttctgtttttttctagcaggtggctttagaagaaaatggtgagaaaaatcagatacaactgggaaaacttgaagctacaataaaatcattatcagcagaacttctaaaggttcgctttgaaatgtttagccaaatattaatatttcatttggttatataaatattcatatgagtttctcgtaggcaaatgagatcatcaagaagttacaaggagatcttaaaactctgatgggtaaattgaaactgaagaatacagttactattcagcaagaaaaactattggctgagaaagaagaaatgctacaaaaggagcgaaaggaatcacaggacgctgggcagtttcttcgtgccaaagagcaagaggtggtcactgcccctgttgtaggctagggttgctttgtgcagttagcgagcttccccacatggatgggagaacttgagcttgattgtatgaagacagttgctttgtcctcccccccacccccatctaaaccaaaccccactagataaggtagtgataacctcactgccggggttctcatgagtgcagagtgggtagctgtgtacgcttgtaattaactatttcattacagagttgaattgacttctgcattctcatttatctgtagtactaatgagatattgacttaagagtatacaatgcgctagtctaacctttactttccctcattctgatgataatattgcaggtatgcagattacaggaacaattagaaactacagttcagaaactcgaagaaagtaaacaacttttgaaaaataatgaaaaatgtaagtgatattatatttttctgtaaagaaggcttattatagttttgttaatttaaatttttatgtgaattaataaaaatgcagata

SEQ ID NO: 28314 - DNA, 1746 bp, Mus musculus
aataaaggcattgactttaaaaaaaaaaaaagaaaatctgagcagacagttgctgagacattggaggctggggacgggggctggggggagtatttgtgcaaaaaacattaactattgtttcttcctcagaattccatcatccctggtccccctttcctctttggagcctgttcggtactgctggctctgctcgttgccttgtttattccggaacacactaatttaagtttaaggtccagcagttggaggaagcactgtggcagtcacagccatcctcacagtacacaagcgccaggagaggccaaagaacctttactccaggacacgaatgtgtgacggaaatcaggaagacttctctctctcgcagcacccaggtcttagttttcacctgtagctctggatgtacattccatttccatctgcagtgtactttaagactgtcttaagaaatacttgcatgaactccgtgggaactaaagaaagaaccggacagttttccaaagatgttacactttctttcaaaaagaaaccttttgtttatattagcaccactctcttgccactaaactgttttattacacatctttaattaaagctctatctgtaactccgtctctgccatttccttaggtgttgagcctttacctgctcgtgctgactcagcgacactaggcaggatggttatggacctgtttgctttaaccttgtaaaacctgagtcattgtaaaatcttgggtcaaataattcaaagccttaatgcagatgcactagaaaagaaatggtaaagaattgtttgcatttaaaagaacttgtgaaaattgtagaaaaccagaatcatgtttcaagcttgtttgccataattttatttaaagcattattcacggctgttctgaagaatgaaaagatcagccacttagaattcaaattggggtggtcagagcctagccatctggctcaatctgtttaaatctgttctgcttcttataccactattcttttgatatttgcataatcataaggacctcaacacttgaatacataatctaaaaattatatagtaaagctggtagccttgaaaatgtcaatgtgatatctatatgtagataaatatatatagtggcctttcaggactgtcacagtaacactttatttacagagctaatgtttgtcctaaattttcaggaccctagaagagagctttatacaattactgatgtgaatttctctaaagtgtatatttttgtgtccagttatattatttaaaaaagtgttactttgtaaaaatgtacataaagtattgtatagtttacactgttttcatcttgtgtgtggttactgcctaatgctttttaaacttggagcattcactatgattaaataaggtctcaaatgtaaatattctgttaataaaattaaatattttaatgatttttttctttttaaaaaggtcttgatctgtgagtccctccctgtaaggccggtttaggctttgttacagtaacaaatcctcttaccttaacttaccttctgcaatccatttgctgccctcacctcacctcaccaaaaacaaaacaaaaagcctgaagataaaaataacgaagtgtgtaggtcaaccggaaatgcttgatttcctaagcacagttagtcttttatttcctaaacatgcttcttgcatataaaacgctcaagcctcagtgctttattgacaaaggtcacagctttcagaaatagcaaaaagcaacattc

SEQ ID NO: 28315 - DNA, 1554 bp, Mus musculus
caagtacaacccagatcctgcaaatgcacaaagttcaagaggacagattcatggtctgctcatattaaagcattgtgtgggcaagtgtgttaatacagtgtggattcaaaatgattggttatttagatatggtctaccctgtcttaaccctacagaaatatagacaaagaagcagttggatagtaaggttgttcaagttataatacattttaggtgtctgaaaatcttttatgcatcatttatatttttcctttctagtcagttaaaaagtaattgggctgaatgtatagtctaaaaatttataaggaaataataatatgtgggggaaatgggcttgtaacctagattgtgtcatatatattgatgctgaaattttgtgtaatgtggtttgtgttttgatgacattcaaaggtgttattgtgtcatgcttccataactcttcgattatttaaaagttatgcttttaaaggtgtacttgttatttctcagctactttcactaaaggcacgtgtgagttcatggagaagaagcctgccagctgagagctgtagtaaggttaggtacagcacactgggagaaagcttcatgtcccgggcaggcccttagtgcagcaacagcagctccttactggacgcttttcaggttgtaagttacctgtgcagtagagcatagaggttggaggttcagaactgacatgtttacatcagtttctatggaatgacacagaagttcatatgagaaaaaggcagcttgatatttaaaccacagtctatattaagaaattccaaaaagaaattagtcgacatcctgctctgaaccataaaatagaatactgttcttacaaatccggttactagactttaaaaatgtcattatactgtcattcaatgaagtgtttttgtttccttgtctttttgaggcagcatcttaactgtgccaccctggctgcctggggtttactgtgtagaccaggctggcctggaaatcacggagatccgcctgcctctgccttcagagtgctgggattaaaggtgtaggccaccacccccatttgagttttgttttgttttacttagtttttaaagaaaggctttagtgtcactcattctatttaaacattcattgtagaatattttattactatatatttttacccgggatttataaaaagtaattatgttatactgaaagtcatctcaaggatctccaggataattaaagtaatcgaatagggccaatgaaaatgcacctttatcacagtctggtcctatgtgccttgccttaccaaataaatacctgacttttatggagaatatactgtaatttacaactgtagacacatacttgaaagtgggattttttttcaagaataactataattctagcttttggttgtttcaacattttccctttaaatctattgtcaaaccacctgatactgagtatcctattaaagtatctaagtatcctattaaagtatctatgagcagcacttgcctaagtgagttgtgatatctgcaccatgattcaggtttgatactttaccatttgtat

SEQ ID NO: 28316 - DNA, 1190 bp, Mus musculus
ctctctctttagggacaggatctcactgtgtagctctggctggtctgaaattccctaggtagaccaggctggtgtcagtcctatagagatcccgcctggtgtcacacctggcgccatcatattgataaaaacactcactatctaccctttttgactttgggttctattttcattttgttaaaataaaatgactcatttttaaggtcaggaaatagaaccttgctgaagtctcacagttggtgtttggtaaaccagctttagatcaggtaccataccctttccagtatgtatcttgagactggtgagccaagccttgaaagaaagtatttgcataggatccctgccttgtgttatgaaaactgtcatgttgtattgtaattatatctgcaggtgacgtgtcctcacttgggaatggcggctccccagatcaccctcagtgtccttgtgattgccttgctcacttgctctgtgactgcttatcccaatggcaaagtaccaatgtcctgtggtgggatgatcccccaacataaccacagcccacagtctgagcctattcaccaaatcacagtgagtcagacgacgttcaaacctggagaccagatcaaaggtatgagtgctggagataatgatctgcatttttttttttagttttttttaaaattaatttgttttttacttttttacttattcactgtttatcccgctcactgcccccttcttgatcacctcctcctacaatccttttttttcgagacagtgtttctctgtatagccttggctgtcctggaactcactttgtacaccaggctggcctcgaactcagaaatccgcctgcctctgcctcccgagtgctgggattaaaggcatgcgccaccacacctggctcccctacaatccttcttgatcccctcccctcctctgagtgtgtgggggccccctgggtattcccccctaccctggctcttcaagtctcgtcgaggctgggtgcttcctctcccactgaggccagtcaaggcagcccagctagaagaacatatcccatattcaggaaacagcttttgggatagatcccatcccagttgtccgggatccacacgaagaccaaggtgcacatttgctacatatgtgaggagaggcctaggttggtttctctatgtagttttggctgtcctggaactcactctgtagac

SEQ ID NO: 28317 - DNA, 2028 bp, Mus musculus
tttggtgtagcccaggctggcctttaaccagttgtataaccaaagataaccctgaacctctgatctgcctgcctctgtttcctgggtggtttacaggtgtgcaccactatatctggttttaagggaactgtaattttcatgacgatgctgctatggtactttaaagactacatttatgtttgactagtttatttaaaagattttgtcttagagtttaaaaaaaaattactacattttgattttatgcgcacacacacacagacacacagacacacacacacacagacacacacacacacacacacacacaccaaacaagtaaaacctacaagaaaaaaaactaaacacgttttccgaccagcagttaggagattttctcctttgtgttcagtatttctgtctaaaggtagctgttgatttattcagtgggcatttccttaacatgtagttatattacggatactatatttcctttagcagttaaatgcaggtaggtgcccctgattagagatctcatttatttttcctttgtggagctgaaacgacatcttatgtcctgtttcagccgtgagatcagtccttataggagctagaacaaagctgcgaatctctcagttgctaaacctcacccttgtgaacggatccagcaagtgttcttgtctcttgaagatacactaacatggatgggttcctttggaagacatccctggtgctctagtgacagcacaggccgtgtgtttcctcctactccgtattttctatctctgctgtgaggacttacagccagtgggtggcgctgtaataccggaggactcatttgttctgttgccactaagtgtttttattatgggactatttccttacatcatatgctctgaattctctctctctctctctctctctctctctctctctctctccctccctccctccctccctctccctctccctctccctctccctctccctctccctctctctctctctctctctctctctctctctctctctgtaataggtgctagaaacttaatgactggtgttaatactttctgacttaacttttatttgttttctttgattatttataatgactgtttgatattttcttttgtatccttctgaccctgctgcaaatgaagataattttcttaggcaaaggaaacaagcaaaataattggtagaatatattttatttttcagatactttttcagctgatgatatcatttctgcttggccccagaaccccatcttcatctctgagtaatgaccccagctccatgcttttatttctaaccaataaagtgaaaacgttctgattttctctacatagattttagctaaaaatagcacagggttcaggtaggaatttcctgtgctcatggtcaatgaatggcacattacggtttatactatcccttgagaatgaatttatttcaaaagaaaaaggtctggagatgtggctcagtggcaccgtgcttgagcagagtgtgtgaagccatgcctccatcctcacactggagaaatgacacagcaacaatttaaatctatatgaaaaaaatttctttcagttttccattgtaagccactaaaggctaaaacatatgtcttaaccagtcctgttcaataacagacaaggaaaagttcttttcaggaaagggtttccaccttttttgttaaggtttgcttaggtacagtttgcagataggtgaacttgctggacttctgatgccaagggcaatataatgcatttttcaaaagaaaaattttttttattagtcctttaagatggaggtgtaccctctcagaggtgaaggggagatgggatgagaggaggaaccctgtgaggagaggcttggggggggggagcagcatttgggatgtaaatacataaattaaattgaagaaaaaggattttacataacggacagctgggtgtggatcccagatcttgggaggcagaggcaggaggatctctgtgtgttcaaggccaatctggtctataagagagtttcaggacagccagg

SEQ ID NO: 28318 - DNA, 2098 bp, Mus musculus
tgtgatatagatgccggactcgtgactcatcactgcacagatgctttgaccggctgtgagttcctgcacagcatcttttttacggagtggtatttgctcgggtttactcctccatcaaagtgtgcaaggaaacccgtgccacttaatcttagcatgcccgtttcccttaggaacgaacacgtcacggctcgtctgctccgtgtgtttctcatttttgtaataaacaacctaggtttttttttttttttgaaaaaagtattcatatacttttttaaaaacagcaattgttaaactaaatgatttttttctgtgtctaggcatattgtcaaaaacagtgaaatcatgttctcttaaagaagggatactctgcagaatagagattaatatatttttcacaggataaaagaaatagtctggaaaatcatggttaagttagcatgcagaaactgagtctgttttggttttgttagcttctggtctgcggaggtcaagccagggcacagatggcctatacctttattgactacgtgaatcacactcttgttagtactactcaatttgtgtgaggatctggggctgtaggttagatgataactcatccttcccggatccggcaccagcccaggaggctgtgggaaggacagcgcagcagatgccaactgggaagccgtgggggccgtgtggctcttggctctaactctgtttatctatgtattctactgaagcagggggaaatggggaacaaagggccttgttcaagataatccattattaatgcaactggagaaacggttcttttatgttctttatgaactggatcagccttctcaaagctcccatgtccttccttccttgtctaaccccggccatactcattcctaggcccacagcgttgtgggtgctaacctttccattctcatcctagccagaaccagattcatgctttctttcctttcatcttcctggttcctccttgtcctgttcccggcactgatccatctttgtaagtgggtgatgggaagggaggcagatactactgtaagttagaaaggcccaggagctgggaggcccgagtagccacagttacttctgaattccatgtttgtggcaatggcatctgtctcctaagagtcctctttgtcatcttcaacaatctatcccactaaacttctgagtgaaatgataccagccaaaggtgctcgctttgtacatgttgctggtaaggtctttgccacttgatgacgatgttaaactataacagttttgcatgtgaaatgtgtatttttttattattataagaatatatgatgcttatcttaaatattgtgctagatgaaattgtccagacacacaggacagttcttatatgattctcatgtgtgggatccagcaggatcaactgtgtggagaattcaggtcattgagtggagcctgggtagctagggggtgggagttgtttcttaacgagagtaaagtttgtgtcggggaagtgacgatcgtacagcgttctgaacgtattcaacgaacagttctgcacggagagatgattgacatgggaataaaccaataaaagctgagcaaaacgttccttgtagcactgttcctatcaagtgatgggtggtgcagcccacatgtctgttgacagaggaatgccacgtggagtgtgtgtgcagtgggacattgctcagccatacaaagcaacgaggcactgatagccgctgtggatgtagaatgaaccttccaaatactatgcgaagtgaaagaagccagcgatggaggttgtctgctctacggacccatgtgtatggagtgttctgaacagtggaatcagtaggaactgagagggtactgaggcttcttaggggctgggtggagccagggagtgggaggtgacttcttagtgggtgtgcatttttatttcaacctgacaaaaattgagtcttggaacttggtagatgcacaagatgagtgacaaggatggtccattttaagatggttttgtctttccataggacagtgtattcacataaaaaaaaaaagtaactacaccacgttctgcttccctgtgtaacattttcgattttcatccaggccctga

SEQ ID NO: 28319 - DNA, 1329 bp, Mus musculus
atcaatgcaatccaccatataaacaagtggaaagaaaaaaaatccacatatcatctcactagatgccgcaaagcctttcacaaaatccaacactccttcatgatagtcttggggagaggggatacaaggtgcatacctaaacacaatatagtcaatttgctgaaagccagtggccaacatcaaattaagtgaagagaaacttaaaagcatttccattaaaatcaagaacaaattaaggctacattccacccatctcttcaatatagtacttgaagttcttgctagggcaataagacaactaaaaagggatatgaatggaaaaggcagaagtcaatgtatctctagtcacagatgatatgatagcatatataagcaacctcaaaaattctaccaaagaacttctagagctaataaacaccttcaataaagtggctagatgaaaatttagctcaaagaaatcagtagctctcctctcctctacataagcaattaacaggctgagaaagaagttagaagacagtaagataccggaaagacgcccgtggagcccgaagtggcgattcaccgaattcgaatcacgctcaccagccgcaacgtgaagtcgctggagaaggtttgtgcggacttgatcagaggcgccaaggaaaagaatctgaaagtgaaaggaccggtgcgcatgcctaccaagactttgagaatcactaccagaaaaacaccttgtggtgaaggttccaagacctgggatcgattccagatgaggatccacaagcgactcattgatttacatagtccttctgagattgttaagcagattacttccatcagtattgagccaggagttgaggttgaagtcaccattgcagatgcctaagacaactgaataaatcgacttaatagtcaaattttgctggcaaaaaaaaaaaaaaaaaaaaaagacagtacccttcaaaatagccacaaataatataaaataccttggtgtaactctaaacaagcaagtgaaaaacctgcatgataagaacttcaagactctgaagaaggaaattgaggaagatatcagatggaaagacctcctatgctcatggattagtaggatttacatagcaataataaccatctcagcaaaagcaacctacagattcaatgcaattcccataaaaattccaacacaattcttcagagatcttgaaagaacagttctcaacttcatatgaaacagacaaaacagaatagctaaaatgatcctgaacaatagagaacttctgagcttatcagtatccttgacctcaagctacactacataataataataaaactgcatggtattta

SEQ ID NO: 28320 - DNA, 1111 bp, Mus musculus
atgctttactcggtcttttctcactctcatttgtggctttttttttttttaaagtcagatgggaattttagaagtctctagcaaaatctaatctgtatccctatgtttaagtatacatgccttttttaaagaaggcatatatgttcatcaataaagaacagatccataaattcatcctttgcttctttcctcaggctatcttagtagaaatggcataattgtcttatctactttgacttatttttccattctgactgcttatcaccaggatttctaatatgcggaagtttctcgtgaatttacttcaaatcttgctgattctcttctgtacatgtctctccatcttcctccgtcctttcttcttcttgacttttaagtataatcaggtttcttaagcaagctttttgctgctcatatctttgttcttctcgtttctctgtgcaccgtagtttggtttcatccataattccctaaactacccttttaactgtgatagtgggcactaaagttggagtagtcagtttcagttttaaacttgctgtaatctgtactatttgacactctgaccccactttgttaaggttttccctcctactttctgatactttcccttagatttcaccttcctttcttttcaattacccttcccctttcacattctgcttgtgtttggcagactttattcatacaacttagttatccttagtgcttttgttaacttctctagctcagaactttactaaaagacccagactaggaatctagccaatcattgtacactttcaaacttagactgttctccttgcaacttgtggttcctagtgttgctgtgtctcatagtgtaataagccagtgccactgttcttaacaagccagaaaacttggagtcattactccttccttccatcctgatttcagacattgattcggattcctgagttcctgtttgtccttcagctgttacaaccctattttgaacaggtattactcaaaaagtttttctgattttttttaacttatgtcagtataaaaataacatatttgtagctatagtttacttagtgctgatgctaatagaatgttttgtgtgtttacaaacaagcaatgctgt

SEQ ID NO: 28321 - DNA, 1302 bp, Mus musculus
atttgtttaataataaatcactttaataaaatcattttaaactttgtgatatatatatcacaaaattttaagtgattcttttaaaaaaatcctcaagttattctatttctctcctttcccaatgtaaacctcttaaattcttcctttcttttcacatgggtctcatgatagagacctacaagtacacaagtgttaaaagtctcatgccaactttcccttagcagtaacagaaaagaagtctcctctgcatagtattcatgtgtgatttttttgactgttagactttcctcttctttgctcactgagaattaatgccttttctcctgttagattccatgtctgcagtgcacacacaagcaactatactgtagtattttttaatgtctatttttttcatttgccaggaatgctttcattaatcaagaaaaaagtttgaggttcaaaggtaatcagataccatcatagttccgaccataaacaatgctgactggcgatgtagtggcattattcccaagaccctctgggcagcttccagaaaaccaaagtctttgggatctggcgggggggggggtacagttgcaaagctgagacttaaagaaattgacagaagggcaccaccaggaaaggagcctgtgacttaatttgactcgacacgagaaacctcactcagcccagacacagacaggatggacagattgatagctctttctcaattccgtgggtgagggtacatggcctttatttaaatattcttaaggaactgcagataggtgtcgatgtgggtaagtgcataatgctacttggactttgtcaagatagcatattatcaatctgtgtgattttgaagtatagctaatgtgaaagattaagtgttttatattggagtaaggtcaggataaggacgcttatcatccacgaacttgggcatcatctccagaacagaggtaatggcatttcttctattattctgttgtatggttcatgtcaattgaatcattttcctatgtacatttattatgtattgctttatgcacagtatgataatttattgcaataataatttgttccataatttaagttgatcataattttctaacatatttaaggaaaatatggatatcaaatggaatgctataggactttagtttttgaactctcagaataaagccactcacaggagtcaagagaaagcatgagcttctagaaacatctgtgtcacactgcctttatgtcctttgacttctttcagcctttatagtttttcctccactctagagagtgtcaaacattcatggcttgact

SEQ ID NO: 28322 - DNA, 10620 bp, Mus musculus
aaccaattgaaagtttttatgttaatgcattctgtgtgaatttaataatttagacagtgttaagaagtatagatcttatctgttatcttaccttgtgtaccattatgctctaataccaggctgggatgttagcaccgggcaccagaagagacatctatgaccagaagctgacattacagccagtggacaactcgaccatttctctacagatgggcaccaacaaagttgcttcccagaaaggaatgagcgtgtatgggcttgggcggcaagtatatgaccccaagtactgtgccgcacccacagaacctgtcattcacaacggaagccagggcacgggcaccaatgggtcggaaatcagtgatagcgattatcaggcagaataccccgatgaatatcatggcgagtacccagacgactaccctcgggagtaccagtatggcgacgaccagggcattgattattagagtcacacacaggagcgcagtatttagtccattgttttatccagtgagacccaagctagccttgaataattcttctctcgtcttcctgaaacactattatgcttgttgtacctttaaagtatgccttatgtacattcctttctccttttcctgcctcctccctaaatagctgccttctagtgctgtagcaagggagccctactgcatagccagtaactcgcgtctgtaccatggaaagggcggaacgattctccaggacagccagctctttcgttgaagatctatctatgcatttttttacacttacacataaactggtattttcgaacaataggaaactattttttctcctttttttacagttttagtacgtatctggcttgtatgtggaagactaaaaagttgatttgctaaatgtggtctttgccaactaaaatctgagatgcagctttagaccctgacacgtggatgttcttctgcagtcttgtctgctaagttttaaataaagtcatgatcagtgtgcatttgtgattacatgtgtactcattcttttcccaagctgacgaggtctctcccgagtggcgcttcgaaaggcgtgcatgcagaaatggccgaggacatgcaggtttgggtggtgtgcctgcagacttcatttgtgccaatgtattactgtagagtcgctctgtttccttcaactgtatttattgctgcgtttctcagcataaacttatcccattgtattttttataaataaatatttttttttgaacattcatatgaaccacaggctggttattttctggctctcttctacataggcagagtaaggtgagaaaccagaggccttgttccatgggcactgagagaaagtgttctaatattatttaattcatacaatacggcactcattggagactgaatctaagctgggtatgcactagggaggctgaagcaggaggatttctctgagtttgagatgatcttgggctacagagaccttgttttaaagctacagaaacaacaaccaaacgaagaagaaaaatgcccattgcctatagtaaaggggcaaccaagatttacctggtccttgttctactacaacttggctgccctgggtttatctgaaattcgatttggaattctctgaaacgcaagggggagttattacatgtgtcatgtaaatgatcctaaagccaggcatgaggtgtgctgtttgattagagcaggctaacccacagctaagtgtgggaaagggcagtgctgtcacgggggaagctgctcggtcacaccctctgaccttgtctcaggtcaaggctgactgatggcctcgggtggttttgtaaagacagataagagatgttgaacccacagaaaggatgtatgcttgttcctcctgtggtggcttgcttagatgcttctgggagtgccctgtaaatcactgtaggagactgggagctaaatgaattctgtggtactattaaagaaaaaatatctaaagtggtcctgagctgtcaggctgtttcttgtcaaattgcaaaagtggttaggaaagcaaagggaaggagccttgtattagatctcacgtgctggcctgccaagtcagtcagattgtgtttcctgttagaatgggagttccacacggcatctgggcccacgaggctcctgtcctcatgttcaaagtttccatttgcttagggcttttaaaaggaaaagatcttctgtttcggtatgtttaaaaaataattaaaaaaaaaaaaaaagctgtcagacaagtctcattttgggcaggggttggttgagcaacacctttctataatgtttgctggtgtgtgaaactcccgcctgcttgcagccggctgggtctcctcgtgttcagcagcctcccctgtgtgtgtctgctcttgaccttccttccctcactaagtctaagagctataacttggcatgctgatagcctctcgtagcatgtgtccaggctaggaagaatgagagaaacgcctgccctgcacaagagcattaatctaggtttgttagatttctgctaacaaaatcctcctttaaaaaaaaaaaaaaagaaaagaaaaagatgaacaaacaaaggtgaggtgttaacatttttatttattttttggtggtggtggtggggctgagtgagtgcactcggggcagttcacatgtggagctctgaggacaacttagaggaactgattctctccttttaccatgtgggtcctggggtattcagttcctcgggttggcaactggcacctttatccagtgagccaaccttatttgtttgtttgtttatatgaggtctctatgtagcattcaggctagcatttaacatctgagtatgtagctcaggctagccttatagcctcttccagttttgaattacagatgtgtgtccctgtgcccagccaatattgtgccttttaaattgatgcatatagacatagttttaacatcttccgtgctctagttcacgtgaaaacagctgtagactttgtctcggtgtcacaggtagtcaaagttctcttggtccctatctcacaatgggctggagttctgtcccctcttcatttggtaaagcatccttttgtccttgagacttggcattgttcaagttgttggtccgttttataacactctgaaaaacaaaagaacgaaagaccccagtgatgtgcctgcagcatctgtttactagaggctgtctccctacaggttgaggggattggatttttagcgcttttccaagtgtattgaaaatgtttgtgtgcatagtaaggtagatttcaaagcaggattctaactggaaattaacaagtcgaggagagtagaccaggttagctttaatgcatccatcccagtagataaaggtgggcagaaatcacatcttacgtttctatgagtggagagcacattcatatttattcattcataggaagtgttgaaatccagtacctgccgaaatgacagtgctctgaatgtttaaggccaaaagagcttaacacttaatttttatggcgacaaaaggaaagaaaattactaaaatgtcacttaacaccccttccctgccagaaccgccgaagaggagtgttgaaatgtgtcctgtctgcggaggataaggcaaaggacgagcaatgtattgtgtgttgcaaaaagctgttggaaacaactgcctggtagttccagatacaagtggctttgctgagggtgtgcctggttagcaaggggcccaagggctgttagtattggcaacagaggtgagcggtctgcccagcggtgtgctctacccaaagctttgtgggtatgcttgcatgtgcaagatactttacataaatatcaactctcccagacagaagtggccgaagacattgtagacataacagatcaggctgttagtgtcaaagacgtaccagctaccgctgtgttcctgggtatgctgcagtggaagagcctacacgccccattttattctcacctctggactgggagtttctgtggggaaatggttcctcgtctgacagctgagctcccaccccccaggtggaagttgaaactcattggagccctctagaccagaaaggaggctgggtgtgtctcctccctgtatgtgagtcttcaacacttgtcaggggagagattacaacaggagatgaagcgtttgcttaccaaaaaccctgggtccataaagtacggtttctccgacgatccatcatttgtttccaggtccacagcaaagcacaggaaaaggatatccagcgcagtttcaaacacggataggaaactgtgagccaccacgcaggcaaaaaaggcaaccagcagcagagggatggcccacacctggagcgcacggctgtagttaaacgccatcagacccccgaaaatgctgaagcacaccactagcacctggggaggaggtggttgaaaacctttataaatagggttggtgggctcttttaccgaagggtctgcccccccccccattataagtaatgctattgtgtgtcctaaacagaatttgacaggctgaaatagaagaagaaggaaaaaaaaaaagatggaagaagaaggaaaaaaaagcccagttagagccagagagattgtactttatctgtaaatctcaccacagtatggccaagtcatccggagcctcgctttagaagtgtacatgtatgtgtgcgtgcgtgcgtgcgtgcgtgcgtgcgtgcgtgcggtatacgtaatcctgtggctgtgtgcactgtgtggatatcagaggccaatttcagatgccttctttgattgctctctaccttcttttgtgaggcagggtctcattgaacctgaagcccatccatccgtttgtctaggctggccagtgacctccagagagtcttccatctacacacacacacacacacacacacacacacacacacagcactagaattaggcatgtaacatcacagtcatcttttatgtggtagtggtctcatgcacagaaactttaccacttgagtctcagctgcttaaaaagctttctctagctctctcttttgcttttgtttgtttgtgcttgtttttatttctttgagacaagagtttctctgtatagccctggctatcctggaactctgcagaccaggctggcctcaaactcagagatccacctgcctctgcatcccaagtgctgggataaaagccgtgcgccaccactgcccagcatttcttccttttttttaaatccccatttttatactgcaagcaattgaataggtggattaataatttcctaagtgattagttttaccctctgagcactaaagtggaaagacttccctctgctagtgtgcaagataattggattctcccaggcttttgtgacatgtaattactatatttccaagaacacacttacagggcatgatacacccaatttcttaagagtgacagagtccacctggggcccccattactcatggatgcctgtgaagatgaatatgggattttgaatgctatttccttcagaagcctaaagtcactgatcatcccatacattttgaaaggtcactagacatgatatgcttatggggaatctaagaaaatcgatatttaaagtgaaatagaaatataaatatgttaagaattttgaaactggctgggaagtggtggtgcacgccttttatcccagcacttgggaggcagaggcaggtggatttctgagtttgaggccagcctagtctacagaatgagttccaggacagccagggctacacagagaaaccttgtctctaataataataataattttgaaactgcattcaaaagtatttttggaattaggaaatacatcacccacaattcaactaaggcaatagattaacaaattgcatgcaaccattccttatttggctgttttgaaaggcataattacattgtacttctgttactgctgtcacatgaagcatctctggggccaggtgagccttaaatgtctgtgtaatgagcacacacacctgtgagatccaagcctgccttaacttgcttggcaccaactatgacagccctgcaccagactctgcatgcagaaacacagaatcctcaatggggcacagtcaccatatatggtattgcccaggtcacagctggtgactaagatcttgttcacttgtgggcattgcttgaaaactggcatttatgtcagagaaggaggaatggttgaaagaactgagagtgtttcgctgcgaatacagaagacgtggtgggaaagatcagagtcaagaattaaagtagcaactataggggctgtgggaccctggaaacatgaaaccttagagtcacctgtaaaacaggaagcctcacaggattgtgggactgagtgaggggtgagacatggcagctactccagagcaacaaacatgattccctttcaagtcagcctccttgttggctactttgttgacttccaggtacctagtacttatttagtcaagacatctcacctttcccaggaaaatgacaaagtttccaaagcagttaacagacgtgagatgacttgaattcttggctatgattgtgtgcgcatcttttgcggatgtacaaaagtctgtcccgttaatggcagttgcagtgtacgcatcctagaacagaaggcatcagttatgaatacggtgatttgtggcattttaaggcaacagaatgacagtacaaagtatgtgacctagtatctccacccaaaacaaacaagctggactatgatctatttcttatcatagtcaaatatatttccataccattcggaaaatgggaaaggacctcatgtcaatcctgcaggctgaatggcccagcacacacatggaaaaaatgagtcgatataagttattttgtaatacacaatagagtcggagggcagggaaaggtgtttgggtaacaaaaagagagcagaccctagggacttgtgagccaaacccaaggctgtagctggtatggagttagtgagggcttcttcaggatcccctgggcctgagagatagtattggttgtttctagagagctgcattccctgtacaaaataggattcataatttgaaatcaaccagacacttgggaaagcacttaaaaaataacctaacgtgtgcccaagatagttgaaatatctggggtccgggcaaaaacaagataaaaatcattccaccagggctggtggatcctcacaacaactgtactggcagaagtgggctccccagagcagggcagagccagggagatatataacaaacccaactctgccctgaggaccctggggaagaggtatgctgaaagtgctctaaggaaatggggcaggggctagagggaacagcaggatggtgtggaaaaggaagagacagaaaaaaacggaataggaatgaaaaaaaaaaaaaaaaaaaaaacaactcacacagtttaaattacatatttggcttttgcccctaagaaagcatttggtgttgttacatggcttctaacattttaatttctagtaactcagttttatggggcatgtgctttgcatatgtgcaggaaggtacactttgaatttagccaagaactcaagaagtgaaatgcacctactggctatttaaaatattctgatattaatacatactgaatgtcttaattttgtgatcctagatccttgaagattagatttccaaaaagtgagatttctgagtcaaagcgtgcatgcgcgcgcgcgtgtgtgtgtgtgtgtgtgtgtgtgtgtgtgtgtgtgtgtgtgtttagaatggcagatttggttttttgtttgttttagtttgtttgagacaagggctcacataatgcgaactggcctcaattttgcatctccctctcaaaggctgagtttttgggcctggggagccacacgggggtttatgtggtgttgggaactgaattcaggccttctcatatgcaagcccagcattctgcggactgaattctaaccccagcgcagactcattctttcaaagactggaaagcaagattaagggcactttcccaaagccccctgatgagtcagtaagacaaagactcttttctttaaacaccaactgtctggatttcacatttcatcagtttgcattgggccaaaactcaatctaaaagcacagtggttccaggaagcacaggccctgtaggccagctgtctttgggctcaaatcctggctcttccagtgaggagacactgggcacagggcagcgaccagcctctcagctccttttccttatccaaacagggacagagagcctaccgatggggatgggaggtttaaagatacaggcctgaggaccccagcatctggccatagtacctgaaggctgatcactctcacgtagctagagcacttcaaagatggcatcattaaccagccacccggagccctgatcaactccttaagattctggggggcatgggaaagacctgtgttctttatcctcatgggaactcagaagtggtcagctatgtgtcttggaccatgtcccggtgcccagtgtggtggccatctttgcttcctctctttagtcaagttctaacccaagcccacaccacaggctcaacactttccctactgattcctagtggacatcccgagtcacgtggggaagggtaggttgatttttgttttgtttatgcctttttttttttttttttgagggagggttttctccctgaaacctactgcctcacagttcatcactcatgagcaacaaaaatagattttgttcttcggctaagatgattaaaagttaaacggtacgtttttgtgcatgtgtcgattccacgactttccaggaggctcctaaccatttatcttttctttaacatctcacggcccactgaaagagaacactaaaaccacactgacagggaaattatatatgccttcctaaagtgactacggtaataacattttaccgtgagatcccaccctctctgccacatccagacctagattagtgactagctgaatgagcggtgggcgcagcactgcccgagaggcatcctgctgtttcagtattagtggtccacgcttaagctgagtagaagttgtttccttggcagccatctggaggatggagtgcactagactgtccacagtgtgtgcacgtatctgagctgacagctccgggaccatgtgcaaagggagctgctacagaggttgacggtgtgtggaaagagtgtcttgtgatgaaggataggaagcaagcacaatgggttgcttatggaaacgattagaggaggaactccccctccccacataggggaggaacccccttcccccatggctaacctttcagcaaggaaaagagagcaatggttaaaccgctctaagttgatgaccatgtaaaactcacagggtgaacctgagatagggtctcatgtaccaattctcagatttatctacagctacaatggctttgaacttctgatctcctatctgaacctccctaatgctgggattactagcactgtctagatgggtaagcactctaccaactgagctagcccaggtcgctgggtttaagatttgactttctatgctgtgcattagaaaggaaaaggagaagtgtgtgaaatgcgggcaggagaagatcacagcgggcatttgttttccctggcctaaagcacccagttttattccaagttttctcaatcacttaaaatataacaaaggtgccgggcagtggtggcgcatgcctttaatcctagcacttgggaggcagaggcaggtggatttctgagttcgaggccagcctggtctacagagtgagttccaggacagccagggctacacagaaaaacatatatatatatatataatatacatataatatgttatatgtataacatattatatgtatataatatatatctcaaaggcagtggttctcaatctgttctcaacccattgcagtgaggacctgtcagatgaccctttcacaggggctgcatatcagagatttacattagaattcataacagtagcaaaatgacacttatgaagtagcaacaaagataattttatggttgggggtcggtaccacgttagaaggaactgtattaaaagattgcagtcttagaaaggttgagaactaggaggaataagccaagaattatggctgaaaaaacatcatatcagaactctgcaagacattcccacacaagcgataatgcccacagggccctgctgcacttagggtcaatgtggtgtgaccacacagccaccgagtgcactggcgaatggcagtggcaaaccagagtctggcccaaagtcaagaaaactttcctctgaacacaactgccagggtcaggaactgaaattcttcccagatgctctgtctcctgaaccccacgccaccccccagcagatgtcctatggtatgtcccaaaacagcttgacacaaaccggaagggcgcttcctatttcctatctgtggcctttaatgttttcttccgtaggcaggtgtgcaccttctatgaggaagtaaatagtgacacaaacattcactcagtacacactgcgttccacattctagacacttcctgaacgtgcggattcattggcccctcttagcccccaacctgtagggtagctcagagcacccaagcacaaaagcactagaggccatg

SEQ ID NO: 28323 - DNA, 1162 bp, Mus musculus
ataccataattaaacacattactttgtatgctggcctaaaaataacttttttaaatgcaataatatgtttaagtattctgccttcttgcctctgttaacagaaagttctctttccattggagcccattcccactctgggctagccagctccttagccacaagcctcactattcccttccctaagccctacactatctagttctgatgccccaggctctgcctgtttccctgcttcatctcttaacccaatagatcctctggggtactgactaccccagccaactactgtctcttcgtctccaccatcagcactgtgccccctccttctctgtctttcccatttatcttctgttataatctctgccaccaaactcagggtcgttttttggactacatttccaacatgtgttcttccatccatctcccgtggctcctttctagtccaggaaccttgggtagctcatttaatgctgtagccactgtcagtttctctcaagcgtatgaggtcagataaattcttaatcaaagaatgagagaaagagtggaagaaataaatgtcgggtttcaaaaaggcgggacggtatgatttggggtcacgcccaccggcaagtggcgttcgagcctccatgttgactttacatctttgatttatttttttgtttgtttgtttgtctgtttttgcttttcagaaacactcatcattgtgggagcagtggtgctcctggccaccatctttatcatcctcctgtccatatctctgtgcaagcgcagaaagaaccgagcgggacagaaagggaagaacaccccgtcgcgcttggcatagaggaaaggctgaagccgctaacgctcacactgcctgcacggcactgttgcggagagctctgatgggaactgtgcaacatggagcgtggagcctgccgatcctagctcagagaggctgccttcatggcctgttactccagctaacgctttgattccaacactagcatttgtcacgttaggacgaactgaaacggtacaaactggttaacactacagcgccttttgcacaaatgctttagattgtatggtctacactcaggaagacactaggtcacccaggcaaagccagtggacagatgcctttcatataacctgggtgggcttttggaaaatctttgag

SEQ ID NO: 28324 - DNA, 1464 bp, Mus musculus
aagaatgtccttattcttgtggttaaaaaacctgcctgaattaaattgggcttaaatcagtgtaacctgattcatcctgggatgtaaaccatttgaagtcagctaatttgacttttatggctctgtctttttctttcatgaagaaccctgtttaaaactggggtcattaactgttctattctaacaaagtagtcttgagtttcatttcttatgccccatggtagtgggaaccagaccaatcacaatgttttattgaaacatattccatcgttacaggatagcgttcggtacacagtggcgggtttctttagctgctgtgtttattctcattcctcacacatgcctttaagtgcattggactccaggagagccatttggggtttctctagctaaacaataaatgtacctgtctcagtccgctggactgagttgttttgaaggttctcatggtgcacagcagtgtgtatgtggtgtacaacagtgtgtatgcagccgtgcttacagcctgtggttgctacctgttgtaccagtctgaccagtgtttggaatgttcagacataatctcctgtgtgaagctcaaggtcttaggaggattttggattttgtgaagagatggacagtctcatcagaaatgtggttgtataatggtgagcgccacatgagtgtagaggcactatatgacgtagtgtactgagcatgcaacgctgctgccgtccttgtctgtggtttcagtttgtaaaactgctaagccattctcatgcacatgggtgaatgacatttcctaggaacggtctctgactcctggacaactactcctgtatcggctctggctccccggaaccattagagactaactgttgtttccacaaaggagggctgagagtgaacgtgatcatacgtagttgtgaaatcggtttgattgagtgggctctgaaaggggcatttaatggtcttgtttcttcataactcacaatcactggctaccaagataaccctgatgtattgattccataaatgcatcacattcagttttaccatgtctccttagcaaacttgtgtacttattttctgttcagattaaaaaaaaaaaatgataacctacagaacatgtgcctgaccttttttattcttggttttgaatgttgacattcagaaagggctttcagcacccaggcggtctttttacattaccttattaagtgagctttaaaagattttgttttatatttctaggcagggtctcctatgttgctctggctggccttgaactcaacagagatctgcctaccttttcctcctgagtgctgtgattaatgtacatgtttaaatgtgcatttctttcttagaaaatcctcaccaaatgtttacacttcacaaatgctaacagatggccaggaaggctaaaggctatcgtgtcctggaaaggctttaaggcacagggaaactacacgttttcagattgct

SEQ ID NO: 28325 - DNA, 1222 bp, Mus musculus
cctccctcccgtggtgttgagattgcgcggcggccgccaggctgagggccgcagggctccgggaccgctggcccggttccgcgggcacccgcgcagctcgggacctgggagagaagggcaaggcgcgcgcccggagctccccgctcgggcccggggaaggcggcgcggccgcgagcctcacccgtgcaggccgagggcgcgacgccgcttatggagtaggcagagcagcaggaacgcggcccccgccagcgaggtgttccgtgccgtcaagtacttgctgaaggccgccatggcaccggcagggcgagcgagccgcgggataggggacgcgccggcgacaacctcagtgcaggaaccgcgggggaaactgggaggatagctcggcgccgagagagggcggggccggccgcgcgggaacgccccctggcgcgcgccgccgcgccgagcccaccgtggactttggcttcccgggcgcgcgcgcgggcgcggggcgatcgaaagggtcgttccccggggggacgctctgcgcacgcgcggacccccgcggactcggccggaaacgcggcgggcagacaacgctagtcctccgcgccggtctccagcagcccacgcttcggccttgcgatctctgcttgcacacaccctagctttctttcacaagaactggaagagcgggccgggcctgcgccacggactccgtgggccctgcccctccgccaccccctggatgggtcggtaccaccctcttaaagaagccgggggaggaggggaacggccccatcactaaaaaggtcaatatttgcaacttaaggagtgaagggagacctggaaaagaaagactacaatcagataatcttatttcaagtcgccgtggattaggtctctagttctgtaaaatcggtttgggaggacgggtccaccactctgttaatttttttataaaaataatgtagtgggaaaaagctcagagtgcgtgacaaaaaggagttttaagaaacaattactcttttttggtagatatgtacaaggatggcgataaaaaaatgtatttctttatgttaggtctggtcaaagaaagtttgagaaactctgttctttgcaaagggacattcagaaataacaatcgtgcgttgtattaatgctggccttactcccagaagcagacgaactttacagattacagcattcttctcctgtcccacccctatcatgcagaaagtgt

SEQ ID NO: 28326 - DNA, 1787 bp, Mus musculus
ctttccttgtgaacctcctgccaccttccccacatgccgcggcacgtctgtgccatcagagctgtttattggctagggtaaacaaaaccaagtgcacacgaggcaggtgctcgctctcccagacgctaatccttggcgctggattcacttctgctgtgttaaatgcttatgaacatagtaaggagcttctgtcttcaaacctaacctgtgtggtgttgttttagaactgctctctgaggcaagtttccaggaagctcttcaagaaagcatccctgacattgaagcccaggattgggtgccgctgtggctgctgaggtactcggtcatcgtgaagagcaggggaatcatcaagtctaaaggctacattctgcaagccaaaaggaggggctcttaactccagctcacacccacagctcaccgacctgctgttgtctggaacataagatacaaattcatgataacattgagatgtgtttaaaaaaaaaaaaatatagctccgccttacaagaagcatccccgaggtgcgagtgcagttgttcggcactgtgttgagttttgagggcctcccgtgcctctgcagcagcgcgctcacaggaaccactgtattctaatcattaagctgttgttttctaacggaaatcgtctataaagaaaaatacttgcaatatatttcctttatttttatgagcaatagaaatcaagaaaatttgttttaagatatattttggcttaggcatcagggtgatgtatatacatattttttatttccaaaattcattaattgcttcctattctatacttctataagcgattacattacagttgttaaaacatactagatttttttttcccctgtcattggcaaaataatctatctcagtaactatagcagtctaccagtaatgtaaataaaattcattctttgatccacgaatggaaatttaatgtgtgtgttcttgcttacagcgtagctatagctatgcattgaccacatgttctgggtcatgtttcttccacctcttatctacaaaggcagagtgtctaagaaggcggcttgatgctttaacattattgtttgggggtttcataaaagcaactactgttgctatcttcagagtctttggacctcttcctgtactctcagtgtgttgctgctcagttggactcaccacatgcttagcactatgggctctggagagatgaactaagaatcagccaagtaaaacttttgatctctgtacctatcaattgccgacaaggagtaaagccaggaaaggcggaggggaagaaaatcatttagttttaatgtcatactagtttaagagtcagaaaaatgcaaagaggctatggtccttacatgtagcattgaaaggtcttaatctctaaatgtgtgtctgtacccaggttcagtttctctttaaaaggtgtcttgtatgccaatatttttaaaccatgagtctttgtaaaactaattttgctcagaaaatttcaatgtagagaaaagaactagagttctatgttaagccaatacagtagatggttttcttaagtgagactttgtggttactgactggatgctagtctcaattagaattatgtgaaaacaactgatttgcctactaaaacttaacagaatttgaactaaaagcctataattatattgattgtatataatgctaaatacataggtaatggttaaatttggaaatgtaacttttctatagcgtatatctttaaatatatgttgtatttaaaatctgtgcagtgcggtgtctgagctgctctga

SEQ ID NO: 28327 - DNA, 1181 bp, Mus musculus
cctttaaaatgaaaagctaagttatcagtagtgtgtataaaagatatatttgaatgtagtgacccagaatagaaaggttttgtgggtaatttctaagtaaacatttttttaaaaaggttttaacttactacattcccaaaattgagtggtaccttattcagcagcgctctgtgacttgggattcattcctcgtgtttaccttaaattccacccaagaattttagacatcggaaggatcaaggtctctttcaagctaggttcatgtgctgtaaagtctgaagccctttttgtttgttttctgagaaggggtctcttatgtagtcctggttgccctggaacttgctatatagaccagactggcctcaaatagagatttgcctgcttctgcctcactagtgctaggattaaaggcggtgccatcacaccctacccctgacgagcatattggtggcagaacactaatacagcatctgtttaaggatgagcagtgctagaacgtgaatcagaactagctaatagatagatgttcagtcctgaaaaatggttgtctggacttgtgagtttatgctttcatttggttgtcaatgatgagaacgtctaggatctgaagccccacattaaatttgaactacttgaatttaaacagtataatttgaaaaaaactgaattatttttaaaactatatagagtaaagtaaaaactgaagttattctgtattgcataggcagtacagattttctgtgaaaaccataaagctattttgtctactttgcatgaataattcagacttttctatatcaaggccaagtagtaactaaaaattggatcttgcttttcagagataagaattctcagctcatcataattatatgtctttatctaagtgtttccttctaggtctcccaccaagtattagatctttgaaatgtaagcaactgatcactgatatatattgtctggcaattcattcttctgccaaatgtacatacagagaattgtgaagatttttaaagaattaaatcacttgtgcaattgtgttcttatttgcagatacgccagtttatgactttaaacttatttttccaacactaatttccagtgcttcaacatcaactccctctcttttcaacataaaattgatgaagggatgtggcagagtttgatttttcaaaaatatgtaa

SEQ ID NO: 28328 - DNA, 1219 bp, Mus musculus
agataaacacgcacaagcacgcacacagacgtcgcctcggcccgcactcgcagccgcaggtccaggcgtcagggaagagcccgggggccccgcgatgggtcgccgccttcgcctcgtagccccgggcgcggccgctcgccctcgcctctcgcaggtggcgacagaagtgcccggcgcgacggcgcaacggccggtctgggcctgcagcctcggcggcccgggccggaggggagcggcctccggacaccggtaggcggggttgcggggcaggcggggagccggggagggacaggcggagtcggccacggacgactggctcccgctgcgctttcccgacccacggcccgcagccgcggcccttgagctgagcagcggcggttcccgggcggctgggcgctcgccggcctcgccgttaccgttggaggtgacctaggcgcggcgggtgggctccggcgacggaggcggccgcgatggtgtcggcccgggagcagggccgttgcctctagcttaatacggcagatgcgcggaacctccaacaggtggctccgtggcgcaatggatagcgcattggacttctagaggctgaaggcattcaaaggttccgggttcgagtcccggcggagtcggaacatttttcttttgtcaccgaggaaattatctttgatttctgtcttttactccttttctttgtattctaaacggcttaattcccagcacagccacacaccattcccgctgctctccgcaacccttacctggagttccgggagctttcagacccctttagcagacccggaccgatcccagtcgagagaacagggaggcagtagagaatccaggtgctcgaccttggcctaaatgagagcttgagataggcctgggtctcgagtgacattccacgtctggagcttgacagtgactgccagcagggtcaagaaaacaggatgcgcaagctagtccgaaggcattagaagtacaccacctcacctcaccccaccccgcctccggaatctcgagtggatcttgttttgtttttttgtttgtttgtttgttttgttttttaaaaaaggcagatctctgtggtcatttcatgattccatttcggtggatctggaatggggcccagaaatctgcatttctggggttgtctgctttcttcacgaaaggagacaggttggagttgacaggctttgcctgccagctagaggcaagagttact

SEQ ID NO: 28329 - DNA, 1183 bp, Mus musculus
cctcactcagttttatagtttatgatgtacattaagatcttcaaatatcatatataagaaacatttcgcatgcagtcactcaaagaaatccagacacattgcatcctcagccacagggctcgcaggtacttagttctttctttcctcgcactaaatgaacccgggccaacacactttctgatctagcgccttcctctctcctcggctcctgacaggttgctaggatactcgaagtctctgaagacaggaagaggagcatgggtgtgagctctgggttggagctcattactttacctcatggacggcagctgcgcctggacatcatcgagaggtgagcttgctgtctctgcgtcccgtgcagcaggataggggtggggatcgggggaggagggagaggagcagcatctgactgtgactctccctcaagcctgagctatgtctgggacatcacacctcccttgccccattcctgaacagtggctggagggtggcctcctttgaagccctggctggcgtggctgcagccagaacgctgcacctcctgctgccttcctcccctcaggagcatctcccggtgtctctgagcttaagacctcccgaagaattaggatctggaaagactgaggagaacgggttctgacctctttctttaagggatgctccagaggactggggttccccaggctgtgaaaccacactgccattttccagaaacagcagcccctgggtacttagtgtctttccttgtcgcagcactaaatcaccctggcaagagcatcccaagaaagggtttatctcagttcacagcccctcatggtggggaagccaagacagcaggaacgtgaaggatgtggtcatgctgtgtcctcggtcaggaatgcaagcttttgccccatgcccttagcagggtcccagctggggagcgctgctgcctacagggccctgtcttcctacctcagctaataaagcccccaggggcccatgtactggcagattctagattctctcaccaccacactaggtgttcattaaaacacacgggcatctgtaacctcaggacttgggggctggagcaggatgactaagtccagcccaggctataaataaagccttttcacaaacaataaacaaaccatgaagcaaagccaaagcatgcccttgaacatggatctttagagatgag

SEQ ID NO: 28330 - DNA, 1100 bp, Mus musculus
tctcttgttctgatacctgtgacatcttgaatcaagttcatattctccctatcccccctccccgtctccgtctctctctctcacactcacccctgtctctccttttctattcccactaagtggagctccagtcttcctgtatgttgggaaacctgctatctcctcgtgcctctcatggtaagagagagaacacgcacctctgaggtcctcctgcccttgtgggccacctcgtgctcccatgtccatgggtgagcctggttctgatcatggtacattctttacctggtgttggatggactttatcgaaatcagctttccaaactggctcccagccagtggcacacaaatagcccttctgatgattaaagccattttctcctcatcttgtcgatccgagcccgaccctttggtcttctccttaggcacaacaccatggccattggcattgctgtggacattctgggctgcacaggcacactggagaaccgagcgggtaccctcaataagatcatccaggtggcggtggaactgaaggatgccatgggagacctctatgctttctctgccatcatgaaagccctggagatgcctcaggtgagatgctggctttgtgcagcctcccacacaagcatgcattcaacactcgtcaaagagttctatacgtctccaccatgcacgtctgactgctctggccaacctctaaagataaacgttagtgaaagccacgccagggacaggcaaccgagagcactgtccttagcattttgattctgtttctaaaaacactggtaattgatcatagttcaatatctcatctttgatgcaaaataacaagagttagcctcactgctaacaagcagtattcctgaagaaccagtcagggcaagacaccatgctggagtctgtggtatgacagaggctgcatccacttgggtcaccagggatgtggctatttggggtaatgactggggaaaccgaggcatttaaggaacttgtatcagagattccctagaccagcggtcctcaatctgtgggtcccgacttctttgggcgtcaaaggggtcacatgccagacatgttacatatcagacatgtacatt

SEQ ID NO: 28331 - DNA, 1099 bp, Mus musculus
ttcatccccagactatgtcctgaaattccagatgatctcagggtcctgtatctcctgttttctactctgggacagaataaataaaaggcaggatcaagaagaatgtccaccattagtacctgggaaggcgtttttatctagagttcattgtgttcttgctccaagtgtccacacgtactagaaagtgctgtgtaaactgaactttaagctttgtagtaaaagcaagcagcttcttcagagtgatacattcatcccagtgtgtggtgtggtgtggtgtggtgtgtgctgcattaagtaagtggtgattcccacggtgcttagagagaggcatctcagcacacagtgggtaagtgtagtgtgtgatggaccacttaggaaaagtaactgatttgctcagagaggcagcctgtaaggatgacttccaaacaaaactccactgtttttagtaactgtgatactgattatgaggcagggtctcatagattaaaagctgatcttcaatttgatgtatagccgagggagaccttgaacttcttgatcctcctgctccacctcccaagtgccaggatcacaggtatgtcaccagcctgatttatgctggagagtgaacccagcgcttcatgcgtgctaggcagacattctactacgtgagttatgtccatagtccccttcgttgattcttaaaaagtcatttggcagaaagcaaagctgggctgacttgggaatgctactcagacagtaagcctggctgcctggaagtatgagggaagtaacctaggaccacagaaatttactaccataagtcagacttttcagctaagatagttgagtcatgtggtatgtagctgaatgatgtgacaggtaaattctgcatcagtcacactgttacaaacagctgcagacaaggagcaatcaccatgactcctcacagcaccacaagcccacagggacacaggcttagggggctgactgttggttctttgaagctgacaaatgccctacatcttcctttaagtggtctttttagagagaggacagagcccatctcaactcttctttaaagcaaactttcattcatgtttacctttgaattttgggc

SEQ ID NO: 28332 - DNA, 3077 bp, Mus musculus
gtttactggtaattttcaatgttgtacaaagttcattctaagctaatcttccacttgtaatacttcattagtgttcatttatttggttcctggcagttactcataggagaggttgagtctaactcagtggaggtaagggacagtctggagtggaggaagaaagtgtggcaggcgtgttcttagaggagaaacagaagacaggttttttactgagatgaaggaagatctctaccaccgttgagggcttcgttttagctgatcgtcgactgtcagagtaggtacctcttctaatgtattgccaaaagcatctgttggaatgtgtccagtcagctgtacagtgtagttgtcatgtgaccacatccttgttagttgagtgaggagataaagggaggaggcagtaacactggcctttgatcatcttgtgtttcagagttctctggtgtgtttagtagccaactataaaatgattttaggtacatttgggacagacactttaaactgaatgccccttttggtcttaccaaaggtcttcagtaattgtttttttctttttcctcctggactgcaggttcctgaagagggtttctgaggaaatgggcaagatgttgaaggaggttacatgcagctgctttgggggagggtattagagttgtcaggctgaaagagagagtgagagaagcaagttgcatgaatgcatgcagatttttttttactaacttcattagcatttccatacattaaaaagtcattctagtaccagtccttaaattcctagtccacagttgttcacatagaagaaggaaaagaaaagccagcaatggctgacctcttttttcatttactgataccaaatcagaaagaatacagagctgtcttaaagtttgtcttattttgggctgtccgttaggactgtcgtcatcagctctgttgaattggcttctagactcgtcgtctgtcaccatttgtcactgtccgcctgcaccacccctgcgcttgcttaacaccctgttgcatgtctcgcgtgatctgggcttagagttttcaggcatgtctctgtaatcccctgttcttgtcaaagctttgtttcattttgcatttgtagtgcaaatcactttgtcagacacctcagcactaatgtttccatcttagtatctgtgtatgctgctaaaacttccctactgcaaacgttccagttttgacatgaagacatagtctgtgaacctgaagtatttacgataagaaaaagaaaacatctctgctctagcctgcagcccagttaccgactctgaaatgtgacgcatcttcagcacctcagtctgggagaatctggtcagcactgaaggcctggcataataacaccgaagggactattgtcaaaagtcagctgcttccattcaaatgctgccttaaaatcgagtgcctaaatctgtttattgccaacactaccactacagtatcccacaaagggctttatgtgccagctcagtgctccgcctctaactgtggcacctcgcagctgtgatgtagcctcggtaggtggcttctagagctctaccatgtgcagtggtgcatcttcaaattcatggatcaaactaaagacctgtgtgagtccattttactttcatcggtgtatttatgagacgtttgatggaccttcccccttcaccttttaacggggtggtgacgatctcccttgattattttaatgatagtctgtttccaagtgatgcttttgtttgaaccagataaaattcagtgagactttgtaatgatctatgtgcacttttacttgtaaaatgggaatttctgtatgtttatacttgtaaatacgattgtcgttagtgccctcattgctcatgtgtcctgccgcgcgtttgtgattctgtgactgacttgtatgggaactaatttcttagtggtcttgtaacggggcggggggggggggggattgtttgtaccactgaagctccattcgtttggttctttactgttgtgaggggagaaagagaatgtgaaacgttctgtgtattattggatttcaagcaatattttagaaaccgtgtgactgctttaataattttttccaatgctatttgaatcatactaccagttacgctaaagctgaatgacaattgtgtgaacattaatgccttcataagatcaagtacaccactgttatgcagctgacatatagtatattacatttgaggctagtaaactatacagttttagatattaaatctcgttacagggttatttatataatgtgacattattctatactgacagactacatgaagtagttttaaaaagtagtgctatttttatttcaaaagttagcaatgagaaggaaatgtgacctggctgtgtttgtcttctgtacagagactgaagtgcttatgtttttctgactaacaatcacagagggcaaagttcaacgctttcttgtacagactgttcttttcaagctactgtgtgtttttctaaagctggtgtttgcttccatagtaggcaagttccttcatgtggagtagtgcaacctgtgtatgggttataacatttgaagacacttggacttgcacagtttttaagtcattcttaaaccattcttaaactttgaacatgtgagctgtctaaaagaaatctcttaatttcatagtaatttccactttgtgcacatattgatttcttaatggtaataagccttgtttatgatagtgttctctgttgagaatattttcatggaataaagcaatcttttcatggtcagttaagatgtgtacttatcttttactgctgctggaaccaaagagactcggagcaccttaaatgtgatagagtccaggtaataagggagatgctaagcttctaaaggacagtagcctttggggtgagccaatttattctggttttagtttcttccaaactttgccaaaggaaaaaatagatgcttaattagggcgaaagtcaatcagctgtaatcatttgcatttatttttactcagcagtagctatgtggcacagacatcccttggccttgtcgtcttcctgcatccatctgtaagagctgtccctgg

SEQ ID NO: 28333 - DNA, 1205 bp, Mus musculus
atagagcatgacaggttaaatgtgattatatctaaagtgatttgagtgttgtgcgcctgcttaaaatgcttagcccaaagcaagccttgtaaacttaacttgtccataacttatgcagataaacgcgtattatcttccagagtatccccagtcctacatctgtcaaagaatggagtatcttgggtttctttggctctcattttttcggttttgtggcaaattagaaggcagagaatggggggggggtttgaaaagataaacagttttttgataaaaactcgttaagtcattttggtatagacatttcaagaacagtgatttattatttagttatttttaatgatctcattttcacctctgggtagaaaattcatgacttaataatgtaggcctttagttttccttatcaatagtgtaaattatgtagggataggctagcagtatctatgttcagcgtcccactaaatgtcaaaataagcagatgaaggaaacaagtatttggtttttacagaccggtttgctgagtcaagaatggggcttctggagtgaatcttgaaaacgactatagactcttgaatgaagaggactccagcagctgacttcggcacctctatctaaccttttcttcagcccttgacctcactaaagtactatcatatgtttaaaacctgtttttcatggttgaagtaatgattgtagctaaatgatagataatatatatttttaataatgtctgtaacttaagtacttatgggaaataaatgtatgtaaaaaaaaaaagttatctttgtgaagcttactttctcaaatattgttttaaaactatgctattataaaataattatctagagttgaataggtagcacttactcagaaaggccacagtcccaaagcagctactagaaacattttggaagctgttccttgtcatcttaagacctgggtgattagaaattctttactgttggttttagtgctattcagtatatgagaactgtctaaaatactcagagggggtgttcttctcccttataattcacactatttggtgaactgtttacagttgtcttaagatactgttgcatttgcttgggtaatttttgtgcaaggtgtaactgaagtatgcgtattagcacacagggccgaggtgactcttgagttcaccacactctgggacctgcttactaattttctctaataaatgt

SEQ ID NO: 28334 - DNA, 1219 bp, Mus musculus
tggcctggaactcactaagtagaccaggctggctcaaactcacagagccctgcctacttcactttattaaacaatgtcaagtatcatgtgttgagtgaagtctttcagaaatgtgtctcatggctgcacaggagtcgtgttgtcgttctttgagtaaatgtgacaaatgatttttgttgttgttgctgctacataaaactataaatggcttcattgattttttttggacagagtctaataccaagctggctcagcctcccaaacacccaactagctattaacaaccttaagagattttgggttttattttctgccttttgttgttgttttcaggatgaatatttgttctaacacatctaaaagtaccaaatgagttaaaaataagatcttgcttaatcagtaaagacaaacagctgatcagaaatcaatttctaataaactgaaaaaacaaacttcagatacactttgattttcattgtataatataaggcatatatagtaactaatagtttaaaaacttgccttttttttgttgttgttgttcttctgtagagtaactgtggccaaaaaataaaaatccgccgtgttttaatgaattgcccagagattgttacaattggattagtgtgggactccgagcactcagacttgactgaagatgttgttcgaagtctagccacgcatctctaccttcctggggtatcacagttgctttcattcaaacgttaatatcaagatggtcttagttttgttcatctgaacctaaatcttttaagggaaatattgatatccagatgtgcttagatgaagataattttgcctaaatcagactaagtggaatacctttttccatagactagaaatgactttcaatcacagactaacccgtctcttgccctttcaccctggagtgatgattggtgataatgatggttaccacttgatggttctcacataaatgtgataaataataatctagagagggtttaaggtttaaacttaatctgtgtattgatttctctgatacatgtgctttttaaagttgattattactttctcaatttactttgagtttgttactgttataattacaaataaaaattatactttaagtgataatttaatgtttcttcaaatatgttatctaatcaagaatatataattcatcttacatttggaatataagtaaagtgtcaattgtatgttgctagagaaactt

SEQ ID NO: 28335 - DNA, 2372 bp, Mus musculus
atggcctccataggcttatatttttgaatatttggtccccagttagtggaactgtctgggaatgcttaggaggtctaaccttgttagtggatgtgtgtcattggcagcaggatttgaggtttcaaaaggccaggggcatttcctgtgcttctctttcttccttgtgctcagggatcgagatgtgagctcccagatactgttttagcaccgtgcctgcctgcctgcctgcctgccaccatgttctctgacatgatggctatgagctctactcctctgaaactgtaaatcctcagtaaaaacattctctaaattgccttggtcatggtgtcttatctaaggaggtggaggaggaagaagaggaggtggaggaggaaaaggagggggaagaggaagaggaagaggaagaggaagaggaagaggaagaggaggaggaggaggaggaggaagaagaagaagaagaagaagaagaagaagaagaagaagaagaagaagaagaagaagaagaagaagaagaagaagaaagttgcgtggcctagatcactcaccagggtcaggaatgggggctgtggcttgcttggggaccctctatgtctccctctttgcttcctggctactgtgacatgagcggctttactgtgtcagtcctcctgcctgtcacgatgctttgcatcttcagacacctatagcagttcagcaagatgacttaggactgaaaccttagagactgagacaatgcaaattattaccctttaaattggtttcttttttagtgataaacagttgacacagttgcctcaaaattcctaatactgtgggtgatggtggctcatgtccttaatcctagcacttgggaggcagaagcaggtggattgctgagtttgaggccagcctggtctagagagtgagttccaggacagcaaaggctacaaagagaaaccctgtctcaaacaacaacaacaacatgtcttgataatgataattctaaaagaagacctggcaggtctgagaggatctatattgagcatagatggattgagctgagaagacccgcccagtgtgtgggacatcattccctggactggcatcctggactgcataaaaagagccagacacaagcactgattgctctctgctttcctgactgtgcccgcatagtgatcagctgcctcaagctaccgcatcaagatggattactcccttgaactgtggaccaaaataaacattttctccttttagttgtggttgccagagtattttatcacagcaacaggaaaagttactcaggtagcttttgattagtcaagctttagggagcttttatttctggttcctcagaaggaggcacacagtgagggcaaaatcactaggctgcttttatttcataaaactttcatagattccccaaactcgcagctcggctgcggactgaactcatactttctctctgatagtgagacatttttggagtgtggcctattggtcctgattttagggccaaataggtgtttctcaactgtttctgtccaaaggtgagctaaaagttatctacctttgacacaggccagttcctgtttgtgggtggggcacacccagttaagtgggcaagcccacggaggtcctgcaaccctttgcttccttgaggacacctcagctgagcgtctcgtttcacacagaaccaggctgtcgtgggccttccttccttctgtggttgtgctggaagacgtcatcaaattgtctgtccacgcgccagattcctctggccactgagcactccccgacacgcgtcgcttccagtaaggcgagcgcagcgcagcgattcagtgccacctgttgaacccagagcgcgccctcctcaccccacccaagtcccctgccaccggctccggaggatctttgacaaattggaggaggcggggcctcgcgaaggaaaagcttagaggaaaagacccggaaagaggcgcgagaccgcagtgggaggtgcggccccgcccccgccagggcgcgccgcgggagcgagcgggtccagcacgcgcgcgcgcccgggcgcctgacgtggcactagcaacccagagcgactcggcggcggcggcgcggggcgcggagcgtgcagagcaggtacggcagacgcggggcgcagggcgcagggaggagggtggggaggaaggggagccacaggtacagcaggttcgggctgagggtgcggagcgtccacacgcggctgcaccgcgactccccatcaacttggctctctggttcccggaggaggagagggctggaaatattccgagggaaaatggcaactacagtgttcagctccgggacatcattagagggaaacgcgaacttgtcccgggtgacagtggaaggggaag

SEQ ID NO: 28336 - DNA, 1067 bp, Mus musculus
tcaaaatgtgaccatggaaaccaagatgcagagttgtaggaatactaatgagagactgttcaaagcaattcaggcatccaggggaaacgtggtagcaattactattcagatctgtgcctgtgaaatttcctgggacccccgaaatgacattactggattcctaagagatgtcttaagccatattcaggggataataactatgataagagtgttgtataaaatgaagattatttccagaatggacacacttacttttcttcaagacatctgatatgtttcttgattgcgtttctatttttagtagcatttgatatctaaaatcctcttgctaacttctcgcctttacttctgcagggttattctgcagtagctcttctttggaatgatattttcatcatgagccaacaaggctatgtggcgacacccccttattctcagtcccagcctggaatgggtatctctccccctcactacggacactatggggacccgtcccatgcatcctctccaccaggtaaattattctttttacttatatatgactattcaatcctcaggcttagagacgtgggatatcttagttggtagtcattgagtgaagccgtggtttgatataacagcatcatttggagagcctcgtacagcaaaacacgcacttatctcacagatctacttcttcaacgtagacttcttcatatctttcctgtgcctggaccagtgttttctctggttcacctccatgcttcagacatggcatgctcatttatagcaatttgttctctttcattgaagcctacattttactggtattccatgttacacgtgagcagcagttattagaatcaacacccaaacctttcattattacagaacaaaaacaaactagcagtgggggcacatgctataagcttagcactcaagagatagaaccaggagggtaaggagttcaaggccagctttggctagatagcaagttcaaggccagcctgggctatacgggaccctatctcaaggaaacaaacaagagctccaaaatcaagacagaagaagccctcttttttaaccta

SEQ ID NO: 28337 - DNA, 1136 bp, Mus musculus
atgaattgtttttagagaacaaaaacaaacaaccaactccagacgtactgcagtgttgcaaagcagtggcagacaccactgtgtatggagtgccctgctggattcaggatctaagacaagccacactttgtttgtttgttggtctgaatgatcacaaagatgcaaccgtaaaccaggggttcttggtaattgacactgttggtttttgttttcttctattgatcgagtttagggtatgtgaagtagccctgggttgatctttcctaactgacttccaaaggaggctttgtgttcacgttggaaacttttctctgctttgccataggaaacgtgcgaatggaaatgcaggctgctgccacatgggttattttgaactcatatcaagattaaatatatgatgcccaatatcagccatgttgcttaccacacagaggacttgttttaggacatattcgctattgcgtatgttgtttgcttaagatgctcagtgatgctatcaatgccgtttgtctcttagatttccaggacccccacctgtcaatagtgtggcaccctcttatgcgtcaggccagaccctgccacagtcatcttacccaggccctgggtccacttcctctgtcacccagctgggcagtcagttcagctccatgcagatcaacagctatggtaagtgtgaggagtcactgttccttcatggtgcctatttggtattttctgtgctgctggaggtgaacccagaaccgtagatgtgctaggctaccgctgaccactgagctacactcccacctcatcattgcttcttttttaaggcagacataactcgggcatgccatgttaaaatgctaccatgtacataaaccattgatactgtgtctggcgctggttccgtttcacctgagcctgttgccactatttcaatataattgaagaaccctcagagcactgtatgttcattgctggagcaataaacaacaaaaatgctgacgtcacaagtaagcattaaacagagtaattatctgaggagtggtgagggtagttttaaaattgtattgttataatgtgagacctcaaaattaaaaacacaatgcttattgtttcacagagagtattagtgctgtgtttaggtcacttgaaga

SEQ ID NO: 28338 - DNA, 1237 bp, Mus musculus
gctcaggggttaagagcactttctgctcttagagtgaagccaagttcggttaccccaacccacttggctgttcacaactgtctataattttaactctttctgaccttcattcaatgccaagcacacatgtacacacatgtgtgtacatctgcaggcactaagcacatgttcatacacaaatactaaatctttttaaaacagaaattccttactaaaactagaagtgttgcttttatgctcttctaaaacattctatttggaaaaaaagatggctccaagtaatatttatatcactttctgtgggataattttaatttgtggtcaccatatatacatgaatatgcaatccttaaacatgcccttttggtttgtgtatggaaattaaacatctctgtcatatgctttgtaggcatcagacctctgagaaacgtggctctgagccgtggtcttctctctcccacaggtgtgggcgcgactcctcagagccagggtccgcctggcccccagtcagcaggcgccttccaggggcctccacaacctgcacagccatctattctgcagccaggacatcaggttccgccgccaccccccactgccctgaacggccctggtgcctctcctatgtctccaccaactcacaggcaagatggccttcctgggccagctcctctgaacgcccagtatcagcccccacctccaccaggccagaccctgggtcctggctaccctccacagcaaggtaaggtggacagggtgaagccgggggtgggggtggaaatcacctgggggtgtgcttagaggaagtcagatttgtttctgtgtcaactgcaaagatagtaggctctggatagcatcagaagggcaagttaaacgggagtgtaagaactccctcttagcttcctgctttatttaacaagacaaacttggtggcaggcttgattcagcagtatgatattgtcagtgactcttacacctgggtctggacactgtcatttattcttttttttttttttcctttttctttctttctttctttttttcaagcaaccaactatggaccgcagatgggaggtgcacagatgtcttacccaggagggttccctggaggtcctgcccagatggctgggccggcaccacagctccagaggaagctggatccggactccatccccagccctgtgagtgtcctctgtgtcccacacagatgctctgctcttccatttgttagcattgagtc

SEQ ID NO: 28339 - DNA, 1153 bp, Mus musculus
gtctgagggggagagagagagatctgtgtcttccgagggcgctctgacatcattgcatgtcactgtggtacctctgagcccacacacgcaggtcacagcccagtcactgttggagtttttgcttattgtcccatttcggatgctgtttttcaagagtgtgcatttggggtaaaccaaaagctatttttaacggtggctagaactatttgatatgtcttatagtttcctgtgtcttattttgaggagatgtgggtttaattaataatgactatttataacattgtttctttggggacagggctttgccagtcataaacggatagtttgaaataaggtttgtgggactatggtctactgattagtgactgtgtaggttcagtgttccgggcacacgactgtgtcatgacagtggccaccttagactttgttggttgggatgattatgccaaatgctaacatttagtaatatacacgttactcttcctttgagtagcccaattagcctgtggttaaatacagaacttgattacagtgatttgatgtatctgcacacttcctttttgtgggagcatcttgtctgtgtcttgctgtggtagtgatgtctggaacacatcctatatctttgtgtttgtcactactcaaactctgaggatgccagacggcagacagatacaggtttaaattcaggcttggtcggttgccagtgttcttggaacccacgccgccgcctgcaccatctgtgctggttgagactggagcaggggaggaacacttcggcgttggttcaaagttggcgtttgtatcaacgatggggaactgtgtgtatctttttgttttttattccagcctagatgctctctgtggctgccttcttaggctcacctttgggtttatctctgttgttgctttctccgcccccccccacctcttttctctagggggtgagggatggaggacgacagtccccggggttacttcttggtaccctacattcattctgtttaattttgcttgtactttttttttttaaaccctggacagttattacaaaaagaaacaaaaattaaaaagaaatctgttctggtcttcatcagcagctgttattagtagagaagtaaatatgtttttatgttggatggcaatagacactcca

SEQ ID NO: 28340 - DNA, 1177 bp, Mus musculus
agggaaatggaggtgggggttgtatgaagtggagagggaagacaggtgccctgtgacctcactcaccagaggacgagacactcgtcatgaagcaaaggcacccagtgctgaaagaagcctttgctccaacctgagacaggacggccgccatgaacagcctctgacggaagatgcttctgactgaatgcacacacctctgtcacacaacaccatccaacctatagagctgcatgcaggacagtagattgacaacaggggtagggacagctccagtaaggctactggagtatcaaataacctgaaggcaagcaactgttttatttcatttgcccagtctacctatgcagagggaaaaaattccatatttttctcatttaaaattcctaattaaaaaaattaatagaaacttaaattttaatagaaaaaatattgtattaaatggtttttaatacattgttggcttttctttttattttctttcatcgttttctttagatacttttccagccccaaacagctgtctacgaatctctggccaaagactgtgtggccaacagctgctcagtgactctgttcctcttccccagtcagtttgtggatgtggcttccttgggtctggttcctctgctcacgggaggaactctttacaaatacaacgttttccaggtaagcggcaagccgcctgtccctctcagttcctttccggtttgagtcttgagtctgtctctgtctttctccctgtctttctctggtgctgtctctcacccagccccgtgtgtgtgtgtttgtgtggtggggcttgagtatatgtgtgcacacatgtgttgcttcagatgggcaaggcaggactttcaggagtcagttctctcctgcatctagctggggtcgaatcttgttgtttctattactcgggcactgggcactgacctaggctggcttgcctggcaagctttctggtggcttctgtctgtgcctcctgtcttaccctaggagtttgtggattactgctttgagctaccacacccaattgttgttgtgtgtctgtctcctgtttacatgagtctcaggaccaagctcaagtccataggcttccacagaagtgtttttaagggctgagccatctccccaacccagtttaagtttgatgcttagatcatggggtaagaaagttgtgtcc

SEQ ID NO: 28341 - DNA, 1163 bp, Mus musculus
ccagggcatcactggcccagtgttagccttctctccccctttctgagctctgtcctcttatatagtgacagccatacaggtctctttgcagatcctcaaacaccctagtcgggctcttacctcaggatctgcgcatacgtgtttctgtgtgtctggaatgttcttttcatttctccaggctcaactcctaacctcttctcacctccttaggtagtcttactcacgactacctttgtcagctgccttcatagccccgccccacagtgatacttatccttgttaccattcatttcctgcacagctcttaacagcgcctacaagtatgcatgttctattttatgcaacaggcctttctccctcaaaaagaccattaggtgcacaaggcagagattcttgtaggctttaattagctatgttcttaatgggggaggggggagagaaaggaaggaaggagaagaaagaggaacagaggaacaagttctgagtgtcttgactttgcccaaacagcacacgttagatgtgaagagtgcagcgctgccaccagccgtccgctgctccgagtcccgactctctgaagaaggaatattcctgctggctaacggtctgaacatgttcttatggtttggagtgggcagcccaccagagctgattcagggaatatttaatgtgccatcgtttgcacatatcaacacagatatggcaagtattcttcagtttttgtgataaccctcaaatataaattttgattttatgtgcagttttatgatacaaaggagaataacagtgtgtgtttatatagctcaatatgagaatcgtattttgatgaataaaaatgagaaagggtaaagtaatatactgaagttttaacttaaacatggcttcactagaaactgataatgcagagatggagagatggcttgtagttaagaatgtttgctgtccttgcagaggacctgacacacacacacacactcgcatgaacacacatgcatgaacatagccttgcacacatgcatgaacacacacacactcgcacaccctgctgttcaccagtggctgttctctgcatgcagtttaagcccgccatcctgcttcattttcctgacacatcagtgaggtagctgcggcagcagtgtgctcctgatgaactagtgaagccagag

SEQ ID NO: 28342 - DNA, 1117 bp, Mus musculus
aacaagctggagtagccattttaatatcggataaaatcgacttccaacccaaagttatcaaaaaagacaaggagggacacttcatactcatcaaaggtaaaatcctccaagaggaactctcaattctgaatatctacgcaccaaatgcaagggcagccacattcattagagacactttagtaaagctcaaagcatacattgcacctcacacaataatagtgggagacttcaacacaccactttcttcaaaggacagatcgtggaaacagaaactaaacagggacacagtgaaactaacagaagttatgaaacgaatggacctgacagatatctacagaacattttatcctaaaacaaaaggatataccttcttctcagcacctcacgggaccttctccaaaattgaccatataattggtcacaaaacaggcctcaatagatacaaaaatattgaaattgtcccatgtatcctatcagaccaccatggcctaagactgatcttcaataacaacataaataatggaaagccaacattcacgtggaaactggataacactcttctcaatgataccttggtcaaggaaggaataaagaaagaaattaaagactttttagagtttaatgaaaatgaagccacaatgtacccaaacctatgggacacaatgaaagcatttctaagagggaaactcatagctctgagtgcctccaagaagaaacgggagagagcacatactagcagcttgacaacacatctaaaagctctagaaaaaaaggaagcaaattcacccaagaggagtagacggcaggaaataatcaaactcaggggtgaaatcaaccaagtggaaacaagaagaactattcaaagaattaaccaaacgaggagttggttctttgagaaaatcaacaagatagataaacccttagctagactcactaaagggcacagggacaaaatcctaattgacaaaatcagaaatgaaaagggagacataacaacagatcctgaagaaatccaaatcaccatcagatccttctacaaaaggctatactcaacaaaactggaaaacctggacgaaatggacaaatttctggacagataccaggtaccaaagttgaa

SEQ ID NO: 28343 - DNA, 2085 bp, Mus musculus
tttttagttctaagaacaaaaggttttgaattaaagtcataaaggacactgctggggccttttcagcatcacagtgtttcttgtggaagaaagcaattggggatcttatagagattgctagggtaaaagtagcttacttttggtaaaggttttcctcgtgatatttttgagaatgaatgtaagcacttgacggaataacaccacctctgtttaaaaacatgtatatgataaattgtcatagatttctttggtttagctatatgatttgaaatattttggttctttttatgaatgtaaattattgctactactatataaaagtaattttaaagtgtcttaagattataaatggcattacattttgtttcttaaaagaggaacacactggctgctccgaaaagccatctttgcattgttcctgggtcgtgctccgcgctcgctgcagccaccttcgccgcccaccgcctcctccagccagagtcctcgaactcgactttaattccctcactcgcggcatcggaccaccggcgtgccccaccatgtcagacgcggcagtggataccagctccgagatcaccaccaaggacttgaaggagaagaaggaagttgtggaggaggcagagaatggaagagatgcacctgccaatgggaacgctcaaaatgaggaaaatggggagcaggaggctgacaatgaggtagatgaagaagaggaagaaggtggggaggaagaggaggaggaagaaggtgacggtgaggaggaggatggagatgaagatgaggaagctgaggctcctacgggcaagcgggtagctgaggatgatgaggatgacgatgtggacaccaagaagcagaagaccgaggaggatgactagacagcaaaaggaaaaataaccttacgcaccgtgacctattcaccctccacttcccgtctcagaatttaaacgtggtcaccttcgagtagagaagcaggccccgcccgcccacagcgggcaatgccacccacagatatgacatgcgctctccaccacccctccaaaactacaacatgaattggcaacatgggaggaaaaaagaaccagaacttcccaggccctactttttttcttaaaaatactttaaaaggaaaatttgtttgtattttttatttacattttatatttttgtacatattgttaggggtcagccatttttaatgataacgggtgaccaaaccagccttcagagcgttttctgtcctacttcagactttacttgtggtgtgaccatgttcattataatctcaaaggagaaaaaaaaaaccttgtaaaaaaaagcaaaaacaacaacaaaaaaacaatcttattccgagcattccagtatgtacctagctgtactataagtagttggtttgtatgagatggttaaaaaggccaaagataaaaagattttttttttccttttctttctgtctatgaagttgctgtttattttttttttggcctgtttgatgtatgtgtgaaacaatgtccaacaataaaccggaattttattttgctgagttgttctaacaaaaaaaaaaaaaaaaaaaaaaaaaaagaggaacactcttttagtatacagttaaaacttaaagaaaaaaaaagaaaagaaaaaacccacaaaattatctcattataaaagtctttgacaaaatacaacaaccctttctgttagaagtattagagaaatccagaattcaaggtccatatctaaacataataaaagcaatatacagcaaaccagtagccaacatcaaactaaatggagagaaacttgaaggaattccactaaaatcagagacaagacaaggctgcccactgcttcctatctattcaatatagtactgtaagttctagccagaacaattaggcaacaaaaggagttcaaagggatacaaattggaaaggaacaagtcaagatatcattgtttgcaaatgacatgatagtgtacataagacccctccaaacaaacaaacaaacaaaacaaacaaacaaacaaaaaacaaaaaacaaaccagagaactactacagctgataaactgctccagaaaagtggctggatataaa

SEQ ID NO: 28344 - DNA, 1145 bp, Mus musculus
gggatgagatttgtgctttctccatgaacactcttcttcaaggccaagaaaccctaactggtttgaaatgcagcctagacttgggaaccagaaaaaacttcaaccacaagcctcctccaatgtatgggcttctggttccctcccatctggttcctcccctgggtcaccctttcttctttactatcctcatacctttctttctttcttcatttctttcttccttcctttctttccttctttctttctttctttctttctttctttctttctttctttctttctttctttctttctttctttcttcctctcctctttttttaattaggtattttctttatttacatttcaaatgctatcccaaaagtcccccataccctccccctaccaactcccctacccaccactcccacttcttggccctggtgctcccctttactgaggcatataaagtttgcaataccaaagggcctctcttcccaatgatggccgactaggccattttctgctacatatgtagctagagacatgagctctggggggtactggttagttcatattgttgttctacctatagggttgcagatccctttagctccttgggtactttctctagctcctccattgggagccctgtgatccatccaatagctgactgtgagcatccacttctgtgtttgccaggcaccggcatagcctcacaagagacagctatatcagggtcctttcagcaaaatcttgctggtgtatgcaatcatacctacattcttactctatctttaaaatattttacttactgaacttcaccctgttaccccccccccaaaaaaaaatgttctgtgaaagcttcccaatgcctctcactgtacaacagctccgcttgtccctgatacatcagcagaaagaccttttagatgctctggagagactggttaaaagagttcatccccttttccctgagttagataccattctttagtcctctatttcctacttttctctttctttaatgctttattgctccctgcttcttccattagctcattttggtgcaacagccctgagtcaacactttgtgactttctctcaccagcccactctgtttctcctgcctatgatcctccccctcccaaaccttctcaggaaat

SEQ ID NO: 28345 - DNA, 1231 bp, Mus musculus
aaaagcaggcagagatgccaggacggatccttgtggttaccctgtcagccagtgcttcttagcaaaagcaatttctaagtacctaaagtacaagaatgatccacgtttgactttcatgggaacctagccaacgtttttagaaatcctgcatttggaaattcccagatcttcttttcctttccctagaactaaagacaaaaacaccatttgacctgcctgacccacagaccaactgactcactgcccttagcacaagcctcttgcttaagagacatttaggtcacacaaaatagacttttgctaaggaggctctttctgtaccctcttcaaaacgtctgctgctgttcttgctggcttctctcaaaccctgccagtcagaagtggctctcctccgccagatcgccgccatcatggacacgagttgcgtgcagcctatcaagctggctagggtaaccaaagtgctgggcaggaccggttcgcagggacagtgcacgcaggtgcgagtggaattcatggatgacaccagccgctctatcatctgaaatgtcaaaggccccgttcgagagggtgacatgctcaccctattgtagtcagaaagagaagctcgaaggttgcgttaatcttgcagctggtggggttctggatatccactacttagcccatggaatgatctgcaactgttaaataaagcatttatatttaaaaaaaaaaagaagtggctctctcttctgtttcttctaggcaatcatgtttcaaaatccagtccttgtggtgcaggcatagaatcccagttctccggaggctaaggcaggatgattgccagggttcaaggccacctgaactatatacagcaagactttctcgatttagagagagagagagagagagagagagagagagagagagagagagagagaagaagaagaagaagaagaagaaggaggaggaggaggaggagcaggaaggaaggaggaagaggaggaggaagagcaagaggaggaggaggaggaaggcagcaagaaaagaataagagaacagaaaagggaatcatttcaaacaagctatcatgattgtcagcaaaatagatgagattttgatgcaaaaagaacttgaagtaatagagttgatgtcataaaaaaatttaccaataaacttgcttaagagacattaggtcacacaaagtagacttcctctaaggaggctctgcctctaaaataccccaaagataagc

SEQ ID NO: 28346 - DNA, 1163 bp, Mus musculus
agcagacttaacattgtcaaaagctttcagagtatctgaaaatgggagccaccattcatccagtcagagctgtcaggaagacaacagaaggcactgacatggaggtgaatgcactcaagtgcttggaccatttcttcattcaacaaatatgcatgatctaagcatctcttgcgcaaagtgttgcacatagtggttgaaggaaaggagaacacaatgttttttaaaggtatctttgctttttacctgcaacttcagtctccttacataattctgtatttctggagctatgctgctttgccacatgaccgtcatgctgaccatatttagagcacacagagacactgggttagcagtgtcttagcccatgttgttattcagggcaagggtgggaggttcctgttaacattttttttttttactaaataagaccagataggttcggtttttatctccaatatggcccattatgcatttcatggctgatagcaaatttgctggatattgtgttctgactttctttgtcatttttctctcctcagtctttgtgaactgcagttgacatatacacaaactccacagcacaaagtcctctgtgccctgtctcttgaggagccaatatagggctctcttcccggggagttctcaaggccagtgatccctggcattcccttccaaccttcttggaatttccagctctgtttgaaacacttgttttccttgtgtagtgtcagcatttccactacagttcttttctttctgcctgtcttccttccctccttcctttctccttttttttcctttaatgcctggcctaacaattcccacattcccgacatgcctgtggttcaggttttgtgtttccttataatcatctggaaaggaagatctgtgcccggtgaaaggaactgtggcaagtaggtctgtagaaatttcagagaaagctatgagaggcggcttctgtggccggtgattagatctcattgctgtgtgcggcttttgtccctgtcatcttctccatgctgagaatggagcagggtggtttggaatcttcacctgtcccagttgcttcagctgtggggactcctcagtaattcaggttcttctgaagcagtgtctcctgtgggcagaacgttccaagctcaacagaatgctttgccctgttt

SEQ ID NO: 28347 - DNA, 1102 bp, Mus musculus
aagggcttggtcccacgggatgtacttggtgagaataacagaacaatcacaagctcctgggctgtctcccaagcaaccatgagcaagaaagtcctttcacacggaggctacagaacggagtttgatttcttatcactgaaggcagattcctaaagaagacccacacttaccattttcagtaaaacacttaaatgtttgcatttttggcagaagaggcaggattttaattggctgtgtagtaagcaaagtaatgatagttctccagggaaaaatgatctgtgtgtgacttcaggttcaagaataaaatgagaagaagaaaaaaataaaggtatatgctcatagaagtgaatgattggcagccttgaaacagaacccgctttgaagagtatgcaacgggctacagcctcgtcatactctgcagcctggtttgagctcaatgaagtcactcagggaaggcagaacacccaaagcagccacagatgatcgcattcttccatcacacacagggtcctagtctgtgtgtgaccttcaggaactagacatgctcttcatttgtgtctttctcatccatctccaagggcttttgattctcatatctgtatttctgtataaacacactacttgtagacattggctaccaagaagactaaggcatctctgtttctattttctgcatatccacagataaacaacaaagccaacgtggtaaccagccccaaagaaaatattcctaccccggcgctggtatacctggactcttgcacccttcttaagttctgcactgtttgctgttgtttctctctttcactaaatcaatatctatgtatcaatacttcatttgttgttggttttgtttgtttgtttgtttgttttgctttcaaagatagaagaaaatctttatattgttttgttgttgttttcttttcttgagatagttgtccagcagtgtgtttctaacatgagccttctcatttcattgtggaacatcatgcttttctctgcagttggaattcttgcatgttggcttggaaacgcagtagaatgcgcttcagttactcttagctctttctggtgttgattgctactgatcgtgcaaacaatg

SEQ ID NO: 28348 - DNA, 1134 bp, Mus musculus
ttcactagctagccacgtgaggagtaatctccatcttcctagaggttgaacttgatctttgtgattcctgcagttctagcttctctcttgagtcacagtagtatccttctgccgggagttaaggcttgtctagcttaaaacaaagaggaaaaggaaatgccccagttttcttctcgtctctcgtttctcctttgtcgattcggtccctgggaggctgtttctctgcgctgaactgctttatggtgcatggaatatccatcagcgttacctccaccatagctgctcacactccttagaagccgatttttaaagcagaagcaaaaaaagcaaaaacttaaacacccccttctctttttcctcatttcaccttttggtgttgattgctaatcactttagatatattgttgctagtgaatgtatgatagatggttgaagcttttctgataattatcacatgatttaaaacaatatatatttaaaacgaatatatacagtaaatgtattgagccgtgtaacctgccaatgagatctgtgaaaaagtaatggcctcacttttcccttttggatttcttttacctttctgtgaagcagctctgcgtggcatacatgtatttaaaaacacaaatagtggtaggatggtttggtttttttgtttttttgtttttttttttttacacttttaacttagcatgtggtgttgaagaattaccatagatccagtttgtcttctgcactaagatgtgaggaaatcgtgatttgttctctccagcacagtgaaattacaccttcatcatcttctattgtttggaaaacactgcagtttaccatgggacactgtatatatttcttgccgtaatggtaaatgactgattgatatatttaagagttaataaatttgtgatttctgctgacaatgtgtccatttttatttcttaagaaatactctatgtgtggtgccggccactgccaaggacatgatgtcctgccctggtctccttcaataaacaacttgcagtctgtgatcatggcaagctgtttgttctcgctgcacgcagtggagctgtctgtcgttccacagaaaacttagctgaaaggaaaattagcggctgagtatcctaaaagcttgtagatgca

SEQ ID NO: 28349 - DNA, 1103 bp, Mus musculus
gggggcagatgcggatgcagcattggaaccggagtatagaccagtgtcacctttgccagaaataggacataaacaaactgaagttgaagcttctctaagtaccagctctaggatctctgacgacattgctgacatgggttctaaaagcaatgctgatagagaagatctgaaaactgttcataaagctgtgcaaccatttttggaggtttcttttaatctgagcaactttgagaccagtgacactgatgaggcgtcacaagaagacagcagactttcccaggattcagagcggtgggagaaggaagctgtgcttacagatgattcttgtgttcagaagagctgtgaggatataggctgccgagaaattgtaggaaaattgccactcctgtcatctaccgatgacgagcctaaagaggccctccctgctgatgggactctgttgtcagagttctgtgatagaacctgtgtgggtttcaattcaggacctcatggagatgtaaaaactggcaaagcactagagggacagtgtcatagtgacacagggagcagtttggactcgtcgctggagtggagtgaggatgtagcaggggacagcagagaagatgctagtcaatctatccaaggcaatgcaattaattgtggtggtgtttcaccctcaaagaaacccagaggtgtaaacagaagcttatacagtccttatcttctaaccgcagtcactgacccagcgcctgagaacagtgacctgctctcagaaggtacccagctttttattttgcaaagtcacagagacagaaatgatgagcaggtcttatcaccaatctctagcagtgacattagtggccagctcttgagtaccactcaggatcactttgagtgtcatgaactagaagaatccagcactcaaatttctagtcctttattttatcctatgggaatcaaacatcctatttatagagacagcgaagcatatatttctgagtctaaagaattaggaaggattagaagtttgccgtgtgatcattttgaagtggaaactacacagagaaaccagcaatcctgggctacttctaaaagttcttcagaactttctgaagtaataaata

SEQ ID NO: 28350 - DNA, 1191 bp, Mus musculus
ctagtgtcctccgctgtgggaaaaagaaggtctggttggatcccaatgagaccaatgaaatcgccaatgccaactttcatcagcagatcaggaagctgatcaaagatgggctgatcatccgcaagcctgtgactgtccattcccgggctcattgccggaaaaaaaccctggcccgacggaagggcaggcatatgggcatagggaagagggagggtactgccaatgctcggatgcctgagaaggtgacctggatgagaaggatgaggatcctgcgccagcttctcaggagataccgggaatccaagattgaccgccgtatgtatcacagcctgtacctgaaggtcaaagggaatgtgttaaaaaacaagcggatcctcatggagcacatccataaactgaaggcggacaaggcccacaagaagctcctggctgaccaggctgaggctcgcaggtctaagaccaaggaagcacgaaagcgccgggaggagcacctccaggccaagaaggaagagatcatcaagactctgtccaaggaggaggagaccaagaaataaagcttccctcatgtctgtacatagcggcctggctgtggcctcatgtggatcagtctttaaaataaaacaagcctttgtccattaaaaaaaaaaagagtcacagcattaggaaggttgagaaccactggtcaagagagctggtgaacccagaagatctccccatggatggactaggctgccagcatctcatggacgaggaggatgcccaacggctgagaactgttgctgaggtcatggcaagataagtgaagtaaaagggaaacatacctttaaaaacttaagtttcaaaagttatgcacttgctaggcaaatgacagtcaagtctttcagtctcctttcaatccattcataaaaaaatgagcagtgactggggctctagagcagtgctgcctgacttctatagaccctgcggatgtgatgaaatgacatcagatcagagttctgcctcggaaggtctagggttggtgctgcttactggaggagccagggaccatctgatatcacgtgcccactgtgcctccagggaccagctgacatcatgtgcttgctgtgcccccagggaccagctgacattatgtccctactgtgccccttgctgtgtaactggtaacagcctggaacggaagatgcagactcc

SEQ ID NO: 28351 - DNA, 1898 bp, Mus musculus
gtcagtacccctggcttagctggcaagtcttttaatacaactttttattcttactggggtttctttcaatgttcttgaaatgctaggaatgaacaggatgctgcccatgagggagcgctccaagacagaggaagacatcctgcgggcagcactgaagtacagcagcaagaagggcagcaaccccacgtccgcctcggatgactccaacgggctggagtgggagaacgactttgtcagtgccgagatggacgacaacggcaactctgagtactccgggtttgtgaaccctgtgttagaactgtcggattctgccatcaagcagtctgatacagaccagcagatccgatagggtgaaaccgtgaccttacttaccaaatgtttaaaaaccaactagaatgtacaggtggcatgccaaggctttttgttaaggcagcaaaaaaccatgtgacaaatgcttgttttcctaggagcaggagtggagggacagctgagcgcttcagtcaggtgtgatcttaacatctgccttcttcgtcccaggactgactcagtgaatctgacatatcacacattcatgcctttctgctcacctcgtcaagttctgcatcttaagtctgtattggttttactctgattgctttatagaactaaatctgaaagtattttttgttacttctcagcatatgtgcaggcagcatgaggagggatgggcgggttccccgggaaggcagaccattcccagcagcgtctccctggttacttttacctttcatgtctacttggcggcagtaattggagatggcccaagcattgtgctgatgtgcgggcttccttacacacacacacacacacacacacacatgcacacatcctaagtcctgcttcactcaatctgagcaagagatgacaggattaaagatgcttccaaagtttggatactttgagttggtaataattaaaactaatacataaaaatgcatatttaaaatttttacttcctttcacatgccattatattggctttgaatttagattttaagttttcactttcttttttaaaaattctatatttccagtgaatgatctttgaaagatttttacacagaacatattctgtgaatgatttaagaaaacactaaaatacgggtatttcaaagtacacacactcctttctgatttgaaaggtcccgttggctgtaccgccctttcctttgccttgtagtgcaaggcgctctgtggctggaacaaattatgttagcgtattgacgacctgtgtctgagtcttagagaaggccagggctgggaaatgtgtcctgactgcagtctttggctgggctgaggactgactgtcactttggcaagcacactgtattctgtctcccttgctgttcctctctcttcggcagcgatggtgcatgctttcaacagtccaggacggtccaggtagaaatagtagagttcttgctgtccgtgaaaacttatgtgggtggccctttcgatatctgaactgctatacaatgacatctgtaattttgtcatttttaaatctcatacaaataaatatactttgatatgtaaatatgcattaggttatgctattatttatatctatctcaagatttaaattgtaggtgtgtcatggaaataatttaaaggtactctatattcacattgcctgtgttaatgctttttaaggtttatattacatcagatgtatatttttggtttggcataagctactgttgtaattttcttggctttttgttcataaagaattttctgaaggaatggtaacttctcaaggattgtgaataaacatttttacatttaatgatatttgcatcatggcttcataatggtccaggtggtatgagtcttggtgttaattatttccttaaatc

SEQ ID NO: 28352 - DNA, 1145 bp, Mus musculus
gctctcattttctataatcaaagtaagccaattctgtcacacagaaattatattaaatttcttgagtttgttgagagaaatagaagaaatatcaatatttcttcattttaattaaaaaaaatgactaggttggattttgctgtcgttattggaactcattattcatactcccccaaaattatttttaatttcgcagaaatatttagaaagtgctaattttaatttcagagtacatgtcagatagttaattcaaaccttgcctattacctaagttttcacacttaaaatataacttctgtattgaatcagaacaaaaaaaaaacccttcaattacaaaaaaatactttataatcataccagttagtaaatggctgcttactttatgcctgaattttagcagattccaaatccacgcttattgcaacccagaagagatgccatgggtcacaggaaatattcccccaccccctgtgtagaccctggaagccatgctaatgtgaagcccagctcctgctaatgtctggtgctctgctgcacagtgtgagcccaggcacgcctgttggtgtggcagcccacggtcgtgcacaagtacttacagccgcagtgacatggtgctaagcatgttttaagactagtcccaatcgagcagcatcttatccaaccagaaacaagcccacaatccagctctttttaagtgatcatccttgtatcataacagattaaagccgcagctactctggattatgtttaatctaacctttatccatccacatcttcacctgaaacttacaaggaccaagagtcaattgccggggcataattcacaatgacactgatcttcccttccccgctctaattatctggattaagaataacacttttgagtaattattttcacattggataaacattaagctttcctggatttatctgagctttttcctaacatgaaatagatccagccaggcttataggaacataactgacaggagggacagcttaatcaaggcaaccctaaacaactaaaacaataaggaaatgttgatttctcattgtgtgggaaactcgggatcgggaagttagcaggttttgtggtactaagccccccaaccttccacagccaattgcagagcttggatgggttt

SEQ ID NO: 28353 - DNA, 1161 bp, Mus musculus
agagggggtgcttgctggctaaacctatacctctcagtcttagactttcttgcttctttaccctaaccctctgattccaagtctcctctcccccaccttatagtcctaaccaaaagccgaatagcctttggctgggcaggagcagaattcccaggagcgcgcctgtgtagaccgggtgggcacagcaaggaattagttgggcctcgcactgctgataggtgcagacagaaccatccctctgccgcggctcggggcctcgtgattggtgtggagccacgtcactccgacccgaagaagggtctgggaggaggcggaggcggggagagctggggagggccgccgcagagtgacgtcttgccaccaggaagcccgcctctggttttaagatgttaggccaacagggaagcgcggagccgcagatcttgccggtctctcgctggggtgtctggaactgagctgcggcagggtctggctccagctcgactgcccgagggggtgtgcgtgcgagccgcggagggtgtgctcggaggcccgcgccgtggctgtggccgtggccgtggcggctgcagccgcctcggggaatctaatatcagctacctgtccctgtcactcttgacacttcgctgtcagggctgcagcgcggggggcgggcaaagcgctctcgtagctgtccttattggaggggtatcaaggggagggagggaggcaagaaaagggtctttgcccattcttgtttcgctttggatcgtggaagtcggctccctaaagaggctcgcagcggttccctcctgcccacgtccccacgtctgcgttggcccccctgcctttcggctgccgaactctttttggctggagtctgaagctagaggagacagggctggaggattcggcagtttgcgttccctggctctttcaagtctcggctaacacggggacacttggcgcctagagcgctaccgagaaccggcggccaccggggctccactggcggtagccctggactcatagggctccgcactccctcgtccatgaactgcatgaaaggcccgctgcccttggagcaccgagcagccgggactaagctgtcggccgcctcctcacccttctgtcaccatccccaggcgttagccatggcttcggtcctagctcctggccagcccc

SEQ ID NO: 28354 - DNA, 1150 bp, Mus musculus
tctctggggtagctatcacccatgggttgatttctgcacggaaggagagggagggagggaaaaaagaggacactttgatggaatcctttcctgttcttccggatgaagaggcaggactttcacgggagtcccttcgcactgaagcctgcgtttgctggaccgcctgtctcccaagcagctggcttcacctcgctgcgtgcgggcacgggggagggggaggagaagtcttcggacagaggtggggatcctgcaggctgtcctcaggacacggctttgcctgccagagcccaaggctacagatctctttgaaaataaagtaatatcaaacaaaagaaagtgaaataaagtctctccgcgggctctgggccccaggtgagtcttcattcccagggcttcaccagccgcagcccctggggtccctgcttaaatccagaaatggaggcagttgatcttatctgacgaggtagtgttttatctgtttcaaaagggtggatcccggctgcgactgctgggccgcccttccagactccagcttccccgtccggaggttcccaagcttcgatccccttctccagcatagctgatctggtttgccagttaccaaacaccaggtcccgggtagctgggaaggaccttttggaccttggagttccgttccacccggcccacagagcttagcttctcggattgtccagataccgcggctccacctgagcgtgccctcaagccagcagctcctcctagggccgctagacctggtggctcggtacagcccagctctgtgactgcccaccgatccccgaagccgcttcacctgaatatcctgacttttttgttttaccgtttttggtttttgtctggaggttaatgggcggtggtaatgggtcggagctctcttcaatctaaccgtacttttctgatacagtagaagaatatggaagcccgcgggacacctacgcaagtccagggtctcagcatggtttttccgtgtctcacaaacaacataatctatcctaatcagcagctggacaaacccccctgcttcctgccagcgcctgcagccagtagccccgaatacggagtccaacacccttgggcggggcagtttggatggacgcagggcccagcagtgaagttgcgcggaacctag

SEQ ID NO: 28355 - DNA, 1212 bp, Mus musculus
ccccgtgtgggaggcgatccggtgtcaccttgcagtattttaagaagggagctccctccttcccgtagaccgtgctgtggttggagatgtttccctccggtttagtgcgagccccctcgatctccccacccccaccccaccccctctgcgccgcggccggccctcggggggcttccgggctccgggaggttccgctgccgcgtgcgagggcgctcgcgacctgccttccctccctccattcatcaatgggaaaccggagacgccggcgctcccgggctggagcgggtggtggcagccgccgggggttcgccttctccagcccgatcccgggcttgctgctcccgccccttctcgcccgcggggagcgcgcccacccttggccttcagcttgcgagctgggcccttgggcggtttacggcggcggccgggcggagccgagactccggggcgcgcgagttcgggccgcggcatggcggctgcctggaggccctgagccccagagccagcctggtgcggtcgccggcgtgctcctggacaccgaggacgcgggcctgggtcccgagcgcgattacacccccggggagtctggatcgccccgtaagggggaggccatagggaggcccgagcgctgcaggaagcccagccccctcgggctggcgttcggggggtcctagcggtgcacttcctcccgttaggggcttgggggggagggggggctgtgacccgagctcaacctgccaacctagggctccgatcttctctgagaccatttgtcaccgtcccttgcagggctctagcctgccttcctgccttcctcctccagtagcccgcagctcgcgtctctagcttgctgcatcccggttgggcctgtcattccggagcaggcattcctagcctctgcaggcgcatggcactcagtctgccctgctgctgcaccaccctagtgcatgctgtttgttgcccaccccaccccacccccttttcctaaggtaccccaggaccatttcccgcctctttctccagacactcagttaagtgactttcactctgtcagaactagacaggtccttggtcctcgtgggactgaaaatatcccaaatccatgaatttcttttcccttgttattctttggccactattaactcctgaacagtacttatgttcttcctgacaatgtattttcattatcttattttccttatttcttatttt

SEQ ID NO: 28356 - DNA, 1131 bp, Mus musculus
gctctaatgaaacagagagacgggagtgtatctcaccgtggatttcaggaagtcaccagtaggtgcaaggtgagacctgcctcaggactgagtttactctgtggaaggagctgagtttcttcccggtttgcagtctattctgtctgggtgtgttgtaacagatcttgcgttgcttttaggtagttaacagggtaacagctccatatgtcccgtatgtcttgttgatgtgcgatccctgggaagtttgcagtgcagccgtcctttgagacagacagagttagacgttatgtcttcattggtctctggccagaccatgaggagcttgcaagctgccttctttcaattaccttaaattactgtttgtttttttctttatgttaacatgacatgcattgcttaggttttcctgggctttcagctggcctaacccactcagtacatatacccaactttctaaaataaaaacttccaaatttatatctgtgactatactgttttactctggaattacagagctagatagacaacctttttttttttctgttttagtgcaaggggtactaagttttaaactggttgaacagagatgtgcgttattccagatgagtatttttacattaatttattttaatattacgtgttttgtctgtacgaatgtctgtgcaacatgtgtgtgccaggtgccctcagaccagtgagatcctttggaactgggattacccatagctggttgtaggttgagtgctggggatcctgcctggatcctctgctagagcagccaattccatctccccccccccccccccgacctattttcaccgatagatgggcgttttctgcaatgcaccaagttctaagagaagtcagagaacatgaagtatggacgtgacactggcatgaggtgacctgtggcgtgaggtgaggtgacctgtgaagggtatacctaatgacacaaccagagcccttaatcactgagccgccaatcattgtgcggtctcccggactaagcccttagagcatttaaataggattaactgctaccatttagtgcattttgcttgttatgaataggcctggaaacaagaactttataatacattttagaaaatttggaaaatacaattaaggaaa

SEQ ID NO: 28357 - DNA, 4982 bp, Mus musculus
gttttgttttgtttttctctaaggataaaggagtttccccttttcaaacgatgtgagcacacacacacacacacacacacacacacacacacacacacacgcaatcttttcaacacgaaaccagagctaaaagaaaagataaacatgggagagacagggtttctatctgggacagcaatgcttttgcaaaaggctaggccttttaaagaaaggtgagcttgtaactccttgataaaagatgtcttaattatttttactgcaactgaaagtaaagaggtagagcctttccccttctgcacagcctcagggcttgtatgttcgctacaaccaaacacaggacagtacttcccccatgatactttattactgggagaaagaaacccctgtagttgaaacaccacactgacaactgttatttctgctctccgacgagaattcaagcatccgttgttcagttgccccaaactttaggacggaggagtaaatgcagaactgaaagggaagaagctcagctggctggcttgaaaatggagtcttgtaccatgtgtaacaaatgccagcccatcgtccctggagctgaacagggaggaagggctatgggcagagactagagccggattcatccaatgtgcagacagcgtgttcgcctccctccctgttcgacctcacacataatcctggctttctaaatgaggccctgtgacacactctgtgctttctatatttttgtgactttcaaacacagatctgcagggctctgcctgatttggggtaaacactgtgtttctgcagcctctgcatttgctcccttcagcagtgcagaggcttgagaagtgccctctgctggcttagtgagaagcttcaacaaacacttcacagtaggttgaaataactgaccactaagggcctgcggagattaaaccctaagttctaagtgctgtcaaacacctgacatatatttgaccaaatcagaagagagagagaacctctatgcttcaagtaagcgtcataaattttttaagtgactttcacttgagaactcagaaagtcaatgtattaagagccatattctgaaagaaagaaagagaaagaaagaaagaaagaaagaaagaaagaaagaaagaaagaaagaaagaaagaaagaaagaaaaagaaagaaagaaagaagcaagctagacaatgttaactgtaatatttcagtcctctacaagccaaataaatgtgtcgatgttcctaatatttcaaagacgcaattacataaagttgttcaatgtgatataatagtattctaattggttaagtagtttaatgattaggcaaactagcagaaacaattagaggctgctacaccacgtagattatacacacatagccacgtacgtgaggtacacggagctataaagctcaaatcaatagtaacacgatttttggctagcagaaactatcacctatcttcctttacttgagagtgtacagtaaaagggattttttttcaaattatttttatattattttagctttaattgtgctgtcattcatggaacagctgctcagcagccttcctgtgagagatgacaggggtgttttcgtgtggcttgtttacgtgtggaattggaaaagaataaaatctgattcccttctgtgggaatgggatcaagggtagacaaaggacccatgtagatcaagtcataactgaacgaccagggaagggagccaggcgggggcgggagtcagctgtggctttcatgttaccattgtgtggtggctgatggacgggacgtggttggagggatgttttcttacttggggtagaagttaaccggagatgaaagtctagaagccactctgtccagtggaatcttagggtgtacttgttcctttgagctttgtaaatgcacaatagtgtacaataataagcctttcccttgccttatggaagaaagtgagcaagataatgaaaaccaagaagccacctatcagttgaattgagtctaatcaaaaggccagcctgaggctcctctggtcggttcagtttaatttagatatttaccatagaatacaggtacaatatggaaatctcataagcataaactttaaaacgactaagctatgcttccaaagcactttagtctcagtgttcttcgcttcatgctctctccacttgtaaaataacttagacttttcattcgcaggatgagtatataataattaagtttccaaaccagctaaactgtagctacaggcaattccagtgttcaccatgggaagaaaaagccacatgtttttttaaaaacacagaattctgatataggctcagcacacagtttttaacatatcagcttagctgctctaattgtatcaagatacgaggctggaccactggcctatgacacatctaaaacctgccagaattgactgccacgtagataatactgctgtcagtgaacattccgggcaagcaagtttttgtagctgccccactatgctgcaatagattatctttctattgaagatttctcgctgcattccaatcccagtgtggtgaaaacttaattcctggattgaatgaacacaaatccaaggtttcatataaacgcagtgcggtcactaggtctgagcatcaactcaaatgtgttgagtttgcaatgaaattctagtgagaatcactccattcacacagtaggagatttttatctggaccttctagtgtcaactgtgaggagaaacaacaactatcattattatttatttattgtatttatatccaatgccaggccaaagtattgatttagatcaagcagtgcccttccccccctcccaaccccccatctttctaatccttctgcactatagaaagtcaagactggaggggaaatccatattcattgctgcaggggaaagcaggtttattaatcctcccgctgtctttatgagaccgattgaccaatgtagctcaggcagaagtttcatgtgggtgggatatctacaggagcctaggaaaacacttccagagaagataaccacagactgttgtttttgttcatttgttttatatcttcatggtaagataagcctgtcacggagttacaaggcaccatgacactaaggtagaatgttccagaagtctggctaccttcccaggctgctcagttacctgggagtgtctagttactatcttgttctgacgagaggagcttttgctcaagaactgccagatacagacaccaagtcagccctggcacactctacaacctccgggcataggtaatgggtctttgactattggattgcctcagtgtcaagtgagttcctagaagaagagaccgagtaggctccaccccccagactccaccacactctgagttgcattggcaggatcggtgtctagacacagttctttgtgaagtgtcaatgctagagacagttgtgaggagatcatgatgacagcccagaactttctagccttcaaatgcatccttttccagtctttgttttgataacagctattttgctatcagtttgggacaacagtagagtctgtggccatgtgatctacagcttatgatcacacagctcccatttcctggtgcctgagatcccagccatcagaaagtgatttgggtgagaattcacaacatatatgtcacctctgcatattgaagtgacatctaataaaacaaggacgtcctattttgtctgaacccgctgaatgaagctctgttatcctagttagtcattgggccgccatcctctgtacccgatagtgacacaaaacagatgtcggtgcctgtacaagaattctcagtgcctgttgtgacagactgtgcttagaagaaacattcgtgagccataaagcaggaaccacagatgaaagggccagttaaaagtccacctgctccaagtatcatagaaaacccaaaagcctgttgtataatctggtattgtccccatccccagatgctttgaaaactaggattctcagagcatggatacccacgcttccatcttcccacaaacatttcctagagttgtactggtgggtgcagcgcctaggtggttggttgggggaagtcttggaagctgtactttgattgcaggtcaagcaaagccaaatccagatatttctgtgtcactcaccagttgtccatgtccacccacaaaacaattgtattatagtcaagttgtcctagctgattggtcctcaaataaggatgcaactatgtttgcaacccagttaggacacatttgaaagaacctgactcactagcatctaaacaatatcatttccccaatgcttggtggcacttcagacttttgttctcctggttgatcaaggtgttgcctggtggtgccgcctcctagtgtgaatatttcagttaagtgtgggtctgagcatgaccgggctgggcttagctcactgctacttggaaaatgactggcattctgcttcctaggccctaaacccatattcagagggaaaattcactatcaagcctcacagcgaaatcacagcagtgttggaattcttattttcaagtgcttatctcacaacattgaaaaatatttttggtgtattaagatttaaaataaagtcatcataacttttgatttaaaactgtttctagttctttgttgttttctggtctggagcggtccaaagaggacactgtaggccatccagaattctctggaaagtcattcctatatccatgtgctgatagaatacacgagtggctaagattgctcttgctttctctggcgacccaccaatgacatacaaggactatgaacatgtgggtgtcaattccacaaggtacctagctcctccagaacgcctttcatggttacagcatcttacagatgacactgttcacattgccttttggctcttcatgaagtctttctgagataaatgaaatagactccagttaaaaccgctgtggtggaggcaaatatagagataacatccccttagacattgc

SEQ ID NO: 28358 - DNA, 1824 bp, Mus musculus
actgagccatatcttgagccctgatgttaatgaaaaccaagggtgcagcctcactctgcagcaacagattacttcctgccatgtaagcatggtggttgtcagacatctttattgtcattgcatctttaagctaaaaggaaacttaacactgatgacacaatttgtgtttcataaagattatgtatctataaaaaattatttgaatagtcaaaactgagtgcatgcacgtacacacacatgcacacacacacacattgacctgctgcatgtttttgtgcctgctgccatatgtgtggccgtgtgctctggcaggtgatagaggagggagctgagtgatgcctgacacctgcccagtggtgacgacacatctttactctgcagcatgtgagacaacggtggagctcctctttgacagcgtcatccatttaggctgcaagccatacctggacagccagcgggctgcatgctggtgtcgttatgaagaaaaaacagatctataaagaccctgactgctggagagcaggcgagaatggaggaccatccttgccaaagatccgatgctttaacagcctaatgttgccttagttttgtgttgacgggtcattttgagacctttctatactgtgtctttttttagaacctcaaagtgaaaatggtggggggccaggcagaaacagagagcatgcttgggatggggagcgagcaggacatccaagagcatgccttcctgagactcgctgtcgtggtggctcccccaaactgggaagaaaagcttaagcccgtgtgacttggtgttcatagttgtacttaacaataaaaatgaaagcaaatgtaaaattcattgtaaggacttttcagcattattttattttgaaatacaggccaatcttcccttagaactattatttattttgaaatttcagatgtacatttatacctggaaaaactattaattctccatttttattatacataacgtgttgtttctctgaagcccactaagataggtataaatatgttactcacaactacaaggtttccaagtgtgcatctcttgtacagttggaatcacggttgatacttctctggagagacgccccaggacatctgagtgttgggatgtgcacagaattcagaagcccagcttcctcaaaccgcttagagcaaatgtccttcctctcctgctgtgagctctaggaatgacgggtttaacgggccaagccgagctctgaatctgtgcgctatctgctgctgaggttgtggttactccctcatccccgttttccatcttctatcctggagtagtgttaaaagtctgacattttctaatggaggtcttaataaacgctatttacttcttagtaatctcctgagagtgttttcaagtctttaattgtggaattgaagaagattcgaaaggtgaagtagaaagaaccgtcttttatggctctctcacttacactgagaattaacaagtgtgaaaacaaatcccagaaaaccgtggcaatctcttaaaacgatggacttggaaatgtttgatggtcagagtgctcgcctgcattggccactgactggtgatttccccatcccagacactaagctctgctgacctttgaagtaatgcatacagggtaagctgcctggagtgtcagaaaggagcatggaggcaagaggctctttgtcagttatcacaggtggcactgggcagaaggaagcgcgtgctgtgggaagggctgtgctcttggccttgacaacggaatctcttctcttgaaggtgagatgaaggcactctaatgacacttgtgtctccatcagacaagaaca

SEQ ID NO: 28359 - DNA, 1173 bp, Mus musculus
caaataagtaaataaatgtccgtggcaatggtggagacctttaaccccagcccctgagaggtggaaacaggcagacctgcaagctcagtgcaagcccagtcgctatagtgagtttcaggccagctagagctatacactaagactgtttcaaaaacaactacaaaaaaatacttctggaaatcttatttttaaaaaatgtaagttattgacatgaattaaatgataattcaacagttccaagatggggcctaaagagatagggtggctgagaactcgctgctcttccagaggacccaggttgatctcagcacccacacagcagctcacaaccatctgtaactccagttccaagggatccagcgccctctcctggcctcagtgtactgcacgcacatggtgcacacatgtgcatgcagggaaaatgcccatacacatacgtaaatcctttttttcctgctaggcacaaggaggaaacttttcctttttaaattaatttattgattttatgttgtgagtgttttgtctctgtgtatggctacctatgggtaagtctgcctggtgcccacagagaccagaacagggtgttggatcacctaggacttgtgtgctagacaattgtaaactgccaaatggctgctgggaattgaatctgggtcccctggaagagccagtgctcttaaccactgagccatctctccagcctccacctcacccccgccccaaataagtaaatcttttaaaatcaaagaaaaatgaaattcttggaatgtgactttttcccttaagttctgtgtggttttagggtgaggtaggagcttagtggcggccttcacttgagtattgcattagaagaaacgggaagttgtcagagtccccccagtctgtgtaggctttgctgggctgtctaacacagtacagtagtcatgtaaatagccatatacttaccaggaagcacacttctctacagctgaagttcccctcatgcggtcatgggcagagtgcaggcttgtagttggcggccctgagagacacagttccattgctaccctggtatctatgacatgggaaaggtttctaagacttttcttttttcttttttctttttcttttggtttttcgagacagggtttctctgtgtagctctggctgtcctggaactcactctgtagtcca

SEQ ID NO: 28360 - DNA, 1154 bp, Mus musculus
cttcctgttcgatccagcaaccctgtttgaaatacagttaggagtaatctttgaccacctccgtttaataactagaataaggggataaaagcaacattttggtttattgaagaaaagcaggaggaaagcacgtgacgaattgtttgagagtgacgtgacagtggggagaacaggaaagggcttagctgacgtttagctgatagtgtccttggggtaccaagtgtttgggggtaataatctctgggctctaatctctcactttacacccaacatagggaagcctcggtttcttcgttttgtgtattatatttatgtctgatctagacttgcatgtagactgtgatggtacgtctaggtataaatataggtggactacgtaggctccctttagagaacgggtgggtttgtttagttagagcatcggccagcggctcgggctgcggggagggtgttgctcgtgctgtctcaagcccatcccctttcccctcagggctctcaatgcacactttccacgggaacttctttgtccgctccaccgacttactgtctcttgccaacatcaatcctgatgctgggtttgcagtacagttgtcaatcgaagagagcctgacagatactgccttagtgtgctttcagacagccctgctgtacacatctagcaaaggtaatgttctccaaactgacatggcttgtggccatgggtcctctttccacttccgttttagtagagagaaaagcatgttgtgccgtgagggtgatggcatttgttgtaggtgactgtatgttgtttctttctcttcataactcacatttgaatccttacataatacaccttcaaaatagatttgttacttatgtatgcatgcccgagtgagtttatgtgtaccacatgcaaacagagactcaaggggggcccaaaagagagggttgcatctcctggtcctagagttgccagtgcttgtgagccagcgtatgggtgctgggagtcaccaggtcctctgcaagagctggaatcacttttaaccaccgagccacctctccagccttgtttacagcgcacttacacggatttttgttatgtttagttactctgtgtggtgtactcaggagcaggaatgccacagtgtgcacgtggaggtcagaaggcaacttgc

SEQ ID NO: 28361 - DNA, 1162 bp, Mus musculus
ggtgtgatggcactggagcgtgtgtggacatcagagccattgcatttggttagtaagcttgttttaacatgtttctagtttgttgctgtggtgaatgatttcctgtcttcaggtgcagattctctgtcttgttctatttcagaaaatgtccaacctcccaagtcaagctccgtagtatccacagttttgccaggaccctcatcaacaagaatgccacctgctccaagtcacccagttgggcctgtgccctctgctccaccccccccagagcagatgcagactaaaggtatgtgagtagctgctcattttatgcatatgcacactcatgtctcagtagctgatttaaaaatgccagtgtataaccataactaactgaaaacatggaaaaagtaatttataattcagacttaataatgacagctttagtcttgcatgttaatttataatttttattgttgattggatacaatctgtgatgttaaatttcctttcttaaaccattatagacttttttttaggctaaatcaaccatcatcgtgttatttagtgaatctttgtgtcttgtttgaagatttctgtgcttgtcatttgttgtcatccgcgacttggagggggttggggatgagcgatgtcatgggattgtaacttctacgtgtatcatcgacataccgtgcggttaatttagtacccttgaataagtcagtgacagatctgacatagactggtttgatcctgttttctccattatcctgtctttcagaagttttcttggttactttctatatggcaaaaattctaaaatcttgatgtttctggctaatctgttttcatttatcagactttgtatttccaactcactggaactgttttaaggatcatacttcatgtgcgtgacagcctctagccttgactgtgaaagctcttctagtacgttcttaatctcagaagaggccctggaaatccttaggccgctgtcactgcctctggttgttgagtgtttatgtggtcacttggttggagtgttgtaagttttcttatttgatttgaaaagaatcaatgctaaactatttatcagttccccaaagccagtgaaactaggaatagaatctagttcttctaagtgttggcttccagagggaacagtggtcggaagacttttctt

SEQ ID NO: 28362 - DNA, 1273 bp, Mus musculus
ttttctgcccttctgtgtctaattgtatgttagtttgcattgctttgtgatgttttgggaggaaggagaccaggaagcctggttatgtgttatcacgaaccaggggtgatgctgaggaagagctgtgacgtcatcagattcatagtcgccaggcactcttgaatggctgcttcctggtcgccttttctgatatgaattctctttctgcaggggctacctgatgggctagtgtcttttgagaggaaatcagtggatcccggatttgctcctgttaatgaagttttaaaggctgacccactccctcctgcaatgtggaaaagaaagaagagcagtgtaaacgctgcactgagcgacaccctagcaagcacagcagagctaggaccggaagtcacgggatcagagacaagttcattacagtatttcccttgatgacctaccccagtgtaccagctatgttaaacggcattttttcttagttttttatttcttaaagaaaatatactcctcctaaaactttggtattgaataaagtgattattttttacaaacccatcatcagcttttggacatgatatttctgattttcagaaattaacgcaaattgagaagtatattgtgagagctgagatatttggacgattggccagttcctgcagtggtgctttaaatggtgtgtgtgctactctgcaatttcagatgcatacgggagacttgtttcctgaacaacatgatgtatgaaaggagcagaaataaatgatttttctaattaacattttagagtgtggactttttgttgttttgtttctgagacaggctctcacaggccctgtctggtctggaatttgctatatagaccaggctggcctcaaactcttaagagatccacctgcctctgctttctgagtgcagggatcaagtatgccaccagaaccagcctaactgaattaacttgatctgtacgtcggtaagttccatcttgcgttgttcctcgggcacaaccagcatcttcaactacatcgttaggtgtcaggtccacaagtgccctcttctccctctcagatgggcagactcagcctggactgcagtcagagcaaagccagcattccgcaggaagtcgggaagcctgtcgccatcggccaggaggagccacttccctacactgacaaacctgttgctgcatagccaagcctgcgcccgactccagactccctcagccccacccctgacctggtgtcctgctccctactctactctcttctctgtctccattttc

SEQ ID NO: 28363 - DNA, 1169 bp, Mus musculus
tccccagcctgagttcctagtatctttatgtggtagcgaagaaagagggaaagggttctacctatttgtttatggtttaattttccccatcttatgtttaatacaaaaattttttgttagtgaaagctaaaattctgtatttgtttttctgactcaataggtaacaccctggagaaacaagtcctctgcttaatttgcccgcagtcaggtaaataagggcacaactactctaatcacatctgctggtcctccatgatgttagcccattaggaccacagcacagtcagctgtcatgatggaggaggctggtggacagccctacccatgaagtgcagtttggaggagcagcatgtccctcaatgaaaagagtgccatgtccacaatgaaaggagacaatgaacgggaccatggaggaaagcactcggtggaggaccaataggaaaacatcgagtgtccatggaaggagatccgatgatggtgggttatccagtgaggtctgtggcctgggaggaaggtttgatgacctccattaacgcccagtctggaggtataaacattcctgcttagagaaaagtaggacactgataggccaggtaggaaaagaaagggatgatgggacttccggctataggacccaggaggaggaagcagtccgatccgcggatttgcttcaagcccctcgtccacctgaaggtgtcaaagaacatccattgtgtttctgactttccaaagatgcaaaagtcgtgggcttccgcagagagagtagcaaggccaaagtggttagcctcaccaaacgtatcacaagtcactggttgcacgagatccacagaggatccagagacctttcctcccaactgtttagatttagccagtgaggttgaagaatgaggtggagccggggagtggtaaagcatgaaataaccaaccatgactaaccgctgcgttcagcctcagtgaattcactctgcaaacagagctgtcatccagacatggctggtgcaagccttccaaatgtgctacatgtcacaacacagggctgcaaatccccgctttgtctccaaggtcataatcaactgtatcgggatgcaccctttggtatggttggttgacgtggaatggtagcctccggtgatgttagttttgatgaaagtcgaagagagtacacgagt

SEQ ID NO: 28364 - DNA, 1134 bp, Mus musculus
acaactggggcgcctggcagaagttcacggctagtgcgggcatccaggtggtgggtgatgacctcacagtgaccaaccctaagcggattgccaaggccgagagcgagaagttctgcaactgcctcctgcacaaagtgaaccagatcggctccgtgaccgagtccctgcaggcgtgtaagctggcccaatccaatggctggggcgtcatggtgtcccaccgatctggggaaactgaggacactttcatcgcagacctggtggtggggctctgcactgggtagatcaagactggtgccccttgccgatctgagcgcctggccaagtacagtcagatccttagaatcgaggaagagctgggcagcaaagccgagtttgctggcaggtccttcaggaaccccctggccaaataaagcatggactggagatccctggagccaccagctgcgaggtcctctgtccctgatgtcatccaggcagctcaaggccagcccagtgcgtgcccctcccatgtcactgcttccttaggcatccacacctgaccaccagaatccctgctggagacccaatttgcaatcatgtgattggtctgaatcattgtttctgtcacctgacttcccagctagtgtctggagccctcggaactccagtgtaatctctagggtgcccaccatcaagaaccccccctcccccagtggtttacatgcaaaaataaaagccgcagaagtcaaaaaaaaaaaaaaaaaaaagatgttgggggaaagaaggaaacagggcaagtgggtgggttttactgcccgtgccagtgcccaggttatgggcatggggactagggtgggtctaaacagagagtgcacgctagtctcagttccagagaatggtgtcaatcacctaaacacttgatccccaggtgagcggaggcaggcgatgcctcacagggccaactggagctggaagagaatccactgataaagaaatgtctacgcagagcaaggtcattagcgtggataattaccatacccactcggcttttatttgcgtccatgcagtatcttcagaaaaggaattttaaagcagttgaacttccaggcattcctcccgtgcacattttaaaactgcctgaggtttctatctttt

SEQ ID NO: 28365 - DNA, 1160 bp, Mus musculus
agtttgcctacctacgtttgacctggaggaagcttttgttttaaagtgcttctgtccataaaagcagactcaccagatgaaattgtcgttactagtatgtgtgtgtggggggggggggcagtgagtgtgtgtttgtgcaaaatactgtttctagctcttaactgtgtcttgcacagctacacttaaaacttagaatgatcaattagggcagagaattcagaaggctgaagctgccaatacaaatagtttagactacagcactgtaaattggctcgagtaagcatttatttggcagaataaatctaaatggccttatctgaatttgacttaagaggtcctgaagtcccactctgccaattccagatcccaagcccacttcccttaggttgaattggcagaaagcaaagcagagagattaattactcccctatcaagctaggcagtaaaattcttactgccagttcagataactctccagactcccaaatgtgttttaaggcttgacttaaacagatagcgtgggtctttgttctttagcctttagactgcttgactttgcaggatggggagcaaaaaaaaaaaaaaaaaaaaaaaaaaaaatctgtcctctatacaacttctactcctagggcaaactctgccttgcacacctgtagtgggcaccccgctagtcttccgggcttccactctgctgggttccacgcttgtccctccacgcttcacaataaagccctttgtttcatgctccccagtgctaggcttcccaagtgttatgttaactagttcgtggatgcctctaaatactgttgtccggaaccacgggttctccagctgtgcagagcacgcgtgcacgtcaccagctacacgtctgacctgctcctgcaacctctggggagaagcttgcagctgggtagatacttcaggccttcctctccagtttcatccagcctcctgttctgatgacatcttcggccttgtctaaaaaaacagccacaccaacctgccttcacccagattacaattccggtgactttatattcttttatgagccgtatccagtagttctcaaccttcctaatgctgcaacccttaaatacagttccttctgcctccagccataaaaccacttgtgttgctacttcagaactgtaactttgcta

SEQ ID NO: 28366 - DNA, 1551 bp, Mus musculus
acctaggacttagcttggatgtggaaaactcttttcagtttctgtttgtgctcttaggtctttgccttggtttgcagggagtcctgtgtgacagggagccctccagtggagctaggcttctagtagcaagcctgctatagagtcaatgttggctgtacccgtgcagcctgcctggtgcctctgccatgttggcctgcatggattctgtgccccaggcatgccctgagaagatcagaacctaagtgaacctgtgccctttctctcaacagggtggcatgaaatggagccagagaaccccttatttcagcccagtccttccatgaataatctggtggcccagaagaagctgggcaagaagaccggagaaggattttacaaatacaagtgacacttcccccagcaacacctccagccagccatgggacaaggatgagcaagccctgggcaggtggtaccgaggcttgccaggggcggctcagtgggccctcccttgcagtctctctgaagtaatcttttgactagttgcagtcatggggttcttccactgaaatggaattctctagtttagtctgttctctgactttttctgaaaaaaaattacacccttggtgccttggagcaacatctttttttttttttttcctgaaccttgccactttttgtaaaaagcgttgcttagactcattccctcaggtcttctgaaaatgagtattctatgtttatcggtgttgaaccccaggggcaggagccacggggcctacagatgcacccaagggcagcagccagtaggacgtgaggtcttgcctgcctgggaacatttgcagcctgcagcctcgagccttagcctacattctgggcctgacaggaaatgttctgtctttctttaccccacaccaggactcctggagtggtgggcaaatacctgtgagcttgttttttgggggaaaggcctatctttgaggccattcagatcttaaccatcactgtccgtccttcttgtttcttccggtgaaatctgtgctaccaagtgcctatgaattgactctactaaaatgaaatcttttaatttgtaaacattggaatcggaataaataaacttatataacttaaaagcataaaatccttaagtaattataaacatgggcctgtcttctctgaactctggctggtactgaagtgacagcacgggagggagagaaaggtggggggcgtgtgtgtgtgtgtgtgtgtgtgtgtgtgtgtgtgtgtgtgtgtgtgtgtgtgagagagagacagatctgtgtttggcccttccacgttccttaccagtaaaatagtcataagggcacaaagagcggtttttaagaacatctgtttcttctttgccaacaaagtcaaacaacgtaacataagattcttttaatcattgggttgacagagtgtcttccatgatagaatgtggaattggaaagacatctgaagccctgatgtccagtggcttcattagcagagagcttaagggatgagtccaaggtcatcagatattcagtaccaggttccggattagatcta

SEQ ID NO: 28367 - DNA, 1142 bp, Mus musculus
gctggttttgtttgtttttgttttggagattcagtataatactgaagtcaaacttcagaatactttagaaagcaaacgagcgacatcaaccacaacggtgagatgtcacgatgacctatttgtcaagctccggacagtgcagtgctcgtgagcacagaaaggctgtgaggtcaggctaactagctgggcatctctgccctgtggagatagtggcaggccctgtcttaggtatgctgaagtgaagggccatttggaccctgttgccacggtggccagtttgtgtgtcgtgcggttgggttagcttaaaggtacccagagatgtcccaagggtggctccggggagcctggcagtgccactccttggtggagtgcgtaagactggagcgactcctgacagggaagaggagggcaggagagggaagatgccttacaagacagagtaaagagacttcagaacacatttcagagatggggatgacagaagcggggccgcggaatccggggtaagaaggagaggttcataccgaacaaaaggtagagctcagtgaagccccttactgtctttctctgccctgcaacaggacactcctggattcatcgtgaaccgactcttggtgccatacctcattgaggccgtcaggctacacgagcgaggtacctgtcccaggccaggcgaaggcctgcagctcttgggctatgcacaggaggtgtgggctgtgcagagcctgggaaggggcttctgccttctagctctgaaggactaagctcagctttgccctggctttaggaatttttatcactgggttcccagggtcccagacctccctgtgagcctctgacacagtccagcagcaacttcatcgatgatgcagatcttcacccctgcacttctgccattagttaacagtttactatggggagggtggatggggaggtgactcggctgttgagatgtgcactgctcttccatagggcccaggattgcttcccagggttcatgttgggcagctctcagcttatgcacacacatacaagatgcatgttacacacacacacacacacacacacacacacacacacacactactaatagtaagtgtttcttgcttttgaaatagatagtaatggaaaagttaccagga

SEQ ID NO: 28368 - DNA, 1198 bp, Mus musculus
agacagcaggaagagggagccacgaggcgtggcttgaccatttgaaacctcagagccccctcctcccagtgagctttgacacaccttttcctctaaggccacacctccaataatccactctctttgagtgtataggggctgtttgcattcaaacctctgccattctggatcctgagaggggcaggagcaaaagggacctcaggctgcggtaggcacaatgagaacagactctctggaggcagctttcgtgagacagctcatttaatgtggggaacaaaggctacttaaacctttggacagtgggtagccgcttttggggtgggcctgggccagaactctagagatgtctcttttaaataaggaggaattccaggtgccattggacgtgaccttataaggcaagaggcagttcaacctggctactgggctgtgtgacctccaccagggggcaaactgtgagggcacagggctatgtgcacggggacagacacaggcaggacagagaggaggagatttccaggcttggactcgcctcaaccccactcttgctctgggccggctcaccacagctccatggctccctggaccccccagcctccgtcacctctttgcagaactactgggtttcatcctgtgttccttgtgcacatgaggggtataactgcccatgtccagtgtcacacctgtgtgtttcctgcagtcattgtgggacacggggaaagtcttttttttttaaaaacagatttatttatttattatatgtaagtacactgtagctgtcctcagacactccaggagagagcatcagatctcgttacggatggttgtgagccaccatgtggttgctgggattttgaactcaggacctttggaagagcagtcggtgctcttaaccgctgagccatctcaccagccccgggggaaagtcttaaataaatgcctgctggggagttcagagcggaccagacagaaggcaaagcgcctttgtgccattttgaacacttttctgttttcaattttatttgggtttaattggaacccgcttgagggcattcagtgaacaccaggcttcctgggaaggacagcaggaaaggcagccatagcagggtcatggaggagttgccaggcttgtaaaatggtacataggtaacactgtagggtcacactctaggaccgcctcttagtgtttgactcttag

SEQ ID NO: 28369 - DNA, 1222 bp, Mus musculus
acctaagagaaaagaagagagaagggcagccaggtaggcctgagagtcatggctgctcctttccgtccatttcctctctgtgacaaatagtgcgcccgccatgctgcgcaggatgtccctgctgggaaggatgttgtaaaacattaattgatctcaataatttcagtttctgtttgtccgtttttcctagctctaaagctgaagaattgtgcggtggtttagctcagtgacacattagacctaagcgatgctttttctcactggtctagtcacccaacatgaactgaagggacaaattccccttgtggtttcctgttagctttgtaaaatagtgaagtaactggcctttttctctttcagccacgaagacttcgagtttatttcaggaacgaggatgcgcaagctggcacgcgaaggccagaaacctccagagggcttcatggcccccaaggcctggactgtgctggtagagtactacaagtccttagagaaagcctaactgctgagctgggcactctgcctgggacgcatggctgagtaacagaggggaccacgcagccaccgacagcccttctctgcggttgtctgactggacacacttcctgaaatcaggccgtttccctccgcgtgcattggttttggtctgtctttcagttctgtttcaaactagtgtaacaccacgctggctctaatgtatcttttccacttattgttaatattcttataatacgattttaaaaatctcgcctttttatattgtatttatgcttctgtcttacaatttttccaagctgatttattagttataaccagtaatacacacatcatctagcttttcattctttaagtaagggggaaaaaatcactaaacaataaagttggctagaccttgtttggggaattttacaaattttataaactatctgtagcaattagggtttttattttacattaaaaatgtaaactgctccccctctcccttgcagccctacgtgttgaggttctcttgcaatctgtgttaagtactgaatgaatgccttgattcaataaaattaattttttgacttatttatggtttgtgtgcatatgcccccttggttgtgaaaaaatttcaatgcgaagaattcctggcagaggtggattatgaaagcatctttaacttctgggtctggtacccagctcccagtaccttgatgtttgctgaagttctgtgtagcaagaa

SEQ ID NO: 28370 - DNA, 1150 bp, Mus musculus
gcatcctgcccttccctctccttgtaatccactaaggctttaaagttttccagccttaaatctggttaaatagcatttattttctgcacttaagaacaaagtagattttctcttccaaacagatacagaaatttgttcttttaacatttctgcccaacttgcttttctttatcttctttttgtgtgtgtatgtgtggttgtgtgcatgtgggtgcttgctatcaggtaaggtagtgctggcctgctttctaagggtatctcctgtctcctttcaagatggcagtcatgctacaaggcatatacataggttatgtgacaagcaactcacccactgaaccatctcctcagacgctgcttgcttctctgttctctaatgaaaagcatttaaggtattgctcagttgtaggagaaagggttttttcctcaggttgctttctcagcatcctgtaaaaagctcgttttctttccgtttccatagtaaggtcattactttcctttatatttaggtttctctgccgattctggggaaagatggcaacgaatgatgctgttctgaagaggctggagcagaagggtgcagaggcggatcagatcatcgaatatctcaagcagcaggttgctcttcttaaggagaaagcaagtaaggatgtttaaacggtctaaggaaatactgaccggaaaatgtttactgtataaattataacttgattattttaattatggcttttagattcccttaattttgagtataaaaatattctaggattatgataacttagaattgatctatagtgaatgttgtatttgcgttttgatacgataaaataccaaaaacaacttgaagaggaatgggtttatttcaatttatagcatagtctatgttatgggaaatcaaagcaggaacttggagacgggaactaaagcataggccatggaggagcgctggttgctggcttgcttaggtgctttctcttttttttttttttttattattatgctatttactaaacatagacaaagcaacccagtaaggaaagtggtcccaaatgcaggaaagaaactcaaagacagcttctgctcccatttttaggagctatacaaatgtattttgttccaatttctttttttttttttttttttttttctttcc

SEQ ID NO: 28371 - DNA, 1197 bp, Mus musculus
tagaacttaatgataaagtataattcaactatttcagcaactcaatcaatttatgttgtcttagccagaatagtgttatctagttttttattacaagtatactattaaataatttttcatgcatttactcaagattatttttaaatcataaaatatttaatgtttaagtaaacttatattaaactaacaaaaattacttaccatgagcctttatgactttggaattttctacttcagctctctgaacctgtggagttctcaaacttagtggcaagggacagaggagggtacacaacgaaaaaccccaaactatcctgaggtcaaggtcacttattatttcaaagaaagaaacaccaaataccaaggtggtcaacctgaagtttcttttagtgggattgctcagagtgctgcagcagagagtgagaagttctaggtgctcaggttagacgcttcctgctctgtgttctgattgccagcagcctggcgcttagcagacagtgaaaagctcagctctaaacagcagcaacagcaggaggaggaggaggaggagaaagaaggggggggggggttgcggagctcctggctggacctcatatgttggactctgaagctcctctcatgaataacgttggagctcttggcctaggtgtagggatcagttacagatctccagtgcctagcaaggcttggctgctctctcagttggttctactagccactggggccacactcttgtttgtggtccttcatagccttccctgtattccatctctgccacctttgtcccctgatgtctctgcctcagcagctctctgggtctctttagtcttcctcttggtgctgctgcttttatttggtctgttagctctctcatccccatgttcccagctcaatttgcttatagcaatcaaaagtaggcaaagtaaaaaccaaaagcaaagaaacaaaattgagataagccttttgttgggcttaatgttgcgttactaggagccaggcaggaggtgtccatcccctagctgattccagagctgagccaagctgacttaccaccagaatcagtgtgatatggcaaaggtgtttgtattactcaaggtacagtcctttatgcaaataaaagattgtacttctcgcaattacaggcctttttgctaggccactagcaaagctgcttccttctgaagtggctgaaaatag

SEQ ID NO: 28372 - DNA, 1106 bp, Mus musculus
tttgtttctgtgtccttgagtttgacctattcagaaaaccattcaagggaagcaaggacctgcagttaatatataaaacccctatgcttccggttatactttaaactgacagccttcaccactgttacatgcctccaccagtaagaagctttgtaaagattctgggggggggagcggaggaccagaggacagcccataagacaggtgctttaaatcagcaaggtttccacgagtgcagctaatgtgttacctgaggctgggctaggaagcaggcctgtgcacagaggtgacgctgccgatgatggagcaacactagcactgtcgaggaggacaagattggaattttaatatcgacagagccccaacttcgtctcctccctgtcagaccgctgttttaaaaaaacacatagctttagagagtcaacttttctccttagcatttctcacccttctgattaagtaatcaaaatattttctgctgtttttgccaggagacacaaagatgattaaagggttggaaaaaaagatctatggtgacaaactaaaggaactgggagtgttctgcctggagaagagaagactgaggggcaggccgtgggggctcctccaggctgcgaagggttggcaccaagagcttggggagcggctgttctccatgtgtcctgagaataggaccagagggaacaggcttaggctagagtgtgagggggactttcctggcagggacagttgctaagcccaatcctttacaaaaaagaagtgtgatcatattcattctcctcctactccctccttccctccctcccttccttccttctttcctccctcccttccttctttcctcccccccttacttctaccttcatctctctctctccctttctgttctcttctcttcctctctatcttctttgtcccttccctccattaaaaaaaaaaaaaaaactacataaaatgttaggtatttaaggtgtacgtacttcaaggtaaagtccctgatcatggacactagaagacactttggtctccaaagtagtccatgataatgaccatcttcagaactgagcagtttggactgagctccaaggtagactttctgctcttgg

SEQ ID NO: 28373 - DNA, 1148 bp, Mus musculus
tagcagttactcaacgaccccagagatgtgacagcaatattgggtcatgttttgagtgtgatgtacctctgtgcactatcttgaagggacaataaaaatctctcagatcagtgaccctcaagaggcctttatttactgagttgaaaccgtataagtatggcaggagcagtacaccatcaaatgtggcctgtctctcttgttcctggtccatacagagatcagagaacccacgtaagcctccctgattacctggagtatatttcctccaggctccatgcactatctcctgttgacagtttggaagattactacaagataaaaacagatcagtctcttcagtcaggcagatgcctcaattcactgagtagcatagtttatgcatgcagtttttgcccatccctgaaagccacgttacaatggaataagttattactaggcaggccagtttacacaaaaatggggaaccaattttgcatagtttttaaaatagccatgcgctttctgattacttatatatatcaatgaagctctttgcatacttgcatgagtatgtggcattgtagatacaaaaaacatggtgtgttctatttctatattagaagttactaataggacttccaactgtgtatccaaaaaaaaaaaaagcagaacaaaatccccttgtctgtcttgataagagcaggttgttaagttcgtattccggagcctagtgttcaagaccagtcggggtttgtatttagctgggtgcgacggtgccagaaggaatggggctgatgttatgaatccttctctatctttcttttcattctcagcatcactggttagaagtgagctgtaactctccattcccagcaggaacacagacaggtgtttttgtttttgtttttgtttttgtttttgtttttgtttttgttttgacaagctcccctaagtagcatcctaatggctccactcagtgacttctgtttatattagaaattagctagaattgggtcctttggttactcctatctgccaaggagaatagaaagtataattttccattgtaaacttaccgtgcatattttatatgaagtaaaagcagaaagacattctgtagtaaggcaacaaggaaatggaaaggcagggagccaaagcatgctgctggc

SEQ ID NO: 28374 - DNA, 1195 bp, Mus musculus
aatacagtccccacttacagatgcgaagctacagtaaactgtgttgctgctgcccaaataacactaaaatttagtaacgtagggaaaggaagtctaatagcattacaatgttttggaagaatagttcatttccataagctacttaaattcatacagaactttctctgaaagttacttttagtaatcatactcgttcttgatgatcatggctaattccatgatctcactgtgttcatgaaatgctaaaggtgggggaagaaggttcaggaaaagaaactgcaataacctaataacctccagttactgaagcctttgcttaaaaggcttggaatttggaataatttgataaaaaaaaaatatgtaaaatgaatctattaagaatttctcatttctgagacacatttagatctctgtttctggcatatggttacttcagataatttactgttttccagcattgtttttacgattctgtgaatattagcagatcatactatatcaagtaaattccgaattgttgattgtacctatgtaataactggcgaggactagagattgtggagtgtctcttgacacggctcatgttctggaaatacttaattgtagtgcttgctctacagttaaagtaagtttatgtattttttcaaataaatggtctcctttaattgtaggtctcccttccttctgtacagcttatattactagcaatagtaagtaaaccattaaaccaaaatagctctacatatgtagggtccatgttggatggttagttggttgttggttctttggtttttgagatggtgtctcactatatagcactgactaacatgaagtcactatgtagaccaggctggcctcaaacttgccagaattaaaggcctgtactgtaccacttaacctttaaactcttgctatgttagttggtttttgtttgtgtgtgtgcaggcctgtatatgagtgcacatgtttgtttccaggcgtagaaatgattgctactacttgagcttctgtgtgcgcctgtgaaccctttgttacgtgtaaaggcttcattctgtcctgctgcacttaggtatccagttactctgaacttctcaatgccgtccacagtggtaccatgaaaacagcctgaatgtgattcttctatgtgttggtagttcctcagtaggctcaaatgcaaatatttttgcttgtacat

SEQ ID NO: 28375 - DNA, 1100 bp, Mus musculus
agtgccaaggttgctcattgtaagcgtatccctaaaagtatgtaaccatgcagagtggggaaagtttcctcttgaaagccattgttcagcctagaagtaaaaattcttacatataaattcttattgattttttttttttgaaaaacactcatctcttagcttctaaattgttgcgcttgaaggcctataaccatattgatctttgttctaggtgacccaatgacaacagaagatgaaaggcattaagaaaagtcctacggaggaatctctgtacctggagtactctcaccaaacagaaggctgcatctttcctctccacacgtctgtaactttgtttttactatcatactgtgaatgcaaggtctttaacgtttgcttagtcctcactgaagaaagtacagatacttcagacacttcgttcctaaaagaggcactgccccaggacctggaaatacaggttatttcaaagcaggcgctccctccgattgtccagaattgctgtttgcctgcagtggtagatcaacctgacgttttctgtagggcaggccttgctgttgtcctgagacacataatccaaaaatcctatgaagctgagccctcaagaaaggaaattttggaacttctgggttttaaaaagacttgtttgaaagcttgtgctgaagtaagtataaggtctcttcctctatttaaagtagaagtaataacagttactccaacatgagtttaagttgccattggcaattattggatagttgagttcttttcatggcatcattacagggcaatccgaaaaagagtttaacatgtgctttatgaagtctggaaacatattttaaaataataataataataacaaaggttttcctccttcattatttttaggacctttaaaagaaatgttcataaatgagtagtaaggccttgtaagccctgaggagtgtttaaaggccttggggatgtcttgatggcatggtgctgaaacagtagccgaaagctcctatcttgagacataaccatgaggcagagaacttacagggaatagcttgagtcctttggaatctcaaaactgtcacagtgccacacctccaccaacaaggcca

SEQ ID NO: 28376 - DNA, 3040 bp, Mus musculus
agccaaaatggctgaaaaggcccggaaagaggaagagtgcggaaagaatggatcagaccacgtgtctcagaaaaatcatggcaaacaggaaaagcgtgagcccacagggccacaggaacccagttacctgcgtttcatccagtctcttgctgagaacacagggtctgtgactacggattctaccgtgactacatcaccatatgctttcactcaggtcacagggccttacaacacatttgtatgacgctggccattaggccagaccaccaaggacgacctgtgagcagtatgtctttcatggcatgggccgtagggacaggtcacagcatctgtgacaaatgcagtgtgtgtttgtgtgtatgtttattgggggggggctgtcagctcaccagcaaaatagtttattttatcattatatttaatctctcccgtggtccatggtggcattcaggaagagcatcctatgcaagggcacagtgggaaggaagcgctggacatttgtcttgaaaaccactggttctcttattggctgaggtcatgcgtgtgccatgcccctcagcactctacacgtaactgcttctagtactcagcgtgtgtaaccgtgggacacagcgctgtagtagagcagttgcaggatcatctggtgctgacgtatgatgtactgaagaaatactggaactaagactttttaacatgcaggttttttactgtaatcttaataacttatttatcaaagtagctacagaaagcttaagtgaataatggcaaaacactgaatctgtttgggtgttaacattaaatggtgctacaaatggtgtttttaatagctgaaaaatcaatgccttctatcatctagccagtgtggtcgagggccctggaggcactggggtacctctgattttacatttctatcttaattattcagcttagtttttaaaatgtggacatttcaaaggcctctggattgtagttatccaccgatgtccttgtaggactataatgtatagatatgcacacttacacatgtgtactgaaatattttaagttgtgtcttagaaaagcactttgcctacctaagctttggcaacttgggcaatgctaaggtactaaaacataaaaacaaaacaaaaaaaagtttactttcatttaggattaaaagtggttttgttttgtttccttttaaggaaacatttgctttgctcttagccactatcggctgatgagcagtatcaggcctgttacaatccaaaccgaagctgaatggatatgctagtccacagaaaacaaataacagtttttggtgctcaccttacttgctatcctgtaaaacggtggtagggcaagctcatccctcctgcgtatacagcttaagaacgtctgttaattgcaggtgataattagccttggtgctgcagacagagcaaagcttgcccacttaagtccatgttgtcccacacacagacctgtatgttcttcagaacagcaggctgcctttgtgttcattacatgctttgtggtgtcttttcttagctaagtgttatatataccaggaaggttgagtggactgaaacccgcagaagttgagaagacatggttaagtccataggactctactggttacagagcaaccaacaaaaaccgaaagagaataggcagctggtttatggtgattttaaacattaatttgtattaaaaggtaaaaaagagttgtatagtaaattaaattgtaaaacaaccttttttaatgcaatgctttagtattttagtactgtaaaaaattaaatatatacatatgtgtatatatatattatatatatatatataatatatgagattgaagaaaaattcacatcacgatggtgctacccagattgctccacatagatcttaatgtgagctaagaatccattcaaagttggagtggtgttcctacttgtcgtcatacctcaacactagctaggcaatgggatactgagctaacagtggaggcttagagcattgtagaccaccatttttctttttttttttttttttaaatctttgtattaagacataccatttttaaatacttgatttcttagcaagtataacttgaatctcaaactttttgttctaaaaattcagggatatttcagctcattctccttatgctaacatgtcatctgtttatgcaaagttgtcggttaatatattcgctttcagaggattgcaatccctcgtagtttgcttgtatatgtactgataactgaaaactaattttataaattttgtcacctttcaattgtaaattttggagagttggcattcagcagagtaaaaagtgtaaaataggaagccctgagctggcagagggagatggggggtacaagacatcgccggtaatggcttctgatctagtgacgaggacagctttggactgcagctggacagtcctagaagctggtggtgtgctgtgcaataggactgttgttacattgtggcctaaatacagtgttgcttactagctttgcaaatagctttgcgtcagtggagacctttgtaatttaccatcagtcacatttgtcactaaaaactttcagaatgtctgccttgcacacacacacacacacacacacacacacaaaaacaaaaaccacaaggtttccaaaccatgatgttgagtccacatcaggttcctgcaaggtgtgcttggcaattttttttttttttttttgagccagccatccctaaggaatatttgctttacatgtcacccactgtcatttgtcaaactgctggccaacaggagtagtaagtgtggtttgagaggatgggtggtgtagggaggaaggcagtgacatcccacctctgtccattagatcaagtgggaggcagatctgtgatttgcttctataggaacagcttgactacatagccatactcgatacaagtgcttctgcttggtgtcaacattacttgaatgaatttttcatcttgattgacgcacagtgatgtatagttcactttacaaggtagtttggttaacttgttagggtttttt

SEQ ID NO: 28377 - DNA, 1206 bp, Mus musculus
atttgtagtgccacttaagccgcttaaagaaagccttcagctaagaccttgcatgtctttcctgtagttcttactataggaggttacatttaactgtccactgtaccaggtatggtctgctaaaccattgatgagtaattttgtacccttccttctttccttccttcctctctctctctctctctctctctctctctctctctctctctctctctcttctttcttctttttcctttctttcttttccttccttccttccttccttccttctttccttcctttcttcctttctttctttctttctttctttctttctttctttatttctctctctctttttcttttttcttctttctttcttctttttttcacagttggttaggttcccactctatagctgggcaataaaagaggaattgcagttggtaattttgatccagatatgaaagctatgcatatgcccgtattggctccgattgacccttgttctgtttgggtgggtggggctgtttgggtggattgttgatccacacaggtatatcggagatcgagtgaggaggagaaactactgtgtttggtacgagtgcgacctaatcacacatgtgagacggcggtgatggtaattgccatcatgttgtgggacggaatcccaaagctactcgcatcagaactctactcagaacttacagatatcttgggcaagtgtggcatatgcaccaaccgtcgctgttctcagaatgaaacgtaagtgggtttagacctttcccgttctccagaggggcttgaatttgtatattgataaagcaggggtcacgtgtttatttcatagtcaggactgtgaatgcttattaaggtccacttcaaccatagggagtcatgttccggagccatttctggtaagatctaggtggatttggttttaccatttctattctagttcttatgccaacttggaaactccatactaatgtggctaccattttagtaagataccattttgggattcgagtcattgactttttttaagatttattcatttatcttatgtatatgagtacactgtagctgtacaaatggttgtgagccatcatgtggttgctgggaattgaattcaggacttcagctcactctggccctgcttgctcggcccaaagatttattattatatctaagtacactgttgctgtcttcagacacatcagaaga

SEQ ID NO: 28378 - DNA, 1161 bp, Mus musculus
cagtatttcccgaataatgtgaccccaaatcaggacgttcaccggtgctttcaggaacaagcgcagaagcctcagcaagcttcgtctctacaggggcttaaggacagaagccagggtgagtctccagccccaccagctgaggcagctcaacagaggtatttggtgcataatgaagcaaaggcactccctgtgcctgagcaaggaggaagtcagacacagacccctcctcagaaggacactcagaagcacgctgccttaaggtggcttctcttacagaagcaagaacagcagcaaacacagcaatcccagcctggtcataaccagatgcttaggccaatcaagactgagcctgtatccaaaccttcttcctatagataccccttgtcaccgccacaagaaaatatgtccagcaggataaagcaagagatctcctctccaagccgtgacaatgggcagccaaagagcatcattgagaccatggaacagcacctgaagcagtttcagctcaagtcactctgtgactataaggctctgactctcaagtcacagaaacacgtgaaagtgccaacagatatccaggctgcagaatcggagaaccacgcccgagctgcagagcctcaagcaaccaaaagcacagattgttctgttctcgacgatgtttcagaatcagatactcctggtgaacaaagtcagaatggcaaatgtgaaggatgcaatccaggtacatgccagtaacatacatggtgtttgccagagttagctagtcatcttcatgtgtgttgcttctttcttaagctggagtctgggatccatttttctttttttttttttaatcttttaatctttttacagtccagtcatcaccctacaaaagtacactcccatctaactccacacaccaccaggcctccccacccccctgaggaatcaagtcattcaaggcctcagaaggcagccaggcaaggttcctgtctgtaagcactccatagcatcagggaggtcttggagcctcccattgatatggatcacaatttgggcctgtcattggatctcctttacctcaggttcttctccattcctgtctctgcagtcctttgagacaggaacaattctgtgtcagagttttttgacagggatggcaaccccatccctccacttgct

SEQ ID NO: 28379 - DNA, 1147 bp, Mus musculus
ggcaaagctcgaagttccctaaagattccatctctcccactactgtgaccccaccgtcacaatcacttcttgctccccgtcttgttcttcagcctcctttagaaggaaaaggcgctctaaatgatgtagctttggaagaacaccatgactaccccaaccgaagcaaccgaactcttttaagggaagggaaaatagaccatcaacccaagacatcatctagccagagtctgaatccatctgtacatacacccaacccccccttgatgcttccagaacagcatcagaatgattgtggctcaccgagccctgaaaagtcaagaaaaatgtcagaatatctcatgtattacctgccaaatcatggccacagtggaggtttacaagaacatagccaatacctgatggggcacagggagcaagagattccgaaggatgcaaacgggaaacaaacgcaaggctctgtacaggcagcacctggctggatagaactgaaagccccgaatttgcatgaagcactccatcagacaaaacgcaaggatatatccttgcactcagtcctccactctcagaccggccctgtcaatcagatgagctccaaacagtccactggcaatgtcaacatgccaggaggattccaaaggctaccttacctccagaaaacagcccagccagagcagaaggcacaaatgtaccaagtgcaagtgaaccaaggaccgtctccaggtatgggggaccaacatcttcagttccagaaagctttataccaggagtgcatccccaggacagatccgtcatctgaggctcacccgcaagcaccgagcgttcctcagtatcatttccagcaaagagtaaatccctccagtgataagcatttgagtcaacaggccacagagactcaacggttatcaggctttttacaacatactcctcagacgcaggcatcacaaacaccagcatcccagaactcaaatttccctcaaatctgccagcagcagcagcagcagcagttacagaggaagaataaagagcaaatgcctcagactttctctcatctccaaggtagcaatgataagcaaagagaaggctcgtgctttggccagattaaagtggaagaaagcttttgtgtcggaaatcagtactccaaatcaag

SEQ ID NO: 28380 - DNA, 1235 bp, Mus musculus
acatggtggcttatgttgggaatcccagtactcaggaggctgaagaagggcgatcaaggcaagcctgacccgcatagtaagttccaggccagcctgggatatagaatgaggcagtgccttaaaataaaataataaagaatttcaatagaaagatgttattcacagtgtacattacttgtatgtatgtatagtttgagtgactggcttttagagatttctttttctttgttaaaggcctgctttggctggagacatggcttggtggatgaaatgcttactgcacaagtgggaggactccccaaatccatataaaagctagaagcttcctggaattccagcaccggagacgcagggatcctcagggcaagctggctagctagatttgcagagctgctggttcagtgggagatcctgcttcactgcatggagagcaatgaaggttgatgtgtatatacacacacacacacatacacacacacacacacacacacacacacacacgcacgtgcacacacacctcccatacataagaaaaaggaagaaaggaaagaaaatgcacttgtaaggtttgaaataggctctgacacaataacatggttgatcctagtagaggctctgggactctgccacctacctacaggagacactgtgttgaacctaaatgagtccaaaggccttcagtagatcatagctttttaatttactattttaattttaccttttagaaaatatagcagaaaatctgttttaaaacgctggtttgatcatagctttttaacttatttaaaattttatctcctagaaaatctgtttttaaaacagcgaataactaataagaataaaattagagtagatttcaattcaaggagaaaaatctgtctaggaactacattagtttcagaacaattgcacgttatagaatacagttgctagtagttccgttgttagccgtgtaagttgtgtgctgagacattgtttggggcatggaaaactggaacctcatagctctctttgacagtttgccagctggaatcccagccaaccagataacaagctgtagcaacactcggccctctaggactcctgaacctgtgccaggccttagagggaagactctttgaacacgctcttccgtccatctgagagtagagggcaccagagccccatggtgtacaaagaagtattccacctcaagaagtttacaattggaggcctggtaatatttagtatagttt

SEQ ID NO: 28381 - DNA, 1185 bp, Mus musculus
ttgctatatgttacttattgattttgtgtattgaactatcttagttggagttttactgctgtgaacagacaccaagaccaaggcaattcttataaggacaacattcaattggggctggctttcagattcagagatttagtccagtattgtcaaggtgggaacatggcagcatccagacaggcatggtgcaggagaagctatgtcttcatctgccagcctctaaaagaagactgactttcaggtagctaggaagtgggtcttaaaggtcacatgtcctaatagtgcctgccacttcttgggccaagaatatacaagccatcacatgaaccatccttgtgtgccttgaacataatctactattatagtgttttaaggagttttcaaatttgatttgcatgttttttttgtttgtttgtgttatgttccttaggtctataggttgtttgtgtgtttgtcttggtttttgagatagggtcttactatatggtctaggctaccttagaactcacagttgttgactctggctatcccaccaatagttttgaaagaagtgaagaacattttccttgaaagcataaatgctataaaattaaatagacttttttttctgatcagcaaagccttctgtcactgtattacactttcaactccagttatgtaaatttttgtttgtctttaactatttgggggaattccagcttcagagaatgaattgagtaattttctttctctttctattttcagagttgcttacagaacattggtattagctcttttttaaaggtctagcagaatttgatagtgcatctaaccagttctggccatttctttactgggagattattattatttttttacatatgtttaaggagtacacaaagtcctaaggtaccatttatttaaacggattcccctccatcttccccttcctcccatgcattttccctagactcctttccttttcaggttgcatgtgcctcacctcttcccctcacccatcctcagagtctccttttgttttcctttgttctcctttctaggtttgtaggctccatccacatttattcttacttacaaacataaacacattgcaagccaggattcatatatgacagaatatttatgacttcagccactgtatcatctctgcaacctgaaaaggtctcacaatataatattctcaag

SEQ ID NO: 28382 - DNA, 1105 bp, Mus musculus
gatggtgtagcctggagtggcacacacctcagctggatataagatgaaggtaaccctcactttggtgacgagaatggactcatcagtgggcatagtcaaggcagtttacttggtacttagagaaaaggtcaaatcacaaagttgagggttggtgctataacttagaaaattgtccccaatgttctgataatcctctaaaagatcctgacagtcagatacgcaaaatttatgaggacaagggaacatgatagcattaaaactatcattaccttcaagccagacctctaactatgcttgacaaggaattcctgaagcatgtgacatttgggggccagtcaaacaagaatgttacaatattttgaaaatctaaaatgggttggagaggtggctttgcaactaagagtatttatatttactgtttgtacagagagcccaggtcagctcctaacaccctggtcaaggcagcttaccacctgtagctgcagctctcagcttctgctgctctcctcagcctatggacccctgaactcagatgacacccacacatagctttatataaaatgaaataggataccatttttactaatctcagatgtgtgatggtaggattggcagtttaaccaaaatttatataatagggctgcaaagatgctcagtggctaagattcctggctgctcttctaggggacttgaggttcaccctcagcatgatactgtgactccagttctatgagatccaatgctctcttttctggcccccccatgaacaccatacacacatgtggaatgtaaatatacatataagcaaaacaccctcacacgtaattaaaaatctgagataatagaaaagggaacttatagaaaggatcgtgtttcatttgaaacccaccagatacgagctctatgcagtaggaagtcacttgggaaagcagcatctggcggggttactttcccaaggagcgccctcctttaccatctgtcatgctgtaagtcagcaagacctcaccatctcagacgccgagctagctcctaaatacaatgctcacttttggtttctctttttcctcaagtacgtgttaagctccattgcgaggataaaggaaga

SEQ ID NO: 28383 - DNA, 1128 bp, Mus musculus
cgtgcaacaaagggaaagcagatgaggttcgtagtcgtgcacattaaaccacgagttaactgactgagtatacctagtccttagctttatgcacagtatccttcctaacaccttgacagagtggggcctggagttctgaagggaaggactgctgctttaccgaacacacgagccagtcacccttctcctgaaacgctgcaccctcatgaccctgctcccgtgtgtgtgtgtgaattagggttgatttgctttctattttctttctcaaaagaaccagatgacgtagagaatgtggagcctaagacagacctctgccaagcctccttggaaaaagatgtgtcccagtgcaagacgcagtagatgcccctgtcccgtcagagcagagcgcccttggatggatgcccccgtcagccgagcgctcttggatgcctttcctcgtgtgtccacactgacaaagatgatgcaatccaacttagtttcagtctaatttccactttagaagatggaggaacaagaaacggattgattgcagtgacttagaacgctggtggcagttctttctgcttgcatctgtgacattccacacgctgaactgttaattatttatttttatacattgcgaagaataaaggtcttgaaggaaaattttaatctttccagatgggtataacatgtatacatttctttaaagttacttatatatgacttaaaaaattctggaacatagcacataagataagccttgttgtgtgacaaaacttttcctgggaagacaaaacacacttgtctgctcagcccagacagggagcccatggcagacgaaagtacaaatgacacccgtgacttcccagccacaaggttggttctggcttacagtgtcaggcgtggtagacaagccactggtacataagcaggtccatcctgctgctatggtgttattctttcttttttttttttttaatattttttattaggtattttcctcatttacatttccaatgctatccccaaaagtcccccataccctcccccccactcccctacccacccactcccctacccacccactcccactttttggccctggcattcccctgtactggggcatataaagtttgcaagtccaat

SEQ ID NO: 28384 - DNA, 1159 bp, Mus musculus
tcctgagagcaggaaagagttttctattttccttcattgcctggtgcatggggtgggggtggggtctgtcaggaagctctgtgatgaacttcttttgtagtaagtggcacactggctccaagagcatttcacagatgtccctacttcatgaatcttgctgtaaaataacatttacaattctctttccttttagtttcctgcctgtgatggatcccataataagcataatgaattgacaggcgataacgtgggtcctctcatcctgaagaagaaagaagtatagcagtggccatttgagatgaaactctgacagagtgtttccatgtgtgttgtgcatagaaaagtctttggaagttttaactctcagtactggttgaataattatttctgccagttattttcttgctacactactgcttatatttggtactttatatagtcagtcatttctatagaaatcagatggtcaagtctcattctgaaattaagtttaatgtgtctttcaacaataaagtcagcacttcagattttaattaattgggaatttaaagtttgactgtgggccaaaagttatttctttgtatatcagtatttcaacagaatacatagttttaaaaaaattatcctttgttctgttaaatgtatctttatattgtcttgttttgctcatttgaagtcatttgccatttttttggccttttgtggaactctgctgcttttagaagaattatgaaaaataattgccatcaacaatattttgaggcagtaaaaccccttgttttatagagactttcatcttattaccatgattatcccaatttctaaaaagtaaatcagatataaaaatttccaattagaaacaattattttcatcataaaaatggttcaccttacaaaagccttgttgtgtgtgtgagggtgtgagggtgtatatgtgtgtgtgagtatgtgtgtgtgtgtgagagagagagagtatgtgtgtgtgtgtgtggtgcttaacttggagactgctgggtggcaagagcactcatgaactagagtttgaagatcagttagatattaaataactgaatttgcattaaaatgatgcatagttcattgctcaaaattatgttttatcttttctgttgtaaattatagagaaacggcaacaggatat

SEQ ID NO: 28385 - DNA, 2962 bp, Mus musculus
cttatttgtttgtttacaggtacaacagaatatctcgggaatggactcagaagtatgccatgtgatgctaccttacagtcagaataacctgcattatagctggaataaactttaaattactgttccttttttgattttcttatccggctgctcccctatcagacctcatcttttttaattttattttttgtttacctccctccattcattcacatgctcatctgagaagacttaagttcttccagctttggacaataactgcttttagaaactgtaaagtagttacacgagaacagttgcccaagattcagaaatttttttaaaaactggagcatgtgtattatgtggccaatgtcttcactctaacttggttatgagactaaaccaatcctcactgctctaacatgctgaagaagccatctgagggggagggagatggatgctcagctgtcacatcaaaggaagcagcattattctagcagcatccgttcttgtttaaaccttccactgttagaggtttgaggttacatgatatactttatgctcataactgatgtggctggagaattggtattgaattatagcatcagcagaacagaaaatgtgatgtattttatgcatgtcaataaaggaatgacctgttcttgttctacagagaatggaaattggaagtcaaacaccctttgtattccaaaatagggtctcaaaacattttgtaattttcatttaaattgttaggaggcttggagctattagttaatctatcttccaatactgtttaatatagcactgaataaatgatgcgagttgtcaatggatgagtgatcaactaatagctctcctagtaattgatttatttttcttcaataaagttgcataaaccaatgagttagctgcctggattaatcagtatgggaaacaatcctttgtaaatgcaaagctgtttttgtatatactgttgggatttgcttcattgtttgacatcaaatgatgatgtaaagttcaaaagagtgaatatattgccatgttcagttaaaatgcacagtctgttacaggttgacacattgcttgacctgatttatgcagaattaataagctattcaaatagtgtagctttaatacgctgcacatgattctggcagccctagagttcataaatggacttgggactcagcagttttgaaacgtgtatatggagtttaagaaatttattttccaggtgcatccccttctaactaaaattttcttcatcttgtacacttaacagctgaaaaagatatatatatatataaaacttgggagtaataatgggtcaaaatttacaaaataaagtactgttttggtgtgggagttgtcatgaggctgtgttgaagtgacttaactgtgggatattgactatccattgagatggatttgttcagccatttacattaatgagcatttaaatgcaacagatcatttcgggtgacttaacatgaatgaataaaaaagtcaatgctattggattgtttgacaagtgctatctgtgccactaaatcttatgtagtaataagggcattaccatttttcacccaagttctgaacctgtagtttgacacctttttctagctttgatttctccattgctttcttagtcttgtatttgatttctagcacatgtgatgttcacttccatattttgcactgcttatatttacgtgcaatcttattccttgtccgcacacagatgtggaaagctagaaataaatgtaaaagcttaattttttataaacatttaaatatgtaatttggacatgatttgttacttaaggttctttaaactggaagtgaagtgcatgccttctgaagatgttctggctttattctgtaataagtatttacattggaaaataccaatttcgctatacagttttttttccacacacccattttaccttttgcttaaattgtgggttcttcagggttaatgtcacgctaattaataaaacttttgggttcaaatcaagtgttcccacaagggtaagaacagtattctttgactcttaaaaagtcctttctgagacctgtactcaaaacagctttattaggcctgtgtcgtgaaagccagatatgacaaacatttttacaaagcagtggatctctagttggctttcaaattcctcccatctaccacctttggtatttacagagatgacgtccttaaaccattgtcagaattaatgggtatgtccagttctctttatctttgacttgatgctttatacaacatttcatatgtcgcttctaagggaataagccatagaggcttctccaggtttaagagaacagagtacctggaaaaccaacattctgaatgtatagacactggactggacttgaggtcacctatgatgaggtttttaaaagaatctaagaatttgctctctacccttcccagtagtgtgtggcatcactagtgctgggtataggactaaagtgagtattaggttgaatattgttgtagagtatttgtgtgtcctatacctcttaatgcataaattcctaaatttaaacatgtctttagagtccagttggcctgtcaatggtgaatttccttttgattttttcttgggcaggtttgcaatgtgataatcagatttttttttaactgattatagattgtttccttgtgtgggtgtactcacatttaaaagtatgaaccacggttaactagtggtctcaggggtagtgaaacactcactttttatttactgggttagttgaagtattcttaagacactgatcatgctgtgttcgtgatttggggggtgggtaatactaaaattagtcatgttttgtgttcacataacaaaactgttcaatgactgttggttacacttttaagtgaatttgtctcctattttatgaggaacccaatgcaagtcactaaatgtcttaatagtgacatctgcataagacttgt

SEQ ID NO: 28386 - DNA, 1154 bp, Mus musculus
tgtgtgtctgttactgtgtatttatgtatctgcaaactcacaaatggtgcaggtgcggaggtcagagagccacctgtagaaatgggtctccttcccatgaatcccaggggtcaagctctcatggtcaggtgcagcagccagaacctttgttcactgagtcaccttgctggccctccctgttttgtttttccaagcagggtttcactcgggagatcaggtgagcctcttgctttaggctcctaagagctgggattccaggtgcttgcctgcctgcacacctggctggagtggccgtgggtgcacagattacgtgtcgaaccagcagttggggttgtttacagactgaatgtgagcggtaggacaaagaggagcctgacagggcaccaagtcacttctacccgagccagtgaccaacttgtagtcacagagaggctctgtgaccaaccttggctgtctcacagctgactctctgaggtgcctgcatagaatcaccaacccctaggtgtataggagtaaaggaacttttcctaatttttatctaaataaagaccgatggggtcggtgagctggctcagtggacttagttctctgtgggctctaggagggaacttgagctgttgggctagcacagccagcacctttgcccactgagtcatctcccagacccaatgccatcctttttgtgcctgtcttctagatcactgctttattcttcagaaacagccacaatgaacaatttcttgtgaatcttatttgtagaaagatgtaggtatataccttatacagacttgcctgtccacctacccccccacccccacaaataataacgttctatgataacgttctatgaccattattttacactaacctgtaagctgacaaaacttagaaagtttttcaggtcactgtgcatttagaaatgctagctgtcatgaccggatgctagctttgggttgagaacagctccaacaatttttatctccccagtgtttgtgatcctgagaaacaattgtcttctccatcccagcgtgggataggagcgtatgtgtggaaatggcaatatagggtcagggaagagtcaggtctgcacagatagatgatatctgtgggacgcccgacttgccagcaagtaagacgccacaacaggatccttc

SEQ ID NO: 28387 - DNA, 1104 bp, Mus musculus
tcccattggctggtgcacgaggaaagacaaagggagccatctatctgcaaacacatttcagtgggtgaagccccaccccctccagtctagcgttttgctatggcatcattagtaaactgctgtacgcgtgtatatataatattttaaagatagaatcttgccttttttactaacttttcttttttttttatttaaaaggtttatttattattattatatataagtacattgtaggtgtcttcagacacaccagaagagggtgtcagatctcaatacagatggttgtgagccaccatgtggttgctgggatttgaactcaggaccttcggaagaacagtcagtgctcttacccgctgagctatctctcctgcccccttttactaacttttcatttagcatgtatcatagtgtcttcgtacacacatatcttatcctttgcctacttctccttttctcccctgaaattccaggcacagtgttccttcagctgggactggggcccttccttcccctctcagggaatctggaaagatgttagaatcgaagcctataacattgctcatctggattacctcacgtttttgccagtatatggtaagtcaagatttgcgatttcttgaaaaaaaatttttgagtcttctttttattacaaaaagtctgtttataatttgaaatataagtatattcttcaggatcttcttaaaataatgcagaatagccaatttataaaagtctgaaatacatgcaaatggtttgtcatgaaaacttacagcataaaccaggcctgtagatagatacctgctaaagtatttattttggggggagggagggaacccaacaggaaaggaaggaaagaaggggcgtcaggcaggaatggtgcatgcctttaatcccagcacttgggaggcagaggcaagcggatttctgagttcgagcccagcctggtttaccgagtgagttccaggacagccagggctatacagagaaaccctgtctcgaaaaaccaaaaagaaagaaaggaagaaagaaagagagagggaaagaaagaaagaaagaaagaaagaaagaaagaaagaaagaaaggaaggaaggaaggaaggaagg

SEQ ID NO: 28388 - DNA, 1600 bp, Mus musculus
aacatctctcagaagggcaatgtttttgtttttgatctggaaacgtctgcggtcgctccctttgtttggttggatgtaggaagtatccccgggagatttagtgataacggcttcctcatgattcggaagaaactctcggtactgttttacccttggaagcccaccagcaagagtgagctgcagcaggccttcagcgtcacctccctgacggatacctactgaagggacatggcttgtaattcagtggacactggggacaaaggctttctaaagcatggctggagaagaaggcagcctgagataaaaccgtcaagaagtatctgctgcctggggtgctatgacttcccagtgaatactgttcatcctggtgatgtctttagacaaggtcatgcccggggattcttgaatctcccaggattgtggttttgtcccacagctaaagcacggccagaagactcataccacccaatgacctttttgggagaccactagactgtgacatgattgtgtggaaccaaatgtggaggttctgaagtaatgtaggcctttcatagcaccaggaattctacccactgtaggtgaagtgtgtggctaggattgccagaggaaatgggaactcagatcctacaatagagattgcttgatggcagccatattgattgttggtagacagctgaggggcctgaatgttgtatctgattactatctttaggtaggattccctttttcatatagtttggcaataactctctttctgaaaagaccaagagatctttgcagcctaggctgattgtgctgtcacctgtgtagtctcagactctggaggcagaggcaggaggaccacaaattcaaagttggccccgactatactgttgaatttttcacttctcctcgtcctgagtgttcttgtgagctttaggcttaccactgattctgatggactctcgaatccaaagttaggagctacatttaaactcattggctctgctgtggaagtggcaaaaaatgttaataagtagctattttgggcactggtttgtgggctttttggtatgacttttatactttttctatatactatatatatatataaataaaaacccacagattatataaattgcactgacaacttgaaagtttatttgcgctctgtttaaccatgtaataaacatttcattgcatacaaagctgcattgaacaccatgtctgcttgacaaatgagggaatttgaagactataactgaagattactggaaagcattcttaattacttagtggaatggactggtgatgagtattttatttaaaaccaagactcattaactaatggctttatttttaaccctgagaatctctaggctgaggaactctgtaaagaagataaatagtacgggctgtttagtctttttcttcagtacctgaggtggaattttcccctaatgaataaaaatcacaagggaccaatcacggggcgagtaggcgggacttccgggtctcggggagaaagaggacgagtaatggtccttttggactgcgggagcaaaggaggcagtcataatataggaagccggaggctgtccgttcgagtgaggatttataa

SEQ ID NO: 28389 - DNA, 1211 bp, Mus musculus
aagtcgttggtgttcatatcattgcgcttcgggaatcttcttttccatagtgttagagaatccttcagaattgcatggaagatgcattcttttcctgttgtaatggctccttgcttgcactagctctccggctctgtttcagtgcgttgtcctgtttttatagtccaagatggatgggacattttgttcagattttaaaggactagaaaggctatctgtgacagtgtttgcttgtaattttcatgtggattttttttcaatcttctcaacttcttaaaatctcaacgtattagtatttctaaccctgtgttgggaactctctaacaagggacagctgataggtctgtgtcattttgctgtgatttaattttctttttacaatggaagatcattttttttctggcacagaaatgtagccaacagaatattagccttaaaacaagtatctgtgtatcagctccagtgttctacttctcttacccttgggtgtgctcttctaagggtaatgattgccccctctccgcatggaacttcacatatgtaaggaaaacctaaaaccaatcctgtgagtgtttcagacgggctgttaagaaggaagagacttggagcctaacacgaggatgtctcctctgcctccatatttcagcagcatcttatccaaatgctaccaccttcctggcctggcttctcagtaggctcttttggatgcctagaggaaatgtatatttttaatattgttatacaagctgtctgatatgcctagcatgaaatctttttctaatcagttttatttcctcataaaagttaaattcgagcaattttctttttgaaatttaaagttaacagttacctttctaaaagtttaaagtgtcaagagatgaatcccatgagacagaagaaggtaatttgctacattactgaccccagtaaccacccatctgtctttcttatttggcttcaaattaggtttccaattgctttcctggtacagtgtttaggcttccgtgttatctgatcagtcataatattgagaaggtaaaatgtattctctttgaagttacagtttattaaaaattacaacctgaacttttatctcacctcaaatttacatatgcaaaataaggcttaagcttcagccgagaaagtgaattttcaaatgagcacagaagtgttcttctagactgtcttcagcttcaagtcttaattttcac

SEQ ID NO: 28390 - DNA, 1191 bp, Mus musculus
atgctcgcaaacggtcatcagtgggaggcctctccagaaaaataacctcccttgagccggataaggatttatgagctgtgaaccaacactgcgggtctcactgtcgctctaattccatccacagcgatgatcacacaggccggacaatgcgctgtggctgaaataatcgagcggattgaagacttcatccagacccaatataaattcatggttctctggagagaacctcagctacgatctcgaaattcctgtccgctctatggagcgatctgagtgtagccgagacccccagaggagggaacaagcagatgagattgacttttgtgcccagcgcgtggggaccaggccggtctcccgtggcctccagctgtccgggcctgcccttgggctgcgggcgcctcccgggggcgtcgcggccgccgcggggcttggggttcggggcgccgggtcggggcgcgcgggcttcccccacccccggaggcgaccccacctcccgcccccgctgtgcgcgcgcgcgtgggtccgtccgtctgtctgctctctctcgacgtcagtgggaatttccagccaggaagtgagagagtgagcgagagaggacgagagagaagtaccgaggcgagccgggcaggaagaggaggtttcgccacccgagcagcccggctgcgcgctgacggcttcccgtgccctgcgcgcccccggcctgccgccgccgccgccgccgccgccgccctcggcctgctcgcgggccggctctagcagcgcaggccggagctcagggccccgccgcgcccggcccgccccgcgcttctccgcccgcgccgcagccatggcgcgccgctgagccgcccgcccgcccgcccgcgccccgacccggctcgggctcccgccggtccgcgccgctccgcagcgggagcccgcaggcgaggagaggccgcgccgcatctccagggtaagccccggggcaggtagaggaacggagccgccagctctccgcaccacggtgcagcgggtcccactggctcgaagctcccggggttcggggggggactaggggagagccccaagcaggagtcgcggatcgagcggccccggctgcggggaaagggcacatccgcactgggcggccccgaggccttgcgggccggctggcggggccctcggcgtctccgcgggcgggaacgggaagcggag

SEQ ID NO: 28391 - DNA, 2370 bp, Mus musculus
ttgtctggtaatatgtacttaattaaaatgtgataaataagaaatcccctttaagatcttattcttgaaaatcaacatgtgttgaaatgtcaacgctaatctctgccaaaattagtgttgaagatcacagactctggcaaatgtctgattaccttcactttctggattgcgtcacagttttgcatatagaatcgaggatgcattcttgggcatttaatacatctaaaagtacagatatgttctgctttctctcccagtgaatccaggtctctaactagtgtttctctggcaccctcaccctagtgtcccacccagatgcagtgttcacagaagacaatggttgggaccaggctctgccctcattctcacacactcgtttgtcagctgggttggtatcgtgttatctgaccctcttttctcattagagccactcacaagatgtttgctaatgtcttaacgcacccaggcaacgcggaggacttctgattttgctcctaacagattagcattttgctaataatagatcgttcttctagaggtgtttacttagtggcttctgcggaggaagctgtgtagtccgctcacgtgagactgagagggttgatggccaccaccacagagcaggaaatagaaagtggaacacggaggagcagaaagaattctgggatagagccaggcacctgaagatgtaaggagacaaatgcatggtacctgagcacaggtagtcagccatgtggcaggatgtagattagaataaatgggttattttaagttgtgatatagtcagagaagaacctagctatctggccaaggtactggtaaatctatcttgagtctgagtcttatttctgggagcatggggctgggaggagagccagatgtaccttctacactttgtcatcaaaggcttctcaggaccgcaaccagctgtgtatttttggactccattttgggtgatgcttgtgtattccttggatctcttatggtcacatggttcccatgccaaagatgctgcatctcctgtatccaggttcaggcatctgtggtgcatccgcagggctgggatggcttaagatctctcatttcctgccgcgactcttgtctaacccatcatcctatgatgaccatttgtctcctatagccctgaagtcaggtagtttctttttaaaattagtagttgagtctcattcagatgttttaaacataggatgaccttcattttttattaattattttatttatttacattttaagtgttgttcctcttccggaccccctctccgtgagcacgtccccctccctcttccctcctcccctttgcctctaagagggtgtttccactcccacctcacccctctagtatccccttctctggggcatcaagcctccacaggaccaaaagcatcccctcccaccgaggccagacaaagcagtcctctgctacatatgtagtgggagtcatggaccttgtttggtggtttagttcctgggaactctgacgggtctggttagttggtactgttgttcttcctatgggatggcaatccccttcagctctttcaattcttctcttcaattcttcccataggggtccctgggttcagtccaatggctggctttaagtatctgcatctgtctcagtcaggtcctggtagaattgagtgtagacagctctaaggagactttctgtgtgttatcaagcccatctgcagtggaaagggaaccctggaagtccacatggcctagctggctcggatgaggtaggagtgtactcagaacctaagtttcaccatcagcacaaacgtcctgaagcaggggcattccatggttgcggttgccttggaatggagacatgtagcgtgaactggggaccagacacctcataaatggctctgtgactgcaggtggcttccattcctagaatgattaaatacttctttaaatggctaaggttaagctctgaagcagataagcatccttataaagaccaagggagaccataacattctacttagtgtcctttcacataggaacactcaacaaaactggcttctcttcctcagggacacagaagagaaagcttatgtctgtgttgggaacatgctagaagcacaaagcagaggatgtgacactgtggtctcagaagttacaaaaaaacataacatgttctgttggaattatacctgtacgtgggctataaggaagataggaattcatgaagtgataaggtatttattttattgctgtgactaattaagataatagttttcactgttccatttgttaaaatcttaagatgttgaatttcaaataatctgctgatatttaaattttatcttgtcaagaatatctgattttttctataagatt

SEQ ID NO: 28392 - DNA, 1198 bp, Mus musculus
cttaaccactgagccatctgtccaacccccacccctcttttttataaatgaaagcaccacagaggtaatactgtcagccacttacagtctatgacggatgggtaggttaaggacggagtgcctgggccccagagattgtctgtctctgcctccccagcactggattttaacctttttgtttatggctggcttatttagaccagttctagacattgaactcatgatactttcctgacaatagctgtctccctgtcccttagataacccttctttatcaaggtcgtttggaaaggaaattgtgataggctcacctcctcagctatgcagctgaccctgagatactgagagcaagatctgactcgggaatgaaagaggagatgaactgatctgaaggtccccaactgtagagataaggtggttacgcctatcatgtgtacacctattcatacattcactcttagcactgtcagggccaaagagctagttgttggtgttggtgttggtgtttgtttgttttctttaaagaataacatatctattgctctgtatgggatagttacgtttggcatcctggcagagtatggaagatgcataaactgtcactcccaggagtaaccaaatggcttagtcagcccagttcttccttactactggggaaagcacctcagcgtgcttgcctgtggtgagtcagcagctttggagtcacagtctgatagctctgcttgctttttaggaatcacccccacccctctgagccgaaacccatgctgctgtgatcaagtcaggtgtcagacgtccaaagaactggtgcccatgcctttttttagaattattaaatttcaaatatctatcagcaccttaagtgtgaggtccatttggtaagagtctgggtcctgggagcttttgatgtcaggttgaatgggaaatacagtaaagtgactttcttcagcacagactattgagtgactaggaagtaaacaatgtgtgtgtgtgtgtgtgtgtgtgtgtgtgtgtcgtggggggcccaaatggggaagaagtacttacaagtaagtagtaggaaatgatgccctggtgggtccaggactggagaaagtacttaaggttgagagggtttctcagtttattaagctctctggagatttaactaatgtagagtctatgggttgggatgtctattgctctttctgttctctct

SEQ ID NO: 28393 - DNA, 1117 bp, Mus musculus
tgagatctcagatttgaggtatttgaggagaactgaaaactggaaatattgtttgcataatgcaggatcctccattttagtctctctaaagtaatttttaaaagattttcttttgtttcctggtggtcggagagatggttcagcagtcaagagggctctgtattagtccagaggacctgagttgggttcctagcaaccgctttgaatttttcacagctgctgccagtaactcctgcttcaagggaactgacacaatcttttggccttttgcagagacttgcatgcatgtacccaaacataaggacacacacacaaacccatacaaaggaaatatgatttctttttgttttttcttttgattcaaaattaattatgaaacttttctgtatttggagtatattattttctttaacctttctatattacttttggaggatttaaaacaacaacaacaacaacaaaaaaaaaacctatcctcagccaggtgtggtggtgcacgcctttgatcccagcacttgggaggcggaggcaggtggatttctgagtttgatccagcctggtctacaaagtgagttccaggacagccagggctatacagagaaaccctgtctcgaaaaaccaaaaaacaaaacaaaacaaaacactatcctcaaaactttttgacagatgatttgatttcctctgatatttaatttttttctattcaactattgatggatacccaaaatatagtagggtccaacttggaaaacgtagatatattttttcatgttattttaacatgtgttctcactgtgaccaatagcaacacataaattgggggattttttttttctagtcatttccagataaatacggtgtggtgagaccctagtgtgggttgtgattatctgcactgtctcatcatataaatgttctatacatgtacattttctgtaattttgaattagaacatagacatcagttatttttttttccctcagtggataaggggagacatccataatttagtacagggccagacagatatcaaggttgtttaggaagaaaaattgctagttatgcatatttttatacatctgcaggaaaacacagaacacataaaaactgtggattg

SEQ ID NO: 28394 - DNA, 1724 bp, Mus musculus
tgattgacagctagcagctagagcagtgattgacagctagcagctagagcggtgattgacagcaagcagctagagtggtgattgacagcaagcagctagagtggtgattgacagcaagctgctagagtggtgattgacagcaagcagctagagtggtgattgacagcaagcagctagagcggtgattgacagcaagctattagagcatgctgcgctccaccaaccaggccactcatcaggtctttagaataagctctttgtagcgaaatctgtaatgtaaagtgggaaaatacagcggggacttgaagctttgctgctcattgagtttgatgtaatttctggtcttgtatgtttaatgatagtattggcttaagggttttgcttcatacagttaaagaattacaaaatgtttttggtattttttttcatatctcctgtccccaaccccttgcttaaaaataagaatgtcagacagagtggctttgtgcctttgcttaaggatttttccctaaatattattgatttgtgtcatctgttgaactcaagcggtctcttgcgttctgccatcagactcttcagtagaaaaacctgattataatagtgggttgaattatacacattgcccttggggtctggagaactcaaccatccttctggaaacatgacctttagaactaggagagctacaaagaacctaaaagttcactttaatttttcacataatacatcatgcgaaacttttaaaatgctatatatctactcaactttagtgaaaacctttccctgacaatttacatatttttgttactccctaaagtagaatcttgagaggaataacttcaaaggaccacgttccacagcagggacttccttcctctccacggtgtctgtcacttttggctgcctctagcacaggttctgttgtgtgctttcacaagggtggagggctcgatgtaaaatcactgctctttgcttagaataaacctgcggctgagtttcacattagcgtcacgctcacaggtccggggcactcctggcctcattctcagagccttctgatctgttgtgcttccttcagcaaacttcctgtctaaccgttagcctaaagcagtgctgcttagtccatgtaaatggttttcctaaggttgcgtgcctctgaacacagctcgttgtggttttcaactctgtcattagaatctcctccctcaactgtcatttcactgtccactttgcagatttctgaatcccatcaagccagtattcttcttttgatttgtttgtatcttcgtcacctgctgatcatgttccctggtacaagatgatgaggcttggagcttctcctagtatcctctggtcctccaggagaccgacatgctgcttctatggtggttttagtgtgtgctcatggtatctttgttgtcatcattgttttaatattgagtccagggtctcactgtgtagctctggctggctccaactctcaatggagacctggctggcctggatctcacagcgattggcttgccctccatcctaccccgactccccacccccacccatgctgggtttattggctcccacacctggtaatactattttcattcataggaacacataagtttctatttgccattcagatcgtggatctcatgtttaacctacccattgaaatacgtatttctaattctctagtttttaagggtctgtggcaactaaattctcca

SEQ ID NO: 28395 - DNA, 1211 bp, Mus musculus
ctttttactatggttgaatgtagggacataggtcagggttatttacaggaacataggcaccagtgcctgcaaccctgaagaaagtgtatctcctctcatcaaccactaactgccatagatcatcagggagggctgggggagagggctcatgagccccttcccgttcagggcaggatgtggacaggctccatcttatagagaccttgtgcagagtcacaaaggctgatgactgtggcatggccaggaaacagtgttccacagacacttcactcttcttacatcatttacccccactgttccataatgttcttagatccttgaagtgggtactgttagaagtcccacttagactgagcacttagtggtcatgtcttcttactatgactgttttaagctctagttacttctgcccacttaaaagaaggaggaggaggagtttctttgacaaaagctgactgtagcattcacctatgggcccaaaacataacaggcagtttgttgtctttttattttaatggagatttgaagttgcaaagttctgtctcctcttcaatgtggcctgtggcccccacggtttacatttgatagtgttgatgtgcactggcctcatttcccactttccctcttttccttcaagtagttcgctgtgtctgtttttaatttctatttgcctttcgttcattgaattgaacaatatagaagcttattgaattttttgtgtcatccttgtacatgggtcatgctaatctctgtactgttttgtcagtacgggttgtaaacatgagcacatgtcagaagatgtgagatatttcttgagcctgtagaataagtcactttaaaatgtagcactctaatgaactgtgaaggctcttagctgtcagaaaacgtgtagaaattgttggtgtacttttccagttttagtgggatagagagggtgggtcaggttatcaggttgagagaagttagcacagcatgaagtcacacaggactttgtacagtattaagcttgaggtttgttgctgcacccatcatgtttataccatgtgtgggttagagtaaacagtacttgggagtagccatgagagatgttggctgagtgcaggatcttaaactacatagaaatttcgtcagtaatcactgagtcctttgtgcttcctgtcttgtggaaaggaccagttatatctttgaatttaattttatgtgtatttatg

SEQ ID NO: 28396 - DNA, 1214 bp, Mus musculus
gataatcctgtctcaccacagaaagacgagcagggccagcagagcagcccggttctgcagtgagccccgtcccacagtaaccttcccctgtcctcctctcgcttaagagaaaccaggcagtgcggtgctttacagaatgctcagactgcaagaaaactttctctagtctatgttgtggaattttaaatctgttttaagagttaaataataatgaaaaaaaccctttaaacactaagaaaggatcgtttggttttgtgtaagaagacttaaagatatgatttcaaaattgctttaagcctcaaatcagtcatggaggacgtggaatacgagtctgcctcggttcgtcactcactggagcatatccttcaggacgtgtcttctgacccttgagcttggttctttaagttcctacctgtatctttttagtccgatgtctatttggtggagcagatattcataactgacctgtgtgtcttctagaatgttgaactttggaagctatgcttttttctgtagctttggtgttttgtctaagaaatacattaattctaggagaactaccagttgtttgctgggctctacaattcattccttttggacaatggagtctattcctgtgcctcccttgtgataccttgttatgcttctgaaatagtcacaagaataatcttaaatcctgtaatgacaataacttattcaattacacagctaagttttgctggctagattattatataagctttttttgaaggatcaatttgtctttacctcagtttaaaacaaaacaaaaaagttatccttctcatatattttccatatatatatataccatatatttccataatgttatcttttaatgtgaatattatacatctgcctccaactaatataaatgtttctgtaaatagcatatgcatgtaggaaaatgagcatgtaataatgtttacatctgtccatatcacatttagccttcatgccttaatccacaatgacaggactgatgcattctttgcggaatgggtgtgttgaattcactagtttgaattcgttaaatggaattgaacagtggtttggaaaccgatggagacagagcagagggcactgcactgttgggcttctgcagagagtttgcagagtagtattcaggtcacaagcccttcgcacgagtgcagtggagctccaggggctctcattggtcttttctctttatgata

SEQ ID NO: 28397 - DNA, 1189 bp, Mus musculus
gcacaaggaagtgtatgaaagggtctcagcattaggacggttgagaaccactgctttggaagttttttgttttagaatacttttctgagtatttgctggtcgttatttttaaaactgatacagagttagggaaatgagcctgcccttccattttccttttcctctgtcttctctagggtcactcaggggaagggattaatgccagatgggactagcagatttacctgcaaaggaaagtctgtttttcacttcatggggactagcacattttccgagtacacagttgtggctgacatctctgttgctaaaatcgatccttcggcccctttggataaagtctgccttctcggctgtggtatttcaactggctacggggctgctgtgaacactgccaaggtaagagcctggccgcggcttccgcttctgtcctcattcagttcagtgagacattgctggcacaccatggccagcctgtgaggctgtgactcttagcgggcagctgacactgtctttgatgataggtggagcctggttctacttgtgccgtctttggcctgggaggagttggactggcagtgatcatgggctgtaaggtggctggtgcatcccggatcattggtatcgacatcaataaagataaattcgcaaaggccaaagaatttggagcctctgaatgtattagcccccaagacttcagtaaatccatccaggaagtcctcgttgagatgacagatgggggcgtggattactcctttgagtgcattggcaacgtgaaggtcatggtgagtacatgtgcccgcattctttttgggctttggtttcctcatgattaaagctttggttctgaaacagctttggtaggaattacttgttgagaaagcaggcgatggcaatagcgccttgaactacttggacctatcgaatggggaattacagaagggctcagggagagatgctcaccaaaatgaaaggcttagtgtgaagggcatgggctttggaactggacacacacctgagcgaaggatggagtgtgtatctagtagtgtgtcaccaacattacatagagtcctgcagtgacttctgacagcttcttgcacggaaatccttaattaggaaaaaagaaacttttagatttatttatgtgtatgaatgctttgcctgcctgatccacttcattgctctcttctcc

SEQ ID NO: 28398 - DNA, 1955 bp, Mus musculus
cgggaagcgatctgctcagtttgagcacaccctgctggtcacggacactggctgtgaaattctcacccggagactcgatagctctcggcctcatttcatgtcccagttttaatttctctcaagatgcctaacatacgaacaccatctcgtactgtgcattttattgaaagtatggaaatgaagttttttttttttaatcactcgttttgttttgactgtggataagaatggactacagcatttggtgtgtgtcctcaagagcttttgggtctgaaagctgagaagaataaaggaaacattgcttacttccttccaccactggcctcaccccctcagttttctgtactgtgttttcttctttgccccttgagcactttgacttcaacctgcactcactgctttgtcactgccagaccagccaccaagggccagctgcttcccaacagaaggttggagatgagaaatcttgaaactttagcaacatgttgctccagatttttactatatattgatatatatggaaatatatatatgcatacattttaaattccatatacacgattactgaacactatatgaccttcggtctgggttgattctgctttgacaggatatctgctctcagaaacggatccataactcgttagtgagtgactcctagttaggacctggtctcctctcacccccatgctgttcatttatcttgtctgtctgcagggaagactccgcgcagtgtggactgtgtgtcagtgagtgagacgttgtcagactttaaggtctggtgtgtgctgcaggaagtggccggcagctgcggggtggctttacagagcactgctgctttagacctctctttggtcaggtgtgaagcccccttttttcagacccttctgatgtgaggctgcacctctggagcactcaagagaagaggcagttgtcctgtggcagaggatgggggagttaaaaaatgtccccaggtgtgtgcacagtcacgggtggctgtggctttaccattagtaaacataacagaatgagaaaggagcctgttgcggtactgtaaacactcagtatgctgctgctatcctgtattgcaaatgcacctctcctcggtcgagttgagagtctcatcagaaatgactaggttgcccggaatctgtgctcctcggtggtggttcaaacaccagaggataaagttgtcacaagagtatccttgattgctgggtgtctcatgacttttatagtataatttgataccactgacacatacttcaagacatctttcccagagtgcctcagaccttattgctttaagagaatgatgataatgttttcatgactttattttaatgatttagtaaagtgattgaatctggtgtagacttctgggtgtgtgtgtgtttaaagtttttatcaaactgtaatatttgtgaatggaatgccttgtaatatgaatgttaatataatatgtaaagggagattaaacgtttgaatgattatcccactttttctagttgtatttgttgggatttcagagggaatcgacgggaataaggctaatgtcacagtctaacctcattgccattggagcaccttttcaggtctatcataccaggattgcatggcgtttagtccagcaaagtgccagcaccatttgtgatgtagctgtatcaggagagcttttaagaccaagaatgtggcatatttaggggaacatttcatattttgacagtagaattagtaatggaggtgggctgggtgttcagtttatatcatcagaaaatgaagctccatgaacaaacccctggtgtggttttgtgaacagatggccagacatgctggtgggaatgcttcccttggtattttaaagctctgcgctctagtctaatcttgaattaatacgggactaaaagtattagatttagtttacaaaacatctacttcattcttgtacaaccaca

SEQ ID NO: 28399 - DNA, 1194 bp, Mus musculus
ggatttactaggctaattttttgggggggggaattatctatttctagtcttttagatattaattttagttagaaggtgttatttttcttctcctctttttgtcctttgaatatttttgttttgtgttgtatagttctggctgtcctaggacttgctccgtagaccaggctggccttgaacacagagatctgcctgcctctgtcttccaagggttagggttaaaggtgtgcaccactgccacctggctgaatgatctttttcatatagcttcctgtaattgttttatgtccatgtacaatcataacatctcgggggggggggggcagtgtggagggtggctgcaggagagagcaagcctgaacacacttctctgcctgtttcctctaagattttttttatttttgaactcaggatagcagttccagtagcttgaagtagggaaggaaattgaggaatctagcttctttaatctttaacttacctcctctttaccacagttctaatgaatgccagcttgatctgcattgattcagatactatttggccatctgtattctcgtgtctctttgttccttttatactagtgtattttgatcactttgtactatagttttaaataatttaataaatttaaatgtgtgtgtacagacatgagtgcagctgactacagaagctagaagagggctttgaatcccctgaagctggaattacaggtggttgtaaaccaccccatgtaggtgctgggtaccaaatttcagtcctttggaaggtagtaaatgctcttatttgctggccacctcttcagcattgtgaaggtcgaatataaagagataaaacacatggagatagcacattgtctggtagtaactgcttaataatgattaagtaaaaagttttcgggaggctagatatggtgggttatatttgtaattctagcattccagaggctgaggcaggtacacagtgaggccctatttcaaacaagaaacaacagaaagtgaaaagtcatagttttcatgagatgtgtggtttctttggctggtgttcacctgtcctcattcgcctgttgggatgttgaatttgtaacttaggtgtgcacttctgtctgttgtaatagtgcttcctttctatcatggcacttgaagtagagaatgaagaggggatgggatgcaggggggatgggagctaggctgt

SEQ ID NO: 28400 - DNA, 1540 bp, Mus musculus
acattggtgaaggatccaggaatatgacagaaaggtggaataaacattaaatttgtgcattctttggtaatttttttgttttttgtaactacaaagctttgctacaaatttatgcatttcattcaaatcagtgatctatgtctgtgtgatccctaaacataattgtggactataaaaatgtaacaccataattacattcctaactagaattagtatgtctgcctttgtatctctatgctgtactttaacactttgtattcttaggttattttgctttggttacaatggctcaagtagaaaagcggtcccatccatattaagacagtgtacaaaactgtaaataaaatgtgtacagtgaattgtcttttagacaactagatttgtcctttatttctccatctctagaaggaatctgtacttcgtattgcaaggcagtctcttgtgtcttcttagagtgtcttccccatgcacagcctcagtttggagcactagtttattatgtttattacaatttttaataaattgactaggtagtatcacatgtaattacactgatgtggctatctttttaataaagttaaggcacagttgctcagtcctaggttgagtgatggactttgactatgttacagttgatgaggattggggttttggtgcatcaccattcggtaggaacagcggctagaaactgattgttgggtttaagatgtttttacttaatggccagaaaattagcgtaaggaaagtatatagagaaacatgcgttagggacattagtgttactatctgaataaaacacaataaacaagtattaagaactacttatattggtcaattgttgcagtatggttttctgtaaacttgaaaccttgatctattctttgtatcatttaaagcaaacatgaagacattttgtctgcagtacgtaattgtatagttcagatcctgtgagatgaggtgtggctgttaacgccgaagggtaagctgaactgtgggtagcagagtggaaaccattggctgagagaaaaatgctctttaagtggtggttgttatgaattcacactgataacttgataaagatccttataaaatacatacggaattaatagcattgctcttattatgtacgtcaagaatgtataaccgcctgctcttgttgtcacagataactccctgttcagtgctttggaaatagcgatgctcacgatctcagcattctgtaccctacatctactgtgtggatcattgagagatcttttgacattgcaacatgatatggtctatgttgggctgcattcctggctgtcttgtatgagaccccggttggctccctgaagctgattgatacagtgtacaggcatgaaggtggctgatgaggctttcttaccaacatgtgggattctagtagttgtatctattagagattaattctcatattccttttcattcatttgtaagaagtatcaactttagaagtgaaaaaagaatcataaaatacagtttttaaagttaaaaactttgagtaggatgtatctttgtt

SEQ ID NO: 28401 - DNA, 1560 bp, Mus musculus
gttaggcagtgttttattcttgtcacgtgttcataatatatgtaggtatttctcccttttataaatgaatgagaattgggatttggtgtatcaccatttgatacattaagatttaaataatttcatagcttctgtcagatacagagtatgaacttgtgaataattcttaatcacataaatcacacactccctgaagatgtaataaataggttgtagtacattagattctaaattccagttagactcagctacaagctaggcatataaacagccagcaaagctagtcacaaataaccatggagactaaggtacagggttaaagtatgaatgtttttattggtgctctaaatcaccatctaagatagatggtagtgttcaacttgacagaaatagacgttcttgaatgctgctggagttgcatttaaaaggttaaatttagtaaatggcctgtatggtgggtacatatctgtaatcacagtgctgagatggaatgaccataaggccaacctgggttacgtaaaccctttatcaaaaagacaaggaccaggaatgtgcttcattgagagtgcttgccaagcatgtactatgttctgtgtgtgattgccagcactgtcaggaagatgaggtgtagtgttgggtctctgtgtatcacgtttctcatgacacccagctttgtattctcagtgtggagtattatggggcaagtggatagatattctcatttggcaccagccctctaaatacacatcaaattgatgagtataccttgaggccagcctggtccataatgctagttctaggacaactaaggctacacaaaccctgtctcgaaacattgaatccaaatgaatcccactgtgggaggatgcctgaaagccagtgcatacaaatgccactttgtaacatcccctcccctccagctgtggtcatgccagtcgtgggtttggtttggtttggttttttaatgtgtatgcatgcatgttttgtatcgtgtggtgcctgaggtggtcagcagagggcatgaaatccctgcaactgaagttaattacttagcacagttgtgagccaccatgtgagtgctgggagtcaactggatcttacacaaaaccaacgactctgcttactgcagagccattactccagccccatggctcttgtttatgtgatggtatgttcatttgtttttcatgacaggctttctataagcccaggctgtcctggaactcactgtagactaggctgggcaccagaataagtgctgggattaaaggttgtgcccccaacactgcccggtagtactttgattttctttctttgggggagaggggagcttggtgtagtggtgcctgcctttaatcccagcactcaggaggtagaaacaggcacagcctgatctacagaggctagcctgatctacagagctatatctaggacagccagggctatacacagattatataaattttgttattttgagacaggttttctctgtagccttggctgttctggaactcattctgtagaccaggctgagcaactgcctctgcctccagagtgctg

SEQ ID NO: 28402 - DNA, 1176 bp, Mus musculus
taagcttctttctgggtcctgtagtatacagaactgtactgcagctattgcaggagtgatggctcttcattgagtaaataacctagagatgatttcaagtctaccaggggatatgtagagcttatatgcaaaccatgacgttccgttcaaaggacttgaacactagagggtcctggagtcagaccctcacagctgtccagggacgattgacccgagggtttcaggctggtgtaacttactcaacagcagcctttcaaagattggtgagaaagtttcgacagtagctaggtttcaaggggcacagactgcccagcagggatgctgttgttgcagattgcacatggcaaaggataggagccttgagggtagctaaggataggaagggtggttcttggctaggtctcatggatactggactggcagatgtttctagatccacagcaatactgggaaatagtttatgactaataattgatcaaagtctctgccaagctgacggtgatgggccaggaaccatcatttctgtgtatgtggaacttgaggtacatggttacgggctgttgggcatcaaggtgtcgtctgcatatgcctgtggtcggagagaacaggtggaagtgggctgtggggaagctggagctcagacctcacgcccacgtgctttcccatgatcctcccgacatttagtcacagagacaagctggcaggatgaaacgaatggtagcattcatcatccaaatttaaatttgtttctcattaacagacattctgcctgtagtgcaccatgaattaatatgttttataactcttgtaactgtctcgtggagggcataattagtcatgagtgtttgggtgttagaaatgttaatctgttcaatgtaggcattgaaatattgcgtcgtttctttatttttaacatctctgagcgctctaagaagatgaaagtggccgtggcctctcttgacctctgggcggcctgctgagccgcctctgcaattggctggcccgggtcatgtgctcacttgtggtccaatcagctgggatggaggcatcagtgtatagaaacctttgacccgggggtgtgaatcagcttctgccttccggaaatgctacccaagagcacaggggtgtggagagggagggagggagagagggagggagggagggagggagggaggg

SEQ ID NO: 28403 - DNA, 1099 bp, Mus musculus
gcgaagaaattgccagaagcatccttttaacatcctccgtgagcaaagctcggcctgtggagtggactggtacctagactccaaatcacggaggagtggctacagctggaatcgggattgtctttccttggccacctctcttgtctccagctgtccaccattgctactgaaaaatggattttgaagacacccatgttgggtgactgtgtgtacccggaaggaccagtggaaaggggtacacagagaccacatcttagtttgcctccacagctgaacgggccctgcctgctttagtctggattgtttttctcttctgcagctccaagtggagtgagcaggactgctttcatgtcctgtagcctgaacctgccctgctatgtcccactctgcgtggtggtcatctgtggggcttgatcagctgcatttctaactaaatggttttttttttttagttgaagtcattgtggcacctggacttgaacatcttgctcttgtgttcattgttgttttttttctccctctccattcctgtcaccagcctgtagaccaccttgaattcactccaacttgctgtataaacccctctagcattccagtgatagagaactttcttaaaaacagaaatacacacagtttatcaatatctgtgttttttctccctggaggagcaaaaaaaatcaaatcaccaccaccaccacctccaagaaaccaaaaccaaccaaccaagcaccaaaccaaaccaaaaaccaatttagattcaggagcgggagaaaggaaagaaaatgtttttgatgatgttaaagttttggacttagaggcaaaagtcctcgaactattagaaccagaaaacactgcatactgaataatgtacaccctgaatgcatacctgtggttcaaaggtgtgggtctaaatggctagtttcctctctagcagcccggaggtgttgcattcattccttttggagagagacatatcacttttaaaaagtggctaaaaattgctggagacccatttggagacaggatatttggacttcatttggctgttgtcgccagccagtgttgggacctggtaataaagcctgggcttttagcggat

SEQ ID NO: 28404 - DNA, 1203 bp, Mus musculus
ccgaggacttgtgctgtcttcattgattatcatattcacagtttctgaagaaattaccccaatatgctgtagctcttccttacaagttaaagccagccaccaaagcacagtgggtgctgagcagtgaaaaagtatcttctctggagtctgagtcccgcatccttttcgtcgactgcacgtccttcaaccctcaccttctcttttagaacattgaacaactctagtgtgagacgcgtgcttcctgtgtcagtaactaaacacgacttggcaactacggtaggtagtaccaagtaccacagaccctgctactcccgcacagatgcgggtgatgtagaaaaggtatgcttcttctgagcgctgagagcggggagccagcatcctgactgtcctgaccttttctaaaactctgttgtgaaactgcagctctgcagagcctcatgtttgtatgatggtttgcatcatgtctgcacacaggtttgtatcatgacacacatacattcatacttacataccggaacatgcatccctgccccctcaccccccccactgggcggaggaaaaaaatcccagataaagtaccttttttttttgtcctttttatgacatttagttggcatgagttaccgccgtataatcatctgtctagtagaacctaacatgtttcttggctcgaagtccctcttttgtcctctcctcctttctgcactgtgttcttagagggaagtcactgtgcacacatagacttaatgaatgggaactgccccctaaccaacttggggttctcaataaattacttggaattctgttatattttatgtatgtggctttagcaataactttgatagcagaatgctgctgtaactgttgtagttataaactcactgcggtggccattttattctaatttgaagggaactagtagcagccagacagccctgagcagagaccgtggaagcagaacttctaccagggattgtcttactgtgccaaacatgccagatgctgtccacgcctgttctgggtcaagacccaggtctgtttgtgtgctctcttctgcttcagcaggctcactggcatttctggagaccacagcttgtgtgtcctatctgcatttcagcggctatgtatcctgtttagcaaatgctagtaggaaaacatatgccattttgacatgtttaggtattgcagggacatagttgttaa

SEQ ID NO: 28405 - DNA, 1221 bp, Mus musculus
tttacagttggctcacacgatagatctgtttctaatttctttaggaacctctgcactcatttccatattggtcaaaccagtttgcactgctatcagcaacggttaaatgcttcctgcccttcgcatccgctccagggtttgttttctacatacatgtgattctggccattctgactaagaggaaatctcaccagttgtaatttacatttctttaatagctaagaacactgaatgctttaagaatatttctcggcaatttgtatttcttcttgcccaaatttgtaattgttttttgtttatttgtttgtttgttttcttggccaaaaaatataatttgggaaaaaacacagcatctttacccaatggtgctgatcaaacggaatagctacacatggaagaatgaggctagctcctaataccaacctgcccaatgttcagctctgaacggatcaaggacctcaaagtaaaactgagtaccctgagtctccaggagaaggtggaaaatagtctttagcttagaggcataagaagggcataagagtcggtagtggtggcgcacgccggtaggatttgctgaaggaggcagaggcaggaggatcacaagaagggcataagaaggggctttctcaagaagatcccaatagcataggcattaaggtcaacaactgacaaatgggacctcacgatactaaaaaacttctagacagcaaaggatgccatcgtgatagatggcgaagaggcggcgtgctgagagcaaataaaaatctttaccagctacagctcgaacagagggttggtgtctaccatatataaagaactcaaacaaacaaacaaacaaacacaaagaaagtctctctccatccaagaaaggaagaggttaaggagtcatgagcctctcacaagtttccactggactgaatcccaaacaccccctgccatctctgaggcagagtgtggggtccctcaaaggacggatgaaggcaaaaccaaggtggacccagatccgctcattcactggactgccgctactctccgctttcctaggccgcactctttgtacaccacagacttcaaaggcaatcagaggcttctcagttctcaagcagaggacagcagtcaatagttccttggaggcccctaccacttatcactgtgttcccatcactgtgatctcctggtggacttttactgtttgcaaaactttgggaggaagaggggggg

SEQ ID NO: 28406 - DNA, 1145 bp, Mus musculus
ttaagaatcagagggggtggacctagtggccaaggaaaagccaatagcatttgaattctgctgtctaacttggtttcctttcccccttttttttttagatttttgggatatgcctggcacagaatttggtgagtgacattgaagctgtcagggctagctggtagacccctgcgaccactgctgtcagacactggactgatcccccctcactgactgaccctctgtgcgccggccggctgatggcgggctgtagaggcctggtcacaggcctacagtctcacctgatggagctgccaagaacttaactttctgtgggggtagaactgggaaatgctgctcacagacggaacttggaaaaagaaaaacaaaacaagtgcgcaacttgctgagtcaacgtgcagtgaatctctactgtagccgtggattggtggtcggatggatgctaccagaagggggaaggggggaggttgggcacggcatgtacttgaatttttggagaatacagtgctgtacacatcttggctaaaacttgggcccttagccgtcagggccaggtgtcttgaaatctctcaaaccctttgcatctgtcctccagagaagaaaccagctgccccctgtgttcagattctgagagaggtggagcgggtcacgatacagcatgcgcccttcatcctgagtttgcccttaagagaactgggcgtttgcagtaaactagggtgccagaggctgagctccacatttccacaggactgctctttcctctgagtggccagcccgagcctgagctctgtcaatgacatccaaggagaaaatgaggttaatgagagacattaattaaacactccctcaccccaccgcaccaaaccagttgggttcttctgatattctggaatactctgggctatgttttatgttttatttcttttttaatcggttgttattttggttctttttttttttctttctttcttttttctttttgtctcccaaaggaggctatgacacagttctcttggtttcttattcagcttgaatagtaagtttttgtagacttgtcacctgcatgtactgtaaccccacccccacccccaaatccaccatgttcttttcagagagacatttgagcgtgttccttagtgtttatg

SEQ ID NO: 28407 - DNA, 2334 bp, Mus musculus
atccagcaggaatgtatgcattgtcttgcttttctcttccagaatctctatacaaggaagtacaggatttggcctttctagatgttgtctccaaacttcgaagtcatgagaacaaaagtgttgcccaacaggcctcgcttacagagcagagacttacagtggaaagctgagaactggccctgctggcaccaggctcatcccagctccgcccactccactgttctccatccagctgcttcttcaactccattctctactacatcacttgtgcatgcgtgtaatgttccagtaccaatggaagaactgctataggtacctgcctaataagatttctaaacccatagttaatgtgaacatgactgtcagaacaagtctccacccataactgttaaatcctatactcctgatgcttgagctacattaagtagaatgtgcatgttgtagtcctatgatgatgtaaacttggtactccatgctgacttgctcctcacatgcagtaagctacataataatgtactggtaaactagaaacaaagaatgcagcaggacctgtctagcttatttaaagatgaaactgaatcgtcaaggtagcaccacgtattctggtctggttttgttttgttttgttttggtgctggggaagcacagcgatcaaaaagcctgtatggctgctcactcattaatcttctgccaacgtcaggcctgtaccacctaaacttgaataggtccaatattccttccttccctacggtttctcctttttctgaactatataggcagtttgccaagcaacacagcaaaccttcctgaggctcctgattccatctttaagcgacagtggtacaggggctcagtgctgaaacatggattttaatgtgagtggagcgtaggaaggagttaaaagaaaccctggcatactgaaccactttggatcttgcctgtactttagattccgatttgtgtgtggttacatctagaacttccatcagctagccagcattgtcagcatgtctctaaagcgtccttgatgtttgttcggtgaaggaaactgaggcggcttgtttggtggagaatggacttcccccccccccccccggttttcatcttttagggtgaaagcagggagattcatctttcatgctccctttcaatgtgctaattctaattggacataagaggaaacctgaagtaagcttgtctaaagagaggaaggccggttttaaaagccatagtagccagtccagtacattctgcagatggcctcatagcagtcattgttagagttcttcacctccactttcccactgagaaccacaataatctcccaggctgcaagccaggactcgccgcaaagactcttcttggcataatgtagtgtgctcgtcactgccactaaccaccaccaagtgagttcttagagctttgacacacagtctttataaattaatcgggattccctgtgacccgccttcctcctcacacccaaggttgagtcctgctgatgtctgagggaggctgagctccgttacaggagtggagggcagtgaggggctgctgagagggaccagctccttcctcccccgacaggagatacctgtatctctgcgttctctaaatcggactttgcttttcacacttttaaattcaagaaagatttacttcatgtaagtgaaaacctgactgacagttccctctgatgtccaaataagggaactgtggtgagcgcctgtgcttgctcactggagaaatgagtgctttattgtctttctcctgggctggataagtggactaatgttgcataatactgtccatattaataacttaataaataaatagtatatgaaactacagtgagattacttggtttctttgtgtgttgtctatatcttgacttccaagaacagggttcactcctaattggtactgggtgttgttgaatgaatgctcaaagttgcagatagccatcaaaaattttccagatagactgatagctgagatttggatagttctacttctagatccttcaaaataaaaacaaaacacttagagattgcttctgtactgaaaagcactataatataaaagggggaggggaggaaactcagaaacattccaagatcatagatttgaaagacagtaccttgtaactcggctaccagcagtcatttcagattaataggagctgctagctccagcaaaatcaagcacaatccagctgtgcccttcaaaacaaaggccaacaaattgggaaactcattgctaagcccaggtagttggtagacaaatgaagaccaaataacctttcatctgcaactaattaatctcagcttcaga

SEQ ID NO: 28408 - DNA, 1099 bp, Mus musculus
aacagagtcaactaacctggtcacatatcacttttttgcataacaaattaattagaaatgaaaaatgcctttatcattgttatttagtattgaagatttaaataagaaagatagttccttaaataacaagtatttcagccaacatttgaataggttatttatttacttattctttcttcctctctctctctctctctctctctctctctctctctctctctctctctctctttctttctttctcaactttacaacccactatcagccattcctttcctcccagtactccctcacacaaatttccccccaatcaagctttcctctggctgtcactctttccctacatacctacccagctcccctctccactccccagtacattcactcagcagccaatggaaagaggtccaaagactcacacccaaatattagatggagctcagggatttgggagaatgattgagggacctgaagaggacagggacgccataggaagaccaagagaatcaactaatgtggtcccttgggggctcccagagactgcatcaccagccaaagaatgagcatgggctagacccaggcccctgcacatataaatcagatgagcagcctgggtcttcatgagggtccccccaacaacaggagcaggggttgttcctgagactgctgcctgcctctatgtggatggtgtacccctaaatgaatgaatgggctttttaaaatacctgcttcactatcagatagcagaaaaattcagtgattccataaagcttactgataatattcaagattgtaaaagtagtaaaatttgaacacatggggtttttaccaagtctcgcttttgaaaagaagcaaaacaaaaacaacaacaacaaaaacccaaccattcttaacaataaaagaacttctgagggaaacaccattcctgacctcaagctgtattacacaacaatagtgataaaacctgcatggtattggtacagagacaggtaggtagatcaatgtaatagaattgaagacccagaaatgaacctatacaactatggtgacttaatatttacaaaggaactaaaagcatccagtggaaagaagacagcat

SEQ ID NO: 28409 - DNA, 3151 bp, Mus musculus
agaaagccacagacagtttggcatttgttatgaattgccagtattttctgcacatgaaatagcttttataaaaatcaatttcctggctattaagttcatcttagaataaattagcaaagtattacattttagaattaaaatccctagcctctatgctgaaataatactttgtggggcgggtagtagctatgagaatccacagaaggcaataaaagtgccttaaaccttattaataagaataattgtttaataaaaccattttatctttaaaatagtaagtagaaatctaaataaattttatgagtaggcagtaacttttctgtttagtgagtgtacttgctttgctcttatcattggtcttacctttcagtaagatgggccatggaaattcttgatcaaagtgtgtcgtgccagtaagagattgttgtgatctcttctgatgttctcccagatgctggccgccttcagatggggcagtttgtttgtgttgtgtatggctgcctggtccagaccgccatgcttttcatctcttatgctgacatgaagatatttcaatagcgttagactctaatagttttgtctcctttttagaaaagagtaggtggaagataaaggaattatggaaataaagtcattgtaagtagaaagttaaaaggaccacttcccactttcagataatgaactgactgatttttacatcttatgtctctaactgaaggttcaaaacctccttgcccggttcttggttcttttttctttttggttcgttttagattgaggattatgataagagccaactgtatattgttactgtgtttttgcttatttggagttgtttgggggattttgtttcttgttttttgtttgggattcttttctatcagtaagtaaatcccctccagctgtgtgatcgctgacttagacaactttgggtctcgggcctttggtagtaagggagaaccatgatgcagctctcccatgctcccgtcatctgttcgtcctgagagagcacagcatcatgcaggcaccgcctgtagtcaggaaagtgactttgagacagccgtgtagtttgcctcactacctagggagaaaagaaatgatggcgtttcgtgttttcttcgtttctataatgaataaaagcgtgtgatcctgctgagttacagcttaaatctgtggggacaaggtgctttcaaattccagatagagttcccaggttcctgctgccccatcacccaagtgtacttgtgcatcgtgtgtgtgtgtgtgtgtgtgtgtgtgtgtgcgcgtgtgcctgttaaaaaagacgtcttagactacagtatttgtttaacctccctaagaactttcaaggcatctgtcctgaaagctgctaatctatggtctagtgaatttatattatatgcagatagtaatgaactgggagatcaatgaacagcaagggtgataccacattgcaaaatggaagcttctccagtagcggcccaggttgcctcctcacctgtgcttgtagggaggcaggaaatgtcttcagaagtcaatgctggggctttgtccgttaggtctttgtgctgctgcagtgatcagtatcagacttgataactcatgttatcaagttagttatagtgttatttcagatctgaatgtcaggctttggcttatgcgacaaaataagttggggttttgttttgatgtggtagttttgttttgtcttttagatgatgtacaaagataatatttgaaaactcattggcatttgcatactcaaaggcttttctttgagttggagttcttataaaattttcttttaccaaggatatcaattttattaagcctttacttctatgtgttatttgtagagtataacgctgcattctataatgctggatttctctaaatttaatctgtaaaagctagtgtggcttggtaatttggcattgtgtctgtattctttgcctgttttatggcaagttgtatatccatacctaaaacagtgacctctgggaggtgagttctaaccatagccagaagctctgtctgcagtggggattgctatgttttgtttaccagcatgggtctgtagatacctggcactttacccttctggcgagctccctgggtatttattagaagtcttctgtgtcggtagcattgttttttcactagtaagttttcaccatagaaccccgagctttcctcctgctagatgtatgtttagaaggctgcactcgataaagcccagatggaaaccatagtgcatgactttaagtccctcctccaatttctcattgttcaggcttggatggtcctacattgatactgtctctctaattgttcggtctgactgctgcctgttgaagtagtaaagtgtttctcttccttgtgattccatgttttccaggggtcaggttaccttccccatgtaaaaccaaagcctaattctttggccatcgtattaaagcaaaagtaaccatttgtttacaagagatttgtaaacaaaatcctttgaatattgatataaaactatgttttaaattatctacagcaaaatgtactctttccaaggaactcgaggttagaggcacttccacggaaaagtgattcccgcagtgcaagttcagtggaacattaatgcttttgtgcatgtgcagctcagtcatctccattggagcagaggcaactcacacaaatgtacccttactccagtctgtccctcacctccattgtctaaggtattggacttagatgcttatgtgtaatatgttgaacctgtcagttgctgtctttttccttcttcgcattttaaagtttgtgtatagctgctcttttgcttttggatatatttttaattaaaaaaatcacatgagaaatgtaatctgtatagtgatactttaataagcacatactcaataaacaactgcaatgatgtcgacagcacgcctggcctttttttttccccctctctgggtgctctgtgctttcacttaactgagcatggggaaaagtcaaaagtcatgtttcatcatcacaggcctggaaacaacccctgacaagtctctgccatggtgttagccaatcctgctgccctaaacatttgaaaatactgcttttactgtactatctaccttctagcctttgcatgtccaatatgtat

SEQ ID NO: 28410 - DNA, 1184 bp, Mus musculus
aagccaatccattatagcattctaaaagaaatattcatttataatggctaaatcatagttcatattgttttatatgacccagtgtgaatatcacaagtaatttcaaattgttggatttttattgctgtaggctttccattttccgttttccttattctttttctttccttttcttcatgttgggactctttcttctgctgcctccttctgtcacttaaaaggaaaattccacctaaacggtaatctttgttttcagtataaccctttagcacagtttactctaacctatacatgtatttactactatgtttatttagaagggtattttaattaagtatattacacaaacaaattatgtatataaaaatattcagaataaaatatataattgatagtttaccaaagaatatgttttatcatcaatgcaacttaaattgtaattactgtttttcctttttttttttttttttttagcccaccaagaaaacacattgtggagcgcaacacggagttttatcacatacccactcacagtgatgccagcaagaaacggctgattgaggacactgaggactggcgcccccggactggaacgactcagtctcgttctttccggatccttgcccagatcactgggactgagcatcgtgagtgagcttctagagattgttggaggggaacgcttaggctctcaaagtagtatttagacttatcagcagttacagagaacagtcctggcaaaggttgcttttaaattatgttgtacaaaagaagattccagtccagggaatcgcactgaaaggaggggaatactagccttggtatatagccattgtaataatgatatggatttgttttagttgtctatgagggtataacatttggcattcatacagataattatgtaagggattttgaagttaaaaattttaaatgttaattttggatcttatttatgtcgcagtgacagaatctgaaaatgacaatacgaagaaggcaaagtaagttctctctttatgaattgaatgctttcttttcgtgaatggtctcggtttgttgtcttcaaactttcaagtgtaatattgcagttttgttgtttttgtaaatagaaactaaggatttaacccatagtccctttagtgtgacctaaatgtgtagcaacagatttgcaagttagttgagat

SEQ ID NO: 28411 - DNA, 1172 bp, Mus musculus
ttaaaaactagattaaaattgagttgttataacaacagcttagcatttttgtattaattgtgctgtgattattctgaatatatagagacatttcttttattaatacaccacagtaaagtctctttggaaacaggatatgtctatcgtaagacatattaaagagagttagctgttgaattgttagaacacctcctttctaattgcctataatctacttattaacctcagcacattagtaagatcctcagatatggtgaattattgtcaatttaaaattaactgattatacataaaaactggctagttaataggctgtagtgtagcacataatttgtttggaaaaaaaaaagaaacatggcacttgaaataaaaagaatggaaacatttatattaaatagataggctcagagctcagaattcagatccattaagttgtgggctattactctgtattttacagtgtttctaaatacttgataacaatccaattttagctgagtaaccaggaatatattttcttgtcacatgtcttctatggggcatagaagatttgatttgattgatcctgagccaactttggctgtgtgccctccccccccccccccccatgtcacctgttgttactaagatgtctttctgtcattttgatttggtgtctacttctggagaccgcagactcaagttgtgattctacctgcgagttaatatgcttaggctacacttcgaaagcactcttcttgagtacttgtggaatatttgctcctaccaaaaagtttttgtactgctttcaaatactttacacataagcacttgtaaaaagtctgaagggcaggcagattttactgttgaagaaaatgagccttttgtagacgtactcttcccataacattagaaatggaccttttagctaatacatgttatctgactttcccatggtcattgctacatatgaagcatgtctgtttgagcacattttataaaatatataaaagtatttgttgactattccaattgatctctttaggtttaaatcagtcaactacctgctcatggccttcaacacagaacattgcctccataacttcctgctaacacaaaacatttcctctaactcttaactgttggagtaaacaattatgtgtaggagatgatgttgcaaagcgatattcctg

SEQ ID NO: 28412 - DNA, 1215 bp, Mus musculus
actagaagagattggtttttattctgatagacgggcttagtcccttagttggcctctggtttttcacccttgctgttactgcaaggtccccttagttcctcaggctgtgagaataacagagatgaggaggatgacttccagctcctattttagccacaaattgtggtgttactaaggacataattcttgtctaggccttgctaaatctgaggttgacaattctcctttaggagctgcacaatactcagaattgtgcatactgtttcgtaatcatacgaatacagtatgggtatcgcttggtgcagagatttactgcaggggaaggtccagcttgaccatttctgagttccctgtgtgatacacctggtttggatggaggttggtatctatttccagttacaaccaaaaatatctaaggctctgcctcccctccccaaaagataccaagagccacaggtgtgggtcgtgatagcacccatgggaggaatcgggtcaatttccacccaagccaaggttaaaagcccactcatctacggatgagaaaaatcatttgatcacctcagttaggcatggccttattaaacttaattaataggggggagagaggttggagacgtactgttggaagggcaagcccttcactgcctcccaccctaaaaaagccaattggccgtgtactatggagccggtcataccccttctcccttttcccagactatcatccaaaaatgtggaggaatatccactcagtgttattcataataaagtgcatttcaaattcgtacagtcaaccttcaccagggttccaacgttctacttaaaattcaactaggaagttacctattcagtactaattagcattataaagtcagagcctccagctcagggctattctgttagttgtttactaggacagaaaggacagtcttatccagatacggtttaccataagaaaagttaggaaatcccatggagacaggtttttttctttagccctaagaattcaggcagaactattgagcataaatatttttttttttttgcctcaggccagccttttctttctttctttcttttttttttttttattaacaacagggaggagatgtagtcttggaataccttgttttctttatctatggtaattgggagtttttctgggtatagtagcctgagatggcatttttgttctcttagggtctatatgacatctgc

SEQ ID NO: 28413 - DNA, 2492 bp, Mus musculus
caaataaatacttttacatcaatactcttatttttaaaaagaagaagaaccacttttttatagtccccatgtttgccctaggcctgccttaagtggaaggaagattaatcacttaactatattttacaaaagaaaaaatagggctttggatgctattactcgtaatataaaaagtgtgattctatttcactaaggcaattatttttttaagaaatcactataatatgaaaaaatgtggcagtttgtacacctttggtggcttgatttaaagaaaagaatgagaatgtattgatgtctatttgatgaattttctatatttatcaggagaacactttattgccttaagtttaccaaccatgtagcagagcctcctagctttccagcagagctacctgccaaatgagtttgtgtattaaacaatgctgcaaaaagatagggacatcagcattcacttaacagtaacaatgaggacttctaagcagctggaaccaagataccatgctaactctatgcattcccaaagtcaaggcaccgtggaggatgttcagtcaggtcttccaaagtcagtgaacctgattaaccctttattgatatgcattctacacgtatttcaacctagacatcttgttcttgtgtctgctgtagaaggaaactctatctttgttaaaccatagagattatcatggtatacatgctgtgaacatgtatatgtacaagttgtaatgtattctgtgttgtaggcatattatttaatttcaccacgtcatcacttttgtacagtggccaagcagacacctccaactccagcatttccattaagtgcatttgtacattttaggccgctggatccagattttatattggcagttactgagggctaaagcaatatattgtaacagaatgtataaatatttttgataaaacagtctatattttataaaaagttattataacactaaagctgtacctcaaaagtctcacaaataatttgatcaaatgctctacgcatcctcagaggatccgttcctggctttgtatcgctcttaccatatgcctgtttgcaaatcatgatcttcactgggctggaattttattagatttttgttttgtttttcccttttttctcctaggctgtcactctgttgttctccctcagttcagtaatatcaataactctttgcttagcatgttagggccatgatacctcaggaacagcagaatggtaacaaccacactcgaattaaccatgtaatcacagtgagctcatctcttacaattttccaaatctgcgttattgagaagcaggaaagtacacaaataatgaagagttgagcttgaaacagctttgctgacatacattggcctgttgttattgtactctgagaatgattacaattgtccagagattctttatattaccttccaaattcattattatttttcacttaagatcctttggaagaaaattttctaaaaagagaagcaatatgttgctgtaaattgctttaaaatgccagttagttgccttggaagagaacaatagaaaaaaaaaaaatagcgtaattgtctagctttaattgaccagtgttaactcagtctgaaaataaaacactaactacttttgaggtacagtctgcatacctttgttggttctgaaatatgcatagaaagcaacttttcaaatgggcttttagcattaaaaactgacatagagttatatacacagtgtacaaaaatttttttaattgaagtcaatcattaaaaaatttagaggtcagggcatagtcacacaattatgctgaaaaaaaaagcactcatttttctgtagtttaaatatatatatatattttagccagattttaaattttcagagtgtaaatagattttgctattactgtatgtgtattgactgctcaagcactttgtaaggaaagtggatactttagaatggtaccctatgcatccaaatgaaatgtgcctttacatcattctaagaaaaagggggttttgcagtcataaattaccacaaatgcacaaattaaagtttaaaatagattgaaatttgtaattttggttttaagttttcattccttttagaattgtccttgtgttaaaatagttggctaaaaacgttagctctacttggaggtctcaagaaaattatttttagttagctttcttttcatcctggagaaggcacattgtccactttacttggaataatggggagatttcatctaggtctgtattctacagcttctttcatccatgcacagaatggccactgtcactagacaccaagaccaggaaagttgccaggaggagagaagcaatgatgtttccaagactaaaaagcaaatatgctaatgtaaagtgtaacatgggagcttcctcgtgttagagcagtggctctcatcctagggggtatgagaggggttagaatggccacttcataggagctgcatatcagatgcttatattgcaatttataa

SEQ ID NO: 28414 - DNA, 1440 bp, Mus musculus
aaccaaattggactttgatcttgaacctgaacctcctccagccccacctcgtgcttcttcccttggagagacagatgaatcttctgaattgagagttttggatatacctggacaggcaaggcattctaaacattccttgtataagttcttcttaaaataaaaccattatagtggctaacatgtacattgcaattaaaattatcagtatgaagtatgaatttatggttttctggttcctttatgtttgtgttttataagtgacttttctcaggtagatgaaattgataggagatagccgttcttcctgttggaggactgttatcatttgcctctgtattcaagagtccaaaaggaatgcaatgttttgcagacattagaagaagataatatgcttgagggaaggagagctgtttgtttaacaataagaacaaatgagccaatctgaaactttttctcatacttttggaattctctgacttttatctaacagtttgttttaatgagcatttgatattttacagggttcagaaactgttttcaatattgagaatgacagaaataacctgcgtccaaaatccaaatctgaatatgagctgagcattcctgactcaggtcgaagctgctggggtgttggagagcttgatgacaagaggtaagggatgagcaggcacgctgcttcgccgtctgtccgtctgtccgtcagccggctggtggctggagtggagttgatggcctcatctttaatcgttatgtttcagagctcagcagaggtttcagttcagtctacaggacttcaggtgctgtgctgtcttggggagaggacactttggaaaggtaatctgtcagcactgtagaaatagcgtataggatgagaaattcaaatagaactcagttatttattcttatttcaggtgctgttggcggaatataaacacacaaatgaaatgtttgcaataaaagccttaaagaaaggagacattgtggcacgagatgaagtagacaggtcagttttttaaaatgaagtttttccttgtggctagagattgagagagtagacagcaatggatctgagttcctagaaatatttgataatgctaaatttatcttctatggcaaaactagacattaattaaatgctgtttttcttttcagtcacctctttcccttaagccaggtttggtgataccaagtaaagacagggaaatgtttaaaataattctgttaaattttaataagttacagtattgataaagtattaaaatgtaactattactgatttgtgacttacttagtaaaactaatcacattttcacccgtgacgcagataaaatgtcatttcctgataatatataagtaactcaatggttaatatagtctgtgttttgaaatatacctttatgaattttcctttatgtattaaaaattatagttattggggaa

SEQ ID NO: 28415 - DNA, 1173 bp, Mus musculus
gtgtccctatttgctagtgtggatatccactatgtttctatctcattaagttatatatagcagtatcctcagatctaaagccttttgacagatgtgtgatttagatgtgtaatggctggctaaaacaacattctatattttaaccttttatttcttattactattgtggttatatcaatatttcatttctttctcctgatttttttaaccagtacattaaattatgattcaattaatagtaaattttctttcttttttctcctagcaaaacctgtgataagccctcttgagcttcggatggaagaattaagacatcattttaagatagaatttgcagtagccgaaggtgcaaagaatgtcatgaagttacttggctcaggaaaagtaacagacagaaaagcgctttcagaagtaattttaaaaacaatttttagccgtttattatgttatttgaagaatatcctggcttaaatgacaacaatatctcttttcctaacaaggcacaagcgagatttaatgaatcaagtcagaagttggaccttttaaagtattcactagagcaaaggttaaatgagctccccaggaatcaccccaaaagcagtgtcgtcattgaggagctttcactggttgcgtcaccaaccctgagtccacggcagagcatgctgtccacgcagaaccagtatagcacactgtccaagccagcggcgctaaccggtgcgtagaatgtaactgtcttggttttgattatataagagtatggattaatagttggagtcagaggcatatgtacaggaccttccttcaattatattttaggttcatatagtaaactttactatttgctggggctgatggcacagcatgtaaacttagctacgtgggacactgaagcaggaggttgcaggttcaaggcttgcctggacagcttagtaaaaccctgtctaaaaataaggattaattggtgggaacgtaacttggtagaacagtgcttgcttagcacacacaagggctcagctctgaaagaaagctttctaagaggcttgtaatataatacacaagcattattatcactgtcaagttctagaacattttcagcatccctaaagaaaaccagtgtccattcaatgcactctttttcctaggccccagcaccactacttaggttcttgtctt

SEQ ID NO: 28416 - DNA, 1196 bp, Mus musculus
atgtagtatttgaaaaccttgtaggcataactcatcttaccacagactggtttcaaattcaccaaatagcccacactggccttaatcatgtaatgatcctttgatcttagcctcctatgtgtagggattatactgtgccaggcgccaaatggtcacttctgtggggagtaagctgaattaaggtagttctgcaactcaagtagttcctttgtttgagttggttgaattctttattatctgtaagcacaaggagatttcatttaagtgacttgaaacttatttcaaactcttgttttttgaatacattaacttacacattatgttttcaatgataatttttattactatatatcaattgtatgatatcatgggttttattgtgccattttcacacattcagataacatattttggtcagattcaccctgacatcccagttttaagcaacagttgattctagtaacaatcatgtgatattttgtacacagattgtccgaggactccagatactccaaatagtgactctcgtagttctactagcaacaatagactgatggccttacagaaacaactggatatagaacttaaagtaaagcagggtgcagagaacatgatacagatgtactcaaatggctcttcaaaggtaaggaaatccctagtatttatatgttccgtatatatgagtttgcctaccccctaaaatttcatttgtcatcccaggatccgaaataggagtaatttgactgtcattgttagcctttcagggtgctggacttggtttgtctggcaatccgagctctctgctaatgtcagcaggtgattggtgccttccaaagctctcctggtgtaaatgggagtcgttttcattccatgtagtgctccatttttcacatgtttatggtttcagttggtaagtttagagttctagtgaccctgagacaattttagctgcacaattggaaaatatagacaaaaaatagaaatgtttttaaaacaatagtataaaaattgcatagtctctcaaaacctaattaatggataaggaacatggagttctctgtaacttttctataatcctaaaattataccaaaacaaaagttatttacaaaaaaaagtctaggctaaaatgggttttccgaccaagcaggctctgggaaagggcaaatgaaagctgacatcctagcatcacttgcgc

SEQ ID NO: 28417 - DNA, 1221 bp, Mus musculus
atggggtactttgttcttttttaagtgaactctgtccatgtggcacctctcactttccagggctccctgctcttgctagcagaagagcctaggatttttgtaacatttaataatcacaattttgatgataaatagctttgagtcttcttaaggccaaccttgaaatttccctgaatgtcatattgctgttgcttttaccgcatagctttagaaagagcaagtcaaaggctaccccagagacagaatgaaaggaaggagggtaactcagtgccatttgtattagtgtactgtcccttcaacatggcttccctgcatttttcttaacacagctctatcatttttgttgccaaattcttccctgaattttcatttaatcatagtaatagctaaagaattaaattgttagaagaggtcctcatgtgtgttttcctatagtcaaattagtatttataatgctggagaaaagaaaccatcataaattatttgtgtggagggatgtaaattaatgcatttgctgtgccaatcaatatgaatattgaaagtagaatagccatatgatgatgtgcctctctgagtacatatagccgaaggacttaggtcgacatatagcagagaatttgggcatcgtaaagacgtcttcacaaaagtcaatgtatagtcagcatagatgtttgtaagtagataaatggacaaagaaaatgcagaatatatacatagtagagttttactcaagctgcaaagaagaattaaattatgttatttgcaagaaagtggatagaagagtgttattttactttctcatgttaagtgaaataagccacatttcaaaaagacaaatctcgtattttctctcataataccaaatctagataaaataagcacacatgcacacatacacaccaaacatataagacatgaaacaagaggagggactatttagaagaggaaggggattgaggccaagggtagacagtgtaggaggtgtaacttttggttccttctaaataatattcttattaggcaggctagaagaatagaaaaaattatttccaaggcagagagaatatatacaatttggatgaacagactaaaaatacctgttaatactttgatccagagatagttgtgactatttcaatatctttttctcttcttatattaaacataacatttgaaataaagctatgtatacttagcaatatgccaagtcagatatactgt

SEQ ID NO: 28418 - DNA, 1171 bp, Mus musculus
aggggatccaaaggcaccagccagcaatgtgctgtgcagacatagatgcaggcaaaacacacacaaaataaaatgagtaaattaaaaaaaaaaccctcataaaccagaagaataaaatcccttatttctaaggatgatagtgattgtgtgaatgtgtgtgataactactttgtttttgttttttttaatagttaatatgagaaaattgaaccaatctcagtttttgtcgctctgatgagttttcccgtattttaacctgagagactgactttggatccatatgaacatatgccgaccttcagtgatttgtttgtttttaagagagactgaacccagtcctacaaatactggaaataatctaatagtgagctatttcaccatcccttctgagaacaattttaagaagcaaaatacatgcttttattctgtcctcagtatcccacattgaaaaactacataataaagggttattactttaaggaaaatttaaagagggatgataaaaataggaatagaagattaagcttttgttttcttgtatacttaccctgatggtggtggtggtcctctatgagtgtttgcgtgtgcacacgcgcacgtgtgtacgcatgcacttgtgtctgtgtgtctgtctgtgatatacttattataagcgtctctgtaggggcctctttggctaagtgtagtagttgagctaagaaagagtaccagtttacagaccagttctttatttgagtaaaagctttgtgtttttagtttcttagagtttcttagttcttaactacaactaaaattaatgagctaatatgaatactagtatagagagattgtaattagctattagtaatactagtgtgtagtagaggaaacatgatttttaaaatacaatatatatggatatgtagaaaagtcccttctataatgaagaaagatatatttaaatgaaaactgtccattctttgtaggtttttactatagatgcaccagaaaataagcctgttgcttttgcataaaaaaagaaagaagaaagaaagaaagaaaagaaaaaagaaataattgaaatagcaaattctttcatagttggctctttgaatattagcattttatctcattatacttgcagcagctttttctatataagcaagaatacaattcacttagtaatttagaa

SEQ ID NO: 28419 - DNA, 2248 bp, Mus musculus
ttattcttgagagttcgcactaaactcttaggtagttaaggcagcacttagaacactaactgggactttccctaaactgtcctcataaaagaccaggtaatgagtcaggtctctgtacagctcttactgttggaaagtcgctgtcacagacaggagaggcaaagggccgtggttagagcttagcaaaacctttatttacagaacagaaggcatactagatatgaaccatgagccgcaagccctcgctcaccctgtgagggattgtcatggagaagccctgtctgtgtccggaccacgttccccaaagagttcctctacctcccatgtctcccagatcgtgaccccaaggactgctttctgactcagtccctccccagcttccttctgtcttaccttgctgtcaggtgactcgttttcctagctcacctgtacagattcgggacatttcttttatcgctttttggagcgaatggattccaagtgtcctttctggagactaagaaaagggtgggcttgcttctctaagagtcctgggagcctgagtccttagaacatataactgtgtaatcaaatgaatagaaccactgagacaatgtgtattttttacatgtggcaaatgcttttctttttttggcctttgtgctttttcagtaatttgaccttagaaaaaaatggtttttatatgatagtaaagcaaaataaccactttgaattttaacgataatgtcaatgtgtgtgtgtgtctatgtttatttcctacagaagaagaggtagctttgtgtgttcagcttgtaccaaccgtcttcttattgctgagaaatggccactattgataaacctttctgttttaaaatgtagtggggaggttatgttttgatctcctctggctttaatttctagtgtcacttgaatatatctggtagcaaaccttgaagcaccgcataggagctgcttctgtgtcccctgatagtcacacagtccctaacatccgctgcttctggcctcctgagcattggatttaaatatccaaaaccctcaaaactccaagttgccagctttttaaacacttgcttttcccttctgtgctgaaaatccagatagcacctataatttggactctattgatcttcctcattatgtgtcctgttggaaacccctaaaattgtctgctccatcagggaacttaccagagtattttgatgttgtatttgcatagatggatatgaaatagtttatagatgacaattctcttttttgaataaaatgaaatttttgaaaaatctaaaagtactagagaacttatctaaagcccagttccctaatgcatagctagtgttttaatttatgttaaaattctgctcagagaccatctgtgtaagtcatcttgccagctttgccagccatcattttcaaacatagctatggtcccaggagcctttattatgggagtatctggaacctaagacttctatgaaacttgtgttttaggaactcaaatgcttctgcttcgtgacatactagtgccattgctgtcaagtcttcgcatcgttgtaccttggacagagttgctttgtgcagggggtgtgggctgggggagtacagacagactgctctgcgggcagtcttctgagaggaaagacattcaaggggctgggtggccatctggtcacattcatcctatactttaatgccatgtggcttgatgacctttgcagtgctatttctggaatggaccctgattgttatgacctgttaaaggtgaactctcgagccatgtagacatgctgttacagcctgtccagagtgaggtcatgggagcagctctaagtcagggtccaatgtagcttagagacacatacatggtgaatggcggctttagctaatcatgcccaccccttccctgccctctgtcccctttcccctctcctcccctctccctgccctctctacccaccgctgtcatttatgctacactgaccaacttaaaacgactttgtcacatcccttagagagacagtcaccccctttcctcagcattcttacaacgctgtgccgcttaagtgttcctgtctgatacctggaagaaaagctatacaatcaacactgcaggaagagggaatgtggctccacggctgcgtgtcctcgtggaacgttttcttctgctgctttgatgctaaggtgacttggtgtttggtgtcacctgagagctcagatactgtcaccagaaagccctgggtcatcacccatc

SEQ ID NO: 28420 - DNA, 1179 bp, Mus musculus
gaaagattcccaggtcgtaccaaaaaggtttgaaacatttgctactgctttatactgtaaagtctgtttcactgctaaagttgcatttaactacatctatcacctttcctagaaaactaactgctattgaaaaccatggtgctggataatgacaaagagccagaatgcttatttctctgctgtgccgtgctgaaccaagtcctaaacatttccatggtgcactgcctcatcagtgagtaccagtgagatgatgcccaccttttaaggatgttcattcaggcttttgagaaaaagtttagggtagtcttactagtagccaagtgaaactaaaaatcaaactactgtttgcaaagccatgtttaggatgtagcaatagcggcatttctcctggttacttttctgttactgtgataaaataccacaagcaaaagcaacttaaagaggaaaaggtttgcttggcttgtgattccccaggatagagtgcatcacagccaggaaggcggcaggaagcttccacacagcatccacgcacaggaagaaggaagagctggagtgagaattttggcttctttaaaaacacagaaatataaaaatattttgttttaatttcaggtgtgggatttggggctgcttcagattgtcaactgcagctgactctgatttgccttttgctctgtcaggggcacgattttgccagctgcagatagttttatgtgtatgtgatatttagaattctgggggcttttcagaggatatctaaatacaggagcccccaacagaggttggccggtttgttaagcagttgtgcacaaagaagagatgagaagaagttagataccctgatggcaaagatcaaacttgctgcaaggaacttgacacgccgaatcagcacaaagttgtctaaggttatcttcacacacacacccctccttttttcttttccactttgtgttaggggcttgaaagggtggaagaagaggtgcagagaaaggtggagaaagaagaacccacaaagtagccagaggtccggttacagagacctcaacccaggctgtgaaccctcagtcacacaccttcccaagcaggttcactaagtgggactaagtgttcacatacatgacccctgagggacaaatattcctattaataaacataaaatccttctgaacacacaaaaga

SEQ ID NO: 28421 - DNA, 1653 bp, Mus musculus
tacattgttctgtattgtctgtcactgccgttaagtttactggaactgagagagccatatccaacaatgggccttaagtcagcttaaatcttccctgtaccagcacatgctcttctctctgaagtaacatggcgttttcttcattgttgtcctttatgaaatcacatttgggtctttgctgaaaaagactgttgactgtaatatgtgtaaaaacttaaattattagcacaattaatctagtattttgatcttgggtaagagtgaaaatcctcgttctaagcagacagtgatgttgctatctctggtctttgtagtatgttcgaggctcagaccctgtactaaagcttttggacgacaacgggaacattgctgaagaactaagcatcctcaagtggaacacagacagtgtggaagagttcctgagcgagaagttggaacgcatataaacatgcttagtagtttttatactaatcaaatgaattatcacagcacctagacaataacttagttttgcatgcttacattggtcatcctttttatgtacatcattaatcttctgacaagaagctgaagtagcaccacagtccataatatatcaggatctggcaagcttaaggaacccagctcttagaaatttctcttcttctacacttgttgctctcaccagtgaaacgctttgtaaggaggcatctgggtaattatgcaaataagtttgtgataattgctccagttctacaaacaacagaattttaaatagaggaagtggataaaggagacacctcccttgctgtgtgctctttgaaagtaattgacagaaaactacaaacacgtaggatgccctgcgcctcagcagcacccaccccagagcctcttggcatgcccagctttcttttcagtacaagtatttgtagtttgtaatgaatgtgccacatacaggttttgtagcttattattatggaacagactgaagatctgcagtacgaatttaatacttataaaggtttgcattaatgaggattacacagaaaacctttgttaaggacttgtgtagatctgataattggcaaatttttattttaaaagtattcttacagaagagttccatttaagaatgttcacttataggaccaaaatataaataaaaactttcaaatatgtttgattttaaattagtctgctttgtcctttcgtgtttcttgatatgttcttcattttcatacaagctcttttttaagccaaaatacaaaaatggctgtactgtttggaacttaataccgtctgttataagcagaggttggttgttaattatcagctgtcctttgtcctgtgacatctaaaatcaagtctttataaagtcagtaagagagtgcatataaacctgcatgattacgctcctgagaagagagtaagaaattctggcagaagccgctccttttgatcagtgcggtaatgccgagggcggcgctttgacagctccagtcctggtgaatgtgccctctcctcggtggttattgctattttagaacaagagggagattaagccggttgtggacagagactttgccaccacagacagaagaatagaggtattgaagaatgaaacttcaaaaaagaacgtctggcattgacatagaaaataaattggactggttt

SEQ ID NO: 28422 - DNA, 1141 bp, Mus musculus
gcggtagtcagttgtaagaaccaccgcagggccgacagaagtggccattcaccctcaggcaccaacgattgacaacacttgaacatttccccttgcctctgttagccttaccgccaccctcactggttgaggtcctttcagacccgtctaagaagtgggtccgaaggtagaaggatacagtcagtgtcagtgaggagaggactgcgtagaagagcagggcctgggtgacaggagtctgggaatgtggacctacctctacagcagtgttctcacctgtgtcgtatgaccctttcacagggctcggctaaggtcatcggaaaacacagatatgtatttacattatgatttgtaacaggagcgaaatgacagttatgaagtaacagggaaaagaatgttacggttggggtcaccataacatgaggaactgtattagagggccacagcgttacacaggctgagaatcacagctctaaagaaagtgagctctaaccaccatacttccatacagtgcctttgaactggggtttagcttcaagacaccctgagaaaccagtgaagcagtattagactaatgtatgcacacctctgtacctcagtccctaagctgtaatctaactcctacgacagtagactttttaagaattgttaatgcttttttattaatacaagtcataatatgctgacaaaaagaaaaattttagaggttaaaaataaaacatggcctacagttccactatcagagaagtgctatgactgaggtggcctccaggctctctgcacacttacagatttttttaacgggatcaaattgtacatgctgttttgtaactttttcactcaacagtcccatgcctatcttgctgtgtcatgtgtgtctacatcttttttaatggatgcatgatatttcctcatatgtgccacattttgttaaactactgttgaatttttaggtttccagtttttcactaataaactgctttgaagagcactgtgctgctagctctttgtgttcctaactctttcctcaagtgctacatggcttacatgtgcctgggtccacagatgagcagtcctcccctccacctgctagtggggacgctgcaccatccatgtcagtccttccctgatgacctcaagtttc

SEQ ID NO: 28423 - DNA, 1176 bp, Mus musculus
ccattcaaaagacatttattgagggccaggtactttgttgatcaactaagtacacctctaacaggattgatattgtgatggaagaaataaaagtgttgtgtttaggaattacctggtttgggtctgagaagtcagaagtagaatcccacgtagaaggaaagacttgttttgggcctagaaccaacagaacataaaattgtccagagtaccttagtagcggagtacaaaggtgtagttcacttactcacagagtcttgtaaacttttgagccctaaagtactatttaaatagcactttaaagcatccatttgtgttaagagcttggtaaacatggaaaacttggttcttggtctcagcattaaaaacccctttctctgcagtcagataaattcctctgcagttttctagttctgtaagactctgacttacacttgagttacatacttgagggactccagagacaactgagatgctagtgttctagggaatcaagtgaatgaggtttgttgttctttttcttcctcagaaaggaagttttatagcctaaagcgccatctgttatatttgtccaaaattaggttttgagggactatagaaatttgggtgactttaaacagcagcttcagttcagcaaattcagtttatgggaaatagatcagtgcaggagaaaatataaatatggactgaattggttctggtttgtatcctcacatattgggctccctggagttcaactcagatttagagctgccattttttatcagtataatgggaataagcattgttacctagcaggagactattccacaagtattactttgtgttttgtgcttttaggcaaagacctggcatatagtacatatgctgtaagcccagatgtccttttcagtccctgacacatgggcagtgaggaacatgtctgacctctgtgctgtgcttgcccccttcagcccattctccacctcccggaaacccgagcagagcctcctcaccccgcccacactcctcaccccgcccacactcctcaccccgcccacacccctcaccctgccccacacgctcctctgtgtaagctctgtagcaggacccggtgcttccagcaggagtgctggttactgaagatgcgcttagacacaagaggacccacccaggctgtagtgctaagaggagcaaagg

SEQ ID NO: 28424 - DNA, 1143 bp, Mus musculus
cagagctgtagtaaatttagacaagagggaaagagtcagcttcctcagatcaagatggcggccaccagagtgagggcatagagagatggcgaagcctggggtggtgaagctggcttggtgtggcagaagagtgcaagtgcccgtgttgatggactgtgagaagaagcaggtaactgataaggaatggagttgtgaaagttcctctgagtttctggcctcggcatgatccttgagggctgcatggtctgctgctgcccagcaccctcttcctcacacggcagaagcagcttgttttccttgagagccaagcttcctccttccttcccactctcatctccaaaagcttcttcccctactcctgccctgctgaaattctgttcctctcaggtactttcctgttctttcatgactgacagttgttgatttgtgtggccatttgttcccacacttctctcttcactgctctggcggtatctgacagagcctggcctacagcatgaagcgcatacagggctactggctggacgagtcggtggatgtggagatgcccaagaaagtgggaaaactccagtgtgagagaatgattaactgtatgcccacaccaccccccgggcactcccagagatggtcagttctgccagggcttctcctctgactgccctccaagaatggtcagagtcaggggtggacacaggagtttatttgccaccaggagacaaaatcaaattgggaagtagaaatttgaatgggaaagtagcaacagaatccccaatgtaacagggttccaactgacagaagctacgagttactgccttgtgctcttgggagacatgctaagccctcacagggcctcaggaacagtcccttgcagaacaactgcagagggctggtcaccgtggagcatagcaagagagcagctattctgactcttgacaaatcctgaagactgattcgagtctccctgtttgctgctaaacagcaaattgcactcaggcctctctgctctcaggagcagtcttccttctggagcatcccagagccaggctgagagtcacactttagtcaggagcctgatgtgtggaaaagtgattcttggccctgtcttgcctagttttatgtcaggctgacccaagctgaagttat

SEQ ID NO: 28425 - DNA, 1113 bp, Mus musculus
attggagtggtgacatacagggcgcagtagatgcacaagtctcactgcctgggagcacagaagaaaaccaagaagagcagtgtgcatcatgaccacatccctgacaaggggcaggtgagggatctatggcacagctcatctcatcaggtagatcagatagagaaagacaggggcctagaagtggggccagactgtaatgctcaaggctggtaaccccagcatcccgttcttccagctgtacccacctcttaaggtgccatagcctccccaggctggaccaccggctagagagcatcttatttatttcatattctgacctcatcaaggtccaagactcatttaaaaggaaggggaacaggtttgtactctgctggtatgatagcagctccaaaggcctagggactttaagacagtggaggtagtttgtgtgtctagagggcagggtagtgagtcctggtgggctgcggacaagcctgccgtgctacaccagggatgagtcatggtgggctgcggacaagcctgccatgctacaccggggagtttattgaggtaaaccccttggacaggcgatctgtagtctgcccctcctgatttcctgctgattcctagggtgtctccctctttggcgtcccctcactatctgtgcacatgtacacacagctcatctgctctccatcctgtctctcgtgcctgagttcctgtagtactcattttctccacagttaacatgaaacagatgtcggcatttaataccactttttggtatgcatatatctgctcatcttcctgtctgtcatggtgtccccataggggcgtgtgagtattttgaaaggtatatttggtgtgtgtggaacctttgatactttttagaaaaacttgtattcctgaaccttccgtagtaaggaagtatgtatgtgcactcttggaggccaaaggaaagccctttggaactggagttttaggtagttgtgagctgtctgatgtgggtgctgggaactaaggctgggtcctctgggagagcagcaagtaccactgcgccttctttccaggcccagagactacgaagtcgtaagagaagcaagaaggcttcactggtgatcacatggggagaca

SEQ ID NO: 28426 - DNA, 1367 bp, Mus musculus
ctagggcccagcctgataggcaagctccaggttgagtgcaagaccttgtctcaagaattaaatggagaacaataggaaaacagtcccaacatccaccgctggctcccaccatgaggacacagaggtgtgtatacacttataaaacgtgcacacacgcatgcgcacgcatacacacatgaacaggctttggtgcgcacacaaatagaaagttatttaagaaagtaaatggtgaccatgcttgaactttgaagtttgctttcattctctctcattgtttccctcctatttctgaaaggcatcttctttctcctaaattacgaagagtttgaagctcagtaactctcagacaaaggtaacttgggcaacacgtggagagagtctccattgccgtagtgtgggggggaaagggcacccgaggatatgactgccgtgtagtgggcagaggttagatgagcaaactctatgatcgttaaatagtgaagtaaaattttaaatacatatttttaaagagtctagagaagaaggatggctcagccattaaaaacgcttctctcgctctttccgagctgctagcgctcctgcgaacatggtgaacgtgcctaaaacccgccggacattctgcaagaaatgtgggaagcaccaaccccacaaggtgacacagtacaagaagggcaaggattctttgtatgcccagggaaagcggcgttacgacaggaaacagagtggctatggtgggcagactaagcctattttccgcaaaaaggctaaaactacaaagaagattgtgctgagactggagtgcgttgagcccaactgcagatctaagaggatgctggctattaagagatgcaagcattttgaattgggaggcgacaagaagagaaagggccaagtgatccagttctaagcagattttgttatgaagacaataaaatcttgacctttcaaaaaaaaaaaaaaaaaaaacgcttctctcacagaggacctgaattcagttctcatgtcaggcagtgtataaccacctgtaactccagtccagaggacctgacaccttctggcctctgcgggtaccttcttgcatgtgcacatacacacatacacatgaaaaaaataaatactttcttaaaaacagctttggggactgggctgtcacccccatacctgtcaccccagcactgagaaagctatatagttttataatttaagaatcacgatttaaaagaactgtttgaaattatataattacactttaccacatttcactcaaatcactataaaaatacataaagactacaaattgttaagtagacataacagcggaaaggtgatgtaaagaagacaggagccaagttaaagaaggcatccct

SEQ ID NO: 28427 - DNA, 3193 bp, Mus musculus
ataggccaggatgtaacgccctctctcctcttccttcttgactcccactgtctcacaggtctatgagaaactcaaggaccatctactgatccctgtgagcaactcggagatggaaaaggtggacggcttgctcacctgctgctccgtttttattaacaagaagatagactcctgagccagagagtcccttccctgtggccagcaagtggccgaggccaggctgatggctctgtacctattcctcctttttcctttgacaatctactgggccactgtgctactaactcttgtttacaaaaaaagaaaagaaaaactaattccaattttaatcacctcattccccacaccctccttttcctcacggtggtacctaacctgtgcattcgctaaaagaattaagcaacctaggaaatacagaactaacgaatcattggaatgcaattgatagcgtggaagcccctcacttcagtgtttgtgtccttaatgtgggaatgatttagctgcagggcattctgaagactgtcttcccggccagccagataagcaagggactttctctgtatcatgaatcaagcttggctcctgtgaaattccctagaacgtggattttttttcccattcccctctcttctcgcccctaaaaacctttcttctgggtctttctgtggtcttctccgcttctttcgtaatcgccttgaccttggatttacccaagctcttgcgttctggatgtcatcccgaaggtccaacctgtgtgcactcctctctctctgccttacagccacctctccaccaccagcagcaagtcagagtggctggtcggggaacaggaacctcacagaggcacaccctgacaggctttcccattgccacacctaggaaggtaaatccagcctcaggtggttgatgcaggatgttagatacagatgcctagaaacaccccatgggtacatcttagagagactgagtcacatgccatgagtttgcctcatgactagtcctgtagtatggagggaagtctttctccactccaccacctccgcctttctgagcttccttctgactcgccttgtatctacccccttagaatcatcatgatcttgagaaagtcatttccttcaaaagaggcagagcatgtacaatgattgctgatggtccggggagagccagagggggctgcctccacccaggcctgggagcgcagtcaggaaatggttcctaaggtcagcctcaaacaatgtctgagtctcctgtgaaatatccatgattgtttactgtggaattcaagtgaaacttcaaattacacaatgctcagctggcacaggtcgctcacagagagccatgcatgccacagcaaagaaggagagcattccttttttttttttttttcttaaaagctgaaacagagcagggacatggtgctttacaatgcacagtgacccagccaggcatgtcatcaaagttctggtcacttctacctttgctgtacagtctgcagtttgtcattcagtatttaaagttcaggagacaaagactaagtcagatctatctctcctttgtgatcagtgtttctcataatgaagacaagagaggctggtctccattgcattccccccagtggatagaagtgagacaatcagggcatccttcatcactcttctcatatttggcaatctctctgaagacatctccatctcttccttgcttctctaactttagactcatagcacatgcaaatatctaactctgtgcaccctgcgaatgaaccatatcctgatcactgtcatatttcacaacatatcatgagtgaataattatgttttttccagggtaaatgaatgtgagccagttgcctaaattaataaagaaaacttgttctcagcaattatggttgcctttgggggttaaatttgaccatatactagtaaaaacaatttctccttgagagaggtgaccatctcaaaatccaccacaggaaaaacagcccactgtatatgtaccagcatgcaactgtcactgacgtcctttctctcatcctgttacgtgcagtcagttacgagtgagtagattttccatggcaacggtttcttctaccagaggtggttttccagttcccgtttcctttgcgctcctctttccttgtttgtcctgagaaattgactagagttgctgcctcttccccatcttactctgctcttcagaccccctgtgtgattcagagatgtgaacacgcaaaatacacgcagcattgccccttcgatgttctcatcacataacgttacctctaaaagggaaaatcattgccccagttcccctctcgtccgttgtgtctcacaaagatgggaagaccaacaaaaatgcttcttgatattacaacaatgtgaggagttacatttaactaagtctatagcttgggtaagaaggatcaggtcagtatgagttggtttagtgaagagatgagctagaaggattgcatagttagcactatgtctttaactggtgggttgctgtaccaattggttgcagatctccacagcgtgttcattgcactaaaatgctactaggaaccaaacactaaggccgtcatctctatatctctaagaagggaagttaggccaggctgtagtctcacagtgtggcctgtgtagggttgcatgctactctctaagacattcagacatagtttctgtgcggtgttaggtttgtgcttttttttttctatcttcttgcctgccatcttccagccaatgtgtggttatccagtctgtgtgccaaagtcagccatatctcccacgacctgttagtccagaggagttctgcaccgacgctagttgccagctgcctgctcctaatgtacaccagtcaagacagaataaaatgtgagttgtaccgtgcccagtagtgtctgtctcgtttcttcttttaccatgttgcccagttggcacgttatggcattccattcagctaagcggaatgacttttcttcctttgttcctgatgggaagtagtaagggagacggaggggaggaggggagagggcagaggacaaaggggaggcagggagaggacagaggagtgtgcgtacacgatacacttacaggaaaacgtctgtgaaacccatctctacgtacagtgaataaacagcagcaaaactgctttgaaatgagggttttttttaatttgttttacagta

SEQ ID NO: 28428 - DNA, 1200 bp, Mus musculus
acttttccataatgtcctttcttttttattatttttaggtgtttgcgtattttgaacttttcataagattaattttatcggaatatttctcaatttgagaaaacaacttgtggattgggaataatgtttttagcacatttatgctacaaattttcagtctgattgtttttcccactgatctggcagtatattttagcagtaagctgttgtgtttcaggaaagctggacacgggaaagctgccgacacactcagcagtgtcccactccttagttctgagaagccgtcgggttctgaggagacacctggtggcactgagcctggtgacctcagtgggccaaaatttgttttatactcaccctgccagcgtgagtgtcttactttcacaggccttgtgtcctcagtcttatcttaaaggatgttatcttggcagggcatcacttgtaattaatggatgatacttgtaattgactaaagtcctcgctctgagccgtttgttctggctccgagagcgctgacatgtgaagcatggtgagcagcgagggaactgacaggatgtggccgtggccagtgtggctttagtgtttgcatcaggcagccaccagctccatccgtgttcttactgctttacaaagtttgactaactttacacattttaaaaatgctgattgtcttcgtttaaattataattttacctatttcttgacatctaactcctattcatttctattatttaaaaattaagaaatgaaaatttgctattaacaataaagtttttttaatgtagtgatgtgtctgagtcagaaattcaaaatgtctgattttcaaatgtctaacgctttttaatatactggttttaaaaagaaaatatttcagagttaaatgtggttgtacatgtgtgtgagtctgcacttaggggttgaagccaaagcccatgagtttgcggccagccgtggttatggagtgagtccaggttggccagtgtctgagttagggtcttactgctgtgaacagacaccacgaccaaggcaactcttataaggacaacatttaattggggctggcttacaggttcagaggttcagcccattatcatcaaggcaggaacatggcagcatccaggcaggcatggggctggaggagctgagagttccacatcttcctctgaaggctgctagcagaatactgacttccaggcagct

SEQ ID NO: 28429 - DNA, 1148 bp, Mus musculus
ctttccctctctgcagccgcgcaggccccgcccccggagcgcccacctcgggaacgccgcgtgttggcccgcgcgccccgtcgcggctctagttccggggcatgcgcgctgcggcgcccgcgcccccctctaccgacccgccgctgccgagttatgccaagtatgtgaggagctggcgaggaccggccgtggtcatggagagccgccgcctccgcccgcgcgggactcggagcccgccccgcgccccgggcgagccgggctgctgagggcggcgctcatggcggagcccctgcggaggacgctcggccggctccgagagcggcacgctcccggcgcgctcgggctgcacgcggactccgtggcggcctcgctctccgagggacgctcgccgccccacgagctcgcgggccccggtatggagcggcccgcatgggggaccgagcagccgggcgcgcgggtgccatggtctcgcggggcgcaggaggccgccgctctgggccgcgcgcttgctcgcgcctccccaggcgcctggggcagcggcgacgacgacggggaggacgagggcgccgactactacgagaacctgccggcgggctgcgcgcccgagggggcggaggcgctgcgggcctcgccttcccgagcgccgggctcctccccggggatggagggcggccgcctggagacgggcaggctgcagacccagttgcgagaggcctattatctgctgatccaggccatgcacgacctaccccctgactcgggcacgcggcggggcggacccgcgggagcccgggctcagggccagcagccgcctctcccccgcggcgcagccgtgcgcccagcctgcagcctccgaggcggcgaccgccctccgcagcaggtgtccccgccccggtcgcctccgacggagtcgagagagggacggcctcccagtcctcggatacaactgtccagttgcagaagtctcgagagcctccgcgtgagccggcggccgcctctgctccagcggtgggcgagcgacagctgcatcaggtgcggtgcgcaccgggacagggacgagccccagccacgtggaggtgggatggacggctggagcccgggcagccacagggctgctacgtccgccgctctcctgcctcccatctgcc

SEQ ID NO: 28430 - DNA, 1278 bp, Mus musculus
tagcttgcatttttttccttagagtttcatgacacttaggtatccacttggatttctaaattgaaattaaatttcagtgggaaaaaaattagtttttgtggtttgactttgatctatgaatatgattaatgtcactcttttttgttttgttttgtttttcgagacagggtttctctgtgcagaccaggctggcctcgaactcagaaatccacctgcctctgcctcccaagtgctgggattacaggcgtgcgccaccactgcccggcaattaatgtcacttttatttttaaacatttaaatacccggtctgcagtgacatgcctctcctctgtgttctctcttttgttctttgaagcagacttatttgagaatgtctatggctctccactgaagaaacgagaacctgaagatgtaaggggtcccgccgagcttagaggtcaccagccccttaacaacatcacagtttcaaagaagcgcaattggctgtatcagagcaccctgaggtctcagagtctggacgagagcaagcgaagccaggacagacgctatttctccctctctcctgtgtctccacccaagcattgggtatcccacaggccgcactgcacacatgcggtgtgtaatgctgccagggctacgttgtccagaaacggctcttcagcctttagcgaggacaatgatgcggacgatgaaggagaaatatggtacaatcccatccctgaggatgacagcttgggcatagcacacgtcttgagtcttgaggaggcaaacaccgccgccctgaagcttcctgtgagcatgttgtctgccagagatctgatgaaggcggagcctcctagtgaagacagaggggacgtgcagacctcacagtcaaatggaattaattctgcagattccatgcattctacagaaattatgcagcactgcaaacaaaggttagggcacaggacacaagaaagcccgacggcagaggatagccctgtgttgaaatctgcttctacaggtaaaggtggctgttcacctgagatgtcttccttttcaggtttgacatttcctcaccctgcacacagatgatgagtgctgtatgtgtcttatactctgtccttataaagtgaaggtgtctcaggcctggagagagatggcttagcatgaagagagcttgttgctcctgcaggaaacctgagtttgagtcctaacacccacatcagttggctcacaatcacagccaccacctataactcccagaggatccaacacctatagctgggcatataattt

SEQ ID NO: 28431 - DNA, 1517 bp, Mus musculus
agtcagtcgtctaacttaagatgctcagagttgtttgtttggacttcgctgtcttcccccaaagagctgaaatgctaagctacttaaaaggatgcaaagctttggttgtgtgttagtaacagaagcccctggctctgtgactgcaggaatgcatggcgtttggatggaaacagaagcgctggaatgattgcctcgccaggtaccgagaagagcacttttagggactggttcctgtaaacattaaatattcgtcccaagtgtggttggcattggaagtgtagcctttacttgaatgtatactgtagatttttaacaaagcaggttctatatttattatgtttagtgtgattttgggattacctctttcatatgttttgtgtctgtacataaatatacatgactatgttaagaggctttaaggtttaaaaacttcacaccatgcttgagtatagcatttcatgccaattaaaatgttttcagtggcatggtgtttacagaggttaggaccactgccacatgacagttaagactttatttttaagccatctgggcaataaaaattcaaagccccttcataagctgagttcagataactagaactactaacgttacatttttgagatttttaaagcattgtattttattttatatatgtgaatgttataatttctaagaggaatattgattatggagtaatgggggaaagacaaacgtatctttgaataataatataagagcattgggttgagatatttggatgataaaggatatttaagatagctggatgctcatattttccttaccaaatgggtgccagtacagtcgtgtctgtaccggccagggctttatatcattgccaataattttgtaattaaaaaattttcaactagatccctctactaaagaaataagacaatgtgaagcattgacttttataaccgagacatggcactctgggcactgtgtcgtctcattttcagaacaatcttaggatctttctgtttctgctgcatgtttcctcgtaagaagtatggcactatgatagtaatgacagtaacataaacgtagacgtaggcccaggcttctcctggatgggttttcatccagcagcttttaagtgcctcaccctgcttgtctctacgctgccgacacaagccctcgcttgctgaggcaggtagtccatctgcctttctctttccttgttcctgctgtgactgttgcattaaattcatcatgctaccaaaagtgaagccttgtgttgtccattcactgcgtgactgtgggttccgcagctgccgccatctagctgggtctgtaagacagcccgacctgatgaggcactgccgcggagcaggtggccttaccacagcaaccatgttcagagtttcaggagctcgctcttaagtatgagctgcctggtacacgatcacttttttattctttaaagtttgacattgcagagttactatagtccagaagaggaaacccggctaggatggtgcaattatcttctggtg

SEQ ID NO: 28432 - DNA, 1518 bp, Mus musculus
ggtaagaaataaagaaaattttcatttgtacctgaaaaatacatacatatcttagatatccaggaatataaaaggaagaaacaagtcaatttactctattaaatattcctccatgtttcagaattataattagaaaacttgttttcaaaatttcatgctcaattttctctcctattattgaaatatactgttaaaaatcaatacagattttaaaaatgtgcaactggtagacaagtgaagataatggggaagggagtgcacatgaccacagtatgatacacacatgtatagaatattataataaagcccactatttttatattaatatatgctaataaaaggccaacaagaactatgtgtaacttgaaatggaaatcactggctttggacacagtctttaaaacttagcctttgagaagcagtttatgttgaatgagtaggcatggcttttctggttcctgatttcttacagtacatatgaatatttcaggacatacacacattagtgtcacttagacatttagacagcgtatgacataaagataggcatgcaaatggaatgcgagaggataactgagggatgcctggaccctggactagagctacctgaggagatccaggtgagagcttgctgccagggtcagctgctgctgagtctgaccctagtcactgttcaccctgcagtcgcccagggtccctcacgggctaacactcactgcttgcctacttttcacatttttcttccgcatttgcattttgcttttaagctatctaagaacattattctttcaacttgttcctttttctaaaagactatttttgggaaaataaatgtctagcataaagcagttcttgtttcctttctcaaagcaatcaacacagttactgggctggagcgctggctcgcaggtcagagcactggctctcctccagaggacttgggttcagttcccagaactacatggttggtcacaaccccagttccagaggatctgattcactcttcctgcacacacatggtacatggacatacgtccatgcatataaagttaagtaaaaataaaacaaatcattacattatatttacattatttcctgaaagaacatagattaaatgtttgtatcctttgaactccattacataaggcctatcttctttacatatgatccccttccaaattggaataagtgactaatcaactgtctgttatgacaatattatattttctatttacataactatttatgacagtaaaactatttacttctatggtgaataactttgtatttataaaaatcactttacatttctaaaattaatacaaattaaattatgagacacacatttgttgtgcatgtagttgcaattgtttttaatcaaaatgtgattaacaaaattgtatttactaaaatatatgttttactaatcatttattttgccatcatactggtaattattttgtaataagtaattataaaatatagtactaaaaaataagtaatagacaaaatctttaa

SEQ ID NO: 28433 - DNA, 1192 bp, Mus musculus
atatgtcattgtaaactactttgactttcccagaattttgcataagagtagacactatacacatataatatgcatataaaacacctacttttatggggctggtatctcaacatagtctgtaattttatgcatactactgtattactggttcattgctttttgtttggttgtttttgtgttttgctttgttttgttttgttggttgttttgaatcaaggtcttactatgtagcctttgtttgcctgggacttgttatgaaaaccaggctggtttcgaacccacagagatctgcccacctctgccagccctggctcccaagtgctaggattaaaggcatgcattaccgtatgcagcttggttcattgtagtacagagtgatattttgttagatgggcatagacctacttatccagctacatgatgccagggagtagaggtgtttccatttttgtagtattatccaaataaagtttctttgattgttcatgtccatgtctctatgtgaatgtgtgctttgtttcatttgtgaaagtacttaggaaggaattagagtgcttggctacaccataggtgtatgttaaactttttaaaaaccttttcccaacctcattactgtcaacagggcatcccatctcctcatgaaatctttgtcctattcgcaatagttggcgagggtttagttctcatttccctaacgccctctgatcttaactgccttcgatgatgctgatttgatgtccatagagcttccggcgtgcactgtccttcaaatttttcattggcttttattcatatttgttgtgtagaatttttatgtgctatggatataatattttattgggttagggttttttttcttcatatttgtgccatagaatttctgagtattctcagtacaagttctttgccatggcttgaaactttctcatagttcatggtttctcttgtccttctctctttaatgtctttggcttttaattttgctgtcgttgcattaattaatttatttttttatggagaatgctttgggtgccaaatttaaggattcatagaccaaagtcttgataactttcttctaaaagcttggtaactttaggtttcgggatgtaggacgatgatgtttaagtatgttgggcttttgtaaagatttattttactttcatgtatatgtttgagtctctgtgcgggtctg

SEQ ID NO: 28434 - DNA, 1207 bp, Mus musculus
gggaaagcattgttcttggtgtttggaagtgtctgaggagttcattctctcacttgcctcctgatgtcgattacaggttgaggctccattcataccaaagttcagaggctctggcgataccagcaacttcgatgactatgaagaagaagaaatccgtgtgtctataacagaaaaatgtggaaaggaattttgtgaattttagggaggagaaagatagcctggagctcacactcagcccttgcacgctgtggaggtggaaggtggagccgagacctgcttgttggagcgggttccaatcccttcattccagcaactgcgtgaggtctttcctgcgtcatcagtgtgcgctcgctctgcaaccacctgtgtccccaggcacggctccgcagcatcgtctgccataacacggtgtgcaccacgtcctcctggtttggtttttctccaccctcctatatccttctcattcacttctctgaccagtgctccctttattttcctggtgtttcagatgggcagtgttatggctgtgtgatatttaaaaggaaagctacatgttgctttttgtagttttgagcaatatttttgctgaccagtggcttgaagataaactctctaatgattatttttattttgagtagcttgaattcagttttgccaaaactcttagtaattttgaagatggaatgtcttgtcagcatgggaatttgcataagtaaagataacttttcaggggtcactgatgcagcagtgagtcagagcgcctagagagcagtgaggactcctggacgagaggctacgttcccctgggccttctagtgctcttcactccgtgagatagtaagtgaccagacagataagtgaggggcatggctcctcgccgcagctgtctcccttggtaccgacctctctgtgggctggagagaggcctaaggtttctgagccttggctcttccatgggggcttcagccagtatttgaggaaagtgtgactgagaaatgacactttgggaggtttctccgtcctcatcggtgggctcttaagggaaaagagcaaacgtgcatttggataaatgctaagtcagcagaagccttgatacctgcttgcagcttagaggttctctcctttaagggaacttgtctgtttgctttggttcgtaccaggtaagaaaacaagcaaagcagtagcttattgcgtcctcttctgaggg

SEQ ID NO: 28435 - DNA, 1199 bp, Mus musculus
ccaggacagtcagggatacacagagaaaccctgtctcgaaaaaccaaaagaaaaaggagtatgatcaagtaaaatatccaatatcaactttgggcctccacccacacatacctactcttaacacatgtgagcatgcgtacatacatgcatgacactttaaaaattaaggatagttgatttctattagaaattaaagaagtgctcttcctgttctccaccatggcgcaagatcaaggggaaaaggagaaccccatgcgggaactgcgcatccgcaagctctgcctcaatatctgcgtcggggagaacggagacagactgacccgggcagccaaggtgttggagcagctcacaggccagaccccggtgttctccaaagctagatacactgtcaggtcctttggcatccggagaaatgagaagattgctgttcactgcacagtccgcggagccaaggcagaggaaattctggagaaaggcctgaaggtgcgggagtatgagttgcggaaaaataacttctcggatactggaaactttggttttggaattcaagaacacattgacctgggcatcaaatacgacccaagcattgggatctacggcctggacttctatgtggtgctgggtaggccagggttcagcatcgcagacaagaagcgcagaacaggctgcattggggccaaacacagaatcagcaaggaggaggccatgcgctggttccagcagaagtacgatggaatcatccttcctggaaaataaacttgatccaaaaagctaataaaattttctcagaaaaaaaaaaaaaagaaattaaagaagtgctaggcagatttcctgagtttaatccttagaattcatagaaaatccaggcactgcagcacacctgtctgtaatctcagcaaagacaggaagatgcccagagttcattagccagtcaacctagccaatccagcaagctatgagttcactatgagactcgatctcaaagaaaatgatggaaaaagatgctatatagtctgacctctctgtcctatactcacaaatgtgtacaaacacatacactaccacaaaaccaacactcaataaaataaaatgagattaagttaaagggaaattaaagagagcgaaaagatccagagggataaacatgtgtgaaacaaaacagaacttgggtttcctcggccaaggtgaaacaccatgac

SEQ ID NO: 28436 - DNA, 1187 bp, Mus musculus
atcccaaagagacatagcagaaaaccagggaaacatccttcctattggcaaatgtatgaaagtaccacttactagctttcttctagtgccaaacgcgccatgtctgtgcaatctagaaggacaggtattgactcctgaggaaggctaagctcataaaagacggggatggacttccgaattggttatgtacagacaagcattgatgatgacaagtcttttggatcaatattttgctgaaataatagtcaccaactattcagatagagcacacctttgctgtatcacttttaataggaatttgcataatagtagcaggctgcaaagaacctctagatgagatcttaaagctaccaccagcctgtcttcaggacggacagagcttacctcggtgactaatatttcagcaccttgcattgaacctgagtcgagttcatcctatcttctccttggaagtttagtctctcacagttgtcttcattgctcatttaatgagacagagccggagaagccagcgcgctcacatcaatcccctgtcttgtgcttattcaatccaggtacgaaaagagtatggcaagtgcttcagacactggtactgctgtggcggcctcccgaccgagagcccgcacagctctgtgaaggcatccaccacccgcaccagtgctcggtactcctctggcacacaggtaaccgagagcttgacagcgtctttaattaaccttatttatagaaagcccgcagagaggtgttctgtttagacacactaattgtttcctccttgtcctcatgtagatagttaggactgccctcttttaggatcttgatttcagtgtcttcttaaatatgtagtctgggtgttgaggtacgagcatcctttttgaggaacccacttcattgtgctccaaggtcatctagggacagtgtttagtagacatcacaagtcattgaataattctccactttaaagaaggccataaaataccatgtaagaaaggaagctgaaagctaggtgtggtgatacaggcccataatcccagccctagcgagatggaggcagaaaattcatgagcgtccatggctacagagtgagttgaggccagatcggcctccataaaccctgtcacaataagtaaataaacagacccaccaaggtgattagattaaagatcacacagcctgtggaagaggaa

SEQ ID NO: 28437 - DNA, 1765 bp, Mus musculus
cacatttgtgaattatccttaatgtgatgagttaaagaaaaccctattaagatatttttattatcacagtaaattctattgactaaaaatagactaaataatttacttgtaaaaagaaagaaagaaagaaagaaagaaagaaagaaagaaagaaagaaagaaagaaagacacagctctgacttcattgttttttttctccttttcaaaattaaaaactaaaattttgagaatgttagaaatgatagctatagctttccgcgctacccggggacgggtccatacggcgttgttcttgattcccatcgtaacttaaagggaaacttacacaatgtccggagcccttgacgtcctgaagatgaaggaggaggatgtcctcaaattccttgctgcgggaacccacttaggtggcaccaaccttgactttcagatggagcagtacatctacaaaaggaaaagtgacggtatctacatcataaacctgaagaggacctgggagaagctgttgctcgcagctcgagctattgttgccatcgagaaccctgctgatgtcagcgtcatctcctccaggaacactggccagcgagctgtgctgaagtttgctgctgccacaggagccactccgatcgctggccgcttcacacctgggaccttcactaaccagatccaagcagcgttcagggagccacggcttctagtggtgaccgatcccagggctgaccatcagccactcacagaggcctcttatgtcaacctgcccaccattgctctgtgtaacacagattctcccctgcgctatgtggacattgccatcccatgcaacaacaagggagctcactcagtgggtctgatgtggtggatgctggccagggaagtactccgcatgcgaggtactatctcccgtgagcacccctgggaggtcatgcctgatctttacttctacagagacccagaggagattgagaaggaggagcaggctgctgctgagaaggctgtgaccaaggaggaattccagggtgaatggactgcaccagctcctgagttcactgctgctcagcctgaggtggccgactggtctgagggtgtgcaggttccctctgtgcccatccagcagttccccacggaagactggagtgcacagccagccactgaggattggtcagcagctcccacagcgcaggccactgaatgggttggagccaccactgagtggtcctgagctgctgtgcaggtgcctgagcaaagggaaaaaagatggaaggaaaataaagttgctaaaagctgaaaaaaaaaaaaaaaaagaaatgatagctataatatcataatttccacctgtattccctcctcctttctcccatgccctacccccattccaagccccaccctgccccacccctgtcccacccctgtcccacccctgtcccaccccagtccctattatctctttatctccatttctactatcacagggccacctgctcccagctggacggcaaccacttattgcctgagcattttcttgcacccagtctttctccatataaacttctgctgcagtagactgctaatctgaggttctgaaatgtggcctgttaatgcccttgctgattacaacttgaccttacctcccatgaccaagtccactgttagttttccaaaacagacccatgtgattattttaggtttttccagtgatggtttataaaccattttgcacaatctgtccctccattgttcgttcccttttaagtcatcacaatctgcctt

SEQ ID NO: 28438 - DNA, 1098 bp, Mus musculus
tttcagtttgctttctttggaaaagtttttatcatacctgaatgaaaaaaatgcccctccaggttatattagaatctgttggcagtgttaaaatgactaacgttaaattgctttaaggtaaacattttagggtagatttgcataaatgttctgccttatttcccccagtgcatgtgaacttttatttctatgggtatatgtgccttggcaattgtgcctatggaagccaaaggaaatttttctgaagttggttctctattatgtgggtcctagaaattaaacccaggtcattttgcatgtatgggtagtctcccaatatattttaaaagtggaagttattacttagttgactatttttgtttgacgtcatctcttaatttcattgtttagaaatacgagagttggggataataagctaatagttttattacagagtttattttgttctctcctttcttaggctggcaatcctggtggaccgggacctggtggtcgaggacgaggtagaggtcaaggaaactggaatatggggcccccgggtggactccaggagtttaatttcattgtgccaactgggaaaactggactgatcattggaaaaggcaatgtattttaaactctttgttttgatatactggatatttgtaaacaaaagatgctatttatatttttttaggaaaggggtcttaacatggcagctaaaataagaatactctttaatgtatgctaaaaatgggattgtgtctcaactgcttctagggaaaggggaccaaaagtctgtcagttacaaaacttgatcctaattcaaatgggttttgttggtgttttttgttttgttttgcatttaacttctttgttacttacaaaacctgttgattgaaatatttttctgttctgacccatatcagggtgtatgtttagtaaggtgtgtataaaatagactttagtgtgttttgcattagttctagatggaagaacaggctaaatagaaaatcctaacattattgtccagtggaatgctacaaaactgtttaatgggcaaagtaataggtgtttggggttttttttggttttttttaaatagtatttctgccagac

SEQ ID NO: 28439 - DNA, 1139 bp, Mus musculus
ccacaacttctattcatttaagaaacaacttgagccgggcggcagtggtgaacgccattagtcccagcacacaggagacagaagcaggcagatctctgagttcgaggacagcctgatctacagagcatgttcaaggatagccagggacacacaggaaaaatcctatctcaaaaaagagagagagagaaaaaaaaagaaaaagaaataacttgaattgtgatggcatctgaatatgaaagatgagtgtcgattagcaaaagagtgcattcccagggcagacaagaagcatcagttatgacttcctttgtaagggttttaaaagtgaatcttctccttctaacaagcatttagacgtggcatgatcaaatagagttggaacaggttatattgaaggttttatatggctaattcaatttcataggattgctcaaatgagtgatgtttgatattagcactgtaaggtctggtcagtgaatatgacttccagcattacctggaagactgactcggcaatatgttgcttaaatttgacttggaagtatacagtattttattgtctgcattttcaagaaactgctgctgtgaggttgagatttatatagatgtcaagaatttaatcttcaatcttaaatggataatatgcgaattcatcctatgtaaaagaatagtgagctcttagtacctgctagttgcaagtcacaaaaaaaaagtttgggttttggtttggtttttgagttacaaaggtgagcttagtgcagaggatgctggttgtggtgacttgggaatagggcagcagctaaaacttgagtattgggggatgctaaaagaattaatagaaaggataagccacagtgctggggataagcattagaacctgagttctatccctcccacctgttgtaaagaaaaataaataaagcgctttaataaagttcgtaaaaaggatccgtaaagtttcctggcctgctcttgtaaccaaatctaggagctctgggttcagagagaaatcctatctcaaaaaaaattaggaaggaaggctggagagagggctcagtggataagaaaagcaataactgctcttccagaggtctgagttcaattcccagcaaccacatggtagttcacaaccatctgcaatg

SEQ ID NO: 28440 - DNA, 1167 bp, Mus musculus
acatttccttttatacatgagcactatttcagacctgtaccgctgctacaacagttaaccttcctgttcttcacttatttccgagactgtttcagcataactaattttgaacagtttgcagacagtgatttgaggagtttataagaaacattgtttttttcatgtaaagcaactctttccatgtatatatatatattataatagtgtgtttctctctaaattcaggatagaaaagtaatagaatgtgaaagtatagctacattgcatctgccattgaaacatttggggtatgaaaatgttcaagctttttttttctttttgcagtatagataagctttgtcttgtaattgcacaagtccagtcattgaatcaaattaatttttttatgtactgaatcattttattaatctttaacattcatgctgaagttctgatattttgttgaaaaccattgttttactctgcatatttgttggctctttgcatattaatatattagactacatgcaaatacagtctgtcttgccattgtctgttgaagtgcaggtttgatccagccagtatagaactagctctgtaggggtgaggaggactgtgctgtgtatcatccttgattgtgttccttcaaggagcattgcactgtaagtacatcagagtgacaaattgatgaactgcaacagtgtctttttgtcgatgttccacataatgcaattgctatattttgtgtgactattatgttggaatacagtgctgtcatgggaaaccataactgcttcttaacatagaataatacatagttctgtattttttttaagtgagcttaatgggtaagtatttttgatatgctttagctaatagctaaagaaaattgatcagtaacaaagttgaatagtattatcagtgctcctaaaatgctgtttttcagtgtaaaatatgcctatcttttatagtgatatgaaaaacttgaaatgtttaagacagaagtgcttttcagtttgcaaagtttaaggacttaacgccttttcattaaatgttagttctatcatctgtggggagcaccatttgtatgaggacaaaaatgttgaggttatagggcagaaaatagtacagctcattgtggatgttttgaaatgttttttgattgttttatgtaacttagtgacttcc

SEQ ID NO: 28441 - DNA, 2061 bp, Mus musculus
tagtatgaagtttaatagtaatagttaaggccttacctgttaagatcttaagtgtagggtattgacatgaacagtttcagtattttgcatgatattgttgcatagatgacctaggaaagtgttgtggtgcatttagtaattaaactgaaggaaatagttggattcagtatcataattcacaaattggaggctgttgattttgattcgtttaaaatttaaaatctttattaattgcaaacagtgcaattatttatacttcacagtgccttcccagaccttccaccttaggttctgctgcaaaaagcaacaggtaagcacaacctaaggccatctctatataaatatatcagtacatacatgttgtccctgtgaggtttgtggttgtgtactcactcaagcaatctgctgctgccgctgccccaaatgtactttgttatttatggtaccattctagtggaaagtctgttaagttgttcaagcaactgtttacaattttgggtgatgttttgtttttggtttttttgggttttttttttccccattaaaatgagtagattgctgcaataactgaaaaacatccaaatctttttgtgcacccctcctctcccagagttatagaaatgtttaagaacacttcagtagttgagacataggaaatcatttggtcagaaatttcaacagccttcacagcccgtttgtatgagtaacaggaaattctctttgccctccaaatctgatctttttatagttttatttttattatttttcccctgtattagtactgctttaaagtacagtaattcagtgagatcgttttggttcagtttcatagacagttctattttcatgacttgtatttgctgacaaggaagaataaagaatactggcagtaagttttgggaaaggcatgtgcatcagtgaaatgttacttgtataacaaataacctttcataatctgcataaccagtagtttctgatttataatattttaataactgactgcatttatttttgccagtttaaaatgttttgtgttcttaggattgatgtttagtgcatattttgagttaaatgactatcttaaagcagcaccatatcagttgtttttattcattttctaaaatgtgctgatcctattaaaaactcctgcttatcttttacaacaaagaaaaatattcaaaaatactgccttcattttcacacacagtgctgaagatgctgcaagcaccaaatcatagctcataaaatcaggtcctgagatagttacccataaagaggaatcctttgagtgtatgccattggtgagccgatgagcatggaccatagaagggctcaatgtagaaggtaaaattggcaaatcataattgagaaatatgactgtgttcccatacataatatggtatagggtgtaatgtacctgctcttgatcactttcattttaaagtgctattcacttaaatgttccatgaattgtttattgcaccacagtttgtgtgtgtgtgtgtgtgtgagagagagagagagagagagagaaataggtcagatcagtatgttgcaagcagatctttagagcctgtcaagttttggttagttgtagtttccatttggaaatgtagatgaatgcttgtagatattggagattgtttctatcttgtaagaacttttcactggtgctgtaagcatttcaaatagcaccagtcttaacctttaaatgggaagtagaaaaggtgagcccaaagtttacagatgattttaatgctatacatgttagtgtagtgatacttagaatgctttgtttgatgtttatttcagaaatgcgtatactagaaaatcattttaatattaaaactggtgacttaatactagttgtaaagtgttttcttaaagaaggatcttggtacttaattgataaagtgggtttagataggagtagcaagtgctctcgatagagaaagtttttgttcacttcaatactttgtcattacaaccagttcttcctgaaaatagttacatgtctagtaaattgatgtagaattaactcgctggagataatctcatttt

SEQ ID NO: 28442 - DNA, 3175 bp, Mus musculus
gagtctacagggctgacagcgtggcctcagggagaggacagtctcaaggatgggcggggattgtcctgcacgtatgcaggaggtttgtcgctgaagccatgcgatggatccagagagactttttaataatccttaggtaataatttaagttgtgaagtgatgcgtattatgttgtgactgtcgcttgaattgaagccagtgctctaggagttcattgtcttcccacaatctgcagtgtcatctcaaaacacgtcttgatgctttgctccttgagaatacactagcccaaggtgactgtatttatgtaataatctacggcttctagcgtcaacgtacttaaccttgcctgaaatgtattcttaaccttaggtactgcttctttaatagaatgtagacaatagacgtgtttacctacagcttgtctgtttgctaatgtatttgagtcaaagaaggcatcctcaccgaggtctggtgtgcgagagcacctgaatgaagcgagcggtttacagcgcacacttggggtgcatcacctgcagtccacaggatattactgttgtcctggaagttatgagaccctgaagtagtttatctcatcttccctcagatgaatattaaacttgaaaatataatttatttaccaaaaaaagaattaaaaatgtatcctctcttagatgtgacttagaggctggattacagtttccgactttagcgtaagataatttcctctctcctttcacaaaacagacttttaatcactcacatagagtttatcacattaaaagtttgtcatgttatgcataaattttaaaaatactcatactttgagcttaggttttaaaggaatttttctcttagatataaaacacaaatattttaaatgctatgggagtgtattttatgtccttatgataaatgagcaaccgggttattataagtaaccttccaagtacactatatattttcaaggtctcattaattttgctttaagaccatgtaccatgttttcaccagtggattggattcactgactctttatcctgaagtgggctgcgttgattttaagagtgaagtgtacaaaaggatgtgaaatgggtttttaaataatgcatttttagattaaagtgcctagagtaaggttaatgatgagaaaataaaaagtgaaaagaagtttacttttttaagattgtaactgtgtagatacatcacagttatgtaaatcgttattagatgtaggatgtagacccgtgccattagtgtgtcaggctcaggccgtacccctgtcctcagtgcatgtggcctggccttctcctctcgccctttgtttcctgaccaccaggcagcagtctgcctgaggacaaagccctgagcccgactttccttatgctttcacagcagatgtttttacctatgagatgtcaccgatgtgagtgacacacgtgtgcgtgccttcctgttaccacatgagcaagacagttgtggattatagtcacttattcattggagatctaagtattttgtcctgtggttttgtaaacagagatattggggggatcctccttgaaatagtttggaagaattgcactgtatagcagtaatcccgcagtggtgtgagatgatcctgtgggtgactcttccaaaaagtatttgatttctttctgtttttagattgcagttaaaaaataaatagattgcccatcttcaagaaagggttggtttgtcaaactcagtgcttaagttttgatgggctaactaactagaatataaacaagatcgtttgtggcctttgataaaagagataagaatgaccaaataaaattttgggagcaataaatgtaggagaaaaatctttggtgggggtttgggaaagcttaactttttaaaggataatgtctttttaaaaagaacatctctggctctgactgttgaaaatacttaagatatacataccagttttatttgccttaaaatcaaacagagaagcaatgctttaacagataaaaacagaaggtcaaactaggctagagcctgttagggaaagaagaaaaggctaacctagtggactcatggtgttaactgaagatagctaccacatgcaagatgtgcacgggcagagagttgatcctgaaaaaatagccagttcctcttttctggaagaaaaactgataaaaattcagtcgattgattttgctttgtcttgctatgttcttgttcaactaaaaatgtagttatttcttcccgaaggttaacaatactacgttcatggaataacaaagcagaattctcttcttttacaagaagccaagtttttaattctataaaagtcagctccaaagagctgtctctgtctcctgaaatagtttgcaccaggagtctgttgattgtgaagctgactattgtaagtacttacaagtgttcctttgctttaaggtgtaggctttcctacttgctttgcagaagttagcctagaaatgaggaaggccagaggaagggtgagaaagtggtagtgaactactccgcggcctgtcgtgaccagactggaagctatgttataacactggtttttattttttatatgaacattattaataattaacataattaattggactgtaattttaaagtatgagaattagcctgaattaaaatctgtgaatttttaaattaaggaatatgtatgtgaaagtaagtgtttatgtgccctgtaataaatgcgaatatgaactgctttgttcttaatgactgtcactttgttcttaatcatgtcacagtctccttgactgacctcagcgtatctgtttcttcactgtaaggacggagctcactaatctgtataaaagtgaatccctgcagtggcagacaacagcaccgtccctcacaggcactgcagtgagcgtgttttctgtcccagccaaataaaccagtgatggtgtcttagtgactagtgacgtgctggctgcattagtaacgctttctatgatgtgtgatcacagacgccttcgtaggcctgccctttcacatgaggcacagagggaggcaaagagagaagaacactgaaatcaagtgtagaataaatgctaccatgggaataaagacagcattgcgattaataaagtttcaggcttcttgctttaattgaaaggtttcagtgaataaggtcatcaggcagggtaagctg

SEQ ID NO: 28443 - DNA, 1156 bp, Mus musculus
ggaggcttcatagaaggaataacctgaaaacacacagtaggcctgccaggaagatcacagacagagcatctcgagcagagagtgccatggaatcaagctacagaagacacatgcatagcataacagtacacatagcagtaaacctagaagggagggcagagaagtcacgcaagaactttgtttctttaagcaaaaatgagccacagaaaagtatttagatgtcaagtgagatgcatgtgttgtaggagattagggaagggtggctggtgcacatgatgtcagtgttctttcctggagctcctttctatagacctgcttgtgtctcttggggttttgtattttgctttgagtcaatgagagttcctctaaggggactctctggcagacagagaacaagaaaaactgtgaaaaagcacctgctatccaggggagagacatttctcaggtttggtaagtagccagatagaacatccagagaccctgagtaagcttggctgtgagcagaagtccctcagcctctcctctcagccagcatcccagacttggtgctgtgagactggtctcctcttctgcagagtcactgtcacaggagagtagcctcgctggggctgtttttggggagtgagctgaactgcaggcttaagtaatgccctcaggtctctaaatagacagggtacgagttacacagcagctgagagatgtgcaaggtgattccgctccagtatgaaccctcgcaattttcatttcagagggtatactaacaccacaagatgcagctgagctggcctcatttctgcagctcaagacaggttcagtgctggccaatacagtacagtgctgagggctccagggacagagggacctgatgtttgcctttgctgagatttatctgtggaggacttactcagccatgtaaggcctttgtggtattagggaaaggcctacagtcagctccctccaggaagaagttgacctgatatttggactagttttctgccctcatttgtcctttaaccagggcctttgtagcatatagaccagttgtacctactaggttgttatcgctataactctttttttttttaagattttatttgttttatgtatatgattacagcgtatctgtcttcagacacaccagaaaagggcatcagat

SEQ ID NO: 28444 - DNA, 1113 bp, Mus musculus
accttccctcataatcaacctaggacccccctcctgtttccctgctaatgtggtaattttaagaaatgggaaatatcctagcttttgaaacactgtgtgcaatgaaggaggaatcattacaattttgcctctcctttagatttaaaatatcatatgaaatggaagaggttgaacaaaacgtgatacacatgaagacaagttaaggacgagagagggatacgtatctcctaatgaaattttatatgcatatcacagaaacctatcccttaatccaggggactctttttctctctctctctctctctctctctctctctctctctctctctctctctctctctctctctctctgttaagactgtccatttcctaactcaggaagtattgctattttttccaccaccttttagatattagctaaaatgctaaatctctctatatgatactctggacatattctctcttctccctccctccctctctccctccctctctccctccttccctcagattccttctcctgacacagctgctcacagacttccaactcaggacacatgcctgctctccttgtatttctctccccattgctgggcattccagcctgcctgccttgttctctcatattcatatgctagcaaaactgacccacccctccttccttccctccttccttccttccttccttccttccttccttccttcctttctctctctcttcctttcttcctttctttctttcttccttcctttctctctctctctctctctctctccctctctctctctctctctctttctttctttctttctttctttcttaagaatttagtggctcacacattaactggttcatttctcctggctcttgaatggtatcaatgtttttaaacttctttctttataagctgcactaattggacaatgtggtgaggcttcctataacttcctcttggagtggaggttggaagagagaaaattcctcctagccttacctatgcaactcttggacccctgactccgagtctagaccaggaaagtaagttcaggttgtgcgcagcagtgatgagcttgcaagtcctggaatgcaaccagagctgtgactagttagtt

SEQ ID NO: 28445 - DNA, 1177 bp, Mus musculus
aatttctttttttttttagatttatttattatatgtaagtacactgtagctgtcttcagacacaccagaagagggcgtcagatctcattacagatggttgtgagccaccatgtggttgctgggatttgaacttcagacctttggaagagcagtcgggtgctcttacccactgagccatctctccagcccccgtaattctttttaagttaacaaagtaatggttttcctcgtggaatcctcatagacacgtgtacttataggatgttctcattcattctgcttgctggcagaacctatagctttctaaggaaatgtatgagtgaatctgaaggtgaactctcccctcctttcgtcagctagctggctaattttggtcaggactgagtataaacacacctcaagttctcctttgctgacttggtaatcacagctccagctccgttacggtgtcctgcatgcataattagctgcaaacgttttatttttagtttaagtatttagtttcatttaaacatcttttattatatttatgtatcggctgctcttgtgggcacccgaggaatcgaatcagttctctcattttactttttttttttttctttccagacagggtctcagtatgtatctctgtctggcctggaactccccgtgtagaccacactgacctcaaactcacggagatctgcctcccaaaaactggaagcaaaggcatacagcaccatactcagcaagacttcaactttgcatctttcatggataaagcacccagaaatccctgtggctgattaattcctgtttcattgatttaagattggacagaggcgacatgtcagacgagacagtcagcagatcacagttctccttgaagacgtacgcagttagagtgtttgctctccctgtgtcttggtattattctctctcccaggtaaacgtcaaagtgagctgaatttgaataatacctctatattgttcggtaatgtttgttcacttgaggctgttgttttgtggtgctacggatttaaacccagagtttgctaagcaggcttactgctacttagctacatttcccagcccctgaggttttcacacagcacaggggactgcagtactttaaatagtttcctttcttaggcaggtatggtgacgtatgttgggttattgggtgttccgtgtctgc

SEQ ID NO: 28446 - DNA, 1200 bp, Mus musculus
tggctccagctccgagacctgctgcctcggccttctgcagccgtgcacacatgtatctttacatagatccacatagccaaaactaccaaaacctaaatgtaaactttataataattgccaatggcacacattctttatgtgtaagtgcaggcgccttaggaacccagggagccttcagacccctatgcgccggggtggcagcagctgagaaagaacaacctgatgtaggtgctggagtagaattcgggtccccgcatgctctcggcactaagccagcgtcctagccctgctgttacggttgttttctgagcagagtttcatgtagctcaggctgccctctaaccttttaccaaccaggactggacttgagctgatctttttgcctgagtgctggggttacaaacacgtgccactatgctggccagtttctgttgttacggtaatatctttcaatattcaatatgtggtgtaaatgttatgtaagttaaaattaaagtgtgttttgatagcataaggatttattcgagtttgttttctttttattattaaggattttaaaattcccagtaatccagcattgaaaacccccatggttgctgtgtctgaagatctggatatagaagtggaagaggaagacgagctgaaggctagaggtgggctcttctgtcagtgctcctctctgcggccctgcccatttgactaggaagctgcataatgagtagttcaaaacagatgagagatgataattaaggacagagcccacagacgtgatcttgtagaccagcgtttgcagtaattgcaaacttgatttgtctggtgtcactttgtcacagctggactctcccttgtcttctgggagcctttagccgttgacctatttttgggttctcacctgccagggaagggttgctagggtgatgtgaagtcggtaccttggcagactgcacgtcttacccagcgctgaggaggctgaggtcagaggttagcttacactgctcttattttacctgcatctataaaaagaaacgaaaagaaaggaagacaagagtaagggggcggcattatttggaaaaggagccaggcggttccagggctcctcttgacctagtcactcagaactttgaacttccacactaggaggcagtgggacaggatttcctggttttttttttttttttttttttttttggttggtttttc

SEQ ID NO: 28447 - DNA, 1204 bp, Mus musculus
ggtgagccctaggaaaagaagactttcttcttcggaaaaggatgacctggaaaggcaggccctagagagttgtgagaggaggcaggcagagccagcaccaccagtctttaagaacattaaacgctgtcttagagctgaagccacaaatagttcagaagaagattcgcctgtaaaaccagacaaggagccaggagaacacaggaggatagtagtggaccatgatgcagactttcaaggggctaaacgagcttgtcgatgtcttatattggatgattgtgagaaaagggaagttaaaaaggtgaatgtcagtgaggaagggccacttaatgctgcagtagtagaagaaatcacaggctatttgactgtcaatggtgttgatgacagtgactcagctgttataaactgtgatgactgtcagcctgacgggaacactaaacaaaataaccctggttcctgtgtgctgcaggaagaatcagtagctggagatggggattcggaaacccagacctcagtgttctgtggtagtaggaaggaggacagttgtatagaccatttcgtgccttgcacaaagtctgatgtgcaggtcaagttggaggaccacaaactagtaactgcctgcctacctgtggaacgacgaaatcagctgactgccgagtcagcttcaggccctgtttctgaaattcagtcatccttaagagattctgaggaagaagtagatgtggtgggagatagcagtgcctccaaagagcagtgtaatgagaacagcagtaaccccctggacacgggttctgaacgcatgccagtctctggagagccagagctgtcctctatcctagactgtgtttcagctcagatgacatctttatcagaacctcaggaacatcggtacaccctgagaacttcacctcggagggcggccctggccagaagtagtcctactaaaaccacatctccttacagagaaaatggacagttggaggagactaatctcagtccccaggaaacaaacacgaccgttagtgatcatgtgagtgagtctcccacagatcctgccgaagttcctcaagatggaaaggttctatgttgtgactctgaaaactatggaagtgaaggactaagtaagccaccctcagaggccagagtgaatattggacatttgccatctgccaaagagagtgccagtcagcacactgccgaggaggaa

SEQ ID NO: 28448 - DNA, 1167 bp, Mus musculus
gagtgtaattgtttatgcattagattttattctaagcagttaaaatcttccttaaatcacaccagatctcaagcaactttctgttaaaactttctgagagattaagtgggaagattttttaatgggtaaatcaaaatgcatctggagtcgtgtaataatgaaatgggtctggagtcatgtaataatgagatgcatgtctgtgtgttttttacttgcagcccacatgaaacagatattcacaaggaagaccaccagttagaacctgtttataagtcagagacgttcttagacagagattactgtgtgtcccagggcaccagttatagttatctggaccccaactacttcccagccaacagatgacatgggagagtgtcgtccgcactagtcctcgtcaacacgcagcagtggcatcatggttaatggtgtgcacggtttggacactcacagcatgagagctccccgagtgttctcgtccagtacagctctgcactgtgtggctgtagatcagcagctgaacattcctggtgagccgagaggttccctggtgagattttcaccactaacctaaagccttgtaggtggtggtgttaaatgggtgaggtggaaacaagagcacgtattaatgccagagtcaattccaaaggtttaaaagacctcggtcataaatatgataatgaaagacaaagtatttatattaaatcagtttagtagctttcagttttgtgaagatagttttcagcgcagaaacagacttatagatgaagttttaaccagtgatggtgtttgcttctaggatgtgtactctaaaagaactcactgtctggtggtcactgatggcctgtagtagactggagctgcttaacggtttgatacctaacttctaatcacgatgacctgtccttaccaagagcaaagcaagacatagctgtggctttgcttctgtaaccagctcatggggtgtgaatgtcatgaagttgtctcgctgatatatttttaatgtcatgttatatgagatgatcatgtgatgtgtacagactatgttgagaagtgccagtggtagtaactgtaaagtctgactcacaccattaatccctctaaagtacacagccttctgcctctgtgtggagttgtcagtacagctcgtcaaagaaaactgcctaatat

SEQ ID NO: 28449 - DNA, 1315 bp, Mus musculus
taaaacccactagtctttgtgcactggaggaaaccggtagtttccagtgcattgtcctctttacctctagagtcaaagaggaaaggttactgcccagcttcaagggtttatgtgtctgttaaatggattgatttctgagaattgtgtcgtgttttgcctcatgagaacagttcacgtctgtgtctctattctctgactttttttaacgaattctctatatttgttggttatgtgacccagtattctggtaagttacactctttcttgtttagagaggactggggtccagtaggtcactaggtgctagtgactctacaggtggtcctgtgacatgccctggaggacagcctttgcacccagctttacatgtagggtgtgattagccaatcagatcatgtattgtgggtatgactctgtcatgcttgctgtgacattttgggtcttatttccagttggggaagttaagtccccttgattgagttccaggaactagttactgacctgaagccttcccaatcgtatctgtgacgaaagcgaaggcactgagaatgaaaacagaagtgacagatgtgaggactccagtaagacgaaagccaggctttgtggagcttggaaacaaccgtgtgcaaataaaccatgtgaaagaaaatgctatttgaagaaaagtagtgccgtggagctctgttgctttagattgaatggctaagcaaccgtcactggcagttgtgggaggtagcagtgtgggtcagctttcgagaggactcaagagctctgacgccattggtaaggacctggagccagggaccacctaggtttccctgggcagctttgaagacaggcagtgtgtgtgtgtgtgtgtgtgtgtgtgtgtgtgtgtgtgtcatgcatcaactagggggcgggacgaggcagcacagccttgaatgcaggagtttacacttgtgttctgaggttgtctgcacacataaccttttgctaggcagaaaccgctacagtccattcatattttaaagtgtaactttatgatgtcacttggagccattcatgtgggcgttgtgtgtcttagctgttctgtagaaaactgacttgcattcccgggtactgattcctgctgaagttttccaggctgcttgcctgcatgtctgctgcctcgtccagagctgtgggtgcagagctgccagtgtgtgctgtgtgttgggttgtcatcctctagtaccactttccattcttgctctaatgtccgtgctccctgtcggttacctttggggcagtgtacgcatttcacagccatgtgagtgggggcgtgatgtgccct

SEQ ID NO: 28450 - DNA, 1406 bp, Mus musculus
tggagacacagctttactcgcacaggaagatggagacacagctttactcgcacaggaagatggagacacagctttactcgcacaggaagatggagacacagctttactcgcacaggaagatggagacacagctttactcgcacaggaagatggagacacagctttactcgcacaggaagatggagacacagctttactcgcacaggaagatggagacacagctttactcgcacaggaagatggagacacagctttactcgcacaggaagatggagacacagctttactcgcacaggaagatggagacacagctttactcgcacaggaagatggagacacagctttactcgcacaggaagatggagacacagctttactcgcacaggaagatggagacacagctttaatcgcacaggaagatggagacacagctttggtagctgtttatctagggaagtcatgcctctgagaatttttagtggtaacccctcagagaaacatgccctattactttttatttttaagcatactgtgaacttctagaattgattgtatctcttcagtttttgtcctgaaagagacagattgctgacagctggatctatgctgtccctgaggacagccccataaactggatgacatacatggagcacacacactgaaggccccgccttcatgtctgatggatcagtaagacacatccaatactgactcttctaggatgtcagtcacctccacatcttcctgcggtgaaaagatggccaagcttgtgttttgtgaccattctcagacactcttttctctttcagactttggcatcagagagccgtgctggggtgggctgtgcctatagatttactattcatgtctgaggagaatcttaggtgtttcatccaagaatctatatgttcatctgttttctttacaaatactgttttctaattgtaggtaacaattaagaagtcttctaatcccctggcaataggcagatacaccttgtttgtgatattgctcttttgtcagtcaggggcagagcacatggcagtccttgttcatcctagcttgttgcctgccctggtggccaaagttgtgtcatgcctaggacacataaaaatcaaatcatcaaatcaaattgaggcaccttgggaggaagacagtagacagaggcctgtggaccatggaccacgtgccacccacagacctgctctctgatgtatgacacaggtgggctgtatatacccacccactgtgcatagacaggatttcatccaggggcccaccagcttcatggcagcctgctctgcaggagtcaccacgatgtgttagttagtatgtgctagtcaggtgggagactcaagggtggagaggagtagcctgtggttggtggccaatgctgccacctcaga

SEQ ID NO: 28451 - DNA, 1205 bp, Mus musculus
ttttgattgcttagtatccattactcatgatattcttcccaagaattaattgtccacatgactgaggcttcaagtccttatgtcacctgcttcttctcctctgtcaccagttttggaaagagttctgtcagatcgccagatgtacactgttagctgctgaaggatctctgggctgtctctttagctgctctgtgaatacgcgcatttatctcctcgtttgtttttaaggcagtgctgtctgggtaatcatgtgtgaatctttattgaacacttatggatgagccacctgttcttacaaattagctgagttctcgagaaggcccaaattagtgaattagttgatgaaggaaatttgttgcagagacagcaggcagctaaggactttttcagcttgtcaaaggtattgttggtctctgaaactggcgaggaatcacggagatatcaaatgaacaattctcggcactgacctaataccttaaactcactaggagaaagtgaaatagccagtcacatcatgtgaagagagtctgctgatctcagccatcatacagaaagttaactaacttttgtagaagtgagcatctttccccactgatcaatgtggagagatcaggagggaattacagggaactcgtggggaaataggctttcttgttcgtttgtgcttctggccactttagacatcgaacaaacctcagaattgcccagcccagtcatagtccaggagctcatgaaatcttcgcttcccacaatcgcttaagtggcaaacagatctggtgagtggaactgccctctaggtccttgctagggctttgagccctatgctagaaccttggacaaaggtaatataatcccaccaacagaaccctggctgccttcctgttccttcgatgcccggagctggttgttcaccacccctacccccaacagtgtcatattctgtgtcaacacggcactcatttctgagggagcagggctctgtgaacacagcactgtaaagggagaaccaagatgggacttaaacgtctcctctgcccagtcctttgggtgaggttataaattgtgtcatattgtcatggttttattcactcaggaagaaggaatgataacccttcattccatctttacagagacactgcgctgttgctatggagatgctgccagagtttcttcccctctctttatgtttgtataatgtgggttat

SEQ ID NO: 28452 - DNA, 1229 bp, Mus musculus
ggctgtctacatgtgctctagctagctaacagtatttaatctgagataggggattgactctaattgggtggtagagcacttatcttgagcttttgcaaacatgcacttttctgggtttttataaccccacggtttactttctgacgaaatggcattaattgccccagatgaacagagctggccctctgttgggggcagtattcgttactctcctgcggttgttgtgataaaataccatgatgaagacaactcacaaacggaggatttctgtggcttggaacagaaggctaaggagtgaactgggcatggctctggtgtttaaacctttgactggtgacatactcctccaacaaggccacacctcctaagacgccacaagtgacaccaccaactggggaccaggtattcagatacagaagcctgtgggggccattctcactcagaccaccataggcgtatccaggtatcttctgactgccttgacgaagctgtttctgagagcatttgatgtttcttcagtgaagctgggttccttggcattcagtacttctaactcctgttttaaagagaaacactttggttttccagtccaaatttcccgacggccatagtgttattttctctagtcacacagttctaaatatttatcatggactgggcttcctcgtggccaggtttgcacctgtggcctgtgcccatcatatacatccttggcatcatccccagaatggtatcagcacactgaaatagtgtggtgttctggggacactgcagcactaagatactgtttataccacactggaaatgacagctttcttttagaaattaactttattttaaattatttctgtgtctatgactgcatgtatgtgggcatgtagaagccagaagagggcattggatcctctggagttgaagttgcaggcagaagggagtctcttggcatgggcaggaaccaaactctagttctcttcaagagtactacatactcttaatggctgagctatgactcaagcctatttcttcttttttctttctatgtggagcctcatcatacagtctcacacttacagtcttcttgcctctgttttctaactactgagatactagtctatgatgtcacagccagccaagacagaggatttgggactggactgtgatgcacttggagagattcctcaggaagtaagctggcgggcctcatgcaatgtagaaactgacaagctctc

SEQ ID NO: 28453 - DNA, 1099 bp, Mus musculus
gtcctgagtccctgtacacagtgcttcacaccatgccccataccgtgtgtgccactcatgcacaaggcttcacaccttgccatatgcacactgtgccatacacagtgtttcacaccttgccccacactgtgcctcagaccaccctgtacttgagtacccatttagacaactttcacatgctgctcgctctggacgcagcccacagggagctgcaagcctggtaagggcaagtttgtaagtctctgaggaccttagtccagtctgcctcatttgtgtccttatggaacagtttacagatgagatctaaacccagagaccccagagggcaagctgatgttcccttagcaccatcaatgcctgggatgccccagcaaggtagacaattgggcacatggaccagtgttagactctggtcaggagcctcagtgttgattttctccacttctcacgcttgccttcctctgtagaaagaaatcaagggtcagcagcatccatgaaacagagcacctctggctttcttttgagcagctggcaaatctgtgacctggactcagaaatgactaccttcttgtgatcatcagggactccaaacttactcttgatgtcccctctaaaactacagattttgtgtgtgtgtgtgtgtgtgtatgagagagagagagagagagagagagagagagagagagagttgtgtttatgtatatgtatatgcacatgcacacaagtttctgcaagattcactattgaatagaaaactggtgtgtcaagagctgagaggttggtctgttagtggaagacttgccatgtgatcaaacatgaaaacccaagttccagaacccacctttacaaaagagctgctcatactgacccacagctagattccagagtcagtgaggcagagacaggaggtctcttcaggccagtgatggacctttccttgaaaacaaagaaagaatggaaggaaaggaggaaagagagaaggaagggagggagggagggaggtagggagggaaaggggaggggagttacaactaagtatttgattccacatacatgcatatacctgtgcacacatatgcctcttcacataatggagatg

SEQ ID NO: 28454 - DNA, 1607 bp, Mus musculus
tttgcttcctttttgaatgattggtatgcatacataacagtagcatgctggcagccagcatttaccctaatacatcttaagatgaaatccccctggaggtgctcctgcgccgacggtggcacatggtgcctctctcccgaatgatgagagtatgcgcgtggcgtgcatagacacagggggaatattaagttctcagaaggccacaggcacaccacgagcactatgctctaacctctggcaggtgggcaattgcagcttgcttcccacttcagaaacatgtcggcagatgtaggcacattatttaattaactaataattgagaaagctatagtcactattaaaagagcaaagctaattctgggctgataaaggactcttagctgccctaaataggtcgtaattagctggcagcggtgtagctccaccttcagggatgggtgaaattaatgaaagctggcagtgaatgaaactgcatttcatgctcctgcctcaggtaaagagggtgaggagagagtgagtcgctttttagggccatttaggaagcagaggacatgacagccactgccaggaagtacagagagcatgggacattggtttgtatatatcaagttctctgctgcctttctgccagagaactccatcattggtactcagtctccaggagagagagataagccagagatgtgccagccctcattgacatccagtggtgacagtcccctttgtctagccagggtcttaaaggtagcatgagtctcactctttctactgggtcatttttgaaagtttcttctattcactctagggattaaattgactcacacctcttgggttttcaaactctaggttgaggtgtattacatctcctctgagtatccgaggtccctgtgagctccccctaccactgtaccaaggcaaacagcttcaaagaccacagtgtaggaagaagagtcaaaaacaagtcatacaagctaccttagttagccaaagccaaagaagtgttattgttgtatgctgactccagagacagagctgtctagctgatcctaactttcagtaaatagctcctaacctcagaaaaacctggaccaagagaaacacgaaaagtggagcaagccttggagggaacagacagtattaaaaacagtgtttcctctttttgttcttttgaagactgtcattgaaaatacaccgaagcaccttttcctctgtaagtggaattaatggcccttctccagctgatttatttggcaggaacacagagttcatacaacagttgtgggcagacctgttggactcccaagtcacaaaagtattataaggcacctaggactgtggctttgtgctaacaagcatccaggcacagggaacttccatcttcccattattaagtggccggtataggtacctctgtaacgtgcagatactggagattaaaaatcctaggagaaagccaggcatggtggtgcacgcactcgggaggcagaagcaggtggatttctgagttcgaggccagcctggtctgcaaagtgagttctaggacagccaggactacacagagaaaccctgtctcgaaaaaaaaaaaaaatcctagaagaagacagcat

SEQ ID NO: 28455 - DNA, 1106 bp, Mus musculus
aactctcaagtcagggaataccaaacttcgtgttgggtgatttggacctggcagaagaccattactagactggaaagctcctgctctgagcccacagtgcggaaagctctgccgtgtgtggagtgggggaattggctgagggagtctctcaaggctgactatgctccaaggagactgcttttacaatactgttgagggcaagcctaacttctcagctcgtgacaggtttctttcaggagtgtttcttgttcaaagagaaagattcattgcatagcttcagtatactaagatacattatttattaattaataagggcagtatgtagcagattgtatttgaacctttatgtcatgaaagctttcttcatagaggtagcccgctttgggaaatttaatggtagagcttttcctgtgtcacagattggaatcttggcctgttttgtgcagatttgcaagaggtagtactggtgtttggatatgtctttgagtgtgtatgtgtctgcacatgcatgtatgtgcacgtatatggaagtcagaggtcaaccttggtgccatttctctggatatcatccatctcatttctttgtctcttgcttgatgctcaatgagtcaacaaggctggctggaccatgagccttagggatctgcttgtttccatctccttaggactggtgttgcaagctggtgccagcacgtccagcttttaaaactggtttctaaaggtgtaattcaagtctttctatgaacactttgtcttagctttgcagcctcgagaaatcgcatgcttcatagttttgaactatacatttttatttcattattgcctctagccttcccaagtggtagaggaaacccaaccccagtctttcacagcacaccgactcctcctactagtagtcattgctcatttctctgcagtcacctccatgccaagatccaccctgatgtcctgccttgggatgcttgtgggtaacacttgcatatgtttttcacttttgattttttaccattaaattattttcctgcctttgttttgagtatgtgtggcattcagttctactgttgagcttgcttttcaaccaatggctttctctgtctctacgaaac

SEQ ID NO: 28456 - DNA, 1119 bp, Mus musculus
cagggccacttctgtgtcagttttttttttttttttttttttctgtgcctggttttctggaaatatggcggaatttaaatgtgtatcaggctcaaaacttacacttttgcatgggagaaaaccagcaatttctgaggcacagaagtagcggagagtgaagttcaccaagctgaagcagaggctgtgagattatctgaaaaggaggaaagccacttgtcagaggaaggctggcagtcctgccctgacagactggctggaacccactgcagcctgaggctccttctattaggtgaaaatgcgcctgttgctggagatttaagatgctaatgagatgtgatgcttaaagttttatgagaacccattgtaacagagcattcgcaagaaagctgatcctgtgtaaatgacaaaataatgaaaaccacatccaaacaacagcacacgcatatgcatgagtgtgaatacacacacacacacacacacacacacacacacacacgccaaaccaaggagtgcatctgacagttcctacaaagccttttctcaactcaggctttttcttcccctggaaggaaatttatcttctccaataaacgttctctgtttctcctgctctcgctgagtctccagcttcctgatatagagcccaagaacttggacccctccgggggtggagtggccagcgaaccccatatccaccaaaagcagtttcttctgctaccctcagggtactgttgaaagaaaatttcgagaattgaattcccactcacctgctagggctgatgaatgtgtttcagtctatgtgggaattcagagtttgtagtcttgggagtacgggcaggccttgaccgtagagaacattgtcattagtagaggagggtttccacagtcaactctctgtccccttccctgggtttcctgtttgtgaatgagccacattgatgctggttaattattatggagtaatgctacttagcagagaggtgcgctcttagcttctcagagtgctttccctggtagttttcctgtcagacaagcccaggaggagggactggcctgagacaggctatcacaggctcctgcagcttctcccatctctctgagggcagcggcttcctttgc

SEQ ID NO: 28457 - DNA, 1193 bp, Mus musculus
tcttctgctatgggccttagagagccgagaccggtgtcttagttctctaggctacagagggcaggaggaacgccagaaggagtctggtagtaagcattatgtctgaatttaagacctgacctgaactcttggtgaggtggctcaaatctgtaatctctgctcctgagagactgaagcaggaggactggcataaatctgaggtcactctgggatgcatagacagttccaggccagcttgggctgcagagtattgaccctaaagtgaaataccaaatcctgcctccagtgggagtgggggtggtctctgacgcgtgcatgctttggggacacctttcctcctactttgttgccttgttcaaccttaagaggagagacggtgtctcatcttactgcaactcgatatgccatgtttggttgatatccattgtagggtatttgtgctgatttgttgttgttgttgttgttaacttgatccacgcctagagatatctagaattattaaaggcatcacttgagaaaatgcgtcctccatcagattagtctctggacagattagtctgtggagcatttttcttggttaatgattgatggggtagggcagagtgcattgtgggtggtgcctcttcagggcaggtggttctgggttataaacgaacgcaagccaagcagagcaggggaggcaggctagtaagcagcacaccaccatggctttgcttcagttcctgcctccaggtccctgtctgggttcctgtcctggcttctctgcgtgatggagcgtcctcaggctgcttttggtcatggtgtcttatcacagcgtagtgatttgaggcagcattagagctgggtgtggtggcacacacctttagtcccaacactcaggaggcagagacaatcggatatctgagttcaaggccagcctggtctacagagtgagttccaggacagccaaggctacacagagaaaccctgtctcaaaaaacaaacagaccaaaaaaaaattctttaaaatgggtcagcattaaggaagtttgtatttctgagaaaaattccgtctgtacctctcagaagtgggaaaggactatcacttaaaaggctctcataggtgacaggtaataaggtaggtacttcctataggccaacgaagtccaccagagtggtgttggtctccctgttctgtattggtcattgaaacc

SEQ ID NO: 28458 - DNA, 1175 bp, Mus musculus
cgcctgagttatcctcttgtaggttgttgatatttgtactaatttgtaggtagagacaaatactggctacattgttagtcctttatgtctgggtatcctgccattgtgggttcagccagctgtggctcaaaaatattttaattaattaattaattaattaactttatatcccaatatcaccccatcctcctcacagtatccccttacacagatcctccctccttttctcctataagaaagggaccccccccccccacagtattactctccctggcacatcaagcccctgtatccttgcttactgaggccagacaaggcagccctgttaagagaaaaggatgtatagacaggcaacagatttagggaccagttactgggagatcctcatgaagtccaagctgtagttctgctacatatgtggaagggcctaggtccagcccatgctcactctttggctggtagttcagtttcgggaagctcccaagggtccaggttagttgactttattgaccttcctgtggaatctctattatcttttggccctttaatacttctcacaactcttccacaagactctgtgaggtctgtctaatgtttggctgtgagttctctgcatctgtttccatcagctgctggatggagcctctcagaggccagtaatgctaggctacgatctgcaagcataacagagtatcattaatatttcgctaataattggttcttgcccatggggtgggtctcgagttgagacagtcattggttggccattccctctgtctctgctcttttccctgcacatcttgtaggcaggacacattttgggtcaaaggttttgtggatgggttgctgtacttatctgtccaccaggaggcctgcctgaaatgttcgacatccttagtcatcagggaaatataaatcaaagcaactctaagattctaccttcagaatagctaaggtcgaaaactcgagggacatcacatgctgatgagaatgtggagcaaaggaagtgccccaccattgctggtgggagtgaaaatcgtccaagtgctctggaaatcaatttggcggtttctcagaaaattggagatagttctacctcaagacctagctgtactaaagatgctccaccattccataaggacgtttgttcaactatgttcatagcaactttattc

SEQ ID NO: 28459 - DNA, 1108 bp, Mus musculus
caatataattggcttaattttagttttctgattccaggagtgcacgcttcccctgtctgtctcttgtcttattgattttgatggcaagagattaatctggtgctctgaggagctgggcatcaagagctctccagcaaggagcaattttgccctctggctgcctggtgctcacatatctctcatcagcaatttgtaggactcacccccctgtgccccacaaaccccgatccccaccccttggcttagaactgtctttgcagtgcccctgaagggaggaggaggaaggccagcctttctttagccacatgaagcctgcatggagcctggtaggattggtctgctcctgctactttgtatgcaagatagctcctgcttaccactcaccccagttttagctgttcgtgtccgtggatccttgggctagctttagcatatagatttcagattacattggaattgcctatgtctttctgtgtttcttacttcacaattagaccctgaaaaacagagtttagccttgtttctcatgcacgtggtaacttgaatagctagctatccacaacatatttcctgaagtagtcaatgacttgagttaatcaggatgatgtcattgactttattaattaacccagtgactttatttaatccagatgagaacatttgggggtactgatagcttgaaaacatggtttccaactggacagtgggtacttaacagtaccggctggcatgtgtccaaagcgtggtgattagctgtctcccatgtgtttcatggtgctagctacagcattatctaaccatttccatggtgagggaagctccaaggctgtcccttcccctggattatagaggtgttctctgtaacccatggaggaggtgagcccatctgtgctatgctgagttggcagatgccttcacacactgccgtgctagacttagggtttaacatagtccttccgacagtgccttaggccctctgtgcatcgggtccttacagagggcctatgctctgctctttagccatctgagcttgtacagcatcaccgtcagagtaggggagtcaagacctgacgagatggaatgcactttttacaaaaagggaaaagca

SEQ ID NO: 28460 - DNA, 1056 bp, Mus musculus
atctcagagaagggggaaggcagagcagaagcgttcccctggcgtccatatctatgccatctgcatacacacatgtacatgcatatgtacacttgcaaaataaaccaaccaagaaagccccagagaccagaggggaagaagtctggaatgtcaaccaagcccccagagagccacagcgaggtgcactaccttgctagtcatgtttctcgatgcccatggtttatggtttagccttctgttccatcatgactgccacctcaggaattctatctgatggtcttttgctgtgagaactgaatgagtgactgaccgtattccacaccacaagctgtcgccatgtcccgtctcccatgtaaaatccttagtagtctagtcatttggttatcaatatcctgtcaatcgagattctatatgtcgataccacactcagtttttaagaaattaattttatttatttgttttgtgtgtgtgtatgcctctcctgcatgaatgtctaccatttgcatacagggagcctaaagaactggagtcccaggcaactgtgggctgttatgtgggtgctgggaattgaacctgggtcctctgcaagatcgctattggctttttactactgatgcctctctttagctccaacaaagccttttaactttctttttaatttttatttactttttcctgtgggtgaaaagggtcaaactcagtactccacgcttccgtggcaaacgctttgccgactatgcccctcctcggcactctcttacgacttaacacattttaacagctctcaatcattcccatccaaacagaccatactgtaaactgaacatcagggagggacttgagtcatagcacactgtcaccccaaagaatccctctccttctgggcggttctgtctagcaggtgcaggccagcggaatgtgccagtaacgtggcagatgctcctctcaacagtttccacgcgtgggcctccactcctggcttgggatcacatgactggtttccagccatcccctgtggccctccatggagcagagtgcacagaggagatcttagaa

SEQ ID NO: 28461 - DNA, 1173 bp, Mus musculus
ctttgctttgagatatgtttttttttagaagtctatctcgagagtcttgctgataagttacttctagtctttcaagagaaactaaagcagagaagtctgttttctcagtcatccccttcctccccatgtgctcctccttagttcccttccgtctcttcccgcctcttcctcttcgttctcttcctcttgggtgtatatctaccttgggccctgtttcaactggaatgaatgactaatcacaaaacttgccaagtaattaccttaatggaaaggtctttctccttctcctgcctcccgcaccgtgattcctataagtaaatagcttcgttataaagtacacccccagtcttgtgagagccctttgtacatagaagcttccttataaatgtgtctctgaggaacagcatgtaatggggacaagtggggaccttgggtcaggacctgggtcagacctcagtcatcactgctgtgacacagtgcctggcaacaggatggtggagaaggaaggggggttgggtcatggttggatatagtccattgtggaaggagcgggaggcagcaggtgactctgtccacagtcagcagagagatgagctgtggtgctccgttcttctttctctctttaaaccagcccgtgagtggttgccggtcacatttagagcgagtctttccacctcagccgacgctcacaggcacgcccagaagtgtgtttcctaggcggcttcagagacgcccagctctccgcttacactggacagaggctgccaggctccgtgttcctgtgaatttgtgtgacaccctccaccctgtatgtgtgagaaaagaaagaggagtggacgttccacgggtgctcagtcacaaacggctgccatgggaaggttgatgactacttcatcagtgtcttctcaagtccaacaagccctgctccttccgatctgcagtcagcctgactctgcacttctaaaaccgtcctccagggaccgtggggcactgcagactccctaggtgcgcactggggatctgcaaaggcagatccaggggaggaaggagcacgggactcatcttcaagagttttctgtgttccttgcaatgcgctgtatgaaatgtgtatcctctgagacgtgcatggctctggaggcgtgagagtgctccagtatgggacctaaggggcat

SEQ ID NO: 28462 - DNA, 1199 bp, Mus musculus
tttttttttcccttggaaaaattttgcttttggttatctttgttattctttaattagtaatctaattagtttagtgtgaagatgtttgtgtgcttcttaggggtcagaggacaaacttgtgggagtcagctctctcctgccaccatgccggtctcagagatcaaactcaggtcatcaggcctggtggcaagtgtctctaccccttgagtcacctcactgacttttccttgttattgtttatatacagtggccagcataatgcacaacttatatgacatagttttatgtggcgcttgtagggatttgcgggccctttgaagccccactgaggccaaccaggtgggatcctagctctgtgttgtcaagtttgtggggtttcacagaccgtttgaagctcctctgaggtccaccagttgggatcgtgtttctgggatgtaacccctttctgggttaattgtatcctgatgtatatcaaggcttccccattgtaattggaggtagaaactgaccttgtgctgcgacagctgagctcagctgaggttggcctgctgatggctgctgccttgtaagacagataagagagaagcaagtgactctgtagggttgctcaagataaaaaacatgtctgtgccaaaagcactgcctttgtgctggtggtttcctgacgtttggtgggaagggggaaggggagggtctaaaatgctttatgacaaatttaaatccctcagttgaaacaaactagaatgaagggaagggatccctctgtgatggataagctcagttcattagatacttgcacacgtccctgtcatcttggaaaaggcaatacaagcacagtgagttgtgtgtgtgcacgagtgtgtatgtgtgtgcacatatatgtatgaatatatgtgtgtggtatgtgtgtttgagtatatatgtatgttgtatgagtacaggtatatgcgtatagtgtatatgtgcacatatgtttatatgtgtgtgtatacatacgtatatatatacacacatatgtatatatacacatatatatgtgtgcatgattatatttgtacatatgtgtatatatatgtgtgtgtgggatggtgtgtgcatttgtatgtgttgtatgaatgtatattcatgggtatatatgtctgtgtaatgtatgtatatatgtttgtacatatatgtatatggtgtgtatatatgtattg

SEQ ID NO: 28463 - DNA, 1231 bp, Mus musculus
tgtgtagccctggctgtcctggaactcactctgtagaccaggctggcctcgaactcagaagtccgcctgcctctgcctccctagtgctgggattaaaggcatgtgccaccacgcccagccttggtgaaaccattctgagtgaaaagaacctacaggtacttactttgctttttctcatggctcctgcagcttgccgtagcgaatcatttcatggctggggaagtctaggaagccagtggctaattaggtattttaggaaaattgccaactcgttgcaaaggtcaacaagagtgtgggcgggagaaaaaaaattggtctgtttatggaagccctcctgagattgctgagtttggagcgctcacatattccaccaactatctgcctcctctccttctctccctttctcccatcttcccttctcccttcatctctccctccctgcatcccaccccctttcctgactttttaagacagtcttactccatagtagcccaagtggccctagcactcactaggcagctctagctggcttcagactctctgcagtctttctgccctggctcctcaagtattggcaccagagatatgagccagcactccggactcattgctaaacctcaggttccacttgggaagtgaagacaaagctgtctcctagcaagcactattgtgtgatgaagactgacagaccccctctcgagcacgtgccctgtggcagatgcttactggctgcttcctcctgtgccagatgggaaggcactggtcctccagggttgagtggaggagaagcaggctgaatgtatttggtctctcctctcagtgttttcctctccacccacccttgcttccaatctttcattctcctccaggctgaatgaaattgagcgtattgtaaatgtattagcctttgccacagcaccctgagatttgccctggtgacactctgacacaatcaaaccatggctggccttggttgagttgtctgacgtttcacctactctcctgcggtagtgatgcccaacagtccatagagtcagggccagatgggagttgctggggctgctgatggagggcttgtttctctaggtaaccatcacctaggctggcggacagtgggatgtccctttttcctgactcatgcctgaggctaccaacttgcagagacaatggaaggaaggcaacagttttctctggagggaagcggatagagttgttaatgtctgctgagggc

SEQ ID NO: 28464 - DNA, 1212 bp, Mus musculus
gagctgacagttgagattcacagtattttattccacgtgtgctctaatacacacatacgtgatattaaaaggatacacgcatgacttttttccacatggatgagaggagagaagagcagagaagtaggagacgagagagcatgagagagcatgctgtctgggggaagttatttcccttggcacacccactgtctgcttgcatggtgttgggcttcaatatttgtgcttctgtagaaacataaggtaggcacagtggtgaatcccatgtggatggagacattgaggctaggagaggtcagctctgctaaggcagttttaccagtaaaataggagctagggtctgaatccaaattaggagataattttgcaaagttggggtgagagcacacctgtcatctcagctcttaggaggcagaggcaggagaattgctataagtttgaggcagcctgggttgcccattgagttctaggataatctgtgcaacataacaagactttgttaggaaggaaggaagggaggaaggaaggaaggaagggagggaggaaaaaaaaagtaagaagatagttttaaggttacagagacaagcctatttgtaacttcctacaataaaatgataacattcaccatcagcaagcactttctgaccacgcagtacagggtggtcgtcacacgtaagacatgcatatcatagattctaatgtccaactattaggaaaaaactgtttctcataactattttatatgtgccgagagaccaagtcttagagaatgcttgccttctttgccctatgcactttgccaggtagctgagaacctggaatgacacggtgtttttaaaggcattactgtgtgcaggaaggccaggcattattttcagttcttggaattgttatttagtaacaataacagtattgttacattgttacatttttatttgtattggacttctgttttacagagaaggaaacacgagacatagtggataaggtcacagtggtgagactataatgcaggtgtctgaatgtaacccaggtacacatatgcacacattctctgtctgtctctctgtgtgtatgcgtgtgtctgtgtctctgtttccctctctgtctgtctgtctgtctgtctgtctcttattctctcactctgaagatttacctttctagagttctagagtttctagatgctaacatcagttcaagctgcttcagaga

SEQ ID NO: 28465 - DNA, 1185 bp, Mus musculus
atgcgtttagcaaattgtatcttatatcttgggtatcctaagtttctgggctaatatccgcttatcagtgagtacatattgtgtgagttcctttgtgatattgggttacctcactcaggatgatgccctccaggtccatccatttgcctaggaatttcataaatccattctttttaatagctgagtagtactccattgtgtaaatgtatcacattttctgtatccattcctctgttgaggggcatctgggttctttccagcttctggctattataaataaggctgctatgaacatagtggagcatgtgtccttcttactggttggaacatcttttggatatatgcccaggagaggtattgcgggatcctccggtagtactatgtccaattttctgaggaaccgccagactgatttccagagtggttgtacaagcctgcaatcccgccaacaatggaggagtgttcctttttctccacatcctcgtttatggctcattttgctgatgagcccttgcccctctggctcctgtgccccttctcaatccagatgttgcaggtatcactagctcaaggttgaaaggaacacttgcagtgctggggtagggatggtcttgggactctattaagaggtagataagacaatcttccaaagttcaagggtgttggctaagaaatgcaggctactcctgtgcgtgcctggagtaattggtcttgtgtgcgtgacactgcaagatgccactttttctcacagctgttccctgtaggaggctgacttggctttgcttgctgcccttctcagccctgttctcccctgaggtgggtggtcctgaggcatcaccaccagacctctttcccttctgctctctcaccagtgctgaggaccacctctctccgttcctgtggttcctgtggcttccctgtggttctttggctggtttgatgcctgttcaattccaccaggctggttaacctccgcagcagcctggctgttggcctgatctgatctaagatttctacgtgtgatgcctggcattttggtggacttgcggtttgctctttttctcttccatttttgaccaagggcatcaaaactgttattaaaagaaacagcctttactttgtatgctaacctgaaaaaggttaatttaagaaggaaatagcatgcaaaggtcacccctttaggtt

SEQ ID NO: 28466 - DNA, 1094 bp, Mus musculus
tgggacatgtacagatactcaaaagcgatactgaggttgggggtggccctgcttttagtttaacctaatcgcctgggaggcacaggcaagaagtcttagtttgaagctagccagctctattagggggacctagtcaattaataaattaaaatggattgtgaacacttcaaatgttgctagtctgagctccagatctataattagttactgtgtggagcttgctttgtgagaaaggcagagagaattattagtatgtgctggaattattagtgtagctagctacagtgctgaggtggtgtgagagacaaatgggaggtagtctcagtttgccctacaatcatgtctgggaacacgggattagacattaaaaaaaaaagaatccatcaaatctgagagaatacaatggtgcagtagaggcagctgtcttactggctcccccttccccttctctagttaccagatgtgtgctattcatggtgggtgttggcctccctaaagatcatcgggagacttcattggattgacagagaaaagcttcgaagtttcatcttagcgtgtcaagatgaagagacgggaggatttgcagacagaccaggagatatggtcagtacaattctggctttgcagtttttcattgttgattgactttcatggttataggcatttctaatgcactaaaaatagtgccctgtaagaaatagtccaaaggttgtcttgggggtttaccttgggtgtttttttaaaatgtgttagttacaaaggctagagctgatagaaatatcttgtagtgataattgtttatgtctagtattagaaatacttgtcttcagaaaacttttaaagtggtattcaagatacacttcactgtggacagatagataattgagccttttccatgtttgtgaacttcccacaggtggatccctttcataccttatttggcattgctgggttgtcacttctgggagaagagcagatcaagcctgttagccctgtcttctgtatgccagaagaggtgcttcagagggtgaatgtccagcctgagctagtgagctagtcagatgggagagatgctgtagtgtgcaatatgaatt

SEQ ID NO: 28467 - DNA, 1023 bp, Mus musculus
agaccagctgctttgtgggatgtgaaccttttttaaagcagggctttgattatgttactaaattactagcccgaatggggggcgaggcatatactcctgccattttataggttcctttcttttctgggcccttgcaagctactaggctattgctttctatttgcctagctggtttcctcagaagttgggggactgcctcctagtgagcatagtcagtcttgactttggggagtttaatgggttttgttcttaggtgacttggtagcacttacatgtctgccttggctctttttgtcttttaggagaaattgatacaagattctcattttgtgcggtggcaactttggctcttttggtaagctttgactgttgcattaaaggaccgaattaaacacttgagtactaggtagctgtaataggctgcttcctttctcgtcatagggcaagcttgatgctattaatgtggaaaaggcgattgagtttgttttgtcctgcatgaactttgatggtggatttgggtgcagaccaggctctgaatctcacgctgggcaggtaattttgcaattaaagtttataggggttttgtgttgtgaatggccacaccttctcactgagttttgtgtatatgctgggtctacacaacttcaccctaagtaaacaccagtgctccttattggcatttgtctgtttatgtggggtctgcattctgtgctgttaactgacctcgaggcttactgtgtgtgtagtccaggctgtcctcggggcttgctacgtgctgggattggaggcatgaccctgaccttattcgtacagatgaactaaccttacccagtgcagagaacattgtgcataagtatagcattccactgtcgcattgaacctactaatacaacctgagataacaaagatggagctttagtaattttggtagtgtctgtcatttactgttaaactatacctgtgtactttatgtctgtaattttagatctattgttgcacaggattcctggccataactagtca

SEQ ID NO: 28468 - DNA, 1156 bp, Mus musculus
ggccatacttggactgccgcttgagctgtgtatggctcagcgttttctgcacttctcgaggcctgggatcttatccgcggaccgtgggcgagccttcctggattgggccgcctgatattttttcttaacatcggggacttgtacgtgcctgtattttgaaggttacatgatcatttacgaatgttgtttcatagttaaacattttaactgggatggaaggaagtcggccttggcccacgccttttaatcctaacactcttggattaaagaagtgaggcagaagcaggtggcctggtctacacagggagttccagaccagacagggcttcatagccgagactctgaataaagtaggaaatttattttggcaatcgctttgacctacttattgggtgagtcttagaatcgaaggtggaatttggagctaatgggtctgattatttagcaaaggggttagcatgtgaagactgtagaaaggtgcgctgaagcctcaaacttgttaagcaagagtgtgtatttctggcataactcaaaagataagcgtcaagattcgggtcaatgatgagctggcatgtattctgaatctaaagttgattataaaccactttagctctagaattactctgagacctgaaagaaaaaaagtactgagatctggctatgtgtgagtctgagatgtcacgatttccggatggtgaatgggatctctgcttttttcttggaagggcacacagcagaaagacgttactatcaagtcagatgcgcctgacaccctgttgctggagaagcatgccgattatattgcttcctatggctcaaagaaagatgattatgtgcgtatgattcttttttctgttgaaaggtttctaagactaacagcaataagtataatacttacttgtataatactaattgagaggcctgatttaaaatgtattataggtgtaccttgtatatcagaggttggtatttgaccacatcagtcatgtgctggtacataaagggcggaagtgcagggctgcaggtagaaggggtttgctcatttctgtctggggtaaaaccttgaaggtcaatgatgtgttggcatgtattatctgaattcgctgatgtgtcataacactttagctctagaattacgctgagaccttgaaaaggt

SEQ ID NO: 28469 - DNA, 1156 bp, Mus musculus; identical to SEQ ID NO: 28468

SEQ ID NO: 28470 - DNA, 1430 bp, Mus musculus
tttatatttaatatataacatatatgactatattaatataatatataacacattattatatcttatataatttatatggtacatgatatgcatatatacaatatattatgcataatatattagcactatatatacagtataaataaatatattttagaatatattaatatgttatattaatatgatatataatattactagtgtgtaatgctatgtattaatttttattgattgattgttattagttataaattatatatagtatgtgtagtattaatattatatagtacgtaattatatatcatatattcatatatatgaaataacatttcaatttggtgctacagtagagctgagacatcaaatgaatccagatgtttaaactccattgtgtttatctttcagatttatgaaggtactgcacaaattcagaggctgatcatagctcgtgagcacattgaaaagtataaaaattaacaggaattactattgaacgatgcatcaccctcgtgtaactaagctccaagcactgttgctgcttcaggggaaaagggctttactgtcttcccaaggaaatgagatcaaagacgagtttggatctgtgcagcggattcccatggcggaggaacctgtcttcagctctatggtgaccctttctagataggtttggcttttggacaatgattggtccttagccccgaattgtgttagtttgctctttgatcacttaaaatggaaaaacaccctggacttttaatgttcattcaagtgacaggaaaggcggcttgtcaaggaagaactcatgattctaacataaacactgaaaatttgtggtagattggacacgtcagactgtgacatagcagcatttctgtgctgaactgttaattttataattttgattatatttgctttgttttgcacaaaagagtaaaaagtttatattcatattctcccattataaaactaaaacttttctgggaatcttagtactgaacgagaattttatttgtcttgtttaaaataattcaataaagctaaccttaacttatttttctctgactctccaggtttgtacaaacccttgggctgctgtacccatttgtgttttacacataggacttttaaaaggaactgaagtaaaacaagcagtgtgctgttgtaggctgtgtgtgtgctgttgtacgctgtgtctgtgtgcagtgtgtgtgctgttgtacgctgtgtctgtgtgtagtgtgtgtgctgttgtaggctgtgtgtgtgcagtgtgtgtgctcttgtaggctgtgtctgtgtgtagtgtgtgtgctgttgtaggctgtgtctgtgtgtagtgtgtgtgctgttgtaggatgtgtctgtgtgtagtgtgtgtgctgttgtaggctgtgtctgtgtgtagtgtgtgtgctgttgtaggctgtgtc

SEQ ID NO: 28471 - DNA, 2086 bp, Mus musculus
aagccctggtgctgtgtggcgtgtgccttgcacaacttgcactcttgtaactgcagctgcacgttacgtataagcatatacagcttgctgccaggtagggaactggggtagggaaaggaaacttacagtcttagaatgtcttgagcatggcttctgaattactgaataaaatctaaatgatctgccaggtaagcagtcagaaggagtgacaacatgtaaacagaacagccagcatggtggtagtggtggtggtggggggaccctaggtagaaccaccacagggaagggacctgagctgcagtgaccaccctgggttttagcctctgaactagaaggcattctctgcttctccctggggcaaccattcactgcccaggtttgactcctccaggttccacaagctttgtttctggagttcttggaccagacatcaaccaagttatggccaagcagatacgtttcatgtggctcacatgagggtggttttcctaattgggtcatgattttaaagtacaattagctcacagtgggagtaaaactgcatctctagggtttgttttgtttgttccctttaattggaaaacttgggttgttggaggcacacatcccacatgacactcagccagccacattctggctgtaacatttgaaaagagtcatccagttcccctcagacccttcccattgctagctctctgacagacacctcattagttggtccctatgggtgtcagtctgtggtggcaagccccggataaacactggagagaaacaaacctgttaactgtattagtgtatcgtaggacaaaaagataaactgctacaattcctacggatgcaagatcaaaatgccaagccctttgtataacgatgtttaggaatttgaagatagctaccaccaagaatgaaatcaaggttgagacttctctctctctctctctctctctctctctctctctctctctctctctctctctctcacacacacacacacacacacacacactctctctccttttgagatggtatttggtatatttagcattgtctctagttcatgcaggcatgagccactacatccaatgtatgtgctaagaaccaatcaaacccaaggctttggtatacaccaggcaagcactctaccaacagagccacctctaacaccatagagcaagatactctgagcataggcaactgcacagctcacacactcagaaagccaactctacatagtaagtaggtgtgttgagttaacagagaacaggtgccttgcccctaacatggcaatttagctgtcctgtcctcattaggaaaagagggagggcactggttcctggaataaatgctggggggctctgaaaaatgaccactgcctccctcctgtgatggaggccagaagtgactttaatcgaattggagatggggaaatagatctgacactgctatgcaaggaatacaataaaaatatattcctaccccaccatggtgctttgcacatgtgggtgggtcctaacagggattcaaataggcacaaatgttaatgtgctaaaacccaataaagtagtttaatttcctagaattttgtctgttctgttgcagtaaatattacttggggtttgtattgcactttcgatcatttaactctcaaataaaagacacaaaacctttattataagccttaaaagcactagagctgggcatataccaaccctctgtgctgttttgtctactcgactgtcagtagtcccaagatgtcacttgccacatttcgccttggccgctcctgctccaactggccgcccctgacagccatgctctcaggatccacctaccccatggtgccttcttcctttttccaaccctccccatgccaaggaactgaagccccagtacccctcttctgcccagctacaggctgtaggcatctttattcaaccaatagttttaaattaaggtacaaggtttgcacaacaaaatctggtataagtgagaattgaggcactagacttgtcttgaggcaaccagaccttggaatacagaaattagcatttcattacatagctacaaaccaaacctcaacattgtt

SEQ ID NO: 28472 - DNA, 1174 bp, Mus musculus
ggggtctgcgtgcatcacaaaactcttttcttcctttttcttcattttcttagtttggttggatgtttttgttttgtgcttgagacaggatcattctctgtagttcatgctggccgtgaactcacagtgatctttctgcctcagccgtctaaatgctgggataatcagtagtgatgcacactaccacacacagcttcatctcagaccttcttgtctgattaagttcagacctttgaataaaatgtacaagttcaaaatggtcctctactgaccttcctgggctcccaagcctgctactctttagggagtcacctgccccctcagccatggctgtcttgggccctgaagactttctgggctgaaaaatatccttttaaaactaatgtcatctcagtctgtaagcctctggaaagcttcggcaaaaatgagcaatacttgggagacctcccagtcagctttcctaacatttttgagaatatcagaatactgcatgccggtcaccagccacctgtagtctggggggtcagcagccacctgtagtctgggaggtcaccagctacctgtagtctgggaggtcagcagccttatcctgggtctgtggtcttcagtatggtcacccatcaaatgcttcatggtcacttatagtttgctgtatatgtgacatgagtctcatagtttcacttaaaattgtaagttcacaaatttaacatgttaagacctgtctgctttggttttcatagtatcttaacctggagtaaattctgtagaacactgaagcccttgtctgtctcgtgtgtttaacacaaacctcatttctgcatagctcctgaccctgtggccttattacacctgctctatcctggaattcttttagactaaatggaaggacagccttttagaaatctcacaccagcattatgtccaaggagatgatggtcggctattcacttttagtagtggttggttactcacttttggtgtgtttttcttcaaacgaacacatcctcccatttctacaccccgccccccacccccacccgtttccacatccttctctttcacatcgtgtggcggattgtcttgttccatttgttctgtagatagagtagcaggttgtagtctgaagatggacccttgccaagtagtgagtagacatcattcctcatgtatttga

SEQ ID NO: 28473 - DNA, 1231 bp, Mus musculus
ggtcttctcggtcgcaccgcgggttgtcagacacggtaaggcaggaacccagagctccgcacaacccgaccccgctaggtgcccgcccatctgccccacagatcgttgcccaggaaacgccgcttgcgcacgctcacgccatcctagcttttcaagtctcagggcgcttccagggccgcggtgacgtggagagcatggaggaggcggggcggggcggggcggggcggggtttggagtgcgcgtgcgtgctaagtgtgctcccggaagtcggccatggcgtctctccgcgaagccaccctgcggaaactgcgcagattttctgagctgagaggtaccaaggcggaactgagttctctgcccccctgcacggagagcgccttcccaaggaccccgcgcagcttcctgtccgataccccttcctgtccgctccgtcctggccaggccagccagacttttccctttttcccttttcctcctctctgtgcgagcctaaacttagatgtcaggaaggagcagtaagagaattaccaacgggaagtaacactggcttaactcagtggtagaagaccttttgcttagagtctgcagtagtcgttaccttgtttcttttcttttcccaagccccgctgcttaactccactttattccaatgtaaaccccaatacggaggcaatcatggctttaaatttgataatgtaagtttggggtacagctgtctggtaaaattgatatttatgagtgcctaaaatgtacggtcttatatttggataccagaatgattggaactattaaatccaagctaacatgtctgtctctctcctctccttctccctccccttccccctcctttcctacctattcctccttcttatctcagtccctccctccctctttatctttcccctccctctcattctctctcaacttgttaaaaaccttattaatatttttgctgattagagggttccactgattcttgaaagtgcaatttgtcatttaatgagttcattgagaagtttagtcctggggtttgtgttgtattctgattgcttatataaagtgtagtttgatcatcgttaataaaaatattagaagctaggactggtgtcgcaagtctgtactgtcatctacttgagacgctaaggcagtaggaacgaggttcaagacctacctggattgcacagacaaatagacgatgataattgatagacagatagataataggtagatc

SEQ ID NO: 28474 - DNA, 1138 bp, Mus musculus
aaactgacagccagtgtctattctatcttatatgctttgtgggtacatcgacactgtgtgttcaaacaggaaaaaaaaaaaaggagaaagaaatcaaagaagctaacgttcttttatttctccagtctgcttccaagcaatagacttctttatctctagctcagaagttggggtaacactttaattaagcttcatttataaacttggaaagttgatgcatcagagatgaacttatataaaccaacaacacagagccacagagcttggagggaagcctcacctcagaactacatggaacccttggcatttcattaaaaatattaaatgagctcctgtcaaggtttatttaaattttaccttatccagaaagctaaattaaaatcagctgtggctttgagaagttggaaaaaaatgaaaagatgcaaagatttcagattaaaggaaggttttatacagaaacaagaagaaacagacacattaaaaacacttgaatttgtgctgttgactttatagatttggaggtattgggagaaattctaatatatgctaaaccaacatgtatgtcatattgaagttatagcagtataagggtcactggaacagagaaagctgaaggtaggaaggaaactatgagggactctaggggctggagaaggagctgggcagaaggactatgggtggaaaagtgccacaccagacacatgtgcaatgaaaaatacatatgcaaccaaccagtgctgtaacatgagctcatcatcagagtagagctctcaaaaaagtctctaaacacttgcattgagaaaatacacagagggtaaaaatgtcaattctggtatctagtaataaatttaaaatgtatccctgatctccaggatagcttcacatctcagtctaccatgagtacttctccaccatttctacattgatccttttctcttttacatctgtgagctcagctttttcatatacatgatgagttaagattgtgtgggaatttttctctgcctggcttgtttcccttagctcaagactctcaagtttcacctgttattttgaaataactcaagttccttaggtacgtcagtgtaccacatgcctgtagtgcccgtggagacataaagagggcatcagattatct

SEQ ID NO: 28475 - DNA, 1174 bp, Mus musculus
agttgttgtggtcatgatgtctcatcacagcaataagactttaactaagagaaacaggaagctgaatgacatacccattccttgtttgataccacaaggcaccagataaaagctcttctcctttagggcagaaacagctttgccccttttccttatgatgtccctcaggtagaggagctcatgtgctgtttgctcacctgtgctttgcttcctgcagcttctctggtcattttgtttccagagccttttacccattgccatgctaaacccttgagcagttatttacgctgtgtccctggctttcaggcatctgtgtgttcatgcacttggtccacactgtccccatttctgtcacatcaaccaaattgactcaaaatgaaaataatgaagagtattatggacttatgaatggcaaggtttggatcagaaactggaagtctgagtacttcactgtgaactacgcacacagcacacattaggaaatgcgttgtggtgagactgagcaaaggtttcctttttaagcgtaagaaaactttccccgagattcaggagattgtgttcattcatgtgcattcttcatgagaaggtaagtgtgcggcgactgtttctctattctttgcactagaaataagcattttgataaaatacattcacatttaaggtgcagcatatacatgctagcttatttgacatattatctaacatttctgaagtttttctagcttggcagtcactggagaatttaaaaaaatagatagcattcccctactttcttgcagtcgtgtttctgggcatggttgataggagttcatatacgattcaaactctggacataaaaggcagggaggcaggcattgtgtggtccttgtggtcatgggatagtacggggttcataaggtgggttaccttttgctgtcttaagattcaaattaaggcagattttttttctagagaaaagttttaatgatgagatttctgaatcctggagcatcctgttgttggccaagggatgcactggtttgcttggtgggaagctggcactgtagaatggagtccttcctggtccattgtagtacctgccgccatcgacctagcagattgccagccccagtcctctgtaaatcatctctttctgcttgggagaccagagcaattttgtagtgattttgctcta

SEQ ID NO: 28476 - DNA, 1099 bp, Mus musculus
cctccctccctccctcccttcctccctcctccccatccctcttcctttttaaaccaccgagtacattagtgctggctctatgtgtgtaggtataggaccatctgtctactagaacatgggtagctttcatgggcatgaagcttacattgactcctgatagccttcaattctcgatgatatcccagcttgaatgggacttcatagaccctccccagtttatgctggaactttggtggcttgatcttgttagactgtctttgtacacatagtcacagccactataagttcatatgcttactgtggtccagctaataaccattttactaccatgtaccttgccccaccccacccccgtccccgtcccccagcttttaaaatttttccgtgcccttttgatgatcaccagccttagaggaaaggatatggtatagatgtgccattcagagctaagcactccacacgttgctggcttctgtattgatctccaacttataggaaaagaagcttctctgatgatggttaatagagaactggtctatgggtataaagataagaacacaggtgcatgtgtcccttaactgtgtccatttaccggtaacattgtctcagctccctcagggcctgtgacctacctgccatgggattttttttgccctattaatggtgccatgcttgagtctgtcttctgtagagagctaaatctgatcaggatttggttatttccataacatggtgttgctgttgcactgtgggcttttctggaaaggtagggtttgcaactgagtgaagactgttgattacctttcttcccttggtagaaccttctagcactatgagattatccagtaaggataaagctttcagatcagtaccagcttaatggttccgtgtcctgtgactcaagtgtatagtacttcttgtaagagcttcatattgtcaaagaactatgaaagggtcaactcttgggcttgcttgagagtgggtcccaaaacctagtaattgtgtggatgatatttggtaattgttgacttaagtaattacaaacttgtttctgtatgtcaatggagaacctcagcagaatatagttttcccattgcca

SEQ ID NO: 28477 - DNA, 1111 bp, Mus musculus
cctagcttcttgaagagatctgtgtcttgtgattagtactgtccacatcaggatttgcccctcagttgtatgcttcctggcactttgttcatcttaaccctaccttcaaagtctcagttagctacctaatgaatacaagtttagcccatggtacttagttaatagttcaaatctagaagaattttaatggagaggaaattccttttaaaactttgtcatagtagaaaaagatgttttacatatatatttcatgaatgacctgccatgagaaatttttaagttgtaaacatctgtaggtatgctgtgctttacaactaaagcagatcctacttgttttctatcgtagattttaacttgtaaaagactagtaattagttacgtgaatgaccaccatttattagatcttcattttatattagctgggaaaagtgagcataattttgatatttgagttgttacagcaatttatactctctttttaaaggatatggaggtggttttaatgaaagagagaatgttgaatacatagaaagagaagaatctgatggggaatatgatgaggtaagctctcagatatgtatattttgagtagagaaatgttaatacctggagtttagaaaagctgtatgtgcatggatgtatgcatgtacggtatagggggtacatgtgcccttgtgtgtatctgtagaggatgttggatgatagttctcattgagcctataattcaaccattggctggactggtggaccagtgggaaaatcctccatctctacctgcaagtacagagattacatgctcacatttccacatctgcttttccacaagggtacaaataggctttgaaaataaaatatttttatgtgttttcagcctgtctattttgggttttttttttccccctctagtttggacgtaaaaagaaaaaatacagggggaaagcagttggccctgcatctatattaaaggaagttgaagataaagagtcagagggagaagaagaggatgaggatgaagatctatctaagtataagctagatgaggtaatggtccctgtcctctcccctcacctttatttactggaactattctgaagcaaaagatgcttttgac

SEQ ID NO: 28478 - DNA, 1202 bp, Mus musculus
tgtgatagtctctgtgggaacaaactaaaaatggtgtcagggatgtcatttgtggttttcagagtgtgagggctagattttccctcggctctacagtctgttagtaatgtaattcatgtagagcactgggttgttgaatctttagttctctaaaaatgaaggctagacatcaaaatgtgatatagcagttagggttttctgcttactagactggaaataggttttcaaatgaaaatgaaaagtgaactggagaatctaaatgtaaatgtgacgttgtctgcagtgagctgtgaggtgacattgtctgcagtgagctatggtgcttgttacttcccttttggcagtttaattgggcttggaaagtggtcactgaaacttttaatttttttttccttgtaaacttagtctttattacagtaagaagctttgttttaagtatttttgcttggaaaatgcatctcttgcatagacatctttttatgtgaaaaatgcactcttaatatatgtctttctttcagtgttcatatcacaaacctcaaaaatgtggtcctaggggaaaaaaatgcttccgtgttgttccaggtcccgttcaagaagctcttccagttcgcagtccaggtctcactccggttccagagaacattccagatcccgtggttcgaaatcaaggtgaatgaggtagcgcctctgtagagcagaggagagtgctcacaggcttcagacggctccgctgcttctctcattgccctgcttctgtttgtccgttctgttgtagccctgggaatctaacgcacctacctcagcttaatctcaccacacagtgttcccaccgcacagcgtgccacacattcccacggttgattaaagggggtggggcttgcacatatagctaagatacgtgtgatgtaggaaggtgaaggcaagttactccacctggtatattaagtttatgtttacagttaatttaaatttgacatacaagtgagaagttatttctgagaggaagaccaaccattccatcatctagcttcgaaacattttatatttcaggcaaatgtttacaatagctttgcctggtttttctcagtttctagtgagtgctctatgtatttactacatctccctgacattaaagaatattataaattacctgtataacaaacacccctcttaaaaccaagtcatgtaggatgttggcttaa

SEQ ID NO: 28479 - DNA, 2359 bp, Mus musculus
tctgggcttatatcaaaaaagtttataagctatcttaggttttaagttctcctgggagcatcaaggtacctagtgtgtgctctgctcttctctggtgtttgcagtcttaggaacagacacctggtctagtgctgtttacagattgttctgctctcttatgtcttacaggcaccacaggtcgtcctccggatcaacacattctggttcccgttcaagttcaaaaaagaaataatgtattaaaatttacatctttaaaaaacattgagtacagtgcatgaagcatattttttaggaagttgatgtctcatttggtcagaagtactacatctgctagtagaggtgcatgcctttattgcttttcaaaacaatacaactgtgtttatttgtgaaactgaaagtaaattgcattttaagccatatactgttccccagataaatgctctgttcattatttacaaccatttgcttcatttaaaaccatcctagcaataacagagtacttttgtttcctactttaaatccttgtccttttcatttctaaatgttctattgacagagacagggttgcctgggcttgcctggacttcagacacatgggcaaagctaataagctagttggaattaccaatttatgttcatatggggttagtagtcaacctggttatgttatttacctctgccagtaatttcttaccagcagttaactacgttgcaaagctgacaactgggaacaagctgagggtgccttagaatcattgtctcttaacagctttacacctcttaatgcaagaggattgtagaaattatagaagaaaaaggttaatcacatcatttcagaatgtttctcaaagtttaagaaatgcggatatccttttaccaaatcctagttaccaaatattgtacttgatcgataaaggatttttaaaaaaggctaaatcatagttaatgagcaaattgaagaaagcttttgaaacctgtttctcagtggcaggctgacagggacatgaatttaagtgaacatttgccttgtgatgtctgattttgaacattgcagatacctaagtaacagaagaattcttatttctgcacaatttaagcaaaatcatttttctccacatctgaaaaagaaaaccatatggcttaaaatgcttttggagttttatttctcaaattaaaatctggtcacttgagatccattttgttctctggtttaaaagttaaaaggtttctctttaacagtctcttcagcagcaaaagcaaggtaagtatataagggacaacagttgtgctggggctccttgtgagggaattatttttcctgtttctcctttagtatttgtctgctgcagtttaaataagtaaagccttctaagatgtttagtagacagatcaaacaaaatgtttttattttaaagtgagtgtttctcttctcaactgatctaaagatgaaaacaaagtatcgtacgtagaaatattttggtaatatttttacaagctttcctgtgtttttttgtcttattttccttgctgcatttactgtaggttgcacacgaactcttactctcttgtaattgtgcctcagacttctcgaaagtcgactttctgagttgcccagatcttctagatccaacgtgttagccttggtttgtttttgtgctttctgtatttaaaacttgaactgtactaggcaaatgcaagattataaatttagctaataggagtttacaaacagttcagatgattatgatttgatttggtttaattgagctgtactagttcatttcataaggaaatgatactgtagacaaatgtaaataaaatccgtgagtcaactatcaagtgttgtttattagaaataaaatagaaagttgtaagctctgactgaatgttctaaactcataatagcttttttttttgtcactgttcactttatcgtgctgactttcaaacataacaaacaagaaggcaacaacttgggataccaagtacttttcatttatgtatgcttgctaccaagacattacatacctcgaccctatggccagttagaatatcagtgtgctcctagaatcactcaagagctaatagttattgtcattcagtgataacaataagtttcttatgtttccactggaatctaaaacaaattgtcaatacaaggccacgtataggcacagttggaaagacaggcatttactgtcattctgtgtccccttcctgatgcctggtgctcagggccaccattgaagattctggtaggggataaggagggctctgctgcctgcttttttttttttttttttttttttttttgacctaggtgttaaaagtgccatcatggctttcttaacttggaagt

SEQ ID NO: 28480 - DNA, 1172 bp, Mus musculus
acgtcgttctgagggaggttgacaaacagggtttcagcctttaagctagagttcgtaactgccgttgacctcctcctttacgaaggcccagagcaccaggtcagagctctgagtctgggtctgaattcagccgcagggcccggcccagggtggaaccctgtgcgagaggagcgcgggcgctgcccggaccctgacccaagcgcagaagcggccctctaacactccgcggcggcgtttcctccgaagctctcgcgagaggagccggggaaagatggctgcgccgggtctttccgagtgaggaggaggcggcggcggcggcgccgggcgtcgtgcggtcgtggtctcttgagctgcggctttcctcgtccgagacgagggccgccgcctccgggagatgcgcgtgtcgcggacccgcggtcgccccgggagttcatgctgcgtgctaggctcgcggccgccgctctaatcgcccggcgccgccgccgcgccggctcggcccgcggtgagcctcccggagcctgtcccgcgcgccgcggcggctatgaccggggagaagatccgctccctgcggagggaccacaagcccagcaaagaggacggggacgtgctggagccctgcgaggaggaggcgacagccgcgctcggcggcgccttcaccgggggcagaagcggaccgggcggcagcggcaagggcggcaaggcctgccataagatcttcagccaccaccaccggctgcagctgaaggcgcccgccgttccgggccccggcgttccggccccgccgcagcacaacgcagtgactgccacctgccctgccccggcctgcctgggcggcagcaaccccgctttagtcgctgacggaggcggctgcccctcgctctacccggtccacgagtgcgtctttaagggggacgtgaggagactgtcctcgctcatccgcacgcacaatatcggacagaaagataatcatggtgagctttgcctaatttccgtcccctcggaggtggggtgggggtgaccgttggcctccgggttcccggtcccttctcccgcaccgtgttttcctctggcggaaaacctcgagtcttttcaggtgcagcgagcgtgccaggggtcagggtgcagcaaggatgttttcttcttttccacctgagcatttcgggacaggttgc

SEQ ID NO: 28481 - DNA, 2432 bp, Mus musculus
gtctgtaatagtttgacacccagtgaccctgagaccttcctatgtaaagcagctgtgagtgctgtgatttgtttttaaagatttttacacttcttgttgaaatatatatcaaataaatatatctatagctatatctaaaacactcctggaccattaacgtaaattctgtgtcttaagagatatgaaaccctttgaaatgcgtcacctctattcagggtggcatgtataaatgttcctttaagctttgttttcatcattatgtatagttctgtaatttgaatgtttaaccaactagaaggaatgcagttttctgaggtgaacagagcaatggtaaccatcagtttcatttacagcctgttgcaatacattccgagggaacgctccctgcagggaatgtggtgcccccccccccccccagcaccttgataacagttgcatttatagctgcaatgcattccaagggagtgctccctgcagggaatgcggtgccccccagcacctccatgcagctcatcgtggtgctctttgtttcacctgaatcctttttcagtggaaactgtttgttactgatcttcctttcatagagcttctatttttttttttttttttcctaaacttgagtttaaaggtccttgttctgttgataggtacggtaacatgcttacagctagccctctcctaagtatcagcactttaaacaaattccaaatttttaaacttgcttcctagtaagtgcatgtaagtcagattatttttaatggaatatggatgcattggtgtcaattttaaaaaataaatatgtattttggacaattatgtattaatgatttcaaaataaggtaaaaacattttatatgtaacaatatatttgttataggctaaacgtccagaaacacacaagattgaaagttctttttttttaagtcataggaaaataattattgatttgtctccaaagtgttaaaatcatgcattactcacttttacacctaaatttttttcatatttattaaaaaatagtttaaagatccaagaaagaaaagtagggagaataatgttcaaatcacaatagtatcatgttttattaaagacttagctaaatgtttgtgtcctgatgagatgtgtcaagatacatttgtcaggttgttacagtgtgactagtagtttaaactttgaccaagacttttattgaaagatgacttatttaaaaatccaaagtgttagccataagatagttctctctctctctctcttttttttttaaatttatttaatgtgggtacactgtagctgtcttcagacacaccagaatagggcatcagattccattacaggtggttgtgagccaccatgtggttgctgggaattgaactcaggacctctggaagaacaggtagtgctcttaaccactgagccatctctccagtccccgatatttatctctttacagttgcatctcacatagtgataccacctggcatatgttgacattttactttttctaagaaaaataattgagttaaaaaaatcaaagccctcaccactccagtaagtgatctatttagttttaagaactgagaagcccaaagctagcatgatgaaatggaggcagtggctgatccagtgacttagctatttagttctgttgtcaatcatgattccaaggttctgaaaggcagtgacactgttgctttaggctcattggcttgaacatgtaggaagaaatgataaatttgcagcttgggatttagaatttcttaaacatgtgaatattttgctgggtaacactggagataggactactgaaaattgttgcactggattgtactactgaaaatggttgcactggattgttttgagacttcaatttacctttaatgagtagtagaatcagattgtccattccaaaatgttttttctctgatcacaaagaacaagtgtatctcttatgatggtggaaaaaaaaggagttaattaatgcaaataaacttttcacaatattagacttttcatgatgtgcctattaatcctgttaacatcagtgtttttgtatactcttacatgcatatcactgttttgaaatgtagataatgtaagattctgtatggtaaatcttaaattttaagctggtattaggggtcccatttagaaaggtgtgcaatacttcaccactcatgtgacctatgtagataggattcccatctccaagaaaacatgagacttgtcctcagtagacattcttgggcagaggagctgcagttcataaaaggagtgtatagcaggtgtcgtggctgagttaaagtatgtttatggtttgaaagctatattagtagctaatagcaagcagttcatcacaaaattacagcttcacaggaactgggctttcaagttaggcatagtggcactgtatgccagctcttggaggctgaggc

SEQ ID NO: 28482 - DNA, 2002 bp, Mus musculus
tgctcacttaggaattaaactgtcaggagtttttgcaaagcaactttataaacagattttaactattctttctagacataaaaaagagaagaagaaagataaggacaaagaaagaagcagagatgaaagggaacgatcaacaagtaaaaagaagaggagcaaagacaaggagaaggagcgagaaaggaagtctgagagtgacaaagacgtcaaagtaagtatacaggctggggtgctgacaccatggtgctgctgctgctgtttgactaagaagtgtttttcctttgaagaagcttattttcccattctccttgtcaaagcaggtgactcgggattatgatgaagaggagcaaggctatgacagtgagaaggaaaagaaagaggagaagagaccaacagaagcagtgtcccctaaaacaaaggagtgctctgtggagaagggggtgggcgaccttcgagagtccaaagtgaacggggatgatcaccacgaagaagacatggatatgagtgactgagcccaaggctggctgcagatggtcctcagtgtcattccttgtgatctctaatgctgtgtgtgttcatctcacctaggtgtatacagctgcacattaccaatggcttcagaacacctgattgtgacctctagtgctttatagcaaaagctataaagtggtacccgggtgaccagcattgccatggttacatccatttgcgtgatcaagcagctgtgcaactgctgctttaacacagatgaacagctgcatgcatctccagcaggcatggattgtctctgtctatgatcctcagtgcgttcacttagaatatttctagagtttgagtccttgccgtgatagagccatgtagggaatgcactgattgcatgttaccccaaacgtcatgaaactttctgacacggtgacctatttaatggtcttgtttgttgacatgacaaattaacattcttagagttacatctgaaaaaaaacatttgtgatagataagccttttgagccttgtggctaaatttttgtggctttgtttaactttcaaaggttatatatgcactaaccttttttgatggctaagtaggctttaaattacagtaaaaatttttcaaagaaaactggctgtaaaatatgatgttttgaattagttgttcactttttcatagctacttatgtttttcccccaataatttatttcacatctctaccagtgaacgcagcccatcactagaaaatgaccttgtcctgattttcagttttcaacttttagtttttaaagctcactgttgaacaagaagtggtggtgcattttaaattgaccttcatgtgcttttaaaatacgacagctctccttgataatgtacttttatttgatctcaagttgtataaaaccaataaacttgtgttactttgattgcagtagtatcttatgcacagtgattccatgttatatgcagactaggtaggcaactgttttcttagttacaagctttacttttgtgcagttaaaacaaaagtaggctacagtctgtgccatgttgatgtacagtttctgaaattgttttacaagactttgataataaaacccttaaactcacaagtcatgcttctgtagagctgggttgtgtttattcacaggttgaacatatgtcagctgcatcattccctgtctacatattcaaacaataactggagtctacccccttgttgtagatgcctgcagaatcgtcaccagtaccttctgtctaaattatggtttaacctgtgttttagtacagaactaagttcatccaacagtgtcttaggaataaatatgatctcacctatacctagcaaatttatattttcactgaaattacagaaatttgcctttctaaaatcgcatgtcgttggtcacatttgtactgtattacaatattaaacaggtagatggctagtgttgggtggcttagagaaaggaagattgagacaagtttatagtctaaaaggtttggata

SEQ ID NO: 28483 - DNA, 1147 bp, Mus musculus
aactatataccaggccctgctgaaaataccacccaacagttttcttctgcagcttatccagtttctcttaagtgccctgtacatattgtatgttttatgatgagatgcagtttcttaatatgtattacagaaatactactggtatttgcaaatatgtagtttaattgtattattgaactctcattttgggggcttgggcacattaacagattaatccatctgtatagggcttttgctgttggatagaatttaaattgtctacataaataatttgtcttaggacctttagattttatctgaatacacagattaggctttaaaagcaggcatacatgtggttttgggcttaaggagttttgaacaagttagatgttgaactgacactatatagcaacatttttttgatatggttagcatggcacatattggaacctaaagcattttactgtacaggtaaggaatgtgccatgttttacctactctcactctctctctctctctctctctttctctctcttttccccctcccttcctcttccctccttcctctctgcgtccccttctctttctctctacctccctctccctccctctcccctttactccccttacacacatttcccctgtgtattcagagaccttcagaaacattcatattcatgtcatgagtcagcaaaagccctactcttgattccaacagaatatttcctttacatactttccttcttttaatttttacaaaatttgtatggtaggtgtaaagaaaatcatagtaactgtaccatattattaacccctaaatcaaactttttttgtcttgtgtatcttgatttttctgtgtgctttatagtgaagcagccgacacgagtcgttgttcataaaacagcttttgaaagttgagagcacacccctggagaaccgactgtgcttgcttacgtttggttcatgacttaaaaatcgagtacaggtgatgaaatcttggcagtgttaacaaaacagtagtgtgtattgtgctatttttttttactctagaaacttaaccattgtagagaaaaaggaaacaaattttcacacattgaagtttcattctgacataaaattaatgataaataatcatagagatcaaactttatattttagcgaacat

SEQ ID NO: 28484 - DNA, 1173 bp, Mus musculus
ttttttttttttttctgaatctgtttcctattttatacatgtgtgtgtgtgtgtgtgtgtgtgtgtgtgtgtgtgtgtgtttcattgtggagtgcaaataggattttacaggtctatacagtgtttaggagtgagcttggcatgaactcttctggatggtcatcctcttcagaaacagcatcagaactttgtctgccaaaaatcatgcttttaaaccacaagttcttaaacttgagtgtccatgaatagggggatcttaagaatgtccctcctgggaaagatattctgattctgtggactcttggtaaacaccagaattcacaattttctatgtacttcttagaagatactttgaaattctttcagcagtagaagcataagggaactgtttttcttatcttgcttccttacacagaataaaatgtatttggtaagtgggacatagttaacttgaaggcagttttttctgactttctaaaaaattgttttatatatacttcaataatggtctctctttatttaagattccttttctgtatataaatgctttgcatgcttgtatttctgtgccttgtgtatgcctaatgtgaggccagaagagtgcactgcatcccctcgaacttgaattattgactgttgtaagtgcccatctggatgctgggaatcgaacatgggtccttcacaagaagtgctcttaaccatctcttcattctaagaattagtttgagtttcgctgttattgtggtggtgggttggggttgttttcaccgaaaattgggccaacagttaccggtgttaaagaatgcctataatttcctaaggtgctgttctgtgggttttaaaaacagaaggtaacttcgttttgaagaactttgtaaatgtaatggttaaaatttaaaacaaaaatgacaggaaaaaacaaaacaaaacaggtgtcctagcactcatgctagaacattcttttcactgtttctgatcgaaattttttctcaaattctagacacattttttaaaaatgtgttcattgagccacataatctcagcaggtaggtgtaggtagaaggatcaggagtcttgcaaggcttgaacttacataacaccctgtcttaaaagaaagcctatccttttagaaacattgagctttcagctttatggatgcagtttgttctgcac

SEQ ID NO: 28485 - DNA, 1840 bp, Mus musculus
tgagctgtgacttcaatgttcttggcatgacccacatccgtttgttcactctcttgcttaaatctattgtattacctagagtgtgcttgtagcaaatcgagaggagactcaaatcacagtgccaccattcagcagctgtttattttgaatgggcttttgtctctccagatttgtatttctctttaaattagaaatattaatgatacctataccataagtctttttaaacaaaacctacagagtcagagactataaacaccttaatgtgactttcatgtgatagttagccagtgctgttggacattgtcataattctagctgtttgcatgcttagttggacttttaaaagacacataagaaaatacacactttatttataaaattgcaaacaatagttttatttcatgaaaagaaaatcactaatgggaaatgtttgattttcctgtttcttctgtttaggacactactgctagatggaaatccattccgagttcctcgagcggccatattaatgaaaggcacagctgctgtgctggagtatttgagagatcgaatccctgcctgagtaccgctggtttcttactctgggcatggtcactcgggataggacagagccagcctccagtgtccaggtgtcactagacagtcactgtttgggctatggtcgttcctactaaatgtctacagtttgtgaagtgatgtgaacatttataatgtcaactgctacagattttaaatgttttataaattcattcctttatgacactgcaagaacttttcatatgatttttataatgaaaaagcaaccatctttgtaaatctgggttccccctggtatcttttcattttccatcttatatgaactgagcaagactatataaggtgtaaagtcagcgaacttttactaaatattattttttggcatttaaaagaaaatcggacttttcgttgtccaggataggacttgctatgtggtcagtgtcagtgcgtgtttatgtttagggttttggttttgactttacatttttttttttaatgttttcagtgtcctttattccaatgtgatacatcttattatttccacaacgttgattctgaaatctccttacagtctgattaaaactagactggtagttttacagtaattttctaaaaaggagttagatatagccaagcttgatttaataaaagtccaaatataaacattgttgtttacactgaaattatcagatgcagcttttcagccgtcctggttcatcatgtgattgagtcgagagtagccagctcagtagaagcatgtgtcagctcagtgtcagcctgcgtgcggagggtggaggtagagaacctataggcggttgaggttgttgatcttaggaaaatcagtgctaataaagatacatgcttcgtgttcataataaaagctacatttttaaggtattggtatagtgtttttgttttaaaaagaaacatatttttaccatgtcacagttcctaagttcagaatctgcttccatagtaaaccagacatcatgtaataaggtgacattttattatttatacaatagacttttatgttattcaaaacacttttttaaattctgaaaaaattgagtacaacagaacctaaaaatggctctgctatacaccacacagcgctattatctgtacaaagcgcatctgcagatgcttccaggctacaccctacccctaacccatagtgtcagaacgtaagacacagctggagagtacagatcacacttgcaaagtcattggcttggcagagttgaaatacaggttagtgggactttgcacataaaattaaacagctttctttcaaggt

SEQ ID NO: 28486 - DNA, 1223 bp, Mus musculus
atccttcccctcctttttaagtttcagaaggaataccccttgatatatcagaaaagatttccaaccactgagagtgaagcagcactttttgatgataaacctacaatcaagcaaccgatgctgaatttaagaaaccccaagcttcacagtctgcgttactgacttaaaacttcaacaaatgaagccgtacatgagactatttctacttaaaagaacactgttgatattataggttcccttcaaaggacattatacaaggaggtgacaaaacagtctttatctgtgcgaggctgctaaagctactggatctgccctaagtgcctaacgaaaggtgataccaaatattttaatcagaaactattttttaatataatgatctggtaagactatcagaattgtaccatccagataaaattgtggtgcttttaaagaagaaaacacgtctgtgtctatatgtatattagctaaagaactggttgtttaagattgcttctttatttataagtatcagatcatgaaaaatattgtacacttttatataatctttttacacttatggtctatttaactttatataaacacacttgtagtttagcttttttaattggactttggtttattggggggcaaaaggaggtagtttttgagataaagtctctctatgtaacctattctaacctcaaactcatattcctcctgccttattctcttgagtagttggaatatatatgtatgtgccaccattcctggcttatatgtgtgttttaaagatatgtttctgtgagatttttgttttcccctaaacattttcttaattatttcagtcttttttccagaaatatattttgaatccttacattcattatctatcctaatactgaaatagatatataattgttatttaacaacagaaatttgtctttcattgtttcttaaatgtaaagaccatgatgaataaagcaaaaattcctgtcttaagacatttatttttttcaatcaaggaaactaaatttttcaggcctgtaaaataatgatatacttgctgacatcaagatatagcgattccttcagctgaagactggcctctctgaaaattctttaagctaatgttttgtttatttttattctttttaattaatttatttattttacttattcactttacatcctgctcactgccctccttcctgtcactccttcccacaatccttcctctatccttt

SEQ ID NO: 28487 - DNA, 1188 bp, Mus musculus
tccacttattagtgagtacacaccatgcatgtccttttgtatctgcgttacctcactcaggatgatattttctagttccatccatttgcctgcaaaactcaggatgtcctcattcttaatagctaagtagtattccattgtgtaaatgaaccacaatttctgtatccattcttctgtggtgggacatctggattgtttccagcttctgactatcacaaataaggcccctatgaacatagtggaacaacatgcccctgtggcatggtggggcatattttgatatgctcaggagtggtattggtggatcttcaggtcaatctatttccagttttctgaggaatctccagatttattcccagaatggttataccagtttgcaatcccacccgcaatgaaggagtgttcctctttctccacatcctctccaatatgtgttgtcacctgaggttttgatcttagccattctgattggtgtaaggtagaatctaagggtcattttgatttgcatttctctgatcattaaggacttggaacatttctttaagtgcttctcagccatttgagatttcaaggatgtgaattctaggtttagttctataccccattttttgattgggttgtttggttttgttggtgattaacttcttgaaatctttatatattttgaatattagccttctattggatgtggggttagtgaagatttttttccccagtttgtaaattgacagtttgtccttctcacagtgtaattgggttaccaaagctttccagttcgatgaggtcccatttatcaattctttatcttagggcatgagccattggagttctgtttaggaaatttctccctgtgccaatgagttcaaggctctttcccactttctcttctattaaactcagtgtgtctcattttatgttgaggtccttcatctacttggacttgagttttgtgcaaggtgacaaaaatagaactatgtagggatattggggtcccccatctgctccatcataaggcatagccactggggaggcaggacgtgggagttttgactgcacttaccctatactgttgatgggtggttgttggcccatagggaagccctgggacaccgatccaagggtgggaaagaacagtctgaagtgaaggacagccagagctggtttggaggtccctgggtctgtgacaag

SEQ ID NO: 28488 - DNA, 1096 bp, Mus musculus
taaagtggatgagtaaaaccataccccctttctcaggataggcctcaggttaaataccttttgcaggaaggagtgtctgggaaggaaagcgtattggcaaagctctccaggcttttaggtacctcattaaaatggagatctgtttgtcccctacatgtggaggggcttagaacattgcccatatgtgattgatgacctcaaatctatggagggctacagctaatgtcagtggcctgatgcccaggaccaagcaaaatgcctactgtcccttcagggtttctggggtttctagccttagctcaaccaggaaccaggctacctttcaggatcccacagatctattttcatttttctacaaaaggactgccagttagaccagaaccatttattgaagatagtttttaccactgatatttttggcttctttgtcaaagatcaagtgtctattcatgtatggttttatttctggttcttcagttctattcctttgatcaacatgtctgtctctgtaccaataccatgcaggggttgttttgtcttgttttgttttgttttatcactgttgctctgtagtggagcttgatgtcagggattatgattcccccaacagttctttgttaagaattgtttttgagattctaggcttattttgcctttccaaatgaatttaagaattgctcattctgtgtctttgaagaattgtgtttgtattttgatgggcattgcgttgaatctgtaaattgcctttggtaggatagccatttttactatgttaattctgccaatccatgagaatgggagatctctccattttctgagatcttctatttctttcttgggagacttgaagttattgctgtacagatctttcacttgtttggttagagttaccacaagatattttatgttatttgtggctattatgtttccctaatttctttctcagcctgtttatcatttgtataaaggaaggctactgatttatttgagttaattttatatctggccactttgctaaagttgtttatcagctggagaagttctatggtagaatttttgaggcacttatgtattctatcataccatctgcaaatag

SEQ ID NO: 28489 - DNA, 1104 bp, Mus musculus
tcctattcctattattcttaggttttggtctttttatggtgtcccaaatttcctgggtattttgtgttaaaactttttagatttaatactttctttgactaatttatttatttattatataatatcttcagtgcctaacattctctttcatttctcatattttgttggtgaagcttgcttctgtagatcctgtaagctttattagatttttcatttctagaattccctaagtttgtgctttttttccccttctatttccattttcaggccttgaacagttttattcctttccttaaactttcttttgatgggggtgggctttctttaaggaatttatttatttcttctttaagacctctatctttataacattaattttaaggtaatttgtgtgtgtgtgtgtgtgtgtgtgtgtgtgtgtgtgtgtgtgtgcttcagctgtattggaatattcagcatttgctgtagtaggatagctgggcttttgtggagacatattgccttggctgatgttgattgtgttcttaagctggtctctgggcatctgagttctaggtgattatggatttaggcaccaatttctgatttagactttgttggataggtgttttgtttcttggtttctgcttcctctcatcttctggtctgtgtgtcctctgattggcaggaattctctgccaggcttgggggctggaacatgccaatgaggagaggagaggagactagagatagtattgagtggagtacttaaaaggtacactgatttgattattacatactgattaaattaattgtaatactatgacataaacatgcacaattgatgcatgtgaattaaataaataaaagcttcatataatccaagagataactgagaaatactgttttagactgactacttacctgagaactgctgctaacttcctctggccactccttgggctcattgtcttaagtaatgatcttatggcctagttggccatcattgggaggagaggcccttggtcttgcaaagattatatgcccccagtacagggaaatgctagggccaggaagtgggagtgggtgggttagggagcagggggggggatataggggactttc

SEQ ID NO: 28490 - DNA, 1214 bp, Mus musculus
ccccgtgctctttccctcgcccgcccccctttccctctcggttcccttccaatcagcaccgggagggcaacgtaatcgactttattaggaataacaggggagtcgggagctaagccctgtgccagccgcgagctgttactggctgtggcttgtgtaaatgcattaggttgtctcggcgagggactagagctggttttagggtctcaacctttaagcccttggcttccatgccgccaccccacccatctctggcggtggacttgtttgaactgaggactcatagagtggtttgggagagtcctggccctctcagcacgaacttggagagggcgtaggagaaagcctgtctgaaaggtgttgcttttgcctcttgtcccctctgccatctcccctccccctctgctttgagccccaagatccagtgagtctgaagcctgaggtcctcccctggcgccaggaggatgtttcctgctccctcctgggctgccctcaggtgacagctcccaggcgccagggagactttctcagtgcgcaccaaaaaaaaaaaaaaaaaaaaaggcttcgaacgtaactgaccttctgccttaggatccactcggaaaactcaacttactcctactgtcttttccacctcatgtccctttctcctcaaggttccggacatccttggacaaacttcagtgccaacttcggagcgggcgctgctgggcagcttagcttccttggggctggctgttgctcttggctgggtggaagagctcaagcaggggtctgtgcttcttgagggagtccctgggcagcgcaggagctcccttgagggggtgagagtagtgggtacggtgtttttcctatagactagggtgtgttgggttagcattccagagtgtctggtaatggcaatctttgtaacaccaggctaagtgttttaaacaaaggagaggagaagcttcaagaagggagttctgaggaggtcgagtacacatttctaagcctctgtcctccatatgggcaaagcacacagaaacacacacacacacacacacacacacacacacacacacacacacacacacacagcttttgtttcgttacgccatgtacaatctctttttctctgaattggattttccaggctcttaatacttctctgctgggagctgtaggcagaagcagtctcagtgattacaccgcggttacaattacacctcttgttt

SEQ ID NO: 28491 - DNA, 1128 bp, Mus musculus
ttgtcccacatttaagttttcttctgttgagtacttgtaacagtcactttttttgtattaaaaacccatgctgggagttggggtgtggtttttggttgtgataatcttcaaataggctcaagcttgttaccatttatctgatgtagatgtctatgaatgcaagaaataaagctaaagtaaagcaaaaaagaagaaaacaccagaagcggtatttagatgaaatggttcgggaatcctggagaaatgactatgaagaagatgaccttgtagtgtcagatgacccatcttcagttgaacactgtgagaacaacagaacatgtgaaattcaaagcaaagcaggttctgaagtagaaaaccttcctgttgaaaatacactggcaccaaagctagaggtcccagagaattgggaaaagtactggaatgaatatggagaagggctgttgtggcaaagctggcaggagaagtatccagaccagacactgtcttctgagccttggaacctccctgatacaaaggaagaatgggaacaacattacagtcagctttattggtattatttggaacaatttcagtattgggaagctcagggctggacttttactgcctcacaaaactgtgataaagatgtttacacatctcacacagaagtagaccagaatgctgagagcagcctgaaagcagatgtaatgactttttcatcttcacctaatatagttgaggatgaaatccctggctcaaatgataatgaccacaatgaaattattactgcgattaacaacataactgtgagtgcagagaaagtagaacagagccagttagattcctctcaacactgtgacgagccgctcagtgaaatcactgggaaagagtgccctgcctctggaggaagtgactcctgtaatggaacacccaaagaaaatgatatatctgagaacagaagctcagaccaaccagctaaaggtaggattatccagacttagtctgacaggtgtccttggagacctcagtctgcttaacacattaaccttaatgaatgtttttatcccatacccatctcataaatactccttccttctgtacctctgtagccagtaaaggcaagcctgaaactctcttggaaaatttaat

SEQ ID NO: 28492 - DNA, 1142 bp, Mus musculus
aagttaacacatgtgtcttaagagcccagtatttccctatattcatccataaacatacacgagcttacaatgtttacttacaatgaacttctacatatacactcttaccttttaaaagacccttgaacacatctcccctctcaaatacaaaacactcacatatctgtgtgcatttatcatcctatacacactgtgacctacatacacatacctttacacacatacccacatgcactcacatgtatttgtacacatactaccctgcacacacacattattagggtcaaaatctgcaaactcatgaaaggtctaaaactaagtctaaattttatcatttagcaatttcagtgattggactgaaggacattttctttctttgcaaaagtatttcttttcacaaatgatgtgacctgatggcactatttgctctcacctgtaattccagcagttgggaagctgggctaggtggatgactgcaagtttgagaccagcttgagctatggagtgaattccaggtgagtttgaactacagagtgtgatcctgtcttagatacagaacaacacaacaatgtagttcagttgtcatcctatactgaaagtagacaccaagattctctgacacaatgtaatcaaggagtgtctgtgtacagcagacattttaggctcctataaaaaagcacaccattttaaaaagaggaagaacactcctccaccatgagctcttcattcagtttcatttctcaaaggattgtagaattgactgcatgaaattcatttttacatcttcacaatgagaaaatatgttggtccctttttatgattatgtgaatggttattatttttcaacttacatttgtgattattattattcaactactggtgagttttaaaagtatatccctcttgtgcttgggattgaacccagagccttgagcatgctaggcaagcactgccactgaggtacacgcccacccacagcatagccttctactgtgggtgaacggctggaggctttgtagttgggcaaacaccatcccagctttggaagacaacagtgaaatgcacagaactacctttttacaccatttattactctcgccttcagaaggggagctgcaggaacgtggggatgcttcaaaggc

SEQ ID NO: 28493 - DNA, 1233 bp, Mus musculus
ctatctcaaaaaagaaagatcaaagaaacaaagaaaagaaagggaaggaagaaaagtctttttaaaagttttttctttaataaaacactggcaatcaaattataaaaggaagtcttaaaaaaatcaataataagaaaacaagtaagactagcaaacaatacagttaggatggttaaaggtgaccccaagaaaccaaagggcaagatgtctgcttatgccttctttgttcagacatgcaggaaaaaacaaaagaagaaaaacccagaggttccagtcaattttgcgaagttttgcaagaagtgctctgagaggtggaagaccatgtctagcaaagagaaatccaagtctgatgaaatggtaaaggcagacaaagtaagctatgattgggagatgaaagattatggaccagccaaaggaggcaagaagaagaaggacccaaatgcccccaaaagacctccatctggaattttcttattctgctctgaattcttcctcaagatcaaatccacaaaccctggcatctccaacggagatgtggcaaaaaagctgggtgagatgtggaataacttcagtgactgtgaaaagcagccttacatcaccaaggcagcaaagctgaaggagaagtatgagaaggatgttgctgactataagtctaaagggaagtttgatggtgccaagggtcctgctaaagttgcccggaaaaaggtggaagaagaggaagaggaagaagaggaggaggagaaggagaaggaggaggaggaagatgaattaaaaactctgtctccttgtgaataccttggagtaggagagagctgtgattgacacatctcttatttgagtcgtgtctattgcccttgttaggtttaataacaaaattttatcacgatcatattttagtttttcaaagtgtcagtggtttacatgaagtggccgtgggtgtccggagcaccgtgaaactgtatgaaagttgtaaatagttccaaacatttttaaaatgaaaaggcactctcacatcctcctcagtgcactttgctgttggtgtgacaaggcaattgaagatgtttctggcattttgttctcaactagtaaggtagtgctaactatatggttattggctagaaatcccgagttgtcaactgtacatatctatagtttgtaaagagaacaaaacgacccagacagattcttgatgctccttgtttggtgtggaggctgtgaggggaagatgccttt

SEQ ID NO: 28494 - DNA, 2206 bp, Mus musculus
ggtgtgtgtgtgtgtggggggggtgccacagctctcgtcagaagacaagtttccgaaaaccactatctccttctacaaggattcacaagattgaactcagggtgtcagctcatggatggagtgcgttttcctgctaagccctgacttctgtcttcagcaccaagtaaataaatgccctgtcacgatcattcttccccaaggtccgtgtcagctaacctcaaaacaactcttcccttgtcagacaaaagcaagctgatcgagtatgcatgcgaagcatatttcgcactgtaaagaccgtaggtgcttgtgcagagagcacctggcatgagttttctccgctccagcttcgtctgtcctccgagtcaggacagggactccgccgagaggccagagggcgcgcgcgcgtcctcgcctttcccgccaactaggcggggacgcagcccggcctcccccacggcgacctcttcgcgggcggggcggttcctgttccgggtcacaaagcacccggatgcgcacgtgctttataagcgcccggcgccgtccggcccctcctttctgagccccggcggtgcgcgctacggagctcggccagcctgctccgtcctgactcaccgctgttcgctcctgctgaggaacaagtcggtcaggaagccgcgcctcagccatggtgaggtggggggcgtcgccacgcggcctggggcgtcggcggggctcgacttgctggggcgccgggagcgcagagcccgggagagggctcccgccgcggcgagggcccgggagagggtcctcatggcggttgtgtaggagtgggcctccacttacgggtcgctgtttgtttttcccgcctgggtgataacaggcatttaaagataccggaaagacgcccgtggagcccgaagtggcgattcaccgaattcgaatcacgctcaccagccgcaacgtgaagtcgctggagaagggtcagtacgatgctcggggtggcttggtgatcgctggggcgcggtcggcgatgaggagataccaaccgtattgagttatagtgatatttcttatacgctattctgagccgataggcgaacttgtttaaaacgcctcgagtcattctgagttaactgaaagaccatgctttcttaacccgcagtttgtgcggacttgatcagaggcgccaaggaaaagaatctgaaagtgaaaggaccggtgcgcatgcctaccaaggtaagggacaggtagactcgagtactggtagactggtggggagggggaaggtcagagtttgattgccaaataaattcagagattaaatttacattcctaagaatacaagttattaggggccaaatgtctggtggcgattgagtatgatacctttcttaaagcaaactccaaaactctctagtaaaggttgctgaaacctgttaacatacagagaaaatggttcagaaatggactaattttgttttattgcagactttgagaatcactaccagaaaaacaccttgtggtgaaggttccaagacctgggatcgattccagatgaggatccacaagcgactcattgatttacatagtccttctgagattgttaagcagattacttccatcagtattgagccgggagttgaggttgaagtcaccattgcagatgcctaagacaactgaataaatcgtcttaatggtcaaattttgctggcttttgttcaggttttttttttttaattcatgtttatgagtgtaaatgtgtgtgtcacaggggtgtcagatgttctttgaaccaccatgtaggtgctggaaacccaacctgcatcctcggagagaacaggttccttaaccactgagcaagtactgaagcattaaactgcttttaaaaatgaaggtgtgctaacagattggtcaggtgaaaaagagacgttaggtttcctgcagggggcgctaagccaatttaaagactaagttgggttagaaaagagcagattgcatccttgatcttttaagcctggggattttgttttgttttgggatagggtcccaacacagaacaggctgacctcattaaatatcaatcttatttgattgcctctgctcccagagtactggaattaaaggcagggaccactgtattagccattctgagttatttgaaatggactctgcaggccatacttggtcaaaattctgccttctcaattacaggcatgagccactatgc

SEQ ID NO: 28495 - DNA, 1156 bp, Mus musculus
ctcattttattcatgctgtcagcagccaggtctacaatacaatgtagctcgatttttgtagacctacataaatacctaaattgtgttgtactcacagagcactcctttgagattatgcaagataatgtcttcgtagcagacacagatcaccaataagcctttctacaatgttagcagcccctggggatggaaggcagtgtcttttgatgagttatcgatctctaaagatggcgaggaattgttactgatgtataagacatttcattacataagcttcagtggtacagatgaaccagaatgaatgtctgtcttctcagaaatcctccttcaacattatatgggatcatgctgctactgtcacttgggatacaactcttcatggtgctacaaacttctgtctcattcagttgtattttttattcataggaaaaggactatatataggtgtaaaggtgtacaatatatttttatactgtgactttaaattgtcattagcaaacttttacaccaccacagtgtattcatgtgcgcttgcaaaaggagatcttggatgtgcaaatgttaccagaacaaacccagcttttgtccacaaagtgactgtaactcagaatggaaagtgggcttgacatagggtgtggagtgaagaacatgctgtgagttactaacagccctttgaatttaacaaaaactgggaatccattagagaaatggattgcatcatgcctgaacataagctgactgctgttttttttgttgttgttggtttttttttttttttttttttttttttttttttagctaatgaaaaagtgtttggactagtactctaaaaatgttctaatggtaaagtttttgagtcaaatagaaatgaaaaaatctgcattccagactgaattttgtatatttttattgcattttaaattgctactctgtgatattgggaaagcaagtggcttatcatgtatatcatgtacttaaaatgtattcacaaactactgttgtatttgtataaaatatagacaaagattatctgtgtgtgtaacctctgtacagttgcttcacgccatgaaacgtcaataatcccatagctgagaaacatacaaccaaacaaggaggatgcttattgtccacacaccaagctgcacacagtcacttg

SEQ ID NO: 28496 - DNA, 1233 bp, Mus musculus
tatttcttctagctgatactttgtgaaatcttttgttttcccagactcaagtcatgctttcagccaattcttgttttgcttttcttttgtttgtatagattctgtatgcaatgagatcatgttgtgaatctgctttaatgataagaagactcaaagcaactcaagctcacccaaactcatacatctaataaattcttgaaattccaaggctggtctctttcatcttaaactcccctttatctccacgtgcacaggctgacttgtaaagggaagaaagcagaaaatctagacaaggaaaaatacccttgggtaaccagccccaagggaagagcccgtgtcagggtgagcacgtggagttgaaggagtcctcaccaaatgggcactgcagcctccctaaggcagattttcgaggagtgtgcacagcaatgctaattcatcacagtgtccatggaaaagaatgctgctggttcaggtggctttgcgagacgctacctctcatcttctcttaggcaccactctgcttttgtatgtgaaaagcccagagccaagaaaattctctttaaattgctttatccactcttcaacgaggcggccgagcggcagacgccaacatgcagatcttcgtgaagaccctgacgggcaagaccatcactcttgaggtcgagcccagtgacaccatcgagaatgtcaaggccaagatccaagacaaggaaggcatcccacctgaccagcagaggctgatattcgcgggcaaacagctggaggatggccgcaccctgtccgactacaacatccagaaagagtccaccttgcacctggtgctgcgtctgcgcggtggcatcattgagccatcccttcgtcagcttgcccagaagtacaactgtgacaagatgatctgccgcaagtgctacgcacgcctgcaccctcgtgcagtcaactgccgcaagaagaagtgcggccataccaacaacctgcgccccaagaagaaggtcaaataaagctgtggtcatacctggcatgtgaccccgggaccaaataaagtccccttccatccaaaaaaaaaaaaaaaaaaaaaaaattgctttatccaaggctacatcttggattttcttatgatatatttaatagcctggtgaatggcagttagaaacgctggctgggaagactcactggaagactgtgaggagggagttgtggttcaacctgcatcattcacactggattcttgtatgt

SEQ ID NO: 28497 - DNA, 1256 bp, Mus musculus
atacttaacctgaaagaaatctcatgtcctcacatatggtcttcagcctttatagtgtggagacatttagagaaggacccttcgtgtcctgtacttgcagtgaccagcaccggcctttgtagtgtaacagggtgttgagagtgatggactacatgttcataggacttgttcacattgacagtgctgccttgaccagcctatgcctgtgtcaccagaactgtgtcctttccctaatattttaaactatttttttatcctctcttcctgttaatgcatttcttaaaatgggtcaacggtgagagaaatttaaatatttacctttgaatacttctctcttttcatatatataaagccatggaagaaataagctgttttcctttggcagagatgccacattttcttaacaggctctgacctgccaacccacttcaccagattgaagtggaggtcagtggtgttacctgaagaaacatctccatccatggccttagaagagtgctttatgcctcaccacaccacttttataaatgctattagtgttcttgctaaggagatggaggatgtctggttttgtgtgtgcgttttcaccatatccccagtacctagagtcttgcacaaactcagtccagactgtgtgttgagttgaactaaagggtcactactagtgttagcatgcttcatacctcagtagtataagctagttgtttcctttgctgatatttgtaattattacccatacacactacattgtttttgttgttgttttaaaagttaggccttttcgctagatactacaccatggtcaattaactgtaaaaaaaataaaaatgtgattgcttctaatgaaataatttccccaaaccctgcccctgaatatactttgacaagtgaaatttgaattcatcaaataaatcagtcatgtctgaaaaggttcctatgctgtgttggtgtttctctattcagtttgcatctttttattttaatgtataattttgtagcattaagagtatctacaatattgggcagtctttagtaactatttccacagccacatgtccagtctgagaaatgttactaaatagtggcttccattctacctttgtacagtcactgaaaacttttgtctccaaatgtatctgcttattctctgttctctcaacatacacaagaagcaatgtttgagaatgggtaacaaagaaaagaaaggaaaaacatctagttgaattttgacccattttgaaatgtgaggcaggaaa

SEQ ID NO: 28498 - DNA, 1253 bp, Mus musculus
gtttacaaggctgtacaaacagtcatatttgtctttgtggtttttctcctttccccaattttatgttttgttttgttttgttttgttttgtttactaaaatacttaatgagatattagtgataactaatgaactgtcaagaacatctagatttatgtttatatgacagttatggggcttgtttcctgaggctcctttggactgtctacagattatgtcagaagaaataggtagggccaaggttaggaagagatggaagattcagaagcccagggcagagagatcagtgagggtgagaggctagcatttgccctggctcctgtcctcaccctgctcttagatccgagttcaaaaataagataaaactctacctatgatggcagtgctcaggtaactcaggcagaagtacagtcaagtgccaaccattttaactttcttgatcatagctgatggccttcctgggacaacctggaaggtcaaagcaagaactcttgagattattctagctgcaactaccagtggtggctgtgtatattactgctgtgtagaaacattagtagtgttttcattttaggtccaagtaagatgtttttagtgatatacctgcagaatggctctgtcttaaaactgtgtagaaaaaccctaatctttaggagctttccctaaggaaaaaaaaaaaaaagttgtgccttacatagggcgttgtgtgttaattatattaataagtgggggtagcttgttcccattaaatgtaagttctgttaatgtgtttttatcagagttgggggaaagtcattaaaattaaataaaactgatggattatttttgcataatgtagcatttatagttgaagtacatttttctaagaattggatcatgatgtatataagtctgaaatgatgtttcatcatttggtttttaattaaatgtaagaccaggatagattggattttaaaaatcttacttttcaataaattatttcagacaacttcatatttctctaattctctggagtaactttggttaaaaaatagctgttagtggtacaaatttggtggtctcttagttaaatgatattgtgtgttgttcctaatgagggaaggattctaatcttgaccagcaatggttgtgagggctgcttcttcacagtagtgaagttcagcaacaacatggttctgtgaggtgctgatatgcatgtaaattgttcttttctttcattatcaaagcccagcaggtatatgtattctgacttcc

SEQ ID NO: 28499 - DNA, 2485 bp, Mus musculus
atgccatcttaaaagcccttggtggccatatgaccactctgaatggagaagagatcagttacactgggtctgatggcattgaagggggacttcttgctagcatcagaatgaaccaccaagctctggtcagaaaacttccggatttagaaaagtcaggacattagtaagcattcctgaccacaagatgcacctcttccagatgtgaattattcggcctgagctgttggaactgttgaagtgctggtggagatgatgcatggttaaggccgccctgaagtactttggaagtacttatgaagcagcagagacttactttccctgtaataggatacaaaatcagggaaattagattgcttcatttctcaagtattgtctttatttttgagactattttcatacagttgtcatatacaaggtgcatatatatatatgtatgtatgtatatatatacatatatatatatttgtgaattaatatctagaactgagtctacactgttatgagtcaccattttcacacaacaaatgatgagtctgcattgttgatacttccatatagaatgggatttgagaaagggaaggttttgttttatgtagagtttagtgtaacttctaggttgtatattattaaaaataaaatcattggtgatttttactcctcagatggaaagcacaagaagtctcatattcattaatatgcaacaagtgctctgttcatctgcctttctatggatttcatagaaatggcttaagtcggttattttctttgaaattgtactaacagattgaccagctggtagaaggtagacagatgactgaattatactggaattgtctgagtgttgcagttgattttcatttccctatgaaaggggccattgttcatcctttctccactgatcaggatttagtcttcaccaggaaagttggttcaagtttcagtattagtctcatgatatgcatattttctcttcagagatgaactatgttgtaagatgctctaagaatataaatgattctatgattgttgaaagttacttgacatatagattgaatagttttagctatttttcaagaattatgttttgtttatgtaataatgtttcttaatttttgaaaccttgccaggtttatctctagacattctcttatcatcaagaatggctatgacttttttcttagctattaatagacttaaaagaaccaaattatcagaggaattacttttgacataattctagttttctcattgataaaattttttttcccactcagttgacagaatgtggttaaaaaaagatatggtagcatttgtcgtgttgctataactcagaacttgtttttttgagctgtatttgttggtgtgagtagtttttcttagtatggcctagaaaattggtataaataataaatcatggtttttttcatgtggctttgatgcccttgtaaacgttaatgaggaatttctcattttttcttttttaaaaatgtaagcctaaagaaaatttctatttattttcctatttcagagctaaaattgagcaaaggatggacattctagtctggtatattgtgcatactttaggtttgcatgtcatagagcccaaagcctggcactcctcagcaggggactgaatcttaatgcagcacaagtgcttttccccgtacttaacagtatgtaacagtatgttacagtatgtaacggcactaaattggcctttgtgtgatgaaaattcagttttggtgtttggaaacttggtattaatttaataggagttgttagtttttaaaacagtttcagacaactagtctaatcaccagataatatgacaggagaaaggaaatcctgctttctctggcgagatgccagagcagatcgtctcaccagaatcctgtattaggaacctctgtgtcactgtaacatgtcaacgcagaaaatagaacttaattgggtaattttttaatgtgcagaaactttatcatttattacaagtaaaactagttcatattttgtaagcacaattgcttttgtttttagtttcattaacagttatcactaagaataggaacattgtgtgttgggctcagaagcaaagatgctggctgagaggtggaagtagtttttataatttgttcgtgttatctaatgattttacgtacttttatagacagttcattttttaatataattttgtttcaaagccaatatacattacaaggaaaacagtatttatttatatgaggtattattgtgccagaacatatctgctgtggagtatgtaatatctctcagaattaatgttaaattgttttatttctaaaacataccaaaacaagtttctatttagaaacttacctgtttttcctttagtagaagcagagacatccacagcctcaacagatcacaccagctgtctcctcctcactcacgatatcccagctccatttttttttctttttttggctctctttcttagctagtatgc

SEQ ID NO: 28500 - DNA, 1346 bp, Mus musculus
ttgaggctgggaagattgcttggtggttaaggacactggctactctgccagaggacctaagttcaatccttagcacacagagtggctgacagtcatctgtaagtccggttctaaaggatctaatgcccttttctggtctctgaaatctctacatccatgtggtgcacacatgtccatgctgaaaaataatacccacccatacttttaaaagaaaaaaatgaatatctaatctattcgggctgatataataaagcacattagactaagtaaattaaaaccagtgggagtttattgtttccagttttggaaggtggaaacaactggatgtcatcagcaggctctgaactgtcaagggctccttcctcaagcaagcagctcctgtggtctcacatggcagcatggaagaagcagctgggctccttcataggcacactctgccctcaggattgggcaggaaagaacactcagaggctttcccagtgccattgccttgctcactggatttcaacctatgtatcgtaaggggaacatacacaattggatactacagaaaaatgattcttccagctaagactattttaacataaggggattaaatgagctattcattgagcagattggctatagtttaatttctatattttgtgtaattaaattatcacaacagttctagcctggtgcctcctacttaggaggctgaggcatgaggatagcaagttcaactgggttatgtagtaaaatattgcttttaaatgaattactagcttaatagaattgtcaaaaccagttcttttctaaatattcatataaaatacagaaatgtgaaaaaatcatcataatccattcagaaattagttcattgtataacttgggtcattctgagaagtgctcattttatagttgaggacaataagatacaatattttaatctgttttaatttttaatatccaggcattaatcattaaaaatgaatgtctgagttctggttccacatactgtagctgttttggttttgttttgttgttgttttgtagtgtacagtgtataatgaaatttctctttagagcacagtctcctgtcaatttaactgaaatgaccagaaagcctttaccatatctgtatactctatatgcatataattgctttcttgctcacttagatcagggatccaaagaaggagacctttgtccagatctcaccccaggacaaaaagcagtccattctttctcttcttttgttcctgtggtgctatagggtatggaagcaggtcctatacatgctaggcagctgcactgctggtccccacacccagcaggtcagtgttcctgtcagcaggcaccacctc

SEQ ID NO: 28501 - DNA, 1198 bp, Mus musculus
ttaagattttatatatatgagtagatatataaatgtttatgtctacatataagtatatagaatctagaaagggggtggtgaaagggaagaagagattattaaagtcggaaaaagagagcttgaccagtacacgtgagatgagagaagggaggctgtctgtggcagtaaagaacagaagggcagagaggagcgtgttgggggagagacatcaggaggaacatgtgtgtatgcagatgacgtgtgtgtctgcagatgacgtgtgtgtatgcagatgacgtgtgagtatgcagatgacatgtgtgtatgcacatgccatcatgagatccagttcgttcctggattcccatggtgggtgctttatggccatctgtaactccagtcccaggagctttatccctcagggacaccaggtatgcatagacaaacaaagaaaacactcagacaaatatgttctcaaagttagaaaagtgtgacaaaatctatgtgaaccccaaaatcaccatgaagcattttatgttagcatgtagctcatgatgtaattattcttatctctgtggactcttaactgaagccttccttctctcctttgcagagagactcccctggagcttcagcgactggtccatggcgcccaagtgaacctggatatggaggatcatcaagaccaagagtacataaaacccaggttgcgattcaaggcttttagtggagaagggcaaaaacttggaaggtaaaattcctctagtgagaaaaccacttctttgctccaaatgacatttcttagaaaataagaaatcaaaatagcttgtaaagtaaaaactgcattctgagttatgacgactttgctgctgtaagtgggcgtacagcccgcatagtactagtagccagtacccagaggtcagtacttctcgcatacgttaaggtctcttgttaacagctctttaaacacacactgctcttacagagggcctgacgttggttccccatgcccatggcatgcagttcacagctacctgtaacgcatgcagttccagtcatccatgggtgtctatacgtgtgtacacatagccacataggcacacacacatgatgaaaagcaaatttttaaattcatgaaaatttaaattaatatgtggcaacttattactccattttgaaatgacagtaattttcacacggaatgatggagctaaagaat

SEQ ID NO: 28502 - DNA, 1157 bp, Mus musculus
caaaactttgctctaatttgaagagaacaggcctctagtgtctgcctcagcagctgtcacgccacttaacactcgctgactttctagaaccctgccatggtgttactgtaagattttaaggccatctgttctgtttacaatatgaaattctgtagctgtaccttcctactggcccaaatcttttggaaaaaaaattaccaaaaaaattcattcaaaataaccttttgaattatttaagaatatatctagtcaacgatgtgaaaggcctgtctatacagtgacagcctctcccaatgcagaagatgctgggaaggaaatctcagaagacagttgatgacgcaaagtccatgcaactggattggcagaattactataaaaatacctatactacatacaacaaaattaacttatagatttaatgcaatacctatcaaaattttaatattggattttacaggttagaaaaaacaaaccaacaattcctttggaaccttaaaagagcacacacagcgaaagccatgctaaggaggagcaagcactgctgggcttcacacgtgcagcagggcacccactgctgcagccctgaacaaagcctgcagtggccataaagacaggatcactgcaacagcgcagagagccagacagatgctaatgctgtggccacagaatttttggcaatgaagtcaaatcatataacaagggggaaaaaacatcaattcaaaaaataacactagtaaaactgagtttctactgtggatgagggaaattagatgaacttggtacaaaaataaaaataaaaagggaccagaattgcaaaacctaacgtagaggaagccacaggaagaccatcaagcagctggggtcagcaatccctccctctcggtagagcagcggtagtaaaggaaggagccccaggcaggcatcagcagctgggaccgcacggaaacaaagtatttccgtgcaccagaggaaccaatcagcaaagcaaaaggccatggcatggacagccttcaccacacttcaggcaagcagctaataggcagacttataaataatcgcagaagttaaatactaaggagataaaactaccaatcgacaaatggccaaatgaactaataattttttttcaaaataacttaaaatgtccagtaaccatt

SEQ ID NO: 28503 - DNA, 1195 bp, Mus musculus
ccacactactttttaaattcacaaatcagaaatggagttattttttagttaagcattttaggagtagaaaaggcatctttgagtggttttatatggagaaatgaaactgacctaaaagcaattgtaattatgtgttctaaccctgataaaggaagtgtgctaagggtagggtctttctctgtggcccaagctcctgtctcagcttcctcctagtgctggcataaaacgtagcaccgctgctctttatgtaggctctaaaagtcggtcttaacaatataaaagtaggaagtcacatgatggagaaagagcttcaggactgatcagttaggagacatttgtttctgtgatatgtaagctcttcaattaataaacaagccaggcctccattgtgccatttgaaagcatgtcaaccttatttaagcagccacttgatgactgtagtgtttcggcaggtaagcaagctcactcacactgaggttaagccgaggcagtggattggttcctaacttttcttacttttgctggaaacatctttgcaggttccaaagtgtttctgaaaagctgcacatggagtgcaaagcagagatggtaacacctctagtgacgaaccctgggcatgtgtgcattacagacaccagcctgtatttccagcctctcaatgggtacccggtacgtagatctcggggccatgttcagtgcttgcttctgtctttcagctaaattttccaggaacctgatgttatagttactatgccctcacatcttggggaaggtcaaagtcgtttgacaaccctgtgtagcagtgtggcttcctagtgccctgtgtagttggagtagatgcacactcccccgtatttcagccattctgaaggaccttgtacccagtagtgcgtaaagaaagtccgcccctcctgactatggatgagacttctcctcctgctgggaagctcggggtaagacacccagaaaaggctgtggtgaatgagaagctgatggtgagagggggactgcttgcttctccttcactgcagacagtgggtctctggcttccgtgagtgctggtgtaaggttctcacagctagtgtggcatcatgtatgatgccacagtcagcagctgtaggaccgtcccctcccaccatctaggaaatcatcttctctttgagaacactagacctaaaactatgccaggaagtga

SEQ ID NO: 28504 - DNA, 1176 bp, Mus musculus
gcaccacccacagtggactatgctctgccacatcaatcactaatcaagaaaacagcttggcatgcccacagcccattgaatggtggcaattcctgaaacaggcttccctctttccaggaaattctagtttttgtcaagttgataaatactaaatatggcagttcttttaaatactaaatatggcagttctttaaaaaaaaaaaagtctcttttctcccaacccctgccctttgttgctgtagattatatgtcaagaaggtgaagggagctgacatataaaagccagtattcttatttgtaagatcaaatttccttcccaggttctattattttcattgaattttaagattttatacagatagatagatagatagatagatagatagatagatagatagatagaaagaaaatatgtgattcaaagaagtaacaatcaccaaaagatgtaactgtagcacacaaactatatataaaaattcagtaacttttaactgtattggaaggctgtggatcaggtttagcctttgacaaaaaaatgtaacatattcccgaggcggcggtcgtatggggggtggatgtcttggagccccctctaggcgcccatgggggggaaaatgtaacatagaagatcaattaaacatcagtgcctaggggacctgagaaatgactcagtggctaaatatctgggaatatgtaaattttggatctgagaagctacatgaaaaaccagatgtagacacgtgagcctataactccatcgaagagtggatgaagcaggatgtttggaagagcttgcttttcagctagcccagttccagggtcagtgatgatctctaatatccccttctagtctctatgtatatgggtatgtttagatacccccccctctctctctctctcaaacacacacacacacatataccagggtctttgtttgaaatgatgtgcaaagctattgtagaatggtccaaaggctaaaaatattttcccaacttgagtgcctctgaacaacaggcagataaaaacagaggccctagtctaataaaacatttagaacctgccaaaagaaagttttttctgaactaaccattaggtataaagagtcctgtgctgggaaagcagagatcgaaccacacagacttcttcaagcttgtagctatgctggcagtcacagca

SEQ ID NO: 28505 - DNA, 1134 bp, Mus musculus
gcctgactgcagcaggagtaaagccttgcctccaacagtgcaggtggcagttattaatcttcatcaagaagcattttaagtacatattgtggttttggtatgaattgggagtaaggcatgctaatgagggcctgacagtcaatgatgggcacccagatctcggaatcataccaatctaagacaggggtacatgccaagagtccgtggctgttaataatacaccacagagccatgttttgtgtaaaataaacacaaacaagctgcaggtacgctcctatgacagataaggatgattcgggaagatctaagattttctaagacaagtgaggccgccagccaccataactcctgggctggactatggagcataaataaattttatgcctcagtccagttgttttttttttttttttaatattatataaagggggtaagatgtacccttcttcagcctaggcaggttggttcaaatggtctgaaccacatgctatgctttttttcatcactctcctttgatgttacactgcctgccacctgccctgaggccgaaccggttttccaagattttctggagttaactgcaaactgtgaatttggtgagtttctgctaaaaggctgttctgacaacttcacatctctacatcaggaaacttggtgtgactggagatgggcttccctctttataagccctctttattattaaacatttgaaccttgagcagactagcttgtcttggttccattatttctctacctgcctagattccctcttctttttcagctctggttgcctcccaggctcaaacccggacatgagagccacaggctagccccaacaagctgtttctaattttccatcagaaggccttcctgtgctttagtcaaggccaggaataaggactctcacctgtgtgggaacctctctccctctgccccctctcccataacccgaggccaagggtgtcaccccaggggccctggtttcaggggctgccaattgtccaccccctgttgagtggggtcagtggcttagatgcccacctgggtccaagtggaaagcatctgacagtcctcccacattggcctgcccagagcataggaggaactctggccagacgtgggctccttccttcc

SEQ ID NO: 28506 - DNA, 1152 bp, Mus musculus
gtgttctccccagaagccaaataatgaaccacttagccagaaagtgtccatattttacaaattagaaagcgttactcattttatggataccgtcatagaacatgtggttctgaagacttaaggacaaggtaaggtctcacacacacacacacaaacacacacacacacacacactaactgcagtaatgaaaatctgaggcaggagattacaatttgggactaaacatggcccatccagtaaaatcctatttcaaaagtaaaaataattttttgtttgtttgttttttcaagacagggtttctctgtatagccctggctgtcctggaactcactttgtagaccaggctggcctccaactcagaaatccgcctgcctctgcctcccaagtgctgggattaaaggcgtgcaccaccacgcctggccgtaaaaatagttttaatgtacaaagatcaactatgtaagtgatattggcagaggggcacatagacgttcatttgaagctccctgcttacctcatttctcttccttgattgcattctagaagtattcccatgttctgtgatccttacagaaggtagatggtttgcatggcagggctgagttctttatgacatcttatatccccaccctccaaaaaacaacatttttgagatataggaacttggctgtaaagcccagatttgcctaagactatgtaacacaggctggcttcaaactcacagcaattctcctgcttgagcctcccgtgcactgggattacaggcatcagcagcacagtgttttattggttctttagcagtctttcagctttgtcagtgtacttgcttttcatgctttacatttcttacattgttcaaactacaggtttttgtttttttggttttttggttttttttggtttttttttttttttttttttttttttttttttttggtaatgtggcattaatggcattaatttctatatttctgtgaccaagtagtgaagtagtacctagaacatagcaggtgagcattcagtaaatagtttttatcttttggaggggctattatattttcagggtgtttagttgttggttgttttttaaaaaaatttttaaagatttgtttattttacatatatgagcacaccattgctctcttcagacacaa

SEQ ID NO: 28507 - DNA, 1868 bp, Mus musculus
gctgtctaaaagaaagattttaaatccagttagagtagcgaaggctttggatagctttactctttgataagcatcccatatactaattgttacaagtcctctcctcgctgtgaacctctgacaagcagcactatctgatttctgctgaccagttctaaaacgacctctttccaacacatctcctctgtgttgtttttaaaagaagcaacaaccccatttcaaaaaacctacttaaaatattttttagagttgtttggcaaaattaaatcactaagaattatgtgaatttttttaaaaaaaataataatctagtctactgcctggttgagtctgctttatttacagtcctgttctcttgtacttcaggcaaacggcattaaaattggccctcagcacgctgctaccaacgcatctcatggaagcaaccaaggcggacagcaggcagggggaggctgctgttgagtctggtgttaccggctagctgcccagtggagccacgcactctgtcaccctctttcctcatgctcagctgagacatgaaactattgaaatggctttatgtcacaggagactttaatccttcagattcttgtataactttgaataaatggttaatgttcacttaaaaagacagattttggagattgtattcatatctatttgcatttgatttctaggtcaattgatgtgattatttttgttaaatgttgtcttgtgcccttaactacgagctgaattgtattaaacactacaaagtcatggtgagtattttaaatcagtttgtgtagttaggtttcccaacacctgtggttacctaatgtttaatattataggactgtcctcaaaaagtttgtcaactttcaaggatataaggaaaaccagaactctttgacttctgtatttatcatttgctttctgtatatatagtttaataacctgcttgggtgtgatttgccaagcttgaactctaatgcatttgcataaattctaccactgttcggagcttgaagctacagaagcattgttaggaattgcttggacactgacttttcaactttttgacatcgttaacgagcatgttcatcttttcttgtcactagtccaagaaaactacgcttcctgtgtattactaaaggctgtgtgtgtgttaacctgttttaatgccaaaagctatttgtccacaagttcttgagaccgcttcacaaaaggatttgtttgccttaatgagtgctgttgggtaaaacacagtgtaatgagtgggacgggcagaaacagaaactccaacactacacaactcccaagagcaaggcccactcggagaaggcacgccatgccacttactcttcccttagacacaataatggtcccttttcttcacacagtttctaagtatattttcttgcagggcagtttgtcaaccttgatgtacagtgactgtgtaaaatttttttctttcagtggcaacctatctataatctttaaaatatggtaagcttactgtctgttttgagggggatatgaaaataaatctaccagatggaaaatcctgttcaaagtagaaaagttttagttgtttactcactgtggtggttttatcctctcgtttttctcccttggtctagaatgaagttgttatagcagtgcaaaataaactcctatgtacaaaagtgtccttctcatgatgagcacattcactgtcctgtcagaggagacgcagcaccagtaccccggtgaatcgtactgtaatggctgccttttatggatcttgcatcaatttttgtatcatatgtggtcatattttaataacaaccagtcatggaaacaaatacaactccagtggtcagcatgcagccttcagtgaagaccct

SEQ ID NO: 28508 - DNA, 1171 bp, Mus musculus
agcctaggtcctctggaagagcagcaattactcttaaccactgggccatttttccagctccttctgtgtgtgtgtgtgtgtgtgtgtgtgtgtgtgtgtgtgtgtgtgtgtgtatatttaaatccattctggtttgtagaatcatccattgcttgtttggaaaatactagttcccgtgaattgtataaaccatccaagcccagacatttcattatgctgtattttaaaaccagaaaagtctttaaaaagctattggaaaactgtcaggttcatggcagtagatgctggttttccaaaattttgatttttgcttgaatgctcaaattttatcattggcaaacagagctgtcaattgttttccttgaagtgacagattatttcgttcgtttctgtaacgcctgccaaatacttaagtctgcaggcccatagtttgtcagtcactttccttccagtgacaatggtgtactcagaagagaggttgccctcagtcatgcggtctacttctcagtctgctttgaaccaaatggcttctgacagccactagaaggttgcaagtctagaggcgggcaggtctggagcacccctgggttactcaaggacgcgagtgcgttgcaggttaaagagaaagttctccgagcacggcagacttaacactgcagaagttattagaatggatgctgcttctgggcagcagtgctgctggagactggcactgcatctggtctctgccaatgggcagaaggttgtccgaatacccctttgcttggtagcctgctgcaaagagtgccttcctgtgcactcctttaagatcggatggcctcaaaatgtcagcctttttgcaattgtgtgtaaatatgcttgttcagtatgagaagctctgattgccaaagtgtgaaaagtgtggctatatgctttagcagctctgggaagttacctcagtgtgtccctgtggtagcgaactctgatccctgtgtcaggactgggctcttttcgcgactgatgggtgaccttgaacacagcactctcccaccttgtcttcataaggtcatggatggagttcttcatcgtccatgttctgtgtacaggtttgagaggcattggatccccttcacaagggtggtaatagtggttccctgtgtgggggaggatgccttgccccgcagcttcttgt

SEQ ID NO: 28509 - DNA, 1179 bp, Mus musculus
tagagggaacagtgtcatcttcctgacatgcagcatcataaacctaatgagacaggttcgctggcctgccttccatacacgggcattttcagccgcccatgtgagttcctgcaggaccaaacctactgaaggtggggggagggggggcctggagaacccctgcagaggtcataaagaaacgttaggaagccttttaaatgtcaagcaaaattagatgttggggaagaatagggtcagaacccctccctggcatcctgcagttatcctgagccctctctgtctgtgtttgtggtgagtcagtggcacagccagggtataggggccacaaaagctgtcctaaagtgctgcaccaaagcaaggtctgtttagctcgccacaaatgatgtctgggagacaagctggctgtgctgtggcaggggctgtggctgtgttctgacagtgacgggtcttcctttgttgtcacgcgtgtcctctgtgtgctggtggctgtggcccaggctatgagaagtacaattccatgcgagctgaccctgcactgtgcttcctggaacgagtcggaatgcccgatgccaaggccatcgctgccgagcagagagggacagacatgctagcagatggtggtgacgggtaagaaggacattctaaaattttaataaactttatgtcagcatcacatctactggcaagagttggttcttatgctgaacggggccctctcttacatctggtttgaatttgatgctaccagtaggttctgcctatataccataggaactattctaaacaaagttcacacacacacaaataaatgaaattgtctcgtgatcaccccctcgccaccccgtgtaactgctttctgaatactggtagagtccatttgcagtgcagacccagacttggtattggggaggttgtccctcttccactctctctccctacagactgatgtgatttaaaactatctttcttttttttttttttaattttatacagtggagaatttgatagagaagatgaagatcctgaatataaaccaacgagagcaccattcaaagatgaaatagatgtaagaccttaggtgtattggcttttacagtgccagtaacaaattatattcccatatagaacttgttaaactttatagataatggccttcctctaaaagacaaagtaaaatcc

SEQ ID NO: 28510 - DNA, 1223 bp, Mus musculus
ctctatactacatatacatagcgaaatgcaaaccatgtgttctcattgttaaactatcaccttacatccatggaataaaatggaggaaatgagtgaaaattagctgttaacttagtaaatataacatgttttttaaaatatggtcattacagtaggattctaaatcttgccttgtgaaaagccagcagtaccgttacttttgcaagtgttggcagtggtgcactccaacagcattttaagtacttggatcccacgttgatcttataaacacaagcaataaaagattttctaattcactttaatttttcctcgctcttacttgtgtcataagaaaagaatttccatccatgtcttggtaaacatttttcaaggttattattttacaattctaaaggtctatacaaaatgaattggtagggttttttttttaatatactatgatgcaattgtttgggaaatattttaaaattctgtttcaattttgcttcttcaaggttggaacataaaaatagcttctgttactattctctgccagtagaaaaaaataataaaacagtagatcaactgaggagtatacatctagtttgtagctcagggctcaggggttaggccctgggtttgatcttcagcattggagggagacagagaagagagggtaacagggagacagagaaagaaagacaaaggaaaaggagaggagtgtaaggaggagagaagtgggaaggaacagggaaagagagagatggagagagggaagtggccatagtcagtaatgttttgtgtttatggcgggaagtaagttgaattggtttcctcttttctttaggctgttcagctagtaaatcactctaccaagtgcttaaaatgtaaagtattttaataagtgttagcaattaaaaattttgacattatcactctggtcatattagtaagtgtctgtgtcgtacagatgctagagaataaggtatctacacatactcagctggtctcaggaaacatggcacagataaaatatcctcccctttgctgttctctgtctgacttcctatgcatgggggctgggatccatttctaaggagaatggataaggaagtaggctggtctttggcatttcatcttgcattcttggtcctctttagcttggtacttacatgctgatccatccttaagggtctttctgtgagatttgaatgcctgccccctcagggcctttctccacaggt

SEQ ID NO: 28511 - DNA, 1179 bp, Mus musculus
caagtaccatgactcttcatccccgtgccatgcagctggagacctctaaggttccttctggattagaactcactggagggaacatttgccttcctgcgattcatttaggaggcctcttgcttcatgtcacccatgacagcacagaactagtgcctgcatttaaggggcagaaaacttggttgtgttgtctacatggctggccaaagatatttttctacatagaatagtgtctacatcaatgcacatggaggatatactatatagagaaactgtgaatgaatcactttagtttgtaatttttctatgcagttatatttttctaagtagctaaactgttctgtcaccatctacccccatgttttcgttgactttaatgacaagaagtataaattctttacgtctgttaaatagtaattttcctggtaaattcagacatttctttttttagaaagaaaaaaatcacgtgtgaaagaaaagaactttgttttcctaacataaattggaagtcatgctaggatgcatgaactgtgccaacacttgcccttgggtctacctgtgtatcctcatttagactcagtgtctccccctttctctgtgctaatagtacaaagttgttatttctaagagcaacatttctttttaaattacactgagcaaagccatagaaacattttatgtgataggaaaataccacagataatggagcttggagagaaaatatcacatggaagtgaaatttcctgctcagggtcagggacccaggtagcctggcctctttgccttctatacccaaggcctggagtctgcagttcctgcctgctgtagatccacttacgtgtcaaaaagaaggcctcttagtctctgagagtctcttcactattttatccatgtaggaatagcagcatagaaagtgcccagggatgctagcatcctaggtggtcaagcatccttgattatgaatttgcagtgcttttccatcttcctcccctcagaataatgtcagccatctcattttatactgaaccagcgttgacaggcatgtttgatttgagtgctatccatggctgagaaagagcagtagaaagccatcttgctcctcaagatgatcattagtaaagcattgctgcattttattttctattttaaaattaaagataactcaagccctagaatgtaatg

SEQ ID NO: 28512 - DNA, 1586 bp, Mus musculus
catgtggacatgttatagcactggctttgatttttttttttttggtagtgtttagatgttttatttgaaaacttaatattttggttcatgatacaaatgatcagtaatatgcttttcaaagtaaggagaaaattaaactccttgtggggacacagggtaaacagtagtctgcaatacatacacgacctcatgcttcagctaaatcaattatataacaactatagtctggtcagtatctatttacatcctgacagcgctgtagattactgtcctatagcttaagggctgccctgcattggtctaaatgagtaccactcgcttagccctgttgtctgctcagggctctcactagggggaagtccatgatcccctcaggttgagggaattcagggtgtatgagaaacagtcactaagcccagagtttgctgctgggtccaagggatgagcctcttcctttatacactggtgtttttattatattattagtgtggtttgtggctaagaaatagtgttgtgatgaaaatttgatttgttagcaaagaagacagctagctgacatgtggtttgaggagagccaccggccatttaaacaacgtcataaggctatttcttttgtgggccaggggcagctcttgattatggtaacactgttttaaggtaaagtgatttttttcccctttctcaaggataaaatcagagtaagttttatgattgaacattgtgaccacagtgcactgatgtccacctgctggcacctcagttaagtcaataagcaataatttttaaagctgtgatatgtatgctatagggcctaaactgaattatattaaagctcttcatattgcaagttgtagaacactactttttataaagccatatttttttagtgtgacttagaagtgacatattactggtaaatggctgaaatcagtttctctgaacttctgtatgtaatctgtttcaaaactctgggaagtgagggttcattgtggccaacttcagatactttgataaaaaataatatgtgaattaattaatgagccttgtctctacaaatatgtgccatgctatgcaacaggggtgggttgtctgaaaatatgtcttttgtgcaatgttgcttaagagcaataaaatggagatgaattcttctctagattgtcattattttgaactattttaaaactttacatgatataattagcatatgttatttaaaattaccacaaacttattgtccaaaatcataaagaaatgcacaccttcatcctcttttcttaacctatgaattttttgcctgcagtactaagagtcaagaccaggaccctgcaactgttctacttcatagcacacacacacacacacacacacacacacacacacacacacacacacacacattcatttcaagtcctttagttacttgagacaaggactcttttaggttgtgtaggctagtctcaaaatttctgtatagcccaggctagttttgaacttgtaacttcctgtgttagccttgcaagtatctgggactacaagggggaacaatgtcacactctgtttttaatctaggttccatgaagtggggc

SEQ ID NO: 28513 - DNA, 1071 bp, Mus musculus
tacatatctgctgactaaaatgctaagcctaggttggcttgaatgtacaatgtgaggtgtagcaatgtgactgagaacacagccagttgctctccacattaaagcacttgtagttgctacttggaatttgatagttctcaataaaagttctcgatataacctgatgtgtgtattaataatcataaatgacttatctgttcatcatatttaggagacctctattggctcgtcaggctcctccctgctcagtattcagtgtgagcagcacggtgagatgcctgtcctccaggaggtcacattgtaataagaagtgactttcaggcagactggcactggccagagtgagaaaaatagctttagaggggacagtggcaggggctcatgggtggctgcggatgagtctgtctaggtaggatgccaacgtggcgccttggtcactgtatttctccttgttgaagaccttgaagcagatgggctggcaggagaaccacagccggaggttgaggacttcctcacagtgaccgacagtgatgacagatttgaggacctggaacccgggacagttcatgaaggtagaacacatttgttttagactagttggtcatttatagtgtaattattaaaaaaattcctaaaattcctttaagagcgatatttaatcttatctaaatattttgaagatgaagctctaaagcaaactgatatctgatttgtttcattaataagtgggtttctgatactagtaagggcagacttttttcttgtattcctccacctcggtgctgtgtgttatatgaagtcatgatgaactgcacttgaactctggccctggcttttgttccagcagcgctgtctcccctactgcacaatctgtagcttccatagcatgtccccagactgtcttcttacatagttagggatcaagtgttctcatcgaaaggagaacttactagcttctagaacccttagctactattgcaatgcaaagacagtcatcaactgtcattaactgagtatagacatggctgtgtttccatgaacctctatctacaaacccagctaatacatagt

SEQ ID NO: 28514 - DNA, 1239 bp, Mus musculus
aaaacagattgcctgtccccatgtccatgccacctgctaaagacttggatgctgtagcaaaatgaaaactgaacagctttggctagttgaaaacttacattttttgataatacaagataacagtgagaaatatcaaaacgggaccagtattttccttggtacaggaaggcaagaacctgaagtttcaggaaggcagatgacataccagtgtctgctaattagcacgagaggcaggacatgtggccgtgcagactcttttgacaaaggacttgggaggaattctatttaaaagcaaaaccaaagtgtaacccaatcaggagtttgcttgtgttcaaaattaagattatttaagcatggtgattgagtaagcagaagcttctcgtgttcagagtcattaatttatggagtgcactttgagaatttagttaaaacgtgtttctgaaatgatttatcaaattactgtcaaaatggtgttcagccaagtatcttcttccgctgtgatgacacatgccatttttctctctccacacagaggcaaagcacggaggacacaagaatgggagaagaggagggatttcaggagggtcctttttcacatggttcatggtcattgcattgctcggcgtctggacatctgtggctgtcgtgtggtttgacttggtcgattatgaagaagttctaggtaagaactagggtatgatttctctagtgagcttgtaagagtgaaaatccaaggattgttatttcttctcttgtattatgacaggttgtagcttcccaccaactcttgaaaaagcaaagggctgccccagagtagtgacctgaatcttgaagatttctgtgtaggctctctatttattgtggtatatggatgcttccatcaaaacaaattttgttaaattcattttcgctattttctgcactctttattttctgttcaggtttattatgaattttaaaaaattctagatcatgaactgattcctttagtgggtatagatctgaagtagcatcttattgtatagcccaggttggcctggaacctacaatgatcctcctgccttggcttccaagtgttagggttacagatgtgagctgccgtggttggttgatggcaaaacctttctctagagagagttttcaaggaacacctacctgcccatgtctgatgagataagagtgtgtgtgcacggctgggtgagttctgggtggaccacgtggttaggtagggggcatctc

SEQ ID NO: 28515 - DNA, 1164 bp, Mus musculus
tgcatttgaactctacctgggactttccagagggtcaggtgactgtcagtgcattctgagaattttttactcaagaatgatcctgtggttggaggatgggacttgcctagctttgacctcaggtggaagggggaagctgtaaggagagtgtgggactggaaaaagcccttagggtctctcatttcccccttttcttgtacaagctccaatcctggagctatgctcaggggtcttgggtaactaactcatattcttcaggtcccgtcctcagggtctcatattgttggcccaggaccatcagctgcactgctcctattgtaacttttatgaaagctctaggtgctggagccactgttgccgagcccaggccacactgcttctgctcgccccccatcgtgcactagcggtctcaaaagattcaaagtccaagatggcaaccctcaaggaccagctgattgtgaatcttcttaaggaagaacagtctccccagaacaagattacagttgttggggttggtgctgttggcatggcttgtgccatcagtatcttaatgaaggacttggcagatgagcttgcccttgttgacgtcatggaagacaaactcaagggcgagatgatggatctccagcatagcagcttcttccttaaaacaccaaaaattgtctccagcaaagactattgtgtaactgcgaactccaagctggtcatcacagggaggccgtcaacaagagggggagagttcccaacattgtcaagtacagtccatactgccagctgctgattgtctcaaatccagtggatatcttaacctacgtggcttggaaaatcagtggctttcccaaaagccgagttattggaagtggttacagtctggattcagctcggttccattacctgatgggagaaaggctgggggttcacgcgctgagctgtcacggctgggtcctgggagagcatggcgattccagtgtgcctgtgtggagtgatgtgaacattgctggtgtctccctgaagtctctgaacccagaactgggcactggtgcagacaaggagcagtggaaggaggttcacaagcaggtggacagtgcctacaaggtgatcaagctgaaagccattagcctctctgtggcaaacttggccaagagcataatgaaggaccttagg

SEQ ID NO: 28516 - DNA, 1168 bp, Mus musculus
aggaaaaccggaacaaccaggggactgtaaattggtctgttgaggacattgttaaaggcataaacagtaacaatttggaaagccagctccaagctactcaagctgctcggaaattgctttctagagagaaacagcctcctatagacatcatcatctgggctggtttgatcccaaaatttgtgtccttcttggacaaaactgattgtagtcctattcagtttgagtctgcttgggcactcaccaacattgcttctggaacatctgaacagaccaaagctgtggtggatggaggtgctatcccagcgtttatttctctcttggcatctccccgtgcccacatcagcgagcagctgtttgggttcttggaaacattgcaggtgatggttcagctttctgagacttagttatcaaacacagtgcgattgacccactgttggcacttcttgcagttcctgatctgtcaaccttggcatgtggttacttacataatcttacctggacactttcaaacctttgtcaaaacaagaaccctgcacctcccttagacgccgttgagcagattcttcctacgttagttcgactcctgcaccacaatgatccagaagtattagcagattcctgctgggccatttcctacctgactgatggtccaaatgagcgcattgagatggttgtgaagaaaggagttgttccccaacttgtgaagcttctaggagctactgaactgcccattatgactcccgcactaagagccatagggaatattgtcactggaacagatgagcagactcagaaagtgacagatgcaggagcacttgcagtctttcccagcctgcaagtctaacaaaccccaaaactaatattcataaggaggccacgtggacaatgtcgaacattatagctggacgccaggatcagatacagcaagttgtgaatcacggcctagtcccctttcttgttggtgtcctctctaaggcagactttaagacacagaaggaggccgcgtgggctataactaactgtaccagcggtgggactgttgagcagattgtgtatcttgttcactgtgggataatagaacctttgatgaacctcttgagtgcaaaagataccaagattattcaggttattcttgatgccatttcaaatatctttcaggctgcagaga

SEQ ID NO: 28517 - DNA, 1191 bp, Mus musculus
atgccagaattccacaaactcaaaacaaaattgatcgagaagaaaggagcacgggcatatgcctgccagtgtagctggagaactgttgaagaactcactgacctgcagacagatcatcagcttcgctgggtgtgtggtaaacactgagagtgcagacagcggcacctgtgagaacaagttccgggtaccagcttgggtaccagtgcacagcagtattgtgcgcgctgggaaaaggcaacaaatgctgtgtaaccacacatgtctgaagaccaaatggactggaaaaggcatgcgtactgtgacaccttggcattcttcctttcgacgtggacattttacttaggttaaaatatctgcgtttgccagcatatcaccttttagggactgaaatagtgacatcccgtgcagatttacagcttttttatagcaactgccatactgactgctaatgcactctaaaatgttcctcatgtgtcatcgttgttaaagaatacccactggcatggcagagaggtcattgtatatgagtgttcatggctcttcctattctgatccatcattgtctgagactataagttgaacatgacagaaaagcagatgaccattggttaactgaggagttggcaagaatacaggaacattgtaaccctgccttttatgtatctcatcttgcctcaccaactcaattcagtattatgcataatagtaataatgatgttaccagttttagtgtatttcctcctttgctcactgaaatagcaaaagttgttagttttctattagcaaacatatatatatacatatatatgttttgatgcaactaaagttactaaaatcctaaaaataagtcgttgttagacttttcaagtatactccataactctaaatgagcagcagtaagatgactttcagacaacctgtatactttctaatagtatcaggttggcccattctttattgaagcataaagaaccaatgggtagctcgtgggctcctgtgatatcactgagatgggaggaactgtatcatacatagtaacgttcaagaaatgcattgcctcagttttacctcccagccccatagacatttcagggcttttctagtctgctagagttcttttctgtgtgaccatttcctgtgtgtgtattacttaagtgtgtgacactgggcactctgaaaggaagtacattt

SEQ ID NO: 28518 - DNA, 1323 bp, Mus musculus
atgcatgaatgttcctctaattccacatcctcctcgccaacatgagctgccacttgtcttattgatctgagccattctgacaggtataaaattaaacctcacagtagccttgattggcatttctctgatgagaaggatgtttaacatttaagtgtttctcagtcatttccgtttccttttttgagaactctttttagctctggaacccgttattattttttagttaattaattaattaattaattaattaattaatttggttttttgagacaggatttctctgtatagccctggctgtcctggaactcactttgtagatcaggctggcctcgaactcagaaatctgcctgcctctgcctcccgagtgctgggattaaaggcatgcgccacccggaacccatttttaaattggattatttttcttgatatttggttcttttggttctttatatcttttgaatgttagccctgtagcagatttgtagttggtaaaaatctttttttccagcctctccttttctccggcggctgggaagatggcggacattcagacggagcgtgcttaccaaaagcagcctacgagctttcaaaacaagaagcgggttctgctgggagaacccgacaaggaaaaactccctcggtactacaagaacattggtctaggcttcaagacgcccaaagaggccaccaagggcacctacctagacaagaaatgccccttcactggtaatgtctccatccgaggtccgatcctgtctggtgtcgtgatgaagatgaagatgcagaggaccatcgtcatccgccgggactatctccattacatctgaaagtacaatcgctttgagaagtgtcacaagaacatgtctgtgcacctgtttcagggatcattgtcacattgtcacagttggagagtgtaggcccctgagcaagactgtgcaattcaatgtgctcaaggtcaccaaggatgctggcaccaagaagcagtttcagaagttctaaggggactctggccaatgccctagaacaaataaagttattttccaacgttaaaaacaaaacaaaacttttttccattctgtagatttccgttttgcccaagtgatgttgtcctttgcctcatagaagcttttcagtttcatgaggtcccatttactaattgttatcttagtgcttgtgctaacaatgttctgttcagaaagttgtctcttgtcccaaggagttcaaggatatctctcctttctcttctatcagggccagtgtaactgtttttatattgaggactttgatccatttggacttaaattttgtgtaatatggatccat

SEQ ID NO: 28519 - DNA, 1232 bp, Mus musculus
tttttttttttttttgacttgggaaactctgtttattgatcctcaaacccaatacaaaactctgcacaagttttacaggtccttgaccttgaggcaacacagctgtgcttgctaaagtcggcttgcttgtctctctgggctctgattctgctttctgagacaccaagaggatttctcctgctctcctcctctgcagtctccaagttggtgatcatcatctgattgtggtggagggtggaggagaggagaggcagaaagacccagaagtttctctgtaggcttagagaagtgagccccacagccaatccaaagccggatctggtccaggttgagggcaacaaagttttctccgttacttttgggcagtggatcatcggagcccaattgctccagaagtggccattcctgtaacacttgtgagcaaccacaatgtggtaaaaaggctgattggtgcagccacccgaagcaaggtgtatgcttaggtggactctctgataggctttgcagaaaaggcggtgaggtgaaccatggtgcttctgcgagctgctcttaggctgtccccctctcggtgactcttaacatcttaattttccaagagtagaaagaacagggagattgactggtattaccccctttgctatccagttaattgtcctagtaagtaagccacattaaaatgatagttgaaaagctttggagatacacgtttttatcaggggcaataaagaatttaccacttgcattgtttgtgcatgagcctgcgagtttgtatggagaaaatgtaattgtgtgccttaacttacaaattttagcagctttatttgaaacatcctccattttatttatctacctgcagtccacctgtttgagatgttcagttcagtgattcatgttcattcaagctatcactgagctttggatagctttatcctgcccgcccaggaggcactccctgaccccctggccttgggcacccactttctgtctctgtttatctttgctctttgggggctggggtaggggatttatagtgaaatcattcactgtagcctctggggacccatttagttcactaagatgttctcatggttcatttgtttagcattattgaacacttgacactcttagtatcaaataatttttttcagtttaatttatttaaagttaataaactccttgcactcttttgggtcagtgtgtgtgtgtgtgtgtgtgtgtgtgtgtgtgtgtgt

SEQ ID NO: 28520 - DNA, 2770 bp, Mus musculus
ttccatcaaagatgaaggggaattacggaatggatggcttattaagacaccgactaagtcgtttgcagtttatgctgccactgccacggagaagtcagagtggatgaatcacataaataagtgtgtcactgatttactctccaaaagtgggaagacgcccagcaacgagcatgctgctgtctgggttcctgactctgaggccaccgtgtgtatgcgctgtcagaaagcaaaattcacaccagtcaatcggcggcaccattgccgcaaatgtggctttgttgtttgtggtccctgctctgaaaagcgatttcttcttcccagccagtcttctaagcctgtgcggatttgtgacttctgctatgacctgctttccacgggggacatggccgcgtgtcagccgactagatcagactcttatagtcagtcgttgaagtctcctttaaatgatgcatctgatgacgacgacgatgatgatagcagtgactaaggatatgctgtgaagtatttaattgactgcctgagagtcagctttgggggcgctctcagtttgctttagccatgactgcctgagaagtcttaacctctgtgcctctctgtatcctatggaaagcagccccatgctttctgctcccctctgcactctctcacagggacaaacttgcagatacatccgatagggtcttggctttctactgtccttatttctagattatttccttgtaagttggaaagaatgtttatttaacagatcttgtattacatttatttccccctgatgtggaaaatctaaaagcacagaatgatgggaacaagagtatgatgtgcttggtatctggcttttccccaagcagtcgatgtcaaggttacgacaccagtgacagagcatggtttggaaatcctttattctcttttctcaataccaagtggtgccttactgtggcagcagtgtcactgtcactgaaataaacgtaagccctaccttctttcttgtttgattgatttagacacactggtgctcttacaggtggagaatgagtgtttgatggatataggtaagcatatttatttgacagctatgaggaactaaatttagaggtttctccaatcttatatgaatatttttcataaaatagttgtgattatatttttacatcttttatgcaccaaattataatggtcacatatgtttagcccgttgccactgttcgggattcgatttgaaactcatcactagtatagaagtggcatatcccactagcttctactttcctgatatatttttacaaataactttatttgctttacattatttctaaaaggaaaaatctgaggaaacccttatattttccaacagggttcctctgtgtagctttgcttatcctggaactcgatttgttgaccaggctggccttgaattctcaaaaatccatctgcctctgcctttgcctccccaggcaccactaccacctgacaaaaatgaaaagtcttaagaaaatcctcccaggagaacatggagtcttagagatctggaagagatcggagtttgactaggtttcctgtctgcaagtcaattttttttgtgaaattatcttgatttacaacgtggtattgtattttacagagttcatgaagccccaaacaatttttatttttgtaaaacaattgtatgtttaatctgtttctgaaatcattttgcaatatatggaaatagagtagcagttgatatttctaaattgtgaccattgtccgagattgctttgagaactggtagttattctctttatgtttggaggcagccattaggctgtaggcctgcttactgcatagcactggacgtgccaggcacattctggcccctggcatgcttaagtaactaggttttcaaatgtgggaaaccaagctgaaaggtctgttttgttttgttgttgttttgttttggtttgtttttttttttttttcagagttcttttcaaacccagtttccctttttcaaactttaaaacctgcataattctgcagatgtcctagggtttgagtcagtaacttgtgaatgaaagtcattggtatttggctttgtggttacagtactaattttactttgctgctcagttttgaaagtgtgtgagctacataggtctccctgtaggaaatgtgaaaaaaagcacaatagaaccaggctaggggctttgttcctgctttttgttttgtttggttttactatcagatggatggatttgtgtttgtctcagagcagcatatacatgcagtcagtaagcatgtttgaaaggaccataaaaaccagagaaatgctgatgggaacttggaagttcagaaaccaaggggaaatgtcctgagataacatttgcattgtcgacctcagttgactgtttttacaataaaaatattttgcagcttatttcctgtgtttttatattgtaattgaatattttcttccttttctaactaagatattatgcataattccaccttagtatatattagatatgaatgcttaggatgtagacactaatgaagaatagttttttgtttttagatagacctattttggcctcaaacggactatgtagcaagtagtagctctaattgcgaagctgagaattcccttgaactgatcctcgtgcctccacatccagaggactagaatagcaggctggactgacccagagtactgaggtccttcgttcttctaggcaagcacccaccagctgagccacactccagccctgtccactctttaggaggtgctgat

SEQ ID NO: 28521 - DNA, 1161 bp, Mus musculus
aatgatagagtattttattgatataacctctgtcccgaacctctaacacacagacataaaaacacacacagacacacacatagacagacacacatagatatatatagacatacacaaacacacacacacatacacacacatacacacacacacacacacacacacacacacacacacgcgcgtgcgcgtgcgcgcgcgcaagtcattgcagtctagagatctgtactttgaaagttctctcccatctcttcacgatccatagagagcctgtgccttcatgactgactatgcccctacagtatctcatctctgaagtgtttcctattgtaaggcatttgtaactgcctataaaataattaatcctccgctaggagaaacaaccttgaaatgatgtccctggtgacctttccattgtcccaggcttcacagagcatctgcaaacaagtccaggctcctttgcctgcctatgggatgcagataattatacctgttttcaagcataaggtttagggtgagacatggctaagtcaatctgagctggaagtttaaaaactgatgtaaattgatttagggaggtaaactctgaatgcccaccccacctcgccccccacccctcatccctgtcagttaaccaactcctctctttgtccactcaccctgcgaggaataaatgggccatcactaagcgacccagagatggagatatctgtaagagtcaggtttcaaattgatgtcctcctcaagatgtagtgtgtatgcaaaaagtaaataggacaatagcaaacagaatgacaaagcaagtaattaaaccccaaaggacatctgtacaatacaaacgtccacacagcctctgtagctagattgttattggtaatgaaggtgggatgatccgatttggtgaactgcttggtctagaggctttccactttacatggcctctgactacgtggataccaggccatcaaatccactgctttacagttatgctagaactcgacccagctagatgggaattggacatctttagaaatgaactgaactcagagggtgttgggaaatgttggtaaacgatccggttctcagtgtaagccgtgctcaggaacttctccatggaaagtttctgaccccgagtatctactctccatcaagggcattgtttcc

SEQ ID NO: 28522 - DNA, 4054 bp, Mus musculus
tcaggtacattaactttggtgaacaatatattcagtaattctgatgtgactccacgatatggtacaaatactacagatgtcgtggccaaaagcatttgtttcatatgcagagggaaaaatcagacccatgagatgatatctggaatctatttgtagataacccacagagcagtcagtatttggagatgtctagattcctaactgccagctcagctaaaaatgcacaagcccaggcactcagtgacgtcatgcttgtgtctgccacaagaaagggagagaaacagtggtaactcctcagacatggagcctgtcttcccaagggatttctggtggcatctgtttgcgcctaagtgaagattgatgggttggtttccacaagctttcgtttttaaacttcacaatatccttagccactttggcctctctttcctccacagcaggcgagtactaatacttaccacagcaggagagtactaatacttaccacagcaggcgagtactaatacttaccacagcaggcgggtactaatacttacctccctcacagagttgtgaggattgtatactgattggaagtggggctgtcagaactgaactctgtgaactttcagggtctttctcctgaacctagttgtgggaggctacggcagtttactgccatgattattcttcagggttggtgctaatgaggctagagcacagggttccactcatatataccagttaacgtggtgtagaggaaagtccattctcttacctctatctggtcagctcttaaagaatagttttggtggattttgatgagccatccacacttgctggaagattaaacacatttacagcttgaagcacattctaataccattgccgcatattcaaagtgctcatttccctagcccctttgcaaccataactaaacatttgtttatgaaataatttcaaggaaaaaaagaaacatactgttatgtgaagtattattcctgaagcagcttgatgcagggaaccctgggaaactttcaggaaggtacagtgcttttctctgatgaggctgggcatttagagctgcagtcagatggggaagagagttaacactggctctgattaggtgccaggcaggatgtctcctaagaacaggaatctagacttaattctttccttaagtcttttccatattgacttccccttttatttatttgttttctaattaaggggccaagtctgtagagtttgttaaactgagaagttgttactatttgttgtcatggaggtgtgcatattttataccacagctattatagggtcatatgttggtaacttgaaatagaccagttaagtgtcttctggacaaaggttctgaatccatgtagctttgcccctactcccttacatcacacgaaagctgtcttacaagctggaagttcagccgtcagaatttgtttggccagcatgaattggtttatgtattaaactatacttttttttttgtttttttaaaaaccttcccaccacatttatttatcccttaagtacacttacatctctgtcacttaccgacttttcatttgctttgtctatgcttagtgttttgttcctgtaaatcagcaaacaatcaattattgggattttttctttggggttaagattaccacaccacctatagtaagtgggtagcacactgtggtttttgtgtgagaatctaacatttatatctaaaattggcaagtttttaatcactaggtgttttgttaggcaactataagtctaataacacagaacaatttttttgaaacctggccaaaaatacattttatgagttaattactcattatcatcatcaccatcattttgctattatacctactagtggtttacagtgttcttcaatgcactgaaagtacaagtaagaagaccccaagagttgaggatgtagcttagtggtagaggatttgcctagcatgtgcaaggtcctgagttccatccccagcactgtaggatgaaaacaaaataagcaagactccagaattcagtagtactgaccatttctaaaccaatagcctagaataatgcttgcaaagtctggaatacatggtatgtatcagtcatacatctggagtcttaattttttagcttttatagtagaccccacattccccaaagtttgtattttatgttcagcattttagaatgtgtattctgttaattactatatcctgggttatattctgtactgtacatagctacttaaagctcgccatacttatcttttgtgacaatttgtatttgtatggttgcataggtggggaattttttgcaagatgaaaaaaggttggattttacttgccactgcagaaagttcaaaacaaaacagaacattaactttctgtatatttttccaattcccatgcagactgttcttgttttattaggtctttggttttagcaaaaagagtgtttacttaaaatgtgtgagggttcatatgtctggttgtcgtttttgtttctcaaatctgtacaggtttacagtcttcgcttttgttaaagtttgaattgctttgctattttgctctgtcctcacagaggtattcagtctctgtatactcttaaaagaagaaaaagcaaaggagggtatctttattctttatcgttttctttgagttggaaacaaaagtatgtatgaaggactacaactagaagatagacatgcatttaaataggctagtggaaaaaagtttttaccgttttctttctgttttagagacagttaaaagactgctccttgtactgggagataccagtgtatgcttctattgttgccttgaaattatctttttattttttaaggcctatagatactattacctttaaagtctttaaagttaggtttcatgccagcagcctctaatgtattataaatggcaaccctatcttcttattctgttaaaattgtatatgaacacctgtctattttacaaacttacatatatgacagtgttgtctactttgtcataggccagtttctcttgaaatgtgacaccaattcaagtggcttaggtgcagggagagaccaagaatagatgcagagaggcaggaagagaagttactattcagaggaaggcagcttaaatggatgatgttctgtgtatcattgataagtttccttgtggtattgaaaaatgtttctaattgtacttgcctgatgttttagtattgttttctagatggacttgtaaaaaccaaaccgtgatttgtgaggttagaagtgtgtatttgggggcctcaggtgtgtgtgtggttttattttcctccagacgttttgaactttagtcaataattgtgtgtgttatttttaagaagtaacttttattttttctctagtaaaattgtgaacacattttccttctgaaggcaggatatgagctatggattctgaaaagtattgtaggttgtactatgtgccttcttagtgtgtttatgggcacaatgttttctctcatcaacttgaaacttaaaagggacattttggttagattactgtacaccaatctatgcataaatggcagcttgttttcttgagccactatctaattgttctttttttatatataaatttttttatattgattgggtcagagatggtcagttttatacagaatgaacagcacagcactttgccaaaaaaccccaaaaaacaaaaaacatgtagcattgcttaaccattgtgtattaataccagttctttgtaatgggttcagtagtgcattttgcactgcacagagtttttaaatctgtcagtaaataaaatgtcctttaacttaacatgtggaggattcttttatcttcatggtcattactcttgaaagtaatacaacttacttaaagcacttgctatttagcattgctttgtgcaaaaagttgtttgatatgcactgtaaatgtttcttttcaaagcatgttactgaacacatgaaatctcaatattcaataactgctggggtagaagtattgttgcaaatacaaggccagcttgggctacatagcaaaaccctgtcttttt

SEQ ID NO: 28523 - DNA, 1182 bp, Mus musculus
gcggcccggcccttcccgagatgcacctggaggcctccggccgcggtgggccttttgtgccacgctgtggttaagagcccaggaaggccctcgtcacacttcccgggtcttcgcatggtccttcacaccggctaaagcttactttcccagctttacacgtagacaggatcagaggagacccagtgccttgtctaggcctaaggagcgttcacccaacccataattgcttatcaagactgggggggggggggggagttacctccctttgctggagctgtcgtcttgtacagcttgagatctaacccgttatggcaagaaagcagaggtgtgttatctgagtggaagtaaaactgatggcctacagccccgctccatagtgacttcaagaccagcctagattatgtgagacactgtcctaaaagtgccaactggtggcctatgtaggtgaacttggccaggatacactgaaaacgagggctgtcgtttacatgggattggtcttaagtatcataagtccaaccgcataagttagtgtacgtacgtcattaaaaatgtactgtgggcatatctaagtattacgtgaacagagtagccataggaaaagcaaaattagaatgattgaatcaacgaaaactaagatagcaagctggcagtggtggtgcacacctttaagatcagaactcagatggcagaagcaagggacctcttaagtttgaggccagcctctgctatagagtgagttccaggacagccaaggctaggcagcaaaaccctgtcttgaaaaaccaaaaataaattaaaaagtaaaacaaggtacttacaagcctttatacattcagaatgggaagtatggtatgttttcacatgtagaacctacagctcagtggtagagcacttggcctatcatgggtttgatcctcagcacttggaaggcgagacatgaaataggggactatttgtaaagtagatagtgggaggcaaatatgatcaaacttttatgcaggcataaaatgttaaaatgaaacctttctatatagctaatacatactgataaacatcaaatttgaaaatgtacagagactccatattgaccaatcatagagttgattaataaatacaagctatttttgctcttcctcctcaacagaagttaagaaacaaatttagccgtttgtggtgctg

SEQ ID NO: 28524 - DNA, 1693 bp, Mus musculus
gtttatcttaactgttaattactgaataatttcttcacatgtacagaatgaagtaaactatgtgaacatctacagaaaaggagggcagctgtcaccagtgtgtaatggaggcattatgacaccaccaaagagtactgaaaaaccaccaggaaaacactgaagttaacaacctggaattgaacaaataatggatagtttcatataaatgagttttacagaaaagtagtgctgtaactatccttgtctaaggagttacactgccattcttttacttaaaaactatatcaatttggcactaaatgcctaggatgcacaaaatcctgggttcaatccccagcactacaaaaggaaacaaaacaaaaacttcaaaaaattggcactaaagaagtatttcctataaaagagaacttgtttacaaaggtgacttcactcccaaggatagtggatggaagccaacaatttaagctatagcagttgtttctgtttgttactgtgtttctttaaaattcagtgttactgtatttcttttgatgaactaggaattttatcattggaatatggactaaactagtgctaccttaaaggatacattagctgacacagaactttgaatctagattttatattcttaaattcctatactcttgaatggtgcaatttgtttttgaaaataaattttaagcttatttacaaaggttgttttgtaataaagtgactaatttatctaaagcagtttgtaacaaacgataaaacttgaattttatgaatggtaaagttcaatctgttttgaactagtttgtctgccttgccatatttcttaatcagtaaggcactgaaccaaatgtttaaactgtgctctaaatgggagaaccaaagaaattataaacaagatataaatgctttggcttcttctactcgggggttttacttgatagaaaggttgctttataatctttttgtgtatcacaatttgggtaaaattaaacactttttcaaactatataagaaagtcactttattgcacactaagatatctctaaggcgctttatgtttgcaaaactggtggtccatttttaagccccatattatgagatgaggactgtgtcaacatgaaaaaactttaacatatgacctaaactattttcttatggcagaaaatattaaatgtatacttactcctagaaatttatttatttaaacttgctgtatatagaatagctacttatacattaaatattttaagttagcctttgaaaaggaaatttgggcctaaaaaagttaatttcattagaaaaaaaatggtaccaggcatgaaccttgtctctctttgaagaaattataaactattgttaagatatgaagtttttgtataatttgtttataaactaatttgtttcagtttgttttggtctaaaaagaaaacaccactaaattgtacatatgtattatataaacttaatcttttaatactgtttacttttagcccactgtttaaaaaataaaattgaaaaaaaattaactaactgcttaaaagtaaagttttgccattgcttgtagaaacttctttttccttctctgtgctgccagctgtaatacttcttcagggttgcttgcattcaattctgtttggccaatggctttgatcttaaaacagaaaagtgttattagaagtttgactgaaaaaaattgtca

SEQ ID NO: 28525 - DNA, 2061 bp, Mus musculus
atgtattttcatgtttttatcattaaaggaaattgtaagccagtgtggtgcctcacgcctttaatcccagcactttcgaggcagaggcaggtgaatctctatgagtttgaggccagcctggcctacatagtgagttccaggacagcacacagagcactataggtaaaaccctggtggttttttgagggggtagggaagaaattctaaattaatatggcctcataaagagattcaggatagataaaagcctgtagagaaatggttttaataagatgcatatttaactttacatgataaaattgttttgtgaacaggttctataattttattttattagaatgctataaaattgcattttaagaactccaaattagaaagaaaaatatttccttttttttggtaatgtatatgtacaatttttttcaagtgtgtgcacttagagtaacgtctagagcttaactgacatctgttctcccccctcctccccgtttagtgtaaatggtcctgttcactaatggtcctgttcactaatgttcatgcttattttgactaaacatgcagctgtggcactgtatgtctgatgaactctgaatatcttggtagtcactagtgtttaacatcaggctttatgaaaattaccagctactcaaatacacactgagtactcatgtggtcattcttgtgatcagagcatgcagaaacagcttacatattgtaaagggggaagtataaaccgtatttcccttgtaatacgatttttttcaattcccttataaaatgaattgagtttttgacataacatgtgctaagttagttttagtttttgttctgtttgctgtatcagtaagctaagaatttttttattaaaagttcataattagtcccaggcatgatggtgaactcttttaatcccagcattcaggaggagcagtagcaggcagttctctgggttcgaggccagtctggattacatagtgtgtaccaggatagccaaagctacccccacccccccaaaaaaggtttaaaattaatttttcattcagcatcacctgaaagaagaagtattatagaaatggcactattggctgaggatgtgtcaatcagtagcatggcgctgggccagcacacacaagtccctgggttcagctcctagcaccatggtggggggggagggagtgggcagagaagggcagacaaatgaagaaaagactgaaatgataatattaggtatcatagatatgttgattcacttccatctggactgtcactaagacaacactatgttgttgcaagcatttaacttttttctttagtgatttgtggagtaacaagtaaaaggtcctactgcttgctattctaagtacttattatatacttgggtaaccgagccgctgctaggatcagccgtaaagctgcgctgaagggtcagccgtaaagctgcactgaggggcagagtttgcaggatgtgggtgggaggaattcctcaaagaaagattgaacatatttgctcttaatataacaaacccattgaaataagtgccttaacttctttatttctaaatccatcttatactttatgtcatattacctgttttcttttccataagaaactgctgttaacttttgccacatgggtaaagttgagtgaggtgaggcttaggcccctccctccctccctcccatgtgtatgcgtgtgtatgcgtgtgtatgcgtgtgtatgcgtgtcctagtgcccttccctactatacaagagcttctgggcttcatccccagcacaacaaaacattaagccaccccacaccattttcatgattagcttcaattcactaaaaagcaaatctttgtcaagaatttccagtcttctgaattaattaattaatttaggcccttgcatgccaaatagtccaacatgtgaaacctacttgataagggatgtaatatggactctggatgtaatatggactctgtgaaacctacttgataagggatgtaatatggactctgtgagtttagtaattttttaaaaatctctttggcatctgtatcttgatgttttgcatt

SEQ ID NO: 28526 - DNA, 1208 bp, Mus musculus
taagtctagtgtggaccagtgttctttgttgttaattttggatagtgacaactgtagttgaaattaaaagttgaaatctgtaaaatctataatttgtaaaagtaatatttaaaaattcatatgtatttcataatgaaaaaattattcatcattaatcttgcaggttgctctttctcccctttttttcttacttgacccagtggggctgaaggcacataatgaacacgttaaactacatcagtgtagactgagttctctgctactgctatgtttagcagatgaccactgtgtttttttcatatttaagagaggaagtcaccttggttttgcagctgtaatatattattaaagtaatttatatattttgaccaattctttgctcttttgaagtcaaaaggaagtattgtttagtactatctgctttagatctttttgtcttagtgattcccttgtcttttcattctgtgtctcttaagaatatttttgtttgtttgcttgcttgcttgctcttcttttttcttttatagaaaggtctcactgcccttgctggcctgtaactcactatgtagaccaggctagtgtggaactcattatgtagaccaggctagtctagaactcgccaagattggtctgcctctgcctcgtgaatgttgagattaaaggcagcctgtgctgcatgagatcctgtctcaaaacagaaagagggtaaagagaagaaaagaccttgaattattgtctattaactaaacattttaaactgatgatgatggtgaatgcttgtaatctcagcactgggtgcctgagtcgaaggattgcaagtgagaagcaagcagagacagcatcagaaaacattgcctcaaaaccagaaccctgccagggccagggaggaagctctgttggcagagtgcttgcccagaatgcacaaagccctgactttctttcctgcagcatacgagccggggtacggtggtctgtaggaatcactggtacagggttatattgtcagctggatggtgagtttgaggccagtctgggctacatgggatcctatctcaaaaaaccaaacaacaaaatgaaattctgatttcctcataaaccttgtgtttatttctattttgatttttggtttgaggtaggattcagttggaaaacttaggctggtctttatttacctcctgagtgctaagaccagtcatgtactaccatgt

SEQ ID NO: 28527 - DNA, 1223 bp, Mus musculus
ctccccaaagacagagtaactgagctgagggtgagatgaaactgaagcgagttggaagtgtggggtaatgtttgaaatgccttttgtgaagcgagttttatcatgttgttatgtatacttgtacttatgttttcctgttactgcaaatcttttttctccccttatcatgtttttagaatttgcaaattagatcgcttcatcaatggactctgctcaactgactgccaacctgagaacaatacttttttttagacctgttggattcaaacaattgtttaattgtaatagtgtaatagtgaattatgttttaagcatgcagtaaaggtgttctttttatgacagttcttcctgaacagttttgcgactataataaaaaaaaaatctatgtacacacacattatacttttttaacaggttattgagccacatgatatatcagtggcactcaacacccgaaaattgtggagcatgcaccttcatgttcaagcaaagttgctccaagaaatagttcgttctttctctggcacaacctgccagcccattcaacatatgttacggcgtatttgtgttcaattgtgtgaccttgcctctccaactgctcttctgatcatgagaactgtgttggatttgattgtagaagacttgcaaaggtattttcattccaccttaagaagttttcctcaagttactcttgacacagataacctcttttacatagtttggaaactagggtttagtaagcctagataacatgtggatgtataaatacacacacacacacacacacacacacgcacacacatactataatatatgaaaattatttttttagaatgctttatcttctcatttcatgtgtaagtcatgttgaaggtcttgattggggtttttacttaaatttcattatagcataatgcttgcttgtgtgcatgtacatgctcatacatgtatggtcaggactttatatagttgcttttttctttccttctgtatgtggattctggggttgaactcaggtcattagggttgttctatatgagtacctttatttcctgagtcaccttcctgccccagttttgcagtttttaaaaggtgaagtataaagaactactctgacttgaagtatattattgaaatcctgaaattataaaattttgcagtgactataagcttctggaaaaaaatcattatatcaaaggaatgaggtgtatgttttatacaaa

SEQ ID NO: 28528 - DNA, 1128 bp, Mus musculus
aggccaacctggtctacagaatgagttccaggacagccagggctacacagaaaaaccctgtctcaaaaaaccaaaaacaaaaaaaatcccttttattcatttactgtgtcttatacatctcattcattagttaaggagtgtttggtttatttcaacttttgtttcgtggtactgaggtttaaatccaagaccttttgcttggtaggcaagtgttctaccaatgagctcttgaattttcgagacagcatgttgcataactcaagctgagtttgaattgctgtgtagctcaggtcgtccttggccttgctatgtgttctaggctgcctttcagttctagaacctaggtcctgggaaagtacctattaatacagatatgttgaaactggctcgatttaaatttagagcctattatataaagatgtgggaacttaactttaattcatgtatcatatatgtatgtatgcaattctttttctttttagggtgctgaacagtcacaaaatgatccaggtgtatgcagttcaaatccttgccccagtgagggaatccctagggaagtgggtgatgggactagagtagatccacttcctccaggtaagacacttattgtattatgtttgtacttacgttacttcacagtgctctagaaatgattattcaagaatgaatgctatttgataattgttgatataataccactggatattttgcttcaggttatctgttgtctgattttatgtttagaagttgaatttaaccatttaactaaaaggctgtagctcagtggttagaatgtttgccttgcatggcaaagtccagggtttgagctacagcactgacaaaataagcaatctgtacaaaccttaaaaccatgcagttgaatcttgggttttgtagtagggctacgttttaaactacaggaaaagtgtcgatcaggtacaatctttaagcaccaattagttgtatttaaaattctgtgaataaacatgttgatactgctaaactagaagagaaaagcttgaaatacgccaagtcacaactttattgtactctatgttaaggtcaaatcagatttgaattattaattcaggaaaatctagcattttacttgtgttccatctctccatt

SEQ ID NO: 28529 - DNA, 1134 bp, Mus musculus
ttttattatttgtttttgtggagcttgaccccagagatatcaggaatgcaggtttttccactttcaagattgagtgagaagctgcttgtgaactggagtcttgcagaaggcatacatagcctgaaaaaccatttttacacaatacacagtaacttagaacaggcactagttaacccttaatccttggcttttctgtcaccgtcttaagggttgagatgccttgtctcaggagcacagtaggagcacagtagtgcttcctagggtcactgctagattgggcattcctttcctgtagtcagggatcattagcctatcactgccaccccttacctagctaattagcatatcaacacctgctttgggtttggcacacatttgagctgcctctcattggctcctgtcttgcaaacactacattattccaagctgcacaaaattatgttcctaacagtgagaaaacaggggagatatagaaagtatggtgcagatgtgtggagaaatgcctgcttgtccatagggatgagagaaggaattctgttctgagattgccctttatttcacagaactcataggtaagtactgtactttaggagtatctgtgttggctcccaagtatcagcacaataggaattacagactatatatttttgtctaatgcattctttttaaatgtactatgttaatatttagaaatctgctttccttttctttttgcgtgtgtacattccatgctgtacattcatatttacttagggaacctgtgtgtgtgcctgcatgtgtacagaggttagaattggtggtctgtcttcttccattattgatctctgctttatttactgagacaaggtctctgactaaacctcgaattctcagattgggctaatctaagctagccagttaccctgggaatcccctgtctttacttcctgaatttagggattagaggtaggttgccatgcctatccagttttttgttttgttttgcttttaaagacaaaatttctttatgtagcccttggctgtcctgcaactggcctcaaactcatggagatctgcctgcctctgctaggattaaaagcttgcttatttgggtggtggggagctgaactctggttttcatgcttgaatgacagg

SEQ ID NO: 28530 - DNA, 1185 bp, Mus musculus
gtatgctgaccttgttaaaggaggtgtgcacactggggtgggctttgaggttacagaaacccaagtcaggcccacccagtctctgtacctgctgcctgggatcaggatgtagtttctccagcatcatgcctgcctgtatgccacgacgcaatggactaaccctctgaaactgtaagcaagcccccaatcaaatactttcttttatgtaagctgctttagtcatggtgtctcttcagagcaatagaacagtgattaagacatactccaagtaccattaattttaagactcaccttaacaccaagaaagcaagcattgattgattagttactagttactagttacttgctgatttcccagaagacctgtagagaatcaggaggaatatggagaaccagcctctcttccttctaactgattttggccaaaggcaaacagtaaccatcaggctgacatgttacactcctatgtaggtttattttaagcttcttggctgggacctctgaggctactggatcatatgctgtgtgccaagagaacaacttaaatgttactggtcacttatctctgtgttagtatctcaaaggtacttgtgtaggatagacatagttaatttttcaaagaccctgctttctctctgcctgttctgtctctatgataatcctaggttgttttcatgttacttctcaatatctttcaaggttgaaataccaacaggtattctggtggctcaaacaatcaagttacagcagaaaccccacagatctgtcctggccctggccacataataacagcactactgaagtaagtccagttgggtggattccacccagaaagagaggaaggccaagccagaagagagtcaaggcagagaacttcatccaggacacaggagttggaatcgctgtgggctggcatttcacaatatgcatgtcactcagtcatgtaactagagaatagaacttacacctctgagactatttcaaagtcatcactctgaggaggctttatcccaattccagaaatatcttggcattcaatcttggtgacaaattattttgactatatttagtcgtggcaagttacttttttttttctttctgagaatcagcattattttcaaatatagacaggtcatccaaaagccagaataagatggggaaatcaatactatccaggtagaaaac

SEQ ID NO: 28531 - DNA, 1200 bp, Mus musculus
ctacattaagaacttggatgacaccattgatgatgagaaattaaggaaagcgttttctccctttggaacaatcaccagtgcgaaggtgatgctggaagatgggagaagcaaagggtttggctttgtctgtttctcctctcctgaagaggcgaccaaagctgtcaccgagatgaatggacgcattgtgggctccaagcctctgtatgtcgccttggcccagaggaaggaagaacggaaggctcacctgacgaagcagtacatgcagcgtgtggcggggatgagagtactccctgccggtgccatcttaaatcagttccagcctgcagctggtggctactttgtgcccgcaggtgcgcaggctcagggaagacccccatattacacgcctaaccagttagcacagatgaggcctaatccacgctggcagcaaggcgggagacctcaaggcttccaaggattgccaagtgccctgcggggcatgtctgggcctcgtccagctcttcgacatctggctccaactggtaatgctccggcctctcgtggccttcctactactgctcagagagtcgggtctgagtgcccggacggcttggctatggactttggtggggctggtgccgcccagcaagggctgactgacagctgcaagtctggaggagtccctacagccacagttgctgcctctgctcccagggctgtggctccacacaagtatgcctccagtggccacagcccacaccctgccatccagctgctgcaggccccccagcctgtagtccatgtccagggtcaggagcccctgacttcctccatgcttgctgcagcgccccaaccaggagcagaagcagatgctgggggagcatctgttcccgcttatccgaacaatgcattcaaacctggctgtgaaaatcaccgggatgctgctggaaattgacaactctgagctgctgcacatgctggagtccccggagtccctctgctccaaggtagatgaagctgtggcagtcctgcaggttcatcatgccaagaaagaagttgcccagaaggtggacactgttgctgctgctacctcttagacaagaataagactcaaaagccaaataacccctcatggcatccagctaagtagacgtcctagttgtcagtggacctccacaccaagaaccaaggtgcaaattcaataggtcattttgtatcaga

SEQ ID NO: 28532 - DNA, 1353 bp, Mus musculus
tacaaagtgttcatactgctctttactcaccaaggctggtagatgtatgtcatctcccagtttaacattactttcccatacagacccacaaagtctgctgggtttgagcaaactggtgggtacctggtttgcttttgcttataaaggtctcaaggcccattggtctagtcattttccttggttaagtgtctcacacacacagcttttcagagcaaaggaataaaagtcactcattgaaacccctgactggctggcatgctttcctgtttatccattttgctagatgatgaaacaaaatgatagtaaggtgttgtccaaacaaagcagcagaagatgtagcacacacggttgctcagtgcaagcacctcacagccccaaatatctgaactcaaattcggaatgtcttaaataaccaaagaagaacacatggttattctttgtatatatatatatatatatatatatatatatatatatatatatatatatatatatatatatatatatctcattttaaaacgtcgggtgtgacaatttgtttggagaccctgtttgagaggagtttcagataaaaggtcatatataaaaattgtctactgttgcgccagctagtgctgaacaatttcattcaaatcctgagtatgtgccctgctgttacttcctttggcagttgaccgttgaaatcagatttttacttggtttttaaagtataagctaaacaagcaataaaaaaggggaatggggcgtgctagtatttcaatttgctctcttgttgctctacttctgtgcctctgtgcattattaatatttggatgcatgcagtgctagcatggaactttggtcttcacaattactgcagtttttccagaaaacactcacaccaataaatgtaacagaacattccatttgttaatgggcatatgtgcataagcagtgtagaaaataggctcatgttagaaactggctacatccttcataactaaaagtgtggttatatgaatggacactgtcaatgttcatagcttaaacctgggtacctggtcaaaatgcttaggaaacattaaaattgagctaaattgtctcaagtccttttattcatataataaagattgaagggatggggggaaggctgacattttctggttttgtttgtgaaattgctggacacaaccttgacagtatcctttaatgtaatgaggtcaattgtattgttaaccatctttttatgtataatagtgaaaaatttacagtaagttggtgtttacaacctataatcaggtaaaatctgtatgtgacctgtttataagttgtactgagttagtttttgtgaactgtggaagagtaagccatgag

SEQ ID NO: 28533 - DNA, 1134 bp, Mus musculus
aagctgcttattgcaactgaaatgtcgaagaaagtagcaggaaggagcttcgccttttggaacatcaatgagctagttgccacaggcgctaggtctagcatttagacctgcaaggaagggcaataagcattaggtaaggcttgaatttgaattttttcactaattaaatgagtgctttttttgtaaagcaaggtaagagtaatctttttgatttgcaggtgaatgagaaccctacctgcctaacgaggaatgtctttcccacaccttaaatacgaaggtttctggctgggtaaggtttgtagctcacagtaaaaaccgatgacactgttggtttcccacaagtcaatgtcacagttgagacacccctcaagctcagttttgttttggtgcccattgagcaaattctaagacataggcagttacattctgcaaagccatgggtgtttgtcataagctagatgtgcctcttcatgtgtacaactcaatgttctaaggtaaagtcatccttcaataagggaaagtcatgttggcttttcaaaagtaagtttttcatgtatgactttaataagctgttcccaccctaagaagaactaggaactttcacagttgtcagaataattgtcttccttaaagctctatagcgtgtaagtttactcttgtgtggaccagtagggatagtcaagtgtttagtcttctcccctaacccatcacaaacagggtctcactgttgtcctagcctggaactcaatccaccagccttctgtgtctcccaagtgctggagttaaaagggtggtgcctgtatgataactcaagttccttttaaaaaaaacatccaaagaacagttgggttactattcacataatgttgctggttgttcataagggctatttctgctgccctgaaagggcttatttgaaaattgcttaattcaggttacttcttaatagaacattttcaggggacaaatctgcaaaatgtttcccacacagggaacatccctgcatcaacaagtttgcttggcatttaagtcaggacaaagttcacagaaatcatagttaccaatgaggtagcaatcgttcaatggtggttaacagattggagaaaatacatttgcttaggaggcatttacagt

SEQ ID NO: 28534 - DNA, 1134 bp, Mus musculus
tgctcccagaatcctttgacctcattctgctttctagtctgcttgtgacactggacagtcctttcttagagctattctatgttctaggctacgaagggttaaataatcccaaaaatgaggtatgtcataccctcacgtctcgatctcaagaagctgtgatgtacgtggaacagcactgttattctgaacactagtgtgtaaagtaaggattagtacagtccgtctcattactttttaattcagggcaccctgagtgaaaaccaatacaaaaaaaaaaaaaatccctaactctgagctctatctctaattcctcttcctccttcccctcttcctcctcctcttcctctcctcctgttttgctacattctcctcagtggcaaaaagtttcactctacctctgacagcatgtatattgcaccagtagctaacaaaaactggtctagtcaaaccaaatgggcacaaaagaaccaggataccaaaagtcatacagctgcaaaccatatcacttcttggtaacaatgcagacctcataaacctaaaaaagagaaagaaaagaaaacttttgttactttccttttttgcttgtcacttatatacaggctatgtgagagtattgatttgtaggtattacacattaaaaaaaaagttatcttcattggatagaattgaatggtggtcgctgataggaatagggcgtcctctatctcttatctctgtctcttttctctttctctttctctgtcatgagactgtgtgtgacagggccacctgtcttttttatttttatttttctgaacttttttttttttaatgtgtaggtgcatgtcttggggatttaaaaatttcaaggctggtttacttatgcaaagcatgcctatgtctggaatacttagggaaagaaagcgactccatgttgtccgaattcctcaagggacagaaaaaaaaaaattggagactgttgaaatgcagatttgaagtaattttattttaattattttgggttctgcgacattattgtgaaaaattaaagttgttgtgcaatacttaattcagacacgtgccacaagttaacggtagactaacactggggggcgggggctaggcatcacgcttttgtctgcatactcttgagct

SEQ ID NO: 28535 - DNA, 1111 bp, Mus musculus
gctataggggaatgtaggctgggtttccctgaggatcttagtgtttcaattcctttagatgaaggcattctctaatggtcttccatgaaacagctctctcaaacaaacttagctggtgaaaatacctttattcagggtgagctttatgcatatactttatttggagagaaccataagtatatatggacatttgtgagtaaggaactttcagcataaatgaatatccttgtctagagtttaaatttctgtgaatgcttcctttgtatggagcattccagaaattccaggtacttgctgggtgggtttaaagcttttcacaggggtcgcctaagaccatcggaagacacagctgtgtacgttatgattcataactagcaaaattagagttatgaagtagcaacagaaataattttatttttgggggggtctccacagcatgaggaactgtaataaagggttgcagcattaggaaggtggaaagccactggtctggggtaacttaagggcactggtaggcaaaggctcaggtcacacgatcctctgacagtctcatcattcctgacacttaacatggagacactagacaagcctgtggctttcccagtgtaaagtgggaagagtggcagagcctacctcatggggtgtgtcttagcactctgagtgtatcctagtgataaacaggatggggctctgttcaggcctggtttctgagcagctattgctcaggtaggtctcttggcttttccatcggatgaggtggggcccagggcaagggtattgcaggggagttcagaggtcttgctgccagcttctatctccacatcagcctcctgacactgcatttggaaacgtgacaacagtaatccaggtcagaaatgaagggatgctactgagaccacacttcccactgtccactgattacagaaagcgttagttagtcacggattgtttgatttctggctcctccctgccagggaaagggggctggccaaatcatcaccactacttctggcctggcaccagggtgagctcttgtttccttaaaaagcagccacttgcgccagccttgatactgggcagtagcattggtgggttgaagggtgaaagaact

SEQ ID NO: 28536 - DNA, 1150 bp, Mus musculus
ttcaaattgtcatttgtttaacaattttcagatttagcagtagaactcattttgctttcaggctttatccagcctttgttgtttttcctcacatattgagaatgttacaatcacagattcttgctcttaagggcctctcaataaatgcatgagcatatcattatgcccaaagtaaagagggataataaggtagcagccagttaggctactgcttttagaagaaataaggtggaagcttggggctacattgatcaatgaatgtttattttggatcagaaagttctaaaaacattgtgtaatatttatgagggtctttggtttggttgtttgtttttttgtttgtttgtttttttaaagaagggcatcagtgaaaggcacatctgtgtcaactggactctacaaattggtacctgcccacaattagtaccttggtgcagttgtcatgaacccgtgaaaaagcaaatcacttgattgttgataataattgctagtttcataactttagtttttaacattagtagagcaaatgttttttcctgtattgatttaatttatttattttatcttatttaaaatctttctctatctttaagctctggtagcataagttctttcccttgaatccacttttgttttctctgactgaatacccagccttggttcttcttactgaccacccaccctattctttaatcactgaacacaccctggctctccccctctcgacacccactcttgttctctcctcgctgaacacctgcccttctcacctcacgggaacttttgagcttttattcagaggtaaatgcttttcctgcttcaccgttgtttatctgctttccacagtcaaatggacccctcttaggcacttgtctctggatcctcacacccatgctaggttgcttagtggatgactctagtgccaacacactgggaactagttacttgcatgtgtttattttcccctagtttaagtgcttaaaaataacttctttttttttctctttcttttttagaatttaatattcttaatttctcccctttcttgcctcccctccatgagtccctcatcccatccccatcccctttgctcctaagagggtgctcctcacccatctactcctgcctcacccttctaacatccccgttt

SEQ ID NO: 28537 - DNA, 1254 bp, Mus musculus
taagtcttcccccctccagctgtcctaacaagacctctgcttgtgctcactttctaggattcaatgaaaaccctggctacacattattttgttaaataatgtatcacttgttttcactcaagtgtttgattattatattttatgtatagcaagagttgaaggtggcagaagcagagagctgtgtggtaaaatcagtacagaaggattttatgcggaatgactcgtgttactcagattttcaatcacttcgagaagtattctttgtaacagagctgtgcccacacacaagtctgtttgctcttcttatgtaacaaagtgccatgggatggggacacagctctagcagagcacttgcctgccatgtgaggctcaaggttcagtttctagcaccaacaaaacaacaatttatgaaaatgaaacgttttgttgcaatctgtttttttccaacttagaactacaactaagtagagcatcatgtgtataatatctgggcttttgacccatgtatactgtctatgagtaaacactgggcttatgatgttaaaagcaggtaatagtctggcaggctggcagagactgctcagcagagcacggactttctgagaccattccagctgactaaaacatactctgcctgctatacagtgtattctgaagggtgtattctgctttgtaacttttgattctttttttattctgaaatttataaaaacataaagttgtaaaataaatgctttgaacctattttgaagtaatgttatcttcatcttatagtatcagtcttaaggagtaataaaacaaaacattatgaaacagttattgaaaattccattttcaacaaagatactctaaagtaactcattaatgttttgttgttttgacaaggattcaaatgtacttaattatgtatttctaatttttgtttatgttttattttaaaatggccagtatatttatgaataaaatgtatggcccacttctaccattttagtgataaatggaaaagtcttctaaaaacggtaggtgttaatttaagaaccatgtatgccaattaaatttgctgctgctggtctgatggaacttccacagctttctttagtcttgattaaaaacatttatatcaaaattctagaatgtgtcttcaccaagaattttatctacttacatatatttatagcctgtaaaaagtaaaacaaagaatgtgtaactattgtgagcaagatagctttgctcataatatctgatgtttaccaa

SEQ ID NO: 28538 - DNA, 1137 bp, Mus musculus
ccgtgttaataggctacatttaacagttaatatgcacagtaatatgcctattacacattcagagattaggccttttacttgtcagggcccagtcagtaaaatctttcccttggctaaaactgacatttatacaggtcatgtaaagatatgtaaaacgataagcacagaaactgtttgctgctgccctgggaagactaagctcatttgtacgttgactctttataggctcttgcagtaagcctaaatatagaggggctgcatattttaaccttgtgtggcattttgcatgcagctttggctttagaacacttgtcaggagagagtgaatatttgacacttgggaatcgttgctttagatgatgatgggagcagttaattacagacgtctctgagtctcaggtggaaggccaggggcagaaatgctttgctgttccatagaaagatggtggaaaggtggggtgggtgtatttagtgtaattctaaagggaggtggtacagaagggatatggtcttcatcagggatggtgggagctacaaaagagattgtgtgacgtgatttcaagttattctgatctgtttcctacagaagagtttgggaagtactgtgacgatattgtgaacacagcggcatggggcggtcagctcgaggtaagctggatcaccgtgactgtggattaaattatttctgaatcccacttgtagttcttacatgttttccagctaagcccagttcttttttctttctctgttcgccattttctcctgacagagagctgtatattcttgtatctgtcattgaaccttgtccccttaagtaagtgaagtatggtttcatcttaaatagcccagcattggatttatgacttaacagacgctagtgctgcatctctgttgttatttgagatgctagtctgcttgatttttctgtatttaaaaaaaaaaaatgaagacagtcaaatgaagacttacttggtgtggtggtgcacacctataatccaagctggtgagaagccatcttaatgctggcctgagctacacagggagatcatgtcttaaaaaataaaaaatgtgttgattttattccccgaaggcaaattttaatctaagagttcggtgttgcagaagtaacttctgtat

SEQ ID NO: 28539 - DNA, 1184 bp, Mus musculus
ggagctgcaaggtgacgggaaaggggctgggaatgtaagaggcgtccacacccaaggctgggagcgtggagtgtgtcctctggtacctggacgggcacacgtcctggatccgtctaggctttccctcagataacttttgatcagtcttctccagctttccccattccctcgacccccttatttgcagtccccggagatgtccccgtgtgcgacctgccgtggacccctagcgggtccggtgcacgtgctgctgctgagtgatgtgcctggagaccaaagtcttggacctcctcttcctcccttcccattcctgcccccgatcccgacgcctggccttagtggtgtggtctgaattgcttctccttggcttgtcggtcacagagaaagatatttaaaaggcagaagttttaccttagtatagttttttaaccttggttttgccctgtcaaaccaaacaaattcgagattgtgtttacgttgggtcgcaagcctcatccggacctttctccgtagctgattgttgtgtcatgattaattgcttctataattactttacattctataattgtacctcttcccaccctcttaactgcttttcgctttttggtccgggggctctgacacggctgttttgatgactttttttagccaaaattcagggaatgaagaacgctgttcccaaaaacgacaaaaagaggaggaagcagctcacggaagatgttgctaaattggaaagagaaatggagcaaaaacacagggaagaactggagcaattgaagcaattgactttcaaggacagtaaggtatggggagcgaagcttgtctctgagcccgagcaaacagctgtctgagtgtgttgaactgcttattgaatacggtctcaaaattctgaaatcgagtcatacagtcacacatcacatttcctcgacattagtttttttagacagagtgccttgtagtctaggctgtcacccatgtggatttggagcagaggctaaaccttgaactttaacttcagatcctactggtgtgacttcacaagtgctgggattacaggcatgcaccaccacacctagctgtacatttctttagtatttttgtgaccaggtttatgggcagattttctttttttaaatggaagaacagcaaaaaagtgcctacttccttaacctaataaccatgta

SEQ ID NO: 28540 - DNA, 1164 bp, Mus musculus
cctccctcctccttctcctcctcctcctcctcctcctcccgggctctttctttcctctccagtcccctcccccagcatgcctcccggcgtgcttcccttcccccggcctcgcggtcccgcaccctcccctcccccgcctcctgccttgtgacacatcctgggccctcccggaggccgtagcggcggcgcggcggcattgctggccaccacctcctccctagccgcagcccagctcaacccgcggcccgccgcgctgtcgctgcagtcatggctgctgacggggtggacgaacgttcgcctctgctgtcagcatcccattcgggaaatgtcactcccacagccccgccgtacttgcaggaaagcagccccagaggtaaggccggcatagacctttctgcttctcgcagaaacgtctggaaggatggaaggatgaatgccggggagctctagcgcggaggcggaggagagcttctcccttgggctgggggaaaaggatgccttcccaggctctgcctgcctacccgaaagcctgtctgcagggcttcgctgctgctgcttgtggtgtggagtgtgtgcttgaacacttccttcccagcttcaggatcggacatgaattttcccaagctccgagctgctgtttccaaagcagcccctaagtgcagctgggcggtggtgcagatccttcagtcattcacaagtgctttcggttgctgaaaaacacggggcactgctcaccctggcatctgcccttgagaggacttcagcaggaaacatcttagtcccttacactcggccccggagtgcaagcagggaactgcctaaccagaagcaacagagtttatccctaatatgtccgaaattcctaagctacgggcattgctgcctgtaaggagtgtgtttcatagcttcagtggtgaatgaagagccttccgttaggaaggaggaattttttaaatgcatgtctgggtgaggttgaaattaacttctaaaaagttccccaagtttataccgtatatatttttagttttgtttttcagtgtagaattaaaaagggatttggagaaatggtgtggtgaaggagaagtctctttaccaaaggattcgatttattcaagcactgtctttgttcaaagtctttgggagtgtttactacggtagtctgga

SEQ ID NO: 28541 - DNA, 1993 bp, Mus musculus
cgcttctctatttacttcataaaatttgtagttatacaagtatcattgttgtctgtcgattagagtcaagagctacatgtagtcttacaggtacttagtggcttcagtttggaaatacacttcatattatcacaaacagggaggccaacacaagttttccaaaaggacatttccttaaagtttctaatctcttgctttgatgttatttttcgtttcaggttggcacacaagatttttcaaggcgatttcatgcaacctatgtgtcttgggcaattgcttatctgctaggtttgatttgccttatccgagcttgttactggggcgcaatcagagtcagttatccagagcacggctttgcttaagtctcctcatgaatccttgatgcaggcgagagtgtccagtagtccttgagaagctctgctggacgccttcaaatcatttatcctcctggattccatcctggtttgtatagtagtctcaagaatttgtgagtcttttctgaacagacgctcactgaagtacattatatgcaagttcattttgctgctaggttttcagacttggaaaaataaagctgtgtctctgttcttttaaatcataaaggtatttttgcatttgtcctcccacgttatatctaatatcagtctttcattatgtttaaaccagttgttccattacttgttgctgtgggactatccccaagaagtgtttataaatgtttctacaatagggtcacatttatacttacattttaaacagaattgcttgctttaaaaatctaagcaatatgcatttttgcttgaactgcttactgtaattttaacctaagagtatagataccttattcaggaaaaacaaattgagtgtactttgaaaaacttgacattcttgtcagagaatcatttctagatagtatatgcttgttttttttgtttttttttttttttgttattgtttgtagaaagatacaatattttggtagtaaattaaaatacctaggatgaacatatatatagtccacagttggagatgttagataaatgtcttttctctaagattacaggactttttgcctttcagtcttgtctttttatttagcatttacaaaaatctggtctggatttatggaatttaatgttactctgctgaatgtattcctttataaactggaggaagtatttcagacaacatgttttataatacttcatcatctcgtcaaagacatgttgacactgggttgcagtccttttcattcaatcatggtaaacttatcttcttgacatctgtgtacacccgcttctctgggaagagaacttaggacttttttgctttagctgaaagttagaattagagattctcttaccatttctcacctggtcagataatgactcgacttcttcaagagaacggatcagagagagagagtttcatcgtcacctaaaacttcgcgtggaattcatggactcagctcttgcactgcccagttttgcagtttagaaggaattccttgagagtcagtggtctaaactctttcacattgtagaattagacaatgagatgccctgaatacattagtaggtgattccaagggacaagactaatgttctaaattatttatgttcctgattaatatgaaaatgtacttaatgcaaagtcggagtcagctacacctcaaagagaaaatgataaatgtataaatgaagtagctcaggattctatgtacctttgaaaatatgctaataaagattattattcaaaaatcactttgttctatttcttcctaaaaaattagattttatttccaaaatttactttgagatcttgctgtgaaatattcatattaaggaagacagaccatttttggataatgttcctttatcttttttattctgttttcattactatgttttaaatatttttatttggtatgctatggtattgttagcacactgtatattcagaataaaataatcagtgtcttgtcttaatgaca

SEQ ID NO: 28542 - DNA, 1173 bp, Mus musculus
tttgacacgcaggcacgcgcgcgcccgtggaagctgagagcgcgcagccccgggtcccctttccgcttcccgtggcctccctccgcctcactcttctgccccgggcagccgaggcctccgttgcctgagagacgcgggtacctcgccactcatccgcagcaccagccgggcgtcacgggggcgtgaccgaccacccagctatgtctccgccccctctgcgcgtgccccgcccctcgggcccaagggggcgggctctgcgggcgcggggtccagactcgaccgactcccggcgggaccgcgtctcgaccgccgctgccgcccttctccggccgttccctccccgcgagaggacgcagggagccgaggcctggcgtgcggggtgccatggaaggccgcaggcggggggacgcggcgggagtggagacactggccggctgaggccgaggcatgcggaaccccggtgggagcctgccccacacgctgccccgggccttgcagcacgccggtcggacgggagtcgtggagcagccgggccgctgggcaccggagcggacagcgggaggggaccgctcggaggaccgccttccccgcgggggcggggccagcgcggcggcggctgctgctgcggcggcggcctcgggcgccctgctcggcgcctatctggagcgccacggtctgcccgcggcctcggacttgccggcgccggccggggcgttggcaggcggccccgggagcggcggcggcgtggtggtcggggtggccgaggtgagaaactggcgctgctgctgcctcggcagcacctgttggtgccggagcctcgtgctggtgtgcgtgctggccgccctgtgcttcgcttccctggccctggtccgccgctacctgcagcacctcctgctctgggtggagagcctcgactcgctgctcggtgtcctgctcttcgtcgtgggcttcatcgtggtctccttcccctgcggttggggctacatcgtgcttaatgtggcggccggctacctgtacggcttcgtgctaggcatggggctcatggtggtgggcgtcctcattggcacctttatcgctcatgtggtctgcaagcggctactcaccgcctgggtggctgccaggatccagaacagcgacaagctgagcgccgttatccgcgtcgtggagggagga

SEQ ID NO: 28543 - DNA, 1177 bp, Mus musculus
tgctacttaagaatgtggatgatagctgggtagtggtggcgcacgcctttaatcccagcacttgggaggcagaggcagatggatttctgagtttgaggccagcctggtctacagagtgagttccaggacagccagagctacacagagaaactcttgtctcgaaaaaaaaaaaacaaaaaaacaaaacagcaacaacaacaaaaaaagaatgttgatgcttatttaataagatgcaagagaatcacaaaagtgtttacatgctgatctgtatgtggactttgctcatagataagaaaaattagttgctaaatgtctctttcaataattgtagagtagtatagtaaattcttattaaaagtttaatttccttctaagtctatgggttgcatatattcccttgatagttgttcgggtgcttcatccatatttcagatctttaccctaaaaaagccagcagtgacaagatttatagaaatgtgactttgcacttgataacaaatcgtgacctttaacctactttccagattactgacgtccccttgcccagctacctgatggcgtcttcagctgggctgctcccgactcagcttctgaattcttacttgggaaccacactacggactatggaagatgtcatcgcagaacaaagtcttagtggctattttgtcttttgtttacaggtgagtgcaaggccaagagttgtctggctttgctgctctttgttttgctgactgtttccttggccacagttgaagaattgtttcattttagatagttgtttcaatacttctttatatttggatgacagtttcaattgtgtgaacacccggaaatacatgggcgtggtcagatgcatagaatatcctctgtaaaatcataagaaaagaatcataaaaaatggattccttttacgggggttgtttttaaagtcattgcaagtcaaatgctgtatcttgactttgtatgaaaactgctgtcaaaaaattttgtattggttcaaagaattagtttttatctaggcttaaagtttttgttttgcttgctttgtgtggataagcatgctaatcacataatgttaaattttgcatgtactgtgcctacagaatagtaggtgtaatttcctatctgtgtctattcaaagtacaatgaatactctgacataaaacgcattcttaag

SEQ ID NO: 28544 - DNA, 1973 bp, Mus musculus
caatcggatcccagtggctcttccttctacaacaagaggaccctcacgttttctggaggtggaatcaatattgtatgattcttacaaactgtgattgttgagagcctagcgtgctgtccaggcctagcagtcacttacctgatggcagagacaagtgctgttgtattatggcacaaacaaaactgactagtttttaaattgcacaattttctaaaagcaagaatcattttctgggtctgtcagtgtaaatgtagatgcagctctggctgcccccccttgttatacctgtaatggcctataggtgtgcactttagtgtttttgaattattttattgctgggacttatgaacagaaaaataacccaaatattttctttctgtttagtatctttatttataaagcccatgaatagttgtgtgcatctttaaggatgagtgaaagtatagagttcgcaatggctcttgttgtatgctctttgcttaggcattctctccagaagggtgaactgttttgtttaatgttcacttgcttgtttcaagcagaaaagctctgctttgttttccttgcttgtaaggaaatagctgtatttcggttgactgtatgttatccggcattatgtcactgtggtcatttacacctctcggtacaagtgtaaaccctacattgtgggactgaagtgctcttaagaccccttttattttcactgtgtaagatgcaaagtgaaagggacattatttagcaggtggctcacaagtcgagcccgcattcttattcgattatattgatttctcccattagacctcatccaagggctgtccgatagcaactcttaccaaaccatttcccccttttatattaataattaggctttgaaataagcttattgttcctataaaatggtgggcttaccatctctgacgtcattcaggtggccttgtttagtcaaaacgccttgttaaaaagaaacgagctttaaaatcatgtttatagtttcagttaaaaaaaatatatatatgtccccatagctttcagctttaaaactataaacattaacaaaaatcccacattcgtgctgtctgctgcattattgctgttttgtttggggctttggtgttccttttccctgacaagactcaggaattctgaaatgtgaaattgtctcaatcctttatcttgtagcatgtgtgtttgctaacagcacttaggacttagcatacaataatccaacatgattcgtatggcgtgcactcatttatcagctttatttttaaaatagtttaattgcaaacttaatgatgagttaattttgatgcaaatagattgtagttgatacggtaacgttttctgttaaggacttcacttttctatgactgttccaacctatcagagctctctccgctgccttttgctggcagtaaaacctttgccctgggtactgctgacatccagagaaatcccgcgcaagcagatttttctagtcttaaccccagagaagagtttgattgtgttcacacacgaggtttttgcccagttcaggtggctttccttcccctgctgatgcgtaaatccctctgcctctgagtagcagtagaagaccagagtaactgggacgaaaggcacctggtctacagtgcatgcctggcctccagacctttgttatcggtagaaaaacaactatacatactgagtccttactgtctgtttagttaagtttcagttagtttaaccatcccaataaaagaaatatttgatttatcctttttagtacaacttggcaacatttttcttgtgtttctcattggctatttttcgttaaaggaatctttatttgagatcattattttcatgcttgctttacaattcatgtattttgaagtgcattatatttacttagcatttgtaacttgaatgacttcaccaaatgaataccttttggtaatttgtaataacttcttccaaatgttaacactttc

SEQ ID NO: 28545 - DNA, 1310 bp, Mus musculus
gatgtaataaactctgcattgtcttttttttttttaactctgtactgctttgacctatcataactacccaccgtgatcatttatagaccctttctatctgcccttagaaaacagatgggtatcaaagaaataataaaaaattaaaatgattaaacataaacaaacaaatcagaatagagcaaaacaggagaaaggaagcacaagaacatatatagatgcaggagtgtacacattcctccacacagagatctcataaaaacaaaaaactggaaactgtaatataaacaaaggacgtataagtttaaaaattaaaaaattgttgacacccttttgagtcaaaatatccctccaaatatgtcgctgaattccttttgcattggtcatttattgctaagcatgggacctaattagagtttcttgttatgataagactcctttgtagacaactaaatttttgtttgtaaaacatgatcagtaagagacaactttggcttttcagttagtggtaaagatatatgtccactttactcagttaaatgtcccaacattacgacaacatttttttttctaatccagtccaggttggaaagaagtctccttagtgtcagattaagccccatctcttaacaatatggacagatgagtgtgccatggccatgagatatttcataatgcagaaggaatttgttgttactttttggattgtactcttctaggctggaccgaattcataagcagattgaagtaagacctgttctttacagatggtattttaatagatactggagtttgtctgtattatatctgtgccccttcttttaagaacaatgttacattatgttcctttggaaaaactgtgatttgacaactgatttcaataaaaatatttgcctctcttaaaaaaaataattcctcatctgatgaatactggtgcaggtcatatgactgaagcctcagtataagtgaggtcatgtgaatgtcagttgtactgtgttttggggttttattagatattttctttatttacatttcaaatgttattccccattcctagtttccccttagaaaaccctctatccctctcccctcttcccctgctcaccaacccacccactccctcttcctggccctgcaagttccctatactggggcatacaaccttcacaggaccaaggggctttcctcccactgatgaccaactaggcaatcatctgctatatatgcagctagaaccatgagtcccaccatgtgttttctttgaatggtggtttagttccagggagctctggaaatactggttagttcatatt

SEQ ID NO: 28546 - DNA, 1176 bp, Mus musculus
gaaagctggtacaagtgctctggaaatcagtatggtttttcctcagaaaactggacatagtactacctgagaccactcctgggcatatacccaaaagatgctacaagaattatcaaggacaaatgcaccactatgttcatagcagcctgatttataatagccagaagcaggaaagaacttagatgtccctcaacagaggaataaatacagaaaatgtgacatatttatacaatggagtactactcagctattaaaaataatgaattcatgaaattcttaggcaaatggatagaactagaagataccatcctgagtgaggtaatctaatcacaaaagaacacacatggtatacagtcactgataattggacattagccccaaagattggaatacctaagataaaactcacaaatcattttaagctcaagaagaatgaagaccgaaatgtggatccttcaattcttttcagatgggggaacaaaatactcatggtaggtagagggtgggaggtacttgggaggatgtaaggagaaggagggggaagacgtgctggatcaggaatgagagaagacaaggatgatatacagagggccagggatttgaacagacctgtgtagcaattggagaggggtaaatgtgggtaaccatcagcaagtcccagatgccaggaaagcaagaagctcccaggatccaacagggatgagattagccgaattgccgaacaaaggagagggagaccatatccaaagtttaggcaagacaactggtaggggactgggactacgtactcatctccaaaattttatcccaaaagggctcctgtctaaaggaaatgcaggaacaaagtgtggaacagagcatgaaggaaaggccatcccagagactgtcccacctgggaatccatcccatatacagacactaaacccagacactatacccagacactattgtggatgccaatgttccttgctgacaggaacctgttatagctgtctcctgagaggcttttccagagcctgataaagacagaggcagatgcttgcaaccaaccattggacttagcatggggtcctcaatggaggagttagagaaagcactgaaggagctgaaggggtttgcaaccccataggaagaacaacaatatcaaccagcgaaacaccccagagctcccaggga

SEQ ID NO: 28547 - DNA, 1121 bp, Mus musculus
acctcaagatgtactacaggctgtgcgtttaaaagcacaaatttataacctttttctaccaactcctatatccactagggttacatttgttggtgtgtacctttaagcaactcttcattaaatttacatcatttgtcttcagcttggcactaatgttaattgtaagtctttaaacagtttcttttaaaaatctaatcttattaaatctactgtgcagcctaaaattgtgaaatgtttccaaacactttaagatttttgcttttaaaatatcatgcaatttcttatcataagcttaataacttaattaaattgtaaatgttctttcaccatctgaatccaatatagtaacaatacaatttattttctctcagaacttgactatagttcaatgcatgatagtttaattcaatgacagtttttttctgagtacaaaagccagttacctttaccaggtaatttgggggtatttccacttaatgatccttttgggaaaaattctctactttgccttaactgagagaggcagaaggaagaggttattataaatcaggttcatactttcttttgcagtgaagctgtgtcgggattagagtgaggaggatggcatctatcccattaatatttcttcctccctaagaatgatgttttcatcttatcaaatctcaaaagaagtctctatggatgtcattgttatcaacattctgataccctagaatcatctaggttcaaactgcagtaaattcagttacataacttcctctaagcatgttttggcaacaatatatttttagtgttattcatttatttacaatttgtgtagagtccctcccaaaaacatggtacaagaatgactgcattgcctggagttggtggatccactcatgactaaagatcattcacacctgtgagattatagtcatggtatttgggaaggagcacaaccaggtcttcagttgatgcccccagttgttctccatattaatatctttatagggatccttgggtctctgactaattacaggtttctaagaagtattatcgagagagagagagagagagagagagagagagagagagagagagagagagagagagagagagagagagagttaacatttacc

SEQ ID NO: 28548 - DNA, 3041 bp, Mus musculus
atttatggaatagatttgtataatatttgcctaagggtctggatgtcaaatactttgcctatctgtgcagtggccagttatcgccaatgtaacagaattgtgtattcatcacatatccctaagtggttgtccacagtaccagccagcattcctgtccgtgttactgagtcctgccaccactgcctgagtctttgttttctgcaggcttctcagaaacagcttcctgctgaggttaggctcagagaagatccacctgtcttgtttgcctcgccccgtgagccgttgcctccttcccacatgggtaatttgcctctggatattgctgttaatctgaagcaatgcacctctataaggcagggtttcttaaaatttattttcatttatccaagaaatttttatgtaacccactgtaaccccagcttaaatacaaactaatatttatgataggtatacaaatcaatcattgcaagtaaattaaaagaaatttattttagacacctggagagatggctccaagttaacagttctcttgcagagaacctattgatttccagcacatacatcaggcagctctacttggctgtaactccagcttcaggggatctgatagtctccttcctctgccctccgtgaggacctgcttgtgtgtgtgtgtgtgtgtgtgtgtgtgtgtgtgtgtgtgtgtgtgtgtgagagagagagagagagagagagagagagagagtgcacatacacacacacacaaaacaaagtgaacaatttttgttagacttacagttttaccatttattaaaggtgaaagcatatttgcctactgctgaggtgaatatgcttgcttggttttatataagatctagatcgcaactgactatttgatattgaagtacacagaacatctttaatgtacttcagagttggttgatatcttgatttttgattgccaatacttagaaccttttttcacataaacacatagtacaaaatgccatcagtgtttagaggtgtttccgaagttggaaatgctatcgtcatcctaagccaaaacacatttaaagtttgtttttttttttttatgaagcaaatgttgacaatttttgaaatcaaactttctagcataatacaatctagaaatctattgattggatattgacttgatttagaatgacaggaaaatagaagtctttctcttctgtaacctagtgtttatgctaaagctgagtatgcacagtaaaatcacattaaatcacaatgcataaagtaacactgctgagtcaggcagtgtttattgttgttgtgtgacatggcagcagtgtagtgcaaaatgcgcctgctgtctatgacaaccaaggctgcagtgaagttgagtgatacaacatggcaagccctgccagaaacacctcagattcattacacatttggttttgacttaatttttgaccattgttcattagaaagctgtactgttgttgatttttttccagtcagttacatggctgcctatgggaccatggcccacagtttaagaacatgggcatgactcagtagtaacaattcagttatcagtaaagtaatgaaatctgatttttttttcttttttttttctcatttgaaaccattattagtccacagtctcagtttcagttctctgtgcttgggaagatgtcacagtggcttttaggactttcttttgcatacagagggagccagcccagaaatgcattagattctctgtatgttaatggtaggagaggggctttttggctctgcagcaaggctcagtaggcttgctcagaactgcaggcccatctccatctccatgtggtagctgtcttatttctgccgtttggtcttccatggtttctttcatattgtggtttacctgcattttttctttttaaaacagtttttctttaaatgactcgtcttgatcaagttttataaatgccattcataggagctgtgattctggcaaattaaagtaattcatagttttctgcaatttgaaataaaagcatttccaacttctagattatcattttataaattctttgtttcagcactcaaccttcattccatactattttatagtgtgttgtactcaaatacttatttttccttttgtgccactatttgaacaaatgccattcattcttaaagaacattgacatatgtatgtggccatcctgtgcatagacatacaatttctcacatacagatattcagaaatagtatttgtactagtctagtcaccttattttctgtttaagattggtttgtttaagaccattaacattttaaatcttctgatgaatttacaagtattcactttagacagggctctgtcagctttcccagagtagacccagggcctcactgatcttctgctgctgtgttttatgtgtctggccttgccttttcatttcatactagaaagccatcttccagaatgctctctaggctattttttcatgaaggtgatgtaagataacagctgggtagaattgtgagcagtatgtgcataacttactaaatatgtaaatttatattaaatacattttccatgtgagttccctttaaataaagttactcttgatgtaacatagctgtgtttggttttcatttttgtgtctctacatattaccaaaacagtagaaaatggagctggggaagtggctcagtgggtaagaccacttggtatacaagcttgaatacctgagctcagacccctgtacccaagtaaaaagccaggtgtggccatgcaggcttaacctcagcactggagggaagagatgtgggcttgctggggcttgcggtcaacagctgaaggacatatggtctctgctctatgtgtcatgcacacacttgttcaaaaactcatactaccatacacacaaaagaaaaagttagagataaacagaaaattagtcttatttggggtgacattaaaaaccaccccagtagaataatttatgaataacctgggctggcaagctcaagagcctgatgcaggcttctagagaggcctttgctatttcacaaca

SEQ ID NO: 28549 - DNA, 1318 bp, Mus musculus
aacaaacaagccagcagacgtcctgtttgtaataataactatgattttgtttttcttcaaggctccaaaagaagcgcttgctcagtgtgtcttggcagagattccccagcaggtggtgggctacttcaacacatacaaactccttcctcccaaaaacccagctgtgaagtagaggagccaggacagctgcaggatttcaaaagctgtgtggagcaacgccatctctcacacagaatgatgtatctgccctctgcgcttcttaccccaggctatatgatgtaaacctagctttttgtatatatcctatctgtttaaagcatccattttatactttttgaagaggacagtagcaagtccatttctgctcagtgtattcagtgattgttagtgatttatagaaattacaagagtgctgtttggaattgaacttaatgtggggaaagtgatgtatgtttgtttattgtctactttctataatgaaatgccatttttaagtgttgcccgtggagtgaatggggatttacaggatgaagtggtatacaggttgctatactgtttatagtaaatattttgcaagtcaatcaaagtgaggtactgagtttgtacctgtgactctctattctgtctcttttatgctgcagtgctacagtgtactagctgtgttttcatatggttgcttatgaaaaccaatgggcttactccgttttgaaaatgtccactcaaccagtggacagctccttgtagacaagacatttttattgccttttgaaatgttttcactgtgaagtcttgtacatatatggcctttgctttactgagtaaacaagacactcaaacttctgtgggcatcaaatgataggtcatcccagaggccacatgattagaccagtgtaggttgactaagtgagtaggattgcttcgttcactaaagctttgaggaccaaacatttaaggtgaaaattcaaacagagttgcaggccagacatggtggcacatcatctgagcatttgggaggcagagacattagggccagcacaagccaacccacttacatagttaattccaggccagccagctacccaatgagaatgtgtttcagaataacaaagaaaaataagtaattgagaaatacattttttctaagtaatggtataattgcaaaagttcatttgtaatttttttcttgtcctgtgtattgatttatatgaatttatttagatatttttgccatttaaaaatagtattattgttttctttaagcttataattctagttatttattaaccaaaattccatttttcatttcaataatatacta

SEQ ID NO: 28550 - DNA, 1145 bp, Mus musculus
acaagatcaagccagccttctggggaagactagtctgcagacctcatcaggttcttaacctttcataccagttatagacttcaggcctatagacttgtttatctactcagtagtcaaagtcttaaagagaggtgaatcacccctgctgtctccttcccatccctcttctgaactggaccctccacatctggctcactgaatccagtaagacaaagttggaggtgaggaggaccgagagacaggttaataatgatgctttattatagtgacagttcccaacatcaccagtaaattgagcttagggaatggatcatcggcttaaaacagttttacctgtcagctcagtcacctacctgtctttgggaaagaagctactatttgttttagaaaatgaaaatgttattacccttttctccagctgacttcaattatcctcctaggtctaggtgttctaaattaggtgttttataaccactccatcaacagaccacctttgttgtgtttggggctcaaaaagaaccctaactagtaagctgcttctgaactgagaaagctcctgacatataggagggagctgtaactgcgtttcccagaatctgaacaggcttactattgcatgtcctaaactgtcacattaggagactaccgtttttgtagaaccatgtgatggccctgctatattactactacatgttcattttctcaaaggaggcctaacattgcactgatggccatcatggttcctgcactagagtattcagagtaaactgatgccagacaaatgtagtttactgcaggcttactggatcctgacatttaattaaatataacataatctagtaaacactgaagtaacaaatcagttgttgaaacatgaaataaatgttcttctgtaacatgtccaacttttcttaatgtgttgaacagagaaatcaagtcaactgggaatttgacaccaatctaaatgtgctatttcctaaatgctaaaagttcgactccaaaattcaacagaatgcaattaaaatggtggtatttctttttattactaattctacatctttttcatgaacacttaattctgttggtccttgtgattaacgtagtatcttgttttcattatgtttcttaagaaacaagacaagtct

SEQ ID NO: 28551 - DNA, 1541 bp, Mus musculus
tttgtttttgtttttgttcagttttaatcgcttggatctaccaccatataagagttatgaacaactaaaggaaaaacttctttttgcaatagaagagacagagggatttggacaagaatgactgacttgtcttggagaagctcttgcatttaaatacccagccaagaaaaattgcacagatagtgtgtataagctgctcattctgtacagtgaattttctgaacctttcaaagtataaatgttttccgttcttccacagaaatatgcaaaacatttcatcattttctactttatttattgttccctttaaatgactgaccaggaaaaaaaaatcatccttaaattttgacgcaagcaagagaatttattaaaaagtatatatctatataaccatatatgacagtggctctagttttatagagcgccaggtgtattaaacatgacagccgttcattcacaaaactctgaatttgctttgccttgtttctgttttccaggggaaaagtgcatatgtgccatgttcttctccctaggtgacattggattgtgttagctgcatggctgttcaggaaggaatttagggcttaagccaactcttactttaagtgtatttttttaaattgctgctggcttttctgaagacaagtacttcaactcattaagttgtactaaatgaataggttttttttaatcacatcattgttatatcagtagacacagaagtcgtgtgatagatccagtcgtgtctaggagcagctgggattgacttgctgcagagcagaggtctatttacatcttactttcggatgttgggtatttgtggaaatttaaagaatcaggcatctctatacttacatttttaaacttgtaatgttcttcaaattcaattgctaatgatttgatagtttaatgcttagggatacataaaaggtactgaacttggctgcttctgtgctcaaggtttacttgtatgaagtcagagatgttctaatggattgaaaagctgcagaagtatttaaacgctcacactaagtactttttattagtgtttgaatgtccccaccccttccttacaaaatcagaattgtttctaaattcagtaggtatattaaaagaattctttgtgctccctattttatacagagcaagttttctccaaatgacactgatttttcttttcattataagggcattcttggtgtatgaaaaaaattaaaatctaatgtgaatgatactgctacttttagcaaactgggcttcctaattaatataaaacattaatttccatttttatcctttcaatatgcactgcgaagttcattaacttaaaattttgtaactatgaagttcacttagaattataacttctatccactagtttagttttgctaagattttatttttctactttagattatgttcttcagttttattcagaattcacaaataaaagcagtagtctacttagttgaataaactatagaaaatctggctattctcaagcttaaaagaatttttttaattctaacatatggcaagtt

SEQ ID NO: 28552 - DNA, 1154 bp, Mus musculus
gtagtttaaaagggggtagacacagtctaacaatggttgagaactcagtgagactggagtttaaatgttctacattttagcagtttaaaaagacaaattatctaaattctataagtctttcttctctttcatatgtggtgagattactaatgactcatagctgcctggtagactgttgtgaagtctaagtgagaaacacatgccatagtgttcacctgcagccctcactgacaggtgtacctccttgtgggttactgcagtcaagccccttaaggtttctaagctgctcattgacctgccgtttgtaggacagatctaatagtagctggttgtggtattatcgtgagggttactgaagggatatctacagtgtacctatgtggtactacaaatactttttactgcactactattgcttgaaccagtttcagtggcgtgtttgtttgtttttaacatttttcatttgtttactctcattggtgggatgttggccattattttatattaaattacatttcattttgtcatacagtttgtgaaagagactgataatgaagtacgaatgcgactcttgcagtttgtgactggaacctgtcgcttgcctctaggaggatttgctgagctcatgggtaaatgaggattcactgcagtttctctgaagttaattttgtgataatagtatgtgttagacatacagtagcattaaatataacgacttatttgtatgaaaattatatgtaaagtttctatgatagaaaagaaagagccattgatactgaaaacaattttcttggtcaatgttctattgctgtgaagatacaccatgaccacagcaatcttatgaaggaaagcatttaattgggtcttgcttacaactccagaggttatagcagagagcaaggccagaattcagggagacatggtgctggaggagtagctgagagttacacacctggatccacaggcaacaggaagagaatgacattgagcctggcaagggctattgaaacctcagagcctatccccaataacacacttcctccagcaaggccacacctcctcattctttcaaatagtgctactccctggtgaccaagcattcaactgtatgagcctgtggcagccattctcattccacccacaaagatatgtga

SEQ ID NO: 28553 - DNA, 1256 bp, Mus musculus
tacaaggatctttttcattgcacaagggtgtttttctttataagaaaataagtctaatcagatgagctgatacttacgattctcagtacatatacctctgacaaaagtgaaaggagggccagatgttctttagagaacgtgtttaattttcacttagcaactagacgctacctttactatttaattttactaaaaaaatcttgcctttttctttaaaaaagccttcgttactaaattatgaaattgaaattgtatacataagaataataaaaatcagttaaagaaatgaacagtaacaaaacacctctggcttatcaaccttttatgatagaaggaaactcagatgtcactttatttatagagagctattaagtcacgtgccatgactctgtgaaggaatggcacattacaataaaggctaatgttttgaatgtgtatactagtaaagcaattaacagtaacctgaatttaaatgtcagtcgatggaagtacagcctatgacagggctttgaaaacgtttctacagtgaagcagttctacagagaacactaatgagcaatgtgtaaactgtttggaaggtgctggtgaataactggaactttccacatggcttcaccacacttgtgccagaaacatattctgaaagttgagctccataggtgctcaccgtgctgctgaatttcacaataatttgctttactattgttaaaaataaacatctttcctcacaaaccatggtgtttatatttttctaaaatggaaaggaagcattcttttcagaaaagagaaatgtttttttctttcagaaaaatgcagtaaaaacatattatccattatccgaatgcagtaaaaacatcttagccgttatccgaatgttggttctgttgtttaggtgcaggtgctttccctgttgttctgcttccttcagtgtctttgctagatcaagtgcagacgctgcacacaatctctagttcctctagttctggatttgagaaatctgtctttggaattcatgttcagttttacttggatagtaaaattatcccgaaaaattaaaatctattaaagaaacacacattatctgactaagtagcacactgtgatctttacttttattttcattttgcctagagttgtaacttaagtgtgcatggcttagctttacacaaacagctgtgtggctctttttatgtatatgccctagtcaggggttctattcccaacaaagatagataatccaattttagaacaatttt

SEQ ID NO: 28554 - DNA, 1160 bp, Mus musculus
ggaggtatgtgcttgcgtgtgaatgtttacatgtgagtataggtgtgtgagaaggccagaggcatcagtcccctgtagctgcaattatagagggttgtgagctgcctggtgtgaattttgaggaccaaacttggatcctctgaaaaagtgatcttaactgctgagccaagtctagctatagatgagctgacttttaccctaattctgtctctttctagttgcatttgtccctatccaggtacctaatcttttaagcaagttgttttacctctcagccttaggtttgtgtgtgtgtttgtttttggacttttgagacaatgattcaccactaatggtacttttcttgcttcaagtcctaaatgctgagtttactacaggcataactcaccatctttcccatatctaaatcctttttaaaaatgtgtgtgtgtgtgtgtgtgtgtgtgtgtgtgtgtgtgtgtgtgtgtgtgtgtggtttgctatatatgtatgtatatttgtgggaggcatatatgtacttgtatatgcatagatgtcgagttctgaagttgatgtgtagagtcatctgtcatttctttcccaccttatttggtgaggcagggtctctgaattaaacccagagcttgtcaatatggctagtcttaccactggccagtttgctctgagggatggatcacctgactcttctttcagaggcttgaattacagatggactgcacacatgtaatttatatgtgtggggatccaaactccggtttccttatgcttacagggcttctcctgctgaaacgtccctactcacctctgtatgtcttctacatcatatcaagtcagtaatagggtatagtgggtacacgcctttaatcccagcacttgggaggcagaggcaggtggaactgtgagttcaaagccagcctggagtatggagctagttccaggacagctagggctacataatgaaacccaaaaccgaaacaaacaagaagacagcagttagatgttttactgtgaagcagttttaaaggaagggtttattttttcccgcagcttcagtctgtggtttgctgcttccatcacttttaggcctgtgacaaggcagaaacatcacaatgaaaggccaaaagcagagaacgtggaggagactggggacaagcagtatc

SEQ ID NO: 28555 - DNA, 1179 bp, Mus musculus
tatgaatatttgtacccacatgtatgtatatgtaacacacacaagcctgaagcccatgaaggccagaagagggcactagaccccctggaattagagatagttgtaagtcatcatgtgggtgctagaaattgaacccagccgggcgtagtggcacactcctttaatcccagcactagggaggcagaagcaggcggatttctgagtttgaggccagcctgggctacaaagtgagttccaggacagccagggctatacagagaaaccctgtctcgaaaaaccaaaaaaaaagaaaaagaaaaagaaattgaacccaggtcttctgcaagagcaataagcactctaaacagctaagccgtctctctccagtaccccttttcagttatgtcataaacattgctggttttcaaccttatactagaggttgatataaattaaacttaacacttctgtggcattagtgcctttttttaatgttttgtttctttttattcatatgcattgttgttttgcctgcctgcatgtatgtatgaatgagggcattggatcccctgcaactggaattacagatagttgtgatccaccatgtgggtgctgggaattgaatccaggtcctctggaagagcagccagtggtgctcttaacctctgagccatctttctagcccctcattggtgactcttgtaaattgctgaacttggtaggactctaaagtattatgtatgttcagtgagaaaagatgctgggtttgtatggataggaagaaatagcaggatgtatggcatgtttttgccaccgtgtggtatgtgttcctctcaggtagtcttactgagatcagtggcttttatatatagtcttttatgtgttgaaacattaatgtaagtgtgtgtggggggagggtgtgggtgtgttgtgtgagagtatgtgcatgtgaaggcggggtacacatggtagaggctagaggtcaacccttgtcattctgcaggagccatctacctttttgaaacagggtatctcactgagaactacagctcatttattagacaaggctgactgaccagtgacccacaggttacgtgtgtgctatcatgcccaagagttttcttttatgtgtgtgaatgttttgcttgcatgtgtgtccatgcattatgtgtggccattatgaagtgcctgcagaggcca

SEQ ID NO: 28556 - DNA, 1511 bp, Mus musculus
ttaagtcaggaaacatgaaatgtcatttgttgaaatttttctttcagcattgagggaccaaaagaggacataaaaagtcaataaaactacccccagcccagttaaattttaaaactggatataagaaattaaatcttagaaaatccttagaaggttttagaaatgataattacagtttgagggagattaatcaagaacttacttattttaaaattgattgtatttaatactttttgtatcattacagaagatactggcccagcctatcaaaaagtgcaatatatatatagcatactttgacattttaaaggttggattgacttactagctgttttgaaaacctaaaagaaaaggttatttgcaactaatttatagttaaattagtttaacttgattaaacacttaaggtaaaatttggtgaaattttaatgtttaatctgtcctgaaaattttttatgagacatatacacccggtttaattttatgttttattgtgaactaacatatgtacagcaagtattctaaatcaggaaggaacctagtcaggttttagaccagtgagattcttaattctcatgggtatagacttcagaataaatgttacatttgtgggacttcataaattaattaattttcttcagactcaaagggagaagaataaataaagcttggagtaatgagatattattgtgtagttttgcaccttttaaaaaataaatcatgaaaaaaattactaagtgttgacttcctggttaaaattggaagaataaaagttaagtttttcaggtatattaactaatgtcttgaattcctgttgctaagtttgacttaggttctctgagaatctttgtgcgtgttaaattagagccctaaactctgtaaagaggtgatttttgtatagtttatgaatagattgtgaggaaggttctgcttcctatggggaatcagatgcaggtgtgctgaaaaagagacttacattggtacaaacatggactctcctaaggccgtataaggctaagtaacaaacaaacagaggaacaaacaggctctccccgaactccacttggatgcttggtaattgatttgcttatcccagccgttaactatagttttatcttcaagcttttttaaatccagtttcttttttcagattttttttttttttttgctttattattttctttgcaaatgctcttgtggatgattaagactttgcaaaagcagacaaagccgtgaaatagatctccatgtgtgtatgctctagcctcagccattactgattcatagccagtttcaccttaatgtaaacttccacaccagtctccagctcatacattatcttgaagaaaattctagatatatcattttacccatacataatttcatactgctaataggtgaaataattatttactattatattaaaattctcaattccctgaacattgcagagcattctgtattcatttataaatccttttaggtttagattcatggattattcctccatg

SEQ ID NO: 28557 - DNA, 1198 bp, Mus musculus
agcaaaagaaaaacccagccctggcaccaaaggctaatagattctggatgactgcttggcgaccgttttcctcatctgagaactgagggtgctgctcccctgaatatttcaaagtctactgcacactgagataatatgagttgccactgaaattatattctacagttcattttgttattcttttctcatacattacacccgaaaccaaagtttcccctcccctccctctacaattaatttttaagtattttggtgttccaaaatgatcagataagctggcggtggtggcgcacgcctttgatcccagcacgtgggaggcagaggcaggcggatttctgagttcgaggccagcctggtctacagagtgagttccaggacagccagggctatacagagaaaccttgtctcgaaaaaacaaacaaaccgatcagatagctccagttatctagccatgtgtcatcacggttgtgagcaaaaccagtgttaacaagcagccccaattttaaacaataactgagcttctggtttgagacccatatttttaggtccaatactggaaagacggaggcagaaagatcaccatgagtttgagtccagctgggactacggagactctgtttcaaaagaaaagactctggggtctggagaagtcaactctactcaggaaaatatattcacagcatctgaagactcatggcaatgtgtgggcagagtagtaacaattcaactcattctaaaaattataattaatgtgaggataagaatctgatgggttttgactgtggagagcaaagtaacctagaagaggccaggaattggtgtgggatactggagatgttctgtggccatgactgaaaacgtcaggagtgtgtgtgtcaaaactcatcaaaggaagcataaaaatgagtgtttttccacgtcaatatacctcaatttcaaaactaataaaatattaaagtttgactccctccagcatgcatgtatttctttaaagtgttaagttatatgcttgttggtgtgctggcatcatagtaacaaggtaaacttgttttcctgcctgctgcttctgaccatttgttttgactctcatttgtgtagttatttagatcaggtaggacccacccagcaaagctctccaggtacttccttctgcaaaataagtggaagccattgaaaaatgtggaaatacaaacatttg

SEQ ID NO: 28558 - DNA, 1175 bp, Mus musculus
tgatagaagcgaacagctcctttgtgtttgatgggtttaagtctccctcagattcctgtcctatagcaggcctggtcccttccttacaggtagccactgttaagagtcccaggcaacagtttaccttcaaaccagagcaagttgattttcatttaggtagatggatgtcagaggagtatttattgaataattgcaggcagctaagtaggactttagtggcatttgtttccaataagatcacaagattgttttctctgaaaaatattgtcaacttacagaaccaactaagtcatgacagaaaacatttaagaaaatggccatctgaagaagagaaaactgttgttacacacccaaagaatgacaacttggaagccagcccgcctgccagcaccctcagcactgaggcgtccctgaacgagagcctcactgacggcagcgagagggacgccagcctagagagcagcgtggatgccgacagcgaggcttcggagcccgagatcgcttccaagcagcctgtgctgctgcggtccaggggtgattcctgcggacacgcggagcagcacccacacctcccactggcaagtgaattgccacaagccaaggagacgcatggtggcgaggaggaaatggcggaagcgattgctgaacttcatttgagtggcactgtaactggcaatagagatttccacagggaaaaacagccactaaatgtcccaaataatttgtgtttttcagagggaaaacatacgaggcttcacagtgcccaaaatgcttttcagaccctttctcagagttatgtaactacttctaaagaatgctcagtccagtcctgtctctaccagttcacatccatggagttattaatgggcaacaataagctgctctgtgaggactgtactgaaaagagacggaagtgccacaaagaaaccagctccgcaggtaaacagctcattgcctgctttctgtgttactgatgggttggaggtaactcgggctttacagttccttaatgggtgacccaagttcctgggtgccttgggcctcttggcccaggccttgttctacttgggtctctgaattcaggacactggctgggcagagtagattcattcacaggagagattacagtaaatggagagcaagaagtacacttctctgtcttgaaactgcaaacc

SEQ ID NO: 28559 - DNA, 3665 bp, Mus musculus
ttttttgcttttgtgagacagggtttctctgtgtagccctggctgtcctggaactcactttgtatcactttgtagaccaggctggcctcgaactcagaaatccacctacctctgcctcccaagtgctggcattaaaggcgtgcgccaccactgcctggctcaaatctatatttttaaatgtaaaaacatgttttatgttaattttcatgtccatggaaattgcccctacacacacacacacagagttgatagtaaagcaaccccctctatgatatgactcatccttacatgcattcaaagatgatgctaaattggatctttagtatactatttcctaatgtaatacaaccttcctgagtggatccaatatatcttatgctacaatttgcttactttttgttgaagccttttttaagcttggctgttttgaatcatacttcacatttttatgtgctagttatttttctagtaaacattgatgtgagtttataactatgaaaggaaaatcatacatccttgcaccaccccactttaaatcatctcagggctctgcagtggtgtgtgtgttagtctataggaaaagtttctagaacagtctgaactagtgcctaatgtaacataattaatttttcatattttatgtgagtcagtagtataaaaaggagccattgtaattttggtagtgtgagtttacaagtaatgaattgattcgcttattgctttgaatatttgaaggtattgaaacatttcataaactaatcatttgcagtctttgaaagataatttacaacacataaaactggtaaatagaagttatagtctatataggaatatagaatactttaaagtttaaggatatctttgaactgtaaaccaccaaattatatttataaatggtagagatcatattcttataaccaacaatgaatatataatacttttttacttctatacattaatacatgttaagcatagttttgtcttcataagcatttatttaaaacttcaggtggatagttagggttgtagttcaatggcaaagcacttgcctggttccatccctagcaaaacaaagaaaatattcaggtgggcttggctactttcatgggacacagacttgccacttctgttccccttaaataagcagtaacacagaatagtttcttctagcattcaaaggattgaactgtgaaaacttagcatgaaaaatattactaccaagattttcaataatcaatgaagtggctcactgatacatagtattgaatcaagatgtaagggaacaggttcaatgtcttagtcatcagtgcctgtgtttgattctatgggcaaatgtgagggagagaggctgtaaactgtccagacctttagccaggatggaaccttcttaacatgtgtaacataaagtccccagtgttgcctcttgatatgtggctgggtgaaactgattgtctaatggagacattttaagattgtggagaaattttcaatggtatttgaatttttttaattgaaggtgaagaaatatattttatctgtagagcccagttgtgtcctctaaaaagaactttccagtgtcttctgtttcatcagacattcagtgttattaatctattgacacggaagagtctagcaccagagcaatgaatgagaaaaataatttatttgttcaagctagcctgtcatagcagttgcacccacacccccaaacaaatgcaagcggtcagcctttttcccccctctctcctggaaaagatactattaagacatgtacaatctaagcaggttccaataccgggcatatgatagtattttatgagcctttaaaacagaaaaacctgctgagtgatggtggcccatgcctttagattcagcacttgggaggcagaggcaggtggatttgagttcaaggacaccctggtccacagagcaggttccaggaaagccaagacaacacagagaaaccttgcctgaaaaaccttggggaaaaaaaaaacaccctaaaatctatatgattttatacattattctagtagtgatgtacaaataaaatgttcatttattacctagttctgaggagattctggaatgtatttttttttaatgacctaaagtttgagtgtttttcttgtcacctgaaaatgtaggaaaatggtttgatttgatatctaggaatttcttatcaagcttatgtaatatagaaaaatcacccagatctacacttaaatttttgttcttactttgaagttttccaaagcacatttgtagaaattttaaattgtgaggccactgtactaacagattacctcaggaaaccgtgcaaacaaacaagaatgtttacagatccgcacaactagtcagtgctttggcaccgtgaatttgaaaggtaaaagagagaagtttttatctagaaactggtttacagggtacctctagccccagttctcccctgactttcccatatttaaaataataaaattctgatgatgtgccaattatgtgaatgcttgtgacataaacaaatatacatctgtatttaagatttgttgtttaatgttttaaaaaataatatgaagactgcttatgtaggtggtcaaggggatgatcatatatcaacagagctattttaccatagttcttagcttgcatgtgtgattaattagtgatttttatgtaatacttgaataagatatcctgaagatatgaaatgtcttcgtgaaatgtagctgtgaaatgtcaccgcacatcaaatttttatagtacaaaataacatcctgcctactttcatgaactttatactcagcttatttttctgcatgacatctggtcatataaacctaaaccaaatatgtgcgataaaatcaagctttcagctagcatccattgcagtattagagaaatgatttctgcattaaaatgtttttgttcatgcagaaatcatcaattgaaatgtgtttaaaagatgattatttttaggtatcagtaatacattcatggtatcattccttctctttcatccagttttacagtattttaaaaatatctgtgtaacttattgagcattatttgatcattgctgtatgtaaaagatcacaataaatattagattcttatgttaattgattaggcctagagtttttgcattatacattgttagcagaatgttaataaacattgtgtcattgcctattttagttccctggcttgctataaacaagatataactgaggagtttgtgaacaacactttctggcctacactcttagaggtcaggaaactgaggacacagacaaacagatctactgtccacatgaggctctgggggtgcgctctgagtgttcacctggtcaaggaggaagggtttcacagtcagaacctaatcactttctaaatactccacttcacagaactttcacatggggagtttgtgaatggggcacaaacatctagttcatagtggccttcaagttccaggaatgcactattttaaaataaatttgtcgccaatctaatactaggagttgtatctattagttcttccactgagctacgttttcagtccagaaaacaaacaaacctgtcagctatttctcataatgatttgagttatttagataggattgtgtcttagtcagggtttctattcctgcacaaacatcatgacc

SEQ ID NO: 28560 - DNA, 1147 bp, Mus musculus
aatagattaggtaaatgaaatgtggcaatacctttttatttatttattttatgcatatgagtacactgtagctgtcttcagacacaccagacacacatggttgtgagccaccatgtggttgttgggaattgaactcaggacccgtgctcttaaccacctcgcatctctcagccgggaatacctttttaatgtagctgttagaaggttttaattacttaagaggtttgcaccctaattctagtaaagatgaagaaactattgtcataatttgatagtatgggaagttttcgtttcttacttggcttttctgtgtctttttctgtttcagaagaaaagcagcaaacagaaagggttacaaaagagatgaatgaatttattcacagagagcaaaatagtttatcacttctagaagcaagtgaagccgaccgtgatgcggtcaatgacaagaaaagaactccaaacgaagctccgtcagtgttagagcccaaaagagagcataaagggaaggagaaggagcgggggagtaggtcaggcagctccagtagcggcagctccagtagcggcagcaggacgagcagcagtagcagctccgtctccagttcttcctacagctccagctcaggcagcagctgcacgtcctctcgctcctcatctcctaagcggagaaagagacccagtaggagcaggtctcccccagcgaaagctagacgcagcaggagcaggagctactcgcgcagagtgaaagtagacagcagcaggaccagggggaagctgagagataggcggagatctaatagaagtagcattgaaagagaaagacgaagaaaccggagcccttccagagacagacgtagaagcagaagtcgctcaagggatagacgaaccaatcgttccagtcgcagtaggagtcgagataggcgtaaaattgaggatccacgtggaaatcttagtgggaacagtcataagcataaaggtgaggctaaagaacaagacaggaaaaaggagaggagtcgaagtgtagataaagacaggagaaagaaagacaaggaaagggaccgtgaactggataaaagaaaagaaaaacagaaaagggaagaaaaagattttaaattcagtagtcaggatgatcggttaaaaaggaagcgag

SEQ ID NO: 28561 - DNA, 1150 bp, Mus musculus
ccttgttgttcattaagttgcttactttatgttaatatgaagagtgactgtgtattcttgtggtttgaatggtaaatgtttattgagtccaagttatttgatttctttctctttttttttttcagatggtctgtcagttgaaactgtggcaggattggtctataatcctttctcaggttactggcattggagtgaaaataccagccttaactatgcagcccatgctgtgagatccagggctcaggagcaccaggagcctgctgagtctgctttaaagggggaaacaggagcactccatgctaacacctccggtagccccagtgtacgggaggagcagaggacatgaggtgcctccaaggacagcagtaaatatacttgaaattgtgttgtttacaaagtcaaaaatcttactccatttcgggagagattttgaagaacaaaaggtcaataaaaatatctaaatcaatggagaaaaatttctgtgtcacctaagagacactttgaagaattttctggtgaggttttgtcacgtgtgcttaaggtctctatgcttttactgtagaaaagtgtgtgttcatttcatttacatgttaggcatttctcacatgtgtaaacagaaacatatgctgatatttattgatttcaactggaatctctgttgtctatggtattcctttattttagttaaagatacaatgcccttgactgataaaaaaaaacccaaaaaacaaaaaacaaaaaccagctctagtttttaatcactgatatttgggagtacaaaatatattttaaacctagggtagtgagcatacgtgtacctccctctctccttccgtctcttctcccctccctcccttaattgagttcagtttgtgtgtttcttttttaaatatttatttgttatatgtaagtacagtatcactatcttcagatacaccagaagaggttgtcagatctcacgtggatgctggggtttgaactcaggacccctggaagagcagcagtcagtgatcttaaccactgagccatctctttagctgagttcagtttgtgttgaccatcttctcttgagtatagggcctaccttggagtgtggttgatacaccagagatcacagcattaaaggaagttgccttttaccagcagctat

SEQ ID NO: 28562 - DNA, 1213 bp, Mus musculus
tggatagcttagttcatttcacaggcagttgtgggccaagggttctgtgtgatggctgtggatttgggctgtaagacttaactgcacaccaacggctttgcttctgaccgtcggggtaaggatcacttcacatagggttgcagaggccctttgaggatagaagtttctgagaagttaatgtactttgctaaaaaagtaaactctctttaatgtagctgttccacggaaatctttagggtgttatccattttcaaagaggaagtgttttgaagatgtttgccacctaggtagccatagggcatatggaaatgggaataatgttgaactcctaagttagaaattcttacctgtacaaaccttagctatgaatattttgtattaaaaccattcctactaggagggcctgtttgatgaggagtgtgagagaggggagaaagtgtgcatgagtaggtgtgcttgggtgtcagtgtcatttgggtgtctcctggtgttctgagcaactggtagcaggtctgtgtgactagggaatctcttgaacagaacatggagaggagggctgtggacctgactctgcacccattttcttgcttgcttccctttctcattgggaagaaatgcctgacactttgtagataagcaagctagtcttaccgagtgatgctgttccctgtaaggatgttttcagtatgagtgtgtggatgaatagctgctcatttatgcattacttggagggaacctccttagatagacaatgtttgttgtgaagttgtagcgcaacttatttgaccacggtacccttagagaggggtgatgaacaggcattgccaactggggtcatgggtacttggacagcttagagctgggtacagatttaagtagaacctgagaacatacccctgtatccatcttccatatgggttattgaaacaaaatgaccaagaaaaattacagcgatgtgggtctttgtgggaggccttcacttattcatgcactgcccagatttgaagtcctgtccagtttggtgaacaggtgcgccttataaggaaaacaatgagagaaatctgggaacaatttattcatttgctcaagtcacgcccccccccaccccccaccaaagtaactgaaggaagcacagtcttttatataaacagatgcttcagatgcttttaattggacagaaaccccaggggccacatgttacttttaccctttt

SEQ ID NO: 28563 - DNA, 1158 bp, Mus musculus
ctactttcaaatcttcagatgaactatccggggactgccctacgtggggatctaccctgtctgcagacaccaaagtttatactgttgctctggtcaagaggcacttgctgacagggacctggagtgactgcttcttgggaggtccagcaagcaactgaccaatgcagatgtagatgcttggagccaaccatcagactgagcacagggaccccattggagagctggcaaaaggactggaggagttgagggggattgcaacccaataggaagaacaacatcagctggccagatcacccaatgctctcagagactagaaccaccaacaaaggagggtacagggagggatccatgttattggctgagtagctgacaagagacctgggactttcatacccaggaccttagctacctgccctgtgaacgcctcccaagcctcctcatttcgcttctaagaactgtaagagtctcagcattactgctggttcagagaccccatggaatttattcctgtggctctgctttgctctctgggcagacagcagacagacagatagactgtattaactagaaatgtcaagatagacttattttgacttactatgggtaagcgatcattccatctatgtcatggattatatattcttggaccagggagtggtaccatttggaggtgtggccttgttggaataggtgtgacctggttggagtaggtgtgtcactgtgggtgtgggcttaagaccctcccctaggtgcatagaagtcagtcttctactagcagcctttgaatgaagatgtagaactctcagctctgccttagccacgcctacctggatactgccatgctcccaccttgatgataatggacttaaactctgaacctgtaagccagccccaattaaatattgttttgtataagacttgccttggtcatggtgtctgttcacagcagtaaaaccctaactaagacagaacttggtaccagggactggggtattgctgtgataggcctgaccatgcttttatttgaagaatgtggattttgggactttggatttggaaagcagtggaatgctttaaatggggcttaatggataatcctagtaggaatatggaagactttaatgctgggagtgatttgaactgtgttgacctgtccca

SEQ ID NO: 28564 - DNA, 1099 bp, Mus musculus
ataccttgatgacaagtatcaacctcatatgaaaaacaaaacaaagacaaaaacaggatagctaaaacaatcctgaaatataaatgatctccaagatgtatcatcatctctgatttcaattgtactacagagaagtagtaacaaaaacttcatggtactgacacaaatcagacaccttgattgaaagaatcaaattgaatactcacatataaatccacatacatatggacacctgatttaaaaaacaaatccagaaatacacaatgaaaaagagaaagcatcttcaacaaatggttctgcttgaccttgatagatgattctagaacaatacaaatagatcaatatccatcaccctgaacaaaactcaggttcaagtggactaatgtcctcaacctaaaaccagatacactttagaacctcatagaaggaaaagaggggattagccctgtgaaagaataccaataactcagttaaaaatcagttttatgttcatctaagttcccagaagcccctccatacaccagagctgggctcacgtgctttggccctcagcagaggtctgatgtgggaacatactatcctgacacaaggagctcacagcagtccccagtgcctgtggcaccactgctaaattcttatggagtctcactttgacctttaccaaacttctgagctccctcaggaacgagataacttcagcagcgttggcttgaaccacaccgaccacaaagggaagctcacctgtgtcctgggtacggtgcattccagaatgtgtgtggcataacattgtatagctatttcccacactgtagaatgtgttcacagacagcagctggtctccgtaaataccccaccccacttccttgtcctctgctgggtcacagagtagctgtagtagttcagaaggggtcggggagcatcaggacttgggttttctatgctgtgtgacacaaggagagaagtgacaatcgtgaaggccaagcatctgcagctcagaggaagcagagtgctgatctgtgtgcaaagatttggaatttttaaaaagtaccaagttcctgaaattcaataaaatatttttattaattaaaaaaaaaatcag

SEQ ID NO: 28565 - DNA, 1299 bp, Mus musculus
aacaggcctatccaccctaatcagtctttgaagaaattgtagactaagaagacgaaagaaattggatcatcatattgaagaaaaaaatgagggagtgaaccaggttgtgaaccatgtacaactgatgtttgacctatttgactcaatgtgaaaagaatttaaccagctgcccttgctgactcttttatcctgtctcaagaatatgttgttgatcacatagcatggtcatccactcacatcttaaaaaaatacagggagcatcggagagaatgggttcaatgtatctatgcctgcctacttcaatctgcaagggagtttcataaaggccccgcattcgccgagccgagaaactactcgtcaacgaatcaaattcagtgatgacagagtatgaaagagccaccttctcaactgttgcccccacgatgtcctttctggaacaagaatggatcttggagaatgcttgaaagtccatgacctggctttaagagcagattatgaaattgtgtccaaagaacaagactttttctttgaacttgatgccatggatcatctgcagtcattcattgcagattgtgatagaagaacagaagtacctaagaaaagattagcagaaactcaagaagagatacgtgctgaagtggctgcaaaggcagagcgtgttcatgagttaaatgaggaaataggcaagttgttggccaaagtggaacaactaggagctgaaggaaatgtggaagaatctcagaaagtcatggatgaagtagagaaagcacaggcaaagaaaacagaagcagaggaagtttatcggaattctacgcttccagcttccagctttcaacagcagtaacttcgtgtctatgaagtctgctctgtgtgtttaggtcttcatgataatgacagacgacttgctgatcattttgggggtaaattgcacctgggatttattgaaataagagagaagctggaagaattagagttgtagctgagaagcaggagaagagaaaccaggaacgtctgaaacgaagagaagagagggagagagaagaacgggagaaactgaggagatctagatccagagagcatcgcagacaccgatctcgctccatgtcacgaggacgcaagaggaggactcgatccaagtctcgtgagaaacgccatcgccacaggtccaggtccagtagccgaagccgcagccatagccaccagagaagtcggcacagttcaagagataggagcagagagcgatccaggaggagatcctcaaaagaaagattcggagatcaatacttagcatcacgtgac

SEQ ID NO: 28566 - DNA, 1177 bp, Mus musculus
tatatttttgttgtctttgtcaagtgaccataagtgtgtagttttatttctgggtcttcaattctattccattgatccacatgtccgtgtctgtacctaaattcttaagatgacccaggtttctggatttttgtacattttaattattatatcatttcacattcctttagttatatttccttttttgttctttgggttcctaataacagttttcagacatctattctgtttggttttaagtaactgaattataaactttccattatctgaataccctagtggtctccagagttttatgtccagttagatcttgtattctgaaggctgtgaaaggccatgatttgatgatgcacattcttcctgttttcagtggtaggttgttctgtacagtatcaaatgactatcatgttagcagaacaatcgactgctttatgacttcaggtttattttttaggatagtatactagaagaacaattgcgaatgcatcttcattgttgtttgacactttgtgatttctgggagccaaatatttcagttgtcaccattttatgggagtattattctaagaacctggtaagtaaagagaatatggatttgctataaaaatttgaaatttataatatttgacaagcgttttacgatttaattttgagaaatgtgaattttttaaatagtaatttttgtttggagtaggatgtagcttgcaagtattttatctttcataaacattgtctatagaaaactggcatatggaatcagcgcttggtgtcttttctcttttgaatgggtaagcaaagtaaccagaagtataggatcatacaaattaacaatctttatttataaattaaaatataaaatttaaacttgagcatttaacatttttagatttttatttatccgtatgggtattttctctgcatatatgttggtgcatcatgtatgtgcagtttcttcagaggccagaagaggccatcagatcctttgggactagatttagaggtggtgtgagtcaccatgttggtgccgggaattgaacttgggtcctttggaagatcagacattaactactaggctatctccagctcccctcacttattataatatcataatatttaggctttgacacaattaatattcactgttcacaataagaatctttgtacctgagtagtcttt

SEQ ID NO: 28567 - DNA, 1209 bp, Mus musculus
tgctcagcagtgccagccatcttgcttgcttgctgtcacacttctctgccatgtttcctagaaccgtaagccaagtaagacttcctttccacaagttgtctagtgtttgtcacagtgatagagttgtaaccaatacaacatgctatacatgtatgaaaatgtcataatgaaacccattgttttgtataataaagatctatattcagtattcgttatccaaaaaattaagttacataacaaaaacattgagaaacatggaaaaaataggttttaaggaacatagcttcattggacaaatcacctggtaaaaatacattttcgggaaaatacaaaatgtaaggaccccttcatgttctctgtttttatgtaattaaaaaaaaattggagggtatatatgctaattacagtctaataaaatatatttataattaaaacaggtcaaacttttatgagctagttggtgttttcagctttcgtttgttggtttttcatttagaatagctccttcagtatttcctggcttcctttgaaaggccttaccaatattatcaagtctccactgtcgatgcttacactggtgaggaactgctgtagtgataaacaagaccctgacctctataagtccagcagcagttacatcatttttctttgcattctggcaaaagttgttaagaaagcaatgagaaccagcggccctcacccttggaagcaagttaaaggaaggtacgtgctatatagtatctcttcgtcatgagtgttcaccagtacctttgactggtgaattaacttatgattggagcttttgcacatttaaagtgtatgccttaacctatgatgccattttttttgtcttgtcaatatgttataaagagggacaatattaatattcataaactagagggttccagtttctaactcatctaattattactgaaaattgcaattctgtgtattaaataccagagtattaggaacagttttggctatagttaattgtaatattatataatcctttgctttagttattgaaagtgatagaattctattttttaatttttaaaaatcattttatggtacattggtagctattaggttcatgcttgattttttttttttttagaaaaatatttttattactattttactgttagtcatttctgtgtacatgtgtgaatgtctgtatgtgcctgagggtaggggcatcctttg

SEQ ID NO: 28568 - DNA, 1127 bp, Mus musculus
ttataataatactgtgttgcaaatattggatgaagatatctttaaatgatagattttagttaatgaaataatcttaccaattttcatgttttgtagaatatattctaagtttcatcaaaaaagaatggaagaactaactgaagttggcctacagaactttttcagcctttttctactgttagcagctgttgcagagatagaagatgtagcaagccatgttttagacctccttcgtttcctcaggcctgcctccatgtcatctcatggagcccttgtttggaagggtcagatggcatttctcctgatgtatgcccagaaaaacttggacattggtgtttgggctgagaaactgtcatgtgaattccaagagaaagcaaaggaattcttggtatctaagaatgatgaaatggtacagagacatgctctatggacactgctttgcatctatattgatggtgttcaagaagtatttgagaccagcagttgcttgtatccttctcatgagcatcttctcaatgatggatttagcatgttactgccagcctgtcgagaatctgaacttaggacagtcctgaactttctacaagctgttctggcgagaatcaggtatgttttctaacgaggtagtgataagcttcactttttacatacttatatagtccaagtgtagaagagtttgttttactgctacataggcataaatcattagtttttcaaacacttaaattttttatgcagacacagacaacaaaaaactgagagcagcctggtgcgattctggaaccctgcatttagaccttccttctgtgttacctctctgtaaagtgttaattatcaaaaaaggaatgttagtctgagcaagatcgtgagttcaaatttgatgtggcttaaatctatggaatgttgttcccatggacagatatgggctattatgtactattttattttaatttagtattttttattagtgtatgtgtgtctgtgtgtgtgtgtgtgtgtgtgtgtgtatgtaatgcatgagtgtgagtgggtatacacatcttaatggcaaatataggagagatcacagcccccactcctcaaaccccacacaaccacacctctaaactccctggggtctccagtct

SEQ ID NO: 28569 - DNA, 1209 bp, Mus musculus
tcctatttttctcttttttattagatattttctttatttacatttcaaatgcaatcccctttcctggtttcccctcttgagaacctcccatccccttccgcctccccctgcttaccaagccacctactccctcttgctggccctggcattcccctatactggggattcttcacaggaccaagggcctctcctcccattgatgaccgtctaggccaccctctgctacatatgcagctagagccacatgtcccaccatgtgttttctttggttggtggtttagtcctagggaactctggaaatactggttagttcatattgttgttcctcctatggagctgcaaacccctgcagctccatggatcctttctctggctccttcattggggaccctgtgttccatccaatggatggctctgagcatccacttctgtattttccaggcactggcagagcctctcaggaggctgaggctcttaggctcctgtcagcaagctcttgttggcatcctcaatagtgtctggttttggtggttgtttatgggatggatccccaagtagggcagtctctggatggtcattccttcagtctctgcttcagactttgtctctgtaactccttccatgggtattttattctcccttctacaaaggatcgaagtatccacactttggtcttccttcttgagtttcacgtgttttgcgaattgtatcttgggttttccaagcttctgggctaatatcctattcatatttttcaattttttggacttttctgaagtattttttttcagttactacaactttcatgatggtgctggtatttcctctccacgaagcagtcactacactcctaattttttttaagatcatagtcctttgtatatatcttaagtgtacatttcttgaatgcaagcattatgtatgatggctagcactctaaagtgtttcatgtaactagattctgaagtgtatctgtgagcttagctgctggacgaatggttctggtgtctaaattcactcttgtactcgagacaaagttaaagtgtttacatagctctttttttctttctgaatgcagacagtgattgacatgatgggacattactataatagtcagaatggtcattttccctctaaccctgttttacatgttcttttttaagatataaattacgcttctatgtttgtggcttatcatgcacttttgag

SEQ ID NO: 28570 - DNA, 1166 bp, Mus musculus
gaggaggtggcgccagttgggcccaagatgcccctttgcatggcaccttgaaaattatttcctgttgttcacattacttctgtaccctagaaggactcccggcaccacaccatcacacactgcaactgcctactgtacccaaccctgctgctccagcacgagaccagaacaggactccgagaagccaggaaccctgctcagcacctctcaactgataagaagtggggggagtctcacagttgtgaataactgtactctatcatcttaaggagtcatgccccaactgcaaccatgcctgcccttaggtcccaatattttaaatgcagacacaataatatctgtgcagatagaggaaaaccaaagctgtggtatttgaacagcattacttaaaaatgaccgagtttggcattttggtgtagtctgcttcttgcatcttcccttctcaccccgccagtctgggcctgagggtttccagcttccggtcagatctagagtcttcaccctcacagcaaagcgtgactcttgagcttgtttgggagtgcagagctatgggggcagtaactgctgacccaaaaatatcgctggccttcccaccacgtgggttaaaacagacttataaagacaccttcctaattaagccgggaacttggctcgagtgcattcgatgccagcttttttttttctggagctctcagcaagaaacctgtcctcagagctcagtgccattttgagagaaacattttgttattttggcagaactaggtataatggttaaattaaacttagtaatacaagtatgtcactaaaagataaaaagaggccccagccttaggtagaggaactccttttacgcccgaggatttgtcctctagagtatgtttgaggttcttccattggtttctctattggatgccatcctattaggctttgctgaagtaacaacttcttttggactccacaaagattgctggttctcccctgggagcttcttggatatggagcctgacctgccagcctgagtattggagccctggaacatattgtcactgccctgcctacctacataactctaagccaataattatcagttgccaagttcatcagccagtgtggggttttgttgttctttgtagggtcattggtgttcttgttagtggaacttaaca

SEQ ID NO: 28571 - DNA, 1162 bp, Mus musculus
gtttggtcttaaaggagtcaattatagaatttgttgacatgtcctcacaataattcttaaataagtacaataaagatagttgagatgtgtacaaggatagtttctgtgaagttgaagtctttggttttgtaatgttccgttctttacaaagcctccctcccgaccttgttggttttgctgtcagtggtggttaacagtctgtttctcatgacacacctcacgggtggcctcccctagacagcttttggaaactgtggattagagatagccccactctgtttctggtaagatactgcctcagtatcagtggttgcctacacttatcaactggtgccacgtattcctcaaaatgccaagattataaactgcaagtttcacgggcctttgaatccttccagcgtttagtgaagcgggcgcctaactgaaccagctgctggagaacagtggatgctctgggggaaaactgatggaactttcagaattctgccaatggaaacaacagtggacgatggcaattgggactgagatttcctgcttgcttctagctgcagagcccatctgaggactgatgttgtccgtgtgcacatccgggatggagctctggtccctgtgcttaaggagcttcccggtggggccacaggtacagccaccagaggaaagggattagtgatagctctcagagaggagagcaggctgtcctgggcattttaaaaaatggcattttggtttggttttttttttttttttttttttttttttttgaggtggggtctcgccacatgactggctaacctgaagctctttatatagttgaagaactcacaaaaaactttctgtttctgtctctgtctcccaaattctgagattaaaggcatgtggctggcttaataaactggttgtgtgtgtgtatatatgtaaatgaatatctttcatgagccacgtgtggtgttgcatgccgttgatatcccagcacttgggaggcagaggcagtcagatctcttaagctcaaggacagcttggtctacagagaattacagggcaaccagggttatacatggaaatgaagtctcacaaaaccatcattccaagattgtagtgtttatcagtgcaactattcaagtgtacagtgtagcaggattgtttccgtttgtctgggtaaagg

SEQ ID NO: 28572 - DNA, 1657 bp, Mus musculus
attttttaaaaatttatgtatgtgtagttcctgggtatatgttagctgtattgatcatgtggcccaaatgagtcaatattaaattccactttctagtttaagttggtttgttctttgtagtagacactgaaagcaagagtcctcctgactcctataagactggcattgtgttagggacagataatcagcagggaaacacagtgactatatttcccaagtgaagaaagagagaaaactgagtgaaaagaaagaaaaatacatattactactctagagatgaaaaatccatgaggatctttttaatgttttaaatttgttttaaatattaaataattttatagaagaattagtggtatctgacatgctggctgtctctcttttgacaaatagaaataggtaacttgaaaaggtttctaagagcgaggcaatacttaaagattatttgaacaaatagcttctttaatttagaagtgagagaagtatgaaagaacagctaaaaataagagaatccaatttgataaccaaacattcatacctgtttttattttaggaggaaaaataaccagtagaagtatagaataaatccctgaagggacctagaaagttaccaattcattcacttaagctctggaatgttacattccagtaatagaatctcagataaggtgagatgagtttggctcattctggcatgttatacttgtgggttcttgcccatattgtttgacctctctgaaattgaatttctataaaagtatacctgccttatataaattccaggacaacaatgaagataaatgacaaaagaccaggcaaatacaaagtcttgtagttaaaatgggtgtctacaaaacacacaacagagttacctgtagtttatgatgcaaggaagccagaatttaggttctcgaaatcctagtagtatttttacttattctgtaaaatgaaatacatttcaaaaggacagaatggagttggggtaactgggctcgtccatattctttcacgggaacagacagacatacttgcctcgagattccacgggaaaagatgtggaagatgagaagaatccagcgatgatggagggaggcagatggaacagcaaagatgggaggtgactggagagtttgtcagcttcttcatatctagttccagtgaagaaactatccctacttatatgtgattcaatacagaagtttaagggaacctactaattccaatcattgctgattatggtggaaagtgccgtcaaaaccatcctccattaattcaaaatgaatatgtgaatcagcagtactgactcaggtttcctgggtggctagcagatgtaaatatggtttcttaactggtatcacacaataaaatccttccattttgcacattagcccacttttctggttttttctttcatgtagaacaccaattgtaacgtcacacaaggtgcatgaaatttacatttggaaaagcggagtttagatgtcggttccttaactagctgtgtctgacttgtctacaactaaagtgcagtttatatactggacactaacctaggtgccttacatgtcttagctttgttagcattgtggtaacaagcgtgaagttaagaatgctttcctgggaaagttgcagcccgggaaacttcagtaactacaaagat

SEQ ID NO: 28573 - DNA, 1177 bp, Mus musculus
attattgggtgtttcttgtgagtttcctcacaagacttccagttctgtaagctcaggagattcttgtttggtttcttcttaaactcagaacagacactgtgcacaaattggatgtcacagtctgaaactctcaagtcccaaatgctccacagtctaatattttcaagctctctcatgctcaaaagttttagactgaagaacatttctaatttcatatttcaaagtagtccaaattctaaaacgttgccaaatgtggaaggaaccttttgatcctaagcattttgaatagatgataacctatccttttgatgtagagagaaggaaggaagagagggagcaagcaggggggaagggctcttagggaagtaagtaaattgagaagtgtgtgtggaatggctgtgtcttagtcataagattgggtattggggcacagtaagtgagtaaaggcaattttaattggtatatagtaacattgtggacatttgtgtttttgtctcataactacttcaaatcctaaagccaaagtcatcttttgtaaattttgagctttgagtattttaaatatgaccttagaccgtttgaatcttcctgagcttgctggagttgttttgacgagtggcagtgactggaggtcagatcagagcctcccgttctgtgatgagccactgctgggccccagccctgtgctgcagtgacacactgcgagccctgcgatctttagttctgtgcttctctttctgcatgacttttctagcttcctgtgcaggaaaaaaagactgttaattccatatttccctctgtgtccatcatgaaagttgccgtgatactgaattatttttacacagtgttggaccaggagctaatggcatatacttttttcctccctttttcttatgatctgcatatatttaattgaattacctttggcttcagtattttttttttcattatttatttattcactttacatccctatcaaagctccccccttcccttctgagtcctaccctcacaaatctttcctcgcattaacccccccaccccccttctccttagagaagaaggggaagcccctcttggttacccacctcgccctggaatgtcaagtcgaagcaagtctaagcacatcctcttccactgaggctgaccagaccaggtagtccatctcagggaaggg

SEQ ID NO: 28574 - DNA, 1180 bp, Mus musculus
gtaataaaatttcttcaaagagttctgaatctagaacatattatatgctttaatgttcttccagatgttaaaatgaaaaataaaatagaatactttttatctctaggaaaggacttgtttgttatttaatttatatggtatattttttacaaggaaaaatgtttatatgtctgaaataaaaaaaaaggaatcagctttacttttaaatttatagtgaatgctttagaagtagaaattttcaaatatattttgtattcctaagttctggctcttgcttttaacagctagaaggaaggcctcctgcatgaacatctccagaggcctcagaagtgatttaacaagtgagaacactgaagaagcaagcattgctgtgttcgaataaagcaagccacagggtaccgtgagggaaagcgtgaggcacgccgcagaacagtgcaaaccatgtgtctgtctgaggggctaaaggcacagagatgcttctgtcattagcccagtttagagttctaaggtttagttgtttgatttccgtggctgtttttacccttagttctttgttggaaattgtatgacaggtagctaggctgttctaatgaacacagaatctgtgggtgtttaaactgtgcagaaattatattctaaaagtagacgtgtttaaaagttgaatttttgttttctatgattattaggtaagacatactaaaacagttccttggaacaataatttaaagcaagttataagcaacatcctattgtcaaaattttagtttttctgaatgtaataaaattaaaacccagatgtttaaggaatgctattttatataatgtcaatggaatttttatattttaaaatgtttaaatatataaataacactacctcttttctgaaatggcaaagtgttaataatactgcatagaagtccttaattattaattaaaaattttattaaagttgatgatagagatttatagaaaacattaaggggctgtagaggtggctcagtgggtgctgctgttgttgttgttgctgttgttgttgttgttgttgttgctgttgttgttgttgttgatggtgatgatttgcagcatcacatggatgctttgtatctccagtcccaggaaagccaatgctttctggccactccgggcactaagcatacacaagatgtataggcgcacatgc

SEQ ID NO: 28575 - DNA, 1868 bp, Mus musculus
gggtaagggggaaatttgatactgttttaagtgctgctaaagaagaaagttgtagagaagtatcacaaaggaagaacggagaatgtgtctaccatcttgattccattgaaggccgccatacaggccatagccaatgcttgccctgagtggtttaaataatttcataaaggattttatactcaatgaattgagggcaaagcaatcacactggaacaaaaatgtgccaatttttccaatatgcaaattgtaatgatcggtaattcataaaactactttgagagcaattgaatattttagtattgtaatttgcactatgatattacgatgttcaggcaaactaaaatactctgaaatctaatgccaaatgtacagttcataggttcatggtacttcgtataagtgtttcattgcattgcgacagttgtttaatagcattaactttccctgggtgtgttgttatgatgcagatctaacagggttattgtaagcacactaattagtcatctggggttttatagataaaatcatacattgatcagaaatcacttttctacttatttttttgtagagtatttttccacacttgaaaaaacatgattattttatatcaaacatcagttttcctttaaaatcttattttagtagccaatgcatgtttgaaataagatgttaaatattatgtgccaatagtaagattgtgtttgtaagtgaaaaatgcatgctataatgaatcatacagctttggtggcatattctactgccaccttatatgcaagctttctcttaacctgtgtgcatggtccacatgctttcaagagtccttttttaatatttacaaagtgacatgtgatttttagtgctgatgagccagtgagccaagatgcaatcctgttctgctttcatttttcttctttacattatgttgtaaattttctcagaaaactttttcttggagttgttggcaataaactacaacaaatgaaagaattggctggtaaatcttacagacaacttaccgttacaaagcatgaagatgtgagaagatcattttacaagcttcattatatgaacacaatactctggcatcttttttgtgtagttaagaagagcttatcgtttctgaaacactgccaaagtcagtactactgccaaaagggagggacacctgcattacactaaactgaataataacagactatccagactgtatagactgccaatcagtacagtaaagtgggagggatatacccactcttttgtttcttattaattagagaaatgtataaggaatatgaattttggcaacagagacatggctttacatgctgataactcatggaaatatttgaaataaaactcattccattcttgaaaaaaatatgcccaggcattttgtttgtttcagaaatgtacttgtgtttttgaaagctctaatttcaaacaagtaatatatgtagaccaactgttccttctacaaataatgtcatttattgtaacacataatgggtagaacatagctttcagtcagttattcgaatcaccagtataaatattcataatgtttgaaggtgatttcactgtgaggttatgaaagcaatggaaaccctagttatttgtttgggtttttatgtgtctatttatagaaaaatgcttcttttaagtctaattttaacaacatcaactaagttaatctaatgctaagaaaattgactctacttactatttcaagtcacagtcctgaaactgagtcttgctgcaatccaaaaataaaacattgattcaaacgaagagcagcctactctgccatggaaagggcagctacagcagtcatgatatcatagatgtgagcagggtaaagaattcctaca

SEQ ID NO: 28576 - DNA, 1777 bp, Mus musculus
atcttttgtggctctttatatttctctattatgtattgcaattagccaaactcaggctaattctcctcatctacagagaagattcatttcagtttgacaagcaggaagtatgtgctcaatgagacataagctcccttagcatggaatcatttgagcaaagaaagaccacagaattaaacgaagagtatgatctcatatttttttaaagacatagttacacaggtgatattgttgatccccaactgccacagaggtaaagatgaaaatgtgttgtcactgcagggtgacaatggagacttagttaaaaaaaaaaaatactaaacaatactagtaaatttactccattctttacctactcaacatgtgtttgaatggcaagctttgtctactcacttgatccaacatatatttttctctagattatcttttttccacacatcgtttttacatgtataccaagaaatcatatatatacatagatactctcataaaggctctaatcatatatttatttgcttaaaagtcaaattcatgcatttacttatgatttttttgatccaaaaatggtagagagctaagcatggattgctaaatttagaatatgctctcagtgaaagctggaaagcatttgatgttgctttcatccaccattgctatattggatgctaagagacctgaaggcagttgcctcttttgttggctatgaatttgagctcattcttggactggaagtacaattaaatgccaatagtgtaagccaagccaaggtattaagtatttcacaagtgcatctacatatttagaacctgatgccaagccacagaacgtctgaactttacgtccatagttagagcgagctttttaactagaatatacaacaatattcataagtcaacctcttcttttctgtgaactaactcgttatttatttatgacatatttattcctgatatgttgagagacaggcatgtcaaccccacacgtagtgatgatagaaattagaatttaaggatcctattgctatgactctcatttctctctgccctatccataccttattgtacaaatatatctcaattcctataaatgtgaatatcctctggcattatttagtccctgtaggctagtatgttctgggaggactttagtttttggaaatatattgaacagaatttgagatgttgacactctttctgatattgttttagctgttgaactttagcagaaggaatgagcttcactatgtgtgagtggaaaatgtaccactgacaagatatgctattggctgctctgttaataaatcctgtgactcatactttctgtaagcatatctcttatgaaagattgattgattcaaccaaattggcttgctgctggtataataaaagcagataatatgcctagagatccaggatggctctaaacagatcatgagcaagttatcacctaaaagtgcagaaagtccttatcaccagtgctctgagtatttaattgctatttagttcaggccttattaataggaatacaaaaataattattttaagccttactgaagagaaatatactgacttatctagttagctgcattgtattttagagagtgaagatcttgatagccatatattttaggacagccatcacctaatgaagtagaaagtataaaagatactctcactgggaaaccagcatcagtttacaagatttctatttactgtgagaagctcagtcctagagtgtacaaagcttgaaccagaactgttgaggtagaaatggacag

SEQ ID NO: 28577 - DNA, 1153 bp, Mus musculus
attctatggaagcatgtacctcctgaatgaattactttgttgtcgttgtagcaaaatacctaacagaagaaacttcagagagagagagagagagagagaaagagagagagagagagagagagagagttatttttaatttttttccattataaattctttgatctaaagtctcatactcactgtagctaagattgtctggaatgggtagtctaccctaaggcggtttcccacttgatttaattctcctggagattccatcacacccagctatgggaagtgtttatttttcacttaagtttcaaggggataaagctcatcatggtagggaaagcttggcagctgagacaccgcatccctggaggtcggagcttggtcagctgcttcccttagcaggcagtcatgaacccgagatctcaggcatggcacaggcgaacttgtgacttttagttgtcactcttgtgctcctatatcttaaatgttcctccacaacttcacaaaacacaacttgctactgaggatcctgtgttcaaacacatgcctctgaaggtacaatttgcccttcgactatgcctattctgcctttctgaattgacctcaacagaagataaatactatcataaaagattctgtgtatcttctgaaagcccccgcgtgtcttcacaagaagactctgctgctctgtctcctttcagtgtttctgttttccttctctttgctattctctccctccaactttttatagcctaaggttgctctctctctctctgtctctctgtctctttctcaggaaaactttgtgggtctagatgggactatgatggaaaagaaaaaacgaaaagcaagcaagatatcccaatagtccaaagtatcccggctgtttcttcatgcacctcccccatccttgtcagcaaaagtagggagattatgttcccaaagaggaactgcagtcacacctaagacacaaagcagtggtcacactggatctgcctcccagtgagaaagcaaaacacatttcagctctttgtgaatgttttgttactgctcaaactctgagagggaccaatgaggaatatgagtactggtcatagagaatgcacatgcacgtttggagtttcttcagggaccttggaagttttgacacatgaatggtagt

SEQ ID NO: 28578 - DNA, 1149 bp, Mus musculus
ccattgtttctcagtggttaaaataaatgttcaccagaaactactgaactgactgaaaaaggataacattaatcctcaagagtgttttccttttaatattttcatttaattttactgtaagacagaaaaaaattgcttatcacttcaaaactagagataaatagttttaaagtaacatatttttcagttatgtcctcatatttggatgtcttacacttttggtttaaaaagaaactgttagtgatatagttacaaattgaaaagttctatgctaaaaataaatttttgtaaaagtgaaaataggagaaattgactgaattcaatatttataattaaaatagaaaaaccacctagtctatataattttacacaactgttatttcttagtactacagagaggaccagttgagtaacactaacaaatattgcatgccagccttcatagcataaagacatttagaaaccagtaagttctgggatgtattttaaaatacacagcagagaggaagcagttttagggtaagagtgactgctctgtggggaaagttcttgctgtgcaagcctgaagacctgagtctgaacacctagaactcaaacagatacgagctcacgagcatgcatgttctagtccacggcttctccagtgagcgagagaaagtggacacagtacagagcccagaagtgcatgagccagttagcctgccgtacacaacagcactaagacatatgtctcaaacatggtgggcagcagaggtcggcaggcaaggttgctctgacattcagacccatgtcatgtcatagtcagtctccctcttactctggaatgtttgaacatacttacacacagagcttttttaaaacgcatgtttaaaataattcttttagcataaaatctttttcaagagatatactaaccttattaaattaaaattttctatttatcagaatattattgggccattaaaaattatgaaaataatagtctgatttttccagataaattgtaagaataatttaatatagtagtattttaatattacacatctccattgggataaggagaaatataacctatagatcttttttttttgctttgctactagattaaagctgaattttaatacatagacttttacagcatatgctgtt

SEQ ID NO: 28579 - DNA, 1201 bp, Mus musculus
ttaataaagattggtttttattttttgatagacaggcttagccccttagctgacctctggcttttcacccttgctgttactgcaaggtgtccttagctcaataggctgtagaaaaaacagggatgaagagaaacgacttccagctcctattttagccacaaatcgtggtgttactaacgacataattcttgcttaggctttgctaattctgaggttgataattctcctttaggagctgcacagcactcagaactgtgcatactggtttgtgattgtacaaattcagtatgggcaccgcttggtgcagaagtactgcaagagaaggtccggcttgaccatttctgagtttcctgtgagataaacccggtttaaaagaggttggtaccaaattttggttaaaaataaaaaatattttccgactctacctcgcctccccaaaaggtaccgagagccacatgtgtgggttttacccacgagagaaatcgggtccatgtccacccaagccaaggttaaaagcccactcatctacggatgagaaaatcatttgatcacctcagttaagcgttgccttatttaacttaattaataggggggagagagattggagacgtactactgaaagggcaagcccttcactgcctcccacccaaataaaagagccggtcgaacgccttctccctgtttcccacctatcatccaaaaatgcggaggaatatcaacttagtgttattttcacatcgttcagtcaaacttagccagagttccaacgccctacttaaaattcaactagaaagttacctaccaagtacctattagcattataaagtcagagtctgaagctccaggcctttcagttagttgtttactagaaaggacagtcttaagccagataccgtttaccataagaaaagttaaagaatcccagtgaagcaagttttttctttagccctagcttccaggcagaactattgagcatagataattttcccccctcaggccagctttttctttttttaaattttgttaataaaagggaggagaagtagtctcccctcccccagcctgaaacctgcttgctcggggtggagcttcctgctcattcgttctgccatgcccactgctggaacctgaggagccacacacgtgcacctttctactggacccgagattattcggtgggaattgggtcccctcccccttc

SEQ ID NO: 28580 - DNA, 1100 bp, Mus musculus
tttaatggatttattaaatttctctttaaaagcctctggataatttccttaaaattgaatttaaggtcatttacttgtgctttggctgtgttggcatatccagtctggccatgataggattgctgtgctctgaaggtttcatattgccctgttttttgttgattgagttcttaagctggcctttctccatctgagagtccctgaatgatttagcaggtattatgaagggggcaaacctagatgatccttgtgtggaaggcttttgctgggtatcctatggctggtcagttgagctcaaaggcagtgcaagtctcccagaagttcggtgtttccatggggacacagtggttaggggatgcttggggacaggcagagtgatggcagtacaatggagcgctattggacagtatgctgttctgggctgctgattgtgccccagaggacttgaaaggcaggataatgggtgaagggagagagtctaacctgtattggtccagaccaacaaggttgatcaaggtgtgcaaagatgtggcaggacaatggaagtcttgaggggaaggaaagcagcaggcagtcccatatttcagttctttaataaaatattttgcataatacagtctattaaatttgaaaagaaataaaattattttgctcaaattttaagatttaaaaatccaccattatttcatttttatgccttcagcatttttgttaatatatctatatatgtgtgtgtgtatgtgtgtgtgggtgtgtggggtctatgtgtctgtgtgtgtgtgtattctcaaaaccaagtacatttgaaaggcattctatgcttcaaggaaaccgtgtgttaaatcattattttattaacttctggtgagttgtgtttgatatagaaagaattccctggttttctatcataactgcaaacccgtgattatttaaaacatctgacaaaattcatcctgttagtataaaaaggtttcaaacaatgagacataaattacggaaactttgttcgttctcattctcagttgggcagtggaaatatgagggctaaacttgtgatttaattgctaaaacatgtaggagactacagtttttataagcct

SEQ ID NO: 28581 - DNA, 1847 bp, Mus musculus
agagaagacaaaccattataacagttcatgagtgttagctttttggcgtgttctgaatgccaaatgcctctctttgctgcatttgttatgtcagttacctttcttcttatggtggatataaaatccactgtcgtgttgcagcagatgatggcacctgtggcttgggaaggcgagcgtgctcagcttcagagcacatgaagtgaacctggctgtatgtgcatgctcctggagtgagctacctaacaggagggggtagcacactggctactgtgtgcaggcatcatcctttctctgtagtaaaaggtgggacctcaagaattttcttcaaagtgctcatctcaaaaatctgatttttttcccagtagatggtatgctccaatgtaaagacagggtattaaaataacttgtggtacattacagagggacagaatgttgaggctgagttcaaagacagggtttgtgccaacacatcctggatcaatactaactgtagtcccacctgttactattaaaggtgagtggtggcagctgtgcttaaggagagcaagtttactgactttcgtgaggttgagcatcgtctgtgaaatatgaatgacatgctctttttacaccctatggattttcaattctgtgtgaaaacagaagcctttctgacttttaatattagtagcagatgaaattgaaagatgatgatgtagcttaaatgatccttcttgtaaccattactgagttgttttatgatatatttgaagaaaattgaaaaataatagagacacaaatcattggcccagctaaaggaggcttgagctgagctatcggtctgttataccaaataaggaacacagcaggctaatcaggaggcccgagtaaggaaggcaaaggaggaaaattaaacccactttcgtagctactcagaggacttgattcctctgaagtcctttcctgagtctgttgccttcccatgcttttaagagaatttgaacacttacaaagagaatatttatattgttaacaataagtttactaccaaccttcaaaataacttaaaggtaataataaaatgccattaaaaaaataaatccctaagatctattttttcagtccatgttaacacattttgataccagtgcatgaatgtcttttaaattagatgccatcagcttcgcttttatagtgttcatgtttgtaaagagaacatttggaatggaaagatgatcgctgtggtacttagatgtacatctcgcatgttcctgctctgttccagatgagcacgagaagctagcgaaggtgttctttaaggctaagacagataacctttttcctgttatttttttcctctctgagttttataatgaatcccttctgtatacagtgaaggtaagggagagtttatagcaagatgtgccttcctcaaaacctgttagtagaaagctcctgggagctaaatgtcttctttcacttaaataaaaaagattatagatagcctcaaactctattaggtgacatgagtgccgagctcagcgttagtagtgacataaaactgacacagaagatagctgtagtctgagtccaagaccaacaccgcctgccactgctgcctgtgcagacatctggcactccacaggagagccatggtctctgctgtgcagcatgctgaaagcatcttgacttcccaggagattccacattacatggatgcaagctcatttctagccagttgttttgcaaggtctgcatcctacaactaaaaggaaattttgttgtcctggtcacttgaaagtattcaaacaagcaaatggaagaaaacactggatttgctcatggtaccagtgttgaaagattgttac

SEQ ID NO: 28582 - DNA, 1249 bp, Mus musculus
cctgttctacaatttattcaagcctcacttcttgggtgaagtagaaaacaggcagacaggtttatacattgatgtccaagaaccagacagtcctgcacagacactagtggcattttgtttccatttccaggaaaggaagcaaggttgtgcaatgtggagtgaagtcctcctcagcagtaaagccatgctctaggttgagtaagtcagttaagagcaccatactgccatactgaaaacatctgcttagagttatttacaagtggttggctattttttgttgaagtattttttgaatagcgaatgtctttttccttcaaatttctgtcattctcccaaggccccctcctcctgcagccagagattacaggtggttttgtttctccctccttccctgtgtgtgtgtgtgtgtgtgtgtgtgtgtgtgtgtgtgtgtgtgtgtgtgtagtcaactcctctattcacaagctagtaaagctatctacttttattcctgtccaggtatttcttgtaagatgatataatgcagaaattcttgtgcatactctgtaactgaaggaggcttttttgatttatttttgtctttaataaaattcagattgttatttcaggctggtatgtaggaatggtagctggcttctctacacgacgactgagctgtgggtttgcccagtggtatttacctcatgcagaccaatagctgaatcaccagtttcctagcatactcagtacagtgtaccatagtcatgccagagactgaatcatcggactgagagtcggcttagcagttaagagcactcatgtggaggactagggttctgttcccagcacccgcatggagactcccaactctctgcaactccagttccggggtggtctgactccttatgttcctgatggttcttgtaagcacatggtgcatatatactcagacgagcgtgcgcgcgcgcacacacacacacacacacacacacacacgtgagaaaaaaaaagtcctctttattttttcatgggccttcatttttatggagtacagcataaaagtgactgacttatcattgcaaacttcttaatgttttttctaagctacagtaaccattttgcttttatatcaagtaacccccccccccgcttatagataaccacatatttttactatctatccattagtttcctcgttgcttcagtattgataagctactgttactaatgacaagttcatgtcagccccaccatagaagcccctgtaaga

SEQ ID NO: 28583 - DNA, 1233 bp, Mus musculus
ccttgctcgcttgcctaccctcaatcagtttctctactcttacacagttcaggattcctgcttcaggaatggtgccatcctcagtgtgctgggtcttcccacatcatttaacttaataaagtcacccacccggaccctagacatgtccacaggccaatttgagttagactattacccattgaggcttccacaggtgattcaaattgacaatgaaagctaatcctcacactaccttataaccataggatggctactaccacacacacacacacacacacacacacacacacacacacacacacacacacacacacactgcattcctctggaggcataataggagtgtgggctgtagactaaaggatatgacaatgaattgtaacccatgatgatgtagatctggttccttttgacctctttaagcccagggcttcatgcatgctgggtaagcattccaccaactaaactacatcccaaccctgtattttgatcttcttccagtaagggacagtctgggcagttggtgaaagttaatagggtgtctgaattgggtggtggtggtgaagcaatgccaatggcttgatttatcaggtggtgatggtgcattggtggttcaatggtagaattctcgcctcccactcgggtgacccgggttcgattcccggccaatgcaatatggtcttttctgtctgctacctacacgtcccagcactcgggaggcagaggcaggcagatttctgagttcgaggccagcctggtttacagagtgagttccaggacagccaaggctatatacagagagaccctgtctcgaaaaacaaacaaacaaaaacaaaacaaaacaaaaaagagaaagagagagaaaatgggaacttctgcgtttagggttagtggaatcatgctgacaacactcgaaaaggaggaaaaagaataagaacaaagcctagcggcacaggtgcgaagatgccacactgaaacccgtgactctttatgctaacctaagacattagctaaacaataaaatgacataaaaatatccaggaaaagaatgatgccaatgagtatacatatcaaaaagagacaggtggcaggctggagagatgatggctcagagcatgcactgctcttgcagaaggcccctgtttggttcccagcacctgcatctggtggctcgcagtcacctgactccagctctagaggatctactgcccttttcagatcccagaggcactg

SEQ ID NO: 28584 - DNA, 1134 bp, Mus musculus
ctgtttcccagctgaaccgcatctgcagccatcacagagcgtttaacacaggttccgcagatcaagctcaggtcttatcacccacatgccatttacttgccaactaagctatgtgctcaggcctcgaaggtattcaaaagccttacttcatactttatcttagtagttattcaggtggaagtgtaaataaaatactcactgctgggtgttgtcaagccagtaggatggatgacatctcattaataatacccagatgttggtggctttctgagttgcctgcttactgttgatgctattgttttgatttttaactaaatgcaaataccttcctgcctcatcccagaaaatgaaaaataatgcttttgacactgttcctagaatgttaaagttgaaaaatgatgatgatgatataatccagaaatttttacttcagagcatggcaatagatgcttctttcacaaagactcaagatcaaacttcttacctaaaagttaggttaactgttgactcctcaagggttttgatcaataccacttaaaccttttccacttgacatgctagaattttggtgtgtgtgtgtgtatttgttcatgagcacaatagctcccatggggtctgcacatgcaggtgtccaccagcatcagcctgcctgagatagtgtcattcttggttctggggagaagggtgtgtgaaggagaataaagcaaccctaataatgttaattgttctcagaactggactttttttttcctcccctcaaaattaaaactctttttcttttggatttaatgaagtattgctaactgaagccagtttgacttgtgagagaggttagactgacggaaggtgtgcagcctgatttacaaccaaaccctgaacccttttgaagaacaataaaacatattttacatgcaaaaaaaaaatactcattgctcaagtttggctagaagcaaaatatctgaatttattttttaagagaggttttaaacatttgtttattgtgtgtgtgcatgtgtgcgagagaatgtgccattgcttacagtggaggtcagaggacaactaacaggtgccagtcctctccagggtggccaagggaagcaccctgacctccccactccagccatctcagcggca

SEQ ID NO: 28585 - DNA, 1223 bp, Mus musculus
taagtttaaaagagggtagttctcttttgtttgaaatggtcctactgtgccctgcctggcctggaccttcctgtgtagaccagtctggccctgaattcagaaacctgcctgcctgtatctcctaagtgtttgcactaaaggcgtgtgataccacacacagctaaaagaaagtaattttgaagaacaaagaattaagtttttggatgggtgtggtgtggtggcacatgcctttaatcccagcactccagaggtagaggcaggcggatctctgagtttgaggccagcctggtctacagagtgagttccaggacagccagggctatacagagaaccttgtctcgaaaaacaaaacaaaaaaaaaaaggtgactcacagttgtcagatggttctttttgttattgtgctgcaaaaaataaagaatgtgacagtgttctgtatacttttttgaaaacgtgcctctctttcttgattctcttttcttgccctgaaagaactagctcgaggttctgtctttgtttatttgaaaaccaatatatctttgcatgtttagtttttaaagtagctaatgcttagcactccttagtgatttttttgtttaatacatgtggctctgattgtcctggaactttctatgtggaccaggctaactctcagaaatctgcctgcctctgcttcctgagtgctgggactaacagtgcgcaccactacacccggcagatcatgttttagttattaaaactaagcagaacttgttgcttgtgttactgcctttacaatcttgtcggaagtatgtcctatctggtggttcttttctgatattggttattgtctcagaatctcagcttctgcatctaagcagtaagaaaactaattcttagggagccacatcttagaattacataagataaaatgtataatgcctagcattagtaagtattccataattagtagaaagctgggtatggtggcatctaatccccatattggaggctgaggcaggaggatcaagtgaattcaagtctatgatgtatagccaagatttatctttaaaatcctcacaacaactagcaactacaagtagtactattaacagttgtatacattttgggtctgttaatgtgtcttatctgtgctttagaacttgaacttaaaaaatgaaaaccagtctcttaagaagaatatctcagcacttatcaaaactgccagagtggagataaaccgta

SEQ ID NO: 28586 - DNA, 1239 bp, Mus musculus
aaggtgcagtctctaacagtgagctttctaaagggacagacagtaaagaaggtgcaacaaaggtggagagtgggccaaatgaagcaaaaggcaaggacttaaagttaagcttcatggaaaaactgaacttaactctttctcctgctaaaaagcagcctgcttgtcaagataacccacatcaaataactggtgttcccgagcccagtggcacgtgtgactcacggtccttggagacgactggaacggtggcatgccttccttctggcagtgaacataatagagaggaaaccaaatcagagttaccagagccaaaggaggctcttttggcaacatctcaactcaggatcagcattccagaaaacaaaatgaaggaagaaaagaggttgttatttaaatctgttgagaatactgtgccttgtgaactgcttgcttgtggcacggaaatttccctcccagcacctgtagaaattgaacaagcaagatgcttgcttggatcagtggaagtggaagagacctgtggtggtgcaaggacagccgcttctgtggtgatgcatgtgttaccagaacatgcttctgaagatgccagccaagaattggacaccaaaagacacgatggtataaatgcttgtgctatttctgaaggtgtgaaaacaaaggtgattctttcaccaaaagcagctgcagccagtgagagccatcttgcacctttggttgaagaacctagcatttcactagtaaactgttcgggagacaataatcctaaacttgaaccttctcttgaagagaggcctatagttgagactaaatcctgtcctttggagtcttgtttacctaaagagacttttgtaccttcaccacagaagactgagttgattgaccacaaaatagaaactggagaatcaaactcagtatatcaagatgatgataactcagttttgagtattgactttaataatctgagacctattccagaccccatcagccctctgaatagtccagtgagaccggtatgcaaagttgttagcatggagagctcatgtgcaattccactgtatgatagcagtcataaaggtaatagtttatgttctataagttgtccttttgtcacctagaacaacaaaataagtgctttggagaattacaaaaattattcattgacattgtgtgtatatgtgatgtgtaaggggtttgtgccaaggaatgcttgagggaggaaaccagaggacagtcatggagttg

SEQ ID NO: 28587 - DNA, 1214 bp, Mus musculus
attaggcccatggccttgagtattcaaagcctgtattctactaatattgagctatagtcttagatttcatatatacttttgttgttcagaaacaattatcaaatggtgtagaagaggtgatgctggtaaaatgaaataaaaattattcagttaactgaccttttgagcttattttccccatgctgagagtcaatttaagtattaagccttaacattttgccttaaaggaggaaaggttattaaaataatactttgttgtgttcaggatgcaaatgtcaaatggctaatactcagtggtcatgtgattttaatatattcttctccacagatgagtttccatccaattcaactctttctaccttcaagagtcagtctgatctaaataaggaaaatgaaaaaccagttcccaaatttgacaaatgttcagaagcagattcttgtaagcatttgtctttagatgaattagaagaaggcgaaattagaagtgatgatgaagaatctgtagcacaaaaacgcttggaaaagagtgcaagacctagagtttctgctgaagtgcagccagggaaaagcagcccaggaagcaggaggagcactgtgcatgtgcataaggacaacgggaggactgctgtaaaactccctcgggacagactcacatggagcaaaagatcaagtgaatcaagaccctccaacaccgaaaggaaaagtaaaacaatgagcatctccagcttggaaaaaatacttccgcttatccttgtaccctcttccctgtgggaggttatgcatatgttacggttgctaggtaaacatgtaagaaaaaattatatgaaattcaagataaaattttcattgacacaatttcatagaattattgaatctgcaattttgagtttcacatcactagttaaatgccttgatttgtctaagatctgtaagtcagtaagtactttacaaaagagtctttgtgaagttatagaatctaaccttaaacaagtgaagaagaatggcatagttgaccgtttatttgaacagcaacaaacagatatgaaaaaaaaattgtggaagtttgtagatgaacaacttgattatttgtttgaaaagcttaaaaaaatcctactaaagttttgtgattctgtaaactttgaaaatgagaatagtgaaggaaaacttggaaaaaaatataaagagagaacccaacattcaaattgtcagaagaa

SEQ ID NO: 28588 - DNA, 1217 bp, Mus musculus
taacaattattatttgtgtgtgtgtgttctcataaagatctcctctgtgtgctttagtctgtagcctaagcacctggttttgcctccccgagattcagttgaacatttcttttttgttcctcttctgtgtctgtctatggctctcttatcagcagcacgtcaggaaaaattataacatgggtttttgtatctctagaaatcttcctcatagtgagaattcagtaagtgttctgtgagtacatttagtaattaccactcaagatgtgcggtgcttttgtgggtaacacctttggtgatttgccaattctcgactgttaactcatgatagggcctgggtcctcaacctgaaatggtttccatctttaggattgtatggcttcagcattgttttccccacactctgaggtaccaaaagttgtgtaagttttgcctgcagtcctgtccctgagtacaaataggcacttgactgcttgaatgctgatattgtctttcctcctgaaggtttgccctgcgctattttaaggacacctatccagtgtttcagagactcttccttgagagttctgatgcgaacccagtgcgctatggacgtaggcggatgaagctccgggacctaatggaagcagccaatatatttctacagcacaggcagactgtttttcgggaactctgggactggagtgtgtgtgttcctctcctcaggagccatgatgctttggtgcgctggtacgtggattaacctgtgctaacttgggggtgggagtgggcaaagacaaagaaaaactctttagatattgctgttggttatggtgttgactgtgtgtttgttgggtcctgggaatcgcagttatggacggttgtgagttgtcatgtgggtgtttgggattgcactccagtcctctggaagagcagtcagtactcccaactgctgagccatctctccagccctagatctttttgttctgttttgttcttaccccttacctcgatcatacagtttttcattagaaaaagattatatgcatggagtgtcgccctttttcctgctccactaaaggagttcattgtgcttgctttgtgttttatacccataaacgtgtgttgtggtggttaagattttacttttagtgtttagctggtgagtacttttgttagtcaacaggagggcaggagaattgacatgcttctgtttccttcaggcatacagctaactgtct

SEQ ID NO: 28589 - DNA, 1157 bp, Mus musculus
aggacacacgagtgccataacacgtggaaggcagagggccagctgcactgcacagtagtagattaatttattgctgtggcttgaaggcacctgaatgctgaggttttcagatttagcagcaagcacctttacccactgaactatttcattgcctatctcttaaatttaagtgaaaatgttacatttttttatacatggaaacataagttatttctgtaatatgtagaaaatggcataaatcaagttttttattatagactaccttgtgcgtaaaatgagaaggccaaaaataaccaaaatttggtaatactcagggagatatggtaatatcctattcctaggatgtgtaattagtttcatgttttataactcacgttgaatgtatttaaatagaacaaatatattaaaagtgtaagtaggcctcagtggtttacaaatcttaaggcactttgaagagccgtaaagcttttcagatttatactgagattgctctctgattgctagtctctgttcatgtatagcattacaatgctctttgggtgggttccccccccccaacagtatttttattctttgaaaatcccgtgcattttattttgtatgatgacctcctggcttttcccatctaactccttcccattcattcccccctttccttcctctggttttgtgtttcttgttttggtttttcagttttcttttctctttgagtctagtttgtttcccagctagtacttgcctctggttcttttgtttgataggtttttgttgttggtggttttgtttgtttagagaaagtattactgtgtagctcaggcttgcctacaacactggactctcctgcctccactttctaaatgctgtgattatgggcctgtgccaccataccataccctagctaggcctgttttctattaatattaaatgatgaatgtcatctaatcccttcttagaaagcagactctgggctctgttgatgtcgcaagcagtctataactgtatataccccccaccctctcatttcatgttcatctgatttttgtcttagtacattgagcttctggtaggcaccacacacacccctttatattacttgggaggaatgaaaaccagtttccaggagggtaaggatgaggagagcataaagacttggtgaa

SEQ ID NO: 28590 - DNA, 1186 bp, Mus musculus
gaagagagaatgtgggttggacctacaaaaccacaaaaactaatcggacttggaaagaatgacgtcaggtgggcatagaggactagactggtatacagggtgtgcttcttggtccggtcctgtagtgtgggggtaggtctgactgggtgtataggttagatgtgacatgggagaagcctggtggaggcctagaggttggctgcagaggaggctcaccaggctagacactggagcagggctttcctaatgctaggactctttaatacagttccccgtgttgtggtggccccaaccgtaacggtatgtttgtttctacttcataactagaattctgctactgttacgaataataatgtaaatgtaaatgtctgtcttctggtggtcttaggcaacccatgtgaaaggtttgttctcccaaagggggtcactccctacaggttagaatgctaccctagagaatgatgtgggacatactagtgtcttatacatgattaataattttcttacaggttcacggaactttatgtagaagaattagaaagtaaagaagacttacaaatacttattgtggattatctgaaaggactgaacgtgagcaagaacactgtgcaaggcattgtaaagtaggttgtcctttgcttgtctttgtacaattacttctgaacataaaagacccattccatgcagctatactttttcatgatttgcttttgtgtgaagaaaactggtagaaggatttgctttacaatggaaaccttacatgaatactttgagattttcttaaaggaattacttgggctggagatggctcagcagctaagaacactgactgctcttccaaagatcccaagttcaatcccaagcaaccacatggtggctcacaaccatctataatgttgtgacctctgacttcttctggtgtgtctgaagagaatgtgagcggcgatgtactcacatacataaaataaataaataaaacttgaaaaaataagttctgaattaaaaaaaaaagaaataacttagacaactaagactcactacctatgaaattaaataggtgctattatcttgattaattctgtatatttatagcttagtacttgaattcctaaatagtaagttgttcttttatcttttgctttgtctctttcctacttaaaatttgcatagtagctaaacagaaatg

SEQ ID NO: 28591 - DNA, 1196 bp, Mus musculus
tgatggcgcacacctttaatcccagcactcgggaggcagaggcaggcggatttctgagttcgaggccagcctggtttacaaagtgagttccaagactgccaggggtacacagagaaaccctgtctcaaaaaaccaaaaaaaaaaaataaaaaaaaaaatatatatatatatatcaaagaatagggtacagaaggattagaattagaatagatagtgagaatttggtgattttataaaattagatgtcgaagagaacatttaacaggttgaacaagagatgtttatagccttagctcctcctgggggtagaaaaaggccatgtcaattacaagtcttacctcttggaacattagattgtttgagggtcacagctagctgcagaggaattttcttggcatatagctatcaaatagtatttttgtttgtacagacagatatattttaaggccttggagtcattgattatactttgaataattcttgtcatttccttttaggtgttcttattgatgctatgagaaagggctactggattgtcttagatgaattaaatttggcacctactgatgtgttagaggccctcaacagactgctggatgataaccgtgaactgctcataacagaaacacaggaagttgttagggcgcaccctcgcttcatgctttttgccacccaaaatcccccaggactttatggaggtagaaaggtgtgtaacaatttcatgcaaagtcttttcatcaacatgagaaatggtaaaatcgttgttaggaatgagacatttggggattctttttctttttttggtttttcttgaaacgggttctctgtagccctggctgtcctggaactcactttgtagaccagactggcctcagactcagaaatctgcctgcctctgcctcccgagtgttgggattaaaggcgtgctaattgtaaatcactgctaattgtaaatcaaaaagaataggtgccttttaaaaataagattttaattaaagtgattgcatcacttcatttcctcctgccaaccccttccatgtttctttttccaatcctttctatgtctgcctcccctaattcctgcttaatttgataattattgttacataaataaatgcattatggatagattggtagatagatgcacaaatacttagataaacctgctaagtctacttttcgtttacttacacaca

SEQ ID NO: 28592 - DNA, 1165 bp, Mus musculus
ggccagatgttttattaaaacaaacgctttctaaattctgtgtggtatgttcattttctcgcttgttctagaagcagcctttctctcccaactctaactggtcttgtgaacagttgtcagtctggcagacctctgcttcttgtgggtctcatggttttgactgactcttgcttcttcagcttcctgacccagtggcagcagtgggtaacagtcactcttacttcatgtctcaacattcttcactaccaactgcttaagtgtccctttatttccacctccaggcttcatgcttctggcaggcagagtcaggaagcaggaggaagctgatgtaattcaagaagtccttgaaaaacatttcaagaaaaaattgtgtcctcagtctcttttttccaaagaaaatgttctaaagttactgggtgagtagacccaaacaccataggaacatgaatcatgttgtactcattagagcctacagttttattttgctttggtaggtaaatcgtctacccagacaactgtgttggagtctaagttcagccatgtagtgtggactgaaagcatgcggagactggcagtgctggtgggcagggcgctggaattcggtgaacccgtactgctagttggagacactgggtaagctctgaaactgtagctcattgagaagtcccactttactgtctgtgggatggggatacacctatagggatgggtgaagcacttagaggagtttctcttctcttttgttgtctgtttttcttttccctccctccctccctccctccctccctccctccctcccaacgcaagattttaccttcatactaaaaaagctattcaataggtgtggagagaaattgctggtgtttcttgcggaattcataacgttatttcttcctctccattgattgctgttggaagaatttaaagaatgaaatgtgtgtagatgatgaccttttgtacaaaccatctgagaggtgctgctgttgtacagggaaacacataaacctgagttgcaggctcctgagtttgattaggcttgtaccgaggtctgagtgtggctcatctcttgctgatacagtgtctctgactatgcatttggaacacatgctgctgcttaatctggtgtatatttctaataggtgtggaaaaactactgtctgccaaa

SEQ ID NO: 28593 - DNA, 1117 bp, Mus musculus
cgactctcggttgtccggagtgaagggcagatcctagcatactgcctcaacaggatgagcctgaagactagcagctggacaaggtcagtggaatcttccgtgtgttctcttgtatacattttggttttgctgaaaatagcgagcacagtgtagccctcccagcatttgtagccacttaattgtctagccatcatatttttactgtttgttttcagtttcgtatatttagaagtcctctgcagaagtagattcttctagactgatgagcctgttatatgctcatagaaagcaatcagaatgtataggcacaagctaggtctagaattcaggcctttgtcatgctgggcatacttatattagcctcaccccatccctaagtacacgtttacgtgtcttttgtcttttttattttttaaaatgtcatgtaaaaactgctaacttttcttgttctatgagttccaggagtcagcctcttactttacaagacttagagaatattatgcagacttgtagccctgacgacctgacgttcaatgcggtggaagtggatacttgctgggtcgatgaaccagaggttttagccacggctgttaaattgctcatagaaagagcaaccaatcaggattggatgctcagagttaagtggctttgtcatctagccaagaacataccgcaggggcttggtaagtagcagcgcttgtacgggtaagaaggggttacatatgttttccttgttcaagagtctcggcagacatgctagtctgtgactacactgttgaaagtattgctgaggaaaagcaaaaaaatgtgtgagactgcgttgtttagatagctattaaattagggtaatatttgccccttatgtatcaagaggaatgcctcgatatttcagggactgtcattttcagttcagaaggaaaaagtattgcatcatgttatttttttttaaccccacccctgatcatattactttttagctttgttatttagctttgttattttttctgagaatagtgttgtttttggtaattcatttacccttaaggatcttaagattctaatttattttttgtattggacagggtctcactatgtagctctggctggcctagaactc

SEQ ID NO: 28594 - DNA, 1092 bp, Mus musculus
tgctaagattacaggtttgcaggaccatgcccaacatggtgaatatcctttacagacagtagtcatggtttattttgttttaagatcttaggttctgtgcagtggcgtgaccggttttggactgtggctgatacagtgacagtagatgcttcaggtctggctttacttgccctccactggcactgggtttcgaaacatttgatctatcagatcccccaactcctggtgaatcaggaaaacaagtaagaccccgtttcaagcagtaatgttaaaatataaaagaacattgaattgaaaacgatttcctcttgcttggtatacttctttggctttcctaattacattaacatgcaaaagtgtagacttctctttagtacccagcatttccccttgttttctttgaagatactataaagagttgcagacagtttccgagcacatccacagttgtctgggcagccctgctgacagctttgctggtgtaaagaagctgcaggcattcctcggacgaccattcccttttaaggtacacctagaaaccctaggtttctcctgaacctgaaagctcaagtagttttgctccaaagctaaccctttatttcttaagaaagtgctaccttgtattcacttaaggctggctagagcattattaacttaaagtctaccaaagcagctaggctactgaaaagaactgtttttcaactcaaagtctgctctctttgtttttattttaggacaagctggtagtggactgttttctacagctacaggcccttaacagagcccttgctatcggagaacagctgcctgtctttggggaatgtgggtggcaagaagacattaatcgtctccaagtggttgcttctgaatggaatttgaagaaaagtctcctacaggcctggggattgatcctcagagccaacattctggaagatgtcaatttaggtaatattttctggtatttggtttgctgagtgtcttctttcctgttgctcataaagtttgcccttaggactcaacttcacaagtatcagtcagctacagcattagatgtgtagaagttaatatgattgaacttggggaaactccaac

SEQ ID NO: 28595 - DNA, 1216 bp, Mus musculus
aagcaaataaatatttttttaagcactgagtttctaggaagtggcttcattgtagcacagtcatggtggtggtgttcttgggcctctcctctgataattagtaacttcagtttttagtacatttttatccttggcctgaccgatagcatgttttctgttaaatacaatttcttattaagaggcgttactctcagtgtttgttttcaagcttctttccagaggaatcagttttgttacttgtgactgtgactgagcctgtctctgttcatagatgtgctcagccctctccagagtaaccattctacctatcctgatgctatatttcattcaggtttttgtcttggcaatgtagcataactgtgtaccagatgtctacaaagttagagtcttacttaaaatctcaaaactgtgaaactgcatgatccctgccagttctgagagggaaaagaatgtcaaaaatctgctgcatttccagccagattataacatttgctaactctttcccccaaggggttttgtttacctaaagaattgatggaagattccgcaggagagggagcaacgcagttccatgactacgagggaggtgggatcggagatggcgagggcatgaaggatgtgagtgaccggatagaaaatgaggaacaggtacgttcgcacagcttatgtaagctgactcttgagtgtttaatcaaacttgttagtacgccaacagcatcatactgatctgtgtaggtctttagattaaaacctaactccaggacctttgcagctcagccatttgttacgataatagtcttggaaggattgacctttccagtttgatttttttttttttttaaagatttatttattttattttattatatgtgagtacactgtagctgtcttaagtcactccagaagagggcatcagatcttgttatggatggttgtgagctaacatgtggttgctgggatttgagctcaagacctttggaagagcagtcggtgctcttaaccgctgagccatctcaccagccccctccagtttgattttaaatggggacttgctgatgatttctgaagagtattttgatatgataattgtttgattttgttttgtttaagtttacattattttgtgcaggaatgggataaggcatacacatataataagtcaggagacaaattgtggagtgttttttggtctgtgtacctgtctataaacaaacaa

SEQ ID NO: 28596 - DNA, 1842 bp, Mus musculus
cttggaaaaaagaccccaaccagaaggttttccattgctcttcaaactcgacagtataggtatattcatgcttgtgaaattactgttctcaaaatgcaacccaatccctcccctaaaagcctacacgctgttttcccaaccctccaaagagacttccagaggaagtgaacgccacacatagataaatacgtttctttgctttgttgactatttatatcctagatctagtcatcatggcatatgcctactatcccagcatttggaaggcagaagcaggagggtcaggagttgaaaggctatcttaactacagagcaaattcaaggccagtcagagctggagagaggggttatcctaaaaatgatgtcagagtctaattgcccattcttttaatagctgtattgaatcccactgttgtatggctgttcctgggaatgagcattggttgttttgaggtttcatatttgcaaataaggctctaatgatctccttaattcctgcagagttttaagaggagacctgggcaggctgacaatgaacgttccgtaggtgactacaatgagcgtgtgcgtaagagactgaggactgtgggcacagacagagagactgaacaggagccaacccaggctcaggtggaagatgcagacgcgttcgaacatgttaaacaaggcagtgatgcatatgatgcacaaacttatggtatggtgctaagaatactacgactttttctcacaaagcttttctctgaggttgtgccacatgactgtgcctgccagacaaagtagaaggggaagaaatatctagctatctctcaatacatacttttataaggtacatataacttgtttctggtagcaaggtaaccgtagccaagtgtaaatgctcagggttctcggggtaagccctctatcctcatagacagctggctagatgctgtaaacctggtgttgaccttgtttcttggtattgaacattgctgagtgtccttgaacagtgaacatccataatacagatggggaagatgagatcacacttcgcttgtccttacattcctctctttctgaggtacactgctatgatatgttcctctgagcacagaacagaaatgatggcagtgctttgtgtctctatgtgttcccaacaccaaagaagaagttgatgagtgtacgcatacttggtcaagatcctccctgaggctggagcatgggcttgttccttcctcacattaggcggtgtgtcatagcttccaatatggcaccctataaacttgtgacactgagtgacttgaaggtggtggatgtggatggtgaatggatcctgaattctgcttgttaattcagttgataagagtgcttgcctaggggggctggcgagatggctcagtgggtaagagcacccgactgctcttccgaaggtccagagttcaaatcccagcaaccacatggtggctcacaaccatccccaacaagatctgactccctcttctggagtgtctgaagacagctacagtgtacttacatataatcaataaataaatctttaaaaaaaaaaaaaaaaaaaagagtgcttgcctagggttggagaaatggctcagtggttaagagtactgactgctctttcagaggtcctgagttcaattcccagcaaccccatggtgactcacaaccatctgtaatggggtcagatgccctcttctgtgtgtctggagacagcttcagtatactcatataaataaaataatttaaaaaagaaaaaaaataatagctagcatgcacaaagcgttggatttgttcctaccactacataaagctaagtacggcatctgtggtgccggtactccagag

SEQ ID NO: 28597 - DNA, 2144 bp, Mus musculus
aacttgttcagaagtgtagctgcaaccctgtcctggggtgctggtgctcagtgccattcctttcacaaagctccacacaaccctgcaaggtgaagaccattcttcccaacacagaatcgtgaggaggagagcagagagtctcagatgcagaaagcaacgaggaccctgagctcctttaaaaagagacggcctgtagcatacatcctagcagctggccgactcggggtgtcagggagcatatagctgcaggttgcactgatcctaactgactggcaaggcaagtggggattgctccatagaaagtagagacatggatgcaaggaaagcagcatttcttacttgttcctcttccttgaacttctccatggcataaagagctgccttcttcataaacattttggaagtttctcagcttttcttgtcaactaaaaaggtcaagaactagttaggaaactatttaatttttctttttctttcaaaatgtcttttgttaacaggattctatcttggacattaaagtaccaatatttaaaggaccaggagagatgcctgaaatccgatcctacatggaagagtttccatttccattttacatcattcttcgggatgtgaacgcgcttcctgagaccctcagtgatgcgctcaggcagtggtttgagctggtgactgcatctgaccactcctagagcagagcacagtctagtgaggctgtggggtcactggagctcccttacacagctgtttgtgaactcagagctctgattctacttcatcttggacctgatttttcttttttactgtatccaacagttataaaaacatttttattgcactatacatttgtatttacaacatagaagagcttagcacaagctcttggactccctgctgtactgactgagcacagacagctcacaagtagtaccagggctcgtgactagggaccaggtagaggtcacactgcccctttagagctcagccactcgctttcctctgctcagtaccttgaggaatgaatccaggaacacggggctgcactctggtccctgccttaagctctacatagagccacttggttggacacatcttaccctgctagaaagcagggtacttagatggtgtgttctcataaagcagccagcaaaggtgaccgcagagctgcacaaaactgaagcagctttttgtgcctcccagtggctgcctcaggagcctatgcaataatggacaggtgattctccctcatttcattcttgggctgccatagcccctgctgtaatttatttctttagccatccttcccccgatactaagaggaaaaattattcctcatactgctttcaagctatcctaagccagtgtcactgtggaaaggagcgaacggatgctgcgtccacgagaacttgacagctccatcctcccctcacccgcacagcacggtagtgttaggcttggttcccttgggcctgggggcagttttacttggccagaaagcagtgtttgaatacttgaaatcatgtgttgtgttctgtttaaatgttgtttgtagacattgtgctgtacacctgtctccatgtctgtttgcagatgacactgtgaagtgtgccacccttatatggtggtcatcaaagacagattgctctgtgtttaacaaagcgtcctaaagcatggacttaaagttattttattttttattccaaaatgctatgcagcttatattctgaaagctattaaataattgttgagttaatctttgatcagggtttactttggtttggcttggtttggtttttttgagatctttgatcattcttaatggcgtatgaaaaatatgacaggattgaaagagtgtgcttccgattgatcctacttgctaacccaaccatgcgagcccagacttgtagctcagtattgcaaacgtttatgcctcactggtcagctctgtgattcgtgagttgcagcacgcaggcttggtagcgagggaaacggggtaagttggcagaaccacgtgggtggtataaagattctgttctgtgacataacccttcactcacacgcactggctacagttgcactcagcatgtgtggctgagaaagagtcccaaatcctgcacttacaatgatttctttcccacagggtagcgctc

SEQ ID NO: 28598 - DNA, 1311 bp, Mus musculus
cagcacatctggctttgtattgtgtagcctagcgtccagctttccacttcacactactgtttttttttggggggggggggtggatggggggagtgccttttggtgacaggattgaatgtagtgccttgggcattggtaagcccacagctacaacctgtaacagccactgttggttcttgactgtaccagatacaataatagaactttgccgtggttaagctggtaaaacaatgactagattgtcctttcctccacaggatacaatccgaatgatgataacccaaggcaatatgcagctaaaggaactagaaaggacgcttgccttagccaactcgtaactggaagatttttcatgtgttttgcacaggctccgagccactgtcatagagcacccaaaaaggtgataatcactctgatcaagaatataagtgaagcgtgttaatatttccactacagtccgtggctgtaataattaaacgtgaactaatgtcaagatgagaggttggaatcctcaattgctcagagggaaggtgaaatggcagcccctttgaaaaacagacgactagttagcaattcttagaaaggcaatgaggacagggctggtaaagatagctcctcatgaagactcttgctgccaaggacagaagtttggtccctgtgacactcatatcgtggaaaaaaaaaaaaaaccactccagaaagttgccctccgacctccacacaggcactgtggcacacaaaccaaaatgagtgtatgttgtgatgtgatcacaagctgttacaaagtcagatgcaggactggcagtgtactgccctagaaaagtgattctcttgctgtgggtcatgacccctttggggccaaacaactctttcacgggggtctagtattaggtatttatgattcataacagcaatattacagttatgaagtaacaaaatttttacagttgtgggtcaccataaaattagagctgtattaaagggtcacagcattaggaaggttaagaactggctagaaacagcgctagatcttgcttgaataacctgctttgtccttcagagttctgaagtgactttcttcaggtgtgacatggtttgataaccataagactgaggtctcgcggagctttagtggaaatagctaagaacaccaagaagagggagcactgggtgggcagttcagctcctgcacctaacatcctcatgaaatgatgaatcagagcactgactgctctcccaaaggtccagagttcaaatcccggcaaccacatggtggctcacaaccgtctgtaatgagatctggtgccctct

SEQ ID NO: 28599 - DNA, 1592 bp, Mus musculus
agaagtgacctttgtgaaatagtatgcatttatccctttgtcaagccaagttcttcctttttcttatagtgacactccatggatgtagacattcctggaaacatacagggtagatatatgagtacagaatctagtgaggccagttatttcatgggactgacccgtcctcagcctcttgggaggtgcagatttttcccattctccttcactggagtcctgtcctcagctcacttgccccatccctgctatgacactccctggacaaaatgtcactggacctgcctaatactaagtaagagatgaaaccccgagttcagcaagttatgctccaagcaggagttattttcactattagaatacttattacctcaagatacccttgacaagaaatgcagacatcaactgtaactgaacatcaaatctagaccacagactaccttggtggcagtactttgatgctatacctcctacccatcagaagcaggcagcttatcactgtgaatggatgtttttgtcaagtcattaagcataaagccaggctattgaataaggccagtcagccccttacccacagggttgacttctaaggaagtggtggttggcttgttttggaaggctctactgtgtactctagactgtctcagccacctgagttctgggattaaaggagtgagcatggctaatcctgtgttgtttgtaacacccgtcttaggtttgttgcaattgtaaagcactgaagatcagctgtgtcttttccccttgtgctatgtgcaaaaacaagcaaatatcccagctgtacttttacagataactgtttatatcacatactctcacatagatcatgcttcaaactgaggcctaggaagcatcaacagctgtggagaaacatgttataaaacagtaatgttgtatattatcaatgtcctttttaaaaacaagtaattgttagcacatcccttagactgtattctgagtatctgtgatggggtgaaagtgttagtctagcatcgctttttatttgaggagtccggaatataggtttttcatgtttagatttgtgtgtgcaaggcatgttgtctgattttatcacatggaacttgtgtctcctatatgcattaaatgttgttttcagttctgctagtattctactttttagtcattagttctgcacattgcactctagagttcctgagagagcctgcacccagccactttacttacttagagcaaatgcatccagtttagttaacatcaggtgtcttccaccaacacaaagtgggtgcaatctgtgtgtttgtggggaatcctttaatgttaatgcaagcatattaagtccactagatataagactaaataatagcacctctaaaaagaactgtccctcaaagataaagggaaagttaggtagagcattaacctttcccttggaaatcagttcagccgggcagtggtggcgcacgcctttaatcccagcactcgggaggcagaggcaggtggatttctgagttcaaggccagcttggtctacagagtgagttctaggacagccagggctatacagagaaaccctgtctcaaaaaaccaaaaaaataa

SEQ ID NO: 28600 - DNA, 1126 bp, Mus musculus
gttttccttattactattgttttgttttgacagctctggttatcctggaactcactctgtaccctgagctggccttgaacttagagatctgcctgcctgtacctactcagtgctggaatggagggtgtgcaacagactatcaaatgaaatcaaattatataccataaaatccactgcctttcagtgtatttacagttgcaacccatcatcataatagaacatttcatcgttcctcagtgaagcccagggtctgctacagtaatttccactgtcctactcaactgaaatcagtttctgtgtttgccttttctgaacagatgcatgtaaataaagtatttatatgcaaattaagttgttattgactaagttacttggaggccaaggtccttgctttgttctgctgaagctctgctgcattgcacatagtaggtgttcagctctctgtagggtgaatggtgtggaaggcagtaatggagtttgggggtaggtataactgggagttgcttagattgccctgcatgaagaatggaggtagcgttagagtgaccagctgccacactctgttgcctgttcatctagattttagaaatttctatcttagctttttatgagatgtggacatttacccagcaagggccaccctggatgtggagtgtaaatcacaaatagtaacctactgtagcgtcaaggtcatgagtgggcccaccatagcccagcttctccttcctctgcagagtcttcccccagctacactttcctcaggccctccccaggttccttcttctccaaggaagcttgactccctgtccagagatgagctaaagctctcagaagcacacatacaggcatcaggagagccctgctggcctgagcatctcctatcccatctgcattcccaggcctgagtcaccaggtgctgttctgtagtagtcacctggggttttcaagaccacagagggcagcgtagagaagtggttaagagccgagcagaaggctgcatcaggctgagctgtttgcagctactgccctttggtagctgtgaggtagtggggactccccagctattcattttctatctggaaaataagcatgtgaataagtcagaggtgtgagtagacttttgagg

SEQ ID NO: 28601 - DNA, 1457 bp, Mus musculus
acaaaactcattttcttcactcgggttggcatatgtccaccagttatctactgctatgtaacaagcacccccaaatatccgtggttttaaatagtaaccatattatttgctcatggttcctatgattggttgtataaggttcaacttcaatagcaagtctgtttgctgtgtggtatgagctgtaaacaccacctgattaaagtttaggctggacaatccaggattgtcactcacaagcctggtctctcaccctgtatgggcatggtgggttgaatgaaaatgacccccataggctcatatatttgaatgcttggctcctagttagtggggtgttaggaaggatttaaaggtgtggtattgttgtaagaatgtaaattctcgttttttcctcagctgccgccaaggtgctcggtccttccgagggagctaaggccgcgttggggtgaggccctcacttcatccggcgactagcaccgtgccggcagtctacagcatggcttccatctccgagctcgcttgcatctactccgccctcatcctgcacgacgatgaggtgacggtcacggaggataagatcaatgccctcattaaagcagctggtgtcagcgtcgaacctttctggcctggcttgtttgccaaggctctggccaatgtcaacattgggtgcctcatctgcaatgtaggggctggtgggcccgctccaacagctggagctgcgcctgctggtggtgctgctctgtccactgctgctgccccagctgaggagaagaaagtggaggcaaagaaggaagagtccgaggagtctgaagatgacatgggctttggtctttttgactaaactgcttttgttaagttggccaataaagagctgaacctgtaaaaaaaaaaaaaaaaaaaaaaaaaagaatgtaaattctcagctactgctcagcaccaagatagcttgcatgctgccatgctctgaaccatgatgattatggactaatcctctgaaattttaagcaagcctccaattaaatgtttataagttagttgtcttggtcatggtgtcttcttacagcaataggacattaactaagacacctggcatggtaagagcattgactcttacgctctggcgttgaattagtcagggttctttagcggaacagaactcatagctatggtccagctcgtccaccaatggctgtctaccaatgggagactcacgaatccagaagatgttcagtatacaaggctggctgtctcagctggtcttcagtatatgctagagaagtgggtccaaatgccagtgaaggaatggacttgctggtgagggtgagaaacagcagcctaggagtatagcccacatcagaggtggatcttcccatctcaaatgggccagattcaaagtctgtctttgcacttcaaattatttaattaggaaaaaattatttactggaggtggtggtacacac

SEQ ID NO: 28602 - DNA, 2678 bp, Mus musculus
aacacacctttgcagtcaccttgtgcagacgggtgatttctttttggtgcagtatcttgtgaacctttgggaccagatttctaaaatgatgccaaccagtgtagagaaatatggatgtcgtctgaggagattggaacagatagcattgatttgtgtgggggggaaaccgtagaagcaatactgtacctgccgaggggtctaaaacacacaagccaagagggttcccagatgtaggcagaggtcactcagataagagatgcacgtgtgcttgtgtgtgttcacctcctgggaatggtgtgttgatgcgctatgttcagagaccttgttcaggaccaggttttaatgctccatgaccacaggagtttagtccttggtggctccatttgttacctgactcgttctttcatctgtaacaacatacctcatgtcctttgcctgttcctaccaagatcagcttgccaccagcttgctctgcaagacagaagacacagaaagcctgtggccggtgggaaaaaaaggaggcctagagacgtatgttagtcagttaactatgtgtgtgcttttatagataggtagggaactaagagtcctaaatctagccctatttcaaaccattctaagggttagtactgtcaggcgtgcatggcattagcaaaggttctttttaaagcagagtcccttagggatgtcaaagctggttctagctttgtgtctaaagcagcttgctcctgaagctcacttcttttacgcatcttcttcccatcttcttgcttccttttccccaaattctttattatttgagacagcgtatctctatgtagccctggctgtcctggaactcactatgtagaccggactgtccttgaactcagagattcacctgcctctgcttccccaagtgatcaaaggtgaacaccaccatgtctggccaggtcttacacttttggagctggtaactaaaactggagacgatgattgaaatgtaagattgagcctcccagtagtctgcacattattaaggagatttctagtcatcatggaaccatggctccttccttatgatttctatgaagagacttgaatgagatggtaggagcctggagttctaatcttcaggactattccccgacggcctctgccaacagagtggatggtggttggccacttttaagagtctaacaccactgtgcacccacacaaagacactagagagtgagaaaaagcatagttttctctttttgagtggggctcagaggtaactcaggctggcctcagacttgccaggtagctaaggatgctctccagtttctgaccgctcagcctcgactttccctaagtgctaggattataggaatgcaacaccgtgcttggcttgaacagtgctgagaactggacccagagctttgtgcatgtgaaggcaagcactctaccaatctagtatccccagcatcctttcttaatagtttttttttttttttaaacaaagaatttctctttgaatagacaaagaattaagtttttaataagactgtagtttcaaaataagacacttgcctgtctggtaaatcacataaaattagcatgtctaagtggcgcttccatttttaagctggttatatcatgagtttttgttgttgaaatgtgccttaaaagcctatcacttcaagagcatgtgattctttgagggataggcaggaacactcctgtgacatagggcccatgttcctgatcataaatgcactctttagttacaacactgattcctgcctcgagcctggtgtgacactgacctcttgaagatgtctgaatgtgactagaattgcgaaatgtcctcacatttgttttgtattttatcttagatttggggggttagcttactgcactgtagatctgtgtctatgctcaaatgggactataaactgaaaggtcaaactcctaactacggtggcttcagtagaacatgtgtttggttttaggaattgagaacttgaagatgtgtagagcaggcagacttttgctctctgagtcaagtacagcttctatgtaagagttgtgccgaattacttgtcataatggaggttagtgtgagtgacctgtacagagtgcttttgaaggagtagaaataaaagctgattaatagataccacgtgttattttgtgaacataatatattttggatcattaaatagaaaatggctaaatatcacagcagtactattaagtatgggttatttgtcaactgagtctgaaacagaatttatcaaatcaatggaactgtcatgattgacgtatggtatgcactcaacaaacacaggctgggtgtagtttgtaatcaagcacactgttttgctgttgctaggacttcatttgtaacacagtcttcagggatgttaactgccaacttgaaagcatgtttgtgtgccgatggcttgacgtaccccgtacccatagcttagttttctgggagcagaatggtctcttgttgaaattcaagatgatgtttactatatacatatatatacatcactgttttattggttatgttaggttcatttaataaaaagaagttttaaaaataacctcttgaagtggggtctcttaatggcattccaggctgatcttggatttctgggctcaacagatcttcctgcctcagcctgtcttcagttgggccacaa

SEQ ID NO: 28603 - DNA, 1104 bp, Mus musculus
caggctggccttggtttcaccatcttgtcttcactctttgagtgcagctattacaggtgggatctcccacacccagttaaaatgttgatgttgaaatgaatgtcaaggttcaagtggacattttgcaagtaactgagatcaacagttccctcatgtttaaagctgttgccagcacaaagcttatagttttaatgatttgggttatttattttaaatgtttgcatttctctattggaaagtatttgaaatgtcttgtatgtaactcatactaagacatttcattcctatttattgttttaaagaataaacatgttctaatggaaaagctgttcttagtgaaagagttaaaagccattgatgcagtcaaggcaggttaaggagtctgtgtgtatgtagttttatgttttatggcttccttgaatgttctactgctagttttaatatctccagggcaaacttgagattttgaaacctttgtgtcacattatgactgtcccctgactgagccagtcattgtggcaactggaagacgctgtcactggggccatggggcagccacgtacacagtggagcacactggggtactcatggtccaggcggctctcacagcataaggtactgagtactgggtaaaagatactgtagacttgggttttagttcactggactctggaaaagggtaagctgtgtctgaaaacaagcacattttacaataccgatatgaaaaacttatggcttaaaactatttccttattgttgttggtgaaggagtgtcagtgtggtaaggtaatactgaagaatcagtatccctcaggatcttctgaaagaagaatcgtgcccagatgctgagcggaaactgctgtccctgtgtctaccaactggagagaaacagccacaccaggcctctggctgctgggaaatgggctcctccacctcacagagctcaggataagctgggtttctggcttattcatcaggattgcttcctagtctccgaattcagatggttctagttaaatttgccttagtcatatttaatactctaggtattctcaaactgttaacaagtgcatgaacaacttttttgggggccgatttcaaaca

SEQ ID NO: 28604 - DNA, 1684 bp, Mus musculus
acaaatgccttttcctgtcacctgggagaggtgttacgtcaatgcattctagaatgagtaagctacacttagcagcttaaatgtaattacaatctgaaatttattttcctttaccagcttaattctaaggaagcttgaatatgggacctgtgcagtacaggtgttaaagttatgtttcctttttcctaaatgcctgagaccagcggtgtttcagattttagattaaaaaaatgttttgaaatatttgcatatatattatgtaatctatattttatacatatatatgtatatacaaacagggagggggaagatagagatggaacccagctagagctataaaaatccctttgtgtatcacatgggcctgccctatgcacacagcttgaaggacggtgtgctcagtgttttagtgtgtctgagagttaactgacctgtgtgcacaggaggccagttgtgcagttctcacctaggtcgtgccactcacagttggatttctggagcattttggtcagtcaacctggactgcgaactagtaagttgctgtgtattctgtgactgtagctaatatttagcttgcctcaaattttttgagctgatatttagtcttaacaaattctccttattggatgaactgcacaggaagtttttcttttcaaccacgtctctctatgacataaacgttggggtacttagggtaaagtagacactgcatgtgtttatgaaggtgcaaacagaaagaagggtgtcaagtgctacagttgcattgctgttgctgtttgtaaactgtgccgtctcagcgtttgggtgagtaaatgtttgcaaccactggagaagagtaaaggccctgtgtgtggtgctacatcctcctaggatttagttcacacagactatgccaggatggaggggcacctgaaaactgccctgggagttttggaggaagggcttctaaaatacttaaaaatacgtgaatcacttcagtctgtttaaacggaaaaaaatatttgataccaggtctttatatatatatataaatatatataaaagaatagttgtctcaagaggaataaaatctggagtgtaaaaaaaatgttaaaaaaaaagaatacttgtctcactttataatattttttaaaggaaaaaagaaaacgtttccaatagcttttgtgttctgtgagctctcactttttacctgaagcagtcttctgtagcatgtcccacagcatcagagtaacttgatggtgactatcatttttgtgcccattatcaggctccagtcatctgtgagaggggataaactaccttgctactaacttaggccttttgtgatctaatgacatagctgagggtggtgtgttcgggtatataagaggttagtatattcaaaaacaatctctgctattgtggttataattatttttgtagtgttttaatagatgcacattaaagtttgtaaaaaaaatctaaaatgtctgtgtgtttatctaatagcagttatttttaatgaaatagctaaaaatagagatttcataaaataaagcataaccacccaaatacaaggttacatactgttttcttactcaccaggagtgtagagttgggtcctttccttcctgtgtgaatgttctatttatatagcatgaattttaagactaaatgtttagactggacatggtaatacacatct

SEQ ID NO: 28605 - DNA, 1175 bp, Mus musculus
atatcatcaaattttagaattaattcaaaataatttgtgttttaaggtagtcttcttttaaaatactgtttagagtgaaggtatattaggagtagttgcatttttaattttgtttttccttttaagctattaaataagtgagggtggggtgtggttcaattagtatgacttgcttaccatcaggaagccctgggtcccataccagtactacatacagctaggcatggcggtacaaaagaatcagaatacttttttccctagacagggtttctttgtgtagccctggctgtcctggaactagctctgtagaccaggctggccgtgaattcagaaacctgcttgcctctgtctcccgagtgccagaaaagcatgcatcaccaccgcccagccgagaatcagcaatttaaggtcatcctcaggtacacattgagtctgaggccagcctgggatatgtgagactgtgccttattattttaagaaggcagctttggaatggcaaattacagaattttagtcccttaaataatgaaaattattatccaccttaatgtttaggaagattcttacctctgaagacgatgctggggccaagatatgatagtcaagttgctgaagaaaaccggttccatcccagtatgctctcaaattatctaaagagcctgaaggtaagaagcagagctctttgctactcctgtagtcttcccgtcttggttttgttttagggcttttctgtaagtgagaggtattatgtgtacacatggacacagaggccagaagacagtcttgggtatggtcctcaggcaccagtcaccttttgtttttgaaataagattttttatcgatagattcctttcatatatgtatgtatttttggatgcttctacagtagtagacttccatatgatttttgaaatggcctttagtgttagttgtctctccctatattccttccttttctcttttctcccctcttcctccccatttaattctcctgttctagtttctcttttatttctccgtaacactatactcttatctccccttctttgggagggtctttcctcactggtcccttactaggtacctaatctctgtggttattcagactgtagcaaacatagtgaaagcttaaaacaaataaccacgttataagagaacaacatacaatagttgtc

SEQ ID NO: 28606 - DNA, 1200 bp, Mus musculus
tctagatgaagagtggggggcatgcagtcaaccctctttgtctgtattgtacatacatggaggagggaaactgctatccagcttcagcctttcacagtctaggaagtgaacttcatctaaccttttgacacgtgtttttttgtggtatgtgcttaactattcttctagaattgtttccttaaggggcttattcatgagcaactgtatttatatcggatactcttcttcagtcaaataacaacagtatacaaagtgaggcagttaaagtaaaactataatgcatttcctttccacagcagtaaaattatgtgtttgtcttcattctattgggattatagtgttgaggaaaggagaatgtgtgaatatgatgatggttgagatttcagattggaatgtaatttcctaataaactatcattctctttatctgtaggtaaggtaaggcataaactaattcttagtgttattggatagccagttatgtagggagctatgattttaatgacttagcttttaaactcaacctttataatatagaatccattgtaatgtactaactttaaagaacttttaaagaacagcatatggggctgacagctcaggaggtaaggatacataactgctaatcttgatactcttattcagttcctggggcctatgttgtaaagaatggttgttctgatctccacatttgtgtagtcacgtgtagtgcaaatacatacatagacacacacaaatgaacaactgtaacttagaaaagaacaaggtgggagctgagtatggcggcttatgtatgtggtcctaggactcaggagactggggattgctgtgagttctaggttagactgtgtaaaatcctgtcttaaacaaacatacaaacaaaaccatttattgcagttttctcatataggatgcagttgaaatactagtttctagttaagttgagctcttcggatatctattgccatcaacatgggatattgtaatatttgtacttctgttatttctattttgggcagttgtggttgttttttggaataggacttaaattgtattctgagcttcacagaagtatcttttcactctcctagtgtcttaggtagggttttgttgctgtaaagggaaaccatggccatgcagctcttataaaaacaacatttaattggggctagcttacagtttcagaggtttagtccattgt

SEQ ID NO: 28607 - DNA, 1199 bp, Mus musculus
ttttacaatgcataagcatctgtattttatatttttgatactattataaaagtatttttatttcagtttctgaatgtttattgctaatgtacaaaagatgattttaaacatgttgactttgaattctatagtattattacagtcaattattggttcttatagtgatttttgtagattttatagcatttctctacgtaattatgtgatccactgaaaaaggctatccttgtctgatcttgggtgcatttcactgcagtgtcttcattgttctgactgcagtctataacgccaagctgaacagtaatgtttagagcagatatccttggacatcttcctatcctgaagggagcattcagtcttttgtcaaaactgtttccataacaatattagttaagaattgatcaagtgggcttgagagattgcagaggactagagtgtggttcctagcactcgggcagctcgtaactagctatgcctctggctgcagcagatccagcctctcttctggcctctgtgggtacctagacacataaatagtgaaatcatttgtaagaggtgagtaattctagttagcattgttgtaagaaatgaaagaaaaaatggggctgggagatgactcagcaggtgaaacacttcctgtgtgagtgtgagggccctgagtttggatctgcagcaccacagaaagctgggtatgctaggttgtgtataatccagtgctcatggcgagatgagaggcagagtactcaactgcaaacataggcaccatgtgtggaaagtgacacctctaccttcatatgtgtgctatggcacataggagagcatacttccatatttgaacgtgtgtgtctctcctgccccacatacacattaaatacacaccagagagggagggcaatggaaaaaaaaatagcaaggcagcaataaaagggaagatttgaactttttctttttatttgttattgtaactttgttaatgttttgttaatcccactggttaagagtaagaccactaccataaatttttgagccaaatttgaagtaagctttattaaatgctggccagggtgacagatactggtcaggtctatactcaggaattaccgtagaatggctacaaactgttagttccacgattagacatgcccttgttcttcctgcctttgcccagttggggcaggcatacatcctggcatccatgt

SEQ ID NO: 28608 - DNA, 1759 bp, Mus musculus
gtactggcattagaaattttctcactaacttatcatggatttcttatatttctcaattttttatattctgagcaatgacaaggtcaagtattatgtacattaaacagtttggtctggctataccattttaagaagttcttctggttttgttttctgtgagagtggggtgtaaaaacagtaatgaagctccattttcttgtgaattgtatcctttctttagaaactattttgagcattttactatgtctcgtgtttgaaccatgacgtcagatgtctggggttcccatcctggcagtggttttgagttcctttgtggcacttaccttcatgtgctgctgtctgggagcgttgctgctttcagacagcagggctcctcctgctttacccactcactgtgatccctgggaacagcagcaagcacaaccgcgttgtgttatttccctcaaacagtgcttcagacacagtggcagctttgcctagaaggtcatgtcagctgaacaaagtgttgtctaggagatgctggcctcccatggacagatgcagaggcgttgctgagactggtcatggaggacgtgaagatgttgctcccactgctcctgctgcacctgcgcttggaggtggtttccgatcctgagctgcacctcagcgttgactctggacagtaggtccctgccgttgtaaaacttgttctgattggcttgtgaaggaattcagaatagcaactagcaagcagcttacttaatgtatttattttagagacacaggttttaagtatatgtatttaaaacaaatgttcacgatctgtattttatatatgtataagcatatctgaaagtatatgcaacagtgtatattcttatattgatacagccagaaatgaaaatccaaatgctttacctagcaggctaaggatctgatggaatttttatttggcaaagtacagattaaccaaaactgtatttatatgaacctgagttttaatgtttttaaacgaactttacatctgcagtgcttttctgtatggaatactagggctgtgcctagacttatgccgctattgttcccaagttatgtaatatgttagcaagtttattcaaaatgccataataattttgtcttaggttgcttttgtacatttgggcactgaaggaatttaaacacctgactgttacaggattgttgaggggagattgtcaaggttccttctgtcgtttacatggtggatccagaactgcctgtggactccaggcagcctagtgcctgctccccagggtcactgaatcttttctccatagatggtctgctcccaagccggtgcaaaagcggggtccttttgaagatacagtaacgtgctttgtcagtgatctctgatagaattaaaatgttatggtaacattaacctttcaaatgaaatggaaagagcattatataggacttactttttcagcttatcctttcctttcaattgtggtgacgtaatcattggccttaaaagcagaccccatgtagtccccaaccgcatcacctcctggagtatccttacagccatttaggctgttggacgaaaggtaggatttggacatcttgaaggaaaacttcccttctcggcttatgttacaacagctgttttctttagctgatattttccagacaggactaagaagactgtttccctgagttatcgcatgggaaggcttgctttttgtttggggaaaaaaaaatatggatgactactgcctagatggttcctttgctttcc

SEQ ID NO: 28609 - DNA, 1189 bp, Mus musculus
tgactcctccggtcagccgggcccctcagatgagggctgctccccaaagagcacctgcagctcagcctccagcagcagctgcaacatctgcagttggctcacctgccgctgcgccccggcagccaggcctgatggcccagatggctaccaccgcggccggtgtggctgtgggctctgcagtggggcacaccctgggtcacgccatcactgggggcttcagcggaggtggcagtgctgagcccgcaaagcccgacatcacttaccaggagcctcagggagcccagctgcagaaccagcagtcttttggaccttgctctctagagatcaagcagtttctggagtgtgctcagaaccagagcgatgtcaagctctgtgagggcttcaacgaggtgctgcggcagtgcaggattgcaaatggtttaatgtaatcaagaaattcaagctgaagagatgtgacattggttctgtataattgatagtacaagtgtggacccttatatttctaacagttcattgctttggaatggccatggatgcttactgaggcttgtatgtagtgttggttactgggcaagtgtttggcctccttgggctgtgttgtgattgtgagttaaaaaaaataaattggttattctgaaaaaaaaaaaaaagacttcaaaacccacttccacagtgacacacttcttccaacaagaccacgcctacttcagaaaggccacaccttctaatagtgccactccctatggccaagcatttaaatacatgagtctgtggggggcaattcttatttaaaaaaacaaaacaaaacaaaacatagggggattttctcattttaccatctctctttccagatgccccttacttgttactgagttgataagatgaacctgtataaataagttaagaattaatcaggagatagcctaccagatgggggtagtgttaggtgcagggccactgtcttagtcagggtttctattcctacacaaacatcatgaccaagaagcagttggggaggaaagggtttattcagcttacatttccacattgctgttcatcactgaaagaagtcaggactggaactcaggcaggtcaggaagcaggagctgatgcagaggccatggagggatgctctttcttgcttcccctggcttgctcagcctgctctcttatcaccacccacaagggg

SEQ ID NO: 28610 - DNA, 1207 bp, Mus musculus
ccttggatgacgggagtcgtagtttctgtgacttctgggtaaccgcctttcaggccgatccctgcccttcacgaaaccccacaaatcccagaatgcactctggcgggcccgcccccggtgcgcaggcgccctggggccgcaggatttgaatcggcggcgttgttattgacgccatattggggccggcggcgggtggcagagttgttccgtggagaagagagggtcgagtgcattgcttagctctgtacggccgggctacctcgcagctcccgcgcgtggccgccactcacgagcttccgtctgcaccggcgtgtcggagatcgcgtctgggtcgcgccactggccgggtccacttccgaagggagcgggtctccgcgcaggagccccggcgcgctcagcccgagcgcacggcgggggcggcccggcctctcgggagcggccccgagccggcggcgcgaccctcgcgcctcgcccgcctgccctgtcgcggctccgccgtcccgggccccacacccaccgggcacctcggagggcccgtttgcccccgtccttcccggccccgcccgagccgagcctcggccgcccgccaccatggcgtgcggagccactctgaaaaggactctggatttcgacccgctgctgagccccgcatctccgaagcggaggcggtgcgcgcctttgtcggcgccggcttcggctgccgcctcccctgccgccgccaccgccgccgccgccgcctcggccgcggccgcctcgccgcagaagtatctccggatggagccttcccccttcggcgacgtctcttcccggctcaccacaggtgggcctcggccccggggctgccggggtgggctgcggccgggagcttgggtgcggacacaaagggaaggaagggcctgaaccgaggtgggggtggtgtcggcaggttgggtgggtacgagtcgggttggccggcattgtgggggtccctcattgtgaggcagatcatttggggctagatccctagaatcgtttccttatgtagagccccagcggaaatgatcagagagggtgatattattcataagtcaggcgagagaagggtcacatttcacccgaatctccgggtctcttgggctgaatcgattggttgcagctattaactcagtgactgagtggtttgaggcgagaaggcagcccctcctccattttagacttggctggtttt

SEQ ID NO: 28611 - DNA, 1099 bp, Mus musculus
gaatgaaaaaaactacccaggaggacttatgggtgaccccactaggcaggcaacagcagtaaccaatatcctaggatggggacaccaagacagagacagctaggatggatcagggggttcaaataataggaattgaatgagtaggacaagagtgcaggtagtgaagctttgttttcttcggtcagaagcaaaagggtaaagcctttcaatgatcaacacgtgtgagaacagtgaggcctgatgcagcaaagcaaccactagttagctgaccaagagcagcggggttggtgtcactgttgattaactacaattagatgcacatttagatccttaaaatcccttctgcttataaactagaagcattgctatcagtgggctgctatggctactgctcggtggtgggatctctaagaactaaggtataatgggaagtctgcgagtgtggccgcaaggaaaatgggaggatccaacagtcctctttattcttttgcttcctggctgatgagctaacagtttagctctaaactggactctagtcatgtcttctgcctcaactgatcatacgccttcaaaatgcaattgaaataaacttcctgactagataaacctgagtattttattgtagttatggaaggctaattgaaagaaacagcagcaaaactgagtttggctttggctataacaatcaggagagattctggtgaaatgctacacagtaaggtgagcagaatcttgtttagagatcaccaacgtcagcactgaagagaggcaaggagatcaaactccagcgttgaggtttatgcttatttgtaggtaaaaattcaagagaacattaaaagtgaaaggaatcaggcaagtatcttagaagccaactgaagactttgaagctcatatatgaatagagtaaacaatgcggtaatcttaggtaacttggttaattgaccgagccaagtatcaaactgaccagtaagcgggggaaaaagccatatgctaatactttataatacggactccataacatcactttacagtcttaaccaaaaggcttaccccaacactaaaactaaacattaataaagttcacaagtgaggaacttgc

SEQ ID NO: 28612 - DNA, 1098 bp, Mus musculus
aattaaaacaaggtaaccacctccagtgcagctggaaggaagagaaagatgcctaccttctgaaggtgatacaggtctgtcttctgcagcccctttggctgtgatccacaggcatcctcttcctctttgctatctgctttgaatacaacagagaatagacactggaagtagaatttatacttttttaaaacatgagcaagacaggcagatgatgctccttccagaagctgaaggcaatacatattacattgtttatatagtagtgagatcttcaatcactagctactgaactcaagcgtttctagccagcagaacaaaagcctatataaaaatatcatacagacttgaaactatttccctttgattagaagcattccgatccacctgcgctcaaccttccactgtcctgcttttgattcattaccgtttagcataaggaaggaggtgtataaaagctataaaagtaactctaggaagaggtccccctaactgatataaacgtatggctatgctgcaggaggatgtggtactcgctctgacttgggaacctgacaatgatttggttcaaatatgatataaaaattagctaaagaatgtatattcttaaagaaccagaagataactcttgattttagaaagttataacctaaggttaggataactgctagctaaattctttattttattccattccattaccgtgtttaaaactgattataacacccagcctgatttaaccctctccaatttaattctaaattaaaataaatatgccaacagtgtaaagaaaccataggtggcaaataaccaaatatttcttcttgtgaaaattttaagtatactttgttattaataacaattggttttttaaaccaagaaataaagacaaatcagcaggatggtgttgttttgattcataaaacactattctttatactgttgtcaaacattttaatcttcagccttaccatttgaaaaatgataatcacttaatgctaatttatcataggatttgttcgctaggtcacattacatgaactctaattaaaattatggtatctacagtctctttatgtccttaagagttgcttctcattg

SEQ ID NO: 28613 - DNA, 1199 bp, Mus musculus
ttgcactctagcagtagaagccctttgtttctgtttggttgtgttgatgtgaaatcatgttgagtatgtttaggataatgatgtaaggaaggaatacaatgcttctgagtgatgttcattagaaagatatcttacatatgtataaagggaagtatgtgtgaaaaggaaagcaggaatttgatgggaaaccataaggaagactacatgaggctcaaagttggtgggcttatattcaatgctagttgacacactgttgtataactttggtagtctaatctcagcaggagcatttggtctttctggatctctattcttatttataagaaaagcattcattaatggcttgatttcaggattagaatctggaaagtgattattttattattattaatattttttattttttaaaaaatgaatgacctggaaaacttaatattgtaaaataatatattgaaatacacttgctgaagaagcttcttttgtattttcttttaaaactagtcagcatctgcatgagtttccgctaattctgatttttgggatcgccacatctcctgttattatccaccgactgcttcctcattcagtgtcatcgctgttgtgtgtagaactgttccagtctctgtcttgcgagcaacacctgacagtagttcttgataaggtaaaaagaaaaagtgcttaccaatgacagagtaaaaccaaagctaccagacatatattatgtataataaatgataccaatacatttatttctatgtatctcagactttgttcaacttatgtacatatttgaatgctcttactcaattatggttagaattatgttttctctttgcatatagttgccttctcagataaaaaataagctttatgaaagctacaatcatttgtatatattcattgttgtttttatgacttagttgaagaatttaggcttttaaaaagaatcaggggtcaaaatacagctcactaatagagtacttgtctgcagtgtaaagggaggccctggaaagtaggaagtaaatactaatgagtaataagccactgacagtaataaataaaattttatagaatttatatgcttcagagtattatcagtgtgctttgatcttatatccttgtataaaatgatctaaagctttcaggtttattttgatttgataggtatgcgtgttagtccacatatatatatgtgcacc

SEQ ID NO: 28614 - DNA, 1265 bp, Mus musculus
aactgttgataataaattagagccttaagtcaaccccagatggtaggttaaataatgtcaacaaaataattgtatgacataagaatcaagaagaaaactctgaatgaaatgctaaaacagatttaatttgggtgtgtttggtgtcaagttatattatttcaaaatgaaggactttatatatatgagagagagagagagagagagagagagaaagagagagagagatcttgtacacagagcatggaggtgccatggtatttttgtgtgtgtgtgtgtgtgtgtgtgtgtgtgatgtacacagagcacggaggcaatgatgcaggaccagagagcatcaggtgaaactataatattcaagcaacgaggtttaagaccgtgtctgagggttacagtgccaaagccatttctgtacacactgttctcttgttcaggtacctggagaggaaggctagccttcttctccagtccatggatagtactttgtccccatagcagtgaggatctagcttctcttctcagagtgaggaaggagtaagacagttgaacacacctcagggtgaatctacttcgtagctcagacactgacttctgggtgaagactgagaactctagtgatgcatttgtgccatttactgtctggttcctatttctttgctgtcagctgatatacttttcagaaaattttataagctgcttttatactttcttttttataaagtatggttacctgttgggctctcaatttgtgactttcagtgattttaaaatatttctataatgttaatggggaaatccagcaataaacttatttctaccacttttgtgcagttactttgttttatggtcatgtcattagggtaaagcaggagtattaacatgggttttttttttttttcctatgtacgaaattatatcagatcagggctttgtttgcaagtagactagaatctcttttttacaagccttgagaaaaaaaatatttttttttttttttggtaagagttacaggataacaaatcttttcagagagctatattttcaaggcttagtccctgtatgattttactccaagcttaaatactcattgatctaggagaaagtttctccagagaaacactgaggaagagtggacataaagcaagtcctaaatgtctatgtccattccacggttggtttctatcggaagcttaatggtgctctatgtaagcagaaaattagcaagtcacttacagatgtggataaatgctttctacagtaagaggtag

SEQ ID NO: 28615 - DNA, 2239 bp, Mus musculus
agccacgggcagagggcagtactgataactcatgtactataaatacatatcatttgtagttttattttaaatagaaagccatcaagcatgctgttgtgagctttttaatttgttgacatggattaacctagctttaaaaaaaaatgagaaaaaaagccatgacatttgtcatgtagaactttattttatccctatgggacttgaacagaatcaatacttcagttattgtaaataattgagttaagcctcaaatttctgtcacccagttgtcctttccatgaacgatactgaattagtgtgattggtatcttttcagcagatcaccattcatgtatagcagtactctttatttgtagatatttttgtatatatttattattgtaaatcatttgctgccaccagcagtctgtaagtctaaatgagtaaatgatacatttatatttgcaattttaattttaacaaagtgatcaagtttttaaacttttattgttttaaattaagaactttttgaactaaaactagaactgccatacttaatttttttttaacataaaacatttacaagatgatatcaaggtgttttgtttcgcacggtaggcacattacagcactctgctctgtgaatttgccatcctccactcgtggatggtgttcatgtgaagttagagcagattccttcatttcattcatatggctatagatttttttcctttttccattgcttctgatcagatatagttactatgagtccctgaaatgtaacggaaatgtgaataaagactttactacattgaagattttaaacattggtattttaagatatcctttgtcaatgtgatagaaagtagtagtggcgcagtgtaaatatgccaggtggtggtttgtgaagtagcccagtattgccttaaataaaatcacatttcagttcttcttttgtatgtgatcttataagattttttttccctcccactttctgagatttatggatggtgtatagctttaaactgtataaacttttgtggaaagaattttttagacatttttataaattttaaaattggtatcatccaagtgagcccatcttgtgtttataaaatgcaagaatccttaacatttatagttacatagatgaaacactttctataaggaagtattatgttttgattttactatttataggcattaggttgtgcagatttgtctgtcttcacattatctaatgatacgattttcattagattagtcttcaagaacagtattagtcatgattgattatttgatcattcagtaactagttcttctagcttagctttcttcaccgtttctgtgctgggaggaagtgatttctggagcactgacagccctcatggatagcagcacagctgaaatcaggactggaaacaaggcagcgttcggatatcgactttcatgtttgccatcaatagcattgtttctttgggggttttttgtttgtttgtttttccttttgttcgttcgtttgttttttgatatgttacaaaacatctgcgttcacagtgctgccccgacctgtggtggtgtggtcacatgggtgtgttccctgttctgcgtcagagtggcagagaatgaggcactaagatgctggtactctgaataaataagcatggtgaaagaatgaccgtaatttcttttggacacttaaaagtttaattattaaagtaatacagttttatttggggggcctaatggattgtgttgagtagttggtttcactttaaggtttcttttcagtatgcataatacttgacatattaaaatccttggtaagcccactgttatttattaatgttaaaataaaggtggttttcatggttgatttatattttttcaacaactgaataatgttttgttcatggggcattttcatacaattttcttaacgcttctaactctttaaatatgggtatttagcaataatatctgatagaatactgtagcaaagaggtttgttgccaggcatttatgttagccactgtaaagtgaaaaagccaatgcaaaaccaggcattgtggtccacacccaattctagtactcaggattgcctgcctcaaaacccaagccagcctgtgctacatatgagatcctgtctgcagaaacaaggacagaaaatatggaagagaaaacaatatattgtgcaacttcttccctcattagaagattaaccactacacttgactatattttccaagaggattgccaa

SEQ ID NO: 28616 - DNA, 1180 bp, Mus musculus
ttactgctaaagactattgaaaatggcttgtgctccaattcattcagtagttctactgaaccaccacaaaattttaccaataatagtgcacatgtttctgttataagtgggcctcagaatacaagatccagtcatttgaataaaaaaggaaatagtgcatctaagaagagaaaaaaagttgctcctgcagtaagtgtatctaatacttcccaaaatgtgctaccaactgatttaccagtgggccttccagcaaagaatcttccagtccctgataccaacacacggtcagacatgactccagattgtgaacctcgggctttggtggaaaatctcacacagaaattaaataacattgacaatcatttgtttataactgatgtaaaagagaactgtaaagccagtcttgagccccatacaatgttaacccctttaacattaaaaacggaaaacggcgattcccgaatgatgcctttgagttcatgcacaccagtgaattctgatttgcagatttctgaagataatgttattcagaactttgagaagactcttgaaattattaaaactgctatgaattctcaaatacttgaggtaaaaagtggatctcagggtactggtgagacaacacagaatgctcagataaattacagcatgcaacttccctcagtaaactctatcccagataacaagctgcctgatgcttctcagtgctcctctttcctaactgtaatgccaacaaagtctgaagcattacataaggaggatcaaatacaggacattttagagggtttgcaaaacttaaaactagaaaatgacacctctgctccagcttcccagagtatgctaatgaacaaatcagtagcactgtcccctactcctactaaatcaactccaaatattgtagtccagccagtacccgaagtgatacatgttcagcttaatgacagagttaataagccctttgtgtgtcaaaaccaaggctgtaactacagtgctatgacaaaggatgccctgtttaaacactatggtaaaatccatcagtatactccagagatgattcttgaaattaagaagaatcaattaaaatttgctccatttaaatgtgtagtaccttcatgtaccaaaacatttacaagaaattctaatctccgggcacactgtcagttggtgcatcattttacaa

SEQ ID NO: 28617 - DNA, 1182 bp, Mus musculus
tatgtatgggtgggtgggtgggtttctacagagattagaagttagactctggttgtgagctacgtgtactgggaattgaattttggtcctctggaagaacagcaagtattcttagccctgtgctgtctctccatccccttgacctctgctttataaaagggatatgaaaagttagaaaagtgaatttttttgttttacaggtctttgcttagtttttacttgtgtttttaagaatttctttctggttctttatacacccgttttcatatcaagctgactttaggcacaggtgtctttctgtgttgctattttaagattcaagaacagcacatgtcagtcttaaaagtccagtttaagaaagaaagagagaatctgtgcttgatagtgtagagtaaccttgatagtgtagagtaacctttcctgtattttgatagtgtagagtaaccttgatagtgtagagtaacctttcctgtattttgatagtgtagagtaaccttgatagtgtagagtaacctttcctgtattttgatagtgtagagtaacctttcctgtattttgcttgtttcacagactgaaggggctggactcgctacctgcatagaattatgtgtaaaagctcttcgcttggaatctacagaaaatactgaagtgaaaatatcaatttgcaaaaccatttcatgtttgttgcctgaggatctggaagtcaaacgtgcttgtcagttgagtgaatttcttattgagcctacagtagatgcatattatgctgtggagatgttatacaaccagccagaccagaaatatgatgaagagaatcttccaataccaaattctctacgttgtgagctcttacttgttttgaaaactcagtggccctttgatccagaattttgggattggaaaactttgaagcgccagtgtcttgctctcatgggagaagaggcgtctattgtgtcctcaattgatgaactgaatgacagtgaagtctatgagaaagtagactaccagggtgaaaggggagacacatctgtgaatggcctttctgctgctggacttggtactgattctggcctgctgatggatactggtgatgaaaagcagaagaagaaagagataaaagaattaaaagatagggggtttatatctgctaggtttaggaattggcaagcctacatgcagtattgt

SEQ ID NO: 28618 - DNA, 1178 bp, Mus musculus
gtgctttcctttgggggtctgtaacatcattggtagttctgttcatctaataataacagccttctggataggctttaatgcagacaatactttctttatggagctgttatttggggagatgctgtaattgaaggcctgctaggggaagggtctatccctgaggtacaccctaatcctagataggtagggttttcattcttgtgccttgttagatgttatgcacacagactttgtatttttatattacatagtctaaagtccaaatgtgactcaaagattttctttatatcacttgtttaagtattatgttttcttattaaaagacagctactctgagattgaaaaattctgattaatatggtaagaaactgcatctgatttttattctgtagaaactcaaagaggctatttatcttgtatttagacataattttatccagagaattggaatctaaagtcagttttaatttcaaatgtaatggctacattaatgcacaatagattattctatgattattacattactcctgtctatccttcaaacttttttttcaaagggaactcactctgttttggagtaaattgcagcaaagggtggaaccatcagtacaagtgtacctggaaaggtgtcggcagctttccctgttaacaaagactgtgtatcacattttcttcctgattaaagttattaattcagaggtaaggctattcaagctacttttccttaatttaaattgtctaacttgtctttagtaagatcttttcttttgttattttgacactttatttaatgaaaatttttttctttcactttagcgttttggaccttgattttatttgtgtgtgtgtgtgtgtgtgtgtgtgtgtgtgtacacagacacacacagacacacacacactaattaatcctttgaaatatttgatctagagaaacctagctgttgatacaaaaaccgtcctcttacctaccatctgtaatatttcctatttttgatttttggtgtcctagtgtgtgttatagtgctttgggagtttagctctatgcaagttcggaaagtgtatagaggaatgtggaaattattctattgctgacagtggtcaaaaacaaaaaccaaccaaccaaccaaaaacagactaaacactcctctggcacaaatacttgataaaattaagcaacg

SEQ ID NO: 28619 - DNA, 1320 bp, Mus musculus
tcctttctgtgctctgttctcttggctgtgctaattccctccctctccagtgttacctgttccttagagtattctctgaagaactattttgtttggacatgaattcctttagtttgattataccatagaaagtttttctttctccttcaacgatggcatgacttctccatgtcttcaaaacaagtatgatttgggaaattgatacattcccgagtttggctgccagcataagatacaaccgtgttggagacatattggaaacatttttgttcaaaacagttaggaagacatcattgactagtcagtatatgtttttttttaatttacatttgaatgttctattattccttccaaaacagacacttcttgaatatgcagagaaatggaaaacttccgaagaccctttacctttgctggaggtatacacagtggccatccagagctacgttaaagctcgaccataccttacctctgagtgtgaaagtgtagccttggtgctggaacgcttggcattgtgagtagaactttgaaaaatgaatcaaacaccataattaacttttccttaaactttatggcccaggtcttataatatttaatttaaaatagatttatttaaaataactaataaagattctaacagtaggattattgatttttgtcttattttcaataatcatttgtatccgtttctgttttagaagctgtgttgaacttttactgtgtctgcctgttgagctatcagataagcagtgggaacaatttcagaccttggtacaggtgagattacttacctagttaccacagatgtagtttaattggatttgcttatttgattaaaccttaaagcatctaaatgctgtgtttatttactgttgtaggtagcgcatgagacactgatggagagtggcagctgtgaactgcagttcctagctactctagctcaggagactggggtgtggaaaaacgcagtgctctccactatcctttcccaggaaccactggataaagagaaaggtaaatttccagagagagaaagaagcaaaaggtcattagcctatgaaaaacaaatatttaaatttgtttggatataactcttctcaagatatatcaaatgaggcccatataattttacctgaaggccttaaattaaagccttacaaagttttgtgggggaagatgtatttataggaatttagaataacccaaattacaatttttttttctcaacttcttttcatcaggagagttctttgtgcagtgctctggcagatagcagtcatttatatgtactgatgagttcatttaacagatggaaatcag

SEQ ID NO: 28620 - DNA, 1176 bp, Mus musculus
cagcatcatgtcttcctcctaggatggttcattaagccccacttaaagcattctactgctttccaaatccacattcctccaaagaaaaacatgctcaggcctatagtagcaatcaataccacattccctggtaccaacctctgccttagggttttactgctgtgaacagacatcatgataagacaacttttataaagagcagtatttataggggctggcttacaggttctgaggttcagtccatcatcacggcaggagcatggcagcatccaggcagacatgcactagagaagctgagggttctatctgtatcttgttctgaaggccagcaaggaagcctgactcctcaggcagctgggagaaaggtctcaaagcccaccccagcagtgacaaacttcctccacaaaggccacgcctgctctaaccaggccacagctgctaagagtgccactccttgggcagagcatattcaagcaaccacaattccaaactcctttcccttccccagcagcttcggcacagtggggctgattgttacgtggtcattctccgttgtgaagttagtaagatgcccctcaagacttcggtactcaagtggatttcaaggattctagaggctgtgtgctagaaactgaacatgaaaccaggagtgctccccagccccaccagtaactgcatgcctgtggcaggaagtcttaagagacctacaagtcaacagccctccttagagaaggtttgtgtctccaagttaccagttttcttgtgtagttgttttgtttcatgttggtgtacctaggaactaatgctagtttgtaattgcagtaatgaatcaccatttgtagttctttttggtttttgttttttaatttcttaagcttcccacttcattatttatctgaatgatctagctagtcttaagagactggaggatataaccagtttagatctatgaaaaatgaaaagttactcttttatctccagggtatttaggaaatcaataataagaattctgaaaaaaaaattaaattggaatgacacaattctagctgagctatgttgtggctagaatagcctaacctcagtgtacgtcctgaatagagagagccagtcctcacaatttaaaagacctgcacccccctgagagtagctttgtagaaacgtgactgcccttcagaa

SEQ ID NO: 28621 - DNA, 1168 bp, Mus musculus
tattcagtggccttttcaggaaatgtatataataaagccagatgtgattctagtcctcacaggtgacgggaggaggacactaagtggaaaatgttctctgatactgtgttgttccagcgaatgttttgtaatgcatgcttttaaatcattacataagatgaacaagcacaaggcaaccttacagaaaacagcatcaatactgcacattaacaagacagaatcctctaatgcttgcatgtacatgagaccaggggagcacactgtaaggctaaggatttcctctattggattgaacagtgaaaaagagttgaagaaacaggctcgggagatggctcagtggttaagagcacagactgcccttccagaggtcctgagttcaattcccagccactacatggtggcttataactgcccccctcccccatgagttctgatgccctcttccacttgggaggcagaggcaagcagatttctgagtttgaggccagcctggtctacagagtgagttccaggacagccagggctctggctctctctgtagaccaggctgaccttaaactcagaaattcgcctgcctctgcccccaagtgctgagattaaaggcatgtaccaccatgcccagcttaaataagtcttttaaactttttttttttttaatcactggatcttctgacaaaatcagaaatcttaataagaaaaaattcttgaagagctgtgttgctctccagagatttccagatagctcagctctgactaaagaaagtttctaaagaagaacagttattgctttctgctagctcatctctggcagaccacagcccaggtttttatttacataacaatctgtcatttatccaggtttcctttcaattatcttgagaaccagcagccctggagtccagtcccttgctctccagagatagaaagcatacattttttttttcttaaccttgcaaaagaatgcagaaatctgtctgcttttgttaataaacttgttgggtgggaccctgccctgaaattaccatttccaccaaacctggcctaaccttgctgtgtcctaggctgaactagaactcaggaatctgcctgcctttgtatttttctaacaagctggctcatggtgtacctgcttttgttcctttagattcatgaagcctctcataattca

SEQ ID NO: 28622 - DNA, 1132 bp, Mus musculus
gtttctttcttactgtaagcgagctcactgctgaaccatcagaaaataatagtaataaattacatcatcatcatgtttgaaaatgctttctcataccctcctgctagtaaccagaacaccaccctatccgtcttcagtgtcaccagctacaggaccctgagcattaacaaagggcacatggttggcaatccgtggttcaaattcaaactctgcctcaaaaagttctttgtagttgattttcttttataaaaaaaaaaaaaaaatctacatgtaatcaaaaactacacattgcacttacttatcatggtcttcatttccattcatgtattatcctctctctctctctctctctctctctctctcaatgtgtgtggagggggtctgtctttcatgactggcattactaaacaatgcacactaatttgaatatgaaatgtgcccacattctgaaagattactattatcattatttatttgcatgcatacacacattgttttttctttcccttagtgtcttctcatttagacactttattcattgagctcagctcatgtaagataatctctctctctctctctctctctctctctctctctctctctctctctctctctctggtttttcgagacagggtttctttgtttaccttaactttcacagttggttgtttctctccaaaagagatgattaggaatgaaatggtttggtggctttggtttttgttttttttttcccccctgataattttaaagaaactatatccacaagtctgggcacaccctgagatcacaagcatatgtttttatcctaatagatactgatatcaaccatctcataagatattccaatctgccctctcaggaaaagataggaacttgggatgcatgctggaaacagcattagtttcccttctgttcccacaagcacctcctccaggttcccttacctctggctttgggttccaccagtggaaataatgaaaaggaaagattaaattactgatctagagtctttttctgcttcctcagctgttgatcttctcttccctggatgtttttttatttcttttcttaattaggaaggaccttcagagcttcttaacttattcttcctatctcccaaccatgccag

SEQ ID NO: 28623 - DNA, 1150 bp, Mus musculus
aatgtggaagtgtatgccagataaaccctttcctctccaagttgccttggtcttggtgtttcctgtcagcagtagtaacactcgctagaacagaggtcggtacaaggagagtgggttatttctgaaacaaatgtgagcatcttgctttggggaggattgtggaaggactttggaactttgggctagaaaagccactgggtattaagagcttagtggactattctataggagcttgcaagataagaatgctaagagcagtgcaaaagacagaagcccggcttgtgaagtttcagagggaagcaaagattgtaatgggccatttatgtaaagaatatgtgatatttggtcagttggagttaaatcagctgtgatgaacaagaggccagaagcactaaagtaaaacgtttgctttgctgggacaatggatgctggccagcatcttaactaatggttaagaagagaccagttatcactaaggtaaaagacttctgggaagtgtttccttaggaccagtacacagaagttgtgttccagaggtggccaaggttgtcccttgttctggttgacccccaaacttgatagtataagagtcacccaggtagtgctggttttgaaggcatgaaggggccatggaaaactgctgaggtctggcactaagtggccaagttggagtccctgaagagaacccaggagaggctattggtgaaagttcaacctagtcgcagcagaagacactagcattttggagatgctagtaccatggagtaaccaccagacacttgtctggtgaattaaagctggtctgagcctagaagatgatctgtatgtgctgcagaagacagagccctttggatgagctcagaagattgtgagtggatcccagacaatggacacttgagttttttatacagtttggctttgcttttgacttgttcagactatgactgtgccctggttctcccctcttgaagtaagaaagtatttagtttttcattttacaggaacccacaatttgagagattttaaacttctaaagtgattttggagttttagagactttgcacttaaaaaaaaaaaaaagagtctacatgtcttaaagatatttaagtactacaggacttttaaaacttggaatgttttatatcgtgat

SEQ ID NO: 28624 - DNA, 1428 bp, Mus musculus
tcttacagatccaacagacgcaaactcctgcctggttctcggtttagccagcttggattgagagctacctggtcccattgcccctatctgcggggacagggacaatttgcacttactcattagctccccaaaggagtagatatgcaatagggttgaatcactaacctctatgctaccacctcagcatagggcacacagagacgagccagcaaagaacaagagggcagcatcttttcttccttagttgtcatctatgtaattcacagtaccagtgcagtccatagggcaatagcttaccctccgcatcatatatcgagtcccataaggaccaagcatagccagtaattcaaggtggaaattaagcctaagcctctattagtttataaatgaaatcggagcactcacaagtttccgttccttttctgtctttaggaaggaacatgaggatcccttggagcccattcaagaggacgatggaaggagccatttagagtaaatagagtgaaaagtacaggctgccacactggggcctgaaggttggcagtggaaaagcctgctgggctgtgatctctcactccaaagtcccaagtgcctttttgcttcctgcaaaaggaaggaagccaaggaggagaccatgtccatcgccctgaagcaagtgttcaacaaggacaagaccttcaggcccaagaggaagtttgaacccggcacacagagatttgagctgcacaaacgggctcaggcgtccctcaactcgggtgtggacctgagggcagccgtgcagttacccaacggggaggaccagaacgactgggtggctgtgcacgtggtggacttcttcaatcgcattaacctcatctacggcaccatctgtgagttctgcactgagcggacctgtcctgtgatgtcagggggccccaaatacgagtaccgatggcaggatgacctcaagtataagaaaccaactgcactgcccgctccccagtacatgaatctgcttatggattggattgaagtccagataaacaatgaggacatatttccaacatgtgttggtaagtgcccgatggccttagagatttgatcatgtatcttttgatttaaaaagatgttttgtccccttcctccctgagctgagaaagtttgcacagtgtgagtcttacaccatctttgaatactagatagcacacattagggcttccctaatctccatcagctatatatctgaaaaagaaaaaaaaatctgattgaaatggtcggaggtcatttatagtctatctgtggttttgtggactagtggtatacattccatgcacttgggagaattgggaagatgttaattaggatctttttttggctttcttagggctagattccaaatccacacagcctggtgagctttttaacgtttggcaaattgacatgtaaggt

SEQ ID NO: 28625 - DNA, 1243 bp, Mus musculus
tagaagtggatctttctacttcagattaagttaaactctctcacaggtgtgccctctacttttggatttttggttctagatggagtcaacatgacaaccaaaagtaactattacaagtccacccaatatcaacttgatacacaatcatatctccttatgtcataattaatttccaaatgaaaacaataaccatgtcataaaaacacctaaacatgaataactattccacatacaatcagaaatgcattcattatatatttaaccaagtcctaattatgcctaacgtgatataactattcttcatacaacagcaaacatgataaatttacaataggtggcaatgtcttattcttttaatatctcaaacttaaatatgataaccattgatgttatcttaattgatgttatatcatatgataaagaaattgatgaaagaaagcacaaatgtctgtataaatgctttcttaagaaaataggacagaaactctgtcaattataatcatcttttctgcaactagtcatgtggccttagtatttataactaccttcctctgctaaaccattttgtattttctccacccttggcaagaacctcagcaggtcttggctcttttcctggaggagtgacccataccttcattccttacatgtatgtgccctttgtcatcctgcctggaccaggttgttgtaacattgactttaatcacaggacatcgtagcaccaacacatgccccaaaggatctcctgccctatagacataacctttcttacctccatagtggggaggcagtcccagtcctccttggtagtctgcatcagtcacgcctcctaacactgttattcctttcttagccggttgacttaagggcatcagaaggccaaagttgccagaggaaaatctgagcttccagttcaatgaatgtaatgttgttctaggcaagcagaactgaaggtctcaggaataggaagcaaacacttcccatggatcactacagggtgagagtgagtagaattattctcttttctaccacttgactcctggacctatggatcctggtatcaaagaaaatgtctcatatattgtacactgattcagagcatgccttctggaaaaccctgccccagcccttcatactgctgccatcaaattgtcacctgtgtcttcctggtaccaacttttgtcctggttagggttactattgctgtgaggaaacaccatgagcaccaaagcaacttggggag

SEQ ID NO: 28626 - DNA, 1133 bp, Mus musculus
tggctagcatcttaggtctgagcctactgttaccttcctttttcaatttaacaacttccctactattagcatagtctgagaaacctctctattgttgtgcttagtttattggcatgggtgttggctaaggtatccagtaggccaccattacagttattgttatcacagtgggcagttatgttaggcctgtggagacaaatgaaattacaaacatgtacccatctgctagggctatttaagaccatctgcaatagtttatcaaaacagaaatgtacatgctttcatttctccacacccctttgccagcagtgtagattgtttcaatgatgatactgcaatcaccagttacaggattaatctgacatattttctgctttatcattaaaagtaagtcttgatctttttttgacttttcaacaaactaaatgcaaggtgggttcaatactatgccatatgaaatttaatttttatagctagttgtaatatggatcattattgaaattttaaaaagtttaaattaaatttctctgtctgtctgtctgtctgtctgtctgtgtgtctgtctgtctgtctgtgtgtctgtctgtctgtctctgtgtgtgcatgtgtgtaccacagcatctatgtgtaggccagaggactagttttgaatgtcatttctttcatttcaaccatgtgatttggggatcaagctcccatcctcagatttgcatgacaaatacttttacccactgaatcatcttgtcatcatgttaaaatccttttttttaagttctaggaactgaatccaaggtcttgtacatactgggcaagtgtgttaccactgaactatatctctttaatacatacacacacatacacatacacactgtgcatatcttttgggagtcagatattttctaggcacgttttgatggcaagtagttttaatttctgaatcattgcaaaagccagagatggtgaactaaataaagtggagtcagcctagagagccattgacatatgaatatataaagaaaccttgacagggaacaggatacttcaggctcccatcagcaccctagaactaacactgtgacacagctctccacacccaaattccccctgccccccaaagagaactagtctctcag

SEQ ID NO: 28627 - DNA, 1273 bp, Mus musculus
actatgatggtcaactgggccggtctgttgacattacttaagccatatttttaaaccactatggtgtatgtttcgaattgagataacttcaaaaaaaaaaaaaaaaaaaaagaccagtggaggagaagcatcaggcctggttttgccccttttaaactgtcctttctagaggtagaaatatatccatattttttgaaaaccttgtcactctggtcatctcatggtctccatgacacttagcctcccagagctgtctgtgagtcacacagctcccacagacactgtatcttggccacaaaaacgccgtggcctgaggactcgctgcttttctcaagcaaaccagtgagttttctctttgccatctttgatttctgcctgctcctgcagctttctgcctcaactgatgggcttgggtgatgaataggggtgtgtaaatggggtgagttggaggtcttcagccttgaatggggtgtaaggtttctataaatctccctcactggagccccacgctggtgcttgtttataatgtatgtgaccctgactggttttctgcttaggagggttggcttctttactaccctcaagaataaagggtaatgcaaagaacgattgagcaaggtcttggtttctcttacaacactgtagcttgacctgtctgcttgatgtgcacctttgtaggggtcagctccaaagatggcgagcctccctgttgtgggtagtcaggtacctgcagacagacgatgccttggtcctaggcctgctgtgcaggagtattgatgtccctcgctgcagcagtaggcacagcaaatcgcttctccagtggatttgattggctagtagctaggaagtgggcttttgcagagatacccacagttgaatgggtttttttaaaccattgttgtagacaatgaaaaggtagtttgccctcttcatgtctatttcccttccagatagttgcatccagaagacagctgttttgtcccactctcctactttgctcctctgttaaaataataacaggggttgacttatgtcccgctcctgaatacatgtaaaatttgtacaaaaatatcttccatgaaaatgatttgtaatctgtagacattacttgggagatgtcttgagatgtaaaatcccatcctttaggttgagggtttttgtttttctccaaataaatccagtctttaaagttgaaaagaaagaagaaagaaagaaagaaagaaagaaagaaagaaagaaagaaagaaagaaaggaaggaaggaaggaaggaag

SEQ ID NO: 28628 - DNA, 1209 bp, Mus musculus
catccgtgtcttgagtttgtccctagagtcagacttggggacttaactttcaatggatttccaccgtgctgaaggcttcggcggatcacgtgcaccaaccaggtcaaaggtagcactcgtcagcagcttgtctcagtttcccagcaggtgacgggggccgtgtaccagcctcaaacctgcagatgcagttgctggatgggtaacatgcgaagccttgcagtttatacagccagtctttcctttctgacagggcagacagtttacagaagaatcaagacctggagtttgaaagaaataaagaacgatttgaatttctaaaggtatggagcagagttcagtttggagttctgtttggttttgcgtgtggggggacatgaggagaggtgtgcagaccgagtaaaagtgtcttcctgttgttcaaccctagtggggttcccaggccttttgcaacatgcggataatccctcctggctcgggaatcattcaccaagtgaacctggagtatttggcaagagtagtgtttgatcaggatggatgctactacccagacagcctcgtgggcacagattcacacacgaccatgattgacggcctgggagttcttggttggggtgagtcttctcccgcattcctatcaggtccgctcttacagagcatgcgtctcgctcaccgcctgtgcttgcgcggtcctcgtcgggagcatgcacctccctcaccgcctgtgcttgcgcggtcacagaggaaggcgctttctctgttttatctactgctgtatttccagtacctaggagtgaaatttgctttccatttgtaaaaataagctgaatgaagtttcaggacgttcgtataagtgaagatcaagtaggcatttgttaacaacggtgcctcctaaatctcctctctattaagtgtggtgttgaagagatgttggcacaggggaattcctggggaatagagagaagtgagtgtccgcaggggactacagctctctaccaggtagacgtgccggctgggctgcttgcctctagctgagggccagtgcggacgataaaagcgttcccctgctctgctgtcactgcaggtgtgggtggtattgaagcagaagctgtcatgctgggtcagcccatcagcatggtgcttccccaggtgattggctacaagctgatggggaagcctcaccctctggtgacatccacggacatcgtgctc

SEQ ID NO: 28629 - DNA, 1145 bp, Mus musculus
gcaggcactgtttctctggtcagaagttctgtatgactgtgcagagacagcctggtgagaagacaccacctaggagaggaccagctatggtcttcaggactggtccgggagaatcctcaggggttgccatatgtatttaactcttacactccataacaggttgctatgggacagtggggcgggggagggaagagtcagcccagttgtccttgtcatctgaagaattatggagaagcaggaaggatgtccttgcagcttcgttcattggctggtgccaatgtcaccttctgtccactcttcagaagcgaatactttcagttcacctcactttgaattgtaaacaccgtcgctatgagccagtgattgagacctttctgtgcattggtgtagaacccccagtctggttcacttggtgacctatctgggaaacctgggcaaatgttgatttgtgcgttcttcaatagactttagatctccagccacccaagtccatagtggatgcctatgtgctactgaatttaggagattcagtaacaacggaccatatctctcccgccggcaatattgcaagaaacagccctgcggctcgctacttgacgaacagagggtgagtgcgggtgatgccggaagggctgaaggcagagggaaaaaatgaagctggcatttctctcttcctgtggtgacgttgagatcagactgttgtctttctttgctaagcactggtactcgaaagccagttggtttccctgtgagtcacagtgaccaggagggatagcttcctaagcaactgtaagccttaggctcagccttctcaagcctgaagcctgggcagagcctgctgaggcccagcagtgttacaacctggaattcattgccatgtcctgttgacagtgtgccaggactgcctccagtgtgcagctcactcaccccttcctcccctcagacaggcgtacagtcgtccccacaccattctctctctgctcagtacagataatgaatttgggggttcccgagtctaattgccatgtgggaagcaaacaatttcctgatttctgtccctctcttctgaatcagttcccttggagagggggctcagagcaaatttgaggagtaaggcgcttttttctctgggaactggaggggat

SEQ ID NO: 28630 - DNA, 2735 bp, Mus musculus
tgtggatggcttagtcgctgggagctcttgggggactggttggttgatattgtttttctccctgtggggttccttcagttgtagggtactctcttaagtcaagtctaagtggggtctgtggacagcatggctcctgagcctgttcacacacataccctgtgacccctgggtgtcaccagccctgtgctttggtgccttcctggcctctggtgaacttgaactttgtatgtgaactcctctttgcttctgagttggaaagctgggtttcctcctttctcaggtgccagacgcccaggaaatgggtcctaatcggcctggggaagactgtctatatagtttttttttcttccaacttgtaaaataaatgggatcccactcattcctgacttttagctactgagtggcttctaagtcattttcagacccgtttctaacattgtgcgctccatctcttcctcctagacgtcccactacactgtccttggagacgcttttaaggagcgctttgtgtgtaagccacaccctaaaccaaagatctatgacaattttgagaagaaagcaaagatattctgcgccaaacagaactgtagccacgactggggaatttttgtgagatacaagacgttcgagattccagtcataaaaattgaaagtttcgtcgtggaagatattgtgagcggagttcagaaccggcactcaaagtggaaggactttcattttgaaaggatacagttcgatcctgcagaaatgtccgtatgacctcaggcttctccgtctcgtgccgcagggagccgtgccttaagcatggagttgatgagccaatgctttcttacccaagcttgcacaatcctttcttacacaagcctgcactgtgttgaatgccagataacctgactggttggtttcaagctggtgctgtccacacaaagcacacacgcctgaactgcggcgccgaatagtttcttcaccaataactcatagcgtagcccttggccatggtggggaggggttaaacttgtcccttttacacttttcagaactgcccgacagggaacgtgcagccactcggtacaccgagacgcatgatggctggcgtgctggaagggttcccgttctctgtctgctcgatctgctgtaagctgcctttgcccttaatgacagtgcccttaagaacagtgacttagttctttttcaggccaccagactgactgccagatcccttctgtcccttctgtcccttgcactgattcctttccggatttgaccctgccaccctgtcaccctctgcagagtctcctggtttctgtctcttccttggtttctttgctgactcaaatttggtagttgcaaggttcagtatgcacacatatatatttaaaatgacatataatttaaaatgtaaaagactatagttgacagctatgcttactgagatggtatttctgttctgttcattactatacatcttacccttgctctcatctgttcttttaacttgggccatttcccgtctttgaatagacatctcaaaccctgtctgtatgtctgtctgtttcccacctgtttgagacagggtctctctgtagaccagaaactccatatgtagactatgctggccttgaactcacagatccccctgcctctcaagtgttgaaattaaaatctttcaccatgcctggctctagctattttcaataaaggctcatgtttaaagtttgaactacttccaattcattccctgacgtggcttgttgttgttgtttacttttggagacactgttcctctctgtagccctggctgtgtagaccaggctgcccttggtcacagagatctgccagcttctgcctccggagcactgagattgaaggcctgcatcaccatgcctggcttgccctttcttcttaaacattatatattcaaatggcatttccgtgtttcttctcaaggtgtgccagtgcttcagagagcttagtttggggttcttcagatcaagagacaagtgtctgagcgctgttactgccaacagagcaaagtactcttcagttcagggaaggaacagtgctggttttgtaggcagtacagtggttttaacaccttcctagaacttacttgtaattcatcagttgtagaccatcaatggcctaaaccaaactgcagagatcatctgaccacataactccccttccaggacatttacatttgaagactatcccaagcccacccagagcacagtgggttacccaaactccccaggtcaaccctggaggtcaacagtatgacatgggatagcacaccacttctcacagatgcctagagaaattacccagcaacataactctttggggaaaaaacacctatagggattaggcttttaattgatagaataggtagaaaaaaagatatgtagtagttcttgatagtggttactggtaaaattcttagtgcaataaaatgaatttgccgagagctgactttcttttttttcttgtttttttgagacagggtttctctgtatagctttggctgtcctggaatgcactctgtagtccaggctggccttcgaactcagaaatccgccttcctctgcctcccaagtgttgggattaaaggcgtgcgccaccacgcctggctgagagctgactttcatttatgtcttttagtctatgttgcctttctttgctgctacagtttaagaactctacagcttgtataagatacctactggaaattattt

SEQ ID NO: 28631 - DNA, 1167 bp, Mus musculus
cagtgccatctccacggacctcactgtcatcagtgtctcctggtagagactgtgatgtgtcttaagactgccagagcccctcctcgataatccgaggctgtggggaaaaggtaaagagtcatctattgcagtctagatgacttcctggaaaaactttgcctcttaaaatatcttaactgtgtgtgttaatttgtaaaattcattatttgttcaaaaagttatgtatgtcccattcccagatatatgcacttttaagtgaagaaaatgttgctagctgtttatttaaaacttgggaaactttttaaataaaaatcaaaaaaatttagaagttatttcataaagccatatggtattgacatatttttatggtagtatttttgaattttttttttgagagttattctggaagtgtgttacaagctaggagaatgcttttggacagttatttttcataaaagatttgtatgattcaaaaccatttcttagactgaagtaagtcgttttaatctgcacaggttatcttggcttctgccaaaagcaaagtttagtattttctttatatacttggttatctggactggcaataagacaaatgtgtattcaacaaaagacaataaaactgtacactctaaaaaattcagacaattttctgtgcaacattgatttctttaaagttttgctggagccaaaggcttaaaacctgggtgaacagttagttacgggcccagcttcagtggctgtagtctctcctcccccatagctcagttctttagttgcgacgttgaggatctttcttacactcttcaggggaatggctttggagcgtttggcttactacaaacacacaggaaccctggccaaaacctgctttggcaatttttctgcacaaagtggctctttgtttttattgttagcagaaataagatggctgtgtatctaacctgataaagattgtcagtgcacagcagagcttggacttactccaaacataagcctcagtttgccttgtttcctgtgattggtcattcttgagtagaaatgggaaggcttgcttcacggccagtattgggttttagtgggagagcagagcatagagaatcattaccctcatggattttaccaatagtttagttaaaacggttgtataaagaatatatagttctccgg

SEQ ID NO: 28632 - DNA, 1109 bp, Mus musculus
tatttcagctgagttcttccgtagaaatccagcttgccttcacagattagttccttggttaaagcgtgaacttactgtgctttttggagcccatggttcgctagtcaatatcgtccagcacatcatcatgagtaatgttactcgctatgatttggagagtcaggcatttgtgtctgacttaagaccatttttgcttaatcgaactgagcattttatacatgaatttatcagttttgctagatctcccttcaatatggcagcttttgaccagcatgctaattatgattgccctccttcatctgaagaaggcagccgttcagattcttcagtcattacaatatcaccagatgaggctgaaactcaagagctagatatgaatgcatctactgttaggcaggcaccgtgggatgatgaaactcctggaccatcttattcaagttcagagcaagtgcatgttggcgtgtcttcccttttaaattcttcagacagttcagatgaagagcttgtctctggaggaaccacatctcagatacaaggagtacagaccaatgacgatgtcaataatgacagtgattcatcgtcagataattgtgtcattgttgggtttgttaagccattggctgaaaggaccccggaacttgttgaactgtcttctgattctgaggagttgggcccttatgagaaagtggagacagtgaagactcaggagcaagagcagtcgtacagttcaggtgacagtgatgttagccgggcgtcatctccacgctctgtccttggaaaagatgaacaaatgagtaaaagccattgtgattctgacacaagaataagctcaaagaaagaagagaaacgatctacatcattgccagctcccagggacagctcatctacaagaggtgacagggtatgctccccatataaccatcgacacaggaagggaggaaggtcgaggagttcagattcccggtcccagagtagaagtggccatgacccgaggaatcacaggaagcacgggaagaaaagactgaggaacaagaggtccagaagcagggagagtagtagcaggccgagagcaagaaaggacaaaaagagatccagaactagagatagca

SEQ ID NO: 28633 - DNA, 1283 bp, Mus musculus
ttttctccagcgaggtcccatctcttgtttgtttgtttttttttttttttttttaaatagcatgtactttttaaaaaaaaagatttatttattattatacataagtacactatagctgtcttcagacgcaccagcagagggagtcagatcctgttacgggtggttttgagccaccatgtggttgctgagatttgaactcaggacctttggaagagcagtcagtgctgttacccgctgagccatcctaccagcctgaggtcccatctcttaaagttactaccacctcactgaatactgccaacaactgtggaccacactttgagtacccgaggcttcagaggggacactaagtgctaagcagttgttggatgaggaggggctcaggagttctggagcaggagtctcctgctgtgttagcagtaggcaggggtgctctgtatatttggggtgtaagcatttcctagtatagtttatatactacttcaggactgctgtggtgtaaatgtggcggctaccagttttcaaagagccacccggggaaaagcatggtgagaagcccataatgtggctatgtggagtgtgtcctgagggagtgtatcatctcagcgggaggctgcgcagacttagaatctgctcagtgtgagccttaggatactgggtatgttgattagagtcatgttttttagctttttcttggtgtcttactggctttccaaaataactgggttctgcaccttccttttgtttgtagctgtgatcaagatggttcaggaagccggcagagtgactgttaaagatggcacttgtgagctcttgaagctgcctctccgttgccatgagtgtcagcagctgctgccttccatcccgcagctgaaagagcacctcaggaagcactggggcgggtgacactcgtctcggcgaccaagggcagtgctagcatctgtccgcattgcctatgctccgttcaatcctgaactaaagcgtacacttcttcgaaacaaagcttatttattcttgagcagccacacattgggtgcactctggtgcaggaactgggaattcgggttttgtgggtgtattctctggtaatggaggctgagacatgcctggtcacccttcccaggaccatgacaggcctgactaatgagagggcaaagccggcttgagactcaaatgcacgatgtagaagcagaggattggtaatatattttgttcctaccctcgttcctggattgtgtagtatctgttcatcaaggtagctgaggttctgaggggcctggttc

SEQ ID NO: 28634 - DNA, 1149 bp, Mus musculus
gtcatatcttgtgtaactgataatagctgtgtacattagactgacatgctaggtatgtgttgtatgacccttcattgttaagctatgggattaaaattctgtatttaactggtaatcaaaagaaaacaattagttacatgtcggtctgtctagttatatgaagtgaaccaattgtgatgcctttgcattgtattgcctcagccattactagaaggtggcataatacatttcgcctgtgttattagtgatagaaatgattcattcctaaagaagtttatcataagctactgcttaagggcttgctcttctagattgcatccccttctgctgtgcaatttttaagatatatatataaacagaaaacatgatcacctttttccccttctcaaaccatgataagcccttgcttgggtgtagtgacttccaaagcccaagtaacttacaaatgaaagtgatgagatctgtacgtggaggggtgatttgcatgtataatccagggaaggtgctccttaggtctgttccaggctttctattcgacttaggctccaacgtaactgcaatttaatgttggtagtatagcaaattatgaatagatttgttgtatgttttgaagtcacatgcttacatgcttaaatctggatatcagaatttaagcagttactgaaatgtatggctgtctaatatactgattacaaagtgtttccagtgtgtcactgcaggcctttttttctcagttcatcaaagcattatgggcttttatgatgtaattttatgtctatgttcctggaatgtgggaatacttagtatccatatatacttatttcttatccatatataagaaataaaggtataggcctaagcccaagtcagaaaagggaacttcaaccaacctggatgaaaatatgtgactttcaggtctacctaggtctgccacatctcttctagtcagaaatttaaaaacatttctaatctgtaagtaggctgaagttttcttcacggggagaacatctgagttagcaaatcaccatggtgaagagagggttcaatggttagtactgactgagagaggacccaaaagttccaagcaagtcccatctctctacagtgagtcccaaaaaccgacttcaggcactaggcatgcagaatact

SEQ ID NO: 28635 - DNA, 3214 bp, Mus musculus
aaagggctgttggggaaatacagatgttggccagtttcttaagatttatgttttaacccatctcctttgcaccttttctctggtaggtttgaccggatcgcacatacaaaggaaacgatgcgcttcgatggtttgaactcacttacctacaaggtgttggatgtacagagatacccgttatatacccaaatcacagtggacatcgggacaccgagatagcatttttagtaccaataagagacctgagaatggccggagacctcagatatgtgtctctgccagttgactgggctggtccctctcatttgtacagtctgaatgacagttcttcttatcattcagacgtccctccagatgcccagggtgagtgtaacatttacccacaacctggctcggcactggatgaaattctacaaggtgagtggagtgtaaaactggtcagcccttggagagacttcttggttgtgtcacccccaaagagtcagaactgtacacagttcaaaacttagtgactgtgggtcacattcccactgttgaaactgctaaattgtgacctggggaaggactttgctttagtcggtgatgttcgtacttggtgacaaattgagactgctgctggattcagattgacaagattttcttggattttttttttatacgaaaatcaaaatttcaatcagtctcgtgctctgtccctttacatcggtatgcgactattacaatcactgtgtgtgtgtcttttcttagcaaaggcgttttaaaacttgagcctggaccttggggtcctgtagtgtgtggattccaaggccttgccctcagagcaggggcctgggcactctcactcacgtggcctgtctccagatccctgtctgatttctgaatgtaaagaggctttttgttttgtttttgtttttgtttttagaagcagttcgtagtatttgaaagaataaatcaagttttgattatgctataggttgatttttgtgttgatccaaatcagaatagctattgagtgtttaagtcatgactttatttttctgggcatgctatataaacttgaatttcctatgtatttttattgtggtattttaaatgtgggggaagggattgggtattttttaggggaaaaaaaataatgtatgctgtagtggtcaaaggagctctgattgagctggcaggccaggttttgtaaagagcaaaattactttcaggtcccttgttgagggaacaggtcagcgttatcctgccagacatctgggtcaggaacttgggagacaacatctgcttacctggcagaactccccactccactcccccaggtgggctgggtggaaggaccctcagccaccaagaactgacgccctcatggccctagactatggggttgaaaactcatagcagtcaggtttgtttaccatctctccgagcctccaccacactccctgacccacccaacgtctccagttcttattgttctccttccttccttctttcctttcccttctcacctctttgcctccttccctaaaattcgctgtggccctcggggtcagactgttcattctccagcatgattgtgccttttaattagaggtctagaaagttcacctgaacccacacccccttcttcctgagaattctggtgcctctaaagcccctccttgccactcagggttttagtgggtgctcccactgctcagtgtacccatgagctgtcgtcattcacagagccctgtgccaggccgtgttctgtgcctgcctgcggtgatgtagccagaagcacgtactcaggtcatcaagccgagagggcgtcaaagaggaagcctgggctgggatccttaggctcagctgtctgtctaatcccagagctaagccctttctgcttcgggcagcctggactccagccctgagtatagaggcggtgtggatggctggccctcatcctacctgtgtctttattgctttgatcaccacagtctctaacttgctgctttctccagaagcctttttatgtatgggttagaaactcttttttccctagtcagagcagccaggctgtacaaaatctgtgctctctcggttccccatgcctctagaaggccgttaaaaccaagactggatgcactgagaggagtctttttttttttttttttttttttctgtcccaagatcctgacttttccaaagtgccttaaaagaagggagacagactcattgagtgtgttgcttctttctctcctaaagcaaacctctgccttttctctatgctgttcgtgttgggttttgttcatgtcagatacgtggttcattctcaggaccaagggaaactgtcttgcctgtcctcctatctcctccctttcagcatcctttggggaacctccagcccaaggcactgttaggcttgggcattagcctggcccaagagatgccactggggactagaggacagaaggggacgttcccttcacctgggaattctcaccctggtgtcaacatgctgtgcctttctctttctctatttttgttggtgacctggatagtgtggcctttgggacagatcagaggcacaggaaagcaaaggaaatgtgccaccctttagcctggcagggtctccctgcccactgggctgttccagacctgtgatactgtgtttgtatgttgatatcccatgtgtacaaatgtgtttaccattggggctgggggtgggtggctgtctctgaccttggcattcagaacagacatctgtatttttgcctttgaaatgcagtaatataacgtgaataaatgaccttatctttgtaactggcttcttttcttttttgttgggggggagagggggttggagacagcagcaggctccacatgccttccggaagtcagaagtgtccctgtaggaccttcatttttcttatctgtaagtaggaatgataccatatagagaccattttaggcttaaaagagatgatacgtttaaactgatgaccaatacctcacaggtacttaacaatatagtgtctattcccagttcaaaataaaattgtgcctagcagttctctggccacagtctactcctatcctcaacaaatgtcaggatagttgagaatgaatctgagagccatttgtgcaaggaattcacagtgtaagttatgtgctgttttcccatatggagtttcttgccaggccaggaagttgctagccagtggctccaaactag

SEQ ID NO: 28636 - DNA, 1216 bp, Mus musculus
acacacacattttaaaacagtctcactatattccaaactgctctgtattttggctggtctcagactcataatctacatactttgggctcgttggtgccagattacaggtgccaccatacctggccattatctatctatctatctatctacctatgtatctgtctatcacaaatctatttcattatgtgacacacatgacttgtttggccatttccccagtgatgcttctgcaactgtttacaacctgctcctatgatgcatgcttcacagggaacagtatggtattgttcacagtttgtcacacacatgtcagcccttctgttgggcagactcctggaaatgaggttgctgattcagggggttgacactcaggattgattgtgaagtaagggcagaaaaatggagcccaacagttaactgttagttaaatggccatgtgtcacagacccagtccttgtgagtgatctgctcaaaggtcacgtggcccctaatagcacttcttgtttctgcaccaggctggagacaccatgttcaatcgagctaagctgctcaatattggctttcaagaggccttgaaggactatgattacaactgctttgtgttcagtgatgtggacctcattccgatggacgaccgtaatgcctacaggtgtttttcgcagccacggcacatttctgttgcaatggacaagttcgggtttaggtaagacatacttagccagagtctgctgcaaatgtggtaggttctccggtgtgaactaaaaaatgtagttcctctgtagtgccctcgactctgcaggagaccaccacttctgagaaatagttgctttttttttttaagtgtatagtcctttcttgctggagaaatagtccagcagttcctaataattactgtgtatcctgataacagttcttaggtttgggcttccaacagtggctgcatctcctcactttctatccccctctgccccacatagtttgagaagcacagatactagagattggataactccacagatgtccttcagcactttcaaagagacatggttctttttctaagaaaaacatgtgttcctgctcaaacatggggctctaacttttgtatcacagtgctagtgaagagacagggtagcagtgtgatccaaaccttcctgacatgtgtagaagatagtcttatcgtcagttgtctaaccttaaaagtcaaaggcccaggcac

SEQ ID NO: 28637 - DNA, 1194 bp, Mus musculus
cctcccgagggcccgccccttagtgcctgccccccaagctccgccctcccttagctgccagaaaaacccggctgaaggttccgcccctcagtcccctctccgagccttgtccctcatgccccgcccctctcgaaaaagacccgctttgcggccccaccccttagactccgcccccccaggttccgcgaacagccttccgaaacccggttgaggccccgccctaggtcgagaccacgccccctgctcatccgcgcttgtggttcccgctgatctctccaaagtcccgcggccaggggtgtcggctttccgccgcaggcggccggtgctgcgctaggtcctagccccctccccccggcccctccttcgatcgctgtggtcgggtagcgcctggcgggcggcctgcgggcgggccgtcctctcagccgtagcccaccccctcttaaagccgcggcgggaagatgaggtttcgtgagcagttcctgggcggcagcgccgcgatgccgggcgcgaccctgcagcgggcctgccgcctgctcgtggccgtctgcgcgctgcacctcggcgtcaccctcgtctattacctctctggccgcgatctgagccgcctgccccagttggtcggagtctcctctacactgcagggcggcacgaacggcgccgcagccagcaagcagcccccaggagagcagcggccgcggggtgcgcggccgccgcctcctttaggcgtctccccgaagcctcgcccgggtctcgactccagccctggtgcagcttctggccccggcttgaagagcaacttgtcttcgttgccagtgcccaccaccactggactgttgtcgctgccagcttgccctgaggagtccccgctgctcggtaagacccaggatctgaggacgtggactcctcggatttcctcagtagggttccagggatattatcctaagatctctttcaggactgccagccaccaggttttgatcagagtgcataatccccaagaagggcttaatcctctttgggatgacccaaagagaggttggctggtgtctcaagaggcaggggccctgttgggaaacccccaggctcttaccccagcaccagacaaggccctggagacacccttgttctggcccaggactcaggaagtttgaagttggggtcagtttagagtagactgaaaaggctgctctgcaa

SEQ ID NO: 28638 - DNA, 1161 bp, Mus musculus
tcttcgagcgcctccagatctactctgacccaccccaccagaagcatcacctcctgtcagcctttccctctcctaacagccaccaaatacttatcaatagctctttagctggctgtggggcttcacacccacctcttccctgttgggattaaaaaagaaaaaattaaagatttatttatttattatatgtaagtacactgtagctgtctccagacacaccagaagagggcatcagatcccattacagatggttgtgagccaccatgtggttcctgggagttgaacgcaggacctctggaagagcagtcagtgctcttaacctctgggccatctctccagaccccaagctgggattttatctgacatgaactagacagatcttgtcacagtctgggggttcataagagcatctgccctgtgtgtctggaaaatgctgttttccttggagtcttccaccacttctggtccttacccccccccccccacgctgcatcccccccccccccgcccctgtaggtccctgggacttgaggggaggattgtgatataaacatctcatttagggctgagctttccaaagtctcttattctctgtactttggccatttggggacgaggagctcttttacggttgcagaaatagagtatagtgttataaagggataaagactaggaaataaaacaagaaggattaagtatgatagaggatgggaagtcagggtggagggggaaaactatcactaagggcttttgaaaagccatatgagaacctactactgtagaagtttctctgttctctataagaagaccttcctgtctttgtctggggtcaccattttgaaaaatgttgacaccccacccccacccccccacccccgaatactggtgtttttgcagaataaacgttctttgtttttgcatactatctgagtctgggatcttccttcagcgattttcggacccttacatatctatcatatatgataggttatttctctgccggtgaagtgagccaattcaagcctccaaggccttagcctgtgactgacctgtaaatatgaaattcacacctggcctcctgatacagtctcaaaatgtacacttgatctgggctatttactgtatgtaaatcttgtttgttggtttttattgcttgtttgt

SEQ ID NO: 28639 - DNA, 1231 bp, Mus musculus
attatgcaccccaatcccactcatagccctgtgggtttttatctgccttccactcttgcaacctccctccccaccaaaataaaaaaatttaaaaacaaaagagaaaacaaacaaacaaaaccaaaaaaaaaaaaaaacaaaaaaaaaaaaccaaacaatttgtcacgggagccgtggtgtgttgtagtatacagggacaacacggtgtaccgtccatccacacatctttacttgcaaatgacttccctgtaaaactataaagctcttctacacctgcccttgctctacataatggcatcgggacccgctatatgtatttaaaagcttcttgcactatatctgggcagggccctcatccattctaatcacattctaacctgcctacggctgccttctatccagccacgtgtcccatttttttttttaagaattatttatttagtatgtgagtatactgacacaccagaagagggcatcggaagtgagccaccatgtggttgctgggaattgaactcaggacctctggaagagcagtcagtgctcttaaccactgagccatctctccagcccccattgttggaccaacatctccaagaagcagctgagttggctcatcaaccggttgcctgggctccgagacttggtgctgtcaggctgctcatggatcgctgtctcagccctctgtagctccagttgtccattgctccggaccctggatgtccagtgggtagaaggactaaaggatgcccagatgagggatctcctgtctccacccacagacaacaggccaggtcagatggacaatcggagcaagctccggaacattgtagagctgcgcctagctggcctggacatcacagatgtctccctgcggctcattattcgccatatgcccctgctctcgaagctccaactcagttactgtaaccacatcaatgaccagtccatcaacctgctcactgccgtcggcaccaccacccgagactcgctgacagaggtcaacctatcagactgtaataaggtaactgacctgtgcctgtccttcttcaaacgctgtggaaatatctgtcatattgacctgaggtactgcaagcaagtcaccaaggaaggctgtgagcaattcatagctgaaatgtctgtgagtgtccaatttgggcaagtggaagagaaactcctgcaaaaactaagttagttccaggacaagtatgtaaatatggagggttggggggaa

SEQ ID NO: 28640 - DNA, 2305 bp, Mus musculus
gtgcaaaacagggtagtgtagaactccgataagacacatggtctgttgttatttattagcatgaacccaaagaaggggattcttgtctccgtgttaatcagtttggacacgtccactggagagcagatagggctgacaagggccattgttgtgtccagttcccctttacagggtttttgccctaaatcatcctcaaaccacgggcctttgactctcgcttcctctcatgaagcttggcgtccaggctgggagcccatgaccgtccgtgcacaggctgtttagagtctaatctccaggtcctccagagtggctaaacaaagaaccttgtctgagcaatggctggcttgtcccaggagggccctgaatgtcactgcctgtgtctgtcctgcaggtgttcttagcagagtgtgacacagtggagcaatacatctgccaagagacagagcggctgcagtctacaaacttggccctggctgaatgaagtgcagtggagagtggctgtactggcctgaagagcagctttacagccctgccctctctggaacagaagtcgcctgtttctccatggctgccaggggcaactagccaaatgtcaatttccctgctcctccgtcggttctcaatgaaaaagtcctgtctttgcaacctgaattagacttgtgttttctcatgttggctctgtggtggtgccgtccagcagctgcctttctaggagaggcctccctgcgtatgtgctgccagctctagttcctctggagctcctcccaggtttgtagggcaccctcatcttcagactcatgacctgtgaccctcagtttgtagatagaagatcagaaccaccaggaggtggagttcaggataaaggaatgttggataaagtttggcagctggacagtccagagtaccttgctgtcttgctatgacctgattccagaacatctggcagcatgttggtttaaagaccttgtcctcatcctccactgctcctccctatcctcctccactgctgccccccctcctcctccactgctcctccccatcctccactgctcctccccatcctcctccactgctcctccccctcctccactgctcctccccatcctccactgctccccctcctcctccactgctcctccccctcctccactgctcctccccatcctccactgctccccctcctcctccactgctgctccccctcctcctccactgctgctccccctcatcctccactgctgctcctcctcctccactgctgctccccctcatcctccactgctgctcctcctcctccactgctgctcctcctcctccactgctcctccccctcctccactgctcctccccatcctccactgctccccctcctcctccactgctccccctcctcctccactgctcctccccatcctccactgctccccctcctcctccactgctgctccccctcctcctcctctgcttttctccagccacaggctttggtttcaaggtgacatgttttcccctgtgtagttctggctgtcctgaaattcactgtgtagacctgagacccacctgcctatgattcccaagtactggggttaaaggcaagcaccactatgcctggctgtaaggtgctagtttgttttggtttttggttttttgagacaggatttctcaatgtagccctggccgtcctggaactcacactgtagacgaggcttctctcaaactcacagagatcctcctgcctctgcctcctgagtgctgggattaaaggtgtgtgccatcactgtccggcttcaaggtgctcttctaaaatggcccctgtggttagtctgtgaatgaatgaccttgcccctaaacagatctccaaactgtcaagaaccaagtaccaaccaagtctcaacctgaagccagttcagagccacggcctagacaaagacagtagtgtgagtgtgtaaatacgggtgaggccagctggcaacttctggtagccacataccctctgggctctacctgtcctctgcggttgtgcctgtcgattttatgggcctccactaccactcgtctgtgtgatttttagatctcttacattgcttagctttccgtgtgtcttagttagggttttactgctgtgaacagacaccatgaccaaggcaagtcttataaaaaacaacatttaattgggggtggcttacaggttcagaggttcagtccattatcatcaaggtgggagcatggcagtatccaggcaggcatggtgcaggaggagctgagagttctatgtcttcatccaaaggctgctagtggaagactg

SEQ ID NO: 28641 - DNA, 1391 bp, Mus musculus
ttacccgctgagccatctctccagccctcctctttcttttccaccctgcagaggacctccactttaatccttcgcagttcctgatttatgaagcaagccccttttgcctttttagaggaggctcgttgtcagcttctgagtaggattttggtttcaattgttaacttgggtgtgtgacgtttgcctgctaactgtgatcgtgttcactgcgtcaaagagcagccctgaccgttgatttctcctcccaggatggcgtgctggtggatgaatttggactgccgcagattcccgcttcgtagacttacaacattccagcacgtgatgtgaaacaacaagagaagtattctgggactaggaaatagttcccgatctgccaaccagatttaggtttctttcctttctttgaaggaaaagctatctacactgctcctgtatttttattttttccgttaaggaattcattgcttttgggaagctgtctttactaaaacttgattcttttttttttttttctcttaggaaagactaattgaaaagtacccttgactttgtatgacttgttttcattcattaacaataatctgaaattaaaccaaggagatgagactctgaattctatggtagtgtaagtacagtctcagtgtgctgatacattgataagataaaagtgattgatgagattgggactgctgatagtatgcttcagaacccttgtctgttgtggtattgtagatgggtttaagtcatggcctcttttgatagattttgttgtgtcatgtgagcaagtcattacacgatctactgttggaatgaactgtctctacggtatcatgagttactattttgattccatggttccctcagtatactagcctgacttgtaatgaataatgaatatttcttgatatttaatgtataggacatttatttatactcaataaatatttttcaaaaggatgtaattgtagtatcgctttaacctaaaacctccactgcagaaccaagtgttgcaatagaaaggaaagaacagaaagtagtttcagcttggattttggatgcgtcagttttttcattttttatttttatttttggttttctgagacagagtttctctgtgtagccctggctgtcctggaactcactttgtagaccagactggcctcgaactcagaaatccgcctgtctctgcctcccgagtgctgggattaaaggcgagcgccaccacccccggtgggtgtgtcatttataaactactgtttcttattagttcttgcgtcatgaggagtaagttaggaacgagtcattcgtactcagtactttaatgttctgttctccctcaagggactgacaataaaaaggaaaatccagacttcatccttttcttgtaagtc

SEQ ID NO: 28642 - DNA, 2424 bp, Mus musculus
gagctgttgtccaggggccaggccacatctcaagcctgcagcagaacttggcattgtaagaattacctaccacatgatactggtttggaaggcacaaaaaggtcatggaaaccagctgaagccagacactgtatggcagggtccaagtccctacagagagtcgtgcagaagccattggtgaaagtgaagcttcagtagcaatggagagagaccccacagtcctggagatgccagaagtgctgagagctgctgctgtggcgtcgatccagcctaaggaagaagctctgtgcctgcggatgcgagttgaagaagtgaggctgcctacgccctctggagcctggaagataatattatgattgagttccgcgtgttggacattgaactacaggattttggttttgctttagcatagctgtttttatgccctagttcctcccttttggaataagaatgtttaagtatgtaacttgttttttattttgcaggagctcacaattaagaaactttggacttttaaagagactttggacttttgaagtgttggaatttttgaagactttggggggcttttttggagttggactatattttatattaagatattaccatgagatttggggataagaaatggaaagttattgcacaaagtaacatgtttgtgtgctaagttgacatgggatgaattgtgctggtttaactgtcaacttgacaacctagagtcacccagagtcttagtgaggaattgtttagatcagatttggtctatcggtatgtctatgggagattgtcttgatagttcattgatgtgggaaaacacagcccactatgagtggcaccattccctaggcagaaaatcctaaactgtatgaatggaaaaatcaagctgagcagcaagcaaacaacatgcatgtattcatttctctcctcccttgactgtggatgtgatatgactagctgcttgagtccctgccttgacttaatgcaataatgaactgtaccctggaattgtaagccaaataaaccctttcctcctctatgtttcttcttgtcaggctattttatcacagcaacagaaatggcaagggtcctgtgactgatgtatatacccagcccagtggaaaaaaaaaagtgttgtattaccagggttatgtgatacatgcttctcctactccaagatgatatgtttcctaacctgctctggttacttcataacataactcttgacatctgtaacatgttctcattgttcttttatctttaatgaacttttattttctgtacttatttcctgtgctagttctttttggtttttaagacagttttactgtgtagccctgtgtagccatgaactcagagatccacctgcctctgcctcccaagtgctggaattaaaggcatgagctgcactgtctagcctcctgtgatagctcttaagtctctataaattttgtgtgtgtgtttgtgtgtttgcttgcttgctttgaggtaggattttatattggccttgaacttgccatatagccaaacatcttgaaaatcatgtttctcttgcctctgtgtcttaggtactgggattacaggcatgtgccaccctatccagattgtgaatcttactttctgttagtttacctaccaggaaatactcatttattatctttactcaatgaataataattgagttcccaatctaggccaggtaacagtgtagatgtggggtcacacccctgcctttatggatcaatcgttcagagatgagtgtgttgttagaaacagacaattgtaagcagaatagtttgaggactgtggagtcctagggagacagatcttgcccaagaaggcattgtagaggaagtaactctacaggacacttaagatctaatgatcagctgtgaggcgtgagaggccagtgcacagcataagcagaaggcacctctgcgtccaaagccactgagaggaaggttgggagcttgaggccagcctgggttaccccgtgtcaagtcatgtgttacttagataaaaattatctctacatttcaagggctcttgaaggaatttgagtgaatatataaaagtaaccctgaagctgagcatagtagcttacacctgtaatcccagcacttggggaagtgtaagaaggaggatcaggagttcaaagccagcctgtactgcaagagcctattttaccccccccccaaaaaagtcatctttgatcccatagtaataaatttccaatgtgttctccaaccattggaaacctagaagcaggtaatttctcaagaaataaaatgagttgggagttcctgttgcctcttcatttttaactgtgtgtgtgtgtgtgtgtgtgtgtgtgtgtgtgtgtgtgtgtgtgtgtgtgtgtgtgtgtgtgtgtgtgatgggagaaggtgagtgtcacagtgtgagata

SEQ ID NO: 28643 - DNA, 1371 bp, Mus musculus
gaggccgtgattgactactttgatgtccaggattgagaagatagatagatttatataaaagaatgattctgtgtattggaggagactcatttgccagcagataaatcatgctcgttcctcctgcctggcagaaccccagcacacgtgctgtcttgtcctgatacagccaaagcatgagtgtgtcagaaccccctgtctgggcctgtccacagacctctggctgtgtggccactggatttttaatcatgtgtttgaagaggctcctcacatatcactgtgattactaagagattgggggagtatcagcttttatttggataaatcagaatttttatcccaaactgactttgtggcacctagccatagtctggttgtcccatttgttctggtgggcctcaccttcctcatgaggaaagacgtgaagccctgaccattggtaaaactatgtctgcaatcgtgtgtcttaaacctacccatcttatccaaaagctcccggatgtctctagactggttaggttgctttatagagttccgttttctcaaatccctggcattctttcagcatgtcaccaagcctaccccgggacagtttaactgtctctcataatggtaagaacttgggaccagctctctcgccatgttcacaatgtgggtctatgaccatgtccactgtagccctaagtcctctgtggttggtagagactctcgcatagacagcggtactgggttgcttttttcctaggctttcagcagccatgctgactctctctgcatctgagctctgaaccactgttcaaatattcaaagtatgtggacagtccagagtttacgccaagcatcctactgtaggccttcttcagtctccactgtgcccatctgtgtggcccctcttctccataggctggacttatctttgttgttgtcttttggttttggtttgttttttcaagatagggtttctctgtgtagccctagctgccctggagctcgctcctgtagaccaggctagcctcaaactcagagagatccaccagcctatgcctcctgagtgctgggattaaaggcatgcgccactaccacctggcttctttttgctttaaaataaactttgagcctcccaaaacttgaaatcattaaacaaggcacttaatttttacttgtattttgtttattgagacaggatctcgctaagttgcttaagccgttcagatcttaaaccctcgacagtccttcctcagcctaagtgctggcattgcaggctctcaccaaacccagctgagagacacggaaggctaaaggaaaaaccagtctccatggaaattacggggacatggcagcagggacaggtgacaggagacaagtgatgggaag

SEQ ID NO: 28644 - DNA, 1667 bp, Mus musculus
aggagctggccctcaccgtgctctctcccctctcccagttcataggcacagccgcccttattgtgtgtgtactggccatcgttgacccttataacaaccctgtgccccgtggcctggaggctttcactgtgggcctggtggtcctggtcattggaacctccatgggcttcaattctggctatgccgtcaaccctgcccgtgactttggacctcgcctcttcaccgccctggctggctggggctcagaagtcttcacgtgagtacagtccccactccccagcttgcctcccctcttcctgccgacctgtctctgatttccggtgttctccctccaggactggccggcactggtggtgggtacccattgtctccccactcctgggttccatcgctggtgtcttcgtgtaccagctcatgattggttgccacctggagcagcccccaccctccaccgaggaagagaatgtgaagctggcccacatgaaacacaaggagcagatctgagtgggcagcagcccccctcccccactgtgcactctcctgagtgtccactgactgtgtggggaccagtccccgaaagccctttgtgatgcctctctcgggctaaaccgctccctgtgtccacccctgctggatgggccctccagaatttctatgaactctgcccattagggcattaggttcccacccacctttaagccaaggtaggatagcaaataagatggagagagagagagagagagagagagagagagagagagagagagaatgaatgtgtacatgtgtgctgttttctaagctgaatgatgcaaaggcaagggaccaagttttcaaaacaaactgtagcagctcaggggaagggagcccaggggaagggagaaagtgagtcaggaatgtgccagagtgtgcatgcttcagggactcctccatgtggaggtggacccagaagtgagtttctaagtatgcgtgtgcctactgtttttttttttttttttgaaatggacttctaggcttggggagggggaagggataagaagggtgtagctcacatctggagctatgacccttgactgggggctgtgtaatatgtttctgttataagatagacattgggaggggctgaagtccaggtcgtaagtttcataatttgttttttaaatatataaatatatacatacatatatgttacagccctaggaataggggtgggaaactccactttttaaaaggggtttcctttctttaatcctccaatcaacaatgtactgttgccttttatatataaaaaagaataaaacgtatacatgctacaggaacttctttttgtgtgtgttttttgttttcaaacagggtctctagtcctggctatcctgggactctgtataccaggctggccttgaactcatggatacccccctgctgacattaaaagcatgtgccaccacaccagagtcttgtttttctgggaatagcattcgagcgttggttttatttggccataaatttccagatgtttagttcagagtctaatcttagcttgtattcagtggtctcagattccatccaatggagcatcttccgaatcctcctgtctcatccccttccacaaggaggaagtttggagcccctctggtaggcagagccacccagagactggagaggctaag

SEQ ID NO: 28645 - DNA, 1999 bp, Mus musculus
cgccaagctgtagaccctccagttgcttccttctgccgtggtctgctcgctgagccagggccttcgtctctgatgcctgtcctgggctatgacccccctcagctctatctggcacagctccgggtaagttcttacaggactggctggcctggggagtgttctgtggagctgcagccctggaggaggtcatcgggcaatcttgattccattctgtcctttctaggaggcctttgaagatctggctctcttcttctatgaccagcatggtggagaggtgattggtgtcctctggaagcccagcagcttccagccccagccctttaaggtatgctggccagtgaccctgtcttgtgctgccagctgtgtacatgtggttcactgggtggctctgggtcaagtgtatgtatggagctcatatatcgattgacactgccctaaccctgcagctcatggtatgcctttgtgacacttcaactcaaatttgctctctggttcttcaggcctccagcataaagggacgcatggtggtgtctcaaggtggggagcttgtgatgttgcccaacatagaagcaatcttggaggactttgctgtgctgggtgaaggcctggtacaggctgtagaggcccgaagtgagaggtggactgtgtgattctcgccttgggacaagtgttggatctgtgcagcagcaggtcagcggcatagccactctcagtgcagatggacgcctgatgaaccactgaatcccccatccccagagaaagccccgtgagattcttctgatgtttcagctctggggcaggggccatggtgtcctgtgtcccctacacctgaccaccccaattcccagaggaggagacagagccagctcagagagaactgaatccacgagatccatttgcctatccatcttgagtcagcctgaactcttgttcatttttgttttctctccatcttcatcttcccgctggcaggacggatgtgtccagatgtcagcgtgcctttccctgttgctgcttctggcctttagattgtggcccttcctgggggtcagggcaccagcactgagcagtgggagggagctgtgtgtgtatgaatggaacccattcagtaggcacagtgccctgagggtaggaacagtgggaaaagatacagaccaggcagggctggctggagttgaggggatcccggtccaagagagagagagcgctgggcgctgcagcctggcctctctgggtcctgccccctccttgctgctgcctatcattacccattactgtgccatacgcctgctcttggaactctgaggtaggcaggatgcttcctctcagcctgatccacatccccttctggcagccactccctgcttttctcccctaatcctgactgtttttttttttagactcagctcaaatagcaccccacctagtccctgccctcacccccacccctctctcccttctgtgaactgtgaatgcgattattccttgtcgagttcacttggcaggcatgcataccagtatgcaccttctattgtcctgaactctgatttaaaattaaattgcttaagtctttctgggtacctgacttgtctttcctcttgatttcagcctggtctatgagaaagctctgtgaggacagagcatgctgagcgcaggcagataggtgacttggggtttctcacagcacctagaatgaggcttgcagagctgtgtgtaaggggagccccagcccaagctgggaggctggggtcaccaccacaaggccacagagaagcagagtcagagcctgtggactatgctgtgagcaggcgaggtgacgaaagaaggcctaagactgatggcgtgtagtggtatcacgcctttaatcccaacactctggaggcagggacaggagcagctctctgagttcgtcctcagagtgaattctgaattggaggccagtcaaagctactgagaccaaaagcaatggagacccagtttttatgaaaatggaatctta

SEQ ID NO: 28646 - DNA, 1197 bp, Mus musculus
gggtccctttgggactttgtgccctttgtctgaatattgggtgtgttcttcctgggacttaagcctagctttgacctagtccccagttccatgaacacttatgtgtctgaccttctctcttccctgattcctccaggaaatcttacaggacaaagacgggctgaaccagcgttacttccgcaagcgagccctttacctggcccacttagcttaccacctggcccaggatcccctcttcagcagcgtacgcttctcttacatgagtggatgccacctgaagccctcgctgctgctgcggccacatggtgggagtcactctctgggcttagtgcacagtatgggatggtaaatctggagggggccatgaggtcttcaagtctggaagcctcgaggccaggaggtcagaagtcatgggtgcccaagtatgagggggtgctaaggggacccactcagattttaggagttgtagaatctcactactccatgtctctacccagggaaggatgagcgcctagttactgtgcgcctgcttccctgccctcccttggacttcttccgtccctgccgcttgctgccaactaagaacaatgtgcgctctgcctggtaccgagggcagagctgtccggattacggtgagcaggcactggtgctgaaatgtgttggtgggcaggggtttggtggagccttctcttctaatagtctccatttgtttgcgtagagccgcctaccccccactataacacctggatcctgcaggatgtagctctggagacccacatgcacttgctggcaagtgtgctgggctctgcccagggcctgaaggatggcgtggcacttctgaaggtttggctgaggcagcgggaactggacaaggtgagttgtgggtggcctggtttcctcgcctctttgtgggaagggttgctcctgagctcagtccagtcatgcttctctttcagggcctgggtggatttaacggattcatcatctccatgctggttgccttcctggtatctaaacgaaagatccataccaccatgagcggctaccaggtcctgagaagtgtcctgcagtttctgggtaaggtaactagagtggacaggccaggggttccgcttgtccccgggggttctcttattccaccagagctccgttagtttcttgtcaccagacagaggagaaaactgagtctgaggcagg

SEQ ID NO: 28647 - DNA, 1161 bp, Mus musculus
tcaggttccctgcaagagcagtcatgcttttaactgttaagccatcatcgagatctctagccccctttcctcccccccccccttctctgtccttccttcccctcccctttctttctttgaggcaaaaatctgtgtaagccctgctgcctggaactagccatgtagtgtccaggctggcttcaaactcactgagacctgcctgcttctctctcctgagtgccaggctcaaagatgtgcatcattatgtttaactccttttcattttttttttaaattaattttttaggttagtatacaaagcaatgggttgaattatggtatcttaattcatatatatatatatattcatatatatatatatatataatattattttctcatttattttcctcccactgcctgccctcaggctcgtcgcaccctcgcaggctcgctcacctcacagcacactttagtaccttcagtactctgtctccatgtagacctcctctctgcttatgcccttggatttttttttaagttagatttattgcatgtaacttcttgaatttttataggctgatttttttttttgagtatacaaacaactataagagatgatttttaaaagcctcaagagtgccacttaaaactgttgatttatatttcgactggacttaaagaccaagcagtctgtgttttattgatcctttgaattttattgtgctaaacctttattcttaagtttaattaacaggataaggggcttataggttggttgaatggtttatcatgtttaaatgtgtagcaatgaaaatatttctttaaatttttgttttaaagatttatttatttattttatgtatatgagtacgccgcagctgccttcagacacaacagaagacggtatcagatcccgttacagatggttgtgagcaccatgtggttgctgggaattgaactcaggacctctggaagagcagtcagtgctcttaactgcagagccatctttccaaccctgaatttttaaaaaatgtttattttttgtgtgtgtaaatgaaatacatttaaaatggtctcttgagccacgtgtagaggtgtatccttacaattgtggtactgaggcagtaggttttggagttcagggcgcgcttgaggaacacactgtccctcagagaaacc

SEQ ID NO: 28648 - DNA, 1230 bp, Mus musculus
ctatagagggaagccaaggcaggaactggtcgatgcagaggccatggagaaagtctgctttctggcttgtatcccacggcttgctcagcctgctttcttatacagctaaggaccacctgcccaggggcgataccaccccagcccaacacccacatccatcagtagtcaaggcgatgctggaaaaccttgtccacagagcagtgtggcctcgcccgtgccaagctgacataagagtcagcacagtgagatgtgacagtctcattatcagttgcatttccatgaacaagcaaacaaaaatgaacaatgataaaaaagtattcaaaaactgctcagaaataaactctagaggcagagagaggcaagaggattcctgcgtttgaggctagctcagtctgtaaagccctttagggaatttttaaaaaactcagtaagaagattaacctaattgaaaaatagccaaagttagccgcaaatgtatactcaggctgaaggagaagggttaccaaagcccggagtttgaggcccactggacaactacctgttggagaggagaccctgacagttaatgaactgctgtgagcatcaaacccacggtgagacctcacaccagcataggggaacagcgtctgagcaacagagaacaagacctggaaggctgggaagaagggaaatgccacacacgctgctaactcactgagcagcgcatctgctcataggaaaagctaagtgccggtctcgtagctaaccacagttccggtctaagagcaagaaacaaatactcagtgtaggcaagcacagcactgctcacaccagtgtcccccatcaggacctacaggtcagacttagcacatccgtgcaatgggtaattttcaagcactggctgcagagtctgaaacatgcacgtaagtgagaggagtcagaggagggtggcatagtgtatgattacgttttattaaaggtccaggtagtcaacagaaaagcaagatgggagcaatgggagcctgggaaggcaaaggagtgggggaaaccaccaagcagagtattacaaactggtgtggtaggcgtgttgattgcgtggtaggttgcttttctgtggtgggcatgttactactgagctctcctcctagtccagcgtcttccctccccctttgctgacattctgtttgcctgcttgaggttactgtagtgatgacagacaggtgtgcctctcactgtgtaaactaggcttct

SEQ ID NO: 28649 - DNA, 1976 bp, Mus musculus
gaaaacagacctcacatataaaacctctgtaatccttcaacccttagcaagagatgggaggcaaaaggcagaactttcaaatgcttttgagctagttaacctgatttctgcagcagcgaacaagagagatcttacctcaaacaaggctgaagtattaggacaaagcccctccatgacaggaaggtatgtgatgagagccgtggtgtgatgtgggatatctgttctgtatggagtgtgaaccgtgagtcacagggaatctgatgatgctcagttataagactgtcttcaaaacagcgccttaacccaagtgtgatggctttcctaataatcccagcactgaggaaacgaaggtggagcagtgtgggtagtgtgagaccctctcaaaacagacctataaacctttcctgtgttgtcctgtgcaggaaacaggtctcagccactaaagctgaggcggagaaggatggagtgaaggtccccacaaccctggcagaatactgcatcaaaactaaagtgccttccaatgacaacagctcagatttgctttatgacgacttgtatgacgacgacattgatgatgaagatgaagaggaagaagatgccgactgttatgatgatgatgattctggaaatgaggagtcgtgacatgttccttcagtgcccctgtactgccctgacgtctcaggccaaagggagggagcaagtggggatctacagtggccactcagcaaaaacttactcccggggcggggaagcaaacagcccctgctgaccctttgcggatctcagtttgctccttttatggacctttactggagagagttccctccacagaatgtctgaagtcttgcattctttcccttccatcactgtattgattcttttttaaaaacagccaccacccctcaaactcccacctcacctcatctctgcagaatgttcacagcaaaacacctttgtctgtttttagattcttgaagaattagtctgttcaagacattgtgtttaaagctgggagcccactgggagtccacaagtgctgcatatattgggtagcaaaagaaaatgggaaaaaaagaaaaaaaaaaaacaacaaaaccaaaaaaaaataaaataaaaaaataaaaataaaaaaagcccacaaaacaaacttaaaaaaaaaaaaaagccaatttgccaagggttagctgctcctttccattagcgtgtgtgcatctgttcagccccgtggtggtgagttttgtttctttcccttcctaaggctgggctgcggtgggcatcagggacttactctcgctaagtctgatgaaatgtgctgcctcagtgacaccatcccaacatggaggctgcagctactctgaggagctatcagattttgttttttggaattgattgggatctgaaagcctgaaataaatattcatactttacatagaaccgagcacttggttgctatttattttaaaggtgggataactttttccaccagaaagtgggggaggggaggtggttagtgtgtgtgcgttcctggttctgaaaccacagaaggcctatcccagtgttggctgatgcctcgggggaaggaagagtgagggctgcggcgggaggatgcagcccaggtactcataagagggttgatttaagtagccactttaattactcagtgttagtcctacatgcatgggttaagattgtgctgtctttgagctgcgtatcttgatagtgacaactgtggatgtgtgcagcttgggactggtccttttcctcactggagatgatctggacttcttgtactttggccaaggagtgcaagcagaaatggtgtgcggagcttcccctggccccagctgactccaggcagccttgtttcctgggtgtcagtcacacgtggctcccccaagcctgagctccggtagcttcatcctagacttgaaagagggttttgtttagcaaactgtctaagtaaagccagacttcaa

SEQ ID NO: 28650 - DNA, 1496 bp, Mus musculus
gctccaccgggcccctggcccctgcagcggcccccggctacgcgcctgccccgttcctgcacatcatgccggcccaccagcagccccactcccagctgttgcaccaccacctacagcaggatgccccggtgagcgcagtgatggaggcagcctccccacgtggggcctggggttctgttccagcctttatagccttttctcctcttcctcctcagagcggctctggtcagcgcagccagcccagctcccttcagcccaagtctcaagcctccaaacccacctacggcagcgctccatactggacaaactagaccctgaaaaggagggggtgggctctgggcaggagggaacacatggagcaccttcctggagccccgtgcccttgctgggatcctgagacaactgtcagctgagccctgtgggaagcctgcctcccagaccctctgctgtgtgtaatgtatttatgtatgtacttgtaaatgtgatacaagcctggaggagctgggctgtggtcacgggtagcacacaagtgtgtgctcccagtccagacacccttaccatagccaagtaggccccactccgacccctctgccttcagatcttccatgtggccccagctcagtgggctgctgggtgtgccactgaaggactggtggtttggggccaggtcagtaccaatgaagaatcacgacttatctcattccctgtgaaccattatgttttctcctctgtaattacttcatccttgtgtttgaaaaactgatccttctgtcatttgtcatggtccctcttctaacaaatcttaatctggaaacagaagaaataacccctgtccagcagaagcctgtccgtctgcgcacagcagaagcctgtccgtctgcgcacagcagggcttccgctttgggtctggtcctgctctggggacttgtctttctaaccaacatttaaaaacaaaatctgcactaggtctcagagatgtgcagccagtcagctcccttataaagaaatcaaagatctgcttccatccatctcagtgaaagcctgtctgcaatcaaaggctcccccatcccagttgtcctgagccaggtggacagctgtttcagggttttctctcacccaaactccacctaataaaatcctgagagcattcttggtctccgtgttctggctaagggggtggcttgggagaggcactgcctcacagggagggtcacttgaattgctgttcccttctttcttcagggcctaagctgggcctagtcaatagtcaagttcatgggcccagagaacagagtgctgagatagtgctgtccaaaccccacctgcctagtctgggaagaagccgagtgcccagactcagagctggagagctgccgctgacagtcacctgtcctaccactgcctgtggctgttggttaagtcagaggttgggggcagggaatattcagtaccctgaagtgttggggctctccagctccactgtgtgagaccaggct

SEQ ID NO: 28651 - DNA, 1137 bp, Mus musculus
tgccgctgcacactctgtgggtcctcccttggctgtggaggcggtgccagtttgttttcgtccaccagggtctccagtgtgttcaaagcagttgcttttttaggttcttaattttgtggacatcatggtcaaaagaaagctgtgtcttaagatcacatctcattttttcaacatttggttcctgttatgcaaattactctttatatatgtatttatactatctagaatttgcatatatattttagaattatatattatttgcattatggaatttgcatgaaaaatggaaagtgtcttacagtttcattatattgggacttcatcttccttttatgatgtaacaagtcgataattgttttagacatgcttttagcctcttgtactttttattccctaaattctgattatggttttcaaaatgcctacttcttgttatatactaaagctagttgcattgcctcttctcatttatttccatattctttttcttgtaaaacaaaagaatgaaagagatccaggctggagaggtggccctgtgtttagagcccctcctgcatccgcctcaggccgctcacagccacctgtaactccaagactcttccagctttgactggtacctgaggacatgcatccgcccaaatatacacataagataaagtaaaattgttgcaaaagatgagataattgttcctttgttaatctgctgtgcatatggttgctgcagtcctaattgagagtcgccctagtgtttgtctgggcatgtctacctgttaactttttctctttgctctttgtagaacggacatggcggtggtcgaagtcagcacacagtagacagtaagtgtctcttctctttatggctgctggagaccagtcagaggaatgtggctaatgtaattcggaaagccccagttgattggcgattaatgctccaaaatcagaacttgcctgtttcccctggaaaccagcggtttgtttttgagaaggtctcactcgtagctgtggctggcctggagcttgtgtgcagaccatgccgacctggaccttgtgctagctgtgcctgcctctgtctcctgagtgccaggatcaaggatgcatgctaccacaccatgcccccaaactgcttgttttgatcag

SEQ ID NO: 28652 - DNA, 1380 bp, Mus musculus
taagattcaaaagtaggtgatgtagccagctatgttgtatagtatacatctagtatttatgaggccctgtcctgtgctcaatcctttcccaccccccaaaatgatacaagtataatttagaatgctactgggctagggtttttgtttattttgggcaggaggcggttatttatttatttgtttgtttatttttttttcattgagaccacatctctctatgtagtcctggctagtccagaacttgttatgtagaccaatttggcctcaattcagttttgcctgccttttcctcccgggttttgcagctaaaggcatgtgctgccatacttagctctttttgagaaaacattctgaagcatttttatatcttttttgttgttgttttgttttgtttttcgagacagggcttctctgtatagccctggctgtcctggaactcactttgaagcatttttatgttctattttgtgtctccccactccccgaattagatgtttgatttttttttttttttaaccatgatttggaagttttgctcacaatgccttctttcttgcagattttgtattttgtacatacattttgtatattctgtatatgatgacttctgtgagcaatgatcgttgccgaggtgctcgggaaaaaccacagatgccaacagcacacgcagcccagtcacagaaacaagtggtgcaggtaagctcccgaaaagcctgactcccttagacggaactacactttcatatactccccttcctaggagactcaggatttaaccttgtctttatagagtgactaataagtgtaggaatgaggtgatcatggtaaaactgaatgttgttccaggagaatcattgtgtagttccgaattccagttgtcaccatctcctatagcaattctacagcaattttcttccttccttctcctttccttccctactcctttcctttccctctcctgcttgtcattgtctggcatgtaatactaggaagtgaacccagagcctccctgttctagacgagcactctactactgacctgtacccctagcctgttattcttctaaatgagacggttgagtagagcatggagcacagggtctggtacaaagttaattttgtacaacattgactcctcaggtgacaggtttcttaacagaaacagtatctttttccccctttatatatatggtttttaaaaaaatttttatatttattaactgtatatttattatctgtttatgtgtgtacacgcatgaacataaatcactgtggtttttgaggttagacatcagttagaaagagcttctaccatgtgagttcagggttggagctctggagttggcagtgagggcccttacttattgaaccatattgctgg

SEQ ID NO: 28653 - DNA, 2451 bp, Mus musculus
cttactctttcctagaggtactaaccgtctcctcatcttcccacagaatcatgatgaaacctggaggaattacttttcggacattgacttcttccccaatgctgtttacacccactgctacgactcgtccggaacgaaactctttgtggcagggggccccctcccttctgggctccacggaaactatgctggactgtggagttaatgacaactaactttctcccaaaatgcagatttacactaacttccaccctcagtttccttgtttgatttccctagctgtggaaggctctcctgtctatgcaaacagagtttgcttgtgggtcaggcagttactaggaagaggctctatgcagaaatccaaaagctgggacgttctacgtcagttggtggcttgttgttctgggttttttgtttgttttcactttgcagtaattagaattttacttttcccttttctgctttttaaagcaaacactgttacaatccctttttattttttcctctccttcctctggcttctttacactgaaatgacaaagtcattcttacccttacttcactgaggtagggcccctttataatcgtgtggtggctgtccgactttctgtgaaagtgtgggagcctttgtgtgcgtgtgtgtgtgtgtgtctgtctgtgtgtctgtgtgcgtttgtgtgtgtgaacttgtgtgcctgctggtactgcatcactgatactacttggaatgaggattatctgtaattaaagtatttataaaagaaacaactttactcagagtccagctttgggactagcctgtatcttctttaaggtccgacattgtaggaagagaaacagacacaccaggaaaacccttgagttagagaagccggatgggaggggaggctgcatcccaggactccaaactgtccaggcctacctgtccttccacccacgcaggaatgcccatgtgtgtgttacttccactcccgacctcctgtctgctcgcccagactggggactgcaggccacatcacagcctagataaagacaatcctctccccagcctcctgcctctgacagggtctgatctgaccgagagcaggcagtctcgagcttgtgtgcttactgctcatgacttggaggaggaacttttccattcttggggttttgctggtattttctaatttgtctgtccaggaaggtgtggtttgtagcgagtgctttgtgtgtgggatctgttctcagtgcagcagggcttagtgttggaagtcactgtcctgctctgttggctcattcctagggtagtgacaggtggctgtgccagcatcgctgcatgtgacagtgtagctgtgattggtaatttgcttgtttctctcaaactatttagtgtgaagagttttttgttgttgtttttgtttttaacttgcaagccagttgttgtcttccgaacatcatgtggaaaggaagctctccccaccctagtaccctgagacacacagtgctgcctgagaaatgcagtcatacacctgcacccagtttctcagttgctccccagttcttccatgctctctttgtgtcaaatgagtattctcataatggctggggctgctggggagggaagcggcaggcccaccgtaggacacagcatcctccacaggttttagaataatcatcctataatctagagaaataggtgctatcaacaggaaattaagcaaaatgctggatgctgtgaatcttttgtcttaatttttttctattcttaaactacaggctgtagatgtcttagttctcacagaacttctgtctttttaaactgacttgtgtgtttaagtaaacaaaactcttgtaggatgttttgtgccattgccagtccgtctcctgtgatgcttttgattgtcttgagattttctgtttttaaaaatgtagcatttgacttttttgccaaggaaaaataaatactatcccagtgcagagctgtttgagtgactatatatggcaaagatgctgcagggagcagacccgaaggattggtgagggcatgctaagatttttcagagttacctagaaaggcttgctcctgcttcccggctctaggctctggggtgcaactgagggcccccgtgcctagagcaagtagtgtagtacctgaaagaaacaagtggttctggggccccgtctgcttcactgagggtgtcctgagagtgactagaagtggctgcatagtggcctttcttgcaattaagaccacactgaatggtcttcccaatgctgggggcttgggagaagactgctaagtcacacgaccaaggctttccagggcaagcaggctgtgctgatctttgcatttgctcagaccaaactcacactgggaccttgataatcagattgcaaaacagaagagggtgggtaaattagttaaatcaatttgagaatatgtcttacaaagagtgacatttggacagg

SEQ ID NO: 28654 - DNA, 1099 bp, Mus musculus
ccattgagtgggctgaagatattaaactaatccaagaagctcagcgggaagcagagcggaaggccgaggaagcagaagctaaagtgaattccaagagtggtccagagggtgacagcaaagtgagcttccccaagactcacaatacagccacaatgccacctcctattaaccccatccttgccagcttacagcacaacaacatcctcactccaactcgggtcagcagtagtgccacaaagcagaaagttctcagcccaccccacacaaaggcagacttcaatcctgctgacttcgagtgtgaagaggacccatttgataatctggagttaaaaaccattgatgagaaggaagagctgagaaacattctggtaggaaccactggacccataatggctcagttactggacagtaacacagcccggggaagctcgggggctgtgttacaggatgaggaggtcttggcatccttggagcaggcaaccttagacttcaagcctcttcataaacccaatggctttataaccttaccacagttgggcaactgtgaaaagatgtcgctgtcttccaaagtgtccctcccccctattcctacagtaagcaatatcaaatctctctccttccccaaacttgactctgatgacagcaatcagaagacagtcaagcttgcgagcactttccatagcacatcctgcctccgaagtggcgcatcccggagtctcctaaagccttccacccaaagcagtgccagtgagctcaatggggaccacactcttgggctttcagctttgaacttgaacagtggcacagaggtgccaacactgacatcctcccagatgccttccctgtctagcgtgtctgtgtgtacagaagaatcatcacctccagatccatgtcccacagtaagttgtcagtcctactctttattccaaaggcggctcagtgatcccacttagcagcagacttgcttcccacaagccttagtgattgatagtgcgtggagaatggctttgttttctgatagaattctgcttcttttcctgagggcagcttgtgtatttattttttgttcttcagtgctagggatcaaacccaggcactc

SEQ ID NO: 28655 - DNA, 1207 bp, Mus musculus
tggagttgaatcccagtgataggaaggggaagtagagttgcgctaaaagccaggcttttggaagacagtgactgttgatagtctttttgccttcccttctatctagaaagcatactttaggggttaaatactttgtcttggtgggaatattcatgtgggcaggagctcgtccagaggtcagcaagtgaattgttactttcgagggaaccttaaagacccatgggactgcttgaaggaggcagaatcttcacctgcagtatacacctacattcagctgctctgcgtggctcaactctttctgaaaaaaatttgttctcctttatcccatagatgatggagtttcttcagttaatgagcaaatttaaggaaatgggctttgaactgaaagacattaaggaagttttgctattacacaacaatgaccaggacaatgctctggaagacctcatggcccgggctggagccagctgagacctggccctgctacggccctgccacagcaccaccattccccaaggaggctctgcacagctcacttgtggggaagacgggacatgcttccagattttctttgggggttagaaggtcggatgtggagttgacacttgttagtctctgtgagcccaggcctgagctgggggaaagtaggaagatttgggcatatatgctctctattggttccttccatattaaacatacctgtgttttgagaagtgtccttcccactttgggctttcagaaggaatacttggttctttctggggtctctaatgttctcagccaaaacctggcctggctaccaagaagagtgggaagacaggaggagcagactgctgctgttttggggctagatcctttcctctcctctctgctgcaccactgtcagactgggctctaacccaagtggaatgcaactgagagggtcttcctgggcccgccttccccgacagccctagtgttacactggttctggagtgtctctgcggtacaaagatgcacttttcttcatggggcaaagtctgcctcttctgccaggcagttcccatttgcccctgtccagactgtttcttttggcttagaccataatcctctgctgcccggggcattggagcccctgtgctaggaagctgtcagttttgagtatcattggccctttccagcacatgggtgagaaaacaggccacgacttgtcactcagcactaaccc

SEQ ID NO: 28656 - DNA, 1140 bp, Mus musculus
gtatgtacatgcatgccttattctttttgcttaagatatctttggctatgtcttgaatttatttgttcttcatattaattttgtttgtatttaaaagacagagccatgttatataaatctagctggcttggtactcatgtgtagcccaggatggcctcaaacttgtggccagcttcttgcctctgcttcccaagtgctgggattacagccatgtgccactacaactagagaatttcaggttttctttttctatgtctttttaaaaatgtcataagtgagtttgtagttgttactgtttttgtggggtttttttaatgttgcagttgagatttaataaacatagtacctcattcacgctaagtgctttaccactttttctcttttcattttgaaacagtctcactaaattacccagactggccttgaacttgcagtcttcctgtctcaggcctcccaagtgcggcctgccttcctctcccgtccccttctgtcccctgccctcccacccacctccctaccacacacacctttctggtttttttgtcattcaagactggtttctctgtgtagccctgactgcactggaactttgtagactatgctggccttgggttttctttttagagcaggttctcgtgttcatgctggcctcaaacttgctgtgtagctgaggatgagcttaaacttgtgatcctcctgcatgcgcctcccaggtgctgaagttacgggcatgcactggcacactgggtttgtgtattgctagggaccaagtcctttggctttgtgtttgcccggtaagtactgtaccactgagctatatagatctctaaggtctaatattttatattttggtgtttataaggatttatttttttaatcctagcattgaatctttgctttgggttttatggacattttaacagtgttgattcttctgagaatccatgactgtgtagccctggctgtcctggaactcactctgtagaccaggctggcctcgaactcagaaatctgcctgcctctgcctcccaagtgctgggattaaaggtgtgcgccaccatgcccggcttatcagtgttctaatagttttcaatgtggagagtcttcctacctgtctgcctgccttccttctttttgttt

SEQ ID NO: 28657 - DNA, 1235 bp, Mus musculus
tccaggctggaagcaagagataaggctggcctcctgtgccccattgccatttcaccctagctcaaagtccaggagccaggcttccagaaaggctcttcaagagcaagcttaaggaaatacagtgagccaagtggctgtatgatatggtatggtatggtatggtatggtatggtatggtatgcacatgtgtgtgcatgtgtgtgtgcctgtgtgtgtgcgtgtgcgtgtgtgtatgtgtgtgcgtgtgtgtgtgtgtgtgttgtacccgagtgtgtgttgagcctatctgtccagggaaccagattggtgtccgagatgaggaaatggctgtggcctgggaaatcagtgagaggccgcttgggaatgagaatgcagtggactgaaagcacagcctggccatctggaacctgggttctggtcccagcctcggcattctccctgagctcctaagcaattcccaggcttctctagggcttcagttctcacaactggaaaataaagagtagctgacatcaccgacagagtcttttcataccagaaggaatttcttcacaggagtttctgcaaaagactatgacatctgtgtgtctgtggtctcacgaggtacctggaggtgtatgtgcacggacatgggaagtacgtgaagatttatttcgggaaaagtggtgtgtgtgtagctgtactgggtgtcatgtatgctgttgcttctgctgctggtctggtctgagggaggaaagctgaggctgtagctcagtgagatggtggctctcccatggctgaagacaagtgcaagcagagagagcctcaggctgctgggcctcggacccacgagcctcctctcactgagccagtgcggccagagtgtctctccttcaggcgccccacatgccagcatttccaccctctggattctcctcacatgtcactctccaggtgccggggcctagagtgggcgtgtgagaaggaggagtggggctgttggcttaggaagggaagcgcctctctgtacaccacaaccaggagctgcccactccccacacctccagcccagcttacctccccctagtacagagatcctaattagataagaaaatgccaagggaggcaagccagagaaagcatctgcaggggccacaggcccatggtggccccatctgagccccctctcccaccccagttcgcatccccaccactcatcatctgggccccaacgctagaactccccccaccgcatc

SEQ ID NO: 28658 - DNA, 1129 bp, Mus musculus
gcgagtttggagttgtcaaagctgtgaacgagtcacttcagtcctgttcaggcactgcaaggagtcctggccagtgaccactggatctcagttacccaacttggagatggattagtaaccttgctttgaggtcacttcgtgaggcagcccttctccttcacggtcaagggcagagtgaacattcctaaccctcacgccagcctccacccatagctactacagatcacacacacccagctggggctgagacccaggcagcactcagcagtcctcccaacccacagcccaatctgtttttagagggattccccaaacttctggttgtagctctgcagacataagggggggagtttccaaacagcaccctccctccagattgtccatttagctaggcaacagtgaggtggggacacagagcatctgggacattgctggggctggtaagagtggtcttggggtccagaatcctaaaccagactccagtactgggtagttgaggtcaccagtgtgtagcttgtcgctgtctggcaatatcactaatggttactgccagcctccatgggtgatagcatttctgtgaactagtatcattctgtatgccattgagtctgtcaccatctttgtgtcagaactgtatccatgtcaacttctctgctactctgtgtgactgtatccatttcaacaggtatcagtgcattgttggtgttgttgtgattgactcttactgcaacattgttactgtggtgacgtgcttgtgtgtcattgtgcaaggtgcaattgtatcatttcctctgacttattaacattgtgtggtagtgtctttgtgtcacagtgggacagtgtcactcaagtggagccctaggatttgtcttatatgttgtttgtatatgtaggtactgatgacacagggttccacgtgagaaatggtactggaagcttgtgttataaagcacggggctgctttcatgatgtttgggcactctgttccattcttattctggggctgacctctgtgtggtccataaaggagcctaggctggggtacaaccttctctggggttgtatgacgtttatcatctagatctatcctggagtcctaaagtaaggatttgggaaaggagctgtttgt

SEQ ID NO: 28659 - DNA, 1196 bp, Mus musculus
gtgtgtgtgtgtgtgtgtgtgtgtgtgtgtgtagatggggtctctgggaggctctgctggctggaagcgttctctagcatgtgcctcttcccagtgtgaggtgaacactgggtcctgtgtcatcctgaattgctggtgtgtgtgaacatgtgggcatgtgtactcacgcctgtgtttaccatcaggaacagattgtggagagcagggagagggagggaggatggcttgctcttacccagcagagcagaaggttcctcagaagtagcatgcatggtacacgtgcatgctaagggggcagagaaaacagaacattgttccataaggaaaaggagacttctccccccaccaactctggctctgccaaaaagaccatcttcagttcttcctgttacaaactcatgcttcgagtgccctgctggtgtgtgtgtgtgtgtgtgtgtgtgtgtgtgtgtgtgtccctgcatggattttcttttttcttttttctttctttctttctttcttttttttttttttttttttttttttttgacagtctctttacatagccctggctgttctggaactcgccctgtagtccaggctggcctcaaactcatggaggtctgtctgcctctgccttctcagggctgggattaaaggcatgtgccaccatgcccagtcaatgtctatagtttcaagggtgtgctgtactatagtagtgatctggtaggggtgggggtaaagaaacaagcctttgatctaggctcccagtctgaagagccattttgtctgttctgactccatggaggacactacagtgccctcttcttcctgcgttcacacttgctgtagaccctttccttccacctaccccagctagagagagtttctttcagccatatgttcttgcctatccctcccagagatcatggcattccggctgtctactctccccatgtaatgagtgcccccaccccgccccgctgcccttcacatgactggtatattggccctttttgggtggagggctccttctggttcttctgtaaaccacaaactttggactgagcttggccggtaggaagtttgtcacctgtgcctccgattctgtgaagctgtccagagcatgtgcccaaagagagaacatgaattcctctgctctttcctgctccccgtgcaagaggcaggggctgctggagcaaatgccttctgaa

SEQ ID NO: 28660 - DNA, 1208 bp, Mus musculus
ctcggccagctcaggcatttcccccatctgtggcatatgttttcgtatagtggattgtaaatgcaggctggcagttcaggattttaagcctggttctcctactcccaagttactgttctgggtcatagcgctctcatccgtaaagtgaggaatagggtgctcaccccattagagttgaaaagcttacaaggagatgtacacatttgacactcagataccaccagagcacttggtgctgtaattgatcaactccgcttgctgtgaatcaaggttttctccagtatgtctagtaatctggatgcccaattatgagcaaataaaattggggctcttctggattcaggctacagcaggacccagcaagttgaaggtgctctcaaaccagggaggagagattgggatggtgggagaaaaagttggggaacttaaggtcttgatatgggatgagtgagatgtggccagaaggctatcctccagctgtagcctgaactttaaacactacatcccttgctttccaatgtagggcatctcagtgaggggacggggacgggacaggtggtgaagattcaggagattgggagaagtgaaacaagttactctaggaggccctttacatacagagggtcctgaaacatctaacaactgctggagaccgcagaaccactgtgatgtctcacactgccaaccgcctggcctccattctctgttcagctagttcaaggcttcagctcctcagcttctacctactgttctctgtcattgctctgtcacgtgtgtctccatgcccttctctgacgtcagcagttctcagtgtcaccaagtctccagaactttgggccacattattgtaaattattgagtcgttttgatcttgcaatcccatcccggttgctgctttggccaggttaaagcaatcacatataataaaggcagtaacttacactggatgggtgattcagtggggcatcttcgttagcttcagaaactgggaagagacttcccggtgggttgcctaattaaaaatcatctgcgatttccaaaatgattagagagagagtgtgacgggaaacacttgtgctcagaatcccctgagaggacaggttttagggtactctccctaacctgtggtccctagggagtcggcctgactgacatcttcagggagagaaccagaggtgaagccttggagtgagaatgtctgctcaagg

SEQ ID NO: 28661 - DNA, 1174 bp, Mus musculus
gcctaggatggagagtgcctgttttgtagtttgctcctcatactggaggttattcaagcaccatgtcttgtaggtttagagggaataatgaggcaggaagtttggtggggcgtggctatactcctcagctatacgttggcctacaggaccagtgtgtggcgatcactgaagagtctaaggctctcctggaagggtataacaagactgtatcctttgtgcttcgtgctccttaatgggtatctcctccctcctacactctcatcccagtctcttctccccctcacccctttgggcacatgcaaagtcattcaaacccctgttgtcaccttgacctgtcgccagacaatgcttctctccaagcagtttgtgcagtgggatgagttactctgccagctagaggctgccaagcaagtgaagccagcagaggaatgacagccactccccacgtccccaccaggggaaggcaggcggctcgagggcctcgcaccaacctgtctctataaggcagagacagcttcatctctgaattcagatactacctgtctgtgttcgactggcggctctgaggtcagggtcaggttgaccttagagtcatgatctgtactccctgtcaatgtatttattccagtgacaataaacttgaacgaccactaaaggagcctgttggcctgctgatgtaagacgggctcagctgtgaggatttgggaggtgaaggggagagctgtcaaccccttggggtggggccaggagctatactcctgatctggtttgcggagagataaagagttcttacatcatttgactgatacagtggggcattgtatatttatttaccccatacttgccaattaccctctaaatatcatcctatggtaaggagggcacaggagggacgcctatacctcacagggtttggggaagaccaggtgggcccacatgtcagatggtcatggaggagcaggcagggacgttcagaaccaaggcagcacagccttgtgtctacattataccagtagccagagaaggagcccaagaggtttggatgtaggaaattttaggaatgggggagagaaagcagggagaaacagctataaagcaacgcgctccaccaaatgtatgctgccctcttgtggtctgagggagtgccttggcgccttcaagtgcctgtatggca

SEQ ID NO: 28662 - DNA, 2029 bp, Mus musculus
ctgaatctgtttaaaagaaaaaaaggcgtgggcttgctggtgtaaggttaagcatcacactttgtgactgaacaggcgcatttctcagagagcctggcaagccctgtaaccacacagaatttccaccagatatgagtgcagcttggaaatgcagatgccataattctatacgttagcctgtagctgggttgggtggccttccaggggccaggtgatgccattggtattaggtgttttggtctttgtcctctgatcaagcagcttggccagtagggtagaagaactttttcttttcttgaaactgtcttttcattcccctcctctccatagatagcccataggctagacaaatgcagtatggaaggccagggcagagctgggctcctcatgaggtttcttatcctgtctgtctcccaggagagacagttgtacacgggcctggagaagcaacggctctggagtggggaccaaacacgtggatggtggagtacggccggggtgttattccgtctaccctgttctttgcactagccgacactttcttcagcacccaggactacctcacactcttctatacccttcgggcctatgcccggggcctccggcttgagcttaccacctacctctttggccaagactcctgaccagccaggcctgaaggaagatctgtggatggacaggagcgcggcaggaccacatccatctctctactcgctggaactcatattcagacagcagcgtataccatgcagatattaagtacctgctgtatgaggaaggacatacatacttgtacatccagacacagctcttgggaagcaaatgagacacagagatgctaagacttgtatgtactgtaagatcatgcactcacatccacccagaaagggtcctctacatatactccagggggccagtcatgtttgaacacacatcacaagcttgactcactgactcaggctttcctagagcctcctgctggcattcagggctctgggatcaagggttgaggtagatgttacacactacctcactctgatgcctcattcctgtagtaatctctggtgaagggaaagaggagctgcccttcggaggtccccttcacctgcagctatgatgcccttcccttcatccctttcctcaccatatgccttatctccattccactcccctgctatgcaaatgcccccctggcttgtcctccctgccccccccccccggcaaccagttcagctgggaaagcagaggcatgtagaggatgctaaagggaagggaggtcctccactacggagacccttgttggggttagaatgggaaagctggctagtgccccagggccagttcccaaggagaggacctggagaagtaagccggggtccaaggagccaccccattccaaaagaagcctttagtgtgtgtgtgcacaccctatcagtttccagacatatctgttgcaatctctgtcttcttgtctctctctgttaataaaaacatattaaacagtttcgtttccttatgtgtctaaacagcagggaagccagctgcctcctggggcactaaaaggcctcctgtacaatccagtttgtaagacaaggtttagacagaagggagtgtgctaagaattactttgaagtcagccttctaggggtggtggtgttaaacctttggctctagactcagctctgcctgctgttggcatctgagtgttggaactggaagtgagcaccaccacacccagagtgcccccccccaccccccgcaatataaagctgacttagaatttacgatgtgatactgaaattcaccgtgaacttaacctccagcttccacttcctaggactgagaattaaggccaaggctttgtgcagtctgggcaagcgctgtgctaaccacacccttagaagacagatgagtcactgaggctggctggcttgcatctatagagataaattttttttttaattttatttctttttttatatgagtacactgcagctgtcttcagacacacactagaagggtgctttgg

SEQ ID NO: 28663 - DNA, 1170 bp, Mus musculus
aggtaagcccgaatacacagccaccaactgggataggaaaaaaatccttcttccttattactacccttcgcccacaagggggagcagtgcgcctccttttgggtcatttccgggcaagcaattttgatcctttgagtggggccttcctcgcccccgttgcagcctggatagcccttgaattccgtcaggtagtatttctagcctattcttgtcagtaggtgaatccccactatgatggtacctttctgtttgacaatgacttcccggctctgcagcccgatgctccggatccaggtaccctcaatttaaccactgttggggagaagggagactgggtctgacccgggtacctgtgctacagagagtaatactcctttattccaggacccagtgaccaccctctcttccgagcagaggccgccagaggagtttggtaactttgggtttcccctcttacaacctccagcccaggtctgaagacgaagacctgagcttgggccctgcccttagcacccaatccacttccctatgtcatttttccctcaccacctagtaaggtcatgtgcttccacccctggtcggatgtgacgctgccactcatgtctgtccctgagatccgagctgtcatcgatgcatgggcctcagtcacagaggagctgggtgcccagtacccttgggtgcaggtctgtgagggggaggtgtaactttggtttgggggagaaccattactgcttccacagggtatggtgaggaggggttgacttgatgtctgtgtgactattgaatatctctctcctttctacccaatagatctttgaaaataaaggagccatgatgggctgttctaacccccatccccactgccaggcaagtatgtgacaggccttaatggctttcttggctgagtccaccggcattgtggacaggactactagattaagagatagggcaaaagaaatacattggtaattcggaggctcagagataatgggctggcctgctcttctttgtgcttgccctttgacaggtttgggctagcagcttcctgccagatatcgcccagcgtgaagagcgatcccagcagacctatcacagccagcatggaaaacctttgttattggaatatggtcaccaagagctcctcaggaaggtagaccagaccttttaccc

SEQ ID NO: 28664 - DNA, 1099 bp, Mus musculus
tatatacatgtttgcattgatacttgttcaggatttctttttgcttctctgcatacaggagaagcttcaaaaaacgtaattgatcattgcctacaagcatttaatgccatgggattgcctaaacttattaagacagacaatgggccatcttattccagtaaaaactttatttcattctgtaaaaaattcggtattaaacataaaactaaaattccttacaaccccatgggacaaaaaaatagttaaacgtgctcatcgcaccttaaagaattggctttttaaaacaaaagaggggcagctatatcccccaaggtcaccaaaggcccaccttgccttcaccttatttgtcctaaatttcttgcacaccgatatcaagggccagtctgcagcggatcgccactggcatccagttaattctaattcttatgcattggtaaaatggaaggaccccctgactaatgaatggaagggtccagatccagttctaatttggggtaggggctcagtttgtgttttttcacgagatgaagatggagcgcggtggctgccagagagattaattcgtcagatgaacacagattctgactcttctggtaagcatcattctaaagactaaaattccttttgtgcttagaattcagctgagagcgaaagctcccaaagctgttttccagctactctctgagccagctcccgacaggaggccggagactagcctcagctttacaatttgcatttgaataaagtacctagacttccccgaaagaagttctgctttctgactttctcactgtctttcaagattttgtctttcaagcaggtaaatcaacactctcaaagcggaccagcggatgtgcatccccgcccccctagagcacacaggtggctgctgttatctcctttccaaggacatttccagcacgtggctttcagtctgagttaaaaatttaggttttcctagagggctagaagagtagatatttctatattaataaagattggtttttattttgatagacaggcttagccccttagctgacctctggcttttcacccttgctattactgcaaggtgtagctccttaggctgtggaaaaaa

SEQ ID NO: 28665 - DNA, 1099 bp, Mus musculus; identical to SEQ ID NO: 28664

SEQ ID NO: 28666 - DNA, 2124 bp, Mus musculus
gagagcttaaaaatctatcgccaggctccggtctccaaggtgcctcaaaacgggcccactaatttggctaaggtaagaggtaatgcaggggccgatcgaacctccctcggtgttccttgaaaggcttataaaagccttcaggcggttcactccctttgatcttacctcggaagcccagaaggcctcagtggccatggcctttcataaagcagtcagctcccgatatcagaaaggaacttcagagattaaaaagtatattatgagagggagacagttattcgatctagtgaaagaggcagagaaagtgtgtgtgtgtgagagagagagagaggcgagaggcaaaagaaaaaaaacaggagggatcgtacgtagacaagaaagaaatttgccacagtggtaagagaaaaagaaaagacaggatctagacaggaaacctggacaactgaagaccgagcctcagctaaagaggctcagctgtgtcagactgaagttacttatttgggatacacccttcgaagtagaaagcagtggctaaaagaagccagaaaaagactgtaacgcagatccccaccccaactacaccaaggcaagtaagaaaattcttgggtactgctggcttctacagactctagatacctgggttggcgaccttagctgcccgttgtacccactaaccaaagaaggagaagtgtctatgtggaccccagatcaccagaaagcctttaaaaaaatgaaaaaggccctactgatggccagcctatgcctgacctaaccaagccattcactctttatgtgaaaaagagagcaggggtcgccagaagaatccttactcagactttgggactttaaaaaaggccagtggcttacttatccaagaagttacaccctgttgccagcgggtggttttcttgcctgaaagctattgctgccataacactgcttgtcaaagatgctgataagctcactccgggacatagtggcaccccaccccacgctcttgaaagcattatccaaaagccccctgactgatggatggtgaccaacgctcctgtgacacatcagagcttttttgttgtctgaacaagtgaccttcgcttcattccacctgctgtcccactgcgtgagactgcacctactcatcactgcactgacattctggcagaaggtcagatcagccttggcctgagggttcgagctggtacactgccttgaggttaaaggtaagcagaaggtggggacagcagtatggtggtgaacagaaagcaagtgatctaggccagcagccttcctgagggacgtcggcccagaaagctgaacttgtgactttaagacaagctctataaatggcaagaaaaaagtctacactgacaacaggtatgcttttgccactgtacggggcaatatacaaagagggctgttgacatcttcagaaaaagacctaagatgctgtggctaaaaaaaaaaaaaaaaaaaaaaatcaggtggcagatctaaccgccaaacaggtggcccaaggagcaatgatcctggcagtcaaggagcctaaagattattatgacatcagagagaccagctttagatacaccgctgagcactatcaagttatagacagtatttgacttggcctgggggccaagaaattcaaaggtgtggttaggtcctttgactactatgttacaagactctctgacttggcaaaagaaatagtcaaaagctgcaaggcctgtactatgacaaggtataatttgtaaaagaaatcttcccaaggtaatggacctgcctttgttgcccaggtaaatcagggactggccaagatattggggattggttagaagttacattgtgcatgcaggccccaaagctcaggacaggtagagaaaatgaatagaaccattaagggacccttaacaaattgacagcggagactggcgctatgattagatagctctcctaccctttatgctcttcagggatagaaacacccctggacagtttagactgacccccctataaattactctacagggggccccctccactggtaaaaatagcctttgtacatggtgctgacatgctgctttcccagcctttgttctctaggctcaaggtgctccagtgagtgag

SEQ ID NO: 28667 - DNA, 2124 bp, Mus musculus; identical to SEQ ID NO: 28666

SEQ ID NO: 28668 - DNA, 1329 bp, Mus musculus
ctgtgactttgtacttccttgtgactcttatctggtatttttggtattttccaacaaagcccttcccacctccttgagttgtggatttttcctttaaatacccctttacttagctactcggggcgccacagtcctctacccctgcgtggtgtatgaccgtgggcccgagagcgctcttgaataaaaatcctcttgcaatttgcagcaagaccgtttctcgttggtgattttggggtgtcgcctctcctgagtcagaacgtgggggagtcctcacgttgtaggtctttcatttggtgcgatggccgggaaacgcaaccacccctcacacctgtgaaccgacttggaggtatggggatcccctcttgtgtgtgtgccggccggtgtctctgttttctgaaatgaacattggaacatgtgcttgtcatgttgggttgtttgtgtcttgtcctatgtttctgaagcacggcaaagtctgagtttggatccatctgagtttattaaatttgtatcttggtttcagggttacgagatcgtgggttcgagtcccacctcgtgccttggttttcgggttgcgagatcgtgggttcgagtcccacctcgtgctttggtttcagggttacgagatcgtgggttcgagtcccaccttgtgccttggttttacaccttgcagagtgaggaacaagtgtgcttctctggttttggtcgtctaggtagaagtggacgacggtgtttgtagacgatggggtgatggggttttctgaaatgcgcgtgtctgtatttgcagctgtccttttgggccgtaaggaccggaggactgtggtcggcagacgtgctaggaggaccacaggctgtggccctgggggacgccctgggaggtaaggagagccagggacgcctggccgtctccggatcggtcagagggaccgagttctgttgaagcggaagcttccccctccaacatcgtctaattcttttgcctgcttgtggaggacaagaaagggtcgagtgtgtctggatctgttggtttctgttttatgtgtttttgtgtatgtgtttagagctatgtgaaaatctaaaaaagcaaaggtaattctcataggtgctttataccctgactagagatagtttacacctgaaatgtgagagaatgggataaaataagcagtatcaattggtctttggagccctgcacctgtagttaggaatctagtgtggctggagaagccctgctaggagctaattataaacgctgctcttatagggaccagcagcttctcaagttctatggtaagggaacagatggctgtttttcctacaaaaatctctgtg

SEQ ID NO: 28669 - DNA, 1329 bp, Mus musculus; identical to SEQ ID NO: 28668

SEQ ID NO: 28670 - DNA, 1105 bp, Mus musculus
ttcaccagcccaggaggagggaggggcacgtgcagatgccttggtgattttgtaagtggtaaatgctgcggccagcttgggctctgtgcaaactgctacagccaccgctggttccctaggtccctgcctttctcgtccatcctccaggatctgtcccctgctttcccacatagacatggttcctcagtggttttctttactcctgcctggggataggcgggtctcctctctaagaagaggtagaggggagcctggttggagccctcttgaaggaaagatggatttatgtgtgaatcttgaactttcaaagagctgtcctgagagacttggtccttggcttcaagaaactagaagagagggttgaggggatggttagggatgcgagcacttgctgtgaaatcaaacccccaaacacccatgtaaaagccaagcctggctgcatgttcctgtaaccctaggattgtagggtggcaatgggtggaccctagcaggttacccggcttatccagctgtgtttcaaaggagggaagtggagctataggggaagacactctggcctcgtcatgtcccccacaagtgtgaatatagaacccacatgcacacaatacacatacacacaaatgaacacacacgagtgcacacacacacacacacacacatgcacacacgtatacacacacatgcacacaaacataaacacatacacacatgcacacaaacacacatacatacacatatacacacgcacacatatatacacacacatacacaaacatgcacatacacacatgcacacatacactcataaacacagacagacacaaacatgcacatacacacatgcacacatacactcataaacacacacacacacacacacacacacacacacacacacaaccaggaactgaggaattcgggctgaggctggatcacctttttattcagttaggtataaatcataggtgcaaggacaagggaagggcgccatggagagcaggttcaggtcttgggacctgagtgacctcctagaggggacagtcctgctgtctccttcctcattccctgggagacactctttcttctgactctctaggtctacccc

SEQ ID NO: 28671 - DNA, 1105 bp, Mus musculus; identical to SEQ ID NO: 28670

SEQ ID NO: 28672 - DNA, 1105 bp, Mus musculus; identical to SEQ ID NO: 28670

SEQ ID NO: 28673 - DNA, 1105 bp, Mus musculus; identical to SEQ ID NO: 28670

SEQ ID NO: 28674 - DNA, 1236 bp, Mus musculus
cataccataaaaatgctatgcttctgattaatgcgattttatttaaaatatgagggttgctcttaaatcatttttgcttttcttgtagtatcctgtggaacatccagacaaattcctcaaatttggcatgactccctccaaaggcgttcttttctatggacctcctggctgtgggaaaaccttactggctaaagccattgctaatgaatgccaggccaacttcatctccatcaagggtcctgagctgcttaccatgtggtttggggaatctgaggccaatgtccgggaaatttttgacaaggtgagctagatggctggctgatgttcataatatgtgttggggcaaggtgaaataagaggctatttctccagagtcaaaaacattttatgccgggcagtggtggcacatgcctgtcatcccagcacttgggaggcagaggcaggtggattttctttctgaagcctgagaaatctagttgtgtcagcatttgagatggtctctttctttcttataggcacggcaagctgccccctgtgtactcttctttgatgagttagattcaattgccaaggctcgaggtggtaatattggagatggtggtggagctgctgaccgagtcatcaatcagatcctgacagaaatggatggcatgtctacaaaaaagaatgtgtttatcattggagctaccaacaggcctgacatcattgatcctgctatcctaagacctggccgtctagatcagctcatttatatcccacttcctgatgagaagtcccgtgttgccatcctaaaagccaatctgcgaaagtccccagttgccaaggcaggtgcagagttgtcagccataggaacttttttctgtgaagctgatgtggagtggcagaggcagaagcaaatgtattgagtggatagcccacagatctgtgtactctatggtaggaaggcacaatgctaaagtactctcttgcttccttcaggatgtggatttggagttcctggctaagatgactaatggcttttctggagctgatttgacagaaatttgccaacgggcttgtaaactggccattcgtgaatctattgagagtgagattaggcgagaacgagagaggcagacaaatccatcggctatggtgagtcagtactctttgtccaaatgtgccagttgagaggcccttctctatgatccagagttgagagtggaggtattaagaaggtgcctgatgttaaatctg

SEQ ID NO: 28675 - DNA, 1134 bp, Mus musculus
attccatgttattttcctatatagatatagcctgcacacatattcagttgtctgctctcttacctcccttcagtgctctaggatagtaagcagttctcatgcctctctgaaggataatgtggttgctgtcaagttgaaagtgtacagctctaccattgttggttgtagtgaaagcttaggctgtttataacaggagtataatacagagttgttttttagtattgcctggggtagggaaggaaggcataagtaatagctactgagctttgtattttagatcatgcggtctagtgaagaagtttctggtcctgtacttgacacctctaattgcacttgtattgctttgtattataggagatatttttcttgtccggggtgggatgcgtgctgtggagttcaaagttgtagagacagatcccagcccttactgtattgttgctccagacacagtgatccactgtgagggggagccaatcaagcgagaggtgagttactccctaatcccagttcacggttttatttggctttttatttgtggtgctgagacttgaacccagggccttgtgcatgttaggtaagtactctgcccctgaattacatcctcatctcccaaatcattaccactcaggtagtattcatgttgtgtatcaaaatgaatacttttggagattggatggccttaaattaatggaagtcgaaaaccacctaagaatttcttgaaagaacccaatcccatgagtttaagatgaagtctgaaagatgtaaatgattggcactgagtgtggtggcatatgccaataatcctaatgcttaggaggtggaggtgggaatattgttttaagtttgagtctagaatgatggtctctgaagtgatgggctgtggtttggtggttaagagcactggctgggggctggtgagatggctcagtgggtaagagcacccgactgctcttccgaaggtccgaagttcaaatcccagcaaccacatggtggcacacaaccacccgtaatgagatccgatgccctcttctggtgcatctgaagacagctacagtgtactttacatataataaataaataaatacatttaaaaaaaaaaaaaaaaaagagcactggctgttcttcaaggggacc

SEQ ID NO: 28676 - DNA, 1165 bp, Mus musculus
tctgtgtgggtaggaggtgaagggtgaattgagtcaaccagagccaaccaaccatcttttgactataatgaaagtcaatggattgtcttttgggacacaaggaccttaagtcacagcacttggttgattttcttgctcttgggcacgactgcatttctgagtgttctgcagttgtccttgacttgcatgaacctcagtgctctccctccccagataatatttatactctatggtaaggagtgtgtactcccaaggcctgagaaactgcaaaacctgcatgattacaagagagtgcaagggcaatagggtgaagtaagagctggggtgctgattcagaactggggtccagagaagaagagggggtggggtaggtggggctaggtttttgttttttggtttgtttgtttgtttgtttgtttgactcgagtttagttatgcagcattatctggcttcaaactttcaatctacctttagcctctggagtactgggatctaggatgtacaccaccatacccagctaattttaccttttaaaaaattttatctaattagttttgagacggggtctcactatgtagctctggctgggctggctggaactcttttttttttttttttttttaatagatcaggctgactcaaaagtcacaggttgctgcctgcctccgaagtgctgacattaaaagcatggactaccacattgcttttaaaatttattgaaatactgtttgggactagaattaaagatatggtcttgtatcctgggttgatctccatctattagtcttcctgcctctcatcttcccaactactaaaagtacagacctagtccatcaaccacgcccttggttggagccagtgttttaaaggagcatgaaggattttagtatggtggagtaagaggatccctaggattggcgagaaatgaacaatgtgggctattattacaacccaactaaactaataagggttcaggcctttgtgcgaggttcttccagctgcttataaactaaggagccaatcaattgaagccaagtaggagaggcctcctccgagggataaagaggatatggcctattgcctttgtcgattggtcaagactccctatccgtcgaggaagcgtagtgctgcggccaattgacgtggcgttactaggcgtgttgc

SEQ ID NO: 28677 - DNA, 1189 bp, Mus musculus
gtgagctgagtgctagcttgggctgagggggagctggagttctgtgcttctgagacctagctgaggagcagaggaaggaaggatgcaaactctgacgtctttcactctcagccatcgtcgttcttgtttttcaggtctcttccactgtatttagaaacctgtttgagctggatccatccccctaaccgcgaagccttccttgaggagtttgggacttcggtgttggagtcttgtgtcctttagcttccttgtttccaggatcttgaactttggcctctgtggactctttccttggggagggttttagatcttcttttttttgttttcttctgccttatcctctttggagagtggctggaactgattgtttctaagtaactcttttgctcctgaggctggtcctgtgaaccttgatctacttgctaccagtctagttccagagtggttccatgaacaaatcactgtctgctcatggcacttttcttccttccttcctttctctcttgtgtgttgagtaaaatcttctatttatgtcttatctgcttactacacatagttgaatgggaaggaaggctcatggcaagctagttgggtattggctgtttaagatgctctatttccaacatccgtcttctgtctgccttccctgtctccctaactcccccttccttcccattgtctttttggtaggttggattctggggactaaactgcagttcctcataaaaatccccattcctacccttttcccaccctgccatctaccgtaagagcttgagacacaagcctttctgagggaaaggctatgttaatccttctggaggagcagttttaagttactaatttatccttcttaagttactattaaaattttgaattgcttattttaagttgtatgtgtgtgtgtgtgcccttggaggacagaggcaggctgttgtgaaccacctgacatggctactaggaatccagcctgtgttctctctagctatgttatctaaaagcacagccaacagccctaggaacctatgctaggtgacagggaagaaagttaggtctggggcatgatcttgacaggcctcctaaggaagagtagtacttgatacttaaggaggtgaggacatgtggtacctggctttaatcccagcacttggaaggcagaggcaggctctacatagtaagttccaggaca

SEQ ID NO: 28678 - DNA, 1405 bp, Mus musculus
cccggactgacctgggagccccgttctgtggattaaagccatcggtcagtttctactaggcagtcccagcctccctccagcagctctcgcaggtacctgggtgtgcccccagatcggcgctggggcgctccccaaggactccaaaaggcgcagacacaagcagcagccccagaatactcaacacggggccagcgccctccatgcctggcccaccagaatcgcacgccgggtaccccgcgttccagcgctgggcctccggccgtagtgcgcacgcgcaggagaccacgcctacatcgggggggctgagtcccttaaggcggccacgcccatctcaggatgggtttaagcaatatttgcataaaccacgcccacctagcgttcctacattaattaatgacctatctatttatagctttcttaaacaattatgtctccagaatctttcaggataaagtatcatgcctaaaacaatggctcattgtttttctacctagagagaccaattttctcaccataaccaaaaaattaagcctgttgtagagtcataaattagtcgcgcctagaagctaaggcagctcgctctgaaggcctgtttcctaggctacatacgagggacatgttccttatcctttcgcctaggggaaagtccccggaccacgggcagagagtgccgcgtgcacacgcgcgtagacttcccccgcaagtcactgttagcccgccaagaagcgacccctccggggcgagctgagcggcgtgcagcggggcgtcatccgtcagctcacatagtgacgcaggcagtgcgacctggctcgcaccaaccacacggggctcattctcagcgcggctacacttttatttatttatttttgtttgtttgtattttggttttttgacagggtttctctgtgtagccctggctgtcctggcactcactttgtagaccaggctggcctcgaactcagaaatcctcctgcctctgcctcccgagtgctgggattaaaggcgtgcgccaccacgcccggccacttttatttctatacaaccttcagagccagatgtgaatgtactaattaggaaatcaaggtcaccctttcctaagaaaagaagaaagaaaacggagacaaatctgaattcctaatttattctttaatagctgtaattctttttttagactgctagtccaaagagagcaagactgtgggttttgcttttttgtttttttccattttactgtccgagcctagtcacttgttgctaggggaacttgaggaagtgaatgaaattaatgaatgaatgttcacagcgactcaaaaggcaaatatacaactaggtccttctgggtctcatgtaacctgggctggcttcattctcatgtagctggagctggcctagaactcctaaccct

SEQ ID NO: 28679 - DNA, 1210 bp, Mus musculus
tgcactagggactgtggttgggagcatggctgccctgtttcacaggtgaatgtgaaacctaggacctgatgctctttgtcgtgcgctctgtccccacacagacccttcagaagccaaacccagacctgaagcagcagctaactggacactcaaagcgggttgctggctctgtgactgagctcatccaggctgctgaagccatgaaaggtaagaagtagtgagagacaggagggaagatacgttcttgtcatggtccaatctctgcttcctggttggctctgagctagcctgtgcttctggtcctcatagatgaggtgttgctaaatgaactccccagtgcctccgagctccctgccctgcctcagcctcctctcctgccttcgtcccacaggaacagagtgggtggacccagaggaccctactgtcattgctgagaatgaactcttgggagccgcagccgccatcgaggctgcagccaagaagctggagcagctgaagcccagggccaaacccaaggtcagggctcctccctccccttccgcctgtcacagcggccagaggtctccacctctgtccctttcctttccatgaccctccccccaccccgactccccatccctatgtaaccttctcattccaggaggcggatgagtccttgaactttgaggaacaaatcctagaagctgccaagtccatcgctgcagccaccagtgcactggtaaaggctgcgtcagcagcccagagggagctggtggctcaaggaaaggtcagtactttagcaccagaggaatgaggacaaggcgctcacacccttagcctcacaagtcgctctgaagtagggacagcctaggtctaagaggactcccttcttccttctgcaggtgggcgccattccagccaatgcactggatgatgggcagtggtcgcagggcctcatttccgctgtgagtgtctaacacccagggtgtctttccgagctgggtaaacctgaggaggctggggtggaatggaccagagcaagaggcatactctaatcttaactctttgtccccattaggcccgtatggtggctgcggccaccaacaatctgtgtgaagcagctaacgcagctgtccagggccatgctagccaggagaaactcatttcctcagccaagcaagtagctgcctccacagctcagctcctggtagcttgcaaggtcaaagcagat

SEQ ID NO: 28680 - DNA, 1178 bp, Mus musculus
tcacatgcgcaagcagtaggaaggaagaatggggttctgccccagagggcactgttagagttacactcagatttgatgtctgcttcctcccaggctttgcacacccagatgctcactgcagtgcaagaaatttctcatctcattgagccgctggccagcgctgctcgggctgaagcctcccagctgggacacaaggtacgtaaggaatcgtgtgaggagctgaggagataggttaacagtacctgacactgaacccagcgtctgtttcaggtgtcccaaatggcccagtactttgaaccactcaccctggctgcagtgggtgctgcgtctaagaccctgagccacccacagcagatggcacttctggaccagactaaaacgttggcagagtctgccttgcagttgctatatactgccaaggaggctggtggtaaccccaaggtagaaaggaggcccagggggcggggagaataattgttagcacaatctagaaagacaggagctaaaggctttcttccctcatgtccccatagcaagcagcacacacccaggaagccctggaggaggctgtgcagatgatgacagaggccgtagaagacctgacgacgaccctcaacgaagcagccagtgctgcaggagtcgttggcggcatggtggactctatcactcaggccatcaaccaggttagcgcctcgggtacctgcggacacagggtaccccagagggactctggcacagaagcagtgaccctgacagtctttctccgtttcatccccctccctcagctagatgaaggacctatgggtgacccagaaggctcattcgtagattaccagacaaccatggtgaggacagccaaggccattgctgtcactgttcaggagatggtaagtttggaacatgaggagtgagtgcccttagggagctgagcttggtcagaacttcacttctttccttatcaccaggtaaccaagtcaaacaccagccctgaagagctaggccctcttgccaaccagctgaccagtgactatggccgactggcctcacaagccaagcctgcagctgtggctgctgaaaatgaagaggtaaacatggaagccatactgccttctctcaggagattccagttcatggcccttgttcccctggcagctcccagggctgtcccacgctccctc

SEQ ID NO: 28681 - DNA, 1102 bp, Mus musculus
agctctcttactcccacacaaggactttttattgttcccagcaggaatacttcctgcagatctacctcgacttcccctctcttggtgccttcacatctgcagtctcgggaggcccttctgtttactcgtgcctcacagaaatctagggactccctggccatcccttaggcacaccagaggcattccctctgaccactcctggctactcacgtgtcacagcagcccacaccaacaggatgcagacaggtacaatggaaacagtccttgcggagccaagattcacccagagtgaagtatttaccctcgtagtggcagggagctaggggaggatgagaatcactgtgttagcagatgagaattggaagcattggcagcagcctctcctggtctggggtgggagaggatccatgcatactacccctccatatagccttcccattcacaggttgaaggaatggctgttctaacacagggttgggcatctctacaccttcatccctgccctcatctttcccttaagcatcagtccatcttaccttgagcttggaagtaacacttgctgctaactcccgggtgctgtaggaacagagacaccaccaagcagatggtcctccagcctccgaggatccccttggcttggccagcccagagcatccttagggccattcctgctgctcagcgctctcagacccttcctggcttcggctcagactcctctggtcttcttacccccttgctcttcttgccttgctccttgactcctgagtttctctctccttgggctcccgtctcataccatggctgggaatgtttataaagtgaggaccctggccccctgctgaggagagctggacaggctggaactctgtttcctgaggtgagggcatgaaaacaagaggtccagcttttaacaagctgtgagagcggattcctgcccccacacagccaggaggagggaggtggccgtggaaggggcgctggactgggcacttccacagccaggagggggagggttgaaggccccaggtggtccccagatctccttgacctgcagagaggaagcattccatcaaccctccctccaccaccagcaggggtgtgt

SEQ ID NO: 28682 - DNA, 1857 bp, Mus musculus
aggagagcaggccggcatctggaatggagactgtgtttccttcagatgccagggcagggtgtccctgagacatcggaaagatggcagccctcagcattgtgaggtgaggggttcatccaaaagcaccccaaagataaacttcgcatctcaccccaagtggacagcagatgcaagcttgtcctgttcctggccatgcttctgccctgtccccccttaaggagaagcatctccaaatacccaacagaagtcaccccactttcacagagatgccccctctttcctcatgatggggcaaagccttccaaggtctgcatttctgctgactctggaggagtgctggggttcacatggtgactgctcactggctggctgaccttgcacaggtcacttcacctgccaccctgctccttgtctgtctattgagagtagaaatgccagctcatgggcgacagctcatgggctgttcttagcgccacctttggcccatggccctcagaaaatcgccactgcttgaggctaaagcacaaagacagaaatgatgtcctctctggacaacagcaagtagccgtgcccagctgaaggcttctgctgtggactctccagaccaacttctgtctttcacatgtatgctccaaggtatccctgctgcctcctaagacctgtgctgtcctgggagcatctaggttgaagggtgatgttgatcaagctgcttttcccacttccataccttgggaagcgggatcgggatcatgctttatcttcccaccccccaccccccacccccaccccccccacccccgctagcgttaggactctgctttctcttacttggattctgacttttccttcatcccctcatgtggacttcaaggcgcctttgtgaccctggtcaaactggacttcttttgttctcctgcccttgcggaggccccgaggtccagtgcttcccttcctgctcctaggacatttgttgtggtttgcgctcaggcttgcagtccccttcatccctcgctttgctccccgtcacataccacggacagacacagctcacacctggtgtgcacgcacacacacacctcccgcctgtcacctcttccttcagcagctactgtcagtacacctccaactccttagctgccttcagataccttttgccttggccggggatgtagttcagtgacagtgttgacttattatttcagtgtcccaggtctcaccccaaacacccccctccaaaactgagtgggagaaaacaggatttcttttcagatggatatctagataaaagcaaaggagaacttagcaggggcccccaggtaggctctgtaggggcgaggaggggagagcttgaccttcactccttgctgtcttggctgcggaaggggtcagacaggatcaagcttagaagtctgcttagtagtcagctcttaccactacctttgggggatcaacctgaaggctgagcatagagcgttttctgcagtagctagagacaatgcaagtgaggctagaggtcccggaggtagaggaggtgctggaaatgagactgggcggacattactgagccacaccaaactgcgaagtgagaaccagtctcctgaagcgcaggtgaaggcctgtggctgtggcgacttctggaaggaggcaaaggctgagcagaattcctttctgaggttatagggcagtggggacctggctggtggcctgggcagtgatgtgtgcaggggcatcagtggttagagcccagcccactgagtcccaggggggtagcctttggggcaaggggcaggacaggttcagggtcagggttggcacaggccacctatgcagggacaaggaaaacatccgccggagctg

SEQ ID NO: 28683 - DNA, 1125 bp, Mus musculus
ggtgaagagtcatctgcttgttctggttcccgaccatttcattgtgtctcatccccatctgccacctctgcccctgaacctctgccccctcacagtccccgctgtcttcccagcgaggttcttgggagctctcagttctctagcatctcagatacccctgaggctcagggtctttgtctgtttccaccccaccttagggaaatgttgttgccatcaaacacgtgaataagaagcgcatcgagctgacccggcaagttctgtttgaactcaaacacgtacgtacttgggtatgagtgggaggtgagggtggacagggaagaggaaatgaggggaccatggttccctggctaacgggataaggggcttatttatcactgattcccagttgcaggtgtatgtaagagaaatgtcattgctcacagtggtatttctgtatttccgtatttatttatttagagacatagtctctctgtgtaacagctctggctatcctggaacttactatgtagaccaggctggccctgaactcacagagatcctactgcttctgcctccccagtgctggggttaaaggtgtgcgccaccatgtttggcctctgtatttaagctttagggctgcccattctcttgttttgtttgtttgtttgtttgtttgttttgttttgttttggtagatgagagatgtccagttcaaccatcttactcgcttcatcggagcctgcatagaccctcccaacatctgcattgtcaccgagtattgtcctcgtgggagcttacaagtgagggacaggggtaggagactgtggtagggtgggggtggaggttccaaagtcaccttgtgtcaaagggtagcccgtgagactggggacagaccctgatctctaacgtgtcactgtcaggatattctagaaaatgacagcatcaatttggactggatgtttcgctactcgctcatcaatgaccttgtgaaggtaagtcttccccgccatgtaaaatgtctcagtccctcaatcttcgctgcagtttctctcctggatctctaacagccaagctctttcccagccctctcctcccgtgactgggtgatgcagcggtcctatgtcccgagaggttcttgtcctcctg

SEQ ID NO: 28684 - DNA, 1141 bp, Mus musculus
tctgcaataatggcaaacgccctgtacctacccacgtgcactaatgtgagacaaggcccattagcaaggccccccttgcccttccagtaatagttaattttgaataattatgtattgtctgaaaacggatgagtgctagtttttgtttccttgttttaaaacaaccaacaataacaaaaatccacacaaatattttgttttgctttgtttaaaagcaaggcatgctcgtgttgactgtaacagactaattcaaattgtcaaagctgctctctggtttcatgttggagagcaatctgtggcatcttggtgtcttttggtttggttttgcttctcctcaaccattctctgcttttggggtgagtatggggttgtgtcttagtcttgtatttttaaatttgttaaccagagggcagcccatgggggagggggacagattatttccacattccactccctaggtctagtttagcaagcatgtccccacctggcgttcttaggaaggagtatagaaacgcctcgattaacaacttactccttcttgagagttgccttttctctccacctctgagtgggtccagcctgtgatggaactcatgaaggtgggtggacgctgcctcatccctctttctaggaagcactcaacatgtgactgtgactttcaagggtatttgtttgtcatttgctgatttggggagaggggataatttctaacttctttcattggtacatgaaaaaaagtatggcacctttgcaatatatcaaatggattgagttcctaatttaaaaaagaagttctttcttgcccttgtcagtcattttcttatatggttagcatagatttacaacacactatagtgttcctagattcagctgaagacctggtacacagcgctccttacgggaatggcgttaggaaacacatcatgggtgacgactgctgtctcctttctttttcttttttatgtctttttttaaagaaagaaaaaatttctttctttctttctttctttctttttttaagagttaactttactcagtctgaatttctggaaaaaaaaaagttgaaagtaccttaagataaggatatactctacatcactttagagagtctaggaaaatccagtggatggaaattataaga

SEQ ID NO: 28685 - DNA, 1207 bp, Mus musculus
tcgggtaggcccaggtctcatcagaaagtagcaaggactcaaggaggtgggtgaatggaagcagttccagctgcctccgtccaagcctgtctctgtcctcacctttaacgcaggagggaaagcctttcctgtagctgtgccaacagtagccgtgctgtctagtgacataggcagtgtgtgctgtgctatagtacagaacccaaatggccgactggccagggcagtggcgttgccgtttctaatttgcattgatgtctaacatgtgtgtaataagctaagcccatcgttagcagtagctctggctcggacagtagggacagaggaaagcaagctgcctctgtggctgcctggacctgctgaaggcgcagaggctctgtgttgaaagctcctttcccttgcagattgaggcctgcaataaggaggcagagaaaatcgagtccctcatcaactccgacagccccacgctggcgtcccacgtcccactctcggccctcatcatttcccaagtgcaggtctccagcagtctcccgtcatctgctgttgtgggcaggcctctcttccactccctgctcctcctcctcagcctgggcctcaccgtgcacttgctctggactagaccctgaccacccacaactgggaggaactgcaaagccttcctccacccagccgtccaccttgtgaaagacattcaggactgctagctggtgaccaagcaaaggcatgtggcacctcttagcaccacacagtatttttttcacctgccaatattagggggtttgccttggtttataaaatggtaaattagactctcccaatataatgaagatgatgcctcttcctggtggatccctggccagttcacactcgctcagtagatggccccccttccccaaagcaaatttagcatccctgatcaatggcatggtcactttataggaggcagccccctttgtccttgggtgggtgccctggtctcctcagagttcctgtgagtgctgaggccgccatgtgcttgtttctgtgtctggaggctgagggctcagtgaaaagccgctacctgccatgacagggcgggccggaggagaaaaacatcattgaattctcactagctcataggctgactccatagaaatgtaaggcaggactctactctgcttagcaaaagcaagacgaccaagtgacactcgtgcctgtctcacacttgggc

SEQ ID NO: 28686 - DNA, 2047 bp, Mus musculus
tcaaccagggcttcttcgaagagaatgtcccacctccaaagaagtagctctcgccagcaagtgtaacgagatggagatgcatatatgaagtgcctatagaaccacaaaagcaccagcgagtgtctgtccccgtgggtgtgtgtatttatgtgtttacctgtgagcatctctcgtgacagctacacctgagtaccttctgattgaaggatggccatctgaaacatttgtccagagggctagctaaccacaattgggtaagattagttctgaaatcttttttctgtttttgtttggttggggttttgtttgtttgttttgcttttatttttgttttgttttgttttttcaaggcagggtttctcggtgtagccttggctgtcctagaatttgctctgcagaccaggctggcagagatgcacctgcctgtgcctcccaagtgtgggattaaaggcatgagccaccactgcctggtttttgtttttgctttttaaagcagacttcatttgaaactttcttccttctaatatccatccttgggctttgaggattctgaatatttgccattctcagaagtgaggtcctttcctaggcccttcctgcactgtaatcttcttgtggtagatactgaagggatcgacacgtcctttaggtgtgacataaagcagctagtgttaaaaacatttggccagctgcatctcacaggaccagtgagatctctcattctcagttggaagacatgatatcatcctgcatcctccaggattccctaatagaactgccaaagagcaaatggagatggaaaaaagagccttacattcttgaagtttttcaacctttaaagagcaaataccacagccactagcacctctcacacctcatatgtgggttgtttgtttgttcgtttgtttttgttttttgtttttaagtttcattgctcacagccctactctggctcctggggggtggggttaggtctggaatgcagccccgcccccctattcccccagtcatctcgggtgaccctcactctgtctgggctcttggccaaggccttggactatgatgaagtcaatagagcagaggtgagggtgagcttccctggaggaagccccaaagcctctgtccttccccaactctgcaggcggtgaccacccaggcctgtccccagcagctgtggctacagctgcgccttggcttcctcccggaatgtgtgacaagcccagatgctcccgggaggaggcccaaacaaggagattaggaacgctaatttgatcctgtgttttgcctcaaactatacacagtttcctctgaaaaaactgatttaaccacgtctgccagggagggatcaagccagaggttcaattgtggatccctgaaatggtggtatcccctcctgcaaggagataaaagggttgttggcctaatgacagcaaggctggctggtctttgttacactgtgaacagtcccacactgcgccacttggttcatccagggatagcaacaaacaaacgagacaataaaatcctttcctttttgtgtaacttcttcctctaatgcgattcgattcgttcttagtttatggctgaggtgatttgggactctgagcccatcttgagccacttcctcctccccagtccctcccctggggaccacactgcctaaatagctacttttggaagcatgtgacctagtagctcacagatgaatagactacctgatccgagggcataccagggacaaggaatttgagctcagacacatggagagaatttactggcggaactgaaaaacgtaccaatggtgcgagtttaaaatagaggcccagcaaacctaagctatatgttctgtagttcagttattaatggtaaaggcaggtgagcctagaatcctagctattcgcaagacgatgggaagttcaaggccagcctggacaacttatagagaatctgtctgaaaggaaggtaagaccgttgattgcaaacctgaggctctaggggcaagtaccatgcttcatgctttgaagaccaagaagctatcttgagcttc

SEQ ID NO: 28687 - DNA, 1211 bp, Mus musculus
ccagtggttgtgtgttgagtagtcgggaagagctcacgtccctgatgcccacaaatggctgttcctgatcactccagctcccgatgctcggcgactcccagcttcccctagggtggcacttccgctggctcttccttctgctcccagtcacgagttgtccccagggctcctcccctttgccagctgattgggcagctcccgtcttctgattggctgttctttttgtggctcaccaacccaaccggatatagaagcagggtttccgcttccaccttctccctcttctcgctcgtcctccggtagcagccgccagcacagtgtcggctgctgggcggggtgtcggcggatcggtcggttggtttcggcttcggcgtctctgcggttgagttgggctgtcatggccgagttggatccattcggcgctcccgccggtgcgcccggtggccccgctctaggaaacggggtggcgggcgccggcgaagaagacccggccgcggccttcttggcgcagcaagagagtgagattgcgggcatcgagaacgatgaggccttcgccatcctggacggcggcgcccccgggccgcagccacacggcgagccgccgggaggtccgggtgagagggcagcggcgttcgggcgggaggacttgtgggcacactcgggtcggtgctcttacgcggaacttgggcttctggctgaagctttagaagcgcaaagaggaagtgagaccccgtctgggtcattgcacggacctccgctgctgcagactgccggcttctgagtgctgctgggccggggcggaggggagcgcagatgcaccgactgtcaggatccgggtccgttctgtccaacttttcaccaagcccttgctgtgcctgaagcctggtctctgaagctgccgcattggcgcagtttggccagacttagagacatggctgagtccactcggaaataattgcttattaggaaaaagtgagagtagtataaactttgggacacacgtgcaaacaaaaatgtcaacgtagtttagcagttaaagatacgcaaaactttggattgtggggaggaagataaggagttcataaagatgggccggctgcggagaaagaaactgacccagaaggataggtgttacattacaagcattgcatacattgttgaggctaggactcctggcgctattctttggaaacagctttggaaggaattaa

SEQ ID NO: 28688 - DNA, 1219 bp, Mus musculus
cagccatagagacagaccaagccctgaaccaaacctgtactccgccatttcacagagcagcctgggtacctgtatctaggagagctgggcacatctgcccttgcttgtggcctgagctaggggccaatactctctggaaaaccagaatgccactaagtcaaaagtcacttactttgtagcaagttatagcaagacagccaccagattgctcaaagggtttttttgtttgtttttttttttttttacattaaaccaacatattgtgttattgcttccagggcagcagaagaagcctttgtaaacgacattgacgagtcatccccaggcactgagtgggagcgggtggcccgcctgtgtgactttaaccccaagtccagcaaacaggccaaagatgtctctcgcatgcgctcagtcctcatctccctgaagcaggcccccctggtgcactgaagagccaccctgtggaaacactacgtctacaatatcttaatcctactcagtgaagctgttcacgtaattggattaattatgttgagttcttttggaccaaaccttttgtctttagagttgatcattgtttgtgattgcatgtttccttcaactgtgttctccctggcattcagagacgagagaggaagaggaagggagaggagctcccgacagtagcctcaacctgtgcttttgtgcattattctgagaataaatttctgtttcaaacaatgtatacatgaagcatctttaattgatctgaaaatggtcttgcagcttgggggacaggtttaaaggggtgagtgattctcattgatttctggggctgagaagacacagccactgagtgtccaccgttctaaactatagtaactccatatgtctggtgtttgggggttgagatactagagagtgagtctagggtcttgggtgccatgcatggaacctgctattagcctatcagccactctctttaccttctgaaataggggtcaaatttaagaaccaggttaaaggcctctccataaggccttactcctccccacgaacctccgtggccccagaacatggcccttggttttggtactggctacatgccgtttctggggtttgcttggatatgtgacagttttaaattttgatattatccagatgaaataaactagaggacaaagtgatggctgtgagttccaaggctagatcataaagggcagcacagctggcatgttac

SEQ ID NO: 28689 - DNA, 1196 bp, Mus musculus
tgatagataccatacctgtccgtgggcacagctcttactttgtcaacaaatgggaaaaaggacaaggagatggctcactgggtcagaggtttggcttacaagcatgaagacctgagtcggatccctaagaacgcacataaaaaagccagctgtggtgctgcacccttgtcctggccatcctgcttaattggtaagcttctgatttggtaggagagactgtctcaggaggaaggtggagtacagttgaagaagacagccagtgttgccccctgacctccacatgtacacaggcgtgcacatgtgtacacaggcgtataggttgggagtaagctataacattgtataatatgatgtcatttctgtaccagctagaaagtatgtaaacctagttccttatatattcttttccaatgtgaggttagggtaccttgacgttttctgcctttgattttttattataatggacacttgttgttctccctgtgtgtgtgtgcatgtgatatatgttcacacaagtgtgcacgtgtgtgtggaggccagaggttatactcagtgtttttctctattgcttatgatttgaaacatggactctctcactgaaactgcagctgctgatttggccaaactggctgggcaaccggcccctgagagtttcttgtcttcccacatgctgcagctgcgataatgggcaaacactacctgcttttttagttttgggtttttcaggctttggttgtttttgtttttgttttgtttttgaggcagggtttcctgtgtagccctacctggcctggaatttgctatataaactaggccagccttgaactcacagacatcctccttcccctgcttcctttccaagtcctaggatgaaaggtgtgtgccaccatgcctgattcaaacctgcggggttttgtttgttttttgttgttttcgtttttgttttaaatatgggtccatgcttataccaagcagtttaaggggtgttggttattaaacagtggcaggtgtggtactgttttctgtggtcttcataaataagccttcaagtctgaaaagttacttaatagtaagaatgctaaccctgccggacagtggtggctcacacctttaatatcagcacacggtctctgagtccgaggccaggcctggtctacagagtgagttccaggacagcaagtgctatacagtgaaaa

SEQ ID NO: 28690 - DNA, 1223 bp, Mus musculus
ggctggcaatgaggtagatgaagaagaggaagaaggtgatggtgaggaagaggatggagatgaagatgaggaagctgaggctcctacgggcaagcgggtagctgaggatgatgaggatgacgacgtcgacaccaagaagcagaagaccgaggaggacgactagacagcaaaaggaaaagtacccttaagcaccgtgacctattcaccctccacttcccgtctcagaatttaaacgtggtcaccttagagtagagaagcagaccccgcccacccacagcgggcaatgccacccacagatatgacatgtgctctccaccaccccaccaaaactacaacatgaattggcaacatgggaggaaaaaagaaccagaacttcccaggccctgctttttttcttaaaaatactttaaaaggaaaatttgtttgtattttttacattttatatttttgtacatattgttaggggtcagccatttttaataataacgggtgaccaaaccagccttcagagcgttttctgtcctacttcagactttacttgtggtgtgatcatgttcattataatctcaaaggagaaaaaaaaaaaccttgtaaaaaaagcaaaaacaacaacaacaaaacaatcttattccgagcactccagtaacttttgtatatgtacctagctgtactataagtagttggtttgtatgagatgattaaaaaggccaaagataaaaagatttttttttctttttctttctatgaagttgtttatttatttttttggcctgtttgatgtgtgaaacaaatgtccaacaataaaccggaattttattttgctgagttgttctaacaacaacaacaaaaaaaaaaaataatttgaacaacttttaatctgtatctcttgaggtgggaagataaacctgtaatccagaccacaccttttgctggtggtctataaaggaaacagaaggaggaagcttgctctcactctatggcaaatccattccttcattggcattaaagcctatttcgagattccagcttatactgaagacatccaaccttgtgtcatgaacaaaccactggactccttgtctgccattagtagacagccattatgtattttttttcttacatattccacaagttcttttcctctggagaaccgtgactggtgcactcacggagtccaattacttgctgcgatgtcttagctttttttttttttttttggtaca

SEQ ID NO: 28691 - DNA, 2439 bp, Mus musculus
ccaagatcttgattttcagttgttttttgccaaactagtgatagcaagtcatgtttatgaatttaaacaaagaacaaagtttattaaaagttactagtgggttgtcttgctttgttttgtttttgcatttttgttttgaagcaagttctcacgtacctgaggcttgcttgactcaggactctcctgcctctgagagttggattacggcatacaccaccattctggtttaggatgtgttcgtaaagaactagaatgcaaagaccatctgggaggaacaggagaactgggcgcttcactgcatgagacatggcttcagtgagcgtcttccctcttgtctttcagggaaaccgtacctgcccaatttgccgagctgatgcttcagaagtgcatcgcgattcagagtgaccagcctaagagcacaaatttagtttgggtgttcctcatcacatgtatatatggactatccatcgaacttaacctgtgtggcttccagccctccctttaccaaaagggtcaatggacctttctttgcactgtgtgacttaatcaactataaaagcttacaattagtcttcacaattatgggattgttatactaactgtgtgattggaactccaaagaccttttctttagcttaattttgtgtgtgcactaacattccctggtttttgtgtgatcattccgagtgttgctgcaagattacagtggacgtgatcttttagcatgtgcttttataaaaagtggtagctccagatgatatagcaatctaccttatatagagccttcagaaactgtgagtggaagtgagtgaagcgtatgactgctggtgatcagtgaatctgtgagagaatgtgtgcaactacatgtgtgggggcatggtagctactgtgtgtgtgagatcctatataccagcatgtaccaagaatgtgtgtgtagttttaattatgctgcaatgtataatctggtgtgttatttaaacagcactagtactgtacactggttttcccttgtgtttgctgttgcacactgattgctaagggtgcatccattctaagcattgaatactccatccccttcccgcccagtgaatggaatgagaaaagccttcttcctttgcttcaggcagctgtccccttctcttccttggtgatcctgagtgggtcacttaaggaaaaagtatcagattctcactccatgacctgattttttttgttgttgtttttttgttttgtaattttcaattctattgtaaaagaaacttaagtctccaacttgctgtttccaaaaagaaggtgcaatatcatatacatcattagcaatattagcatttcaatcagcgatctgagtgttagttgtttttcctttacatttctagtagtttccttacagaaaggacctgcatttttattaatgtgtagatttatggtctgatctgaagatgtttgagtaatatatttttaagaacaccactggtcctgtaagtcttgcctccttggcttctactagagcaaaatctgctgccaagtcagcctggtttctggttgtgttcttcactcaggcctccatgggcaacaatggtttcaggagaactgtttgtttctgtgtgaattgagttgacacactccagtcctgagctgctctgctgccgcttccctcagttaaccttctcaccgaaaccttagttcaggatggatcaagtgctgtgacagtgacagctcatttctcaggcctggtttgctttgatgtattactcttcttcttttaatttatgttagaacgagaaaagcttaatacaacaggtgcccagaatacttgcagtgtaaatgaagattggatttttgtataaaaagataatgctgtcaaacgggaactgacctttattgaatctgaaatgatacatagctgtgtgtgtatatatattttttaaaaataggttcattgaacataaatcagattgtttgaggtcatttttcagcaacattggattcctttctcctcggtgtgctcagccttctctgcagcctctgtgagttttcagcacgtgtgcagccacacaggctgcaaccttccactcgcagccgctgctgacacctggctgccgacctcactcagctcacagtgggctccaggcccgtttttactcagacagggacagtgttcacctacttgatactgccgtgtttcttaccctcccttgaagtttctctaagctcatcacagcctagagttcaggaaagttaatccacacagaagcacaattttgtcctcttccagacactgttgcctctacctagttagacaaataggatttgacctacattctgttgcccctaggtttgtgttagtgtcagaaatacttaaacagtggtaaatgcacatgttacttttaaatcattaggataactcctgtctggttcctaatgaataaaaggtgtgtt

SEQ ID NO: 28692 - DNA, 2323 bp, Mus musculus
tggccattcacatttctttcttagcatcctcatgtacatgacattatagctgccctttgtcaagattttatccctgggaaaaatgagccatccagtattttccattcagtgttctgtttttgtttgagacattgtctacctacatagcccaggctggcctagagctcatagtatagccttggctgcccccagcttaagatactgctgtcttaaccatccaaaatgctaagattatattccgttaatttcaaaccattccccccaagaagggggcagctcagcagaattgacagcttgtaccttaaaggactgatgaaagatgtgagcattcctttagcttttaggatccagtgtgtgtgtgatagtgagtgtatatttaaacgtaactttgtaagacagagtcaggaatgtagaatcagtctgcagcagtgttatctcttttaagtttttataccgaactcttcggtctgagttccatttagtctctctcttgtttttttgtttttgttttgtttttgagacagggtttctctgtgtagccctggctgtcctggaattctttctgtagaccaggctggcctcgaactcaccgagacccacctgcctctgcttccaagtactgggactaacggtgtgccatcactgcctctctccccttttctttctctttgtggttctggggagtaaacctagggtcacagggttgctggcacagtgctcttccctctgagtgacatttccattctccagcctttttctcttgttttccttgttttgttttgttttctaagtcagagtttgggggatgggttggggaagacagggtattgctatgtagccctagctgacctggaactcactatgtagaccacgctggtctcaaacaggtccccttgcttctgcctcctgagtaccgtcattaaaggtgtgtacttatccctagctctatttttttcttgttttttaattagcttttatttatgttttaacttatattggatctcagcttcaaatagaaacaactctaaattatttttagaaatggttggaagtggggtatgacataggacatcagaatacagttatcaaaatatctttgttttctcaggaaaatttattatttgatgaaaatcataagctaaagctgattgactttggtctttgtgcaaaacccaaggtaagtatggaaataaaaatgcatttatgtctataactataactataaatatctatgtgttatttttcacttaatctttattgtttggttatgtccatttagaggaatattaaattttatccttagcattaatagttttataagtatgctacataattctgagatggaaccaagattgtgagtccccccagggaagctatgagaatctcgagtgacaggtaacatgaagccattatgatacgatactgaatcatgtgcttgtagtttgagtattttgccactagatgatgcctttgttcatttgtgtacaagttgagaattgagtgtgtatctagtttttgttacccaagtggttatataactaggggtaagttatacgccgaggtgatcctctttccttgtgaaagaagaggggagtggatggccatgggcttctacagtcactctgctcaggagtcccctcatttgcactacgtagtaagtgctggtgttcttcagcgtaacttctctttgaggtgactttgaacttctcagctctgccgctgccgctgtctcctgtgaggctgctggttggaggcttccttctgggttctctaatgatggcgctgcgctgctgagatgagctgtctgtactcattaagaatgttgaaattgcagactcgtctcagccctttgtagtcccatgattatttcctgcccctcagaactagcaaggtgcagagggaagcagattttgcctcttcagttctgaatgtctgcttctttctgattcttctcccactgatgtctattctgagatcaccagtgggggcttgtgtcgggaagcagatgattcagaaggcaggtttaaaaggttttttacagacataaaagcttataaagatcatcctttggcatgtaagttatattctccacaggaggtagtggggatgtttgtagaagactcccattagcttttttggtttttggtaatggctgccacagattcaactcatatagacagcatctaaaaaatggggaggtttgggaaagattggcctcagttctgtggggctctcactgcgtcaccacggcctggctcatttgtaaacagagtcttaaggtttcttgatcctttgcctctggtagagctcagcccaggagtgc

SEQ ID NO: 28693 - DNA, 1101 bp, Mus musculus
acatagacctgtatgcagacaaaatactcttaaacataaaataaaaattaaacaaataaagttttgattgagattgcataatgtatgagtgggggtatatatccatgccatggcagggtttggaggtcagaggacagcttggtggagtgagttctttccttccacctccatgagttctggagatcaaactcaggtcaccaggactgcagggcaagcgcttttacctactgagctacatgctggctcctggtaggtgctcctcagtgtcagaggttatgtcctttccagcttctgctttggtgagattatacttgtgaatttgcaaacgaggtgtctaatattgctgtgtaatagtgacaagctaagtcagtcgcattccatataacctctagcttgtctctgtgtctgcttccagactttctccctgtgcttgggatatgctgctgtaaaattggaatccccatgttgttattgctaacttcttttgcctttttgaattaatagtcaaagaatctgagcctggaagatatgagcacaagtgatgataactgtgtggctggattgatagactatgaattgtgtgaagataaattattagctcccaagacgccacaggtgggtagttttattactacttaaagcagaatgcatgtcttaattataaacacatctagcccaacaggaaatcaggtctgtgcttgtaaatttatttactctctaagccactgaagacattaatgagagattattggaatattaatgagggggaagtcagtgatttccaagttaagaaaaccaagattccattctggagcacttcactgcctctgccctctttgatgaactggaatttgcctgtagttaaatagttgaaattcgcccttagagtgtttagctctgtgtttaacagtatagagccaccagaaattgtgacacagtaattctgttgccctctcaagggtctcttgtgtccttctgtgaacgcctttcctcttaactcagggcagcggcagcgatgtctcctcctctagcgttcttgtctgaagccgacttcacgtttgttgttggacttctcaggtgtgtggctcagagtttccacca

SEQ ID NO: 28694 - DNA, 1176 bp, Mus musculus
attgtcagtcaaaaacgaaggtgtgctttagtgtgtcctagttgtacattaatctgtggtgtttgtggtttctctaatgatgtcatttctccgattgtaatttatatggctttcatagggccacagtcttactctgccttacttggttacatagttggacacagaagagaggtaaatataaaattctgggttcatgcacaatcccagatgggaaggaaagtgagctgttagagatgattatagaatataattatataatcctttattccatattttaaaagctaacagtaaaatctgacacttttatactacttggatatatatagggttttttgataaaaaatggatagtagtaaaattgtcagatttgtatgtatgtgtgtccaagaaaatctatgtcagactgttatctatatactgtttattgaagcagtatttacaatgacaaaggtaaccaaccaggatgtacattgacagatgaatgtataaagaaaacatgtcctgtatatactatagaatattatttggccacaaagattgaaatctggtcatttacagcaacagggtagaattgcagggcattgtgttaagtgaaataagcctagcacaaaatgggaaattttggtggttttctctcatagatacacttacaatctcaagtaactgggcaggggggagaagttcctaacataaagaaacctgatttgaccattgacagtgtagatggacattaaattatcacacctttaaaaatagaacatgttcatatactggtaagaaaaatatgtcaaaatgcaacgaatcctttttttgatatttttataaaaaatggtgttggtcattgaggtaaaattggttttatttttcatttagattggtgctccaatagtttatagtcaacatattgtaattataatatattaaatgtataaaggggattggcagcccagtagcttttctgtctcactaggttcaggagttacttggtagaagtgggtatccaatatcacccaccatataaaatgaaaatttatattcatgttttcagaggtctataagctaaattatcttactcataacatggtaaagtttagcttgcttttctgtgctcacccttcaccctgtgacttcctacatctatcgtgccagctccaggctctccaagaactctgttgc

SEQ ID NO: 28695 - DNA, 1236 bp, Mus musculus
taaagaaacacagaaagaaaagaccaggagtagagaaggcaagacgcacaggaggggtcaccagcctcggggtgaggatgaagacttccccaggggctcaaaacccaacgcctctggctgcgctaacaaccagaagccttctaagtccctccaccatgcatcccattaccacaggctgagagaagagcggcttctcagggagagcaagcggagcaagccaaagaaaaggaagagtacagaggacggcagccatgatgatttgtttcttattaagcaaaagaagaagaagcctaagccgagtggtctctgacctggtctccgcgcttcagtgtcctggaagtgcttaagtacctgttaatgagacgctgggattgaatgctgagttccggccatgcctggagtggctgtacagagaccacaaagagttcaggtctgtgtccacaggctgttcctaggtaggaaggcaaacttgaggtagaaaattgtcttttcatgaaaacctttttaaatgctttggaaaaattacaagctcatcagatgattttatctccaatgtttgaggacttaaaagctcattggaagaaagtttattgttaagaaaagtcatcacttttttagctttttttttaagaacactggaaaaatcaatgaaaatccaagcccggctttgcttgcatcagaggctgttggaatctctctctgtacagaacagcatgtaaaatgaagctgtcaccattgaattctggaggaggtggaggagaggacatagcaaatacacaaacaaaatgtgcgcagtgtgggcttgcaggacggaggtgtgaaaggcatcctcaaacttgagtgcaatggcagggacattttgttcgcactgttaacagccatagttcaagagacagggatacataccatcaacctaacttgtcctcgtggatccttttaaacacttcaacgctctttagaatcttttgtacttgtgagccttttttacccttgtgaaagcctaatgttagaataagaaaaataaaatgcctgaaaccatgtgtaaataaatgtgtttattgttacaaaagacaaagagagctcgggtaccagagagcatagttgagtagacaggtcgccacagtcacgccttcttcacctgtgggcatagagataagtctgttttctgttaagggaagaaaagaaaaagaagccagttcctgggtctttatacccaagagtcaggtgaaaattgtc

SEQ ID NO: 28696 - DNA, 1270 bp, Mus musculus
ggaaagatgccggagtgtgaggttgcttgctctttgtgtgcgatggttattgagtgacatgggggtgggcagctttgcaaagcagcggatcccttcttgtggtcagacacaattgttggataacaatttggaagtttctagaatcatatttcataaagtcagtgacatccaccatcgccaccaccaccaccattataactgtgcagtatggcctgaggacttgtagaataaaacctaattcaggggctggagagatggctcagtggttaagagcaccaactgctcttccaaaggtcctgagttcaaatcccagcaaccacatggtggctcacaaccatccgtaatgagatctgatgccctcttctggggtgtctgaagacagctacagtgtacttatgtataataataaataaatctttaaaaaaaaacctaatcccgggtttttctttcagctccatatatcttaaagaagctggatagcatctgaggacgggcagtcaggtggatgcatggcatgaagacctggtgacggcttctcctcctgtctgcagctgaattggcccagaaaggtgtaaggctgattaaacggacatataaactacttgttgagaacaagtaggactttgagaactgacctccatagctgaaatataaagccacttgggaagtgcaaaaagatgtcttgtgttcatggtgcccttaggcccatgaactccacccctgtgagtgttgatggagtggttaataatgtcaggctctaaggggagtcatttctgtttaccacttctgttcaaagtgttatttgtgaagtctgtttggaagtcagcatacacccacaatgacatttaagcacagtctatatttttaataaacattctgatgaagaaagcgtggttttgtgtttttaatcccactttggtcatggccatccttggtgggactgttacagcactgcgactattgctcctggagtttggtttgagcttgagaatctgttaatcctgctatgtggaattatgcttcttggccaaagtcttcatgaactgcagatgactgactgcttagtgctagaaatacaaagaccatgaaagtggggaaggggaggctgcattttaaactccaatagttctctaagagtgttggctgaagagggctatcagttctccagagcaactatccatgctcccctctgtttggctaatgtatatgggttttgtttcatttgtaagattgtttctatttgatgtctatatgtgtctgcctgcttgta

SEQ ID NO: 28697 - DNA, 1221 bp, Mus musculus
ttttaaagttcagttttgtaacattttaaagcaaattttccatgaagtagtatctgaattaccattgtcctgttttcttttgaatatggatatcatgagtttttttcctctagacaaacatgtaatttgttagtactgatagaacattctccggtgatgctgtttgtttttatatccacactgacgtgtgcagttaccactagttacgtgtggctgctgagcagctgaactgttgaagagtggaattttatatatgttaagtagatacaaggctaaattaaactacatgtaagttgggcagtacagtcttgaagattgttcttaggccttggaatggctcctggttggagggtttcatggtgtgtggtgggagggctgaattctgaggaccatcagtcccttagtgtgacagctgtgggtccctggcattcttgcccatggatcagaaccagcagcagcagctgtaggttgtctggatgaagggaactgaactttggttttaatcttacaggttggagatctcatctatggccagtgtgtggtcgctaataaagacatggaaccagagatggtctgcattgacagctgtggccgcgccaatgggatgggtgtgattgggcaggatggcctgctcttcaaagtgacgttgggcttaattagaaagtaggttatgctgcttattaactgccctgccttctttaatgacctgtttactctgagaatttcgtaatggtgttttgttggtcatacttgctccccattctctgtaactccttccaggttccttccccactttcctcccctctccaccctgtctcctaagtttgccctttttaaagacaagccactgagtcaaatctgtgctgcatgtatatttgtaaaaaatggggcctactaccaaagtgtgaccagcctaccgtgaaaggggcactgagctgggcactgtgtcccagctactcgggaaggcaggagcgttctcacacctacaaatctgagacttagtttacatgacctaggtagacttcctctccaaatacagaggcattgtgtgtgtgtgtgtgtgtgtgtgtgtgtgtgtgtgtgtgtgcgtgtgtgtgtgtgcgcgcgcgcgcgcacacacgtgcatgtgctcaagaccgggcagagacatcaaagcagcagagacatcaagtcttgttttgggacgatgctgagcggactttgcgtagtcacagagagcca

SEQ ID NO: 28698 - DNA, 1173 bp, Mus musculus
tagggtctttccgctcataggccaggctggccttaaactcactatatcatactggctggtcttgaacttgtccttctgcctcaacttgcttaatgtttatcctgtctttgtgtaagatagatgtcatatctgttttaaggaatatggaaactgttaagctaacaaacagattttccaaggctttatattcaggaagtagtagaaatggaatcatacatggtcccatgagactgcctcaggcatagctgtccagaggtggggcatacattttctggtttcattctgggtagtcattttgtacattcttggtaatgtcttttagtttgtgttttagttttatgaattgttaatcttgtgaaataataatgatagctgaaaatattttctgttcatgttttaagaaaaaatgtttaaatacatctgctatataggcttatttttaaagatttacttatttttattttatgtgcattggtggttttgcctacatgtatgtctgtgatggtgtcaaatcccctagaattggagctagagacagttgtgagctgtcatgtgagtgctggaaattgaacctgggtcctctggaagagcagccaattctcttaacgacagagccacatctctccagcccctaggcttacttcttattcatgagaactttatatttaggtataagaatccgtgtaacagtccaggtccctatagttataaggttgtaaagagaaagccccaaggtaactgtaagagtattcacttggtgatgtgacaaagccagtgtagtacctacataagcctaagtctgcttcttcctccgcatgtctcttgtatacttaatacaatataagacaaatccagcatatgccagttatggggaatactgtatatatttgcattttgtgtgtgtgtgtatatatatatatatatatatatatatatatatatatatgtatttgtatatgtgtgtgtgtgtatttgtattttacatttatatagtatttcctcataactagcacatacacacacacacacacacatttttttttcatgtgtaattccacaaaaccctgaaggtgattttggagaattggtcaagacacatataaatcattggcaatagaggatctgagagagaaaacctcagaaaaacaaggtgatagaaataacgatacagga

SEQ ID NO: 28699 - DNA, 1119 bp, Mus musculus
gggttttcctggtcattttgcatgtggctcttgttctccccatccctgtctccaccattcctctctgcctccgtcctcgtttttgatttttggtatgaattttatggacatttggcaggagccttggttgggatgagaaaacccatggcactagtgttaaataaaactcagaagttggatgttggcacactggtgattgaaaaagttcatcttcatttatcagtatacttggcctttaaagttgctgtcagacattgagcacagtaatagcattctcataacttttagaaactcttgcaacaagatagctttttaaagtttcctgttaaaatgacacctttatatctcatgtgggattttgttgtgaaattctagaaaaatattataacctctctttgtaatttattttacttgtatgaatttaagatctccagcgtgtgtctttacttggtattctgttccggtcagcagcattggagaggaaaggaagagccataagcctggtcatttccgttgtccagaagatttatttactcaggaggtcggcacagcatccggccagtgagtgaggagattgatgtgacttaggttggctgtgagtcttttaatcacacagatggtgtgtttatagtaatgaagtgggagggaaatcaagtaaagattttattgtgtttgttccttcaaccagggatcagttctcagaagggagctagagtcctctttaagctgctgtcataaacctagagtcagtgacctgactgacactgctgtcctgtgtttggctatggaaggtctgggagacaacgtgtaagcccaggctgctccagtcttaaatgggcgatgtcctgccaggctctgctacattggttggttggtttgttgattgactgactgattgataatttaagccatgcagcagtagccttgttctctttggtcacgtgccctttaggccagtgctcctttaatattaggatgcagtacaatgtaccctgaaggactagtaaaatgtgctggaccttaagactgatttaggcagggaaagaacagaactcttatgtaaatggaacctcaaatctgcatccaggtggcctctaggccatagtttaaaacacaact

SEQ ID NO: 28700 - DNA, 1099 bp, Mus musculus
tatataaggatcaaattgatactcaaaagaagattccataaatgatatcagtttgtaaagagttctatgtcagatgttatacccacatgtcacctaacgcaagccagggacccttgaatcactgttgctgaatacctactatgtgttgaagaatgtgtctgctttaatatactatgggcccctacaaagacccttacaaggtaggtggaatgagcgtcaaattatgttgaaagtagcagtgtgttaaaaaatgaagtgacgtgccttcagccacaggtggcagaggtggcagcactggattcagatggaggtttgctgtcagttttattgctgagactgcactgactcctctgcgttttgccccttagttcatggaggaggagttacactggtctgctggtccatgtgcttgctatcttctgcaaagtttgatcacacagttggcctcgttcccttgagtactgcataaaagaacatttcaagcactgatgttcccatgagactggagagcataaactcaggccatttctaacagaaaaactatgcagatgagtccccatggtggcgaaaaagtggatagtcagccttgtgagaagcaaagccagacagatgagaagtgacaagagccagcaaactgagcagggatccgttgccctctctgaggaacagtcaggatcaagacaaaatcagacagtactaagcaaggaattgaacggcctcagaaaaacctgttctattgggaagagttacatatcttaacgtccctttttgtttttattttgtttttggctttttgagacagggtttctttgtatagaccagactgccttcaaattcacagatgtccacctgcctctgccttccaagtgttgggattaaagacatgtgccaccacagcctggccttagggtctcactttaatagtctaaaactatgttgttttttttttactgttttatttagtcatttttattataattggtagaaatatattttaattgataacgaagttattactgttggtaaagcttcctttggaagagtctattaatgggaatgctatgttgaatgacttacagatgtatcaaatatacagtag

SEQ ID NO: 28701 - DNA, 2517 bp, Mus musculus
tgaaataaagagctaaagtaagaaacttctactttaaaaaaaaatattatgtgatcacaattcgggggccaggggaacatatgcttttaattccagaagtggggatgcagaggcaggaggatcttctgtgagtttgaggtcagcaggtctacatagtaaggttctgggctagccagagttatacagtaagaccctgcttattaaaaaaaaaaaaaaaagtcatttttttcctcagaacccaaaacatatgtatattttattttttctccccattgtattcctaagaaggcagcatagcaaaaaattttagaaaacaacacaaggaaaatataaatttcatattctctactcctgcatcgaggaccaaatcacattttttaaggctgtgccctctagaaggtgagaataaagaaatacatcaagaatcttttagaaggtgggtgtttctaatactggagtatgcagcagtgtccataagagtctgttacacttggcttttatttttatttattttttgagacaagatttctctgtgtagccttggctgtcttagaactcactttgttacccaggctggcccacaactcagtttcccttgcctttgcctaccaaatgctgagattaaaggtatgtacctttaatcgctggctttcatttggcttttatgaaagcaggagacatggcctgataacttcctgatgacaatcatctttatcctgtaccagtggtcttggtccactcagtaacaccttctgttggtcatgaaggaatccatatatatgacttctgtttagataactaatgcatatctttttaagtgccaaaatttaaaaatttcagttatttttttgatgcaagtctccttagggatggtagtctacctccctgcctttttaaacagcttgctcagtcgaattcacttcatcatgaagttatattcatgatgttttattgcgcatgcccagtgcggtctggtccacataaaacagtaaaacatttcatagcacacaaagggctataacagattcgaggaatatccacctagtaagtgattccctcaacgatggaattatttccctcagtattagctttaaaaagtgtttgatgtctgcagagtaatgcattctatcagtgtgcctgtttctaacaggctcccactttcttctgtgctgtctcccaagttctgggctgtgacatgaactgaccagttctggtcagtgcctacaaaataactggaccaaagctcccagttaaaggtggggctctaaccaagtaaggggaggaagtatgagtatacactgctgctgctggagtggagtgtggtgatgatgatgcctctgcagggaggcaggccttcatccttttaagagcaaagaagcgtgcagaagagaaaggaaggaaaaggaaaatcgaggtaggccgaagactctgggagatggcactgaataaccattaaaatgtactcttgattaccatgttaaagtcagtttagtgacactgtagagtaaggctgcactatgtgtacatcctctggagaactcgagactgtgtatatcctgagaactgcacccctccgaatggtaatggaaatcagcaccaagaggaaagtctccagtttgcctgtgtgctgctgtcttgagttgtaaattacctgagagaggtttaatcaaaagtcccagggcctggagaaacggctcagcggttaagagcactggctgctcttccagaggtcctgagttcaattcccagcaaccacatggtggctcacaaccatctgtaatgggatccaatgccctcttctggtgtgtctgaagacagctacagtgtgctcatacataattaattttaaaaaaaaagtcccaaggagcacatctcatgcagacattttttgaatgtatgtatatataaatgtcactgtaagtgacgcttacccctaagaataataaagtaacattcaggatttagatctggtcccaatctgtattttcccctatacaaagaatagatgtttgaattttcttttaaatttggctgcatccttcatttccaaactctgcttctttttttgggggcggggggcacaaaactttaggtttgtatttttggcaagcttggaatattctagttaatatgctgtcagctagaacactctcttagcaggttctaaggtgctattgggtcttctgctagactgtgcgctccttgagggcagggctatctttattcttgtatccacggtgcctgggatagtatctgacagagtagttgttcaataaatatctgttgaatgaattgaataaaccttcactacgtgtggcctcaagttctcacgaatccagaatgtagtggaaaatgataatgattaggccttggcttgttttgacttttttttttttttttttttttttggataattaccaggataacatcatctgggtatttcttagtggttttgaaaactaaattaggaccctacttttcattgaacatggatttgaatccctactgtatgcctgg

SEQ ID NO: 28702 - DNA, 1186 bp, Mus musculus
tataaaggcattacaatctggcttgcctacttcatgtaaagttattataggtttaaaggttcgttttttccttgcatgataaagggtttgcttctggtaaactggtaatcactagaaaattttgcctctaggtatggctaatatagctttacattatgtaagaaaaattttattgtctctgcttctatacaagaagctaagagtttaaatcttttagtgtatattgtttcctaagtggaaagtattttattaactaatgcttctcaagggaagtttaccttaaatccttgctctcacccaaaagattcagagacaatatctttttattacttagggttttggtttactacaaaagtttttacaaaaaataaagaaagcttttataattgttattaattatattcattggtaattaaatattagctgtgccaagacaattctttggccagaaaaaacattattgtaaaatcatttttctcatcctcccagccgatcattggcccacgtgggcccaactagctgctgtggggtggagccttgagacacgcagtttcccctgtttcagcacaaataatctagttgtgtgctgtagatggtgttttaaaatgctgaacaatcaaaccctaatttgtatattaatagtcaatgctatatctctgagctcacaattgcttaagattgttcgtccctcagatactaataattcccaaatttgcaattgcttatgcatatacaactcatagaaaaaatgctgtccttttaagaaggcggtttttagacattgattaaattgttctaattgcctggacatttttaaaacaatgccaggataaattttatctcagacagtccataggccgtccatataaaatagattggatatataacctcattcgttatatatccataacagttatggtttaagataatattttagtattcttaaaaattgtgcatgtataattctttccttttagtgtcctcagttactacttgtttccacataatagtgctaattcttgaggacttttacttaataattgctacaaataaatgctcttatttctagttaataaataaatcatgcacatgtgactcttaataacttttcaagctttctagttacaaccactccttaaaaaaaagagaaatgattaaaagtacaattagtcactgctcctttaca

SEQ ID NO: 28703 - DNA, 2344 bp, Mus musculus
tgcacatcctaggcaaatgctgtcccactacactccagccttcccagttttggttttatttggttttattttattttgagacagattctcaacaggtagcccaggctcgtcttgaactctcctggctctgccttctgagtgttgggattaaaggcgtgagctgccggacctggcatccccagtccttaagaataggttccttcctccctccctccctccctccctccctcccttccttccttccttcctttctttccagagctgaggacctaacccagggccttgcacttgctaggcaagagctctaccactgagctaagtccccaaccccaaagataggtttcttactaagtttttcattgggtaattgcgtgtgtgtgtgtgtgtgtgtgtgtgtgtgtgtgtgtacacctatgtacctataaactgaaatcagaccctcagctgcagtttgagagaagtttctggggaaggtaatccaaaacagctctttaactacactgaagctggttacataaagctaccatcatccagctgtaacagttgggagcctggtaagcattggggtggcagtaacggaggtcagcggctttggagcgacactggtggaagtgcagtgcggacattaaggggcaaatgtgaggactcggcagacaagaatttgtctgagatacatctgagtactactgtcttcagttacaatttgaaggtgagaagtctcagaaacgagagatggcgccttgggtcctgacccctgtgtccacgtgcagcattgcccagatgcagcacaggggaggggagttaaccagggattatactttaatttttgtttgtttttgttttttcgagacaaggtttctctgtgtagccctggctgtcctggaactcactctgtagaccaggctggccttgaactcagaaatccacctgcctctgcctcccgagtgctgggattaaaggcgtgcgccaccactgcccagcccaggattatacttggccttgttttctttacactccgtgcaggtggcgcaagtgtcggctgtaaagcgctcctttgagggtcaccaggctgttaagggcaaggctttggctttgctgacttaattatgtgacattttaaagcaagattaaacttcctaatgctttttaacttttaaacactttgtcacccttagagctcttaaagactagattgcagtgtattacagaggtggctctgtctctgataaatttaagtttgacaaaaataaaatcagagcttgtaatccactttgaacttctatgtcagaatgtaattaatagtcttaactagtgcggtgatattttttaaaggcaaaaaagactaaagaactctgaaaagctttaaagtggcctttgtgttacatgtgtggcacaggtggctcatgagtgcaggacacgagtgtcccgtgtgtcctgtctgatgccactagaaacctacgagttttgcatttaacacaccagtgctgtaaaccctcaggacggtagcagggtcaacacagcctttgcattgtggcaaattggggttttgcttcctttgtggttagagacagatgtttgtgcctatcaacgtttatcttgtggttggtcatataatcacttgctatatattgtgaccctgtgcaatgaagcagaattgtacatacatagtattatttgagtacctgaaattcctaagctcaaagacaatatagataaacttgtaaggtttagagggctggcctcgtgtaagtggttaatagagagtgaaccctggtttgagggtggtgagagctgggtggatgtggtcaccgctgggccagactgttgccaggaaggcattcatgcttgggttccttatgtcaaatgtattttttctcctatataaataaatgcatatcaaaagcttgaatatgttctctctagatttaaagatttttttacttttttatgctctttgtataaacttaatgctctttgcttgccaaactgctgaggaggtgggtctgcatatatttcttcttttcgttattaaaagtagctaaacacaaagcttcggttgctctttggagttgtggctgtgagtttgagtaatgttaaactttggggtgttggtatagaacttgtgtattgtggttgggtagtctcttacaattagcagtctctgtgtgtgtgtgtgtgtgtgtgtgtgtgtgtgtgtgtgtgtgtgtgtgtgtgtgtgtgatgtgctatgtgcctatgtgcgatgtgctatgtgcctatgtgcgtgcgtgcgtgcgtgatagattagcccaccagtcgttctggtacatttagtgtcctggcccagcaatcctgaagactcaac

SEQ ID NO: 28704 - DNA, 1193 bp, Mus musculus
cgctctctcatctcctggggaataatcaatgccacttacgagtttttgttaaagattgtatgatgaaatcattatgtgagatgttattctcatctaactagacctaaggaaaatgcaatttggctttgttcctaattggcttaagtacagtttggtgtccaagaccaagccataacttgcagacagagcactgacaagaacagagtccaggtttcagtgggcaggtgtcagggttcgggtgtggtcattactccagagctttaggctgctgttgcccgggaaccagcctgcaccgctgggctgtggcctccgcagccagagcgcgtgcttcgcccccagcccggggcatctcaggctcattctcacctcatttactttgtctctgctcttaagagggccataatcattagaccccagctctgcacggaggactggagcagaggtgccactcagtgccatgcctgagctccatgatgaatggttggggttagctttgaaataagtgctgttgagatagccgcgatctaaactttctgttcacatttgatagagttgagcagctaatgaacgcttccattttgctgtttggctttgaacactttctgtttaattctgagtctgactttaagcccttccagaatgtccttgtgctgtttttactgaattcattgccaaaagatagggtgccctagttaaattccgttgtgtgcttcatcgtggtaagctggtcactgcaggctctgctattctgcttgcttctttgtgctactgctgtcgacagccaaccagtgaggacactgtcccttgtgaatagtaactgtcatgtctgtcctgctctctggtactggactttaaacaaataaacacttccataaagttttatttcaggggttttaatgcaaccccaagtcttctttttttctggtttctcagtgctacagagtgagctaaggagtggagggtgcttcccctctggccgcccgtctctttctctgggaagaaagatttcagggttctgctactcaggagcccagttgccactgtgccgtttaggaatgtctgctctaagtagcagccctgacttctggtcaggtaggatccaactggcaggaaccaggccaaggagtcacatagctattttctgggtaaatgctgtaatggaaataccatcagtctgggaagtagcttagaat

SEQ ID NO: 28705 - DNA, 1202 bp, Mus musculus
cagggatgactgatgaggtcgctcctgccatccttcctaaaagaagccaactcctcttcccacagctccaaatcctggcgtgttacactctcgtgggtgagtgggctctgggctgcagggtaccaggaagcatcactcagctccacagggttgaagagtagcccggcaggacctctccaggagagtcttgtatgttggctctttaaagttaatctctgagccaggtgggaacaggagggtcacttggcccaatgtggctctgtgcaaaagggattcaaagacggcatcggttggtaagatgggtcaggtacgagggctgttcagaaccagaacacatttgccacttgctgctcacagctggcccaatctctgaagacagatatgatgacagtgagagagtgacgttaaacgttacagtcagagagctgagaaagcactctgcagggcagccaggagtaggaagacgtcctctttgcacatccacaacttgtctccttccctcctgtttgcctgcagaattccagaggcaagagagcgtccggtcacagcacaaaggcatccagttgtacgacaccccgtacgagccggaaggccagagcgtggactcagactcagagagcactgtgagccttcggctgcgggagagcaagctaccccaggatgacgacaggcctgctgatgagtacgaccagccgtgggaatggaaccgggtcaccatccccgccctggcaggtaggagcagtgtccctgcttgggaggcaggtactgaacagaagacaagtgggtctagcctggccaggtgaacaccagttgagttgggctgttctttttcttaatggcaccacaaagataatccgggttcctgagggaaatgaggccaggccagagagaaactccagtctggcatagagggttcccagtgcaatctcaccaccttcagagctggttcccttaggcctcatggagttgcattctgtagtctccttcagtcctgcatagccctcagggtccctgtgaggaggagacagtataagacaggggaaagcccagcacctgcctgtggtgctgactcatgcttgggctcatggtgtctgggagagctagtctggcaccaccttcctcagcttggtctcagaacatcagtgttagattgcctgtgggctgcccagagatctagcaccttgggccagtgagtaaagata

SEQ ID NO: 28706 - DNA, 1191 bp, Mus musculus
aggagagtgagagaaattttgtcaaagctgttctctgtgttagttccccagaaggcttcattgtaacacttccttggtcacaaagtcctcacagccagtctaggttctaggtccagatactgtgtcagctattgctccatcccatgtcattccagcctcagaggtcagccaactttttttttttttaaaagggccagagccaggcagtaaatgttttcaggtttgagctggtctccatcacagtgggttagctctgtcattgactctataggcagccttagagaatatattagtaggaatacttgtgttctgagaaacctttatttccaaagccaggcactgagcaccgagcgtcattttcagtcttgatggggctcactctgtttagggtactctcaagctgtgccaatctgctccgtttcagtatggcttggcccctcattcttcagcatatgcgcctgtggcaggacagggttccaagaaagggcagaagcccttgaggtttcttgaggtttgaaactgggacactgttcctttaaatgctgttgaccaaagcaagtcacaacacaaggccaagattcaggaagagaggttgaattgtggggcaaggggcagggatggaggcaagacagtctaggcttttagggctgttcgtactatcaactcaccctgaggtttagagacatcagtgatggacctaatgtcgtagcttttaaggatgacaacaagatgcacaccgtgcattctgagtccactcactacccgtgtgctttctactaaactgcttcactctttcccagcctaaccagccgtgagaaagagggccctgatgttgactgatggctgtcatgtttcccctccccccctgctaccagatattccccttagccctttccttgttttgacccacagctggactctctctcccatctgctgccgagttccataaagaagatgttaatgctgcacttgggttattttatagagaaattctgcacgcagagtaggcgcatcccagaggacagctacacaaaaatgtgtgtcttgtaactgtcatgtcttctcattctaacaccagaccttccctccctctaggatcggctaggctgtgtgtgctctgctttaagataaaagcgggtggtacctctgcccatatctagaaaggacataagtttcctaaaaggaggtcag

SEQ ID NO: 28707 - DNA, 1132 bp, Mus musculus
ctggcagtcagccaggccacctgggccaagaaagtcctccccagggtctggaggcctgttctctgctccctgcatgtgtgctgcacatggaaacagtatcttgcttttctgaaggtttaggaagcgaagttgtatttcacaacttatttttttcacattctgctttcagctggccacagagtcagagttgtcgctcctgtaaggtttcttctgggctataatttgcaagccagaattattgtaatgctatagtattatgccaagagcttccagagtccctgtgtaactgcctggcccctaaacactgtatataattaaccccagtcagtatccctgcaatctgatcttattcctggtttacagatggggtggctggcctaaagtggtatttacttgatacaagcaagatgtctctgggtgttttcctttgcgtatagagacacaccttcagagatggagtcagaaatagtaattctgaagagaaacataaaatcttcaggaagataatggagaagcatcctgccttgtgtttcagggagacagatgcttgtaggaaaatcatcagagtagccagaagatgagctctctctctccagtcacagcttccaggattcacagaggagaaactgggaccagtggcagagaaacagtcaagaggaactgctgtggggctggtgagatggctcagtgggtaagagcacccgactgctcttccgaaggtccgaagttcaaatcccagcaaccacatggtggctcacaaccatccgtaatgagatctgactccctcttctggagtgtctgaagacagctacagtgtaattacatataatcaataaataaatcttaaaaaaaaaaaaaaaggaactgctgtgattgatagccatttttctggttgtcacaaaccccaccctatgtcatgctgtaaataaagcctcccccctccccccagtgtcagagacccataacaggacttcaggacttcatacttgctctactgccaagttctactgctaacccctggtttgacattgacacctcctttgacaggtttggcattgtcccctcctccctgcactgcccccagttctcttggaggatggggtaggtgaagatagccatatttcagtttctg

SEQ ID NO: 28708 - DNA, 1176 bp, Mus musculus
tgccctgtagtctactctggagtcatcctttcctaaggctttcttcataccccccccacccgcccccatctctttcttacctcttgtttattgcacagattgcctcatgtctcttctacttcaacccttctctcttcctgtttactggatatgtaacaaaacattcaagcaaagctctccttggtgagcagttttaagttgtcaacttgttacaacctggaatcatctgggaagagtctcagagagactgtctacatcaggtttgcctgtgggcatgtctgtggggaagttgtcttgagttaattgatgtgagaagacgcagcccatagtgggcagcaccattccctaggcagggtatcttaacttgtatgagagcagagagatcatgctgagcacaagtgagcaaatgagcatacacacattcatttctctctcttttccactgtggatgtgacttgactagttcaaactcctactaccgtgacttcccactaaaataagtcctttctcaattgctttttgtcaggatgttatattatagcattaggaaaggcaactaggacactctcatttgagggctagtgattacctcattttaataaaccttgtcttcaaactccatccaaacacacaaggccatagcttgaattctatggccgtagaatggcaaaaaaaagtatattttgaatcctcctcctccttttctgcatgaattccaagctcaaatgttgacacgtgctgagaaaagagttggaagctgtaggtcaaaatgacaaatggtaaaaatgtgtgctgtcactactcagtctcagtagtgagaaatggcatgtttggtgttgtttcaaaggaaacggagaactgagatttatatacgaaacttctcactttaaaaatcaccgaggatgtagttcaggaatctagggcttgcatgcaaaaagccctggggtcagctctgtaagcaaataagcgtaaataaaacgcacgctctgtgtggggaaggttgttaggaaacgctcttattggcagcctggtacaaaacctttccacctggtgtcacctgcaccagctgacattgattttcaagtctcactctctgtataggctgaaagcagggaagagtccgatgagataccctatgaagagatggagttcttcacaactacaagtgggaacact

SEQ ID NO: 28709 - DNA, 1182 bp, Mus musculus
tgcctagcctcctggcctttgggcacatattcttatcccacgattcttaagaagcacacagagccacacatagaccaaatggctttaatattattttgcagtttccagtgatgcagaatgcagctgcagttgtgtttcaaggagaagctgagtggggctggctgtccctgcagcttggtgccactcctgggcccgtgtgcagcctcagtggacactcagtgctgaggccccgatgccacctctagttaccctgtactgtccatactgttacagttcggtgtgcaggctttctcttaagtcagaagccccctggctatgctcaacagcttttgagccttatcattactataatattggctgaatccctaaggaaaataactccccaaaacaacaaaaatactagtttaactggcactgtggtctattaaaaggcacaagaacagtgtatttgaacatttttactggctcccatggtgttaaaaaaggaaatccagtaggaacaccaagattaggtttcagagtaatcccgtgtgttgtttggccaggatctcctaattccttaccattaagatgctgtactctgctgtcctctagaggctttgtttgtaggcaagagctctgtgtgatttgatttgtctcataaatgaccaggcaggcacttggtgtctgtaagcagggccatgctaaataccacaggcatggtggactggaaattcacccaatggtgttgatctcacataagccattgcccactgtggtataggaagatgtttttatgtggctgtaagttttctttttttttccttttttttttttttttggtttttcgagacagggtttctctgtatagccctggctgtcctggaactcactctgtagaccaggctggcctcgaactcagaaatccgcctgcctctgcctcccaagtgctgggattaaaggcgtgtgccaccactgcccagcggctgtaagttttcatccatcatgaagttggaattcaataaagaagaaatgatttctgactgcagatgagtaccccgcaggtgttcccacagcactcagaaggatgtctgttgcctggtgtggtgggttttgaaacttgaaaattcaccattgcctttttctccctctttatcttacctggcaaaaggaatcctgtgtctttctgactcttagaaaatt

SEQ ID NO: 28710 - DNA, 1493 bp, Mus musculus
tttgtttcagaaaagtgattaatacagaagtaattatccttaaagttcaattctttaagcctctgaatctcccagatttattagctcatttaagaggtaactgagagcccctagtcgtatagaaatttctaagtgtgttttagtctgcagagaaaaggttcccactttctgacgcattggctccctagacaagctggtcttgaaaatgtcttgtgtcctgactttgcagacacgctttgcagctgtcagtagtgtagctgtggccaatggctggcccctgcatcaaggctttaagagctgggcttgggtttacattattgtgtgtctctccactctttcccctgcagtgttagaatgctgagccttctcaggaaatgtgtgggcatgggtggtctgtgagggacacgttctgcaaggttgcttgtgtttgctttctgactgaggcctcttctgtgtccgcagcatcaccagaccatccagcagtacatggtgaccctggagaacctgctcttcacggccgagttagaccctcacatcctggctgtgttccagcaattctgtgctctgcaggcctaacactcgcgtttcttccctttttattatcttgaaataacttgtcttatttttgatggtttgaatgtttgctttcttgtagtagcctttcacttcctgatggaaatgggggaggagagtgaggaatatgacgtgacccttagttgccctgcagggcaagtgtggcttgctaacagcgatgttatgttgaccgtagagttgtacatatgtgagcacaactttcctgtgataaatttgatactttttctccttagggcacaaaacaacagatttgaggtgtgtgaaatgcaaggtcgggcttgcaaaatagtagatacaaccgagggactatccccagggagccaacttttctctgctcctgggaacatggctggaataaactgcagttatggtttttaaactctgggagtcatggtttatcatcttagtctcttttcttactgaagctgtcttttgcaaatacttttcttaagtggtatcttatgattacttgttcggctaaaggattattaatactaatccccaaatttgtctaaatataaatccacccagaaatcttgaaagttactttaaactgcgatctcaaagtataaagatggcagcagtttttcgacttctcagatgactacaggtgtgtcagccattgctgaaagcattggtcaggccctgcacctctaagaaggatttgtccaagatcctgtagtgtcaccgaccgagctgacgtggacttggagttcagtgtggcttggggcttgtctcctaggtcctggagtctgttgaggctgaagcacaacgcctgttgtgtaaataatgcagaagcagttatctggcatcccggattgctaggatttttaaacttctcattaaacctcaaaaacatccactaataatgatacaattactggtagtaattgtatgca

SEQ ID NO: 28711 - DNA, 1193 bp, Mus musculus
aggtctggtgagatggatggctcagtctgtggtggtgatgccaccaagtctgaaaatctaagtagaatggactctaactgtggcaggaacatggccacccatacatacaaaacaaagtaataagtgtgaaatattgtatgtacaaaataaattttttttacaggtaacctgagactcagaggtttgtttgtccaaaggcatacagctggtgatgggatccgccttgctggaatcctcccttccctgtaactctgattcctcggaatggcaggaagggagatcagggtgagtttttttgtttgtttgttgcattttagagctagggtttctctgtgtagctctggttatgcttgaactctctatgtagaccatcctggaactcacagagatcctcctgcttctgcctctggagagttaggattaaaggccaccaccacatccaactctgttggttttggtggatagttttactaaaatcgtccaggctgtaacacttggtattctcctgcctctgcttctctagtgctcagagtacaagcgcaggcctctttatacatagctgatgatcctctctctctctctctctctctcgatcctctctctctctctctctctctctctctctctcgtgtgtgtgtgtgtgtgtgtgtgtgtgtgtgtgtgtgtgtgtgaacttgctctgtagaccaggctggcctggaactcccagagattgcctctgcctctgcctctcaagtgctgggattaaagtcagatgctaccactgcctggcctggctgatttttgtttttaatttttgcttttaccccttatacatatagacatatacaataaaatataaatacattattatttatttagacagtgtttcactgtgtagtcctggatggtctggaacatgctatgtagagtagagccggtcttaaattcactgagttctacctgcctgcctcttcctccagagtgctggactttaaaattgtgcaccaccaggttaagtttctttggttttggtgacagagtctcactatgtaaacctgtatggccttgaaatggcttggtctgtaacctgcccctggaattagagagatgtgctattatgcataactttatgtaagttttaaagggggaatggggatgacacgatttttcagaaataggtgtgaggactcgtggatcaaagtgataataat

SEQ ID NO: 28712 - DNA, 1192 bp, Mus musculus
acgcaataaatcagtggttcaagagaacaagggggcccagtgctttctccatcaaccacttgttgcttgtgggcgctttaaaagtgtagtccctaattcacgtctaattccatggctctggccagacgtagtcaagaggatttaaggtgaaaatgagtactctacctaaatttagttacttcctactctattgatttttgtggctgactagagtgaaaagctcaaggcatgaactcatcgtttcaagttcaaggaagaagatggtctaacaactcaatttcccagcacgtggtgggcacaaaatgtctgacggagggatggaagggacacgtgccggtgaaatgttcagggccccgggaacagggacaccacccaatcagtcctcagggaccgccccacacttctgcggggccgacctcaaggcctgtggcaggcctttccaaacacaaagcctcgggcacgccaccgccacaagttcccaacttgttagccatagtcacctgagggcgccagcccaggccgcctgtcccgctcgacctcgtgggcccagggtcgagcccacgcgcgccgcagcgcacgagagcggcgtcgggcccgcggcctgcgcacagccggccgcagaggccgccgcgtggagcacgtgcggggcccaggccgccccagccccgcgtcggccaccgttgcccttttaagaagggggagggcgcccgcgaggggacgaggcggcggtggccgagcgccgcgcttccagtgcgcgcggagacgagccccgcggggcgggggcagcccggggaccgacaggcagcgcgagggcggccggctcacccggcggaggaagacggcgcccgccaacatggcgctgtggcgcgccccggctggcgcgcggagccgccggccgcccacaccgaggggccggcctccctctcgggcaaggccccgggcggcggcgcgggggagggcgaagccaccgcggcggtgacggtgccgggccggctggcccggggagcccgcgtgggcaaggccgagggcgaaggcgagccgggcaaaggaggggcaaagttggatttttttaggcttgaaaaaatggcgggaagcgcatccttttttcaaacttggcctcgggaggggcggcggttgcgccacctccgccgccaggcccgcccctcccccgttccgcgccaggccgcgcccg

SEQ ID NO: 28713 - DNA, 1153 bp, Mus musculus
tttgttgttgttttctgttacagtttttaaagcttcttcctatttttgtttgtacccacaggttcgagaacttgtcttggacaattgcaaagcaatggatggaaaaattgaggggttaacagatgaatttgtgaacttagagttcctcagtttaataagtgtaggcttgttttcagtttcagacctcccgaagctacctaagttgaaaaaggtaagtattctttcattgttaagaggatgattgagaaggaggaatgcatgggtttctgtgtgctgtaagcacgtgtgttttagtggcccacgacactgagattgggcggctaccttccgtcctaaggtggctcagcttcattttcatcactggtggttacacttgaccctgcaatgttgcaacagtgttttgaaaataatgccttattataagagagagttgctttataaataattggttagttgtcaaaagctttattttgttagctactttttgtgcttatgctatgttcaggagacacaagagcctctcactttctgtgctttaatttgtatgctgatgagaaggaaagtgaagactgactgtggggtgtgcgtgtggtacctaccctccaaaggcatctcagatgagggggcgaagttacaggcagtttacaactgcccccatgggtagtgaaaatcaaacccatcttctgcaaggacagaaagtgctcttgactgctgagccatctctagctagtcctgtcatgaaattcttaataactagtttgaaatgtgttgtgattgactagaaagagctgtgtaagaaagcctgcgacaggccaaatctggtggtatctgcctgtaatccagctcttagcagaaacatgtaaaggactgtggggtccctctagacagccactgcctcctatgtctgtgtccccagccaccaccaccacccccaaaaagaagaaaacccacagaaaacaaacctacatttctctctccctggtcttaacccattgttgatggtttaccttccctatagtcaccctgtcttgccctctagttacttccagaaagaacagaatatggaaaaagagtttctcttgtctctgtatttgtcaaggaaatagaaaaaaactttgctcctgtgcactgacaggtgtagccataggcccag

SEQ ID NO: 28714 - DNA, 1212 bp, Mus musculus
agccagcgccagcttacagaagcagcagtttctggagagccacatttacagactctggggccttgcacagggaatccgatgccctcttctggccttcgcagccactgcatgcacatggtgtgtacatatatagcacacataacaaatttttaaaaaaacaaaacaaattaccatcttttggcatacctgcctaactcatcccaaatgtttctgggatgtataaacttcataatttggatttaatcaaataaaataatgtttataacctgatagaaacagggcttctgggagaggcgggtctatccaggctgcatgtgtagaaatcaagagaatgacgaggagagtctcgggtttccacaagtgggcgccagggttgaacttgatcagtcttggcagcaagtgtctttacctgaggagtcacttcaccagctcttgtagaactttgctgctactgtttggttttgttggaagaatttgctttttaccttaattcagtagtaagtgattctctgtctgtgtttcctttagcttgagctcagtgaaaatagaatcttcggaggtctggacagactagcagaagaacttccaagcctcacacatctgaacctaagtggcaataacctgaaagatatcagcaccttggagccgttggtgagtggtggggatttagagtgggttgttgtcatctcattgtcatatttccagtgggagaaatgattggcttcatagagtggcttgtaaagtctctccagtgtactcctgggcctctgctctcctgactgaaactgatgtatcatgcatggagaattttatggttatcttagctttaagcctgtctgctaattttttctattagactagccaggctaatctgtactgtaacataacagtctgtcttgggtgttacatttcagagctgtaagtagggcagtttgaggcacaaagggtctcgtggttggtgatcttagacttacctacatcactattttgggtagaaacaccttcctcagtcttacttgtaggtaaattaaagagaccaagttttaagtgccttttgggtttaagcgtggtatatgaatgaccctcagcaaactgaaccgagagggctttattccttgccttacttaagtgcttagaggaaagtcaaggagtagattgtttgtacattggggactgttggaaggggagcaagctcagcagtgtgaggcgcag

SEQ ID NO: 28715 - DNA, 1243 bp, Mus musculus
tgtttaattttgggagagcactaaacttaactattagacgggatggtgcactctgggctttccatgctattctagaacgtagcaggacggtgtatataacaaggccttttaagtttcctttagagagtctggtaatgtgaacctcttctagagatctttaagacagaggagtgtagatgttcctgaaatctaagctcgtgtatacccttctgcccatgcctcatgccagttctcatttcatctctatgggcaggctctgtgtacatctcatctaggtcacactcctagtgctaccaggaaaagacgggagctagagcagaaggggaacgtggcttgttaggaaggcaatgcaaaactacagagttttcctgtctacagggatgactagctaaccagtagggaagcctagagttttgcctcttgaagctggtttggtgatatgctccttttatttaggaatcatgttttttggttcttcattttagaaaaggttggattgtctgaaaagcctggatctgtttggctgtgaggtcactaaccggagtgattaccgagaaactgtcttcaggctcctgccccagctgtcctatctggatggctatgaccgagaggaccaggaagcacctgactcagatgtggaggtggatagtgtagaggaagcccccgactcagatggagaggtggatggtgtggacaaagaggaagaggatgaaggtgggtagactgggcatcctttgacctgacttctgctcttccacagtcctgttgggtgcttctgctcagtgtccttgagtgtgagtgggtatgcatgagtgggtgtgtgcgtgcatgagtgtgtttataaactctggacatttaaccctaaaatgctcagaaatgaaatggttttattagcaagtgggtattgtatatctatttggtcagtagctatttcacacaagccactagaatcctttctgtgcttagagttcatcattttcttgtctccctggctctgcctgctgtcctcccgagctcagtgcctgagctacaaacttcaagatatattcttagttgttctttctctctctctctctctctctctctctctctctctctctctctcttctctctctctttcttaatttataaaagcatgatctcaagtatacgtggaattaatggaaagagatgtttttcaggtgtgtgtagtggcacacttacagagttcggttcacaagttgagctgttcttattaatcaaa

SEQ ID NO: 28716 - DNA, 1412 bp, Mus musculus
aaagtggggagataggattcctagggtttttaagtcacttgcctaaggttcacttgtgaagggtgtggcttagaaacaggctgggtaagcagagttgttgctatgtattaaaacctcagttcgatagctgtgccagttgaggtgctaccataccacctgcctctctggccctggcgtcctatgcatttggtgccgtgcagcacatcgttagtggctgcctcgttagcagggttagcggagcccttcccatgttcttacgctagtttgtttttcactgcagaggaggaagaaagtgggaagggtgaaaagagaaagagagaaacagatgacgaaggagaagatgattaagacccgaaacaacctgcaagaaacagaactgttgagtattggttggactgctcatggatttggtagctgttttaaaaaggtagctgtgatacaagccccaggacacccccacccaaagagccaaagaatagttcccgcgacattccgccttcctccgttagccccttggtaatccaccaccaagcctggggacttcgccccaacaaaattgtaaacgttgttaggttttcgtgtaagactcttgctgtatcgtgacagctgtgattggtgagttgaccgtcctggctgccagttacactgcgattgtaacaacatttttactttctgtacaacaaggaaaagctttgtaaataaaatcttaacattttgggtctgttttctcatgcttttctttctttttttttttctttctttttttaaagatattaggacattttgtgtgataactgccaaaaccgtattttctaagactaagcaaaataaatgcattactctttggtaaagcctagttgtactctcacatttctaaacaaggctcctaactagcttgtgctgtgtctggtacagaggtggggggcagtctttggtatattagtgatgaggaaaggcaggatctttgaccatcactattcgaactctcgctgttagtgaccccggagaataagtaagctacttcttaaaaatggtttggaatctgcaatagtggcagagcgcctgcctgcatgaataagtccctgggtcagctccagcagcagaaaatgtcatgcagcagttgagtaatctggaacccttgcaaaccagtacatgcatgtgtcaaggggaaagaccctaccatgtattgacttctgggtcccttttagtgtaaagttaaagggctaaggccagatgacttgacaagcctcagtgtgggtgacccatgctcccatggacaggaaatactctaggtaaaaaagtagacctcaccaagactagagcatgtgtgttaggctgatggctggcctgtcttgaccgccgcttgtcaagacgggaattctgacataagccttgccaacaggcagcaggtc

SEQ ID NO: 28717 - DNA, 1083 bp, Mus musculus
ttaggagtagcccatgtacttgagcagtatgtctgtgtgtggagtatgcgcctgagtgtaggggcccggatctcttagcgatggcatcacaagtggtcttcagccacatgacacggtgtacatgtgcacacacctgcaatccctgggacccacatggtggagggagtgcttttcttttcaatttttctcttttggttctcgtgagacagtctgtatgtaccgcctggctgtcctgtatataagtaggctgagatagtatacagagatccacctgcctctgccttctgagtcttgtctttctcttttttttttttttcttacataagaaatatttggttcatgtctttaatcctagcactaaggaagcagaggcaggaagatcactggtctacatagcaagttccaggccagccaaggctagttagtgagaactgtgtacttattttttaacttttaatttctttttttacaggagtgtggggccgactgcgctaagtttcagaagagcgagttggagttcaagtttaaccggaaggccctggagagaccatatacttcgaagcattcatgggggaagacgtatggggagcacaagcggcatctggaattcagccacgaccagtacaaggagctgcagagctatgcgcaggagatcggcatcttcttcactgcctctggcatggacgaggtgagctttggctgcccagcggctgtgagtggagccatgggatgcaggcggctctttgtgtattgcccattccggctcttgttcacctgtattgggtccaagaccagaagcccagagcaggggttctgagagagggtaccatagtttaaaactaacctctggatcagagcagccacgctaaaccccaaggtccttcccattgtgggaacctggtatgggttgggagcataccccttgccagctagctctgactggctcactctggtgctgctggtatcacccacaggtaagtggcccaaacgcttgctgtgctgacatccaagaaggatccagctggtattgggcctcaggtccattttgcaatataatttcttcttccccccattctatgcagc

SEQ ID NO: 28718 - DNA, 1213 bp, Mus musculus
taatatcagttgtcccccaagtccagtggtcagagttcagttcccaggtccttcctggtgaaaggagaaagcaagccctgggggctgtccttggatttccacgtagctacacgtgcgccgtggccctcatgccatgctgctttaagtaaacacatacggaaaatttaaaaactaaacgagccggatgtggtggcgcacgcttttaatcccagcactcgggaggcagaggcaggcggcgttgaggtcagcctggtctacagagtgagttctagggcagccaatactacacagagggaccctgtctcaaaaagcaaaccaatagacggatggatggatggatgacagacggacggatggatggacagacggacagaaggatgaggggaggccgagagctcaggtttcagctacatcacccttttcctgacaccgaggttcatccatagaacttgaaggagctgcttctcttccgtcatggtaggagagggggtaaaaagcgaaccagaaaaagtgaaaagacctcccaaagtgttgagttcagttcagggcagcttccctgttctgttaattaaactttgggacattggaattggctgagggaaatgactgaatagagagcattactctattcatattcttctagcctacacaaacaaataaaatacagttttaaaaagttaaaaaaaaagagtgaaaagactaatagtcccagcagttgggaggtggcgtctagcctgggcagcccagcctgcaagctggaagcaatgctgctttgctgtgctggaaaccccgctcggaggctcctcttcatttgtttgaggctagttttccggctagcctggggcagtgagacagagacgggtaggagtacctttacaaaagacttaagttgattttgctttgccaagccagcatttcctgccaggcctccttagagctggcttggttgggttctgtctgtccttccgtgtccaccacctccgtttcagtggcaggtggttcccgcactcaccttcctgacttccttctgccagccatcattttaacgagttctgtcttcctctgctgtgcaggatgttccgggcggctctgtgtgctcaggagaggttaaggtgtggcaggagtttatggagtctgaaaaagttcgtaggacacgtgtcaggagggtgtgcagaggaggtggattttaaccaaagaaagcttagtattgagg

SEQ ID NO: 28719 - DNA, 1194 bp, Mus musculus
acggtgggcattagactctgcctgagcccctgtgggcagagacaagctctcccaactctgtgagcgaaggcagggacagagcgttcaccccctttggcagtgtcaccgccagaggcctacggttcttagcagccagtccctttctcagaggcctgtcctcagacatcaggtgcacactaacccacggtacagttggccaagcagaggcagctgtgagaaggggaatgggaagcagggaggaacacgggtctggggggtggggggtggggtggagggggtggagcttgttcatcttaaccatgggggaggtgcagacatcagccctgccgtaagcaccagggtcttgtcacatatgacagattacaaacccagacaaaggtgctattgtttgacttgtttaagggcatgaactcttaccgaggctcactgtcacattcactttgttctttggaatcaatgctgagattaatcattttgttctttttaagtatctccttgtcttcatcttatttaaaaaaaaaaaaaaccttccactttttttttttttaaagataagatctcactctatcctggctggcctggaactcaccctgtatacccgactggactcagaccctgagatctgcttgcctctgccacctgagggctgagattaaagctgtgcgccaccatgtttgacctgtacttactttgatgtgtgtgtatgtgtgcaggagttacagaggacagctaacggaggtcagttctgaccctccatcttgttgttggtctcgaggatcaaagtcgggcatcaggcttggtagcagtctccttcaccagctgactcgtctcgatggcccactgatctccccctcccctggaagtttccgctagtttagcattgtagattgggcagtagctgagggatggattgtgtgcaggcttgggaaacgtccaggagctgggaagtgatggttggtaggagtggcatgtggagagggctcagagccttccaagttctttagggagtggagagccaaggattcagttttgtttttttttttttttttctttacatttgttttgcctacatgtatatctgcatcacgtgtttctggtgcctacagaagccagacgagagggttcagtcacatggaactggagataacagctctgagccaccatgtggttgctgaaactgaacttgggtcttct

SEQ ID NO: 28720 - DNA, 1205 bp, Mus musculus
gagaagggctggtgtgtgggggcgggcaccaccgatgacgtgtgtgcagagtgcagagggccatttctgcagagcccttgctctggccacttggcgaggatagctggagtctgaggcctctctcctttgtctagagtttgatttgtttttgcaagtttctgacatcccaactcctctttgtttgcagacgccaaggagaagtcattgccattcctctccctcgtgagagtaagaccgtcgtagataaggctcgagatccgtgctgagtccctctctgcctgagcgccattccagcagtctggagaggcagcatggtgcccagcttctcgccgccgtcagcgtgccagtggcaggcgccttggcccagcatggtgctgtcccggtgaggcccggccccaggcctccctgccctacaggcccgagaccatgactcggaaggagggtggtacgtgtctgtggcgagggctggctgtagggctgacacaggggctgacgcagctggcgtccacgcctccaatggacgggaggtaggcgtggtggaggatggggagctggagggacagccggcgctggatgctgcagggaagacagggagagttagtgagggctggctgctctcccgaaagcttcttgctcctattttgacaaaaaaaaaaacaaaaaaacaaaaaacaaaaaacaaacaaacaaacaaaaaaaaaacaaaaaaaaaaacccaaaaaacaaaaaaacccacacacaaaacaaacaaacaaacaaaaaaccctgaggataggagtctgtgtcccttaaatgcaagatctgttggttcaattgtttaagcgcgtcttcagacatgaagcaggcatttgacggggtcctactattggaaatagcccagaagagtagcagtaccaagattcaatcttgctacctccctatcttcccaatgaggttcactggttaaactatcatggcaaaattaggaggactcaaccaatgtttcacacaatagcactcatctcaagttacacaagcctccgagtgatgtggctttcagttcctgcccccttcccgccccccctcccccgcccctcccccgtcccccagctgcttattccctcctccctgccctctgtcctggctgtaaccaacagccaatccttcccagcaggttcctccctggcctttcagattctttggtgattaaccttgtcatccctacg

SEQ ID NO: 28721 - DNA, 1181 bp, Mus musculus
cacacgaggccagctggcgatgggtttctgactcaagattcaacttgtagccagcccagggctgtgaggacatcaagacatgcaaaaagatagaatggatgtgggttttattcagccagcctctgtctctatctggggtacttgctaccctgcccttgagtttccccatggctgtgtaaacgcacacagcaggtgcatcttaggcagaaagatcatttctcatttatttccagctgatctgttattggttcatttggcgtttcacatggcagttcagagacctccattaagcatcccctccaggatatgagcagtggccacaaatatcaccttagactctgacagtcatcttgaccttcccctttaaagtaatgtgatcatcccagccaggtgggctgtcacccttctgcaggcccctctggggtcatcttatagccgctaaatgttccccttaggggttttcctcttgtctggttcagctggccatatcacactcctgcattagttaccttatctgatgaacctcaaatccttgaccctgctagaaagttctggaaggaaggtcctgtccaccgagaggtaggtgtggtggctgagcactttcggggcagaggccctggtttttattgtcattagggaggaacagtaggactgatagaaagcacatttgcccctgacctgctgagtggcggggcgtgattggctatgtcccgcttaaacactggaagaccgtgttccctggttaatgttggcaggctcgttgtccgggaacatagccacactttccctgtcacttgctggattagccagttttgtgtcactcctaacaaaatgcccaagacagttaatttataaagaaaaggtttattctggttcatgggtctccaggttgttgttcaagatggagcggtcccaagacttccaacctctggtgaaaggatccaaggcataggcagagagcaagtgtccaagaaagtgcttaatccaggaggcaaagccagaggcccaacctcccctttcgagggtcacatccacaatgaccagtaggccctacccctagtgggccacagcaccttcctgtgaacaagcctgtgcttgtgagctgtagggtgatcaacacccaatgagactaggaagcctaactgcctgcctctttgttccccagaaataaagaaattgtc

SEQ ID NO: 28722 - DNA, 1208 bp, Mus musculus
tcaggtggcttactaccatttgtaactagtttcaggggatcttactccctcttctggcttctgaaggcacctgtacacatatagacacacacacagattaaaaaaaaattttcacaaagatttttttttaagtactattttcttgtaacttccttattgtatgagaatggttgtcttgtactctggctattcttcaaaagaggattaaatgactgggaacgataaggaagacacagaggacagttatctgtactgtagctgaggaagactttgcatttgagcatgtagtttgcgcttaattttctagcagcaaagacagatgaagatgaagctctcctattaagaattcatgaacaatgctccccctccatcccactccaccccaagcttatagtagtcaaagaatttccaaggggtaaagttattgctggacttggcatttctgatttcttgttctgaggctcaatcttcaacactttcctcgggttcagtttagaacccactgacactatccttccctatttaaggctctgatccaagtgtggacatttgaatgcctaataccagtggaacagctgatgttaaagctgggacgtctgaattaagctttgctagaggctagaggataatggttagagaacaacatgaaactatttgggctggcttataaagacgttttcctaatgttcttaaattggccagtagccatctggcagacatcatcaaagaatggtcaccaaagatgaacagaaccagacatgtttttcttctaacaagtccagcgaggccagatgctgaaagtgtctttgctttgggtttcctgtttgaaaagtgacttctgggtaatgggtattaaaaatgattattttaggagagataacatgtacccagagtgtgttcttctgttttaccagttttatagtaaccctgggatatgcacattagcttgaggagtattctctattcggtgtatcctaaaatcttcctgcttcttagtagaatccttctttgtgtaagtactctgggaaatgaatgtgatttttactctttgcaatttacgaagatattgttcccttttaaattttatgtatgtatctgtttatcatctgtcctttattgattgattggttgtagttgttggctactttaagtccttgtcagagtttgctttgtttcaccaacaggatagacctaaagcttaccttatt

SEQ ID NO: 28723 - DNA, 2054 bp, Mus musculus
tcaatgtaagtaagggtttgttgttacagttgtatcacctgcttaaataagctcttgtgctataatcaggtacttttggggcctttgttttcagttttttccatttctaacccttcgagatctgctttatagaaatccagggaccaatgtattttatcactaaaactgtttttatataattttaagaccataccaaaagttatctgagttaaagttgtaatacgtttcttactttcttgcaaggaaatgggtttttactgaagacacttctcatgatatctgaagttgaagaatcattatgtttttcttacctaagtggataaaatgtgctttgatgaatcagggaattttttaaagttcgaatttagttctaaattgagtttacatgtttacagctaattttttgtgtagggatagtttgattctctaggtggccaatactgaatataaaaataacttaaaaattgagataggtcatggttaatgtggctataactatatatacatctaattagagaaatatttctatgtaattttgtagtgcagtctgttgtttctattgccaatcaaagacttccccccagccccaaagtgtagtatggctaagacatatcttctgacaaattacatattatcttgtcaataccctggttaagctagcatgaaggaagtatgacttactgaggcttacacaacttgagtcccttatatcttcagctctgtttttcccactctgcctttctgctgccccctggctcagagacttagtgttcctgaccccacctccagcctttggacctaagagctgcttttgagacctaaaatgaagtgattgatggaagctgtgtgacatttttccacttccttgagtcactgggtgttatgagggagtgatctgcaaattggggtagggggtgcccctactggtagccctgctttgatgtcagctctgggcaaagattagggtgacagctaagtggcagtggaagttggcctcagaagtagtggccagctgtgtctctagtaggacagtaaaggcatgaagctcagcctgtaatcctgctactacagtagtactccagaagtgccttgaggccctgtgtggggctgtggccatcaagaattccagattttggttctcgctgcagacttaagtggccatgtagccatttttgtaatccatacatgtttgactcttccctctgcaaattgtcagatacgtaaaaccaatgacaaactactacttaacatgcacaccaaaatctgcccagaagacattgtgatttcattccatgcactgaaggaatgattgtaaatcatttctttgttccttggtcatgggagtgttctggttctacattgtggagattccagctgttgttctgttatagcccagcagaacaagtcgacgtgttgaaattctgaagaatagtttgggagtgcagtacagcttcatgtgttggatgttgaaactttcatgggccctctttagaaaagcagaggactgtcagcacattatttttaatcctgttatgcactcgtacttattgtcagtaacaataagtacgagtattgaaaatattgtcagtaacattcagtctctttcttaaagtgaatttgcttatttttcaatgagatttgtgagtttaatattatgaactgtgttttgataatccctttttcacattgtgccaatggaatggaatatttgatatttctttatatgtcaaggagatgcttcaatatgtcatttgctttaaacttaaattacctctcaagagaccaaggtacatttacctcattgtgtatataatgtttaatatttgtcagcatccaccaggtttgcaattttatttctataaagtgtgagtgttacgttgctaagttactcagatggtactgtattgtttatatctgtaccccaaatgacatcatctagactttgttttctgtgtcttattgtatttgtgcagtcctttaaccctgttggtgtgattgctgccctttcagatatgtgcaggtgtctatagaaattctcatttaaggtgaatggt

SEQ ID NO: 28724 - DNA, 1198 bp, Mus musculus
gtccggaaagagaccagattatgcccctatggagtcctcagatgaagaggatgaagaatttcagttcattaagaaagctaagggacaagaagcagagcctgaggaacaggaggaggactcatccagtgacccccgacttcggaggttacagaaccgcatcagtgaagatgtggaagagcgattgactcgacacagaaagatcgtggaacctgaagtagtgggagagagtgactcagaagtagaaggggatgcttggcgcctggaacgggaagatagcagtaaggaagaggaggaagagattgatgatgaagaaatcgagcgacgccgaggcatgatgcgtcagcgagcacaggagaggaaaaatgaagagatggaagtcatggaggtggaagatgaagggcgctctggggaggagtctgagtcagagtctgagtatgaggagtacacagacagtgaggatgaaatggagcctcgacttaagcctgtcttcattcgaaagaaggatccggtgacagttcaagaacgagaagctgaagcattgaaagagaaggaactggaacaagaagcaaaatgcatggctgaggagcggtgcaagtacaccctcaagattgtagaagaagagaccaagaaagagctagaggagaacatgcggtctcttgctgccctggatgcgctcaatactgatgatgaaaatgatgaggagtacgaggtatggaaagtgcgcgagctcaaaagaatcaagcgggagagagaagaccgagaagcgcttgaaaaggagaaagcagaaattgaacgcatgagaaatctgactgaggaagaaaggcgggcagaacttcgggcaaatggcaaagtcattaccaacaaagctgttaaaggcaaatacaagtttctacagaagtattgtcaccgaggtgccttcttcatggatgaggatgaagaagtctacaagagagattttagtgcaccactcttgaggaccatttcaataaaaccattcttcctaaagtcatgcaggtgaagaattttggacggtctggtcgcaccaagaacacccaccttgtggatcaagataccaattcctttgactctgcatggggccaagagagtacccagaacacaaaattctttaaacaaaaggcagcaggggtacgagatgtatttgagcaaccatctgccaagaagaggaaaaccacctagt

SEQ ID NO: 28725 - DNA, 2610 bp, Mus musculus
agtttccagcctttacttacaatgatgtcaccttattcttccaaggtctatacttggctacccagtgctcttatctaagctgacatgtggaaatagccacagttgctccagggaatctttaattatgatcctgagttgcactgaaccaccctgaggaagccgtatgttcatggttaatgcagacatttacccaggtcctatggattcagtaataccaggcagctagtcaaccaggaaaaggcttatggccaaggaggttaaggcgaccagtcacttatctactgttttaccttggttaggtgtctgcctgtatcccggtgttcaaactggccagacggcgtaagagggtcctattttactgtcacttcccagatctgctgcttactcagagaaattcagctctgaagaagttctacagggcccccatcgactggatcgaggaatacaccacaggcatggcagaccgcatcttggtcaacagccagtacactgcttccgtctttaaagaaaccttcaagaccctgtctcacagaaatcctgatgtgctctacccatctctgaatatcggcagctttgacttggctattcctgaaaagatagatgacctcgtccccaaggggaagcaattcctgttcctctctatcaaccgatacgaaaggaagaaaaatctgcccttggcactgagatccttggtgcagcttcggaatcggttaccatctcaagagtgggataaggttcatctcttcatggccggtggttatgacgataggatcccggagaacgtggagcactataaggagttgaagaaaatggtccaagagtcagaccttgagcgtcatgtgaccttcctgcggtccttctcggacagacagaagatctcactcctccacggctgcttgtgtgtgctctacactccgagcaacgagcactttggcatcgtccctctggaggccatgtacatgcagtgcccagtcatcgctgttaataacggtgggcccctggagtccattgtccacaaggtcacggggttcctgtgtgagccagacccagtgcacttctcagaagccatggagaagttcatccacaaaccatccttaaaagccacgatgggcctcgctggaaaagccagggtggcggagaagttttcagctgatgcatttgcagaccagctgtaccagtatgtcacgaagctggtgtagtcaggagagtacagtgtagagtctgtatgctacatgcactgcgatccctcttatgggttgtagaaacgcctttgaaaccaaaagaaagggggaaacaaaggagctagaatctagtgctagtgagattttcttttttaagtagacttgagtcttgaatgtgagccacctgtccaccacacctacctgtcatttctgaaatattcttaatgctgtaatcattccgtatctcgtgagtgttgttgaaagtatggtaggaatctgctgctagcagactattttaactctattttcctggattattgttcctttatatataaaggtttgatcatccagtgccttaattggctttagtagtgtaggtcttaccattgtcacagtcaattgatttgacttcagagcgtaatgggaacgaggctgctgcagctcccaagctcggtttacttaaagtgttctctagtagctgctagaaaatttttgttagaattttggctggatctataacaagagtactcagtattatttattgttttggtttttgttttgttttgttttttactgcaacttgacaataaaatatgtttggcatcagaagagaatagaacattagatctgagcccgatgctctgacttcatcttgttaaatacataaacctgaagtcagaagactaggataaatgagatagtttacatgaaggaacaccatcacacatgttttggcctaccgtgtcacgcttggccttattcctttgagcctgtgccagaacagtgtattgaggcagggagcaaagacaaaaagggtcccatatccctttctagaaaatatcccttgatgacctgattctcttccactagccctcactactaaaagtcctgtcacctcctagtgtggctctcagtgtgggccggggaccaggcctcagggcacaggcctttgggaactgtattagagttctctaaaatagcaaacagcacttaacagaatgaattcccagaagaagaagaacaaatggcgtacaggcttctgtccagctaatccaacaatgaacagaaagtccagaaatccagtagttgttcagtccaggaggctgaatgtctcagctgatcttcagtatacactggaatcccaaagtaggctctgacgccggtgaagggatggacttgccagcaaggtaaggacaagcaagccaagagcaaacgctccctacttccatgtccttgtataggctgccagcagaaggcatggcgcagactagaggtacgttttcccacttgaagatcagaattaaaggaagacctgccaacttcaagttaagcaaaaatccctcccaggtgtgccctccattgttagattttagttcaatccagatggagtcaagttgacaaccaagaatggccaccaccggggacactc

SEQ ID NO: 28726 - DNA, 1104 bp, Mus musculus
aacttgtagaaggtaaatgagcttaatgggtggggtccgagatgttcagacttctgtattccgcgagtctataggcaggaatccctctgagccttgtctgtctccttgtgtataaaggatcaatacttgtctcactcatgagatgcgtgagcttctgcaggttgaattcgatcatagattcacaagcattttgtgctagttcacctgtatgtctcatactgtagtgagacggaaaaggttgtctcaatacatgttaatttgagaaggtttgcaaatagatttttttgcgcataagagtttgggaaatttttctttttattgtagaacatattaagtacacaaaattagcatatctgagggattatctctaggacatccgatgtcgtcgtttgtgtataatgtgctgccctcggcagtcgtgagtattaagcctaccttgagactgaagtaagcatgacttctcttctcattcccaggggccctgtcccagtgctggtgatgagtcttctgttcatcgctgctgtatttatgctgcacatttggggcaagtacacgcgatcatagattgggctacatccatctgtcatctgaagaagaagaagaaggaaaaaaacccaacatatcttggaccaaaagtgtagtgattttctgttcacgtgtattattttacagagaataagaattgactttgagaaatcagttttttctatggctaataaactttggaattgctttatatggagactggttgcctgtgctttattgtgagggccctctgccttaagatgtagcagtgaataggtctttcttacagagctcattctttgcaggattggcagttcctcctacaaccatgtagtcactcaaactcaagatgctctaattggccttggcatgtttttcccaaggtatttctgtgctagtgattgtcattttgggtacttggttttcaagaagtgtgccttggactgccatcagggatctgtatgtgagacaggtggtgccgagggtaaagagtcaaagaaatcagaaaccaagagtcttggctggggcgtcggctcattctgttgttttgttttgtttttacttttttgagatggggtc

SEQ ID NO: 28727 - DNA, 1168 bp, Mus musculus
agtgagtggaataactaataaggtttctgtaattgagttatctcctaggaagcttaaagccaaaattttaatcaccaaaaattaaatttgtgaagtgtatcagctttattttataactgctgcctttgtttccttttctgttgtaattgtttatctcttatttttaatttattacattttatattttatatgtttaaagagacttttaatccttatgaaaaatatgggctacaaaagaattagaagttaaagtgagaacttaagggaactgttgctggccaggtttcctttttatccagcagaccactcttgttaccattccctatctctaaattaaaatgtgtgcatgttcactgccaatgattcagtagtttgcaaggggacgcagaaacatttaggctgcctggcagagtttttgggtaaccttttttatagtctttgtaacttgcacagtgctttgcacatagtgaactgttcatagatgtattacaaatacaagacatggacaatttcatcgtcatttcagatatattgcaacagagctgggcacggtgctgcatatgtgcaatccggcacttgggaagttgggctagggtgagcaattgggacttaaaggctatcctgggctatataagccttttcttataaatcaaatcaaaccaaaaataaaataaaataaaaaagcgcttcagtcacttctctgcataggtagtgctaaactgtaagtgctcagcccttagagactgtgtcgtgctttttggtagtttgtcattactcttttcacagttctatgtcatcactaccatattggtacagaggagatttctcctgacctggagcaagagctgctgctcaccaggccttctcagcccatgtgtagatggactcacttctatactgagacctatgacagtgctgacagcagtaacagtgacgattacagcatttcctggaaaggggagttggcaccagcctcctatcatttagcttcagatggcttatctctcgtgtttgtgtcggaagcaagatacttgaatccatccaggatttctctcacaatagtaacatagaattgctttaattttattttatcattgcattgtgtatgtttattcaagtgcaactatttgtggcctgtgctcttgagtatatattaatggggagttat

SEQ ID NO: 28728 - DNA, 1223 bp, Mus musculus
agagtttcaccgtgtgtttgtctcttgttggcgcataagtgttaccaaagttcattacagcagtgttttcctcatctcagccaggttttactgagttctggcactgagatagttgatagagatccgcttcattaacagagtagggtgactaatatcaaggcagtccctcttagcagtcacttgtaaaagtgaagggttaggaccaagctacgttgtgctgtctctatggggttctctaggaggcaagggtgtttagtgttgcttccttccacatagcctcagtaactctgacaggcccagagtcagtgctgctgtggcagccatgccctgcctggacagtgagttcagggatgtttgaagaaacaagataatctcttcaccttgacatatacttttccctttttatttactagtaaataagtaattataaggccactgccagttacgtaatagtaatgtatgataactccataagatattttggtatcaagattcttttcttcttttgtagcaagaccaggatgtagcgagcagtcctccagagagctccttccagaagctggcgcccagcgagtataggtatactttattgagggatcgagatgagctgtaaaaactcaagaatactgcaagcctttccacaccagcagaggcttacgtggtggaaatagtgaacctatattttcataattctatgtgtatttttattttgaataaactgaaagaagttttgggtttttaatttttttcctccccctgactcaattgcattgtcatttaatacagcctcttttttacaaaatctgctagggttttaaagaacaaaataaaaaccagaggcctgtctccactttaaatctgtcctggacagtctttatcatgcaagcggaaggtggcattgccggaagcacgccgttaacttacactgccactgcacaggcaagagaatcggcctgctccctgtgtgctatctgctttttctttcttcttttctttgcatatggtcaaaatctattggtatttttattatcacatttctaaaagctaaggggatatatattctaggggcttgggagggaaataaattaaaaatttcacactgtgtactgtgttgtactgattggttgggcattgcttatgagggttccatagtggttcttcttggattcctaatgtgtaacttaaacatactatgaagaggaggagagccataagccagagca

SEQ ID NO: 28729 - DNA, 1177 bp, Mus musculus
ccaagaaaacgcagcagcagcccggggcggtgctctccatcctacccgagccgccgatgctggaccgcttcctactcacccctgactccaagaatggcgtcccggggccgccccaggaggcacaaccctcacggggccgcccctaccgccaagccaggccactgcgcccacaggaacagaccccaggacactagagcccgggagctctgaagaagtagcctggggctccaggctgcacagccctctgggaattgtagttcccgtcccggaggcacagaggtacgcggtcccttccaatcccgaagagccccgcgcacagatggcttggccgtcgtgggcacagggcttactgggaaagagagtcccagctctccgatgacatggtcaatgaaactacagtatggactacatttcccgacgtgcttcgagatgggcaggacccggaagtgagggcgtgagaggcctctctggaagttgtcccgggtgttcgccgctggagctccgggtcgagaggacgaggtgccgctgccgccggccccggagcccagcccttttctagcccggtccagtcccagccgccacctcctgaccccgccgtcgaccccgtcgttaccatgaatcctgcggtcttcctgtctttagcagacctcagatgctccttgctgctcctggtgagtgtatgtcggggtgacaaaccctccgactgtgtccctgaacgcctcccgccctccgcgagggggaacggtgcagccccctgcttgcctcgactctcctccgctggcgaggcgtgcacccccgggcactaccttcactttggccgttcttttggctccttaagcctgcggtccacaaggcctgcgaaagcacagtcagggcttggaacctgcaaataggagaattcgccttggggggagtgagtgatccgtgggagggaggtcaccgctgaggcccctggagttcgtttcagttttgtggacgttgaggacctgcttggggcaccagaatcctaagggacctagggtacacctaatgttttctcccacatggaggggcgttagaagccgacaggtgttggggtcgtgtgaatctctctctggatccttgaaaccggctggcaaagccctctgttgtggcttaatgtgattggttggaaacccggaactggagtctggtttgg

SEQ ID NO: 28730 - DNA, 1202 bp, Mus musculus
gccttttgtttttctctgcagactttaaagagtggcagtgttcaggagcagtggcttacagacttacattactgcttcagcgtgtacatcagtggccatccccaagggcctagtatattgaatgcattgtattaaagaagcaccatggtacctcctgtttgaagttaattgttcatgcacattcattttattttgaagaaagactgatgtaacagatgtttgccattaaacctcaacttttaaagaagttcatgagcttccttcatacagaagtgggaaaataaagtttaagagcttttagtgctctcacactgtttgcctggaatagtacgagatgcaaagacaggctatagaacagtttgaatttctgaggagctaaatgtttacaatacatagagtgagctacgatgccttcattcacttaccagtgaatctttgtgatctcatctagataaacctgtcttcatcattttgaatataatttactaaaccaaaagtctaggtagttaagtgaggtaaacacttgcttcctgaccttcactgttagcacagtactgacctgacgtcgtcgctgcctctgtaaaagcccgtaatcactagactttatgtgagccaagtagtcttagttagagtgtgggttactttcacaaaagaaactgcttttggggaatgctacctattcctgcaagttggtcagaagatgcagaggggaagagaagcctgagttggttggtgcattctgctgtaagccctgtcttgctgacttttggtgctgtgctagcattggtgccactcagcagtgaaagccgagcttctgttctctctggaccaacctggaaactgagcacggtaaggaagcaacacaatgtgcttctcagttccgctctagtacactggacagtttctaactgcgtgcactaagccaccgtgtgcatctaaagtttaaaatgtctcttgtgattttcattacagtatgttccagggaagtaaagagttgagggtggttgttgtggcccaggtttcctatctcattgaagaaggttctatcgagtgagaaacctaggcctatgccaggtagctgttagaaatcccagcccagcagctccttagtacaggtgttgtcaggatgagtgtggcagttctcatttccagccatgctggcttgaggtgaagcacacagctaggcagtccatccgagcgcc

SEQ ID NO: 28731 - DNA, 1121 bp, Mus musculus
gaagagagaactattatatttttattaggataagatattttaaatatgaaagtgtttcagatcttagaaaagttagccaacatttggaaatacttatacttgaacaaggacttcagcttatcatagttttagttaaaaatgtttgcttgaatgtgatacgtattaatgtccatacctaaaatctgtatttgtgttataggatttgctgtcacagatgcatcactatagtggtggtgttaaacaaagtgctcttcttggacttaaagaccttttgtctcaatacccatttataattgatgcacacctctcaaacatattaagtgaagtgactgctgtgtttacagatagagatgctaatgtacggttagcagcagttcaacttcttcaattcctggcccccaaaatacgaactgaacacatttctccattttttcctttggtaagtgcccatctctctagtgccatgactcacattactgaaggaattcaggaggactctttaaaagttctggacattctgctggagcattatccagctctcattactggccgtagcagtatattgcttaagaactttgtagaactcatttctcatcagcagctgtccaaaggactggtaaatagagacagatcccagtcttggatactttctgtaaatcctaatcggagagtcacttctcagcaatggaggctgaaagtcttagcaagactcagtaaattccttcaggccttggcagatggatccagtaggttgagagaaagtgaaggacttcaggaacaaaaagaaactccccatgccactagcaactccatttttatcaactggaaggatcatgccaacgaccagcaacagatccaggtttatgaaaatgggggttcacagccaaatgtcagttcacagttcaggctacggtaaggatttcagttacgtccacactcagttttcctatattgaatttttaactactgacaattaatggctaatggtggaaacacataatacttgtctttcataattttcatgtagttattaatggtgagttgattagatgactcccaatggcaagagtcatttgaaagtgttttcatttgtagcaaaagcctaattagtagtaaaattt

SEQ ID NO: 28732 - DNA, 1112 bp, Mus musculus
aggagtggaaggggttcaaagctagactcttgggagaacaatactgatgataatactgagatgaagatgaaaatgccctctggcatatttgacctgattcatgaaagaactatactgatgataatactgagatgaagggaagatgccaatgccctctgggatatttgacctgtcctcctaggcacacacactagtatttgttcccagttctttgtctatcacgtctctgcagcaacttcctccttgtcacctaccattgttccttccacctgttcacgtgaactggccttactcggtccttggtcacccaacttatttggcactgcctctgtcaccaattcctccattgccgttaggggcacctcattcagtatcttctactttgggttgcactaagacgaccggaggagtttgggggtttatttgtttgtttttgtttttatccaatgttgaatagcaaatccctggctggaaaggattgattgatgacttccatgtatgcacagcacagctcctttgtaaaactcaagtatggaatcctcccccatagggatcctgcccagtgggtccatgatttaggaatgtttcaagggggatgccaggacaatctttaaatgcatttccttcttggttccacttcaggaggcagagatgacatggtaggagagtacatttgagttgtcaacagtctctgcagtgtcaggtcaattacatcagcacttggtctagaccacaggaaaggaatgattgtgcctcctgggaatgtcacaaggacctgataattatatttggcaaagctatgaggagtggctctctaatgtcattgctaagaattacccttttagtagcatctctggatgcccaagcttttcagagggatggtacttcaagcttttcagagggatggtacttcatttctgtgccttccccccccccccccccgctgggcctctttccgggtggtcggtcctcttactcctccctgcccttggtagttatctgtattctcttgtcttccctccaaaccccatccccactcctaacctaccccccccagccccccttctgccctcacaatagctttcgttctcccatggtagaggtggaaggta

SEQ ID NO: 28733 - DNA, 1112 bp, Mus musculus
tttttgtacacgtgtgtgtgtgtgtgtgtgtgtttgtgtgtgtacacaggcaccttctgaggccataagagggtattggatcccctagagctgcaggctgcaagtacagagagttgtgagctgcctaatgtaggtgctgagaattagactctggtcctcctgacagagtggcaagcactcttaaccacagagatctttgttccagccatgtcccttccccttttaaagtctgtttgcatgtcagatgagtgcatgccatgacccacgtggaggtcagagagaggatagctttgggtgttagtcctcactgtccaccttgcttgagacagaggtttctctgtttttctttgtttgtttttctgctactgtatgtgctggctgcctggtctcgcagtctcctgacgttgctgctcatctcctcatggagcacggggattacagacctggtctaccatgctttgctttctgagggttctggggatttgaactcaggtcctcacacttgcttggtaagcactgtactcactgagccccacacccccagcctcctttctcctcttttaagacaaggtcttaccaatttagctgaacctagctttgaacctcctaccctccagcttcagcctctcgggtgctaggattattggcatgtgacatcattgtctgacttgccttgctttcttggggagagtatgtacatttcagcatattcttgaagtttcttacctaatttttccactggctttcctggccgttgtcaggagggcagagaagtgcagtgctgattttccatgggagtatgagctcagaagcctggagaggcttgctgtttgtaggcctttgacaaagactttatttatcctttgtgctgtgtgagggttctggtgtggcgtttttctctgttagacttgacttcccactctgccttgtactttgggcttttgtgtttgtttgtaaaatgagttttctgggataggaagatagctcagttggtgaggtacttgatgtcctcctgtgtggacctgggtttgatcccaacccttaggtgaaaatctgggtgggatggtgcaagtgtataaccctagccctggagagggagagacacacaggtt

SEQ ID NO: 28734 - DNA, 1147 bp, Mus musculus
agagagagagagagagagagagagagagagagagagagagagaagtaagaaaaaggagtaggaagaggaagagaaggaggtagaggaggaggaggagaagggagggagggagggagcatgggaacgaattgggaatgaggaatggtgtggggcttttgaaagcctgaccacagtggtgcatctccaacaagaccacacctcctaattcttcccaaacagttccaccaaatggggacaaaacattcaaaagtaggcgccttcggtggccattctcattcaaaccaccgcaagttggggggcttcctgtggtccttcattgttaggttaatagcagtctgaggtttggatctgttattcacttagagctacttgtgaggatttaatgtattgaacttgtgacaggcttgattagtcgtttgttaaatctaaataaacgcaccagctttagtttaagtcagtgttttcctaactgctaagtaaactgttgagatgaaatggcactttccgtgcagttagaggaatgaacgacaaaggttagctttgtttgaatgatagtccaatgatgcctttcaagcatgcacaccatttgaaacatttcaaagggttccctccgtccagaccttattttgattctgtcagcagtgttaggacgtattgttccaattttaaagactggaagctgcaatttaccaaaatcatagccctaaatcataggagtcattttatttagtcatttatttacttacgtatgcatgcatttatgcctttgaaactcacagtgtgaggaactgaaaagcacagagaggctttgcaggggaaggtctcttcctcacccatgttcccagtcactcagttgccttcaatcatcacgattcgttttgtttactcttccgggggtgttccgtacatgtccaagcagatacacagacacattcattttcttttataaaggcatcgcagcacaggctgcgtgttacttaacgtttttattgtaacatctgtattatacccagaagtgttttaacccacatgtgtaatttaggcaactactgtgtacctggctgtaaagtaaaaccttgccagcgttgtagtatcagcctcatcggggaatgaaagggcagtagtgttgccagcgaagcttgtagaa

SEQ ID NO: 28735 - DNA, 1145 bp, Mus musculus
ccaaagtttcagaatcccttaacttgctctatgccagtgccattgatctaccgtctcataggctccaggtaagagatcagcttcacccctccaaagacagttttaagtacaccatctctgtcacagggccaacttccttctggacctggcatttatagcttagcgaagatgtttttctttttcagattgtttttactgtggccgtagttcacagtggccgtgttctgcagctgtttttgtgtgctctctgtctcacttgtctgcctgcttgccgtgtttgtgcatggtggcttgccagggacctcacatctcgcttaccctctctgataagtctcccttctaaattgcccagcgggtgatggcagagcgaattcatttgtttctgagcctttgaaagggtttgtattttccatttttgttttcagtattcagtgagctggtttgtgttcttttaagatgcaggtgatgaaagggaagatgtttatatcggaagccacatgccttgccctgaaaacctcaatgggtactgcatccatgggaaatgtgaattcatctactctactcagaaggcctcttgtaggtaagttggcggctcatgagcagggctgagagactttttccattggtcattactgtcttatagactaaatagtaccacataaattgtgttgtctttaaaataaaccaacagatcatctatacatcgcccaaactctggcaagaaatatgcaaagataagaaacaggctgcataagggtttgaaggctgtgagcttaccatctttacgatggcattttaatattaatttgccatattccaacgctattttgatctttcgacaatctgtcacaaggtggttgaacgactgaagaatatattacgaatagagaagggataactcaaataaaacatacactaaaatagacttctaaaaataaaggagtgggaatgaggagccaggtgtgaattgtgagagggaagtgggaatcgtgtcagtcttcagctcctgtactccagagacattgcataactcgttcaaggtcagcagcaagttggaaatagagctgagaagaaagtagacctcagattccctgacacacaacctgaggatttcagtgcattttgcaggtgtgtgtgtgtgtgtg

SEQ ID NO: 28736 - DNA, 1836 bp, Mus musculus
gtgttgtgctattgctctccgtcagagaagcttccttgtcgccttggcgctgtgataatgctcaggaaaagtagtgaggtcagcatcttttcaccttcacagcgatcagtctcgggaactgaggacttaccgggccagagaggccgacgtccctctcagaaatgtgtatcagcagtgtgtgacccctcccaactccagctatagagcaaagaacaaccagtcattgtgccttgaattaagtctcttacttccttttctaacgggtgcagtgtgtgaactgtgcgttactttgacatagtttaaacatccttaactgattttgttttttaatatctgtattttcaatgcaacaggaaatgccccaagaacaatagagggcggaggcagaagcagaacctgggtcattttacttcagacacttcatccagaatggtctgagccgcggacttttatatgcgcactgaccacgtgatgtacatttattatgtctttttttaaagaatggaaatatttatttcagaggccttatttttggacatttttagtgtagtactgttggctcgtatttagaatatttagctacaacagtttttgactgtttagtagtctctgttttatgtttttaaatacagaaattggcttcacgaatttgtaacacatggtgatactactaagacttgttctttatccatggaatgtaatatttttgcagagacggatggacccacttcacggtggtcataaagtcatacttcttccccagtgaccacagcaaatgacaaagcatgaactaaagtaaagatgtttacagattacttttcttacaaaaaaaatctagaggacactgtgtttaaatagatatttaaatgcttttgaggtttagtatctgattttttttagacacttcccctattgcatgggctgccaagctgtgtgtatgtgttagatgtcacatatttataagctgtacaaactgcagttgactatttctctccttgaagaaataatcctaatcattttaaaaggggcctgggaattaacggtggaacaggtcactgaaaataggtttagatattgtcaagatagggcgtttaatgagcagattgcaataaaacctacagtatcagctaaactactttaatacacattcatttttaaacattgtatttgttttaatataaatgtacaaattatatcagtgtttgtgaatacaatgcagaaataattgttaatgattggtgctctgaaagtgagcttaaaaatgacctaagacctctaattcaaatctgtcctgtagtagctctattaatagatcgttggtgtttcaaagtctgaactgtgagtagaatgtatcgaggcgtttaacatgtagtttagccagtcaaaagtatgcatgtagagtttaaagactatgtttaaacttaaatattaattttaataatttgatttggaaaagcatgttataatataatgttttcactatacggtctgctttgtgtgctcatttattgtattatttgatattggtctgttagtactaataataggaacaattcataggacaagaagattgcagttcagaattctctttccttttacaaaccaccccctgaaatgatccaaagagaaaaacttagttcagtgtttgaagcaacttggcttgcaggctcagtatgagtaacatagtggctttagtgaacttcttctcacagtttccccctcccacccacacagacttatttgaggtccttagtcagtcggcaagcatgtttggaaccggccccggtgctttgcaagggctcatgttgcagggcagtcacgtatgggcacttgtgt

SEQ ID NO: 28737 - DNA, 1222 bp, Mus musculus
ttgaagtagctgtcctgaagtatacaactcagtgcttagatacagaaaaggacattccagtgctctcttggggcagtagaactgtaggtggaaagtagaaccaggcaggtaggtgactgctctttgtgtgtgtgtgtgtgtgtgtgtgtgtgtgtgtgtgtgtgtgtgtgtgcaatgcatatgcacatgtgtgtatgtccatccactgtacacatgtagagagatcaaagaagggcacctgttctctagctctattttaggtccttgagacaggatctgccactgtacttaaccagcaagcacacagcaatcctatctgaaccctctacagtgttgggattgcagacacgcatgaccatgcacagctcttcacacgggcactgaaagagtagtaaactcagtgctccaaggtatgctaatcataaaacagatagtgacattcctccacccacccacttcctgagtttaaggagtattcattcaaagaaagtcaccctgaccattaccagaacctgcaatgcaaatgtgctattgttaggggctcttagaaactgtcttcagagttaacaattaccaggtattctttgtgacacctgtgactttgtacttccttgcgactcttatctggtatttttggtattttccaacaactcccttcccacctccttgagttgtggttttttcctttaaatacccccttactcagctactcagggcgccacggtcctctacccctgtgtggtgtatgaccatgggcccgagagcgctcttgaattaaaatcctcttgcaatttgtagcaagaccgtttctcgtgggtgattttggggtgtcgcctctcctgagtcagaacgtgggggagtcgtcacgttgtgggtctttcagcaccaggaagatgagcttggcactcatgcttgtacagcaggcattcatacccactgagccatccccacactcccggctcctgccctttacataaaccctctgcttaggtttatttaggacatttttctgtacagttaagaaacttctgacaatgccaggcagtagtcgcacacctttaatcccagcacttgagaggtagaggcagatgggtctctgagttcaaggccagcctagtctaagagtgagttataggacagccaaggctatacagagaaacccccgtcttaaaagaaagaaagaaagaaagaaagaaagaaagaaagaaagaaagaaagaaag

SEQ ID NO: 28738 - DNA, 1354 bp, Mus musculus
cattaggatctgggcacttcatcaatggctgtgtcacccttcacgaggctgactgtctcagcagtaccaagctgttgctgagagcctgggggattctttgaaaagcctactgaccttcaattcatgctggccgcctgaagaagctggttctaatatggacgaaaagatgcagcaatggcaggaacaagatggatgtacttgtcagtcgagtgaaggcaagcaggtggaaggaaaatcagaccttccttctgcatgggttctgcccacatttactgtgcacttccctctcgagagacaatctgcttaagaaaatcccttagtggagcggccagctgcttgtcttttagttgactccagatcagtcagtgacaaccaagattaaccataacacaaaaatactaagtacctcgggcttcagataagaggccattgcaaagatgttttctttgcctgtcatacggttaaagtagtagtttcaataaaatgttcttattaaggctcaaagatatggggctattatatatacaaataagaaaatgtatagtgagaattttggtgtcttaaaaagaaacacagaaatactgtaggtgtggaatctggggctgcttcagacttgtccacagcagctgactaatttgccttgtgctctagcaggggcttgattcttccagctgcagatggtttctgtgattgtgtgaggttttgaattctgggggttcttcagaggataaatgttagggctctaagaggcgctgagttgttgattgtttgctgttggttgtgatttgttaagcactcgtgaacaaagaagaaacaacaagaagaaattagatgtcctgatgcttgccccaaggaacttgatgcccctaatgggcagaaagtctaatagtaacattatcccctttcccctctatccttttttctgtgctatctagttttagggggttgaaggagtagaagaagaggagtggagaagggcggaagaaaaagaacccacaaagtagccaaaagaccagctaccaaacaaaatgtattagatgtctgaaggaaacgtgaacatctggtgcacattatagaaagttccactgtgttttactccataagtaaaggtggaagaaagggcaacgtgttctgggttcatctcttgggactaacggagatttgttaaagggtaatgactttctttctgaatgaaattcacttttatgtatcactttattatttcttttaaaatgaatattagaaataaaaacaaaatgtctagcagttattaagttttaaagtgttattgctagagtctacatagatctgaatcacaaaattggttgttatataaaaatcatggtaggaagat

SEQ ID NO: 28739 - DNA, 1172 bp, Mus musculus
tcccacttcttacttaatcatttgctgtaagagttcttaatgtatgtatgcaaggccaagtagtgtttctcagttgccatccactttgtcttttgagacagggagcccactaatattaggctaggctggctagccagccagctatcctcagggatccacctgtctttatctttcctgtgctgaggtgacagcatttgctaccatacaaggctttcttagaagcaggttctattgatcaaacttagatgctcatgcttgtgtgacaagccctgagcacctgagcacctgagctgtgtccttagtctcggttaagattgttttttttattttctttatagaaaaataactaatgaactaatgtgaacttagtgaatttaatagctcgtctgtttttttgtggagactaatgattctgtttcctgaggtaggaggaattagacattcgaacactgcaatccaagaatcgtaagctagcagaaatgctagatcagcggcaggccattgaagatgagcttcgggaacacattgaaaagctggagcgacgccaggccactgatgatgcctcactgttgattgtgaaccggtactggagccaggtagctactttgtctcttcacccctattcagatcagccttctcatccttagagcgctcttagtttctcaacttttgcccttcatggttgtttactgcatgtttccttctgtagtttgatgaaaacatccgcatcatccttaaacgttatgatctggaccagggtttgggggacctactcacagaaaggaaagccttggttgtgccagaaccagaacctgactctgatagcaatcaggaacgcaaagatgaccgtgagagaggcaagtgtttgcaaggaagtctgtcactgccttagttacctgggttttaaggttgagctttgctctgaggctctccagttgagcgggacagtggattttgctatttctagctttaaaagaagattaagggctcctttttctctccctgtgttgttgggaggtattctgtaactgtattagttactagatttttgaagttgaactttgctttgaggctttccatttgagggaaaatttgctatttccagatttataatttgggggggctttttttctccccatgttctcaggggatgggcaagagccagctttctc

SEQ ID NO: 28740 - DNA, 1209 bp, Mus musculus
gattaacaaataataaggatacttgaactaaaaggaaaaacttcattaacattcttggggagttaaatcaaatggttgcttaggaaaaacataaccattttttgctaccagtcagaattattttctctgtggccattaataaagaacagctagttactggggtcttcatctgtgacttagaacaaatgtcctggtcaggtcaattccactcagctcttctagtggcttatatttgagttgaaacaatgtaaaacacatatcaaaatagttctgggtgacctggtttactcagggattgggttttactcagaagtggtagtctagacttcataattttctgagtaatggtttcaagtatgtggaacattggtgagttactctcccatggctctgacttgtgggacatacatgtttcactctgattctgacttgccttttcgttgggccttcctaaggtggaattgcggagtgcagtggaggaagtggttaaggaaaccccagagtatcgctgcatgcagtcacagttctctgtcctgtataacgagagtctgcagttgaaagcccacttggatgaagctcggaccctgcttcatggcacccggggtactcaccagcgccaggttgaactcattgaggtaacagcgaacttttctttgtttcactgcatatggatcttacatgtggggagatcaggcagatactgtgccattgtgtgtgattcaatggaacctggctggcactcttatcacaaagccaaccattccctctcctgcattgtcttctctatatgattgcctgactaatggattttgtggttttactttcatgtatagctaatatcccattcatccagtgggtatatgtataagacaacagacctcttcctgatgaggaagtgagtggaaagtgaaaagtttgtcgatagaagtaggcatgtgctccaacagtgacagccatcatgaagctgtgcatacggatcttacatgtggggagatcaggcagatactgtgccattgtgatattgaatgcacatttaggcaaattattttgaaggaataacttttactttggtatttatgttcacttttgtgttttctatactccttaaagtagtatttagggaagttagtttttatgtatgttggctaaataaattgatactagtttatgtttacatctggacagtttatggttagttctctaactgaa

SEQ ID NO: 28741 - DNA, 1169 bp, Mus musculus
agttttaagccagaagtcttgagtttggattttgtctctgccaaataattcaactttgagactcaaagaactcactgaaacactggttgtttaggtttatatatactccataattatttactaaatctaaactgccccactttcctgtaatttcagagttaacaatcaaattagtgaagaataggttactttgaatataggagctaaggatctcagtttagttattggttatacctttaacaataaatatgtcgttcttttgagtcttggctccaagattaccaaaaaaagaaacaatggtcgtgccaaaaaaggtccgcggtcatgtgtagccaattcgctgcacgaactgcgccccggtggtgcccaaggataaggccattaagaagttggccgggcgtggtggcacacgcctttaatcccagcacttgggaggcagaggcaggagaatttctgagttcaaggccagcctggtctacaaagtgagttctagaacagccagggctatacagagaaaccctgtctcagaaaaaaaagaaaagaaaaagaaaaaaagaagtttgccattcggaacattgtagaagccgctgctgtcagggacatatctgaagcaagcatcttcgatgcttatgtgcttccccagctctacgtcaagctgcattactgagtgagctgtgccattaatagtgaggtcaccaggaatagattccgtgaagcccagcaggacgggacatccccatcacgattcagacctgctggcgctgcacggcgacctccaccaaagcccatctaattaggtggttttgtaagggtggaaggaaaactaccgtcgaaaaataaagtggaagttctactttatgtggcaaacaaacaaacaaacaaaaaacaataaatatgtcaagacgaaatgcatcctgacttctccaggaagaatgacagccaacattcacaacattctgaattcacacttggatgcttatcttcagagtaaagctcattgtcattttaaaatggggcctctcagaaaatcctagaggtagttttgagaaatgtgaaacttgacagacttacaataataattctccagacaaagcagcataaaatttccttttcctttttatttttaaatttatttatttatattctttaatccttttttacagtccaga

SEQ ID NO: 28742 - DNA, 1154 bp, Mus musculus
ctccaagcttgccacaaaacctatgatccacaacctgatctgtgcagcctgcaagatacactggggcaataatagatgaatcttgttagagtgaccaaccaatgattagtctaatttgagacctgcatcatgggaggtagcccatgtctgatactgcctagatgagcaagatctataagctgaatagctggatgactaagagacctaggatggaatcaaacatgactcacaaagaggaataacatcaatgaaataaaacatttcttaataatattctgctatatttgtaaggccagggaatagtacaattatcagagatacttgctccagtagctgatgggagtataaatagtgacccacagccatacattaggcaaagcttagaaaccctgtagaagatagagaggagccagagggattgaagacacaggtcaaaaaatggcctacataacaaaactaaacaagggctgtagggtctcacagagactgaagtagcaaccgcagaacatacatgggtctgtggtaggccctctgtatatgtactgtttagctggaggtttgtattggactcttaacaatgagagtgaggatatctctaattcttttgcttgctcagaccactttttcctccttttgggtggcctagttcagcttgatgtgagggtttatgtcttgtcttaatgtactactaggatgtctgctcttttctgaaaggaaacagagatgcagtcaatcttgggaagaagggagtggagaagttggaaggagggcaggaagaagaccctgtagtcaagcaatattgtatgaaagaataataatttgtttaaagaggaacactggaggaaacctctcataatgattgggctagtaactgatatatgagtactgcagagtatgatttggaattatttcatttattttattttattttattttattttattttattttattttattttattttgttttagtctatcatgtatggttctctcatggtatctgggatgtccagaaactgatgagagtatatgtaatgacccatagccaaacattaggctgagcttatggaacactgaagaagaaggagaaagcattgtagaagccagcagaaatgaagataccacaataacatggtccacagcatcaactaac

SEQ ID NO: 28743 - DNA, 1150 bp, Mus musculus
gatgtaataaaatgtgagaagtagattcacccagctggatagacagaggagcgtgcccaggttggtagatgaatatgaaataagttctaattatctacccgtactattttatattccttttctctcttctgtaaaagaaggctaacaaacacaactcaaggtatcatagtggttcacagagtgagaaaagagacaaagcactgtgacctgatatcgcttcaatggttcaatatttttagaggggcctggacaatgtgataacgtgcatcattccattgaaataatattgaaacctttaaaatgttaaaaaaaaaaaagaaaactgatatctgtgccctaagtgactaggactatataaaatgcataccagcagaaaattctctcatatttctctcatattggattcaatatccattataagttgctatcacatacatttgatttttgacacatcttccaccttgttaaagagcaagcctcactttaagaaagtttgatgctttgagagattcatttctcactgttaaaatatatataattgatacttacctggcaggggagacaccatgatcacgaaggtggttttcccagggcgaggctcacccattgcactttggggtgtgctgacccctgcgatttccccaaatgcgggaaactcgactgcataatttgtggtagtgggggactgcgttcgcgctctcccctgacttaaaaatatatatatatatatatatatatatatatatatatatatatatatataattgaattccaaaaacaataagatgatgctgtgtttatcacccacagcagaggcaggggacttctcaggagtagtgggacaacacagaattgatgttacaccttttgttgttgttctgtaattttggtttgttaaaagttttactttttataatttgattaaagaaagaatatgaatttgcgtggatagagaaaaggagatctaagaggtgtgagggagaagaaatatggtccacatatatagtagaaaattaaaaataaattaaaaaataaacattatagttaactaaaaggatataagaaagcaacacaaactggaaaaaattccaagagttaatacttatctatctttaaataataattcttctattgaatcttactgtgagtt

SEQ ID NO: 28744 - DNA, 1159 bp, Mus musculus
ataacgacttctacctgtttggttgtgttttcctgtttttctttaaggacttataactctttagcagtgttctcctgtatttctttaagtgagttattaaagaccttcttaatgtcctctaccatcatcataagatatgcttttaaatctaggtctaggttttcgggtgtgttggggtgcccaggactaggttgggtaggagtgctgagttttgatgatggtgaatggtcttgatttctgttagtaggattcttatgtttgcttttcgccatctggtattctctggagctagttgttatagttgtctctggttagagcttgttcctcaggtgattatgttagcctctatcagcagacctgggagactagctctatccttagtttcagtgttcagagtactctctgcaggcaagctctcctcttgcagggaaggtgcccagatatctggtgtttgaacctgcttcctggcagaagttgtgttccactcaccggaggacttaggatcccgtggtggatcctgtgtgggtcctggcgggtgtccagagaatacccgggccagggaccccggtgctgcatttggccagaagggacttgagccccggatcaggtagggttatctgtttccttaattaatgcagtctcaggtcccgtacgattttattgtagcaggtgctgtgttccactcaccagaggtcttaggatcccatggcggatcctgtgtgggtccttgagggtgtccagagactccccaggccaggtaccccggtgctgcagtgggccggaagggactagagccccggatcaggctgggttatctctaactattttgataagtacaagaaaactaaaatcaatcaatcaatcaatcaatcaatcaaacaataaataaactacttggattctagtaggaggactttataaaaactagcttgctcaacctacaaatcattatacagaaataaatatttcatgtaactttcttattgttgattttggctctactccctggcttggtagtatagataacctataattttgatttttgttgtttactatacttgtctcagtttctcttctttcctttgatcataactgtctcatttataaaacatttttatttatattttgttacaagtttgtgtaatgaaattgctaactg

SEQ ID NO: 28745 - DNA, 1101 bp, Mus musculus
tactgctgtagatgaattcttacctgtgaggtagcatatctgcctagacagaaatggtgttctgttccatagcagccaaaatgacaatgtaaataataggttctgcagtggaacaaaggccactgatacccaaatgtcccaaagggtcccgctcagaacagaagcactagatcactgcagttattctacaatctgatgtcatcatcttaattttctccctaagaaagccctgaaaagtgaattcatttctatttgccccgtgttttgacaggagtaataatgtccgtgtctagtgccttagtctctttttctattgctcttcatggaatatcttgaaagcaacctgaaggagaaagttatcaaaggaaagttagagcagcaagaggttgaattggctactcacattgcactcagccatgaagcaaatagtgatgaatgcttgtgctcacctcactttctggttcagagggtagcccagggaatggtaccaccctcggtgggtgggcattcccacctcagtaacctagtcaagatcctctcacactgggacagatggccgtagactgtcttccaggtgactaattctcatcaggctgataatgagatgaaaactcaagcagccggttgggtctctaatatccctttatcataccgattccttaactgggttgcataaatcttcttagcctttcctatctttcttctagattgtctggtcacagtacagtcctgtactgtgtattacttccctcccagatggctcagggcctgacaacctacatgtttctcccaaatctgaccttaggctgcactcctatgtgtatacccccaagcccctgtcactaacatctgcagagtgtgaccatggtccagtgtactgtctttctccctacattgtcaggccatgtatctctgtccataaattgagacattgtttatcaggggctaaggccactttgcctttttcaggaaaccaaactggatccctagttttgtaaagcattctcattcactgcactggtcaccagactggctgtatcaatatcactgagcaagttaggggaatcagatctctatcttacatataggtggtaattatgt

SEQ ID NO: 28746 - DNA, 1121 bp, Mus musculus
catgtgaggggcgtaccctgctactgagctactgctactgctttgttagggcagacataaccaaacttatgtgttagagagattagaacaccaaagttgtttccattaaatggaaaattttcagaaagagactggagagatggatcagtggttaagagcacacattgcttgctctttcagaggacccaagttcagtttttatcacccacatcaggtggcttacctttaagttcaactcttggggatccagcaccctcttgtggcctcctcaagaactgcactcatgtgcatttaccgccacacagggacacctcacctgcatgcacataattaaaggtaaacaataagtctgtgttaatttattgaaatattttaattgcaattcagaaaatagctggcattttctaactattataattcatttgtttggagctcttaactagggtagtatactattcatctaacattaatgtttggtaacctctctaattttagggacccagagaagaactggaatcgaaattctgtgaaaggacttgtagcttctctgataaatgtgaaagataattctacagccacagctctggaagtggtggctggggaacgactctacaatgttgtagtagacacagaggtaaatggatgttaattaaagaaaatttaaaattaatattctgcctaaaaaatcatataatggtagaaaaattctgtgcttttgtagtcctctgagccacttaagctttttagttaattttttgacagatttaattttcatttatttttctgttctgctgtcaaatttatatttatttaaatttgtaaactaatctcacaatttttttattacagtaacattggatttatttacatttcttcagatttcactgttcttgttcatgtaaattaacctcatcacaaacattttgtgatgtatcttttagttttctgtgtgttcttcgcatgtacacacaccatgcagaaagcagaagaaggcatcctacgtatacatggtctttccagatacagctcccttttctgattgcagccttgcgccccttacctccttctctgcactttctccctcctcacaaacctcaccttctagtctctacatcagcttc

SEQ ID NO: 28747 - DNA, 1830 bp, Mus musculus
agaggaaaagaacccaactgagtgcatgccagttcagagtacagacttctcaccttgacgtttttacacatgaacttccaagaatttgggatccaagttgtttatataataatgttaacattattttcatatgtaattctttttagcacttttaaaattgcagattcctcttttcttacctagtgtgattatggtccaattattgtagttgtgattgcatgtatatcatcaatttttttcttacaaaaatcttttgtatgtattaaagaacctgaggtacatatagttggtaaattgtgtatgcaaatgcccaaaatacaaagaaacagatgaagttataggataaatatagctgacagtcagcttttaactagtttaatttctaagtacagtattaatgacttttcttttgcttataaaatcattcagatacagaatagttgtaaagaaagtcactggaccattaaagggaacacatagcaattatgcatacaccgagctacttgaggtcagtcctgtggagacagcatgccagatccttggctgggaaatggatctggagagactttcacgttagtgaggttggactatcatgtttatgtatgtttaataattgatctccacaagcttgaaatttgagtgttttttagctttgagtattttagtaggagcttgggaagaaatgtgttattacacagtattacacttggattattctatctacagtcctgtaatattttgtaagatttctatcagacttctcataatctaatcaataattttttggtgaatgtaggacctagcagattaaatgaaaagtatattttataagagtctggtaaaggtaactaagtctgtcttctctaccaaaaaaacctccaaagcttcatgattgatgaaattcttggtgccttctgcttgtctgggtcaaaggtaaaactcctttagaaagcaggaggggcccagtacacaccctgagatcctgcagctcttactgtctctacgtacatttccacatcagcacctcatgcccgtaatcctcagagcgctaatgtgatctgattggattggacagatggggcccatgtttcgtcctgatacttaacccttagttccttgatgttctactttctttgttgtgtcatacaggccctgagttggacatttctcaaacttatatatgtggtgttatatagaccttaagtcatttgtaccctggaacattttggaaattatttcatctggagggaagtggcagtaggctgaaaatactgactgatgcatagtagaaatctcagataatggacctacacaatgttttgttttccaaggggttataaactattggtcaaaatagttgtgtttatttaccctgtctctaatagtggtattctaatttgatcacaatctagtcaatgccagctgttaatattttgtattaggcaattataaaatagcgttgaattgctgtcttaagcttataagtgactattttgtgtgatttcctttgtctataaattatttccttgtatgcctttctgttttgttttcttttgtttttgtattttatatatagtttcactcatatttttgtgcatatattaaatttctgtgagacatgctaaatttttgtagtactacagtttttatttcaatatagaaaagttgttaaatagtgacttttcatatattcataagaaggtgggttaactaacattaataacttaagccaaacatttcttttgtttgtttgtttgtttgtttggttttggtttgggttttttttttttttggttttgggtttttttcaagacaaggtttctctgtgta

SEQ ID NO: 28748 - DNA, 1151 bp, Mus musculus
taagatttcagatctatttcaaattatgtttatataatgttatgtaattcattgcttgaaaggaaaaatgacaagtttgatactaatgtcaacataggtttctaaaatgataaggaaagtgtgtttccagtagttattggcataccattcattttagatatcaaagataccgaaatcaaagaagcatgtctttatttttcaaaaacaaacttccgttggctttctcagtccattatcaccatgtacagcccttagaaaaatccttgttttaattactcagatttttgaggccacaaaacaacaacaaaagtaaggcaccatttttgaaaacaaaatcaattgagtgtagatttaaaatcttttctgaagctagagacaatctgtagctattatgttaccttttacactatctgaagagcaatcttcaactttcctgtttaaacgtaattattttagaaagttaaaaatcaatcctatcttcaaataagaatttcttagattccctatggagatgtgcattgtgagttgagaaattctcaagtgcaaacacttctggtttactttaaaaaaaaatagtggaaaacttactaactgtgaatatgagaaagacaaaagaaagtgagtcctctcgctagatatacctagcataattcattatgaaacaaacaaacctcaaactactgtattttggtgtctgtaccgcaagcatatgcctcatgactataaatgttacatacatcatttgctctctgtatagtaggcattgacttaaagggattgtttgttgtcttctcatggttgtatatatcaggtaaaattgttccaaagagccatgtgttatgtaatggggaaccactttgatactgaattactaatttgtactttcattactatttgctggtaatagtgtaacgccacagtaatactgttctgattcaaaactgttgcatccctttttgtagaacatttatatttccataaggattcggtatgttcttttccctcctgccctaggatgaagctggttttgtgctttttctttatcattggccctcattccaagcactttatgctgtctgtaatggatctatttttgcactggaatatctgagatttgcaaaactagacaaaagtttcagagcagatttcta

SEQ ID NO: 28749 - DNA, 2124 bp, Mus musculus
ttctcgagagctctccctttcatgggggatttctccttcaagtacttactcaattctgtgttctcctaatctcaacacaaggaaaaatgccaccataaataaaatgcagctacaacaacaaaagattcagtgcagaggccttcatgaccgtctgtcttccttttgccaggtatttgtgaactttgccaaggaccaaagtgatgatgaccacttaaaggacctgtcactgcacaaaaaccagacagttgtggatgtggccgttctcacatcctttttgcaggatgagaaagtgaaagaaagttatgtatgaagaatcccgttcacacagggtgaatgaaaggaaggaagagcgaggtcttcctttgcactgtgtcaagtgttctagaagaaagcgtcctgcgtttctgtggagaagaacaaactggatactgtactgacactattcaatgcaatgcacttcaatgcaacgagaacacaattccattacaggggcagtgcctttgtagcctatgtcttgtatggctctctagtgaaaatgacttgaagttagttcattaccttatacagatgtgaaactctggtgtggaaccaagcagactctgggtttggattcatactttttttgttcctgtgtattctcactaggattgcaacaacagtctatcaaatagtcatggccagtgataatcaaagtcaaaggcacacacatcctcgtccattaagccattaagccatgctgaaccacaaaacaggtttcccggtgacacatccattgctggcaatgagtgtgccagagttactagtgccaagttgctcagaaagtctgaagcactgagtgtgtcacaaacacttttgtgaaaaccgccctactgtcggttgacatcattaaatatcaggtgacaaaaacggtgccacatgtgactaaatccccattttccttctctctttgatgagctgctgttgtggctgtcttgtacaaaatgtgcatctctctaacccaggtacttggttctcttgttcagtgttgcccatgcccctgtcatggcttgccatagcatctttctgagactttttcaaatacattagatcctcctaagcagcaaagattagcagccaaactgctggggctgcaagcggctcagttcagggtgtggcatgaaagatccagtgcatttacacgtggcaggtctgggttggtttgtgctgactgtctcctaacacaagatgggtacactacaccttgagatccttcattatttaacagaaatctagttctttctaactgtttgaattaacctagaaaatgaaagggtggcatttcattttgacaaaaatgtttgcattgttagtattatttggaattttaagttttatcaatgcttctggaagcttagaactgtacacgtgtgatgtcagtcacatagaggaatgtgcccggactgcctcatgcctttattttccttggtaaatttgaagatagaatgtctgactagcgcagtgaccagaaaacaatgtggtagtcaacatctcaggccatattttaagatcctgtagagcactattcatttcaggttgcagatggagtatttttgaaacatcattactatgtagatgcttggataggagtgagggggagctagcagatttcctgtgccatttattcagctgattgatgtacagatgtaggtttattttgtaaaatccactgaaagaatatggccacacccttgcctacttgatagcatcaatacagaagccaagaaggaccactaagtaaccccctcttcccagggagagcagctagcttgaaatctctcggatacaatcgatgcgtctgacctttgggatcctcaccatatgggcaaacaatgggctttgcaggatgagagacacccacttaaacctctgacgatctcgaatggttcatctcttccgtcattaaccagtcatggaaaacaatcaacaaactctgccacgtgaaatattttttcagacttttctaacccaagcttaatttgttttcatctgcaagcaacgtggaaaaaaatagttatttcaccagtgctcaatgtcatccgtcttcatacaaaacaaaaatatgagtaagttcctgtattgggcaaa

SEQ ID NO: 28750 - DNA, 1205 bp, Mus musculus
tttaaatcagttgaatttggggtgtatctatcacagacatcatgacattagccttggaataatttgcattaagagcagtgaccatggttaattactcagaaccaattaccaaggccattctcaggccacaacattaaagacatttcttcagcacccaggaggacacttaccctcttgttccaggaggtaagtcatctatttttatctccagtttcgcatcattaggatacaggactatttctatcaaccctgagttcatggagggtattaaaatgaaggttttgtagaaacatcaatactggagtgtctatattgagttcgtgctacttgaagtcacaggccaatggaagggcaataaaagctacagtcttattctgcttcctacatttctgcacaagataattcttcacagtgatcaatgatgttaacacttctgggatttcctttcctcttacgagttgtgacattctggtctccctggataatgagaccaaagatagttgcattcagaatcatgagaattttaccaatgatgaaacacagtgttgtatgtgcttatagttccagatactaatgaggtggaagttggggcctcatttgagtgaagttaaaaaagaaaaaaagaaaactttgtgatggcctctggtattgtgtgattacaagtaacctctaagattcagctctgaatctggacacacacacacacacacacacacacacacacacacacacacacacacacacacagagatttgtacatttgagcttcacctccaggtcaaagccactcatgttcaaggatttcctttgactgtttcactgtcttgtgggatattggcatcttataaaatgttttctaatacctactcaacagtcagcaagcattgcaaaagtattcatgtgcacaaagaaaggtgtccccaacatcctggcatcaagacacacttaaatatgcagtagctgagggcagtagctgagggcacagttgaatgctagtgtatggttgcatatccaagggcatgggatcagtcataaccaaaataagaaagaaatacaaaaatagataaaatgggtcctctcatacaatgagcaacaatcaataaagtaaatattaaaatccatatgttatatttcaggatggaataaagaatttcagtgttttagtcacttttctgttgctataataaagtacactgagaagagca

SEQ ID NO: 28751 - DNA, 1183 bp, Mus musculus
ttcagaggacccacactgggtgtctcacaacccctctaactctggctccaagggatctaaggctgtcttctagctttcacaggtacctgcgtgaacctggtacacacacataggaaaataaatatttttttaaagaatgaaattttaatgtgtttgaatttgtaatgactacggacctttttatattctatctcattctctacgctatctatctatctgtctgtctgtctatctatctatctatctatctatctatctatctatctatctatcatctatctttctatccacctacctacctatcagatatcagagtaccctatagtaagcagaagatggcatcagttcaaattgtttctatgagggattcaaatgtttctgctaccatactatgtagggaagcctagaataactccatatgtgcagactcaggcactggaaacaatagggttgatgggaaaagagagttagggtaggacactaaaccaagaaagcttaaagaaagtccagtaattgctaaaagtacgaatgaataaacagctgtctagagttatgcctgttgtttatctaggctcacactggggaaggtctgtgtcatctcatgttatggaatcctgtgtcctttgagaaggaagtcttgcttctgatacatcatttcataagaggcaaagggctggtctagtgtacagcctgattagttcagacagagaggaaggcctgggcatctccttctgcatctgcagcccacattgaaaagaagtcagtgttctgaagccactgagttggtcaccacataagctccgggaagtcatttctgtagatctccagccatcctcccacccaaggttgtcttctgttgccaatgctttctctttaataatagtgaaaaaaacttacctctgcttgaacacatcagcatgctgggaaaaatctcctgggagccagtgtgaccttaggacataatgctgactgatgccagttgggtatgaggccggaaacactgtagagtcgactgtactgctgccctcgttgtttcttaggtctgacctgcagctaggatcagcttctttgcgattcttgttcaaatagatactcagggattgcagatatggttcagttgtaacatactggtctagcaaacatgcagacctggggttttattcctaatactgcacgtgaagat

SEQ ID NO: 28752 - DNA, 1230 bp, Mus musculus
ctttgacagtgaggacttagtttacgttagacatttatactgagattattatcaccattaacattgttctagaagattaattagtgcagtaagccataaagccaaaaacaagaagaatgactgtaagcggtgagttaggaaacaaaatcaactacatttattaataagttctgtggaacacagtagtctgcatgtgtagttaagtaagaagttgtttattaaaggagtcattgtgaatcaacaaaccatttattagttattagatttagttaaaagctttggataacttaaaatgtgaatcacagtaaatcctaagaaatagatagcaggtagagacaatttcaaatagtcaagggacttaaaagcagcgagggaaagaaaatctgaagtcagcctgacttgactatgcagaactttatttttacataacaaatgggatggtaaagtgagtcactgcatgtgatcctgttgggatttgtccaaaggaattaaaaaaccagaacagtcagatgtggtggctcacacctgttactccagcactcaggttgtggaggcaggatttattttttttttttataggttttctctgtgtagccctggctgtcctggaactagctctgtacaccaggctggccttgaactcagagatctgtctatttctgcattgtgtgccaccactgcctggctggtttgtttgtttgtttgttttcctttccctttgagtttacctttcattgtaggaactaggcttcaattggatttctgtagaatttatttgcaagctgggtgtgatactgctagaagccctgtagttgtttgatggctgttccagggaattattactttggtagttgcttttaagggactaatggagataggtcttaaaacagaacagggcttgtaatggacacagagaggcctgagtgtaccctggggggtggggtggtggggtggggtggggctggcttcctgaatagggtataaactagtcagtaccaggtctgagacttactagttttggtgacagtcaaaaatggcttcttaggggtggggcatgttaatgactagttatggagattgatagctgcttgtttttttgttgttttgttttgattttttcgagacagagttttctctgtttagccctggctgtcctggaactcactctgtagaccaggctggcctcaaactcagaaatccgcctgcctctgcctcctgagtgctgggatt

SEQ ID NO: 28753 - DNA, 1172 bp, Mus musculus
tggtcctaagtgggacggagactcccttcagcccctggacagcttccccatagtgtactcccagttcaaaactgctagaggcctctctaatcaatgagtgttctttttatccaacagttccttctgccctgtgtgccttttgagataattttcacttgggatgtttatattgtcatttgctaataacacttttctcattgtcaaaatataattaacatcttgggaaacaattctccatattgctgaataatatattaagaaatagaatatcattcctcttacttgttcatttgttatttttgcttgtatttaagacttaccttttaacaatgcatgtggtattgaaaatgtaagtgagacacactctacttagacatgtgttagacagtgacaatctcactgactagcctgtagttaaaggagggaatcatctcaagtttgtttttttgagcatccatgagactaatactaacaataatggcactaaaactattggctccaaagatatttgttagccgtgcttctttaactagagttctctatgctagcttctagaggaacggggtggagattgtgagtagccaatggttattctgccacaggtccgaccttaggagcttcagtcaacaaaggagatgaaatacaaaggagcacttcccttgctttgaggtggtagcatatagctctcccaacattgctcagactgataggcatgctgtgcaattgaaagagtcttgtcctgactgacagtttgactggtaattagtgggcagagggaaggtcttcatagactgaggaagttccattagagttgtgcaccattgtgcggtttgggttttcaccacttacagactcgatgctctcctctcttcccctcctcaggtcattctcttcctgatcatgctggttatgcgcaagcgtgtggctctcaccatcgccttgttccacgtggctggcaaggtcttcatacacttgcctctgttagtcttccagcccttctggacgttttttgctctcgtcttattttgggcatactggataatgacacttctcttccttggcactactggtaagaaatgcagtttcttcccccgttcatgaatctaatttgtacccgtacattttaagtcatcaaagaggttaggggtgtagctcagtatagaatgcttgca

SEQ ID NO: 28754 - DNA, 3038 bp, Mus musculus
ctgcttgctgtacaaggctaaggtctctctgggctgtgggctgtagtagtatgttgtgtgtgtctcactggtggccctgaagtatggcctgcagtatcccagcatcataggctcaagaggggagtctcaacctatttttgccctgttgctgttgtgaccgtgtgtatatactaatagcatcattcatatctcctttcaatggtaattttctaagattatactctgtatggctttgttttctaggcttcgggagcaagttctgcttgaacatagccgacggttatggacccccattgacattccaaaacaatatatacacataactatgtatttgtgtgtgtgggtgtgtgtatatatgtatatgtatgtgtgtatatatatgtatatgtatatacacacacacacataatcagccaaaatcagagaaaaaggaacagggatttaataccttttttatgcttatttttgtcaaacatgtacgcctttcatacgggtggcttttacaaggcaacttccgtcatttaatgttttcaattgtaattgtcttaatggaaatgttagattcatatctgattaacgtttttaataactagaggaaattttaactttagttacttaacctagataaaattatcgtaccaaattcttgtgtaagtttttgcaggggtgatttccctggtgtctgtttaaaatcagtgtcttattttactgatgcataagtcctagtgtgtcagactaggcatgtgcgttcagataaataagagatttctccagtctgttttctccaatcaaagaagccatgccattttactttgagaagcatctgagtgggcccgttacgggaaatttcataatagctcatgcatttgtcagccgacattcaaaagtaaccaactcctcaggtatttgtagtttaccctaatgcttctatagaaggaagtaggaacaatagagagaaaggggtagataatctttattatgcaaagttttttcttgtattttgtctctttcctcttcacttttttttttttctttttttttagtagcatccaccacacattcgtgtgcctgatctgaaaggaagctggggcacccagcaagtttagcctttctgggtattgatttccagcttaggtaattctagaaagaattaaagagagagaaacaagaagcatgaagctgagagtttcagcgctctgcttctgtttccaaggcaagtcgggagcttagggttaaacgaccatctattcaaatgcttgctataaatctgaacacacgggcaggtgccccactccttggtattcgttgtatccggagttctacaatgtgtaactgaagaatcagttggtgttaaccctcgagtgtgagtgtgctttatgtttgggggtacgtttgggatttcttgttttgctgggttgttggctttttttttttattcctaaagcttaccagatatgaatggctaatattccattgttctgcttattgtaatggtgaatgctttaagaaaaaaaaagtgtaatttgctaagaataattcatgatctgtttatgcgataactcctttttgttacaatttttttaaaaaaagctatttttgttaatgtaaagtaaatatttcagagcaaattttttaaacttattgcactaaatacaggctctgtaaaataataataataataatgaaaaagcctcagcatttatcattccatagaaggaaaatcttttgaaagaaagcattgcctatcagaagtagatcgtgaattagactggtgttatgggattgcatacaatgttctgagggctcaacgagcagctatttgctaatgtgcttcctttcaaagggttggacctttaaattgctgcaaaaggtaaattgtattttcttttttaagtactggtgttctttaatctagctaggctaaattttgctaaatgccttggtttcttttcaaagctcatgaatatttctgagccttcagagtttttgcaataagagtctggattaaaaacaacagcaaaccacacacacaaacacacacacacacacaagagtgcatgtgtaagcaggatctgggaagccagcattgagagagtatagctattgtgaaataatgattcaccagaaattaacatctaacatctagtgttgccaaatagtgtcactgtacttctctatcatttgaaatggaatttaattatgtaactaacaactgtcctactaggtgagagaggaagattatgtgagaaagtcagtataccatgtaacttgtagccacacagattttcgacattgagaaacattgggaactaaattgagaatgggccagagcctggaagatgggtctcacaccagaagacattccaggagctagccatttaggagatgtcccttcaaagtgacgtgatgatggacttgcacttgggaatcaggttctgctcacttggacatccctgcatcatggactcttgctgcccctgttccatgtgctcgcaattccagctactggaagccaccaggaatgctttctaattatcatttgcaactagaactgtaatcagaaagaaaatttgtatttttgtataacttgattgtgtgccattttatataacaggtcctgttttacaaataaattttgttttactaactttgtgtttagaaattatgctctatgtgtgtaaccatgtcatttgagttcaattaatttccaggctgtttcccctaagtaagtttgtgtgccatatagtcatatgcaaatatgcctatctactacacgggtgcacacagagagatatttgatgtatggaatatcactctgccttgagctccattctttgattaatttgagaaagcctggcagaggcgttttagtgacccgtaagtgtttcctgcttgggtgttcctgctgcctctcccgttcatttgcaagtccttgtcctggctatgggctgcctccctgccatctgctcaccccctcaccgcttccatcctctgcccaagtgagaagaatagaccaagaacaaaggtgatctgtgaaa

SEQ ID NO: 28755 - DNA, 1189 bp, Mus musculus
gctcattctcttgatgtgtttactttccagctcaggaaaaggtgacctgtctctgcagattggaagaatggactctaaggaggctgtttgcacaaggctctccactcaccagctgttgagtctgtgcggaagacaggatcttattacttcaatggcagcagcgatcaagaaagttctccaaccttgaacagccaaatggattgactacagtgggggcagctaattaatgattaatcagaagcatttgataataatctgccttgcagccacgccttcaaacttcattgttgctttctcttctggccttgtaatgtttgagtcaagccctgcttctcagctagtgagcatcagcccaaagtcagaactcacaggggattctctgcattcatcccgggtctgtcctctctgactctgctacatacagggtccatgtgggctgataactagtaccaggggcctgctgcatgctacgcattgggatgggtgcccgacataatactgaatcctcaagaagccttgtcaagtttgtaggtatcattgacgttttgacgatgaggaaaggagatgctcagagagagagagatcatgtgttgtgagtcagatcacacagtcgataggatcagtatttcaattccagagcccctccactctaacgctatgctttgcttattattgctacagagataactgccctgtagtatcccaatggatatcactcccagtctcaaattgggctgggtatggcggtgtatatgcatgggaagcgtcttggggagggtggtagaagcacaaaagaatcacagaattattttctaagcaaaataacacttgtttgtttatggcccatggatcatagcttcctgtccccacctatttttgtaaataaagttttatgggaacacaaccacatccattatgcgttgtccgtgactcctttctttctgtaatggcacaatgacataattttatcaaagaccctataatccccagtgcctcaaatattgatgctgtggcccttgcaggaaagtctggggccctggcctagatgagtttggaaggaagctcacagttttcatcaggacgaatttattacattttccctcgactgaaaacggaaaacttggtaatacctgtataatcactgttctgatcatgatggtatgtgggtagacaaagtagtgatgggcag

SEQ ID NO: 28756 - DNA, 1899 bp, Mus musculus
ggttattaacggaaaagtcttttattacaaagtcaattaaaacttttcattcaaggtttttgagccaaactagaagttgagattgtaaaactgctttaagaactttaaagaaatgaatatttgatctctgattaatttttgagacttctaaatctcttcttgttttaagtttcttggacttctgacaaacttccctggagaagtgttcatttttgttttcttcatgtagcttgtagatcataataagtatttgctcttaaaatttactacttagtagcatgattatttttgttctgttgatgaagcaaatttgacagaatattatttctccatatcacacatatctacactattatctgataacacactggtagtttttaagactaaggcagtttatagaatgaagtatatcaatattcttttggtttcccaaagcaatattttacttttcatttattatagtttgaaagacatttttcattgttccattacctatagaaatggtatttcatgacctagggaaaaaggaattactcctttttgtagactcatacctgaaagcagtgatttactagaattgctttgtgtggctactaagtttattttgtcaaaaatgacaaggaaaaagccagctgttttcatagaccttttcattatgatactgtatcttgcatagttgaatcttctcatttatacagtgcctttttctcatgctcattgtctactgactttaaggcaggcaacactggaccatagtggtgcaggccttctattgaggccagaggagcaagtgtgcttcttccttgtccttgtcccatcattgagaccttcatctacagtttccaaacagtcattggaaaacgcacgacagttacccagaaggttttatttctcagcagatttgtagaatgaagtataacgtcagtgaatgagagtccaagttcttatcacacgatattaggtactaattataccctcattgctttaaaatacacatcagggtctcttttaaaaatagaacaaatctgtagtatttaagtttaaaaatcttaagtttattatgttaaattgaattttgtcaacccttctttttaaattaaaataattgaatagagtgcctagttaaattttctcaaagcaaggtaactgctcagctcagtcagctgtggcaagctggccagccctcttcactccagcgttcttcactgctctatgtctgcttacacagcttggacatggctgctttccatgaaggaaatataggggaggtggactgtaagggatatataaccagtgtgaagaactgcttcataaaatatgtattaagtattgtatttccctcttagcagttgaatccaaaccagtttcatttagctggaagtagacaggaaggagctgccttaagcactttagaaaaagaatttgctacaattcatttgactcagctgattgtgtcacatcttttaaatactggtaaatatggatataccaagtatttaatgactaatgcacatagaaattaatattaatacagtgatcttttgaatgttccaggtataggctttttaaaaagtgttaagagtgtctgtctgtctgtctgtctgtctgtctgtctgtacgtttaattgatagcacctctgccgtgtgtcatcaactactagacagccaggctaagccttctcattctgttctgaagattctaaaaaaattcgaaccatcaacaatagtatgtataatttgaacttccatgattgatccttgatataaataataaaagaaaatatttatgatgaaatattttaattaggtcaattatctagaattacctagttttgtctatatatcttttccatgaaattatagctatctatgtatttgtagttgtttctttcaaaaaca

SEQ ID NO: 28757 - DNA, 1161 bp, Mus musculus
ctactaaaatctacatataggataatcttaataagatttaaatcttaatggttttgaaaagcatccattgtcttacagtttgctgggctgggtttcctgatgtttgcgttgtggtgcgggttctgttaaagcatttttaaagccataggagataacaattgcaagtttgcttttctgttcctgctcctaacatccacttcatggacatcagtgagagaacgctaaatgagcattctcatcccatggggagaagtttgcattaatttttagagtccttagggacagtctccattctccacagctttcttttgctactttagtctttccgtgctaccttctgttcactactctcattaaaaatgttctagcaaaaaggcaaggataaaaacatggcctaattaatggtataacagctgctttcatcttgtcactaatatttggttttaaataatcatgcttgatccttgtcttatgctaggatggctggtttcggatagctgagaatatggggtttcaatgcctaaagactgaaagcaaggatcctcggctagatggaatagactcactttctgggactgaaatccctctgcactacgtctgtaagctgaccactcatgccatccacttggtagtctttcatgagaggagtggcaactacctctggcatggtcacctacgactcaaaggacacatggataggaagtttgttccttttcgaaagttacagtttggtcgttatcctggagcctttgacaggtaaatctataacaataaacagtaataagtcaataatatgatatgtttatatttatatatacatgtatgtatagatacacacattgaagtattataactcagggaaatccactgtgattctgcagtagtgtggatgggtcccacagtggtgagtgtctcaaggcaaaaaagactgacaggatagaggtatactgtgttcgtggatgtcttagtcagggtttctattcctgcacaaacatcatgaccaagaaacaatttggggaggaaagggtttattcagcttacaattccacattgctgtttatcaccaaggaagtcaggactggaactcaagcaggtcaggaagcaggagctgatgcagaggccatggagggatgttctttactggcttgcttcccctggctt

SEQ ID NO: 28758 - DNA, 1282 bp, Mus musculus
atgacaagcagcagtctgttaggatgcagcctctctgtaggaatattgtctctccatatgcatctcatcagattgctgtaattattagcaaacttgtacccaaataacagatcataatcagttctttcctagaaaataagtccatagaatatgtatccaagttttagatagccaaccctatatatttttatgcacctagaaacaaaacaaaacaaaacaaaaatcaaaaacaaaacaaacccagtaacaacaaccagataacagtgtccttgaggacaaagccaccctatctggagagggtcatttgcttgtactcaatatcaaggagtaggcgtgtttacatcacgttccttgagagctcccaccttctgccaggagatcttacccacccctgctccaggttcttctctcacgtctatcattggagggcaaggtctgctagtgtccagaatacaaactctcttggtcctgtgcagaggttctgcagtcttccctccatagacgatgggcaaacttgtcttcaccctggtttagctttagcttttaggttctgccccaccttggagaaagtttcccagaatttgcaggtgaggtttacgtctgaaaatacctccatgattcagtcatactgaagccagtgctcttgaccttggagctctgatgagtggcccaagaccttgggtcgggggtgcccagcacctgactgaccctttgcagatcagttttcttccctccctgagtacgctaactttattctcctaacgcgactactgtctgctgccatttgcctggcttgcttgaagataccttttatattaacttgttctcacgtcaccgaggatagtcccagggagaccctgagaagcagacacgttgtcagtttctgacagccagctacttccctaagcatggacaacttgcctcgccttctcttggctacagttaccgaccttggccactgaggtaaaataatagtaactgaaaccgggcatccctaagagtagctgggatcaggtctttgtggagcctccatggcacctcagtgcgtgatgagttttccagcgtctcagtggcgtgtggggacaaaattgctgagcagagatattccttcttctccagaatcctcaggctaccttcttaccttgattgggttgggtgggggagacagtttctgtctgaagacattacctgtggtttctgactcttgaaatgtttaacggattaaatgagatgtataaggtgcttccattcaggaccagggttaagtaagtactcatgagac

SEQ ID NO: 28759 - DNA, 1772 bp, Mus musculus
aacttggaagaccgcacaacagagttgcttagaaataaaattggagctgaggctctggtgagatggcttagcaggtgaaagcactgtcaccaagtctgacatgattttgatccccaggacccatatagtggaaggagagaacctcaaattgcctgtcctcaaatacacaggctctgatgtgctcggagctcctctccagcacaagaggacaccaaacacacacacacacacacacatgagtaaataaatataaagaaaagtttttactgtatctaagcattacaggtcaaattatgtgatttatgaattcagagtcattgctacgttacctccccctgaagcagagccggccggttctcatttagttgatcaagttgctgtcttctagtcctaacgcattgcactgtttcctttcaagcccagtcagattactcttaaactgtgtgcctagtctgatatggacttgcctttctgtaatctagctttgggcagcaagcatcactatatataatgatttgcagaaccaaagattttggaatgcttcgttttatttaactacctgctctgtatgaaatgtggcttagtggtacactaattgcccagcatgtgtgaggtctggattcagtacaaagcaccagaagtcagagaccgaaggcttaccacatgcttgggctccctagtgaataccagcctatcctgggctacagtgtaaggccctgtattgagggaggacaaaggaggggagagaaagagagacagagatagaatgagaataaatctgcccacagatttaggtttttatctaagctaggcaaaatagcaggatatataatgctattttaagtagtcagttgtaggcggcagaccaactcggtgtcaatgccttttgtgtaggaccaatcggcaagtatacattccctgagaagtttgttcccacaccttcagaacacctaggctaaaatgctgcttctataattcctggacctaacctaagagaatttctctgagggcccatttagtcatccagacttctgtctacttacgagtagctttcgcagaagggcactgtcatataaagtagtctgtcatgcactttacaaattataagcttgtacagccttatgacagtttattctaagcatgaaaactggttcatgagtttattaaatgtagctctgtcagcctgtggcatatgactgtgacacatgtatgtgaatcttctggacaaggttatgttttaaacatgaaatttcagtatatgcttaccagtttaatatttggttttatcttcaggtatagtttatggtactactgaaaatagttttaatattattactctgatctgaatttgtaatatacaatctactttgagatgattaataaaaatttttaatctcttgctcttttgtgtttgtttttgaaagtttaactagaaataaaaagcagttgcattggaaactggtaaaatagtaattgtgccacaaaatatgtatttctaaaattcaagtctggaaaccctggaagtctgtctacacacatacactgagatcaaaacttctcagtgacaaagtctaccacatgacacctctaatcatgcagagtgtggcttgtcagctcaggatagccaggaaaaacaccctctgaggagaagcctgtcatactttagcatcagagatctctagaaaggtcttttatagtagttgagtgtaagcccaactactgtaaaatatatatacctctggaggaagaagtgaaaggtctagtttatgcaa

SEQ ID NO: 28760 - DNA, 1266 bp, Mus musculus
ggtcgccctgggcgtcggaggcaggaggaggagttacttctctcagagtgtgcccgtggttctgtgaatgatgtgagagagcgcttatgtgtaagggtggaggagacaaaagaggaagtgctttggttcagggacaccgctcgctctgctggtcgtagctcttggggtcacgagtgtatcatgtgaatttatttttctggtgtaagagattctcataattatttggatagttttatattgataaaagaataattttttaaatgttacaaaaagttcacttgttactgcaaaattctaagaatttaacaaaaaattcagtatttttttttaccttttgaatgactataattgtgttttaattctgcagaattaaacttttacttcatatttccagtataattcctgtatatagaagacgattcctatttaattttgaacatggagaacttttcctaaatactttttaacctaaaataaactaatagtgtacatttggtgtatacagttatttattttatatatcttgcacacattaaaaatacctgaaattgtctacagccataccaccctgaacacgcccgatcttgtctgatctctggagctaagcagggtcgggcctggttagtacttggatgggagaccgcctgggaataccgggtgctgtaggcttgaaaaaaaaaacctgaaatttattttagtttcaagtattatttttcattatttttaatatgagtctcagtttgaagtttatttcttgcccttgttttaaaaactactttttccttagaaaagcagggttacaatttgtgtgtattgttttctttttgcaacaggagtctcactctgtagcccaggctggccacagaccttctacctcagcttccaaagtgctgggattatgggtccgggccaccgtgccaggctagcggtgtagtttttattgttaataatcctgtggttggaacctgggctgttttgtgtcaccagctggagagagatagtcttcacatgttgtatgtttctcctgactcagttggtctgaacaggctggtggcatgtctctgtgactgaacaaaaagtactgtcatggctgaaacggtgtcctgcacctcttccggcgatcattgcttcacgagtttatttgactgtctcttcttgcaagtttgcatttggtatctctgctcaatagatatgtgcgtgtatttctagttttatctgaaatgaaagttgttttcctgtgaaaatgctcagctctcctgaggactg

SEQ ID NO: 28761 - DNA, 1226 bp, Mus musculus
tttgtttgcttcacggcatttaagggtgtgacagggtaccctagttccaagcaaaatggcttattttacagttctcggctccattattagtcccttgagggcagtggtggcccttcccagtattctgtcatttgtattctcagcttacctacaagacacaaagcgaaggcacaatagagcctgctgcttcattagcccacaggagtcccataaaacagttcagagaaatatagcacactcctagtctcttctcaatttcagcaagttggaagcagcatgattagaaaccaaaagtcttcaactggagtgtgtaccacagcattagcccatcggtgatcccaggcttaccgtttaatctaggccatgacactaggcttgcttaacgtcggttcatctatctcacgccaatgaggtgataactacaccctagctgcagtgctctctcgctgtctgagacaagatgaactctcgggaggctgagacaggaggatcgcttgagtctcggagtggcctgccgcgcactaagccattggtggctatactatgtttggcatcaatacggtaacctcccaggagtggagggaccaccaggttgcctaaggaggggtgaaccagcccaggtcggaaacggagcaggtaaaatctcccatgctgatcagaaaattgaaatgaaaacttggggttcaaaggaagtaaatctcaaatatcgtacaagagccattcaacagtagcaggcacagaaattttcttttacctgctactcagattcagactcctggcccttcaggtgcagcggcagccacatgccaacggcagtggtgaagagagagagcagaggctgtgggcggcgcaacaactcagatgccagtgtacgccattcctcaatgggaatccttaatgagaagacactctgactcttagggaccagcataagtgttgctcttgatgtgggagggccaactaccctccacgtcctctgtgtgctttgacaaggcttccaacatggtacctgagaagtctcagtcatccctcagtttaggacttctcagaaagttcagctgtacagatcgtagctggaagtttcgtcatgtaatatcaaccgtgcaaaaacatgaaatataatcatgtaattttaaaatggttatcatttttaaaggctgttacaaatactaattggaaattatagctatgatgttacatataacatattacttataatatgtaca

SEQ ID NO: 28762 - DNA, 1113 bp, Mus musculus
agttcaaaaagaaaaagtctaaggagaagtcagaatcaatagtaagttatctagaattctgaatgtggtggagacactcaaaaacggtaccaacttttgaagtattaatgtttccttgacagatggcatttgaagatctatcaaagcagaaaacatttatctgagttttctttcctttgaagttaggaagtcaaggactttgtctctattatgtctgattgcctctccttgtccggtgttcgagttggcaaagaggagcaggcgaaaggtagtgatgtttgagttcattccatgagaagatctgttgcctctttgtgtttgtggtgagtgcgatcctcacaatgctgtgttctaatctctgcctcaggttcctgatgtgagagggtagcccccgatcatggaggtgcttcagtgcgatggctgtgacttccgagccccatcttacgaagatctcaaggcacacatccaggatgtccacacggcattcttacagccaactgatgttgccgaggacaatgatgacgagccactatctgggtccatgaatgctagtaatcagacagaggtggagttctcttctataaaggatgagtttgtgattgcagaggatttaccaggtaatcctaccctaaactcatatgtctgagaaagcttgtcatcatatcatcatcatcatcaccatcaccatcattaaccataggtcttatgttaggtttctgaactttcttactccctgcaaggcattttccctacttaggcatcatttttctcttagttatcttaggctattgtccttttagtggccctgtgtgttcctcttctaatgttgaaaacaaaatgtctcagaaagttctagaacaaatcttacagttgatgaaactagtctttattctgtatccaaaacagtctatgatatcttcattattagcactgtgtgagcagccttcagtgcatctccagtcatcatgcctgttgaatgtgatgcttattcgagagtaactgaaatgatggtgctgttttgtgtgtttgaatttcatattctctttcgctttacttttctcatttcaatcttcttacatattctctgcaggtcaaagtgcaactgcgttgggg

SEQ ID NO: 28763 - DNA, 1769 bp, Mus musculus
atttcaggggctccatgggcaactccatcatgagacctaattcttcttcaacttccaagttttcttcttctatgtcttaccctcagatgaagccgaagtcacctcataattctggccttgtgaacttgacggagaggtcccgttacggaatgtctgacatgacgaattcatctgctgacctggacactaacagcatgctaaatgactctagctctgatgaggacttaaatgaggtagacagtgagaatggtttaagtgttctggatcaccaggcgtcaggactgtctgcagagcagctcatgggctctgatggcaacaagctgttagagaccaaggggattccatttcgaaggttcatgaatagattccagtgtcccttttgtcctttcctcaccatgcaccgccgtagcatttcccgccacatagaaaatatccacttatctggaaagaccgctgtctacaaatgtgacgagtgtccgtttacttgtaagagctcattaaaactcggggctcataaacagtgtcacacgggtacgtcggattgggatactgtgaattctcaaagcgaaagcctgtcttcctcgttgaatgaaggaatggtatcttacgagagctccagcatcaatggtagaaagtcgggagtcatgttggaccccttacagcagcagcagccaccacagccacctccgccactaccaccaccaccaccaccaccatcacagccactgccgcagcctccacctccaccgctgcagtcaccacaccaggtgccaccaccaacccagcagccacagccacccacacaggccccacctttgcacccttacaagtgcaccatgtgtagttattccaccatgactctgaaagggctaagagtccatcagcagcacaaacattcattctgcgacaacttgccaaaattcgaggggcagccctcgagcctaccactggaaaatgagacggatagccacccctcttccagcaacactgtgaagaaaagtcagacctcaattcttggattgtcctccaagaataactttgtagctaaggccaataggaagcttgctagtgactttcctcttgacttatcacctgtgaagaagagaacaaggattgacgagatagccagcaatttgcagagcaaaatcaaccagaccaaactgcaggaagacgcgatcatcaacgtcgaggacgatgaggaggaagaggatgacaacgaagtcgagatcgaggttgaactggacagggaggaggaggcaacggaccccatcatggaggtgcccactgccttttcagcccaacagatctgggccagagacgctagtgaggcccagaaggagcccaactacagaagtatcactcatgattacactgccaccaatggggcggagatcgagctcacgctttctgaagacgaagaggattactacggctcttcagcaagcatgaaagatcaagtgtccaatgcggctctgctgaacacccagcccgctatctatgggacggaacccagtaatgaaaataccgattttggggactctggaaggctttactattgtaaacactgtgactttaataataaatctgcccggagtgttagcacccactaccagcgaatgcacccatacattaagttcagctttaggtatatcttggaccccaatgatcacagcgcagtgtacaggtgcctggaatgctatattgactacaccaactttgaagacctccaacagcattatggtgaacaccacccagaggccatgaatgta

SEQ ID NO: 28764 - DNA, 1113 bp, Mus musculus
gtataccacaggccaccctcaaacatacagatacctggtggcccaggcttccagaatattgggattacaggtgtctgctactgttcccagatgctctgtgacttgcttgttgttattacaatgtctttagttgccttttgaaaactctgaattctagagtttctgacaaacactgttttgcaggggcagggcaggcatatcttcctgaggaaccataaaccactcacatctaaaaaaaaaaaatcacagtcccctctatttatttattcaaaattgatcctagtcattctttctccattgcagaaagtttcgataaccaatcctgatgcttcctcccctttctgtagctgctaacttcatccttgcgacttttcctgttgagtaagtttccctgagtatgtggcggaaggattttctctctggctgcttctctctataagtttgtgactttccccccttgctttgaaggctgctttttaacatttggattattcctttgtcccttttctgaggtctgtatttgcccttgtagctccaccatggctccacccctgttctgagtgggacagttgtgtaggcacttgtgaatattcttgtgaatgaatgttctggtttcctccttggaagcttcctaatcttccattcggtccacggtactgagtcccagtgcttaccgcactccacagagctgtgtgacctagcgttcgttcctatccatttaagagaaagtttcaaaagacaacaatttgaagatgaagccctagggactgttctcacagggagatgttcccacggagcatctgatgcaactattctgctacagtgaacagatcttccttgacgtagcatttgaaatattgtcattgtcctttgtggaggaggggaactcaagcttgaagaaacgtgtcgtaagaaggtggctgcgtggcaacactgaagagagatgggcattgctagaagcttgccaggcagccgagttgcttcttggagtcagtacatagtcgctcctacagtgggcagtttcttttgtgtttttcaagatgcaatgttttgggggaaaaatgaaatccaagctccaagattctgcatagactaaaacagactaataaaaac

SEQ ID NO: 28765 - DNA, 3028 bp, Mus musculus
ggcgggccggcgtgggctgagaagggaggggacagacagaggagagaagaagacagaacaaagctgcttttaggactgaacaatctattttcaaagcactggtacctgtgtgagtgagtatgtaaattaaagttatttaaatggttggaatatgtggctcctttcctgtcacgacatccttccttccggatcttcaccacggagattttcatctgctgcggtttgggaagtacctcccgtgggcacggtggtctccgtgaccctctcggacagtgtgtggaaaccgaggctcccggacacagaagacttctcctaggggaacaacttttgggcgcacaactttctgtgcgtttttctagttttaataccttaagctttttcaagacctaactgcagccgctttgggagaaaaaaaaataacaaaacagaaaacaaacaaaaaaaaactgctttgcataaaacagtcacctgtttcctagtacctcagacttaaccaagggaattctctgcatttgtctgtactacctgtggcccttgtggttaaatgtagagagaactgctggacaggatggtgaatggagaaaaaaaaagagttttaaagaaaggaacacaaattgtgcttaaaatccccacgtgggttttatttcttaaaatactgtgatttttttaattattttagtaaaaaacaaaacaaaaaaaaaagaaacagactttaattactagataactgtgtgtgaattgtcatcttgtattccaggtaagctgtttattagtgttcagctataatttagaatttggtaggttcatgtgaactaattttatggtgatcgtgggatttcgttggccacatgtttatttttttctcgatttgagtgttacaaacacagcacaaattcagttgttctttcttcatatgagttgttctctgtgtgtttgtttaatttgaggtcaagggagagttagagggtgtagggtgtgtgtgtgtatgtatgtgtgtgtgtgtgaatttttataattttaaacatgaacataacaaagaggttaacttccttttaaatttgtttttgtgtttgtttgctttttaatttaactaaagaaccaaactccgagcacagctatgcagtggggggggccagacaaggaggtcccgtcacccttttgggtttgtttgttttttttttttctcaaagcaacacatttcgtctccccaacgatttctgttacattgggctggccttcgtgtgtgctgtgaactctgttttgtttgctttgtgtattgtgaggctgtctcatttctttggggagccatcccttccgtgagcttggacaggagatgccgcatcctgcagggagcctggaaaagtgctttgtctgcgcatctagctgctctgtttccccacagtggcttcgtttattttattttatttttttccaagagcagcttagactgaaagcaagtctacatttatagcacattatgattgtgaaaatggggttttgttccaaaaagtggaaaggaacattcttgaagcttaggggcgtgtgtgtgtgggtgggtgggtgtgtgcgcgtgcgcacatacgtgtgctggtgtttggatgtatgtgtgtgggcaaatatgagtcctaggttttgtttcttttgttgtccttgtttgggtttttgtttgtttgttttttttaacttggaagggttgatggggtggggggcgggccagaagggaaagagggtaaactgaggtgtcagtgtcccacacagcttcagagaaaatccatggaaagatatcgcatttgtgaagtaagtacgtacttgaaaagcatgatcttggttttgctttgtttttattttttatttttgtttttatttttgatttttagtttttgctattaagaatttttatttgtaggatgtttaatttaattttgtttttagggatggggccgtcatgtggaaaccagaacagggggaagtgtgaaatatctagacagattcttctgtgtccttactcgcttttgattggcctcatttcaaatgtactaaacagtttcatacctggactggatgtctgtgatggttaccaaaaacaaacaaaacaacgaaaggaaaagagaaaataattgtgacatgcttctatcactactttatttttcaaataacatgtaaatattgtaatccattggattttgttttgctaacctgataataaaaatatgggaccattatccttttaacaaggctaggatgtcatttttttgttttatttttcaaacatatacctgatattttgtggccgcacattttggacgcattctgttttctgttgactgtaatgacatagaatttacaaaattttttgttgttgttgtttaatttatacagaggacatttttttttccagagcttgagagaagaaaataaatagcaaaatgataacctattgactccaataatcagtgtttcctgaaacttgatgaaagatagggggatcctgactccttgaagccaagggtttaaacacaaaaaaaataaaataaaaaaataaataaaaataaaaaacacaagtaggttattcaagttgtttgcaacatacattttgtaatgagatgtgagaaattaataaagaatttttttcacatgtatttatgtgcatctgttaagttatttgtgggtgtgattacagacaggaagactggcaatgacaagaccagtttcaccctatgtgctgaatctacccaggcatggaaagcagctaaaaccaaggtgaggtctgagctagagtttaaaatattagcgttcctgcgttcgagtatacatcgacaatgaaaagctaatggaaagaatagtttccaccaaaattgagcatcagttggttgtggtacctcacacatgaaaccgctccattttcgaggctgatgcaagaggatcacaacaactaccccaccccaaaatgtggatcagtagacgaggcaaatcgaggatcacttcataagaaccatattcttttcatcgagttctcagagatcctttt

SEQ ID NO: 28766 - DNA, 1172 bp, Mus musculus
ggggtttcctcctaagatacagagtgtttggaatgttcgtaggcagcctacttcaatcccaaaaagttattttgctaatgcttttaagtggcaatacaatctttataaagttacaattaagatacataagtaaagatttgtagagaattatatggtacttttgggtatgtgtattctatatttaaaacagtgacttgtttggattcttttcatattgaattgtgaagactgaaatgagcgtctaatgctaattgcagtcgatagttaagataactaagttatcataggtacttagacagagatgttcagttcactggttattgggttgatttgtggctgtcaggtgacttacttactgtgctgtttaacacatccagcccaaagcagtgaccacagcagtgccagctacaacccagccatcaagtactcccagccccactgcagtcagttcttccccagcagtggctgcggcccaggctccagctcccacccctgctctgcctcccacttccactcctgcctccactgctccagcctccactacagcctcttctgaacccgcacctgctggtgccactcagcctgagaaacctgcagaaaagccagcccagacaccagtgcttactagcccagcaccagctgacaggtaagggctacggtttaagaaggacatcaaaagtagccatattttttaatttttaagaatcaaacctctttcatttctaaatgaaatctgaatcatgcacttgtgtctgtttttcatgtttgtgcatgtatatatgcacacttgtgtgtaggatgcaggttgatgtaatttctctccctctattgttctccaccttatttatttatttatttatttatttatttatttatttatttgtttgtttgtttgtttggtttttcaagacagggtttcaggatttctctgtgtagccctggctgtcctggaattcactctgtagtctaggctggcctcaaactcagaaattcacctgcctgtgccttccaagtgctgggattaaaggcgtgcaccatgactgcccggtgttctccaccttacttaagacagggtctttggctaaatccaaagcttgccatgccagttcagttaggctgtccagtgaatctttgatatccaccacttaccaccctcacagtgctggaattac

SEQ ID NO: 28767 - DNA, 1099 bp, Mus musculus
cataaagctactacttattttgactagagatgtttaagaaatatataataaaagtaatgactataaagcagccagtcattataacaaataagcagttatttgttgtgattgtggccgttgttctgtgaacagaagcatccttccatatcagtgaataatccagtttttcgatgcactatatttggttctgacgtttgttaactgtgataagcttagaatggcatagttaagatctttggtgttttcctcatctttaaaatgtgtgggtcaaagtccgacagtctaaagcaggtgggaagtggcacgtgtgcacagagactgctggggaagagtgcagtgtagctgcttcctctgacaccttttgttgagccaacagctagctgtgaacaatgcggactcaattattcagaagtgctgtcacaggagctgagtggtacctgtagcttttgtataacactctttgccaccacctcctcgacagagctgctccctcattactgccaaagtgactgctcactgagacccagtgagtcagatgagaggggggattgcagtgaagattaatgagcaggcttcttggacaggattgtggttttgttttttgtttatttgcttgcaggcagtggttggttggtttttattgataatgataatagccaaggcaaatggttctggcatagtaattcgcctaaaaatcatagaagggatttcctgctttatctaaaatatgacttctattactgctactctgaaactggcactaagctattttttgttttctgacttagtacaacttgtaacaccagtagcaggagctgtgtgaacttagaatcagagccagtcacagtggaaaatgggcagtaattggaaatgctttgaaagcatgtttgaaagcaattatttatggtattcatgacaatatacacatgtttgccccttatacaaagatgtgttccagatgtccagtgggtatgatgttttttccttaaataaacatgctcctgataaagtgatcaggcatactaagacattagtgattaatgatactagaacaattaaaaaattactggaataaaagttgcatgtgggccagctattg

SEQ ID NO: 28768 - DNA, 1147 bp, Mus musculus
gcaaaactaaaataaagttattcttgaaagtagaaactggtatatttgtgattgtctcagtggggtaaaagccttgggcagggaaattacttagttttttttttttttttttggtttttcgagacagggtttctctgtgtagccctggctgtcctggaactcactctgtagaccaggctggccttgaactcagaaatccgcctgctgggattaaaggcgtgcgccaccacgcccggctactacttggtttttatatattcttttgagatctttcctcctttacatacttgctgttttaagtagaaactgtaaacgttacagagcaggcttggtttagctgtgataatcactgtgcttgagtacagcttctgttcttaacaacgttggaaggagggatgctgagatggctcagtgggagagccactaggttccaaaccagacagcctgagtttgatttacttgccctagcccagagggtagaaaaggaaccagctatgattatattaattgtagttatattagaaacaaccagtaccacccacccaccccccagagctcttgtctctagctgcatatgtatcagacgatggcctggtcggccatcagtggaaagagaggcccattggtcgtgcaaaactttatattcctcagtacaggggaacgccagggccaagaagtgggagtgggtgggtgggggagtaggtgtgggagggtgggggggacttttgggatatcattggaaatgtaaatgaagaaaacacccaattaaaaaaaaagaaaaagaagcacaaacattgaatgcatctctcagtagttcttatatactgcactgttatatagaattatgcatacatatacataggatatttaaatgaaattgtctattaaagtaaaaagtaagagcaagaaaaagaaagatagagattatgggaaaatattcatattgtacacagtgcacttttatgaaaattctaaacgtatataaaactgatatatttacagaatttaaaaaaaaaagagccagctgctgctcattttcctttacccactgtgtactgtgcatataacagatacacctatgaacacacatgcatttaactcaaaaactgaaattggaaagaagtataaatgtatggagtgcatgtga

SEQ ID NO: 28769 - DNA, 2122 bp, Mus musculus
atttaattgcttcctttttttttttttccagttaaaggcattaggatttcctgaaggacttgtgattcaagcatattttgcttgtgagaagaatgagaatctggctgccaactttcttctacagcagaactttgatgaagactgaagggatttttttgtacctcacactcacaccagtgcattacactaaccttgttcactggattgtctggggtgacttgggctcatatccacaatatttggtatacggtagtaggttggtgggggtgggggtggggagctaggatatagggcagggatacatacagttgcatgtctgcttcaattagcagatgctgcagatccacacagtgtaaaatactatacaaccaaacatccgcctttacaggtcgttattcttctaagcagtaggtaacttttcctgggtttcattctttctagtgtactagatccagaaatttagtgtgatgccctgctttctcttttctttgacttaacattggtttctgaaagaatctttgctacctagaacctgcagtctgttttatggcaacactggataatggctttttgaaattgagggggaaaaattggagcatctgtaaacagaaatgccaaattattgatagtcatcgttgctgcttcacattagtatgagactgatgcagaaggaagcccattcttcgtgttcagtgctggggatggggtggggacttttcttaaaacgaaaataattactgctattttaaaatgtcttgattattgaatgtgagaccctctgacatgatttgagaagctgcacacataggcagagtcattttcctgtttacattgtttgtttggggaagattggtaggggtctaattactgttcacttccttgttgtattgcagtaaaagatttaaaacaaccattgcatgtttgcttttgatgtatccctttgtgaaatcagcacttctggggccaatgaagaaactgtgcagcattcactcccctcccccctcccctcccctcccctccgtagagatgtgtttgatcagcaagtcaggagtcaaactgctgcctttaaaaaaacacacaaaaagctgattcagttcaaaattaatgcaaatctttcaaaactgggtttctgatacttgtggatgtttttcttcattagataagaatgtattaccattaaatccattagtattacattgctttcaaagagaaggtgggtggaactataattcagcatcttttactgcatttaaagatgggagcaaacttttgtatggttgggagatgtggctggaaagtactttggaaaatatacaatcaagatatttcgtctcatattaaaagagaaatctcaatcacagtgttggcttttatttggattttgctcatctcggtctttgtttggaaactccctcatcgacattgctattggattgtaaagaggggcccagtatcagtttgttgaatttgtcaaatcttttcctggacataaatgagactattgaaggaagtaacgtcccaccgtcgtgatgctgtgtgagaagatggctttgcagacctcctgcgcagtctcttgcactgtgtccatcaccacttggtgaggactcttaaactctctcctcatgtgcttataccctgttccatgaaaataaatgagaccatgattttccttcatgatgtaccatgtttaactttcatgtattattctgcaaacttggtaggctgttggatgttatattgcccatgtgctttacagtgggcaatgtgagatgtctcagaatgaaacggtgcatctttcagggcagaagagcagtgggttggggagaggggtaaggtccagtggagtgggggaatgcttccatttgttctgccctcccttactgcccagaatgttagcataaaacaacacaggaagctgataaaaatagcagctgttgtttctctttggaaagtgacagcagaagttggtggcatgggactttttgtccttggacacaaacctgcagatcctaggagtaatagtttcccccaaggacagcccagcccatggaccacttcttcctcagtggagataccacacatgagtggagagatacgttagatagctttggtaaatatcttt

SEQ ID NO: 28770 - DNA, 1180 bp, Mus musculus
ctgctcaattttagcagggagcactaaacagtaggccagaacactctagtttcatacatttatatttatacacatagacacatacacacacaaacgtgtgtgtatatgtacatgttacattttgtctttaaatgaaattatgaatcattttctgtgcaggcctggccttgtagtccccacagaatctaagtaacaaaagaaccttccccaggcaaacaaccctaagaacagaatgtagttccacagtgccctcctgaggattaagggcttcatttatgctgcatatattatccctaaagagatccaaaatatactatctacagagtatctcaaagcttcctgaatgtctctgaaggcatggaaacaatttaaaaattactcaaaccctgaaggacaggactgtgtagcccagtggtggggtgcaactgagcaaaaccctggagaggtagccacctctccaggttgaagcaaaactatttttagctgtcacaaaatggaaaagtctgtgtgatacttgtagacatgttaatggtggtgtgggtgactcagaagatgaaaggagcagaagctgactggcttattctttagagtgcttattaaccatccattgtacctagtgcctggagttgtatttacaccgtattatgctttataaatggaatttagaaacgtagattcacaaggagctcatgggagatcggcaaagtagtttctttgacttttaagaggccagtgtgattgaaaccacagcatgtgtctttgcttaaaaggaaacaggtgcatcaggaagatggaattttatgtggtcaagaatatattcaaagcaaagctaatgacatggaaaaatgttcatggtatgttaagtggagaaggcaggatataacacaataaacagcgagactccaattgtatacttgagtttgggcttgtctcctgtcacccaggctggctcaatcctaactctgttgctgagaatggccttgaactggtcaccttgcctctccctcccaaactcctgggttatgggcatgctctagcaaacctggctgtgttttgtttcctgtttggttttgtccttgctttttgttgtttgtttgtttaagtaggtttgcttattgtagctccaggcaagcctggagctccttgcaactcaactgtccttttaacccagggactctct

SEQ ID NO: 28771 - DNA, 1982 bp, Mus musculus
atataaagtttgcctgtccaatgggcctctctttccagtgatggccgactaggccatcttttgatatatatgcaactagagacaagagctccagggtactggttagttcataatgttgttccacctataggattgcagatccctttagcagagccaacttctaatccagtccatttccagtgctggttaggctcgagagtgaaaactccgtactgtgggggtggacgctttgagagggtatctgctttttttttttttaagttactaactactgtttctccatgagtttaaactcataacacatgtcattcctcttcatctgaaattcagtatggccctaaagtgtcataaagacattcctgaaggttttttttattattattattatatttttactttcttgaaaggagagagggtggggcatgcagtagaatttgctctctggcctctcccttttttttaagaaaaaaaaggggggtggctaattcttccttctagcaatggcttcagcagcccgttctctttccctttacaggcgagaaaccttaccactgtgactgggacggctgtgggtggaaattcgcccgctccgatgaactgaccaggcactaccgcaaacacacagggcaccggccctttcagtgccagaagtgtgacagggccttttccaggtcggaccaccttgccttacacatgaagaggcacttttaaatcccacgtagtggatgtgacccacactgccaggagagagagttcagtatttttttttctaacctttcacactgtcttcccacgaggggaggagcccagctggcaagcgctacaatcatggtcaagttcccagcaagtcagcttgtgaatggataatcaggagaaaggaagagttcaagagacaaaacagaaatactaaaaacaaacaaacaaaaaaacaaacaaaaaaaacaagaaaaaaaaatcacagaacagatggggtctgatactggatggatcttctatcattccaataccaaatccaacttgaacatgcccggacttacaaaatgccaaggggtgactggaagtttgtggatatcagggtatacactaaatcagtgagcttggggggagggaagaccaggattcccttgaattgtgtttcgatgatgcaatacacacgtaaagatcaccttgtatgctctttgccttcttaaaaaaaaaaaaagccattattgtgtcggaggaagaggaagcgattcaggtacagaacatgttctaacagcctaaatgatggtgcttggtgagtcgtggttctaaaggtaccaaacgggggagccaaagttctccaactgctgcatacttttgacaaggaaaatctagttttgtcttccgatctacattgatgacctaagccaggtaaataagcctggtttatttctgtaacatttttatgcagacagtctgttatgcactgtggtttcagatgtgcaataatttgtacaatggtttattcccaagtatgcctttaagcagaacaaatgtgtttttctatatagttccttgccttaataaatatgtaatataaatttaagcaaacttctattttgtatatttgtaaactacaaagtaaaaaaaaatgaacattttgtggagtttgtattttgcatactcaaggtgagaaataagttttaaataaacctataatattttatctgaacgacaatctctttgtttttttttttcgaaactggaaaagaactttttaacggggggggggggggggccactggtgagaaccacactgtgaagccaaccttaccttagcaagaggatgtaggcaacttgcttttttagactactcagttttacatgaagtagtgttggagttgagagctgtacggatgggaccttaaaaaacatctggttcatgtttgtttagtacgaatgcagaagtatacctccttacccaaacgcacatttccaggtaggtggctcagttattcttt

SEQ ID NO: 28772 - DNA, 1945 bp, Mus musculus
gctcctctcactttgctataaactactgaagaaggtgaggttgtttttctgtattcagctttattaacttagaggaaaatgacagtgtgcacgtttcactttgcagcttgttttcagagcacagcagcagctaactgtcttaactctttcctccagatggaaaataacagatggggctctgcgacgaacaaagataccatggatggtcaaaactgagcagcctggggttcatctcagggataccatgtggcacagctgacattttaaaacgcaaatgatcctttgtactttcataagttcatcagtcttttaaagaggatgctgaaatctttttttctgatcttcagattagacagtcatgttgctatggtggttgctaagattctaacagcagtgcaatttgaaaacaaacactgtgctcagggtgtttttcagcacacaccaaatatcccaactgtcttaatggcggctgaatcccaaagaagcaattgcaaatgcacattctccttggcattcttaactggtttttaagcggattatttacaacactaatttcagcagaaagtatacagtggccttgttgaatgcagctttttttttgaggcctgtggactcttcttcatttcttgttgaagcaggataaggggccgtcagtgcctggtcccagatcacacctgttagcactgctgcttctaataagtatctcactggtaaggctgtgaggctgcacctgtcccttccctacttctggaaggaaaaaccacaggagtcactccaaagaagcctggagcaacttcagaagaggagatggtttttgttagctgtagtaagcacagctgaccaggcagccctgaataatggatggaatcctaagtatttcttactgggttaaagacacgtttgaagtacccttctcagtattgaggaaatgacagctgcagaagacagaacatcggaaccaagaggctgtttagatcgcagacacctgtacactgtattttatgtatgtggaattggaatgctcattttaaaataaatatttttagtctttttaactttaggatttaaaccttttcttgggctgggaagatgactctgctggaaacctgtgtaccttgtaagctgtgtaatgaagcaaggcaaaggttgcccaggagatggcccagctatctgctgtactgcagactatcagaacgagggccgagagagggagcatgtgcagtcccagcgtgtgctatacagaaatctcacctttagctactgtcacagctgccaacataaccaggctttcaaaagcctagtcttgcaggcagctgttacagggaatgattgaatggaaccagcgtctgtgaaaagtcaggattggtaccaacacgtgtgagtgaaaactctgggatttctttttaaactgagaagcagaatgctaacttcactgggttctcagtgttgctatctcagtgacaaagcagctccctcaacaaaactgtaaaagaccatcaaatatgtggcaacaataccattatctctgacgacaaaatagggtttattagttagtattaaagatcatgtgataatataagcttcaataaaaatcgtacattcaaactgaactcataccgactggcttaattttgatccattatcaaaatctgggggcagcatactgaccagtgatacaattagaaaatgccattccaatctgtacgtttccacgtgctgcatctgaaagtgcttctagcgtggtttttactctgtgatgccaacattctctcaacttgcaataaagctagcagaggaagatacaaccagtgaaacagatatggactcatagcacgagtctctgagaatcctttctgctactcagaaagtgaggatctgctgctgtgtgcctagttttcagcctagcatgttcccggtagatggcataattaagggacagctatgc

SEQ ID NO: 28773 - DNA, 1152 bp, Mus musculus
tatggcaatatactcccaaatttttgttcctgcaaagagtaactagtatttattttctatttatttatttatttattttatcagtttctagtctttgctcattatgctatcaaatctgttaactcactaaggtctggggaaaaactaatatctgaacccatgaaacagccttctcaatagcttaagacgacttggagaattgtaggtagagtcttctcaccagtgtcacaaaagcttggtgcctggaggggctgttgtagtcaggttatgcctttgttttagacaaggaaaccaatgtgtgggtaaagtagcttacgcagcagccagttagcaaccgaattcagatggaacaggtcctctccatcagcctgccttctgctcctcctgtcttcctcacggctcagtcacttttgtcacacataaataaaaaaagagaaaagtggaaagttccctatagcacttgtatgcacagttaatagagttgtaagagaaaagctgccgtgggaggggagattccatggtcaattaaaattgaggaatgctaacttatttcctttccctgggctgtctgagtttctattatgccatgacacattttgatcttaggaggggacagactgttgcacttgatattgttctcctgtcctcgcccccatttctctgagcatctcaaccagtttttggtcaagtttacaggtcttctagaagacgatttccagtgaaaatactggcagtgagtttgttatggtgctgcgatggcattggtaacaagccccagcggtgcaatgagctaccagaaagacttagctgcccagagctgtccttgcaaggagtttctttcccacctggggcacacaaagtcagtatttgtgtttgattttgcaagttacccaagaattaattaactaatggaaatgtattggtgatgttgatactgcagcttagcaatgcttctgtgtggcactttataatcttcaggcgcctttgaggactccctgtgagccaggcagtatcgcagtgactgtatggtcagagtcctaggagccctgaaaaactggttgctgattctgtctcttccccctcctgccctcctctctccgaagtttacatcctaaaaggatagagccagaacttggttacagagtctctgac

SEQ ID NO: 28774 - DNA, 1372 bp, Mus musculus
cacccccctcagggctctcagcagaccctcggattccaaaggtaaacgaccttcagctggcagaatcgtgcccctgcccaccatgagacgagtcatagtcagctgctgtggacaatctgaagcagccccatatcccacgcctggggttaaaactaaagcataatcacaaaacataactggggtttttcatataagaaaatttaaagctaacagagcactagttagtctgtctttacagggtctttactcttcctttttgttttattagcatttctttaaaaatgcaactagatctttctacaactgcttgtcttgtaggattgtgtgatatatctgtaatatgctttatattataatattcaaagaattgcttcatctcactgaagacatgtgagagggcattatcagtattaatttgtgcaggtgtcctccaaacttctgttatttccaataaatgtgcaattacagaaccagcttttcggaactcaaagcagttgcacattgggactgaatatgaatcgtgtatggtgtgcaaactgtagtgttagaaattctgcaaaatggaacacatcatctgtctgccagatttcatttcctttagcactcctaggactactcggcaggtaatgaagtttggttatacagagaataagtaaggcatttttttatctcctcggcttgttgccaaatcatagaaaaaaaatttaaactttgattgttaacatggtgggtttttttcatgaaattttgaggcttctaatacatttcccattgataattggtcaatttcttcatttccttgtgccaatagactgctcaacctgtatgagactgaatatgagtctcatattcaaaaatacaatggaaagtgtctatttctgattgccagttgcggttgcacaaataagattaattctgagccatccggaacaaattcagcagtttctatatacagaacaactctttctgcatactgagagtcagtaattgttaagagattcagagaaatctagcactagggttgcatacagctctgacttttgaacggaatttcgtgggctttgggtcactttgcttattttgtccgacttacagccttccattctcaacttacttgcatcaggatagaatgtaggcgcctcaggaactggccttccctttacaatacttgggagaatccaattagttctttttgtaaattgaagatgcttgctttggagatatttgttaatttctcccaaatagttgttacatgctttgcaaatcttcattgattacacatagtgacataatctcagcattagtaaaaggcaccacaattttggctgtgtctgttactgataattcatatagtcttattctaccttttata

SEQ ID NO: 28775 - DNA, 1131 bp, Mus musculus
gcagaatgcatttcttatggctttggcagtttcccagtcctgttagcagaggttctcatttattcgatacatgtgaaagagttgtcctgcttcatgacgcaggacatggcgtcacttgagcccagctcctagtgttgagccctttccagctgttgttccagctgttgttccagctgtcctgggcagcagaaggggttttgatttgttttttgaaagcacttaagactaaaatttttcttaaaacttcttactaactttataacttgattgattaataaaacccacacatgctgggcggtggtggcacacgcctttaatcccagcacttgggaggcagaggcaggcggatttctgagtttgaggccagtctggtctgcagagtgagttccaggacagccagggctacacagagaaaccctgtctcagaaaaccaaaataaataaataaataaataaataaataaaccccacacatactgcagtgccatctgacttgctatgtatagtatggctcatgctggtttcctggttgtatcatgaatccttcaacattatgacctgttaatccatcatctgttagatctgaccactaaaccacttactctgttctttaataagttggtcatttgctcattaatacttttcttgagcattagtaaattctaggcaccatgccaaggaccacaggtggctgtgggcgatgactcccacgatggcttctctcaccttaaatgccagccagatcatgtaaatcatactaaatctaaaattcttgcattaaaatggttgaggagagaaaccaagtttttgtttttaaactatattgtgataagtttataattagcacatgctcataagcagcaaatatacacagtgagtttgtatacatctacaaattatgttgctccagtgtgcttttagccatgtaaaagcaaatttgcaaaaaactaagtttgagctgattcatagttgttggtaggatagttctcaatttgaatgtgaatttctaggggaactctgagctctaagtttagagcttcctaaattagtggtaatggtataagtctgtcctgaaattttaagagcagaagtcccccaaaaactcaaactaccccattgctacagtgaatcc

SEQ ID NO: 28776 - DNA, 1194 bp, Mus musculus
gacactcttacacatacacaacaacaatgcactaaataaataaataaatatttaaaagaaaaaaaaagaatacaaacacataagctggacacaatagaaaagttttagtaacaacttttaagatagtgagctgttatttaactaaaaagctcaaacaggctctaccagtcctctaaaacagaagcctgtgttcacttacttatttgggtagacttttaagaagattatttttcattttatgtgtgtgggtgttgggtgcatgcttgtatgtattagcaccacatgtgagcagtacctgcagagacttgaagagtatgtcagatcctggggactggagttacacgtgactgtgagtggcatgtgggtgccaggattcaaaccagtgccctcccaccagagccatctctccagctgcagtgggtgggggtcgtgcttgggccctgctactttgtaactgttgcccgggctttgattgcttctcttttactcctctattagctttggcagcaatccttggagctgtgccatttctggggacatattgggcagcagtacctgccgttctagacctgtggctgacacaagggctaggatgtaaagccatcttgctcctggtctttcatctcttgccaacatacttcgtagacactgcaatctactctgatatatcagggtaagtgttctccagttcttgctcagtcttagggtgtttggtttggggaagggttggggatggagtagtggcaatcagttgggtagccttttgtgatcctttcacagtgaaattcaacaatgttgaattacattgttgtggtaaatttctgatcgttattatgtaagtataaaatccaaaattaagaccaaaattatgcataattctgttttgagttttgtggcatttagcctaggaaaaaaagtattactaagcatatataaaatattttaagtacaataaagagttagtggagggggctggagagatggctcagtgggagcaccgaatgctcttccgtaggtcctgagttcaaatcccagcaaccacttgatggctcacaaccatcagtagtaataggatctgatgcccacttctggtgtgtctgaagacagctccagtatacttacataaataaaataaataaataaatcttaaaaaaaaaaaagattgccattggaggcccacttgaactacatagc

SEQ ID NO: 28777 - DNA, 1175 bp, Mus musculus
taaaaattgggactgtttatatatcctcctgtgagtagtgactaagtgcagtgaatttaataaatgaacacaacaccattgaatgtaagatggtgacaaacactagagatagaaatgcttatgattaaaaaaacacagattttatatttcatctctgtgaatggataggaagttatagaaaaaaatgggaaaatggaagcagttattttaagaaaatggaactacaatccaatgcttgtcttttaaaattgtcttgagagcctggcgtggtggtgcacgcctttaatcccagcactcgggaggcagaggcaggtggatttctgagttcgagaccagcctggtctacaaagtgagttccaggacagccagggctatacagagaaaccctgtcatgaaaaaccaaaaaataaaataaaataaaataaagttgttttgagactagggagatggttcagtttgtaaagtatttggcagtttgtcttgcaagcctgaagacctgcgtttgttccccagcacctatgtaaatgaagctcagcccacatctttaaccccaggacaggcagaagcaggtggggctctgtgagttggaggccagcctggactacaaatgagaaagatcttatctcaaaacaaatgaacaaaagaaaagccagccacaggtaatccctgtgttgcaatcccagtgctgagaaatagaggcagtaacatctttgggctgctgactggccagtctagttgaatctggtgagctcaaggttaatttaaactctatctcaaaaagtaaagtggaaaatgactgagggagacacgcggtgtccatcgttggttttgacactcatttgtgcatatgtatgcccatacacttatacatacaaaaatcaaaatctcttaagtgcccccccccccccttttggcctgtgctagggattgagcaaggtaagtgatctcctcctgagctctttgctctgagctttacaaatgtctctaataaggaaataggatgagacactacactgagtgtaagttgtgcctgctgtgtcaggttcccagaagtctgtcctgccagccctgcctgtctcagcagactcagggagagatttgtgcttgtatgtaaggtcctaaattttacttaagagtcttaaggcaacccttaattggagtaatgcaagacttaa

SEQ ID NO: 28778 - DNA, 1193 bp, Mus musculus
tcactcacctcctctgtccatgtctctctctttcactcacctcctctgtccatgtctctctccttcattcacctcctctgtccacatctttcttttgctcacctcctctgtccacgtctctctctttcactcacctcctctgtccatgtctctctccttcactcacctcctctgtccatgtctctctccttcactcacctcctctgatcatgtctctctccttcactcacctcctctgtccacgtctctctctttcactcacctcctctgtccacgtctctcttgctctctttcattcacactcaccagttgctgctgctttttcgtcattcaactttactggcctattgtttgtttaagtgtgtgtgagtgttttgccttcattactttgtatgtgtatatatgtatgtatgatgtatatgtgtgtgtgtgtgtgtgtgtgtgtgtgtgtgtgtgtgtgtgtgttatgcacatgtatgtatgatgctgtcggaagagtgcattggattctctggaactagttaaagacagtggagctaccatgtggtgctgggactgtgcaggagctcaccctgcagtatgcagcaggttggaaagaactggagcctctgaagtcttaagcttaatttctgacaaaattggagttaggaagattccactctacttaaaactatgaaggcttgagtttggaactgtgctggggctctatggaatctcatggtttgtatgttaatgccacctcataggaggttagggctccatgctttctcagaagattatttttatttaaaaccatgcttttaaggatgtttcttttaatacttttgcaaactgttactcatggaaacaaatctggttgtaactctgaaataagcttagtattgatgatataatccatactcctggtttacagagctttggagaggaaggagtgaggtagccctttgctcagggagctaccccgggaaccctagggcccagctgcttcctgatgcaaaacttgtcagttcattgattttagaacttatcttcgagtaagacacctgaccttccataccttagaaccccgttgttgtttgtttttgtcttgtttaatccctgcgttgtctgatgctttggtagcatgcactggagcttaagtcttgctttgaagctcttgagtgtcaacatcctagattaactttttgtgtctg

SEQ ID NO: 28779 - DNA, 1242 bp, Mus musculus
gctcagggtctggctttgagaggtactgtctgcaggtttatggagttggaacgatgaggtttatctgcaaggtctcctgatgatgtatgtcagtcactcaggttatatttgcagaaggcagaagaggactcagggaaggcgggtgcttggggacttagctgtgtactgtgggagttctggatacagttttggggcctgttgggtcctttttgaaactcgagttctaacctagtgatatttcagagaaacaggctggttccctgacttcagggtttgtgtctacgactttgtttgtcgtggtgtcaggtgctgcataggggtgaacttgagtttggggtaatgtgaaacctgtgggtatgtgggggtgcatatgatggcctggagattgacctcttaagggtaggttggcacatgccttcatcctttgagagcaagggtgaaattgttctttcgttagagtctacctgtatgagggccttttaacaatgtttttccctgtgaaataatctcttaattttcctgtatatcaaattgttctattaactgaaaacatgacttcttactacttttcagcatcactggctggctcatggagaattccagtattcctggttattgttttcctgatgtctgtgggcaccctttatgaaaaacagaatgagaaggagtcggctggtaagacagtcttttatgagtgcgttcttagtgttttggaaggatagctgtctgtactgctgtgataaataccatgacaaaagtggcttggggggggggggggaagggtttatttcctcttctaactctcaagtcaaaggtcacactcattgcagcgaggtcagctcaggactgaagctgatccagaggccataaaggactagcttgttcttcatgacttgctcagcctgctttcctacagctcctatggcatctgcctagtgatggcaccctccacaaggatctgggccaccctacaccaataatcaatcaatcactctggtgagggaatgctctcaattgcggttctgtcttttcagatgatcctactttatagaatttatcaagtaccttaccaaacaaagcacaataacttaaatgtcaaagagaaatcttttaatgtattaaaaacccgaagtggtttctaaacagaaaattaaattatctaaaatgttttaggcatctttagaccatgttcctattttgtatctttttgttattatggttaatataaaattggccatcaac

SEQ ID NO: 28780 - DNA, 1104 bp, Mus musculus
ggccctgctgaggcgcccagcccgcggggctctccccggccagagtcccgggccccgcgcacggtcgggccgggcgagaccccgcgtaccgcggcgctggcgctgcgcttcgataagcccatcaagcaggctttctacaacacgggcgccgtgctgttcgtgtgcctgtgctgcggcgccgcggtgctcgtgtacttcatcctcgaggccttcctgcggccgctgctctgggccgtgctgtgcggcactttcctgcacccgttcaagagctcgctcacgcgcctgggccgcctgtggctgcggcgcctgcaccgcgcgcacacgcccatcgtgctggccgcgctgctgctgccgctctgcttcgccgactacggcgtggaggcgctgggcgagcaggcgctgcgccgccgccgcctgttgctgctgctgggagcgggcggcccgctgctctatgggctctactgcctgggcagctacctgggcgtgcaggtgctgctggcgcacgcgggcgcgctcatctgccgcggcctcgactacttcagcagcctgtgggtgagtgagatgggggagtgcgtgcgaggttggcgggacccgggacgccgcgacaaggcggccaaaggtcctccagtgagcgccttcccacggccgagggacttggcgcgcttccttccagagaggcgggtgtgatttgaaacccgccctccgctagggaaaaggtcctttggctgagttcagttctttcaccctagtttgtgtgtgactctgggcgctttcgagaactgtattacttatgtgggggccattgcgacccggtctacgttagcaatggactgcgttaaaggagagagataccaggtgtcaatcgaggaacttcagaattggaaggaatcgcaaagataatcttagaggcgaattcctgactcagactacgtcgcaggctggttagttcacatatttatcgggcaaggttaaagtgaagtggttatttaatgcttaagaatcttaagaatgttggttggtaaactaccacaggggctaagaatgcaacgctggaatagcgagatcctagacagcgcgagatctagcgtgtatacaccccatact

SEQ ID NO: 28781 - DNA, 1606 bp, Mus musculus
ctgtttcctttgtgtatgcatgcttgaccacgctcatttctgaattgtcttccattctcccagtaaccattccatctgcaaacaaaacaagccatgttttcaggatgacaggccacactggaaaacctcagccagtggagatggcagccactttgactatgtccaggaccagaaccagaggaacttaggaggggcgtacagtgtcacgtaccgggacaaactcatgaccgcactttgagagactgaagcctcctccggtcaccaccatggtgcctttgcattccatgaggagcgtcctggcatcgcatgaatgtttttgtacaagtgtcattagtgcttttcgtgtccctgtaaacatttgaagataacagatagccatgatttactgtggaatgcattctcaattatgaaggtagctaaaggctcaggaatcgttttgatatgctggctttaaaactgaagtcaaagtctcaaccatcatgctgtgtatcctgatagttttgtcatttatccagtggggccacataaagcaaaccagcaagaccaaagcttgggaaaatagcttagcacataggactgtttgtaggagtggaaatcgacagggaccagcctcccttgccgtgtgaccttagctaaatcattcccctttctttgatttcatttcctccctgaaaagaacgggctgggctaagtgatctccaaggtcttctattctgtgatctgttaagatttcacttctcatttggggtgagagcatgcatccagactaactccccataaggacgactataataccccttctgtagcagaagctcaataaagattacaaaactcattaggtattcatcaatacagggaggcttggagttttccatctgtaaatgggttagcccgtgtggaattgagcctcagtgctgatcaccagttgcatagcatgtttcactagaatttacttctcaaacgcaaggatgctttgtaatgtctcagtgactggtgctgctaccctgtgtgatcagcgtagaggctgggttccatcctagacttaactcctttgaccagcagcatgcagttgagatatagtgggggatcacaggagagcctgccgggtttctgcaggtcgtgccaaagcactgtgttgcacagagggatgcatatgcccccctccttctgtaggaccccaaagcaacatgttgtcttttagggtggaacttgtaccaaagtatttatttaccccgattcaagtagcacctctctaacctcgttacgtcttcgtaggcagtcccagggtgctcttctgtttgtgtttctgtgcaatcagttaattctgtgtcactttgatatatgtgattataatttggctccttttaagccctttgggcatgtgtataacatcttctcttgctaaaatctggcctttttagttctatgaaagtctcttgaggaggaggggatcagtcctctgcacacttgcacaagggagtagaccacctacctataacctccccacaagatgcatgtttacaggcgtgttccagttcagcaggtgttctcatccccagtgtatgtactgcatccatctgaataaacgtgttctgggtctcttcat

SEQ ID NO: 28782 - DNA, 1207 bp, Mus musculus
tgcagacgtacagtcaatgtgccccgcccactccttcacacgcagcctgctttctcccagaggaagggcagggggaacaagcttttcctttgctttaggcccctgctcttgttttcttaggttattctaagaaacaccatcctgtggtcttccatttccgttaaccgtgggtgcttggagattgtttcccatccttacagacttgcaccctccattgctataactattgtgtgaccctctaccacataacgggcttttcacgcccctgccggtgtgtgagtcctaatttacatgtgtctccattggtctttctaaggggaaagagccctgcccaggcggaactctcctatctgaacaaagcgaagtggctggaaatgtatggagtggacatgcatgttgtcagggtaagaactatgtatgtttgtttcattttattttgctgtttctgaaaaaaaaatgtatagcgtgccaacaaagtaaattttggtgaggaaattgtttttacgttcttctctgtgacgacctgttagaaccctctaccgactgtcacttcgtttgtttgtagggaagagatggctgtgaatattctcttggactgaccccgacaggcatattaatctttgaaggagctaacaaaataggcttattcttttggtaatttagttttgtctaatattaaaaatgtcttttcctattttcttgtgttggaaagtctatgtgatggatgattttgaggggaatttgcaacacccagatttgctttaaaaaaaaaaatcacaccatcctattgtgcttgtggatgtgtggccagtgcactgaacgtctagctaatcgtatttaaacgaatgagtgatgattttcttctcttaccaatctaagcttttataagtagaaaggaaactgtttgatgtgtagacggattggctgtagactgccctttttaaaatgctttctctctgaccaggcctaagatcaccaaaatggactttaaaaagagtaaactgaccctcgtagtagtggaagatgatgaccaggtaggtctcgctccccagagtcctccttgctgccgctcactggcatccctgtgacctttgctccctccctcaggggcgtgagcaagagcacaccttcgtgttcaggctggacagtgcgcgtacctgcaagcacttgtggaagtgtgcagtggagcaccatgccttcttccgtc

SEQ ID NO: 28783 - DNA, 1765 bp, Mus musculus
gagagaggggcagggtttatttgagctcatcgtttgaggttttggtaagggcagcatggcagctgtgctttcagcgatagagcagagaaagaggaacgccggtccttagctcacacagctccccacttggctcagcagccagctagcttcccctcggcccacacttctctgagggtaccccgctcactcacccagtctgtgaaggcttgagttcgcctctgtctttcccagcaccgaggcccagcattggctcacagggagtgaatagaatagaagtgcttcatagaccctctcaagcatggcgtgcaagaggcagcactcccagagccctggccttgacagctttctcttctcttccagagccaatacaagtttgtgtgtgaagcgatccttcgagtgtacgaagaaggcttagtccagaggctggatcccagttaggacaactgtgaagtggtcgttcctccttccctagggcgacttcctgaagaagggggcacacattcccctggaggcccccccagagatgctggtcactgtgggaaagggatgagcttatctgaacccaggcactttaaatttctgtggaaaagataccctgtacataaggactgatggtgtagatatgcatgcagctatgactcctttggcccagagagaagcaacaggggatctccagttgggaactgtgtttctccctacatatcaccgtcccctgtcatccatccttgagcaatgagaggggacaccagcagtgtcctcccgccagaagccagacaatgtggctacttgtggttgctcaggtgttttgtgtgttgttctgtgtgggattccaagggctgaacttccttggcaattcctgtccattacccctgacaccaagggaaactcggatgaatgtaccacaggcagggcacaagggacttcaggctggaggatgaacaggatctattctgcccgccctccctccctccctccctccctccgcctcatctctaccccttctgcaatccaaagcaccccatttcccccaccccaaattccttttcttcaggatcacgcccagtgcctgaaccagcttcatgatgtatgttcaggtgaattctctgccgagactgggaactaggctctgcataaggctgagtctcagcttcggaagcaggcgagcctctgctcactccttgtatactcggacgccatgactggattcgccgactactgaatctctggattgctgctacttcaagctctcacacttgaaacaagacaattttcttggggggtgggggatgatagcatccaaatattcagaattttggacccttcttagaaatgaccttctagtaagtgaccatgagaaacactgcttctcaatcaagggtggtgtgtgtgtgtgtgtccgtctgtcattgtgtctctgtgtgtatgtgtgtgtctgtgggtggctgactttctcaggattcctaacttgattcaaattactgttgagtttatgtaaagaattcatctctgtacagaagaacaagtgtgttgttcattcaccctaggttacaatggtctccatttcatttcagaggagagaatcagactaactgaatataaacacaatttgatgttaatttattctaagtactctgggattttgattgtcctaaagaattctgctctgtgaataccatgttattttttttttttaatttgtggcaggattgtagcgaattactatttaaggaaaataaattacatgaatgctctaaggtggtatttt

SEQ ID NO: 28784 - DNA, 1184 bp, Mus musculus
agagatagttcagtgatcatccaaaggacccaagttcccgtctcagcacccgtattagaagcagctcataacaaccagggcctctacaccctccttggcttccatgggcactgtcatcataaacaaaagctcacacacagacatatgcttaaaaataaatcctttttaaaaaaatgccctaaaattgaccagctctaatcttgacaagttcgtttcagcagtgagcagagaacttgaatgggcttttctctaaaggtggatggccaaaaagcattgtgtgaagggactcattcactgttgtcagtcattatggttgggaaaatccaagccatgaaatactactgtatacccaggagaatggtcttagcccaaagaaaagggaggggaccccctaagtgttagcagggataggaaacattgctagtagaaatgtgaagtggtccaggcgtggtggcacacacctttaatcccagcactcgggaggcagaggcaggaggatttctgagttcgaggccagcctggtctacaaagtgagttccaggagagccagggctacacagagaaaccctgtcttgaacccccccccccaaaaaaaaaagaaacgtgaaatcagctagggtcggtaggaaagttcaacttgcggaggaaagggtttatttcagttacgcttccacactgaaggaagccaggacaggttcaaaacctggaggctgatgcaggagaggtgctagttattggcttgcttagtgttctctctttcccctctctctttctctctcatccttcctttcttttatctttccttccttccccccctttcttcctttttttttttttttttcttcttttttcttctgcattttcaagaccgataggtttctctgtatagccttgtctgtcctggaacttgcttggcagaccaggctggtatggaacttaacaaagatcttcctgcctctgtcctgcctcctgagtgctgggattaaaggtctaagacactactgccctgctctgatatcttaatagatcctagaaccatcccagagatagtaccacctacaatgggctgggccttcctccatcaatcactaactaaaaaaatacactacaggcttgtgtacagccagattttaggaggccttttttttttttttccagttgaggcttcctcctctctgatgact

SEQ ID NO: 28785 - DNA, 1196 bp, Mus musculus
ttcgatgggaaaagctacttcccctgaactagtaaaatttctagtctgggaaaagtactgaagtttccaggcatcgatgagtgagatgctttcccgagcatcccggcatcccagggaaggaacagtgaggtgatacctactctcagctttctttctctccctaaggtgaacctgggcaggtcttccttcctcaggagcccagacagcacaccagggcttctcctggcagtttgctggtattacatcaccaatgtttaaggaacaactcggcccctgggggctggattgggagcgcaagctgtaatggaatctcattggcttcacatcagtgggttcagaagttctcagaaaataagatctgagaaataagaaatggtcaaataggacagaactcaggacttcccatctaaagctgggctgcttgctgtcaaactgatttgacctggtggagagcaatcagtaattttgcactacgatgacagagaggacgtataactctgctattttctgcacataggaacaaagccaattgcaaataccttttgattcccctcttcccttctcttccatgcagtcgagttctgaaagcagaaagttggaagtgagggagacaagacagaataacggggtggtctgagagaacaatttaaatcccacatgtatgcacatgtatatatgtgtacgtgtatatgtatatacatacagagtacatatagaacatttgtatgtgtatacggtggtcacattcagggccttgtgcatgctaggcaaacactgcagcactaagctatacccagccatatatacatatatgtatacatatacataatattcatatgttgtatgcacttcatttggaaagatactgagagggggctgaggagatggctctgagttagaggcactgggtggtcttctataggtcctaggtttgattctcagcacctacatggtggtaatatatatacctacatgctcataaccaggtatgcctccaatcctaggtatctaattccctcttctggtttccattggtatagccatacatgtgatacccaggcatatttgcaggcaaaacacccatgcatattaaaatccccctcccttatttttagagacagtgtttccctgtgtagccctggctgtcctggaactcaaactgtagaccaggttgtgtggctcagagatctacttgc

SEQ ID NO: 28786 - DNA, 1113 bp, Mus musculus
ctggaggccaactgctgtgattcctctgtggatggaacttacaacggaatctcctccccagagcctggtgcagccatactggtaagcagcttaggctcgcctgcccactcagtcaccgaggcagaacccactgagaaagcatccggtaggcaggtgcctcctcacatcgagctcagtagaagcccctccgacagaatggctgaaggagaaagagccaatggacactccactgaccagccccaagacctgctggggaacagcctgcaggcacctgccagccccagttcctctaccagctcccactgctcctcccgagatggggagttcacactcaccacactgaagaaggaggccaagtttgagctgcgtgccttccacgaggacaagaagccctccaagctctttgaggaggacgagcgcgagaaggagcagttctgcgtccggaaagtgaggccctccgaggagatgatagagctggagaaagagcggagggagctcatccggagtcaggctgtgaagaagaatcctggcatcgccgccaagtggtggaatcctccccaggagaaaactattgaggagcagctggacgaggaacatctggagtcgcacagaaagtacaaggagcgcaaagagaaaagggcccagcaggagcagctacagttgcaacagcagcagcagcaacagctgcaacagcaacagctacaacaacaacagctgcaacagcaacagctgcaacaacagctgcaacagcagcagctgtccacgtcccagccctgcacagccccagctgctcacaaacacctagatggcattgaacacacaaaggaggatgtggtcactgagcagattgacttctcggctgcacgcaagcagttccagctgatggagaattccaggcagacactggccaagggccagagcacaccaaggctgttctctatcaagccttactacaaacctcttggatccatccattcggacaagccaccgaccatcttgagaccagctactgtcgggggaactctggaagacggcggcacacaggcagccaaggagcagaaagctccctgtgtatctgagagccagtctgcaggagccggtccagctaacgct

SEQ ID NO: 28787 - DNA, 1112 bp, Mus musculus
ggcaataattgaaaataaaaaggggagcagactcagccttagaaaggtagatggtcagaaataaggtgtttataactattttctattttaaagtgagccttagaggtggttgtggcataggatgagttgttttggatctgagagaggaaaccttaaacacatggggatagaaagagaaaggggtgagagggacaaagaaagaaaggaaggaagggggggagattatttttgcttgaacaaccagtgtttttcaggatgacaaagagaaaaatatagaaatttaagtgcaaacgtggaatcagctacaaatcctaaagatggtgtgtatgcctttgtgtgcttgtataaagcatgtgtgttggtgaataaaggtatgccagtggggtgtgtgtgtgtgtgtgtgtgtgtctgtgtatcgtgacacatgggtgtacagtatttcctccatagctgcctgtcggcttcaggaatgaatgacaattttcttttttatgaaaagggatataacggcacagggcggatgcagtatttctattattgagctgacctaacacggtatttgcatgagttgcagttgtgaagttttgagcagttttgtattggtaatttgacatttagaacacactttatttattctcatgctttgtgtccctgcctcgtgtttcacagaggataccagcttcactcttcctgtcacttcagggaatatgatagggacgctcactaattaggtgccccgagtttctgaatgagaaaatgtttcatttctggtggggaaggggaggcgggaggagggggagaaggcgtggaaggggaaggaggaagaaaaaagaactaaccagccttcattatttttcctttattttaaagctatttcttacaagcaataattaaatccgaccttgctaaaattcatttttgtttttatgttattatgtcataagttctaatatgttattctaataagtatcgactccacaatatttatatgtacactccacacgctatctttgctttgcttttgtttttgtattaaactagtattgactttggggaaaagcttattcactgataagtagtgggcacaaaataaaaagatggagttgtcttat

SEQ ID NO: 28788 - DNA, 1529 bp, Mus musculus
atgaagtggtcttttggcggcagtagattgagtgggaagttctgaagtttgagggaatagactccattagtaggtgagacaccctgtctcttcccgctcacagggcttttatcgctggcctctccatttcccagttgtgctcttttctctgaactgccctccaaagatggccatctgtttcctagctttcctccctgacagttctagtgcattctattaagatggaaagcacagttccatcagagagccagcttttctctgtgttctttgagggtattttaaaaaaattttttgaggggcgggtgtttgttttttctcattcaggaaacatttgagccattgctttggacatatcactgtgctaggctctaggatcccacgtgggccccagtcactttcccaggatggagctgatccctggaggaaagtcttccttccctgccccttaaccctgagatgaagaggctcgacattagtccagcctcggatgctcggctctaccctgcatcagcacatacgctgcttagtctcagctgtaagaaatatttagcttctgtagatgttaaaaaccttcctgaaggaactccacactgcagtgtttatactccagagcactttcctccagagcctgtgacttgacagcctggcctttctcctctagagatgagggatgcagggtctgtcggtggcagaggctgggtggcactgggactacatggtgcatgtcccttcctcttacccatgcatgctgcccaccctaggcaatggcatagaagcagtatatagatcagtatccactcacacacacttatacacatacacactcggtgtgcttgcacacacacacacacacacacatacacacacacacacacacgaacaaggaacaccaaaacagtgttgattgttgtgtttaaagacatgtttttttttcacctgaagaatggacttaaactatgtatttaaaaaaaaatagcctcagtgttagagatggtgaatgtatccagtttcagttacaaaaacaatttcctgaattttaagcattcagtgagctgccaattttgattttgtgttgctttttatccaaatggctttctcttttcttttacttttttcttttttctttgtaaattggaggaagtggggggcggggagcagcaatattgtgtttgaaaaattatactctgtacctggctttcctgtgttatgttaaccacttcaatgtttttattctgctttggttttatagtgtctgtgaggcattcgatgcaactatacagttattttctcattaaaactcaacgtgtatagtgtttttcttttttttttttcttttttccttttttctttcttttttcttgattgaaggattgctctttgttttactgtgaaaggaggttgggagattggttgtcagtctctgaggggcatgccagtggccttgatccctgcctctgcctccccacgtactgaaccgactgaaccggaagaagcaatagtatctggcaaaataaccctacgatgctatg

SEQ ID NO: 28789 - DNA, 1205 bp, Mus musculus
aggccaaggcaggaggattgctgcaagtttgaggctagcctaggacatatagtaacttatgagctaacctggattacaaaggaagaccgcatctaaaacaaaaccagaaataacacttcagccaaatcacatatagtgcacatgcagaaagcactgaggtcatgtccacacaagtggcgtctccctgtctgcattcaggatgatagagttgtagtgatgctgtaatctcagcacttgggaggctgcggccagcctgggcacaggttatctcttcttactaaattaagaggtctttatgtttgggggaaattttgctggaaccctggcttttctccagatttctttatttttgctattagtcttgtcttttggtttgactttttgggttgtcttttaaaaacttatttgagaaagcttaaattaaacctcccccattctgcattctctctgagcctcttatagaattacagcctcttatagaataatggcattgccctggctaatagccctttcatctctcaacaggtgggggagttctccggtgctaacaaggaaaagcttgaagcctctattactgaatatgcctaatcatgctctgaaaagtgtaaccagctaccagctgtttaaaacctgtaccttttttaatttgcaaaaaactatgaagtgtggagagtctatacccaactgccatctgattataaatgacaataaaatattaattctaccctttttaaaactgcctgatgtgttttaatataaatgagaaatggcctgatttagtcccctaagccactgctttaaggcaaaaagataggagctggagaggtggctcagtcgtttagaacattgcctgttcttgcagagggccaaagttcagttctcagcatccatacggcagctacctgttcctccagttccagggaatctgatgtcctctactggccaccatgggcaccaagcatgtctgaagtacatgtacattacatgtaactaacatacacataaactttttaaaatctttttttaaaacttaatatttagttgtagaaaatctcgtttattcggttacattaaaagtcttggggggggggtattttaccttaataaataaacatggtccagaccatgagtgtgactgatggttcacttgtgacgaaactgttgctctgatgtgagattcctgtgccaaagattacagttagctg

SEQ ID NO: 28790 - DNA, 1207 bp, Mus musculus
aggagtcggactgatgctcaggtttaatttttgtcaggttttatcctgattgtctcgcctctattttatttttttctgattaaattgtaaataagtatatcctgctgccccactccctagcaaggggaaaacctggtttacttctccttcatgcccctcttcgaccctggtccctgcttagcaggcaatccgctgtgttttatgaaggacgggcttttcatccaggaaagggcctgccttgctgggttaaagtaaaactcatagccaaccctccctcgaaggccatctgattttcttcctttaaggagtcacctgacaggttgtgcttgtgggtaatggactttcatcaatgttcagactccgtgttcttctaacacacaggcttgtgcgcatgaagagtttgtaggcttatgaataagatgcctgcatactagatctttgggcattctttcagggtttcatttgtgactaattttaatcctaattatggttctctaattataattaatgctgagatatatacatatatgtatatataatttatatgtatatgttaatttaaaagagcataggaagcgtcacctggccacaccggaaggactattggacacatgttttatgtgtatgagtgttttgcctgaatatatgtctgtgtaccacttgcatgcccgctgcccagaggaggtcagaagagggcatcggatcctctggaactggagttacagatggttgtgaaccaccatgtgggtgctggggatcaaatccaggtcctcggatgtgtagccagggctcttaaccactgagtcatctctccagcctcacctgttgctctgagcactttgcatgacagacttactctcctgtaaactgctgtctgacttagtcaatccagagtttattgccagctccctcaagagagccataaattaactgagtatataaaacacttagatcagaactaagtgccagactggttgcacacattagaataataatagtaaaatattttaaaagtcagagcccagtgggcttgacatgatcagtaaagctgaccttagcgtggtgaaacttaacatagggacttgatatgaaacctcctcccgcccctcccctccacaccccaaccccagaatagctcagcttggggggggcagtgatgtcacatatggatgcaaagtgcaggaggaacggtcagtggtagctcagg

SEQ ID NO: 28791 - DNA, 2862 bp, Mus musculus
gtctgctggactccgggattggtcttgttattgctggatgtgtgctgcccgcagtgcgatgtcctggcctatgagaagttcttcctcctcctggccgagttcaactctgctatgaaccccatcatctactcctaccgcgacaaagagatgagcgccaccttcaggcagatcctgtgttgccagcgcaacgagaaccctaatggccccacggaaggctctgaccgctctgcctcctccctcaaccacaccattctggctggagttcacagcaacgaccactctgtggtttagaaggaagccagccggcctctgtggatctgtgaaccccaccctaccccccattgccagggcaaggtggggagccagaggagatgaggacactcctgtacttaacactaaccaatggcagtatttgtccctagacccaagagacttgaggatgaatttatttggcaggccccatcttctcctttggaaaacagaaggggaccgtcttgtggtggaattgagaaatggactctggggtgaccgtgtagcattcactaactagacttaaaagattttatgtggtttggcttaagccaggaaaaaaaaatctgctgaattgagtatacaatcgagtatacacaggcttcccctttaaagaacaaacaatacattgcatttattaatgagtatgtttatgcctgacagcatgtttgtgatcgaaaagactgctaaactgacatagatgagttgtttttttttttttgttttttgtttttttttacatgatggaggaaaagtataaattagaatgatttttgtgtttgtttagaaagcaagcatgtggtgtgtgtattcagtatgcctttctttaaagataaaaggccactattttaaatcttctagggaatagaagaatctagtaaaaaccagtattcatttaggctacaggaaaaaccatatcctaatcaattaccttttaattaaagtaatgaaatatacatgaaaggcaaagtaatgtgagcttgtcacccaaagagtgtgtgctctccaaacgctggaggagatgaagctgtagcgttgtccctgcatagtgaagatacccacgtgcgttctcagtgccagaccctcagtgggacttgttttaaagcctgtggttttccaagttagaaaataatacctacttactatagaaaacttgaaaattgcagaactgtgtgaaaaaagaaaaaagaaagaaagattgctgatatacgacctggaagtagccatctttccctgctcacccacgtatgcctatagacatatattatatacctttttttttttttacataatcgggttgatattgtaaaatgttttgtaactttttctttcagaattgccaggtttttctatggcattttttttcaaaaacagtgttagcggctatataatattccatttaatggatgcagctcagtttatttaaccattcctgtattgttgactatgtttttaatttttttcattattataatattggaagaatcttgtgtatataaaactttgccagtatcattgatgatttacttgggctccattcccatgaaggacctacttttaaaatgtgaaatgtcctcatgtgttgtcactttataaaaagggatattctaccctcaaactgcaggggtgaccatgctgacaaaaagctcagaaattacctttttacaaaagaaacacagtggctactttagttgcgaatgggttcttgacaagatgtttcccaataacccagacccttaacataactagcaaatttactttagtaggaactggtgatccctttctggacacaagaaaacacaaagacatcaagcatcagagtgaatccagcaatgcagtaccaagcagcctgggtggggtgtgctagcaactggctgctgtgtggtctccagcaatcacccaatggacaccctgtgttcagagatgcccagtacagtgtcctggagactaaggtctctaatgtcatgctatgaggaacaaggaggaagaagaatagtcctgaagcaggtgtggagaggtcaggaggacgtctgagagaaggcagtcctgccaagagtggcattctagggaggaggaaggcagggtgtggcttgtgtctggacagtcagtggtaggcatgtgacatttgcctggtggaaaaaaaataagtaggcggagatccagttagcaggacaaagattttgctcgaggattcacaaaatgcaaagaaatttatactggaaatgagtgaaacgaacttggacttttattgatgccctttttatgggggaggtaaggactatttgaattgaaaagcatactaattgaaccttaataaatcattctcaatcagtgtttggcgatgtgtggttctggtctgtgctttttttctattttcgagaagcctctggcttgtgctgtgatggcttctctctctgaccttctttaacagtctgaggcagcccaacaactgttcctttagctcagatactggttcctcatccatgagattcatgagagacgtgttacctcaatggaatgagtactagagcaaggtatttagagagattttttttattatttatttatttattttgaataaaatgtatgtaataaataagataaaacaaaaactagcacatcagaattgggcaaaaacaaacaaaaggaaaagatcctacaagaaagctcaagaaacagagatccacttgtttacacactcaagaatcccataaaacccactaaactggaagccacaatatatatgaaaaggacctggggcagacccatgcagaccctgtgcatgctgcctctgtctctgtgggttcatgggagagttggtcatgttgattt

SEQ ID NO: 28792 - DNA, 1206 bp, Mus musculus
caggctccagagcttccagaggtctccacacgcatggtgtctactcacatggacaagcatacacatgattaaaactaaaaatctttctttaaaagctaggcataaacaaatgaatacattatttccaatgtacaggaaaaccaatttatgataattaaggttagtcttctaggaaaagcttttgactcaaaaggctatcccaaattgggactggcggcacagtctggagtcccagctgctcaggaggctgggcaggagaattgcaagttgaaggcccatgggggatagaataagttcagggcccacctggtagcttgataagaatttctctcaaaataatatttaaagacattgaggatataccttagtataaagcatttgcttagcatccatgaggttctagattcaatccccactgttgcctaaaagcaccccatgtagttacatcaaaatgacttcatatagttacatcatatagttacatcataatgactccatatagttacatcataatgacctcatatagttatatcataatgacccatgtagttacgtcatatagttacatcgaaatgactccgtagctacaggacaatggataagttttattttgtctatggttcactacctgagcttcctttaagatacgttagttaagaactgattcggcaaaatcaaaatgtccttcagagatggactgaaatttgactgtattctgggatgcaactggcctgtctggatggaatacacaaattcgacagcactagggggaaagtagcttctgacatcctgatctgagaagtgaagagagtcaggccttgaagatgctaacttgggtgtagggctagtgtaggattgtcctactttgacttgttccaaatctgtggaattcctgagtatttttgtgaaaaccaatttttccagcccagactggcaatgctttctaccctgctcacccagactcttgggctccctaggaggcttctctggccccttcttagctttggttttgtgttccatatgaaagcaaagaagcaaagatcaacccattaggaaacagcacttctagaaaaaacgactgattcagagagcaggcagtgaacgccttgcttggagggaaggtgtggtcacgtgactgtgctctgcagctgggacctgttgttccaaagctgcccatttcctccctgacccttgcaccagcattcc

SEQ ID NO: 28793 - DNA, 1138 bp, Mus musculus
gccttcttttataaccggagtgggaaatatctagccacagaatggaacacagtgagcaagctggtgatgggactgggcatcactgtttgcgtgttcatcatgttggccaatctcctggtcatggtggcaatctacgtcaaccgccgcttccatttccctatttattacttgatggccaacctggctgctgcagacttcttcgctggattggcctacttctacctgatgttcaatacaggacctaatacccggagactgactgttagcacgtggctcctccggcagggcctcattgacaccagcctgacagcttctgtggccaacctgctggctattgctatcgagaggcacatcacggttttccgcatgcagctccatacacgaatgagcaaccggcgcgtggtggtggtgattgtagtcatctggactatggccattgtgatgggtgctatacccagtgtgggctggaactgcatctgtgatatcgatcactgttccaacatggcacccctctacagtgactcctacttagtcttctgggccattttcaacctggtgacctttgtggtcatggtggttctctacgctcacatctttggctatgttcgccagaggactatgaggatgtctcggcatagttctggacccaggaggaatcgggacaccatgatgagccttctgaagactgtggtcattgtgcttggtgagttctgtattgactgttgccccctttatagcttttccaatgttgtcaaatggccacatacatttatgatcgtagtaaacaagaatgtgaacattcaccaggtgtctatgcagaattatgagtggacagggaaatttcattttaaatgtctatggcaatgtcagcttactgttcttcctatagttatagaatatgctaaatattggtctctgtgctgttgtataaaaatgaggaaaacaaagatatcattgaagagtgttccttctagaattaagaataccaaaacattaacgatcccacaccactaaacccaaaacaaacaaaagcctcagaatacctggttttatttagctttaaaaggttgttttatagtttctattgtaagactctcactcttaggactttgcttcacagatgttcaaatagatagtg

SEQ ID NO: 28794 - DNA, 1187 bp, Mus musculus
tgaatacttaagacattgggaatattatgtggaagaaggataattccaccttctacttattaaggcattacatatcaatgattgtaaacagtttaattatcccagtgtatactgtttacttcagaaaatttcatacttgaatgtcctatgacagttaaagcattggattagaaaacattttaatacctttggctaaaaaaagttaaggtgtggtatgaagaaacttgaatgttattcatagtctaatgttgatgagtacacggaaggagattggttttgtaattgcttgctgctttctgttagttacctccatgagggaagggtagtttttatgtgtgacacattggctgtaattaatctgagaaattttttgcttatatttgattttagaaaatttgcagtctagtaggaaagaatagttttatatcttttataccctagacacaggtttttatcagtttgcaaatggattgtatccaattgtttattgttggtatggaaaaattgaagctaatttaaattctttctgatttgttttagagtcaaacatgaagtttctggagagacagtggtatttcaagggggtggccttggcaaaacacctgatgggtaagtgtgctaaatctaaacacattgatcaactaagggagaataggaatattgtttgttgatggataaataaaaatgacatggaaaaaaaccctactgtcttagattaggttttcttggcctctgagatagagatttgtatgttggaagattattggagaatacccttaggattgtctttgggagcagtgagcagtgttggcctgaagccatacctcactggacactggattcctgaggagcttcaggctaggatggcgtggcccttcaggggtgtcgagccacagagcctgggcctcttgccatacttcttaggcctttatgcctggccagtgagtaatcatttgtggcaggctgctttgtgggaggccatgacctcaaagaccaaagttagttctcggactgatactaggtctagaactgtctgcttctaggaagctgagtcctgaatagacatcttgcaacatagagctacgttaaattcatctaaattttttctgggaatactttctgtgtttgactagtctgcctgtttagtattttaaattaattttgatgttgtccctctttaattatta

SEQ ID NO: 28795 - DNA, 1173 bp, Mus musculus
aggtgtcccagctgagtaggactgttctttctttccctttgtagctttcatagtacttctggtattgtggaggctagactgcaggaagaaggatttcaggttagatccagttccaatatattaagcttgttcttttataatatcatacacatacataatactttctgatatttctctcccttgctctcttttatttcctcccatccgtattaccatccctttgccagcctctttcccctatttattatttttgtttttgttttttgtaaacatttagtttaaccaaggccatatgtattgtaactgtccattgaagccttgcagagtcttttttttaaaaaaaataatagcttttcacattattttttatggatatcaatagattgagtgttagactatcatttacttttattaagtgtcagatatcagcaggaagatgattatgcatcatatatctacttcttttctctattgctcagagtctgatgagtagcagtaaagaagaaatgcgtgaattggcggctttgttttattctgtggttgtgtctacagtgtccggaattgagttaaagtcaatgatagaacagctgataaaggccacaaaagacaatcatgtatgttatcagtttatctttactcttctttgttatttaaataactttggaattaaaaaaaaaaacccgcaggaacctgtctctgaagtctgtgcactgttataatcataaaggtgaggtttgtttttccgttcctacagatttatcacacttcagagctaagtacagttatggccagaacttaggtttgctagaaaacatcagttcctcctttgagcctgtaagacagtgaaaaaatatatgaaattttgtttttctttcagttctgaaaataggtgaatctcataggaccatcttcctgaattagggaatttactgctaaggatggatttacctggttgttagatctttttgagcctgcgtctcatggtgtagctgattctgcccccagacttgagatctttctgccttagcatgttccatcatagcttggccccattctttttcagtaggtgatagggttttacaaagtatttgtactagtttttagttttccatttgtaaagtaaacttataaattcttagcctttataagtaatacttgagataaatgtgctga

SEQ ID NO: 28796 - DNA, 1641 bp, Mus musculus
cctgcttggctaattactcatggttgaaagaataagttcaagactctcctctgtaaaactatttccccagtgcccacttacagctaacggaagagcatagggggtgtacctggttcctgaatgcctatatatttctgtagtaggcagagtcaaaggctcatgttagttcttgtaactttttacagggcttggtgatagaatgtgggcacttaggaagggaaaggtatggggaggcctcgtgagaatggatttaccctgcacagaagcttctgagacataaatcaagaaagaaaaatcagctttccgagctacccgggaacgggtccatacggcgttgttcttgattcccatagtaacttaaagggaaatttacacaatgtccggagtccttgacgtcttgcagatgaaggaggaggatgttcttaaattccttgctgcaggaacccacttaggtggcaccaaccttgactttcagatggatcagtgcatctacagaaggaaaagtttcggtatctatatcataaacctgaagaggtcctgggagaagctgttgctcgcagctcgagctattgttgccatcgagaatcctgctgacgtcagcgtcatctcctccaggaacactggccagcgagctatgctgaagtctgctgccgccatgggagccactccaatcactggccgcttctcacctgggaccttcactaaccagatccaggcagccttcagggagccacggcttttagtggtgaccaatcccagggctgaccaccagcccctcacagaggcctcttatgtcaacctgcccaccattgctctgtgtaacacagattctcccctgcgctatgtggatgttgccatcccatgcaacaacaagggagctcactcagtgggtctgatgtggtggatgctggccagggaagtactctgcatgcgaggtgctatctcccatgagcacccatgggaggtcacgcctgatctttacttctacagagacccagaggagattgagaaggaggagcaggctgctgctgagaaggctgtgaccaaggaggaattcctgggtgaatggaccgcaccagctcctgagttcactgcagctcagcctgaggtggccgactggtctgagggtgtgtaggttccctctgtgcccatccagcagttccccaatggaagactggagtgcacagccagccactgaggattggtcagtagctcccacagcgcaggccactgagtgggttggagccaccactgagtggtcctgagctgctgtgcagacgccagagcaaagggaaaaaagatggaaggaaaataaagttcctaaaagccggaaaaagagagggggggggggggagatctcaatgataaaataagttggttaatgccattggacccatgaggaaggccctaggcagggacaaaattcagaggatggaggctttagataagtgtttgaccaggaaggaggaaaggatttgaatgtattgagataattttgtaatcactctagactcagggtagagactcaagatctttaatactgttttttgtttgtttgtttgttttttactctctgtaagttactaagtgaagccgttttgtagtaggaattaggataagccactgaaggaggagattgga

SEQ ID NO: 28797 - DNA, 3098 bp, Mus musculus
taatctgacaggcagtcagttgatttttatttttcattctcagggtggcacactgtgtttttcaaaacttgattatgctgtggcctggttcatccgtgaatccatgacaatctacattttcctgtcggcattatgggacccgactataagctggagaactggtcgctacaggttacgctgtggggggacagcagaggagatcctggatgtgtaagaagacctctgtgactgatggcgcacagtgtggaatggaagtgttataaattatgtttatagagacactttccagggtctcccttcagtagtttatcacatgtatgttttggtatctgctctttaatttatttgcatggcacttgcatctgtgaaaagcaaaaaaacaaaaacaaaacatgtctgtagtcttggccaaatagtatatcttgtggaagtagagaatcaaggcaattggttctaggaagtgggatttgtttttttttgttgttgtttatttttttaaacaaataaatatatatatatatatatatatatacacacacacacacatatacaggactgctctgcagcagacactatgacagtatccttcagtagggaaagtttcttacctgagttcctctgaatctgtacgggcagaacagcagctccatgagagaagtcatggcctctcccctgtgtgaagtaaatgctatacagagagacgcccgctggctgagaaactttttcatgctttatgcctacctcttgtagttgttgcagagcaaatagaagttagaagttgtaatacggtagctaggccttgcaaaaacaaatggaaaactttttaaaataataataataaaagagctggagtctagtatttatataaatctgtgaggttttttgttttgttttgggtttttttttttgttttgtttttttgtttgtttgggtttttttgttttgttttttgtttttggtctcattacaattgaaccaaaagtggttgagattggtttttaatggtaaccatgaattgaaggcatcttttggaccaactgtcgttggttctgtcttgaaccatattaatcactgtgctgtaattaggagagctgaatctttccctccctgctcccggctcacccggcctgccccatctttccttcgctttttccagggggtgatgttgtacaagtggatgttttgtagtgtaaggaaaatgcatttcagacagtcacacaggagctattttcttacccgggatgtctgtattgttaataagaatgtaatttcatgatacaagtatttaatatcttttttaagtgagtaaaaatattctagctattggcaaatagattacagtagacaattagaggatatgatgaggttgactcttccaatcaatcagtatcaagctaagtcgactgtgtgcgtgttggtttgttttccttttttttctttttttttactataacagtcttatttaaattggatttttgtattcagtttgtatgacagtagactaggccagcctagctgtaaatgcatgctacactttcctctccgtcatgcagctaagcttgcttgtcagcccgtgcttaacttgtggtgaactggacttttgtttaaaataagcaaaactgtaagggacagtgcatcggcctttccccgtcttcttaagtagaagtttgctcatccttccgaattcgagggcgtgttatccatctgatgcttgctgttaaccccagcacttggcagcttcccatccatcctgtgttactatggcttccatctcagcacacagtgtatagcctattagcaataacttcctatgtatagagaacattttcatcttactgagccagcccatttgcctaatgactatacagacagtctaaattgcaatatatctgtaaatgtgtatatactataaatacacaatatacttacatttttctgggccaaacagcatttcctttcccctccttttcctctcccctctcttgccttatgatgaatttgtttgagggcattttcttcatgagcaaaggcttggatgcatattcctaggtttgattttgtttttgttttttttctttctgtgaaatgggtattattatccccaaggagagctgcgcagtgagagccagtctagttatgacccactacgtgttgttttttacattactctttgatgagtcgcgttttgctgagcacgtttgttgtccgtcggtttgtttagtggagtttggtggatgccctttgcactgctgaagtgaaatcttgctgactacttagcttttttgttgatctcagtatgggcaaagaaacaaaatccaaatggctggacagacttctgtaaatatttttttaaaaaaacaaaacaaatgttctgtatgtgtgtgttttacgtggtcatgaagtatttccttaaagcgaagctttgagtacacagagagtaactctttgtttagcaagtttggagtgaagataaaatagcaagaaatactgtaaaatgtcaaagcaccacaccagaactgtaggagtccagatttataataaactgtctttttaaaaagaaaacaattaagtgtctagaatatatcatgttttattatttaaaatcattgtcttaagttttttgttgagagaataaaaaatttgaatacaatcaacgagagtaatggactggctttgtttacttcctgacatgttctgtctcagacatgttgccatattcatcttctttcttttccttttgttttgtctttttgagacaaatgtttctctgtgtacctttggctgtcttggaactctctgtagatcaggcaagcctcaaacccagagagagatccacctgcctctgcctcctgagtactgactgggattaaacaactcttttgctttcatttgtgctacactggacttacagtggggttcacctgctttggttgcaggtaataacacagggctggagaaaatgaggacaggcacctcacccacacatctgcattagtcattctgggtggggctgcacttggagaattacagacccttgatgactgacctctggtacagacccagagttccgtttgggagctcattcctggctgggcggc

SEQ ID NO: 28798 - DNA, 3101 bp, Mus musculus
acgtttcagatgggttaccttcatgttggttgaatagttaggtatgatgattttccagtgggtgttttcccacttacatctgaggtgtattttcacctgaatactgaataagggagggaaaaaattaggactgtctccccaaatttgcttttttttcccctcacacagacattatcttaattttcagtggcattttaaattggattgcttcctttattttgagttgggaactactatgtaatttattaattcatggcactcatatcatccagcataagtgtagcaaaagtttttgagaatagaagggaaatcatactggtgttgaatgtaattctgaagtagggatggcctttaaatatgagagagaacattgaaatccttttcagggatttgtgtagatatgtgtgcgtgtgtatgtgtgtgtataaataagtgtatatacatacatatactcttttaatgttatatatacatgtgcacattacatacattttaatttattgacaaaattaacagtgatttgggaacgtaagatatgcttgttttaaaagagcatgtttgaagccatcagattgtgtctaaaattagctgtagcatatggatgctgtccatatttgagctctttactgtttattatagaggtctacaatatttgtgttggcatagttttaaatatcagggtggtgggaaaattcgatctgtgtatttttattttagcatgcagtattcagtatcttttaagcagtggttaatttgtgctgttgatgccttgctgagttaatctactttatttttcacttttcaaggtatcctgacttttacaaagcatatatattcaggacttagaaaatagcagtacacatttaataatagagttatatatcaagatgttttactttgggatttagatgtgttttgtgacagatgagaatatacaagtcatgcattctcttaattgacaatttgttagaatttcaggattacctggtatccccatagaatgttatgcgatctttgggactaaatactacaagcagctctttgtagcagtgtttgcactgaatgttttagagtcatggttgctgtctttttagttccttctttgtcttttcctactgtggtgattaagggtcctgttgtggttttggaattagcccttatgatccaggcatagtagcacacagctgcaattgaagcactggaggaaactgatggttgtgactttaaacccagcctggactgcagaccatgctccatgctagtcttgctaagatcctgtgtccttccctttccccagttaatctactatcaactttaaagtcttcatgtcatcaagcagagcatttacttgagtatattatcgtgcagttcctcatctagtcccataatgatcttttgtgcctcagtgaatctacttgtaaactccaagcttatctcttagaaaacccagtgtgtactgctatttttagaaccaaaaagcatgactatgattggagcatttttctcagcctttcctttgtcttgatctattgtcaattcgaataaaactgccagacttaaaatactcactatcgtgctaaaacaaacagtttagattgtacataactttgcagtgtaactcagctgtctccttaaggattgtgttagatataagactgtttgcagtccttttttcagagcaaatcctaacaggtacttgtgaattgttttaaaaatagaaaattacagaaatcttaatttggggtgggagcttaaagggagaaaaacaaaacaggaccaaagtttatgtgccttcttcagtagtcttaattgaccttttcctatttgagactaaggtagcactggtattttggttttcaggaaatatctactatatagattaagagactattgtccctcaaactggtcatacaagtgactagttatgactgagttaaaaagtcagctacacttatgccttcagcattatgtgttaccagttgaagagcagaactgctctcggtctttatggtagtcaccgtagctttcgcagcttgtcaggggccttggtgttgatagcagtcataaccgaaagctgctcatagcaaatttcacttcacactgtcagcagaggtttgttggtatgtcctttgtaagaacaggtattttaggtaggaggtttttggttttgtttttgttttggcgtctttaagactatcatcctctagtcttttttgtttcttggttgtcttttgttatttgtttttttccttgccactcattgttacccagatctttaaaaacacatcccatatccaggaagtactaatcaccaagattgctgaccacaccaagttttacactgaagtttcacctcattgctctgaccaaagactgcttgttctggttttaactcaaaggtgaagcattttccctgagctctttcctaaaagatcccatgcagagcggccttgacttttcctttcctattggtgaatagactacttagagaaaatgggagttgaccatgaacagagcgagacagaaggatggacggttgttttcagaactgtatttgaggaaggaatagcacagctagacgcctcgaacattgtctaatgttttacatggtctgttcataaaattcccttttctgtttgtaaggatgttcatctaacagaagaaaatgctgtaaatatttgtaacaacattttttaaaccaggccaaaaagaaaaaaaaaaaaggttttcgggaacaagttaacatataaagtggttttatataaaacagcgattgtcttgtatattttgataagcagcagtaccagatttcatttgtaatacagtttgtggtattggaagaaaaggattctgtgattgtctaagtgaattatgttataaatgcaaagaggagaaaatattaaaaaacgtattttctaactgtgtagtgcatggttaattcaagcttctgtacactacaatattgattccgcttcccttaggtttgtatatttgataactgttccttggaatctcagcctcttttcctaacacatatagcattgtagcatgccttttaataaatgtcatggcatctgtactctcttaaggtttttctgtgt

SEQ ID NO: 28799 - DNA, 1161 bp, Mus musculus
atcatgttttaaatttcaaaatgacactgtctagtaatgtaatgtgatcttggaaaattttaaaagaaaaataatcctacttttttataattgttttcagaaaaaaagtttacagtcttaaggaaaaatattcaggtctatcatatggtttgacagattttttaaaagttatttttggtaaggtcttcttttagaaaaaaaaatctcaagggttttttgtaccactataatctctaatactcagaattactgtgtatttacttaatttcttattatgtgccttattatgtgcttaagatacaatagattagaattttatctaaatatctagaaagataaattgtgggcttggtgagcattctgttattttttcctgtcttggattttaagggttttggttgtttttgttttgtttttttctttttttctcgttgcaattttaagtggttttcaataagtaatagtttctactcagatttttggtgctttgggatagtggtgggatagagaagggtgagtggattgggaataaataactcagtgtgcacctgtaggcctctctaggttggctgccgccagccgtcagggaagtctgagctgtagacctgcagactcggatctctgtctgtctgccttcactgcccgttagattttgtctcaggattacttgattccttctcagcactcaagtgagaacctgattttctctgttaatgcgacttcattacagatagcccacatatttggagtatgagaaagtgggttatttttttatattctgaccctcttacttttttggttgaatgtaaaaagtacatattaatgttgcttcaatgattgtgtcatgtaaaattactttttaatatgaaactgcttttgttaattatttcttcaatgcgtgattggcttttaaaatacagaatttgtcagaggaatcaattttgtccaccccttctcacttttaataatctcagagtggatcatctcatctttttaaaatatctcagtctttactttcagccattaatttgaacattcttttaaaaaaaaaaaagaatgaaggaaagaaaaaaattgtataagctgaaagataattataggttgaagtcaaatcagaattccctcaatacagagcaactattggtaggctaggcagggaaa

SEQ ID NO: 28800 - DNA, 1019 bp, Mus musculus
tatagttgacactctgatattttcacagtccttctgtcacaatggatgacctgaagaacctgttcacagaagctggatgctcagtgaaggcttttaagttcttccagtaagtccttgctttctaaagtaacattttatttaacatggattgctacttttttttaaagtagtttagcaaagtccaaaggaagggaagatttaaaagcaacattaattctaagtatttgtgtattttgtcattttaggaaagaccgtaagatggctctcattcagttgggatctgtggaagaagcaatccaggctcttattgagcttcacaatcatgaccttggagagaatcaccacctcagagtttccttctcaaaatccaccatctgaccttcccgtgaaattgtctccttatactggaccacagtttctgtaagatcttcaggcacagactgaagcagctcaagaccatttctgcctcttcacaaaataactcttcgggaatttgatattcgagaacagtcaaaacaagagagagtccttttcttcctctcgttttccccaacagtgtatgatcaaaagtttgctttgcctttgtattgtggtttctatgaaaataactttcggggggaaaaaatcaggaaaatctttttaaaataatttaattccctgaatgagatttaaaaaggacagagtttctttctgtttgggtccagagcagccttacatgacatttctaaactcctttgtactttgagaaatttaaacatacagacttttacaatttcttgatgtaatttaaatcacctacaaccaagtttttttaactttatgattcagaagtttccctgtagaaaatgacattcattcacttataaaaattataccagatatttgcatctattgatagttattatacataactacatggagatatattggaaacaggtttataaacgtgcatgctttctttcagatttcttttttccccccactgtagcacactcctttaaataatgtccatcttctct

SEQ ID NO: 28801 - DNA, 1166 bp, Mus musculus
caacctgttattggctaaaggttgacatgtgaaacctgaatgtgttaaaaataatagcccagtctggcatgtctattgaaagtatattgggtcctgattttgttggtgctatcttaggaagtatagattttcttgaactttcttgtgataacaattctttcattcttgtttgtttaatctgacatcttttctgcctttggtactttattcagaaagtccttccctaccttgagatcagataaatagttaggtgatgtggtctgtctcagtgacagagctggcatagatcccaggcatttgcaatgattttaaaaaaaaaatttaaaatagttgtctggggctggagagatggctcagcagttcagagcagttgttgctcttgcagaataggatgcacttctcagcacaaccagtcataactcagccttcagaggatcctgtgctgccgtctgcatacatgcatgcagccaaaacacacacttttaaaaatagaatgaagtaatttttagttacctgttagttcctctgcttcttctgtgtccccctttccttcgctctcttttgacatttaaaactctaaggtagaatatattggggcgggggtaagagttgatgtcattttctgcaaggttctagaataatttattgaatagttcccatttccagtgatttaatgtatcacatttttgtttacaattgattctgtttctagtttttactttcattgttttctgtgtatttttcttgttacaattttaccttatgattttgttatgaaacaaaataggttcagaaggaagtgcagtagtctcaattgttcactgtcctttttgaaaaattactaatgtaaaattgagtttaatgagcttctaaaaattaataaaggtgtatgttgtttcctgttatttggttcacgatgacacaataattaatggtttattttgtcagaaatagaaactgagttaaactggaggaaaaaattaattgccttatagatcttcaggcaagcgttactccagggtacagatgccatcttgtttctgctgtctccaacctgggcttccttaggacagatgtgcttcatctccacctcctattctaagtgtgaagttagttgtgctagctgctgtcatgtctgttagctgatagaacccatgtctcaccag

SEQ ID NO: 28802 - DNA, 1686 bp, Mus musculus
tcttgactttaactatgcttttttattgtgagatgtattagaataacctctagtgtaactggttcttaataaatgtcactcagtttccagttatgcatggggaggcaaactccctgcatcttataagtattggattccagttgtagctcatggaccaaaagggggtttctgtccattggcattctctggagatcaaactgtacagtatctgtattattggcctgagacgtagtttgtgcaatctatttgggacaaacctccagtcaaaaggattgcatttttatcgacctaattaagattttctaaagtgaatttgttttgtgataaagggaaggtggtagccgatgatacaggtctctagcaggagataagaaaggctaagcgtggtccttggattagcttgacttttttctgaaaagaaactcaaacataagaaatttcccagacataattttaaaacttatcagaatcagtagagacaatagcaaattttaggatttttaaaagtaaagtgtaaattacttgtctttttacagactgtttgtcttgatatgactctggagttagcatttctaccattctgcatttgtttccgtgggagctttaagaatgctgtggcctagttttcttgtttgtgttgggtagaactaggaagccatcagttatctagactcctaacaattattgtgcttacagtgtttatagtggccgttggatttctgtgttacaacattttataaatcacataccttagaatactttgctattgatttataattaattatttatactgggtgtccatatttagtattaatccagacagataacctttatctaactgaacttttatacctttaatccatgttacaacttttaaaatagcattataatttttaaaactttgctttataaagcatttgttaccaaaaaaaaaaaaaaaaaaacccaaaaaacaaacaaacaaaaaaaacccttgccaaaaaccattacaattctatgcattgtgtgataacggagtggttccacggctttgcatgttgttctaggtgctgtttgcggagtctgtaacgttgttgtgggatcgttacccatcgatactgtcacttactgtagttaggctgtgccacccacatgtgtgttacgtgtgacctgagaaagtagtgcttcgtctagtattttgagccagcacttagcggcttcttcggaaggaaatgtagtcaccgtgcagtgccaagctgctgttccgcatgtgttgttccgttccagagagagccttcctgccacacacctgcagaaaagagaacagcaattctgtttgccactgagaatcttcttcttttaaacttgagcatttttatggcaaagtccagtagaagacagtggggcagcagggcctccccggtcaggtatttttagtttgaatggtgtagcagcagaagccttcgaggtgcacacattgtcttaggtgtcagcatggctcacatagaattgcatctataagagtaactagtaacttaggggctggagagatggctcagtggttaagaacatgtatggctcctctggaggacctgagtttgagtcccagctatcatatatatatatatatatatatatatgatagtcccacatatcaggtgtctgtaattctagctacaggccaaaacctctgcacatacttacaca

SEQ ID NO: 28803 - DNA, 1185 bp, Mus musculus
aggcactaggcacaaacatagaggacaaacatacatgcaggtaaaacacccacacacataaacgataaataaattgcagttgtaggtgctacctccctattgccccaggcctctctccggggaatggtttgccaggtaataggttatcagcaggagatcccactggacacgaagaggttggcattcagctgtatcttaggcatgcaatgagttttctttctttctaattaaaaatgtcagtaacatgcttcacttatttcctccattgctgagattctgttccttacattgtaaacttgaagaggaaaccaaacctgataatgtggtccagtgagcacacccatgcctgtgaattctacctccagcacaaccaagcctgatacctcacacaagcaaaaacaagagaaggaagaccagaggggtcttcagaggccacagtttttccattgttttctgtgttttaaaacagatgctgtatctaaccaaagctgtgaaagaaatgttctctttggtcaagtgacatggtccccattccttggattctgttctactttgtcagctgagacccataaatggcgtttgggaaaaaaatgtgaaattctattaccttttgcattaattcatcttattaaaagcgtaaagcatttcggcatgttcagagacacaccattaagatctgaacaagatagtatttatgtggaaactgaaatgtcctgacagatcctgggcgatgattcacggctcacttggcagccagcttctgctggcaccaccctcagctctgctatggtatctatctctcggctggctcatctccagggttcacgagtcacactgctagtctagaatttctcagtatgctaccatgccttcttgagagatcttttttttttttttctaatttccaggtttccagtttctaaagttaatttgttatctctagacaacattgctaattttgtcggttgaagctaaaggtggccatattgttaccactcaaatgaacaaaatggttatatctcatcctttcaagtatccatcttttatgagacactgattactctttaaggggggtgagggcgagcttactttatgtatggaaaatgcaaactagtaagacctcaaggaagttggctgatttgccctagacaagctctgctgtagtctaagctaaggctgagcctg

SEQ ID NO: 28804 - DNA, 1152 bp, Mus musculus
acagggccaaacttgaacaagaacagaggtgcttatttatatatgtacctcccactaccctccctttgccctatagaattagagtttgattaaagtgtgaaaagtatggcttagggagtcctataataccttacacaaaggtgtcatgattaaaattctattttatgagggagttactttgtaaggatcctgtcatttttctgtacccaaggattgaacctaggactttaacagttatggatgtgttttaccgagcctcatcaccatgggtaactgactgcatctccatcctctctgctgttgggggaatttaaacatctttagttggggcaatattcagttttactcccttctgatagtttgctataggtgttttcaccagccacatacgccgtcctgctcagtgcaagtgaagcagcagtgagcagtcttcctgagtcatcacactgctccctgtgtctgctgctgacccagggacccccttgctcctgcccctcaaagggccatccagcttccctctgcacctcctagtagtcttcctcgtcttgcatttcgctaagttcctgtgcagtgagatctgtgcctgcctgcctgcctgcctgccatgcttctgaacctgctactgacgttaggcagagagaagggtttctgctgttgaaaccttgcctgctatgtgactttgtaatctaggtgcttgttttcccttcctgggtcagatcaaatacccggatgaaagggctgatctagattcacagtttgaggcacagtctgtcatggtcaggaaggtcaaggcagcaggagcttgaagcagttggccacatctcctccacagtcgagaattcgagaacaaatggattctactgtgctgtctttatgtaaccagtattctagccagggagtgatgccactcatcagtgggtggagcgtctacctcagttaatactatcagtaattccctaaggcatgcccagaggctcatcttgtagtggttctagatgttgtcatgctgacagtccagtcccactaaccaggaggactttccagtggtcctctgcttcgggtacgtacccatttctgtgggtacctattaatatctactctggtatatgctgtgtttgagggacaaaaaggtcacagagacctgcatatggg

SEQ ID NO: 28805 - DNA, 1190 bp, Mus musculus
attgtttttgttttgtactttagctcatatttgagatcagcaattgctggtatcctcccagggatgaatggtgtatccaagaagagatagcagtccataagtaaaaatcatattttggggtaaattaattttatttaacgttggtttattattaaagtggcattattatatttcagagaactttaaaaaattagcattagggtagagcattaacattttccacacacaatggtgttttgttatcttttttctagatattgcctcatctagatctaacatgtagtatgctatcaaggtcattgttctggcagaatatggtagttgaagcaaaatgtcttccttccttccttccttccttccttccttccttccttccttccttccttccttccttccttcctccctccctccctccctccctccctccctccctccctccctcccttccttccctttttcttttccctttgtttttgtttttgtctgactatgtagccttcctggcctgggactccctatgtaggctagccaggctatcgttgaactcgcagctttccttcacatctgccttgagtgccttagactgtgtgccgagggagcagtgttctgtggtctctgcttgactggtcccttcagcaaagcttgtcagcatgtgcaacagggaaacaccattcctcctcgccgatttgtgttggttcagcagtatgtgaaattacattattcaggagggaaaaaaacctacaaccctttcagagttaagctggaggaaattaatcaaatgttctagacaattctgaagaataactgagtttcatttcctgagggcaggaaaaaacatccccctcaaaaaaaaaaaaaaaagaaaaaaaagcaaaaaacccaaaaacccaaaaacccaagccaaaccaaaggtcttatgtttcctagctcctattgatgggtggatggatcgattggtttttaagacaaagggtttctctgtgtggccctggctatcttggaaattgccttttagaccaggctggccttgaactcagagatctgtcagcctctgccccctgagtactgggactaaaggcgagcaccactgtgtcaggctccatcctagctccttgactgtgcagcctgctggtaaactgccattcagctgtgcatgggcggaaggaggggtgtcttcgccttatttgatt

SEQ ID NO: 28806 - DNA, 1221 bp, Mus musculus
tatagggaatatgcttttatttcagatttcagaccaggttaagaagctaaaagcatatgtaacataaaccccaaactctcaagtactgtgtgcaatgtcagtgtttcaaaattaaaccccgaagtttccaatagactcttgtaacaatttataagtaggattttttttttgtagattccaacatatatctgtatagatacttgaggttgtttgtttgtttttgagctagggacctattatgtagctcagcctggctttgtaacctggcatgatgtttagtttttcttgccgtaatcgtctgaatgttgaggctacgtgtgtgtcacagtgtcaagttcactatggttgggattcatttccctaataattgtggtgggcatcttttcatgtgctcattggctgtttgtagatctggggggacgctgccaacattgctccacctctgagcttcatcactacccctacttgtccatttttaaaatgcatttttaaacatttaaaaactcaaacattgtttcttttattgtattaatcattgtacatgtggacataggtctggcacataggatgtttcttacaggtacatgtggtctcctgaacaaatccactccaccctcatcagcactgtttactctcttacagattcatgttgtctacacatatgtgattttgcttatgtatgtagaaaatctagatgcttcatacaagagaaaacctgtgatagttgcttttctgagacaggcttgattcactcagttgcctgtaatgacataacttctgtggctgaggaagaatcgatgtgtgcacagcacgttttcctcgtcctttcttccctgccacccctagcttagccgttgggaatcgtctgtgtggtgcactggcttacagtctttctagcagataccctgctgcataacagggttatttagcagatctgctttcagtttttttaaatggatttttatgcatggattaaacacattagtgactatctctgagtcaccaataatgcatcggtattgaatgaaggaaagaatgttcccttggtgtgatttaaccaagaatggtccagatttgaattctctatgttccccgagtcttctgtcctctcttgtgtgatgtgaatctgtgcctgcctgaaagctgtcttgttaatatgtccctgtgtctgtgtcttctgagtctgtcagttgtatgagctgcgtggctatgcttaaacaa

SEQ ID NO: 28807 - DNA, 2630 bp, Mus musculus
gtggagagataaagatagcttttgaagcttgaacacatgccagtgagatgaaagttggccttagcaactgcccaggtcctgagaaatggagggcttgttcatggggttagaaacctgcaaaggcagccgggcgtggtggcgcatgcctttaatcccagcactcgggaggcagaggcaagcggatttctgagtttgaggccaacctggtctacaaagtgagttccaggacagccagggctacacagagaaacttcgtctcgcaaaaccaaaaccaaaaccaccaccaacaacaaaaaacaaaagtccaaaaaaccaaaaaacctacaaaggcaaaagaggtttgagagccgtggttgtttaggacagttgtggtttgtagcaggaaaggacactcctgatgttgggaatttgcaagaagaatctgggctgagctgcttcaaacaaggaggctttgctctggagtgaggagggagtgacccctcagcctgtgtagggtccagttttatgctctcggaaggctcagcagtgattgctgccgagtgggaagtagcttctcccagctgttcctcacctcaccagatattttcccaaagccgaaacaagaaaagtcagcatgcctggggctagaagcggaatgtaagatacgtctctatgccaaatggagttgtagaatgtaccctctcagcccataaacaggaggaaaccatatgtgaacactacagcctctggcgagggctctgtggagattttaattttagaagggggcatgatggcagtgtttctcttttaggacaacacccacggaacactcaaaggctgtgtgacttgtcctgtcctgtggcaccgaagccctaggtagctggctgttttgatgaggtcatttgaatcatgggagtgtccttacactacactatcctgagctggttggggtgggtagaagaaggcaaggactgcctgagaggctgcgttgaccctactgatgtgggtcttgggatgggctggaacagggttcctgcctgagtaggtggaactggcaaccttgaagggtgattcccccccacccccagaggatcagctgcctgtggttgggacagggcacaccaccttccctcagacggtcttgctaagtatatgactgggagagtttggtcatttttgtgtaccctatggtgggaatgtggggttgcctttcaaaagccttcaggatggcaacagattggatgtgctatctcagtgcctgcaggtctctctgctcgaggcagcagggggcgctttgcagtatagttgaggaaaatgaccgctccttgaccaaactgagatgcacttggtgtgtgggaactgattgcttcctccctgtttataattcagtgaataatcacgggcccaatattttactaacccactctgtaggttgtcagtgttccattttgaaagtgtccccgtggttgcacacttcagaggacagggactctgtgtgtctaagaaggctgggatgagggctctgttacagggcagactgttctctcatagtcttatctgtttgaatattcctgggtatgactttatgtgtggcaaaaacccacattaccaaagtagtttttaactactgtaatttgtaaataagtgttgtggcaggtgggaacctttaaaagatcagtaagatgtttctcatatttatgaacttagcacttgaaaaccaacacactcagaaaaagccacagattgttaaaagcctaattgtagttcgtaacaatttgtcagtacgtactaattgccttattcttcagctagtggtttataaagaggctgcatagaaagttttacacatggaagcagctgatgtagagacttcatataggcagctgcagtcctaaagtctcaagctagagggtgggggccacggaaggaaggcagcctttcaggtagcaagattaaatattgctgttgccaaatagtatttgaaataataccagaaaacggggaccacagtactgttcgatgttttcaagtgagaaagaggaatgtagtatgctttggcatagtttgggagtggagaatacagacattatcagcagtgacaaatcacatagcttcaaaaactcctccagtttgtgacaacatgacaggtgtgacagcatgacaggtttgctctgcttctgcagagtgggccccagaggtcacttaggactgagatgctccaaagtttgaagtgccaaataacatgaaacgtgctctgtcgactcaatattaaagccagggtgaagagttgcaaacccctctgtccctgcagtactgcctgagtgtgtggtgattctgggctctccacaaccagctcaaagcagctagcacccgtgctcactgttgttggacgggctggtccacagcctcagacccacgctctgccgagatactggacgggaggaaggatttttcctagactgcggattggcgtgacaaagcaatggctgtgtcagctgggccttcatccaggaacagaccaacataaaccagcatcttctaccagttagcactgtcctcctggaccatgctgagggttgggcctctccctcagagtcctttctcactgtagttctgtgtgcctgttcccttcatgcctgagtcaggaatac

SEQ ID NO: 28808 - DNA, 1141 bp, Mus musculus
actgctctggttctctcaccctcctgaggagtggccctgtattctcttgggtctggagagggtgtgcttcctgttgaacgaccatggagcccactctgtggccatggagcctgctgaggagtcagagccaggcctttccaccaaacaccacagagccagaatcctcctctctcctgtcctggtggacaccaggcacagggagaggcgaggcctggaggatgtgtggagctggttgtgccctaggcaggatgcccaaagcccagtagaccctggggatcagggcctgcctgccaccaatggcccctttgccatagtgagtgctactgaagcttaggttgtaaatgtcacctcatgctcaaatgctcctcccatcccaggaggtaaggagctgtgtctctttccccacctggaaggtattgggaagttcctaagagagcagccctcacccgtggctcctgtgcctggctcacctgggacctaacgttctgaggaaataggtgtattctgctctgtctaggtcgtagtctctggtctttggttcattgtcctgtgatacaatttctaagggctgtttagtaattcttttgttcttctgggagatagcaagaaacggggagcagtgttaataaccgggcctctgagcaggtgcagtgaaggagcccagaaatgggtatgtgtggaatgccaggaagcctccctccccatccaggtcagggggcagtggtcgggccaggcccctggaaagctgtggtgcaggccttgcaggctgggacctgcagcaggtcctcctgctgactgaggactgcagccagctcatggatgttagatgggcgggggaactggactgcctcacatcctttgtaggttttccaatgcctcgccctgtgatgtgtcatgctgctgccgcacaacctggcttcagaggtaccagggagcaggatgatgctgggatggtaaaggagagcatctctgcaggcaaacagggactccactgctgaccccagcctctgactcccttcaccttgctgccagggctatgtctgagtgcccacactttggacagcccctggaatatctggctgggctcattttgcctctgcttagcccccctcccacacacacacatccactccccacatca

SEQ ID NO: 28809 - DNA, 1347 bp, Mus musculus
ggtggtaattggctactttgtgatgctggctgtcatgtcctacaacacctggattttcctcggtgtggtcctgggctcggctgtgggctactacctagcctacccacttctcaacatgacttagtgggccagagatgtgcagtgcggagggctggagagagctggggcctctgttccagacattgtacttcagctgcttttccttatggtggccattgctcacctctttcccagttcctggagactttgagatgaaaccagcaaatggtccctggagcttagaagccattgaagctacctccctccccagcctctctagggcccaggctcctgtggtgccttaagcaagtagctgtgaccaaagggaacatggagagaccagaagctggaggtagggtggccagcctgtgacacagatctctgactgcaaattaaagttttccaaagagcttcagtggtcaaggccatggaacctggatactctcttctgctttgtgccttaatgtcagggtcatctccagcctttaggggacagaccacgccagctccttgttctcacctttttgccttggaacacatgaggattgtcattgacaaaacaagcttttcattttcaactcctggttggcagttttgcacattcatacaaaacaaaatttctaatgaactcattgtattcaggatggatggcagtgtctgttgagacttgtctccccttctcgagggaagactgatgctgattaaaggcagagacccaggactgttactgaggctgtgggcttgtcctgtgtacagatgagctcttcctgtctgacagcactgcctgcagcaggttagtggtcagagccttgcccgagcctcttgtgtgcaccagagaggacagcatctgataacagagctgactgccccttatatttccttactgctaactcctaatgatctggtaggaaatgtgagtcagtcactttagtactgactcagcaggggtgtgctggggctgggtactgactgagggtgcaatagcaatcaaaccaaagctaggtcattttaagagtttggtggactccagatatttgagccttttcactttacacagaaaagttaagacaggaatggggacatatacctgtaatcttcaggatgtgggaggctgaggcaggagattgcgactttgaggccagcttgagctacatagagagttgcaggccagcctgagatacacagtaaaacacacacacacacacacacacacacacacacacaacaatcactgctacatactttataatgtctgtgttcaagtacctcatgggcccaatgaaaagatggttttaagaagttttggga

SEQ ID NO: 28810 - DNA, 1326 bp, Mus musculus
cacagcaaattctaggccagtcaaagctacatagtgtgaaacaaaacaaaaggaaaacagtaagagttggacatagtgacaggcacctatagtcctagagcatggggtgtagacacaggagtatcaggagttcaagatcattctctgttaggcacaaagttggaagccaaaatttgagctacgcaagctcctgccacaataaataaacaagtaaggaaggcaggggtgatgaattcctgtagtcctttcagatggacaaattttaacctctgaaaagcactgagaaatgtgctagtgagtcttgggattgagatcagctacttctagagcccagttttcttcttcttgtctactggacactatccagaacagactccttatttgggttatcactcttcagccgggaaatcgttgcttttatcttgtgttttttcatgaaatcttaagcaaaattgaacagaatggacactgtagcttgtagtgttgacatgctttcttgtattctgataataaggatctcttatttatggtttaagctatctgtgttcgcttaaccacaatgtgctgttagtaatatctttggcctgtgactggtgatttgaatgaaaatagcccttacaggtcccaatcatacatttaaatgtttggttcccagttgatggaccttttaagaagggctaggggtgtggccttgttagaggagttgtgtaactgaggtttcaaaagcccacagaaggctgggtcttgctctctctgcctataacttgtggatcagatgtgagctctcagccactgctctaggaccctgcctgcctgcctgcctgcctgcctgcctgcctgcctgcctgctcccatgcttcttaccacgatgactggggattgatacttggaacctgtaaggaagccctcagtgaaatgcttttcccccctctaacagcaatagaacagtaattaagacaaccaggtatcatccagtgagctgtgccttgccctgcacaacctcctcctgtttcattactgtttctttcccactgcgactgcattcattgttgtggctatctactaatgacctggtcatggtcaacagcctggaacttcattgttctccatgaaatgtgccttatgagtatgtctcctgtctctagttttatctttgtttttcctctccttttcctttatcttccctactgcaggcctactggggtaacccaaatatactctttttccgcattggtactattcagggataaaatggtgactataacatagtctatagaccagagacatcccaacagaggtttagctacctcagaatcccttgagaaa

SEQ ID NO: 28811 - DNA, 1166 bp, Mus musculus
atatataattaactaaaatttaaatataattaattaaaaactaaaagttactttattgcataataattaaaatttataatgaaagaatatatttagaaaaggggtattttccttatatattgctttataaactgacttttaaacttaatgttatatcataaatgcctatgtgaatgtcaataatatatgtaaagtgtattgctttaaagacaactaggtggccttctctctaccataattccctttactctcctgatagacatttaagttgatttagaattcagtaattatcaaaaagtgggcttattttcccagaagacaatatttggtgctggggaaagctctaaagtataagaataatccagagatgacagcccttgaaccacagcacagcaaattatagtcatatgactcatgtcatatgacatcttgtctttgcttgaagcaggaatacagggcagctttgctcagagttaacagttttggttttatgaatttttaagaatcttttaatagtgagagctaacagctgggtgtggtaacacacactttaagctcatcactttcaattaaggcagagacaggaggatctcggagtttgaggccaacaagtccccatagcaagtttcaggacagtcacgatgcatagagaaaccttgtctcaaacaaacaacaacaaaagacttaggacaagcgtcctggacagacatgaccaagccagcatgctagtgaggtgcagtgacttgctctgctctgtccagttttctgtgggtgctctgaggtctgagactgcttggtggaagagttgggtagctgatggtggttctgtaggattatattaattatttgatatgatttataggaagaagatctcttactcttgcataattgagttcttcctttgtacaactcatatccctgacaactggctttctgcctgcctttccttcctctttcttgactagaaatcctgtattgtgagccgagttagagacaggcagcctctgtcttcagctaaaacctacacatagtgatcaacccttgtgtttttttcaggatgcaactgttctgcgaggagctgggcagtcccttgtgacaccatctatccagccttctcttcagccagctcatccggtattaccacagatggcctcacagggtaagaa

SEQ ID NO: 28812 - DNA, 3001 bp, Mus musculus
gacttaaatttcacactagaaatgagctccagtcttaactcagtgaatgggaaacacatgttcctctctccaggttacactgaaacctgtgtagtgtgtacagagtgggtagggactaaacacaggcctagcgtctatgagtctgtattcctgctcagtcatcaacttgtgttcctattgaacatttgatcagaatgaacttgccaatcaaaacaaaaacaggacaatcaatttaagacaacagaaatagagattgttaaataaaaccattagtattttactttgactcagtaccttggtttgtcccaactgaataagagtttgtattgtgtgtgtgttccttgaaaccaatgattttcaaactttacagcttcagaatcacccagagggcttgttaagacactacttggtggacctcaaccccagaaccaccaaatttggcatttctaagttcctaggtgatgttctactcacagtcagtccagaggattaccttaagagtctctgcattaaactagaaaagttgcacctagaagggacagagggtggggctacctgctatcaggcatgaacatgtgaattgctggttagtaggtggtatgccttgggcacatgtcacatctaaatgctgctggtcgatactttatcattccacaaacatttattcacttccaaatatgttttatgtatacccacatacagtgtgtgggattacagccaaagtatacttgtcaacatatacgaagtctctagtcctaacttttaaagatctaaggttccttggaagttatttgaaggccaagagacctttgctctgctgtgtgagtcagccagtcaaaagcccagaaaggcaaaaacccagctttcttgtttggagagacatggggcatgtgtctgccaatagccagttgttctcagtgtgcactatgtaggtccccatccactacttgaccacctttatcatttacggggatttacatagattacagtggccaagacccctttctcaatgaaggatctcattggacgtcctgtcaatcattaatctacatgcaggcttgttcccacactacctctttaaagcgattcttcctatgctggtctgttcaatcctgccctctttggtgctagatccagttgtgcctcagagcagaagaaacaaacctgctgtcttgttggcccagtgtttcagttttgaagtgtgtactttctcctctgtgtgtgccaattacatattagagaacaaggaatgtgtactttggtggctttgaaccaagaaaaggttttaagcctactggatggagtctaaaattcttagaaatcaactttagagctttgcttttctctgagttcatcctgcagtgaatgacaggtactgacagcccaacattaaggtgcaaatagcctgtttgtcatatcagaagccatggaataataaacccaggggaatccagaaaccacacttagtggtaaccctggtgctctctagaatctccaaatgagctgctataaaacacctttcaggggctgagatgcagctctggtgtgagtcacttacctagcttatgtcaggcccctaaaagtaatgcataaactgtcagaatcgggaccttatcgttgaggtgaaaagaaccaaggcccgtaggaacaaggtgctatgaatctgaaaccaagagaaacctcagtttggcatggttcttcagggtagcttccgagtagaaatagtctgctgcaaatcctaaacttaagatccctgcgctaggttgctagagactgcggttagtgcagaacagaggtaagcctaagtcccatcctcatgaacttcaatgcccagcctttgtgtttattttatctaaatgtctcctttcatctgtgggaaagctatagctgagtgtctttagcccctgccctacttttccctctctgacttttttcccaggtagcttagtgtttaacatctctctcaccatcctgatgcagtagcatggctattgctgaggttattttacctaataattagaactttgtatttacaaagcaagtagaggtcttaaatttgcttcaagaagcagttgctccactggaatttctataaagctgggtaaagggttagcagaattacagatcttaagtactaactgcagtccaagatggaagagtactcagcagccactgccctcatcaggaacctcctcggcatccatcagtctcctcactgctcctgtgcgcagggctgtccctcccacactcccttccaggccgtggccttcgcttcctcattagaatcaggagagtgaggcacagtgtccatcatgccatttaatcttgtgcctgccctttccagcctcttcaaaagatgcatccaaacaacaggtctgcatttgatgtaatgccttaattactggggccacattcacgttgactgtctcagagactgtaagctcccggagagcagggttgctgtaatgggaatgtttaagtgttgtgtgcaagaaaacaaaataaatattttgattttcgtgattctatgcatgtctgtctacacactgtccaaataagctggttctgggacgtcagtctcctccatggcatggccttgttgctctcctgccactcttaagcagacctggtgcctgccacagggtcagcatgaccttgtgcatagcacatagcagcaaatatttcagtataggagcgattcttaagttcagaaactaacctttgccgcctttcatccgtagttcataacccctgtgttcatgccattaggcggcagcactagcttccaggaggctcccgggcagactgtgcccatccctgtagcagaggggaagtattactgttagtggtctaaccgctggcccatcatcacctcttctgcaatgctgtggtaaacatcacctttggggacagctggctcaaatctaggctacaccacataggaactgctatcctaactgtctcaaagccattgatagtcaagtgtggtgacacatacctg

SEQ ID NO: 28813 - DNA, 1128 bp, Mus musculus
acccgattccaaagcaccgtgttttggagcagccagaaagagtggtctctgctcaggacttaagtaagagcagtgcaaagagagctgcagcacacgaagacatcaggaaaaggctactaaggtccacactagggtccctcagctttcctcctcctcggcccagacccgtaaggtaacggccctttcccacgggaacccccggcctctctagggcaggcctgagcttagatccagagctccgtaccgtggaggaggctcgtgaggaggccatgccgggcggcggagacgcgaggccctagccaaatccgcgttctacttttcagaccgggaaccgcgcgcctagcaaagtggaagtgcgtcactggccggaaacgtatcagaaacgtactacgtgcgaagtatcttgggaatggtagttgccaaaggtcggctggagtcgaggggcgtggccttacagagctacacaacctcgcgggagaagaggagcatgggaagagaggcgcagagcagcctgggaggtgtagtttgggctgcgcagcaatggagtcatggtgggagttgaggttctggggaactgcagaggcctgaaaagaggtaggtttgcggatcgcaaccataatctggaacaaaacgagggtctctgttatccttcgggaggccttccgccatttcgaagctgaggcctgtgttgccatggaaatctctccctagacttctgcagccttggagctgggaaagaggactgttgtccacgacggaagtccttcgggggcccctcgtaactcggtggctacgtaatcagtttgggcttcaagaagatattaaactctaagaccttctaaggctaaaatagagatgtggtggaggagctgcggcctagtttgttgtgggtttacttgtctacagcctattctttgtctgtgttctttgaaataaagggtccatgaaggctccagataaagagcatatcagcagtagtagctccaatgaatgttaggccatcagagataaggttttttttaaaaaaaaaatccttacatgaaagttgtgggggttacaaaaatatgcgcgtttgccgagctgaacagactcacttccacactcaaggccctgccccgaacaactcca

SEQ ID NO: 28814 - DNA, 1188 bp, Mus musculus
aaaaactgtagatgttgtatagactcaacacttttcagtgccctgcctcctccctcacactcaggattgtgaccgttctttcatttttgttttttttatttggcattttgagacagaatctgtaagtatatccctgactgtcccggaagccttacattgtaagtaatcctcctgtcctgcccttcgagtgatggcattatggaaatgtgctgctgtgcctggcagttgtatttttagtgcttgaacttggctctctataacatggtatgtgcttgggactacgggtgattcagcaagcaagatagctggactggctaggcagtggtggcgcatgcctttaatcccagcttgggaggcagaggcgggcagatctcttgagtttgaggccagcctggtctacagagcaagttcaaggacagccttttctctaccctgtctcgaggaaaaaagaaaaaaaagatagctggactgtatttgaaatctccccagttatgaggacatgtcaccaccatttgtggcgagctcctttcctgacgccgagaatgaaaccagagccatagactgcagctgtgtgatagctccacagtaaaaaagattttccctttctgtggtgttcacgaaggatgttcactgcagctgggactcagaactgcacacttggccttgttagagccaagttagagcctcttccttttggctttgaagtttgatatccttcatgacaaaacaatctggccattgtatccagattcaaaggggttttaaaaacaaacatgatgtctgtgttgtacagcctccttcctgttggttatttaaagggtgtaccttatgtattaaagaacacttcatgtcaaaggaactggaaaaaatcctaatttatgtttgggtgttaccaaacataaacttttatatataaatacacacacacatacatacatacacacacacacacacttgctgagagtaaaatcttactataaaaactctttgaaaggattattttctatttcagcattttgtgaacctaaccatttgtccaaagagatccccttctttagttttgagatctaatgtaattctaggcctgaattgttccactttctgttactttattcagatgtttattgtggtgttttttgaggggggaggaagtagcaggtttttgtgacaaagggtcttactgtgtag

SEQ ID NO: 28815 - DNA, 1178 bp, Mus musculus
tgaaattaccattttcttgacatcttacagtgtttgtaaaatgatgagactggcatagagccctgcattcgggatctggcacatttgagttctctggtctgaaccttactaggaacttaattttcggttgatccaagagagcattcgagttggaaatgttccatgtaagccttaggccgagcaagtgtctggggaagtaatccatttcttcaaccactgtaagaaaatagtggattctgaatggcagaaccactgtcatttaaccctacctcagtggtgcatcaggcacattaagagaattcattcttttaaggttgctgggtggacttgaataactgctgaattacccagctgtaagcagtggaactatgtgaaccagtatgaaatgattgcacagtgctttatggagaacgttggccattggcaagaccaggaccgggcatgtggcctgattgctgactggtcagcctttttacctctctgcctgtggatgccatggacaaatcactgactttatgaacagtggacttttcccactcctgtgtcttgatttggagcttagcagagttgaatcttaggataggtgatacttcttaggcaccgctgcaggcctccgtccctaatctaagcacacccagtggaagtgctgccaatgtaagtgggtgagactgcttgctaggatttgattctgaaatatcccggcactgttgtgccattaaaccctcaggacataggacctggctggtacaaataagtcaccaacacagggttgtcggaagtttttagcccagcttctatctccagctgccctctgcttcctggtatgctctggtgtggtgagcatctgctacaggctcctccctgtgctctgtaccctctgaaaccttgagccccaatcaacctcccctccagctgtctctaacaggtattgtggtgactaacactgccccaaggttagaactaacaaatgctaagtaagagctaagatcctaaccctctgtctcaaaaaaaaaaaaaggaaggaagaagaaaagaaaatctgttcagtataacaaactactagtttttggtactccccggcatcctgagaatgtaagttgtattctgaaggaaagggactccaaggttaaccctaggctgagcctcggctccagcatctgcttccttgggccagggtc

SEQ ID NO: 28816 - DNA, 1159 bp, Mus musculus
ttagtacgacagacactgctaggaatagaaatataacaaaggacatggtgtttgcaactcttgtgtacggtgtgatacaagatggctgcccttcatatacaagttagtgtgtcctttacttgatgtaattcactctgtggcagttaaatcctttagactttgcacagactttgggctctgtcacacctggcttccaaacatgggaggagtggggggggggtgtacattctttttcttttttcccatgctggggattgaaccctgagccttgtacatgctaagcaaacactgtgcctctaacctacactcccagctctgccttcaaatggcaaatctattagttgaaagtgctatttaagcttagactataggtgtccgcgtttataaaatggggagttatgtcactaggcaagattctttgggtgactgactgagatagtttgtcgtaaaacacccgtcagggttcttggcgggtggcagctgttcctcagagtttagtcacccactctcctagttttgaagtcagccacagatggtggaatgtgcttgcctgtgaggatactgcactgagaaaagggaaatctgttcccctgggttgttttgaaaatgtctcatctgttcagacagggctgcaggccaggactgctgttactcttctgagcccctgaggtgttagagcagagttcagaggccccacttagcacaggggctgctcttctggctgcttcctgctcaccagtgccagctttggttcaagtctccaaggctaaccagaaggccagcctactggtacctctgcccctgagcaccgaggaaaagcaggtggagaaggatgaaggctgtgggacaatggccctgctaacccgagcttaccagctcaggatccctgagaggagatgaggcatgaggttagccagctaatggattacagcagaggaccacctgctgtggagacctgcctgctaatgactgttttctccaggtcacacacctgtgctgggtcccgagtgagccatacatagtccagacctctgaggataagaccatcaggtgggctactggccgctgtggaggtgtttctggtgaaggtctgtggttgctgccgtgcttacatgactgtctccattctgctgcttcatgacgctgcgcccttcctagg

SEQ ID NO: 28817 - DNA, 1281 bp, Mus musculus
cgtgcgtccttccctcaggtgctcttcccagtctttgctgtggctgaccagctcatctccatcgttcgcggacctctggccacagtgagactagattcacctccccatcacccttgcaggtcaggccatgcttctaggtagtgttcttttcctcaatgacatgagtgttccccagggcaacttctggatagcagcttcagactcagacataacctttcaatgtttcatctgtggggatcctgtttcttttctgttggccttagtctcccaaactcaccatgcttgtgcccttccaagggtctcattaacctgtgcctctggcatccagtgtggtaccttgtgcatggctagtatacaacaaggtacagtgggggcaaatggctgggcaggcaggtaactggagaagtactgtagtccctcaaagtgcctcgctgcagagcagcttggactgagccttctctagcctctcagtccagtagttcttggtctcttgcatcatacaccatgtgaagagagtatttttttctagcatacgaaggacaacctgccaggatactgttggccagaacgtcgtcgtgggagtgtggtagcctcctcccgcctcctctgtctccaggaaacctgcttgcagcacacttgttggcatctgtcccaggccctgaggctgagctctagcatggacctacgtgtgagaagggtgacaaacattccccctcactgtgctgctgaacaccccatttcatgactcgtagggtagagagcggcaagcaagaaaagctgagggcaaaggagagctagccttaataaatcaatgtgcgcattattaaaggtttctaaagacttggtaatgtctttgctggtaactggctccatgctgattggcagccttaggtacatgcttagaaataagccggtcagagctccccttagcatcaagagactggagatgttactggaaccaagggcaagtcctttggccatttcttctataaggagttcatctgagaataatggtcttcttgccaggactggggatgaagcttggcggcagggcacttgactagcacgccaaaagctctgagttcaatcccaggattgcaaacagaacagtgaaaacaaattggggtggtcacagagtttggctggtggacaatcactgctttgcttcagccccttattgccatgcacaatgtggtcccaggatgaatgactgggagatctttggagaacggtgtgtgttcatatgggagtgtgtgtttgtgtgtatgtgtatgagttctt

SEQ ID NO: 28818 - DNA, 1109 bp, Mus musculus
atcctgcttccttacagcgtacaggcgggagcagaaaggcaagaaggaggcttcggagcaaaagaagaaggacaaagacaaaaaggattccgaagagcaagacaaaagcagagaggaggaggaggaggatgaagagagactggacgaggacgaccagaacgaagaggaggaaatagacaactgaatggagagagtaggcagactgtggcgtggtggaggggaccctgagatcctgagacatgtctgtgtgaaggctttccctgcaaggcagagccatcttcggcactggtgcctgagatcaaaataaaagctgaccagaaagatcaaaaagaactcttcccaggctcagagcatctgagttacagaaaccggtcatgcgtcatcagtctgcaggttaggatgtttttgaataagcgattctgagtgactacatagtttggtattgcttgtctacttaaagtatatggctagctagtttctgatcccatttccctgcccctctgaataagtaataacatccatgttgcctgcagtgttccaagtcacagaagcactaaaggctcagggggaaacaatggggctttgagcctggtcacccagtttgactgtacagtagttgaccataggaactcgtgcttagaatggctgctctctaggagatgactaaggagctgtgagcgagcgaacgaggaaatgtcttcacctgatggtagcattacttacttggtgtctggctttctagacttacttagctttgtagtcctctagtgactgtagatgctcagtcgtctggggtggctgcactcataggacacacactctttaattctgagtgttgattagaatctgtcaaaaaaggtgccaattcttaaaagcaggggcttaatcttggaggtaactcagtgcctgccatggtaggtcctagtgctacctcctggaaggtataaaatcccagatccatctcccagacttatggctgctgcttttcattccctgggctcataacaagttccagagactttatttcttccaggcacagcctgttctgtctccatctctctggcttctgcttcccagcccggctttctcctcctcttacttatttcatc

SEQ ID NO: 28819 - DNA, 1135 bp, Mus musculus
actaacaaactggctgcttacttgagctgctttctgtagacccagtctctgtcatcctcacgctgaaacatctggagttttgcctaccagacctgtagtctcagcaggctgaagctattgcaagacatctcaaagttacacttgggccaggcacagcaggggccgaggaaaaaccttcctggcttccctgctgggttttttcctcattattttgtttattcacacagtgatgggcagcgtagcgatagggttaaggtcatagcttttggagccgggccactagaatccgagtcctggttctgatgctttgcttactaagtaaacttgagcaagctcagttttctcctcacacggtgctggtaatagcaaccatcgcatgggttgttccaaggattaactgagctgtattgctagagcacccagcacatggtcgaggtgtagaggtgtctagtaagctgtgatgagaagctgtaaactgcagttagtggttgagcattgccgttgtgttaggggctgtggacaccaaggagaagtccttcccgtgtctaagtggggttgccagggaggacttgactttccacctaatctctttgtccttccttccaccgagcatgagtattgtcaagcttttgttgtggccctccatatctggactctacagcttggcttggaaggccccacatttccctataggcttcccattggctcttgctatgcaagataataatgtccatctccattccgtctacaatacactgtattcctcgggaatgtgactaactaggacatcactgagcctcaggaaggaaggctggttttgctccttgacccccacccccaaccccagagtcatcccttgtctttaaccctcctccagggtttttgggtcctcatcacagcctgaccatactgtgtcaccccgaggtttggtctctctaccatgataggagaggtgttagggtgtggtcagggctaccttactgccattgataatcaggaagacacaagaggtcaccaggccagacttctgcccaggaaagccacaccctagaggggagggatacattctcagagaacagtagctaggatacagtacagagaacaacaggagcccgggtcctttgctcctggcctt

SEQ ID NO: 28820 - DNA, 1109 bp, Mus musculus
gcatccggagacggagttccagcacagaagagggaaggagactccttaggagtcaattctagtaaaagaaataaggctttaaatgtcttacttaaaaactaatatttgtataaacagcaacatgaaaccaaacataaactaagtggaggtcattctggaaagttggagaaatatgggattactggtcctgttgtgcataaattctgctttcctcattgaaaccttttgttaataacaaaaccaagactttttaaaaaaaacaaaagaagagcgtcatgctgtagcccacgctgacctgggactcatcactttgttaactaggctacttccggccttggcctctcaaatgctagggctacaggtgtgccctaccacacctagcaagacaatattctttttaaaagactatttcggggctggagagatggctcagcagttaagagaactgactgctcttccaaaggtcctgagttcaattcccagcaaccacatggtggatcacaaccatctgtaatgagatcctacgccctcttctggtgtgtctgaagacagctacagtgaactcattcataaaataaagaaaaaaatcttgaaaaaaaaaagacttctttttcttttccaagccaacagaggttcctaagaatccaataatgtctataaaagagataggacagccagaaatgtcccactaagatgcacccttgacctagtaatatttccatggaaataaagcaaaaggagttgattttaagatatcaacttgttttctttatggaagatgtaaatttatggaaatgaaaactgaggaccaacctaaacctccagcagcccagtatgggatagatacattacattaattctcttctacaagtattacctagccttgagaagtattaagacaaggtagagcaaaattctaatatgttatgacttggataataagaaatatgcttatataatacctagaataaaatgtctcaatattacatggggaatgtaagggagggagtctgttttggacaatcttttctttctttgtttctaatttgacttgtcaggttatgtaaatatttaacttttcttttacattattaaccttattatcttaa

SEQ ID NO: 28821 - DNA, 1189 bp, Mus musculus
ggagttcttgtggtctttctaccccaggatctggactgacatctgcagtgggagatgactttcaggtagacacctactgtgtggccctaatgcacaccatatggagagagtgtgtatgtcagaggctctactggctgggtaccatcctgtccttctgatgctggtgccaggcattgggctgtttgtgggtagctgctgcccagtgccagagagcatgttacctagaatgctcttagagagaggcgtactcacaagacctaaggcagctgggtttcagcatttatgtttcttctttgcttcccagagcacattgttccattcattgtgttagtaagaggggtgtgggctctgaacccctccaggcagctgcaagcttgcccctccaccctgaagctgtgcagtctccctttggcacatgaagaagaacaccacttgcaccctaacttccctgataccctggtgcttccccccaatggactccctacatctctttcttattttcgtttctctctctctctctctctctctctctctctctctctctctccctctctctctctctctctctctctctctctgatctgatgtaggttctgtttttctgtatctatctgttgaatgtgtttgtctggtacttatttgctgatgtcttctgagaattttagaagcacctttaaaagaaaaaagatttagtctagtttgagcagaatggcttcttcaaggctgggcaggagacagtggcctcggaactggatctgtgtggggaaggtaggagctgagtgtgaaggtgtgattgggtgggtggccatggctgggcatgtgtctggcgagaatccagaaggctgaccggggaagttctcctgagtcccgtgtgtgtgtgtgcgtgcgtgcgtgcatgcgtgtgtgtgtgtttgtgtgtgtgtgtgtgtgtgtgtctgtgtgtctgtgtgtgtctgtgtgtgtgtgcacgcgcgcacgcacttatgtctgcttttgatttcactcacaaaacatttggaaggctcactggtgttataatatcagctcctttgttgctgctgatgggtcccccactgtgaagaatctgagtctgtttgatcacttacctgttcacttgggtcagttccagctttaggctgacatgaatggagcttctgagaagtgcttttgtgatgctgtctgtgggctt

SEQ ID NO: 28822 - DNA, 1148 bp, Mus musculus
gggattcctacccctaccatgctgtttagggcctggatctgcctgttgtgaccaggcctgcacagagtcaggaaggcagtcccaacactagatcagttgacccaggcttggctctgtctcccactctgtgactcagagatgctgagagcttgcctgaggacacacagctatctggttcaggtcaggaattcctgccctgggtttttcctagtcatcagatagggaaggagagagtatatatccccatgtggggaaactgaggcccaaaatgatgagggggagggtctggtttttcatttacatgtgagcctccggtgttggtggcctgtgagtctccgtaagacttctgcctgtctgtctccatctctttctcccttgatagcataactggagagattttctagtttccttcacagggcagagtagtatatgacctgtatcatgaaacaagggatctgggaaattcagaggccttccctatcagcgtatttcaagcacagtagaaagcatgcaagcttgacctgtggaaggacttccagaaattaaatattttgttcttatagctctctaagttcggtggctcctcctggaggctgctgaatagtcccgtggtgggtaccacccctgacaagtgatataatgataaacatcagcttgccggagaattgttaatgatgcttagcttggtcttgactagggcacaaagaggtggctggtttataggctaggagacagagcctggaagctcagtaggtcatctgttgaatgctcaggctgcgctggtcctgcatccaccctctgtatcagaggagcagattctggaggcccgagcttggctgaaatgcttttagatgtctgggccttggcatgttgctgtccacacctctggccctgtgaactgttgccatccagagtgagggtggagccttgccctagtctattttcttccgcccagcctggttctgctcacagtataaggcgaggcgttcagtcccagaggggcccaacctgggaaagcggaggagccacgtagcacgcccggcagtgagccaagttcattccttgggccatgggccaggctgctgcagtcaggggttggggcaacggaagaaggtagtgcctgctgccataggctaatgtgcagtcat

SEQ ID NO: 28823 - DNA, 1204 bp, Mus musculus
atgagctctgctctcgcctgctcagcttgttgcttgtccacctgtttctagaatacattagacctggaaggaaccggtgagaccacccagggcagcaccaacgctctcccggatgtgtctgtggtaaggccctgctttgctgcactctcttctttgttcatgacccctgggctcttctcagggttggccacagagaggggacacggggtgggtggtaggatagagtctctacggagaccccaccaacccagctgattgcctgctctgttgcctgtgtggcactgggcaagcttcttggaccctctgtgtcagtgttttctcatctgtaacatgaaaaccctgcaccttgctcacagttgggggccagaagaagtcaagtggtttggtcaaagcatggagacagtctctctgtggctgtcagagctttccaagtgtggacactggcctaaggaggtcccaggagctggtggccgtgatccacttctgcgcatactgcaccctgcacctcaggcaccctgctggcacatcatgcacgctgctgttctcatccctgcttaaaccttctagtgggtccactacgctcggagatgcaccctgtccatggccaccctgccaccctgtctcctcctgtcccaccccgtggctaattaagtcttgtcacttgtgatgagcccctgctgatgccaagaacttcgattccctaaggaatcgagtgggtccccagagacacctgccgagatcctggcgctcctcagctgctgagatgcagggaacagttttccactgagcgttgcattattcaaagcagtgtggccaggagctgaggagcagggactcagtctttgccgggtccagcaccactcgctgtccctctccatccactatgggctctgacttctactcttgttgggtcttttggcaggatgatgtcaaatccccctcagaagatctgcctggtatcaagccacctcctcccccaccacccctggctcaaggtcatgaccgcttgcttggccagccacggaagccagggagggaggaccccgcacctctgtcttctgctgcccactcaggcattgtcttctcagcaccacggaaccgcagcccgccgccagggactgctcccactccgggaccttcctcagcacaggactctccctcctcccccatttatgcctccatctcccatgccaaccccagttcc

SEQ ID NO: 28824 - DNA, 1433 bp, Mus musculus
gcagggggaggctgggagtcccttaggcagggcagaggtggggggctgagtccttcccatcgcccctgacctctgcccttgttctggctgggactggatgttcttgatgctcagtctgtctcctggccaccaccttataagtggcctcaggctctggagaatggcctcctttcaaatcctggcttagtcccgtcgcttgctgtgtgtcctcaagagcagttctgcctctctgagtttagatgtaggatccataaaaggagggtgatcatttctgtgctatgtagtagagatgcaatcagactttgcatatgtcatggcctctgcctgtctggaatggtctccttcccacttcccatagcctgtaccattagcttggatggcagatcttacaggaagccttccacggccctctggaaggagtgacttccagttcttggctctttgtactttcatgatcaggagaggtatagtcagtgacctctacttggtcacctgtggtttacagaagtgaccgcatctcagtcactgctggatcccaggagcttagcacacattttagcctgtgtgaatactgaagccgttattgttaataatagctgtgacttgtggagcagtctctaagcattctctaagacccagtcccagcatttcttaaacaagtcttctgtggccttcccagtgatcataaccactaaggccctcgtgttccagagaaggacactgaagctcagagaggaggagcaactcactccaagtcacacagcttgctggcgagagaccagtcaggacggggtccctggcctgcttactctgtgtggtgttgtgaaccctgtcctctgattctgcctcttcctgaaggtgtttgcccagcgtcacctagcagtcagtctgtcttttggtctatatgccatctgtctttcacctccctcgtcttcctttctgttaatctttatgggtgcatgtcacgtgctgtgtgcagcctgggtatactacagggcatcagagaataataaagatgttttcttcaactggaattcagaggacagcagggataacgttgggccgagatgagtggcaggcacaataagtgataagagctaaataaaatagtagaagggggctggggaagattggcaaggcacacacacttgaggatgacagcaggagcagcatatgcaaaggtcctgcggtttgagcatgcctcttgcatctacacaccgtctaggagggcagtggagccagaagagggcaagtgcagaaagcagtaggtcatatgctgaagagtttgactaggaacaagatgacgcgcctgacctggaaggatacagcctggcttatctgattattggatctctgattattgagactaaacaaggagtacacagacacaggaattatcaagagctctgtgcagatggtgcagccagttgcta

SEQ ID NO: 28825 - DNA, 2280 bp, Mus musculus
gggggaaggggagaaggaaagagagaggtaagagacaaggagagagcaagagggtagccaagcagtcccttttataatgggctgggctaccttgctgttgccaggtaattgtggggaggagcttacctggctgtagccagaataccaggagcttgggacattgtctacatgactgattgacacaggattatggagttgagttgatgtggtgtcaggcgcttgtgtctgggagcatagcttacggtttggtcccttgtagatttttctacttggtctcccgagtaagcctcgctcgaccagaacatagactgcctttcacggtccaacactataaggtgtgtgttgccttctagggtaagctgctgtcgcaggctagtatgacgactgatttaaataatgtgagtctttctcccacagcagaatggagggggccttttggtctggtatacagctctacccaagaactcactctgggctgtagatcgccaatattcatcagcccctagcatgtagtccttccggtaattgaacctgagccatagtagcccccgcttaagcacccagaacaggagaagaaagaaaacatagggtgtgcctttacatgtgaactctgtacacattaaattctgcaggagtccagatccaggcatggactatgcacagatcatgatcctggaagacccttggatgatgggggtcttggactggaaacagcagagaccaacctgactgactctgtaatttgagaatgtattaaaaggccctgcacagtcccaaaagtggagctgagaaactcagggtgcatctgcagaaggattcccaccacagtgacctatgtccttttctccagacttctttttcagggaaggagtacctttttggctaacagtatgccttaaaccttagctggtaggaccactagcactgtagctggtggggggaggacagttgctcaaggcattgtggggttctgtaacttaaaggaggccaggtatcattaaatgtcccctacagagccaccgtcctcctcttcctcctcctcctcctgtcagaaagtgggctgtttcctactggaaaggatgaaaacaatgatcgagggcccctgcagccttaacctctctgggttctgcttgcatggttttgtttgcattgtgcacatgggtgcttctgggacaaagaataactgtcactcctgtcctgccaacatccctctgctgttttaggatcttgattctaacagctaggagaccacataccttcgggctcggggccaagctccatcctcgagattctcttggttctctctttttctgtcaataagaccataacatttacttactgtggtttgtgttctttgctcaaacatcaatatgaaggattcagggagattccagtggcttgtgggaaggtggtggtgtctaggaggctgcttggtgtgcacaggatagtagccagcaggcaggtcctcctgcctccccaccaaggatgcccactttaggcccccttgaggggtgttatcatccacctgggttacagtcaaggccggctttgcagcatcagacagagaacttgctttgttctctgctgtttgtttgttctgtgacaggaagccactgtcctgggtagaacctgaattcagagctgaaatggctgtaattttggctggtcctgaagtcccatggcttgagcgttgtatagagtatttcctgagtccttgcgccccgcccccagagggaaagtaccaccagaatctgagcctgagggcagacagtatcgaggtaagatcccagatagcaagataaggaaaatctgcatccttgttcccctttctgctttggcaatgcaagtaccactggcagggtagttgataaggtttgtttggctggaggctggaaagcaggaagttccagaatgtcacacctgcacttgatgggagccttggtgttgaaccactgcttggtgacagattgtcaactcaggtctctcttcctcatcccataaagccaccaccaatgccacagagtcatagaagacccacccaggcttatctattgctagatacctcccaaggcctgctttccaaataccattggcatatgaatttggaggttagttttctatacacggcaacttggaggacgtagttattcattctatgggtacggtagaagccagtgaagaaaaatgaaattccaagaagggctagggagtgacaggaagtggggacctctctgaaaaaatgactaaggagccaccaagtaccattttgaaacctgaaac

SEQ ID NO: 28826 - DNA, 1197 bp, Mus musculus
cagaacccccctgttttatttagtagaagacacttttcagttttaaaaaatctgtatttttcgtttatgatgcagaaaggaagttaaagctcagaagtctcccagaagagagattaattctatgtatacatatacgacagaacgagaatccaattaaaataaagtctaagaataaaagtgttggagcccctgggcttcaaagaggaacacagcttttaagagaagggtcaagtaaacaaagtttactcagcttctttccctggtagatcttacatctattgacatgcaagggatttgctgaggattttatccagtgcccacagggttcccgttcctctcttaaagtccaactatcaaatcagcagcgccaggtcctgactaagcaaatcacttactatgtagaattatgttgaaatgtttggtttttgacagagagagagagagagagagagagagagagaaagaaaggctatttggaatgaataagatttaaactaggaatttaaaagaagaaaagtataccttgcaaaggtctccagccaggaagttcatagactgcttgctgtattaagttctgctgaacgcttgctatgtgtgaccttggacaagtctctgatatcatctgctctaggctggatgagtctggggctgtccaaggtccttcccagcgctggaagttcgtgatttgcttgaaatgtgctacccagaaggcaggtagaccgtctgatctgctgcgctcttgttcttttggaattgccttcaattaaggcaagagaattggctaaggtttgggagaagagaagcttggcactcctgggtaactttgtgctaaatcgggaaatccatgtgttacacactgtactgatgggcccggctgtcgtctctcacccccatctctcgacccaagaacaccagccctggtgtgagtccaaagggagtgggaattgccagtaggactgggacacaaacaggagcatcttgggaccactggagatcaagcccactcacccactggatgttttagtcccttgttaatacaggtagtgtgtgtgtgtgtgtgtgtgtgtgtgtgtgtgtgtgcgtgcatgcttcataaaaattaaacagccttcattgcagccccagcattcccacaggtaaatctgagtgagtagcaaattagaatctgaaatgttccagacattaagaagcgtttgt

SEQ ID NO: 28827 - DNA, 2041 bp, Mus musculus
ccctcagtcaatgggaacgcgacacatggactctgcaaggatcccatgcccctgccagctcatagaagtacacgttctgggcacaggatgttgcccgttcctggctaggtgacctagggatggagatgttcctcttcctccaagactgagaagtgggggaggagtcaggagcccagcatgggaaacagcgagctcagatgaggccagcatttgggaacactttagcgagtctcagtcatgtaggccttggggtcaccaagcgcacaccagatgccttcttggcatcacatgctcgcctggccttgctgaatctggtggatgagctggagttacttgggcttgtggcctgcgtggagggtcctttctgttgcctgaaaatccctagagaactacagcaggctccacagggcaagtccctgacttttggagtcagaaggtgagactgaggctcttagaggatgctgctccctcagcattgcctcaggctgccgatgtcacagtcctacctgcttccagtgggagggaagattctcagcagggtgagctagcttgtgagctacagtactgtctgggattgttgtctcttagcactcaggttatagaggaccagggttggaggacaggggagaggaggagtcaaaaagccgatgcccgtcaacacggcgctggaaaagaagaccctgttggcctcagactgtctttgtgtggcaacacgctttcttgagatgtgattctgtcctgctgagcagcagcggtgttttcagacactaacattgttctggaatgacatgtgatcagacactctgagcttgtgtgaagaactcagagactttcccaaagtttgaagactgtccacagccctatgcccaaagccctggtctggtgtgaaggtcttactcaaaaaccaacctttgtggtttttgtccccgacaaatcatcattataagttggaactcttccttgaactggcatatgtattcattcctgttggactcttattcctcctcaaaaccccgctctccatatccttcctgctgttctttgtctcattgaaatccccttatggatattttatgttattccacgtttctcctgtacatacctctttttctgtcaagactgtaaactcctcaaggcccaacattgtacccatcttccttttgtgaatgacctggacttgctaagaaaaaagaaaaaggtctgaaaagtcccatggattggttgccttacccgctccactggttttggcaaatgcttctggcaaacatggttgagtgataagacccaggtcaccatggacctgagatctggccttgagctgcatcactttacttgtatgtgcaccctccgattgcccatctcgacgggctggatggttttggtaatttccagctgcttgtgctgtttgttattcttaacttctgtgcacaaagtgctccctggaccccaagctgaggtgtccctggtgggagccttcagagggagcaccggcctgagctggtaacctggattcttgctgcccacctgccatctctggccggggctgtaagtgaccatggctgagtgcacaaattgattctcagtgtgtccactgactcctttatagggtgatgcagtggaccggaaccgcgcaactcaggagatttttctgggggagacaagtcctacctcttgtgttctgtgtccagaatggaagcgtcccccagccgtgtgccagggaagccttcctcagtgggatcgttcactgtcttttgagccacgggaaatgtcactgtgaagttgatccagggaagcctgtgcttgtccttgggtcacaggactcttgagcgtagggatgggaaataaaactgtttggtgagtgatggagcagcttgctcgtggaggcgtggtgtggtccttcgacattctccctgcctactggatgggacttatggggtgagcccacagtggacgtttctttgtgtgtgcctcagtttcctccctttgtaaaatccacatgtctcacctgcttcacaaggttgccaggaggctgatccatcca

SEQ ID NO: 28828 - DNA, 1873 bp, Mus musculus
ttgtgataaaggctaagccccctttcagaactgctgacacaaatggtctcagtgtctcttgccccttgtgcaattcaccttaccatcagcttaagcttcttaagcctcaacagcttaatcctgttcaaaacctctcagacctcccaactccttgttgttgataaacgccaagccagtcaagccaaagtgcgtaacatcccattaatggtgtcctgtaatccctctttgcccatttctattacccacccccacctaaaattaagtagaactaatgcaaagcagtgcttctgtgttatttaacccccctgcctttctcatcccagagcttttacttatgcagcactcttgctatctcagacattccagaggtacacttggaatctggcatgcagtaggtgctgggtggggttttatgttaagtgaataaatgattgcattagccagtgagaggaagcatctttgccgtgagactatctgggaccaaactgattcttttgcctgcccacaggaagtcattgtggggcctgacaccacctcctacagcctggcagacctgagcccatccacccactactcagcaaggatccaggcattgagtgggtccctgaggagcaagctgatccaaaccatcttcacaacaagtaaggggttcagagaggaacacagtcttaagatctgaccttgtgacagctaatcaaccttccacttccccttcaacttctagtttacattttcaaacaaaaatctgaaacgtatcaattccctattagtgcttagaagcctggggaatgtagatgtaggcatcctagtgaaatgagtagaggaccaatgagagctcatctacatccaatcctcacccccatgtcctactggatacagattagaagacacctatattccatgagccttactttcttcatctttgcaaagtgatataaaaaaaaacaaaacaaaccaaaagactcccctccttcacaagtatctcatgggagaagttgaggtatcatatttgaattcctagcttatctgtggctcttatactgttaagtttaatataagctctgtcatgaggaacacagagaagcaggggctgcctgcttgtaggaacctagtcactgcatagatgaactgaagtgtgtttggacagtagccacctcctccctccactctcacactctttctctttatcctgcagttggactcctgtacccattccccagggactgctctcaagcaatgttgaatggtgatactacctctggcctctacaccatctatataaatggtgacaagactcaagcactggaagtctactgtgatatgacctctgatggaggtggatggattgtgagtacaacagtgggttttagagttctgggacatgggcttggatgaagggaagtgtgtactctcaaatacatgtgcataagactttgcaaggtaatccttgtcacatggaagcccttcacaattatctatttaaataaaaaatagaaggcaaggactggatatgtagttcagttagtagagcgcttgcttagaatgaagaaggttttgagttcaaaccccagcactgcagaaaaacaagaacaaagttgctaactgtctacttgcactcagaaggtagaggcagaaggatcaggaattctaggtcatcctaaaatatcagttttgagccattctggactaacagaatgaggtggcaggaggaactctgctatgaatggcagtgacaatcaaaactactagttactataaccagtgttggctaagtagttactctttaccagacttctgataagaatgtcagggcttatttcaatcccatgaccatattgactgtataggattttcttttatcaataaaacgtgt

SEQ ID NO: 28829 - DNA, 1207 bp, Mus musculus
aagttcaatgcctgcctgggtcacattcaagataagcctaggccaggtggtcaaaatagattggatggcattctcagagaactaatgaaaatgtttttaaagtaaaaagaaatagaggaggagaattttcttatagggaaagtgacagacctcttttaaatactttttagagtattttattttattttattttattttattttatgtgtgttagagtttaccttgaatgtatgtgtatgaaccacctgtacctgcagatgttaaaaaagggcatcagagtccctggaactggagttacaggtggttgtgagtcattacttggatactgggaatggaaccctggtcctctgcaagaacaaaagtgctcttagccactgcgtaatctctctagccccttgactgacagaacttgtatctagtacactcagtagagctctggctgagtccagaaggttgggaacaatgtgttttaagaacagacaacttcagatctctattgtaaatagcagaagagacttatcaagggagttaagcctatagggtactacacgaatactcttgacctccaatatcctttcttattcctctcagtgtcccctcccaaagaccttattgtgacagaagtaacagaggagactgtaaatctggcatgggacaatgagatgcgggtcactgagtacctcattatgtacacacccacccatgctgatggcctagagatgcagttccgtgtgcctggggaccagacatccaccaccattcgggagctggaaccaggggtggagtacttcattcgtgtgttcgccatcttggaaaacaagaggagcatccctgtcagtgccagggttgccacctgtgagtaggcagaggattctgggtagactcacctagccttggccaagctgtgtagcactatgcatactttaagtgcccaatatatactaacacacttcacccaatgagacagaagcaattgttaaccccatgtgcagatgaggaaactgagaccagacagttcatcatctcctctcaatccccacagctaacaaagatggagttgggctttaccctggaaagtcttaggagattagatcttaatcttcttatcaccattgtgtggagttctcctctattgacctcactgtctcaggttattcctttaagagtcagtacaattaccttcatgcctgagaagcaaactgtggct

SEQ ID NO: 28830 - DNA, 1195 bp, Mus musculus
ctgataataaaagaataaaaaaacagtttgaattacttataatatgccaattgttcaacattttagacttcaaatgtagaagggttctgaataaaaagctgtaagagaacagagcaaagcggaggctgtgaaaactgttgcatactgtctgtggtatttaaatttcactctgttgatgatggaaatcactgaatactttgtgaaatacatgtctggagttatattaggaaaccagtaaagaagcagtgaggtcaagctgtacgtggtacaatgaattagcatagcaagctcaaggagtggagccaagagaagaattcaagactcatgtaacaatccagactgtggctgtgttaacaatgagaagaagctgagtgtactatacaaaaatggaagcaagggtggactggatatgaaactcaattatttgtgggggagctgagagaattggggatagtaaggcaaagccaaactctttggtatggatacacagaaacacaggtgctgccaactacataaaaggcaatagaagggagagtttcatcaaagacatctacttctctcttacagagctgctttgtatgcctggacatatcccatacttattgaatgtctgggactctgcaaaggactcctatgtaggaggtaagcaccccccttgaagcctgcaatgtttaaatggatggaagtactcaaaatgtctggaaaatatttcatcatttcattagaagtgacctaactgtgaaagtgtctatttggaaccagccccaattctcaaacttcttaaaggcttttcctcccaagaggaaagtaaagtaagcaatgttcactccaaccaccacacacacacacacacacacacacacacacacacacacacgcacacacagggtcaggaattttgtgagcatcaatgctgggaagagctaattcatctaagaaaatgagagtaggcagtaatccatggaagagtgctcctgaaggcagaacagcactgaaatggggcttgatggatcagagctttccactggcctaataatatgaactgccctgattgatgaccctgatacacacaagggggagggaagcaactcctcaagtgaaaggatacaatattagcactcccttcaggcctatgactttcattgtcaagtgaaaaatatctaaatcccagagcaaggccacagctccaccaatg

SEQ ID NO: 28831 - DNA, 1165 bp, Mus musculus
atgaggagaatgccacacctactaacattgccagttcccatgggccaagcacattcaaactaccatttgtccattaaccaaaaacattgggacaagaaggggtttcaattgagagattttcagatttttaaatatctatacatttgctgagatatgctggggatggagccaacctcttatataaactcaaaagccattttgtttattttatatcatataaccagagcctaagtaatctcatatttatttgtgcttgtgttttggcatcggctcattacattaagtcaggtatggaattattccatgcgtgttcagggaacactcaaaaagctttcattttctcggtgtattttaggttctatattttcagctcagaaacattaagcctgtgtttatagatgagttttattattatcggtttattagtggtgttctttgttcttccattagaatataagcttcagattggaattgactttgattttatatctccagtcctcagatgtgagagagcaatgacacagatgagtattgttatgaaaatagaccaatgtctaaaagaaggaaccgatacagcaaaatcatgcaattcaagagtgtatgcaccatgtgttttggtaagtctgaactccaaagttgcttaaaactatgtctgagcacccatgtgaacatatgttttgtaatgagcagctagtatcatccctccacacaccaaaaatggtgtgccctgaacctgtaataagcaaatggctctacttttaaggccagctagagcaggagtaaaccctctagccttcaggagcagtagtagcttctcacttaaaaagctgagttgatcccaagtataattcaacaaagttaactcatgtcacattggatacacacaaatggaaaaagtgagataaacagaaaacacttagtacttcctggcacagttaatgccctctattcccagtagctgtaattatcaatgattaattgctcctggatatgttactaagtttggttgcgtcaatgtaaaggaatgagatgtggtagaaaacacaactgcagaatctgagggggggaggtggaatagattgcacactgctacatttctagaaccttatgtcctgcacagtcagcactgtagcctccactgaagaggagtgacctaacaataaag

SEQ ID NO: 28832 - DNA, 3423 bp, Mus musculus
aagccaacggcggtctacacaactacaaaatgagatcaacatgggattccctttgactcgccacagttgaaactgcaacatggctaaaggtagggagagcttaaaaatctatcgccaggctccgatctccaaggtgtctcaaaacaggcccactaatttggctaaggtaagaggtaatgcaggggccaattgaacctccctcaatgttccttaaaaggcttataaaagccttcaggcggttcactccctttgaccttacccagaagatcagtggccatggcctttcataaggcagtcagctcccgatatcagaaagaaacttcagagattaaaaggtgtattacaaaaaggagacagttatgtgatctagtaaaagaggcagagaaagtgtgtgtaaaaaagaggcgggaggcaaaagaaagaaaaaacaggagggatcgtagacaagaaagaaatttgccacagtggtaggaaaaaaagaaaagaacggatctagacaggaaacctgggcaactgaagacggagcctcagctaaagaggctcagctgtgtcagactgaagtgacttatttgggatacacccttcgaggtgaaaagcagtggctaaaaaaagccagaaaaagactgtaactcagatccccaccccaactacaccaaggcaagtaagagaattcttgggtactgctggccttctacagactctagatacctgggttggcgaccttagctgcccagttgtaccccctaaccaaagaaggggaggtgtctgtgtggaccccagatcaccagaaagcctttaaagagattaaaaaggccctactgatggccagcctatgcctgacctaaccaagcctttcactctttatgtgaaagagagagcaggggtcaccagaggagtccttactcagactttgggactttgaaaaaggccagtgacttacctatccaagaagttacaccctgttgccagtgggtggttttcttgcctgaaagctattgctgccataatctgcttgtcaaggatgctgataagctcactctgggacagcaaataactgtagtgacatcccacattcttgaaagcattaccaacgctcctgtgacacatcagagctttttgttgtctaaatgagtgaccttcacttcattccacctgctgtcccactgtgtgagactgcacctactcatcactgcgctgacattctggcagaagaaatgatctgaattatcagatcagccttggcctgagggtacgagctggtacactgatgacagtagcctcgaggttaaaggtaagcaaaaggcggggacagcagtatggtggtgaacagaaagcaagtgatctaggccagcagccttcctgagggacgtcggcccagaaacctgaacttgcgactttaagacaagctctataaatggcaaaaataaagtctacactgacaacaggtatgcttttgccactgtacgggacaatatacaaagagggctgttgacatctgcagaaaaagacctaagatgctgtggctaaaaaaaatcagatggcagatctaaccgtcaagcaggtggctcaaagaacaatgatcctggcagtcaagaagtctaaagattattatgacatcagagagaccagctttagatacaccgctgaacactatcaagctatagacagtatttggcttggcctgggggccaagaaattcaaaggtgtggttaggtcctgtgactactatgttacaggactctctgacttggcagaaaaaatagtcaaaagcttcaaggcctgtgctataatgaggtagaatttctaaaagaaatcttcccaaggtaatggacctgcctttgttgcccaggtaaatcagagactggccaagatattagagatcggttaaaagttacattgtgcatgcaggccccaaagctcaggacaggtaaaaaaattaatagaaccattaagggatccttaccaaattgacagtggagactggcgctatgattagatagctctcctaccctttatgctcttcagggataaaaacacccctggacagtttagactgacccccctataaattactctacaggggggccccctccactggtaaaaatagcctttgtacatagtgctgacatgctgctttcccagcctttgttctctaggctcaaggtgctccagtgagtgagacagcgagcgaaaaagcagctcctgaaggcctactcaagaaaagaagacctgctacattagacgtctccacgcagaaaaccttgagactccggtggaaaggcccttatcttgtactcttgacagccctactttctacctttatgggaccccttttgattttgcttctgcttttaattataggtccatgtgtgttaaataggcaagtcacctttattaaacagaaatgagtgcaatgtggcttttagttttaagacaacagtaccatgccctaaagtaaaggattaagtatgtcaggaaaaaaatagtgtctagttctaagattagaactactaacaagtagaaggggggaatgaaagtataacaacgtaaaaacagaattctaggcctttaggcccaggcttgggaatgtggcctttgtaaaggtatgctaatcaaaaaagagagcaacattcctctacccacccgcttcctgggttcaaagagtgctcattcaaagaaagtcaccctggccattaccagaacctgcaatgcaaatgtgctattgttagaggctcttagaagctgtcttgagagttaacaattaccaggtattccttgtgactcttgtaactttacacttccttgtgactcttaactggtatctttggtatcttccaacaacgccctctccacttccttaagtttcggtttcttcctttaaatacccccttacccagctactcggggcgccacggtcctctacccctgcgtggtgtatgaccatgggcccgagagcgctcttgaataaaaatcctcttgcaatttgcagcaagacccgtttcttgtgggtgattttggggtgtcgcctctcctgagtcagaacgtgggggagccctcacattgtgggtctttcagatcatgataataatcggtaaattctattcaaacattcccattgtcaacaccttccttgaattaagtcagttaatctgtacaagctatctagaaaaggcagccctattaactttcaacaaacacagaaacagagagaaagagaggttaagttgttttcacctacccacactgtggtaagtagctcactgtgttccttaatacataatctgtctctaggatccaaggctgtcatcatgagatctgctaccctactctaagcccctcttctcttactgtttcctccttctttcccacatagcctcatccatctatcttcttctcctgtctctctcactctgtgctttgctt

SEQ ID NO: 28833 - DNA, 1829 bp, Mus musculus
gagacggctcctttaggaataggcacttttcttaaacttactaagctccattttgagaatgaaaatggtcatgtaccaaccagataagactgttgtgaagggtgcttagcataagcataaaggtgtattgctttaagtacccatgctttgggacaattgtgggccttctttctgttttttcactgcttccagtctttttacaagaagagagtgtctgccaaatgctcccccaaggaatcaagggagacatttggagcttgcaaagccaggaaccaaaagaaaccattacttctgttactgtaaggaacagttgagtagcataaatgtccaggcctagggtaagatgttatacctgccttattttaaaagagctttagaaaattataagggagagtgtggccaggcggctcggaccgagcagggctttccttgccagtggattgtgtagagtatacagccagtctcttgtcttctgttcgacatggcatcttctgatattcaggtgaaagagctggagaagcgcgcttcaggccaggcttttgagctgattctcagccctcggtcaaaagaatctgtccccgatttccccctttcccccccaaagaagaaggacctttccctggaggaaatccagaagaaattagaagctgcagaagaaagacgcaagtctcatgaggcggaagtcttgaagcagctcgcggagaagcgggagcatgagaaggaggtgctccagaaagccatcgaggagaacaacgacttcagcaagatggcggaggagaagctgacccacaaaatggaggctaacaaagagaaccgggaggcgcagatggcggccaagctggagcgcttgcgagagaaggacaagcacgtggaagaggtgcggaagaacaaagaatccaaagaccccgcggatgagactgaggctgactaagttgtcccgagaactgactttctccccgaccccgtcctaaatatccaaagactgtactggccagtgtcctttactttccctcctgacagatagtctagaagccgatgtaggaccgtataggtagatccagaccgtgagatgttttaggggctcaaggggagaaactgaaagtgttttactcttttttaaagtgttggtctttctaatgtagctatttttctcgttgcatcttttccactcgggcacaatcggtgtgctgggttaatggctagtactgtattgactgtggaagacgtttgtgaagagtatgtagtggcttcttccaacccattagatgctgaatatctgtccactttgcgatcccaattctgtcccaatctcaccagatgctactgtacttgaatggttaataaactgcacagtgctgttaaaaaaaaaaaaaaaaaaaaaagaaaattataagggaaggatgtgatagaattggagagcacctactgcatgccaacacatgtgtacccagagatgaaaaactgaatgagacctggcttatgagctgttagaagggccaaaagagcctctggagtctcaggactatttctccctttaggaacttgatattggctatttgcatacttttctgagaaacttactacccttaccaggaatggacggagggcaccttcatgttctgagcactttcccgagtgctctcctgcattgggcgtgcagattctctgctgatgtagctcccacagtcccagatctcaccaactgcttactgagatctgagggcagaagaaatcatctgttcaataaacatgtctgttcaaccatagaaaccaaaatgtcatctatcatctttgtcaatccagtcaacagcaggaacagcacaggaaaa

SEQ ID NO: 28834 - DNA, 1171 bp, Mus musculus
aaacatgagcctggatatgaacagctttgagatctgtgtattattggggaaatcacttgtgatatgtttgtaggatgaaggggatagtctagggagaagatggcttttagaagctaggcatgtggcttgtacctctaattacaatatcactagagagacaaaggaaggttcctggggcctgtttaacttaaagacctcaaacctatgagagaccctttcaacaaacaaggtggttggtaagtaagaaatgatacccaagattgtctatgacctccctgtatgtacatccatccaaacattcacataaacctggagatgagtcctatcagcgggcaggtgacagccctggaacatccgcaagaggccagctctatacccaggaggacccgacctttctgatcctggtagctgcaaggcagatgctagcaggatgagagagagcctatgaagcagggggtttcgacctgaaggtgatttccaaggcttgcctggcaccttctgtaaatgccacctctgggctgtggcctaggggagccaagaagctgtttgggaagggctgtttttgctctccgaatctgaattgccctcaggtaatgatccaaatacccctgtctctcttcagccttccttgcccaggtttctttttgtggtgggtgtttcctggctttttctcctctcaccagccttggatctgctttcacccttgacctctttctatgcttcactctctttctcctctccattcctgcccatccttacagcagaccattacagcatgcagctggttgtagaagaaagtaacagtcttcctctgggcagcgtatctccagcttatacctggtttctgcagagtcagggtgagctccactactcaccagtgaggcttccaatccaggcatcattctctcgatacttagccctccagggtgacaacttcatctcccatccatgtggtaccagtcttaccattctcttcataagctctggattcacctgcaactcacagctgtgtatatgtcactcctagtttaaaatggtcatcccccaggtgtccagcccatctaccacagacaacaaaaggctcccccaagcatcacctctaggcatctgtttcaatcacagttttcccctagaaaatgcatcagaattaagttacaactataggcagcta

SEQ ID NO: 28835 - DNA, 1103 bp, Mus musculus
ggtttgacttttggagccatataaaactttccataattgtgaatagaattcatcaaaatgggaagagaagaacactgtctaaaagttcttagcaatgagaaatcaaccaaccatactttatatcgctggagacatggccatggagacaggcacatcagtgatgcactgtactggtttgatcatattccccagaagacacacagaaagggcataaaaggcttcccaaagcacagagctctcagctgttttcagtggctatgttcacagactgatgttaagaagttggtacattcatgggataaggtagcttatagattcttttcttttgcatgtatttcttttttgtgtggcggtgtgtgcttgtacaccaacttgcatggagaagtccattcactctttccaccacgtggggtctggggctcaacctcagattagcaggtttggtagcaggtgtctttgcctgctgagccccatgttataaaatgaaaaatgcataatatcattggaaactgagagttttactgaaagaagaataaatatgaaatcagaaatgcaaaccacaccatccaaatttgaattataaacatgaaaatgaactcatgatgaaattttctgttttaaaaactgactgaataactccacataaaagattgtaaaaataagtaaaatcagattcagagcagcaaacccactacatatcccagggctgattctgagggcctctttgtccccagaggggtcagggctcctataggaaatagcttgtttcaggttctaagatgagtttagaacctataacatcctagtgaggaagaaggaggtagatccaggccccacacgacagcgtcccctggaagactgaaaagtgcagctgccagtgcctcacttctgtcagcctggatcgcccaggcagcagctgtttgtcaacactccagggaattttgagaaccatagattaaaaaatagtagctgttacaatgtatccagttcttgtttggatgctgagtcaaatgaattaaggaataagaaaatagggaagtgaagaagaaaagaagaaatgtctgacttgggtttttcttcagggtttgatagattgcgtatcc

SEQ ID NO: 28836 - DNA, 1352 bp, Mus musculus
tccatgacttcctggacttgtcactctgagcctttggtgagggaataatatcatggtggggacatttgataaagtatacctgttcaccctcataatgtttaggaaccatttagaaaccagggtttgggggatagggtcttaaaagtcctctttagtgatgctttttttctacaaggctccacctcctaaacacagcacaaccttccagtggtgttataaaccaagcctttaatacatgggctttggggacatttaagatccagaattcaactgtgggaagctgtagaggtaagaagttgattgcagcaaaaggagacactgacaaagattagtatttgattttcagattctgaaatctgtccacctgatgaccttgccttattaccagcatgcaaagagaatcttgaagacctcctaggcccatcctccatagccacttacctggattccaagagtcagctctctgttaaagtcagcgtgaatggaactgaccagtctgagaatatcaatatccctgatgacacagaagacttaaaacagaaaatccacgacttgcaaaccgagctggaaggctaccggaacatcattgtccagctactgaagcactctcagtgcagtgaggctattatcacagttttgtgtgggacagaaggggcccaagatggcttgaacaagcctaagggccatattgatgaggaagagatgacattttcaagtttgcaccaagtacgatatgtgaagcatatgaaaatcctccgtccactaaccccggagatgattgatggcaagatgctagagagcctcaagcagcagctggtggaccaggagcaggagctacagaaggagcaggacttgaacttggaacttttcggtgaaatccatgacctgcagaacaagttccaagacctctcgccatcaaggtacatcctattcctgcttcatcctcctcattaggcttgcaggtttcccaggtcgttgctatgtaggagcccagcagctcttgagcgaatgctactccctgggtgggtagagtataccctagggaaggcttcacttgggcttcaggcagccacacagcttcactctatgcatgcgtatgttaggagctgggcaacttctgagactggcagggcaggagttgccctcctcaggctgaggactcagtgtagaaactccacagccatcagacggtggattgcagtgtgtttactgagctgcctgctgtgtttatttctgaactctgttattggcttttgccttgttgtggaaataaaatggatgtcctaagcaggttgggaggaatataaatgtttttcatatctttaccctttaaggtcatcttagagaaataa

SEQ ID NO: 28837 - DNA, 1149 bp, Mus musculus
gcccagttaattagtatgtgtcagtagagtataataatacatgtctgtgatgtaaataatgttatataaaacatttgataactatactaagcatggttgaagacatgcaccccaagttcatcttaagaatttccaaggcatggtctgtggaatggttgaccccgcaggagggcacctggagtgagttggacactaatgctgtcatctcactttgttttctgaaccatagcaggagaacagaaccactcaggagtgagaaaactgagggtcaggaaagcgacacagatgcatcctgccttaccatcagtggacttgctggcttgccccctcccatttcctccttggtcctgcctgtggaccagttctcactcaacctgcatcctttcttctccacctatcccttccattctatggtggtgcctctatctgactgaagactttgatttgcagatcatggaggactatgctgagggtggctgcaaaagtggatatggaaggcacatggattccaatattttaggtcatgatggggcccaaactcctggtgcctctgaagagcacaccctagaagatgagctcctgggcctgcttgccactctcttcagtaagaaggccacaccgttgctggaatccaggtagacatgggcccagacacctctttacctctcgtttgaggagcgaacatactcgtttcgctaaatggactctgacggtgctgtgcagtgtacctgggagctcctgaaatggctgggaaggaatcttgccagtcgtgcaattaagtaattaggcttcgtgcttgtggctgtgaggggacttgaacagagctacacgcaggctcattacaaaaagcaagagaaagctttccccagaattattcctgggagtcccagcaagggctgcctggctgttggcagggagaggagtcggccctcttggcatctcctctggttttggcatcagcttaaaaacaccatttcagtttgtattgctgctgttttatgttgcgcttgaactaaattctcttctcgctgtatctgctaggagttgttcctatgtgggcaatactacaggttgttcttctgacacagagaaggagaaacaggaggtgcatttgtagtctgtaaattagtcctttctgagccatttccc

SEQ ID NO: 28838 - DNA, 1132 bp, Mus musculus
actgtcatcgctaactgtgcatagagagaaggaggtctctgctatgaaggatgatctgacatagttggagaaacttcacctctggggagtctttcttccagaatgctttgtcacaagacagaaacatgttagttgccattgaccaaatgcctctagtgttctgtggctgtgatcctagcacattctcattctatagaccttattctaaccttgtcagtagacaagctgctgaggatagctcaggtagccttctcacaagtctcatgcctctgccttgaagtgagacctctatgtctttgctctttcctccaggtcagtgacctcatacagcttgtgaaggacctgcacacagacaaccagcacctgaagaaaaccatttttgatctctcttctgtgggtttccagggaagtgacagacttgagttaacaaaacaagaagaggtaagaagaagagtcttgcttgttgccatgtgctaattgcatagaggatacctgacatagacacagacagacagacagacagacagacagacaggatacctgacatagacacagacagacagacagacagacagacacacacacacacacacacacacacacacacactgcatgtctatttgagggagttctttgaacttgcctttgctgtggtagagtcttgagggccccgttggtcattgagtctgtccatgtgcttcctccaactcaggccatgtcttacgtgcttgatatcctgtgatgttactgtggcctggctctgggtatttgctgcagatggtacatctgatgagtgatgtcatcttagagctctttggagaatggccatggctccagagagcttgcatagtatgcgtccagccttggaatatccataacttaaaggaagatgtctacataccccacctgctccccacccccacgtcacttctgacatttgtctcttttcctgtttgtaaccatgctgtacagggaaggaccctgaagctctgttgggagcaggagatgttgagttcctctaggcgtggctagctcatctctccagtgaaagaacccggccccatgtgtgaatcagtgtcattgctgaagccaggctgtttcaccatgaatgcaaaggatctttccttacaga

SEQ ID NO: 28839 - DNA, 1209 bp, Mus musculus
tactaacaaagaagaatattgatggtgctgggattcaccactgcctgccatcttcatttcattttctgattactattggttggctgattatgacatcagagcttgaactcagggattcacacgttaggcaagtgacccctttaaagttacttaattaccttaaagtattagaaaatccagacaaacggaaaagtcagctatactctctttgcattgaagttatttagttttgttaaaagtttgtgcttttccctcttgtatttctttgacagcactgtggaccactcttgccaacaggaccacaacctacactttgtcctgtagttttccaaaatgctgctccttgggctctgggtactgaatggtgcccatttttcttcctccctgcctggtaggcaaaacagtcttggtttgtttctgacatgggaaaccaggtccctctgctctccctctctcctaggggtctgaggactgtgaagctgcgctggtagagaaggaagccctattggccaagctacactcagaaaatgtcacaaagagcactgagaaccataggttgctcaggaatgttaaaaaggtcacccaggagttgaatgacttgaagaaggagaagttgagactagagcaggccctggaggaagcccaccaagaggggaacagaggagcccgaaccattcacgtgagtgcctcctgctctcctgacattgtgaggggtgcatcgggtggggccagcgatgctttcttctcacagggagctgaatcaggatagttctcttttcagttttttaggatccttcatactgatgcccatagtggttgcacatgtttatatttccacagcagggaataaggtatttctttccctgaatccttgccagcatttcttatgttattaatggttttgtttttgtttttatgttaaccattttgactaggatgcagtgagttcttggagcagttttaatttgtatttccctggtagctaagaatgttgaacactttcttatgcatttggtgacctgtgccttcgttgaagaacccctttattgagtggatggttggattttggcgcttaacttttgcagttctttggtggccttgatatcattctagggctggccttgtagagtcaagccttactctgaagacagtcatatccagtgttatatctttcctgtacactctcaggttttactgtgttttatagac

SEQ ID NO: 28840 - DNA, 1194 bp, Mus musculus
tcccctggacctgcaactccagttccaagggattagacatcctcttttagctgctgttggacaactttacaaactacatgatccttccaggcatatacgcatatatgtaatcaggaaggaaaaggaagaagaaggagaaggaagaaggaagaattagaagaagaaagacccccccacaccccccaatacacacacagggttccttgacatggaacttgacagtgaagcagcagcaggagacatttaaattcctggaatggctgccaaggaacaggctcacagactcaacttcagatcacaggtgtggctgtgtgcagattacagtgtaggctggctgttactcctcttggccattaaagttatttctggattggaggtggcattctcctccaggtgtaaaagtaaaaacacttactgaagaaaaaattaaaaataatttctatccttaaagaagtacaaagaagtaatataaattgccagcaaactcacctctaaatattttctccgttgatactttcatacacttatacatgcacatacagggaagaaaaaaaaaaaaaagaacttgtgcagggaggccagaggtccatattgtccatctctccatcttattttttgaagcagggtctctcattgaactcagagctcatcaatttggctagactggttggccactacaacccagggatccttttgtctccacctttgtagtgccatcttatggcaggtacagctgcttctggcttttatgtgggcactagggattaaattctggccctcaagcttaccgagaaagcactggactaactgaacaatctccccagcctccctctctctctttttttttttttttatttttttatttttttccattttttattaggtatttaactcatttacatttccaatgctataccaaaagtcccccatatccacccacccccactcccctgcccacccactccccctttttggccctggtgttcccctgtactggggcatataaagtttgcaagtccaatgggcctctctttccagtgatggccgactaggccatcttttgatatatatgcagctagagtcaagagctccggggtactggttagttcataatgttgttccacctatagggttgcagatccctttagctccttggctactttctctagctcctccattgggagccctatgatc

SEQ ID NO: 28841 - DNA, 1189 bp, Mus musculus
ggatccataggtaacctgggtgtgctctgcatttttggctgtctttataaaggtagacattacatctcattgtactaaaacaatttacaagtgactgattgcctagcatatgagtctatgagtttaatccttagaattacaaaatatattaataatattttgccctttgtcatttaaaaaacacctttccatgtgttctttgatcctcaccctagcctccttaggaagtagtcttgtgctcatttcatagatgaagtaactgaggcacagagagtctaagttgttcagcgctataccatgcacatcatcattattattcctggaatcagttctcacctctacttcattgtcattttgctatgtgatacatataaatctactagccatgggccctagaagactggaatggaaattcccatttgtggatgcttctaatagagcccttgtatgctctctagaatactacccccccccccaccccgccataccatgtgtatatattggggtaggggaagtatgtaactcacaggcacaattcagggccacatagatactaaggactttgttgaaagaacacacatggatttctacctaaagacaagattaatgacgagaaggtaaagctgccagttcattaaaatgaatgaattcctgaattggggaggggagcagagagacttttcctagcagttgcagcacaggtgtgtattgactatacatcacagagttccaaagtgctgagcacaatggctgcctcccagataccccatctcctgccaaaataagtggaaaggagataaaagccaaacgtttgttaaacagttcacacaataaataaatgtttatatgagtttaagagccaaagtaaacagtcgagattccagctaaatagagattccatgatacagatcttaagagataacacagaaactaaaccacaaatttatcaagtacctgttaattgctcctaaatcatgtttttcacaatgaaaaaagctatagccttaaaatgtgttgtaaataacatcatttagtgaccccgttgctctgcttatacaaattattttgttgtaaagatcaaccatgaggtgatctctccttgaaagtagagtaggaaaccagaataaaacatgctgctgggttttcattcctctggagacattatcacccaatgccacgagtcctctgc

SEQ ID NO: 28842 - DNA, 1224 bp, Mus musculus
ggttttgttgtggattaattttgtttctccatctatggttattgaacgtttggctgggtatagtagtctgcgctggcatttgtattctcttagtgtctgtataacatctgtccaggatcttctggctttcatagtctctggtaaaaaatctggtgtacttctgataggcctgcctttatatgttacttgacctttttcccttacttcttttaatattctgtctttatttagtgcctttgttgttctgattattatgtgttgggaagaattttttttctggtccagtctgtttggagttctgtaggcttcttgtatgttcatggtcatctctttctttaggtttgggaagtgttcttctataattttgttgaagatatttgctggacttttaagttgaaaatcttgcttccacaggaggcctacacgccgccgtctgtgccgccgccatgtctctagtgatccctgagaagttccagcacattttgcaagtactcaacaccaacatcgatgggcggtggaaaatagccttcgccatcactgccattaagggcgtggggcagagatatgctcatgtggtgttgaggaaagcagacatcgacctcaccaagagggctggagaactcacggaggatgaggtggagcgagtgatccccatcatgcagaacccacaacagtacaagatcccagactggttcctgaacagacagaaggatgtgaaggatgggaagtacagccaggttctggccaacggtctagacaacaagctgcgtgaggacctggagtggctgaagaaaattagagcccatagagggctgcgccacttttggggccttcgtgtccgcggtcagcacaccaagactactggccgcaggggccgaactgtgggtgtatccaagaagaaatgagtctctgggcctttgctgttaataaatagtttatatacctatggaaaaaaaaaagaaaatcttcattctcatctactcctattatccataggtttggtcttctcattgtgtcctggatttcctgaatgttttgagttaggatctttttgcattttgcattttctttgattgttgtaccgttgttctctatggaatcttctgcacctgagattctctcttccatctcttgtattctgttgctgatgcccacatctatggttcctgatttctttcctagggtttctatctctagctttgcctcactttgggttttctttat

SEQ ID NO: 28843 - DNA, 1099 bp, Mus musculus
tgaactttatcagtagcccacagagtgaattaaagtaaacatttcattcagcaggagttagtaggaccacacacaggccagcacacatgcacccatgcttgcactcaagcagcaacccactcacactcatatctacactcagaaagagtgacaaggtgtggaggagagaaacactaggacaaatgaaaagcacaccatcatagcactaaaaagcatgtcttttccgtgtaatgtttataagacacaaagttaaatgtgtctttcagcttcaaagcctcccaatttagtagacagagagtggtcagtatcaagaaagaacctaaaatacttccttgagttagattgaagttagccgcccctcccctccctttattgaaggtgtggcctgtctagggctgggtaagacttttagggagagttgtgcaggagggggaggggcttccagggctctatttaaagccaatgtgctctactatcagggccatttgaaagtgagctccagcctaagagggaggcagaggcatggacctgggagcagtcatgaatgaaacaccagatgagaagcctgggcatgtgaaactagagatgtccacccagtcttcttccaagagaatgcagcctctagaccagaaggataaagagaatcagtcctctgagagttgggggaacactggcaggagttccaagtcctctcccaaaggcaaaggtagggtttaggtctttaaactactgatgggcttggggaaggtaaagagaggggatggctgcacaatgcattccattccttccctgcatagttcaaaacaaaatgtgtgtgtgtgtgtgggggggggggtcttgtgtgcctgtgtaggcctgtttttgctaatggctgtgtcagctgcatatccttgggaatatattttggagtgtttgctgaggcagcttgagaacatccaaattaggaacaaagagggaatggagaattgaaaaatagtgggggactgcatgggatttcaaagcatgcaaggagcttggcctaatggaagctgatctcaggctttcctgagaaagttgggaaactgtcaccaatcacctcttcttcctacagagaacacat

SEQ ID NO: 28844 - DNA, 1251 bp, Mus musculus
tacaacatgacactagtctgtggggaatgctctgattaggtgccttgtacatcatcttttttgcctctgcaattacatttggggcagaatttcttgggattgcgagaagggcaagtgaattctttaatatggaaatatatgccaactcacgtttctgtgagaacgtaccagttttcacttccatttgcaatatatacacaggaacggccatttcttcattctgcctccctacatggcctgttaccaagtgtgctgtcctcttacaatctactcactgtctacaacatgcaaatggttgcttatacatatttttaatgatacttagtatattttaacatattcagagtaagttttattttattttctttgagctaccttttcatgacctttgtcagtacacggcattttatctatgtggtttgttcttaaaagtttaggtagcattacaagtttttttttcctgattttcaagtcattgatttctgtttttatctatataaaggtcctctgaatgtcaaagtgaagaaattcaatgaagcgcgggtaaacggcgggagtaactatgactctcttaaggtagccaaatgcctcctcatctaattagtgaatggatgaacgagatttccactgtccctacctactatccagtgaaaccacagccaagggaatgggcttggcagaatcagcaggggcgggggagaagacccttttgagcttgactctagtcttatttagtttcttttggcctactctcaaagggttgatttcaacttagggattaccaggaacttcatgacgttgaaatggctatttagatttaagttcatcataaatttgacattaaaagctgccatccatggatttcttcacattctcagctttttctcatttctttggcacaatattgttgtatgtatctctttgggctggtaacagacataacaagaaaaagactcatattttatgatctcaaagtggtcagtccatcacatgccttcataaattatacttgacatttaaaatttagtgtatgctctgccagtgcaaaataatatcaagatataaaaacagatctgggtcgcagttaataattgcaatatttatcatttcgtcactagctccatagaagaaactcagtgtatgtttgtgagtgtgtgtgtgtgtgtgtgtgtgtgtgtgtgtgtgtgtaaattgtatacctatgtgtgaggaactaactgtaaaccctggatctgagaaaaggcaaaaatg

SEQ ID NO: 28845 - DNA, 1164 bp, Mus musculus
tgcattgaaaccacaaaatagctttaaaatatctgtatttctcatagctaactaagagggtcattccacttggaagcacatgggcctctgattggcttctagatccttgctcttccctcagcagctagtctgcttccatttaatgcacatactagagtcattccagaaactatttctaagagtaagcacttaagtcaaatgtagccaacttttgggaggtagaaattcggattttaagataaggctgtctgtacctctgtcctctctactttatagatgagagccgaggcagagaagttccttgtctctagtcctttagtcaggcctgccattctgctggtgctggctctctggagtcatgtgtgtgtgtatgtgtgtgggggtggggtggggggccgtgttttagcctggactggccatgtgtggccagtggctgctctgtgagagtcctgtatcttctaggacacagcgtattctcaacagtcaacagcttgacagtcactaggacatgcatggagggcgaggctggaggagtgctgattgttcacagggagagatgtttggaataaagaactaataactctttgagttgaaggaggtgataagtcaggatgaaagataaaagttgtaacagttgtttgaatagacaaaaggaagaaaggtacaacaaagactccttcattccaggtgatcatggagaggccaggtagcactcttgaggtccacttgctgggcatcagcagggaattctggccatgcgggagaaggggactggtagggacaggaactaatgtaggggttgtgcttgggagggaaaggtttctggctcatatcttggctaagaattcagggcagcgatggtaattttttttttccctttcactttcaaattctaagcttggtgctctgtggtaataggggatgggggaccttcttgacattgacgtttctaaacagttctattctgggtctttcctggttctgaaggtgggtccttacctctctgatctgccctggcgaaagcgtgctcagcatgtagagtcaagtttctgagagtcactgcatcacacacacacacatacacacacacacacatctgctcagcatgtagagtcaagtttctgagagtcactgcatcacacacacacacacacacacacacac

SEQ ID NO: 28846 - DNA, 1171 bp, Mus musculus
tcctcttcttccttttacttctctaccccttctcttcctcctcctcctccaaccactgccaacagcagcagcagttgcaagctcagcatctctcccatggccatggacccccagtacctctcacgcctcacccttcaggacttcagcctcctggcatcccgccccttgggggcagtgccagccttctcgcgctgtctagtgctctgagtgggcagtctcacttggcaataaaagatgacaagaagcaccatgatgcagagcgccacagaggtgagaggccgggcaagccagattaggctttgctcccatactcagacagtgctgcagagctgtgcctcgctgtggaaagccccagccccacacagagagcaaacagtgagataacaggagctgtctgtcgcaaagcttgctttccactgacactcagttcaccctgccactctgcaaggtttgccttgggcagctgtggggtttttccgatcttgctagcccgcaggcatcttgacatcttagtaactgcctttttaatcccagtggcctgtaccatattatggagaactgttaactgcttaattgggtaattttcaaagaaagtgatgtttgttaaatggggcgaaataagaagttaaatttgaaagtgaatgtgttcaaatgaaaggcttgacaattgcatctgttactagttttgtaggctttaatcctagtgtgcgttaaatattgggcaaattgcacttgactaatttttgaagaaaagtaatttattctgtcaagaaattaaaaataggctttgtgtatggttaaactgtaaatcttatgtttacaaaaatactgtaatcttcaggaaatcactgtattaggaatgtgcaatgacttatataaataaagccattttttgaaactgcctggggcctgtgttctaattattccccccttttttatttctgttcttgcctctgtgtctgaacgggcgtgtctgtgcatttcttggtaacctcgggagcagacagagagcctggcacggtaagtaccccagcgcctgttgcacatgaacacagacccacttgctttcccaagctgccttcttcgaacacaagcaccaagcagacacacagacaccccgcgtgtagtgacctgggtttctcagtttttctttttaaaaatcattttattt

SEQ ID NO: 28847 - DNA, 1099 bp, Mus musculus
caagatagtaatgagtgcactgtgattacaaggatgggggcgcctcaggaagtgtttaggacacatgtagttagtagtcactgattctacaaagattttctggatttgttctgcagtttctgaatggtacagaaacgtaactcaggaaaaattaaagtggcaaatatttaccactttaggagagtgtgaacagcaccctagggacagcagcttacatggcccctgaagttattatccgagccaaaggagaaggccacggacgtggggcagatatctggagtctggggtgcgtcgtcatagagatggtgactggcaagcggccttggcatgagtatgaacacaactttcagattatgtacaaggtggggatgggacacaagccaccaatcccagaaaggctaagccctgaaggaaaggcctttctgtcgcactgcctggaaagtgacccgaagatacagtggacagccagccagctcctcgaccacgcttttgtcaaggtttgcacagatgaagagtgaagtgaaccagtccgtggcctagtagtgtgtggacagaatcccgtgatcactactgtatgtaatatttacataaagactgcagcgcggactcgagactcgagccccgggctaccttgccagcagagtcttgcccaacacccgcaagggcccacacgggactccccacgggatcctaagacctctggtgagtggaacacagcgcctgtcccaatccaatcgcgcagaacttgagactgcagtacatagggaagcaggctacccgggcctgatctggggcacaagtcccttccgctccactcgagactcgagccccgggctacctcgccagcagagtcttgcccaacacccgcaagggcccacacgggactccccacgggaccctgagacctctggtgagtggaacacagcgcctgccccaatccaatcgcgcggaacttgagactgcagtacatagggaagcaggctacacgggcttgatctggggcacaaaccccttccactccactcgagccccgggctaccttgccagctgagtcgcctgacacccgcaagggcccacacaggattccacacgtgatcct

SEQ ID NO: 28848 - DNA, 1193 bp, Mus musculus
aattagcgtgtttgaatccttagttttagttaattctcctctccgtttacttcccagtcgtcctccccccccccccccatttcctgcttataccggtgcacgctctatccttgtactttcatatcacatgcattctactatttctcatctctaaatgtctagtctaacatctactactcccagtgaccatgtgctagcctcttgcttcttcaacttaaatagacaaatcaaaatgaaaatagtggctgtgtataagaggaaacatttaagtttctgcctttctgggcctaggttacctcacttaatatattttccaattccataaattttcctgaaaattttataattccagttttctttatagcttaagaaaatctctattgtatatgtgagccatatttttcttatccacacagctattgtgaataaaacatcaatgaacatgtttgatgtgggaatattaaaaagactatttgtatcctgtgctacgccgggcactggcagaccacatagctttagctgggtggtctccactcaatctctggccgggagctgctgaaatgtttcccttggccggtcattctcatgtcagccccatgcaaggaccgccctcccagccgtcagctgccacaacacccagtaacccggtagaaacaaaactctagaagttaataattaatcagtcagatttatataacaataaattctcatttcacaggatgccctcacaataaattcagagtcagttgatattggtacaagatgcccacctagattagacaagttaccctaattattcttttttttttaattattacatattttcttcaattacatttccaatgctatcccaaaagtcccccacaccctccccccgccccactcccctatccacccattcccatttttttggccctggcgttcccctgtactggggctaccctaattattctatccctatatgatataaatctacctatggctatttaaaaccatgcggattatgaatcatcttgcttgttgccctccatcttgcttccttctcctctctcctgagtctgtctgtctgcctgtctgtctgtctctctctctctctctctctctgcagcacttagctccgcctctcttttccctgtctaatcacaagtctcctgctgcactaatagtaattggacagggactatcctgccaca

SEQ ID NO: 28849 - DNA, 1249 bp, Mus musculus
tagcacgaaatttgtaggacacagtggatcacatgctacagtaaaatggacacgaccaagggagaaggaggtgttttttgctgttgatttcctaagattatgtttcatgttgaacagggcctcgaaactattgggcaaacatgaaacaaactaaaaatttcagcccctgaatgtaaatacatgccaattatcagtatcatatttcagattatctgcattaaactaggattattactatttcttaatttcactgagaatcatgcagttgttggatataattttacctttataattatatataaaaatatgttgatagtaattttagaataattttaataataatttaatgtaacttttgaatatgttctatattttccattattaaatgataaaatacacagtatagtagtatttgataaatagctatttgattagtaagtactattttttatttcctaacacctgcttttgctttttctctccctgtcttgtctctagggtgtggatgaatggaatatagctcgcctaaatacagtcttggatgtggttgaagaagagtgtggtatttctattgagggggtaaataccccttatctctattttggaatgtggaaaacaacatttgcgtggcacacggaggacatggatctctacagtattaattatctccactttggggagcccaagtcttggcaagtcacttgtttaatattcacacccattagagttgagaatcattgattgttgttcattattgatgagaatttacttcttttatagagtgagtgtaaggaagttttgggttgtaatcttataattattctttcctgcctctgcaatttaatatatttttaagaataactatttatgccgtgtagtggtggcacatgcctttaattctagcatgtggggaggcagaagcaggaagatttctgagttggaggccagcctggactacagagtaaggtccaggacagccagggctacagagagaaaaaaaacaaaacaaaaaaagaattattcatttctggtcatatttggaagttgggtcagatgtggcagtgtctgctgctgattatctatgaatagtgttgttgacagtaagcctgcattagggagtgggaaggttatctggatatctaacacctgaaaatttagtttattttatctgttgagtattttggagttgatattaggaaggaaaggttttcattaaattaaaaaaaaatgtcaactaatacttcataat

SEQ ID NO: 28850 - DNA, 1210 bp, Mus musculus
gatgctctcttctcctgtgtctgaagacagctacagtgtactcatatacataaaataagtaaaatctaaaaaaaaaaaaaaccataaaattctgtctgtgactttgaaataatttagttaattgttgccaaacatagttattgtaggatattgtaagttagtcgttgttagtgtgaaatacgcaggaagataagaaagtgtttggtgcatatagtgtctcaggcttttggaactggtgctttcagaatagttagttctcagagtctccactgagggattggctagtacgggtgttcttaatctcactttcgacttgaacaggaagtttgaacagttacttgctgtatatttggcaactgtatttcaattacgtgccaaattgaaattcttaaaattaagtgattttgtatgtacaaatgtaattctgggtaaatagttttgaaaagatcaacctttttgacatatatatattaccttttaaggattagtacttgggctgatttttagtcattgttctaaggacattagaattgaagtgtgttttccaaccatatgaaatgttgttttagctgactgcatttctgctgctccttaggcttcttccccagtagctcccaaggctgtgatgcatttctccggcacaagatgaccctcatttccccctcagtgctgaagaagtatggcattcccttcgacaaggttagcggctctccgactttacaagtccattgctcatatcataggatttgtatttaagaaaagttcaaaatggcaaaacgtggtcttggattattaaataatacttatgacgggtgaagagaaatttaaactcctataacatcaataattaatttaaatcgtaattaaatattttaaaatgttttactcaggtttatatatgtttaatttttgttggagtatttcatacataaatataatatgcacccactattcttcccatccagatttttccctaccccatggtcacttttttctccaaacagaataatgcccttccttccttcttccttccttccttcattcctctctctctctctctctttctctctctctctctcttccttccttccttccttccttccttccttccttccttccttcctttctttctttctttctaaactcacagtgtctatttagtaatacttacatgtgcatggctgtagaaccatgtatcagaggatgaata

SEQ ID NO: 28851 - DNA, 1138 bp, Mus musculus
catgtatcacactgctgaaacataatacacatgtagtatcaagtgaaaatgaaaacctacattttcagtatccttatggttttcaaatgtatatatccgtattatagacttagtccttggcctttatatggttcgttttttatatgtgtttatgccttagtgtgcatgcagctcatggaaggcagaaggaacatcgggtcatctagtattggaatttgttgtagttgtgagctgccatgtaggtgctgatatgccgtgcagtgccaagacccactgcaggaactgctgagccatttctccagccccatttacctagttctcattacagaacttatgttaagtatatccagttgtcattagagaagtttataatctagaacatacttgcactggaattacttggattcatttcttctatgtgccagattgctaccaccaagttgaagtcagtaagtttagggaatttgtttatatttaatgtctcctttccttaggtgggctcatgtcatatgtgctgttgcagttccagaagtgcgattcactaatgtcccagaacggacacaaatagatgtagacagaatacctttacagaggttaaaattggtgagtgtcaaagtttttttttactttatatattaatgttaatttcaacttctgaatttgttttgtttccaaatcagtatatcagatagtttcattttattctacctatatttccctgtatcctctatatatttttcttcacaaattctttattagtatattgtaagtctccataacaggcctcatttttttaaatatgggaaagggatcaattttctttattgatatgaacttgtaaacattaggctctctgatattgttcagcaattccctaacctgtcttacagaaattgcctgctgtttttctttctttactcttgtgtttcttttggtataacaaatatgttcaaccttagcagccatctctttgccaagaagaattttgctttgaatcgcagaagcttttttttttttttattacaaggttttttactcaaatgtagactctagatacttaatattcccatctcaaacttgttaccttctaatctattcagtagcattcataaaaatttcttcactgatttactttttt

SEQ ID NO: 28852 - DNA, 1160 bp, Mus musculus
acatatgcagctagagacacgagctctgggggtactggttagttcacattgttgttccacttatagggttgcaggccccttcagctccttgggtactttctctagctcctccattgggggccctgtgttccatccaatagatgtctgtgagcatccacttctgtgtttgccaggcactggcatagcctcacaagagacagctatatcagggtcctttccccaaaatcttgctggcatatgcaatagtgtctgtgtttggtggctgattatgggatggattcctgggtggggcagtctctggataaaatcatcctttcatctcagcagtgggggtgctttctaagagttactgaaacaaaatgtttctttctgatgacgaagatccaaccaattcacaattctaagtttcctccccaaatgatatatggcactctctagggaacccgtagattagcctcatgagcggctcagcagaaaatatatgcatctgccaacttgaaacatttccaaattctaggcttccttctgtctgatcccttccctctctactacacaatgaaccatgtatttttaacacctgaaagaataacagtctactttgttatcaacctcatatattctatttgttcatgtcattagaagtcatacccctaacttaaaccagtggagaccgtattctagattgaaactagactaaggaatcaggaatgaagtttggtattttattgtagactctaggtttggtcttgagtatctcaactcaatgatcacttactgaagagttgctgagttccacgctttagtgttccaacattagtttatacaacatttagtttatagttcttaatatcctttagcttaagaaatgcccaatgggatgaacattgattattcctgcattcatgttcagggctcacaggaattcccagcttttctgtggtagagactcttccatggaagaaaaactatctcagacagaaaacttaaggctctcatatgtggctcataatgtaaaatttactcttccgaaagaaggaagtaggatgtgctaggttgtaaaagtctgcccttgggaatgtgcagttattcttgagggcaggtagaagataaggttacagacaggtacatgtagcactctttaattagttaattagtatgtt

SEQ ID NO: 28853 - DNA, 1510 bp, Mus musculus
gatgatgaagacactgtaagacactgtggtaggttccttcgaccctgtgatagatcctagcctctgttccctagatctgtatgtagtgtttcagtaatatatttctcatttatacactcaataatgtatttctgcgtttagtccacagcctccgacatgcgatttgaagacacattttatggagcagatgtaatccaaggggagaggaagaggcaaagagtgctaagctccaggctcaagaatgagtatgtggatgaccctgtgtatcgtactttcctgaagagttctttccagaagaagtgtcagaagagacagtagttgataatgtgcagcagccacagtgcagctcagaccagaagagggaagacaaagggacagccttggggtacacattgggacaggtggctgggtgcttctttggtattggtaataaaccaggcttctggagtttgattaccaagcaaccaagaagagacatattagttgcttctgtaatctgatcacccctcagtcatttgtttgaccccaaagaatattcctaaattaaaggaaacagcagtgaatggcccactagataaaacaactgctaaagaagcggggttccctctctggctcaggtcccttcctcagggaacacatttggaggctcctttcccacctccttcagtggcagcctcatcacccaacagccggtgggtgtatttatatatattttccacagccagggaaagagtctcactcacatttgttttcagtggcagtttttataaaacatttttaaaacacaaatggcatgtatggtaataggatttacctgtatgctatcttcccttgtacagaacttttccattttttatattattacttttgattgtgtctgaaaactgagttggcctttataagaggaaattttttgctcttgaagaggaattcatatgaagtatatgggaattttatatatttacagaggaaaaatcttggcctgatattttgaacacttcataattcctgttctgaaatgatatttataaaatatatatttctttcattatgtgtttgtaaaaattagagtttaaagaaatatacttaatgcatagttttaaactaatgtaacatgatttttctttgcaaaacagcctggagatgtattaatatttaaaaattaaaatctgttttctcctgtcccgtcttctgtctgtcaattttctctaaattaaaacaccccttatttgaaggagggggttgctcatgaaacttcagaggtgaacagaagtctgcttttacatgactgcaaaaacagaaactgggaaggtgttcaaaaaccccttactagcttggcaagtagactttgaccaaccaagatacaaaggagaacatgatacattttgtaatgcagtggcatgatgcggtgggaagggggtgcctcagcaggtccatgctgaagcaccccccaccgttcctgatgtaccagccataggaccatgggtctactataaatgaagtttacttg

SEQ ID NO: 28854 - DNA, 2307 bp, Mus musculus
aggaaccaatgcgcgtattgcagggaaatgggccactggaagagcgactgtccgaaaaaaaaaacaagaggtaaaggtgctttctcttggagaagatgaagactagggggaacggggctcggcccccctccccgagcctagggtaactttagaagtggaggggacccctgtggactttctagttgacaggggagccgaattttcagtactcaaaacacctctaggaaaagtaaagaaaaatgaaaaaaccttggtgatcggggctacgggacaaaaatcgtatccatggaccacatcccgagtagtagacatagggcgaaatcgagtaactcattcgtttctggtcattccagagtgtcctatgcctttattggggagagacttactaaccaagttaaaagcacaaataactttcacctctcatcgaccggaggttttctggggaataaaagcgccccagactctagagctgtctttacaactaggggaggaatatcgactttaccaaaataaagtaaagccccctgagggattacaggactggttgaatcgatacccccaggcgtgggcagagacgggaggagtggggatggcaaaactggtcccccccccgtggtgattgaacttaagtccggggccacccctataggggtccgacaatatcccatgagcagagaagctcaagagggtatacgcccccaaattaacaaactgctccaacaagggattttggtcccatgcaaatccccttggaacactcctctacttccagtaaaaaaaccagggaccagggactaccgtccagtacaggaccttagagaagtcaacaagagagttcaggacatacaccccacggtgccaaatccttataacctcctcagcaccttgccacctggtcggacatggtacacagtcctggatctcaaagacgcttttttctgtttgaggttacaccccaacagccagcccttgttcgctttcgaatggcgagactccgagagtggacaagccggacagctcacatggacgaggctgcctcagggattcaagaactcgcccactttgttcgatgaagccctacaccgagatcttgctcttttccgagccaataacccacaggtgactcttctgcaatatgtagatgacctgctcctagctgcagaaacacgcgaggactgtgaaattgggacccaaaacctcctgggcgagttaggtaagctggggtatcgggcctctgctaaaaaggctcagttatgccagatagaagtgacctacctaggatatgtcttgagagatggacaacggtggctcacagaagccagaaaacaagctgttatgcagatcccgaccccaaccactgctcgccaggtaagagagttcctggggaccgccgggttttgcagactctggattcccggatttgccacactggcagctcccttgtatccactaaccaaagagaaaggggaattcacctggaccagagaacatcagctagcctttgaaactctcaaaaaggcactgctgcaggctccggcattggccctgccagatttaaacaaacctttcaccctatacattgatgaaagaaatggagtggcaaggggagtccttacccaggttttgggaccatggaagcgcccggtagcctacttatcaaagaaactggacgctgtggccagtggatggccctcctgcctgcaagcgatagcagccacggctgtgctagtaaaagatgctgacaaactgactatgggccagaatgttactatagtggccccacactctcttgagagcatcatcaggcaaccaccggaccgctggatgaccaacgcccgaatgacgcactaccagagcctattgctgacagagcgagtaagttttgcacccccagccattctcaaccccgcctccttactacctgagactgacgaggcccctgcacataagtgtgaagaaatactggcagaagagactggaatccggccagacctcacagaccaaccttggccaggggcgatgacttggttcacggacggaagcagctttgtggtagaaggtaagtggaaggctggggcggcagtagtggatggaaaggctgtcatatgggccagcagtctgccggagggtacatcagctcaaaaagtggaactaatcgcattaattcaagccttaaggctggcagaaggaagggctcttaatgtctataccgacagccggtacgcttttgccacggctcatgttcacggagcaatataccgacaccgtggactgctgacgtctgccggcaaagatatcaaaaataaa

SEQ ID NO: 28855 - DNA, 1156 bp, Mus musculus
atgtctataaaattgggggcattggcactgtcaccgtgggccgagtggagactggtgttctcaaacctggcatggtggttacctttgctccagccaatgtaacaactgaagtcaaacctgttgaaatgaagcttttagtgaagctcttcctggggacaatgtgggcttcaatgtaaagaacttgtcagtcaaatatgttagacgaggcagtgttgctagtgacagcaaaaatgacccaccaatggaagcagctggcttcactgctcaggtgattatcctgaaccatccaggccaaataagtgctggctatgctcctgttctgtattgtcacacttagcatgcaagttgactgagcttaaagaaaagattgatcgtcgttctggtaagaagctgcaagatggccccaaattcttgaaggctgatgatgctgccattgttgatattatcccttgcaagcccaggtgtattgagagcttctctgagtatcctctctttggtcattttgctgttcctgacatgagccagacaggtgctgtgggtgtcatcaaagctgtggacaagaaggctgctggagctggcaaagtcgccaagtctgcccagaaagttcagaaggctaaatacatattatccctaacacctgacaccccagttttaatcagtggtggaaaaaagttctcagaactgtttgtctcaattgaccatttccatttaatagtaaaagaatgattaatgataacaatgcatcaggaaatgcagaagggaagaatgaaagaccgtgtgtgtgtgtgtgtgtgtgtgtgtgtgtgtgtgtgtgtgtgtgagagagagagagagagagagagagagagagttttaagttattagttttcaaaatcagttctttttaatggacacaactttacacaactttgagaccattaaaacaagtttaatgagagaaaaaaatatacattttaatcagtagcacatagaagcttttctaaagtaaaccacattctttacaaattcaaaaatattgaaataatgtcttttattctatctgaatacaatataataaaacttaaaatgggcaagtaaacacctcttgtaaatagacaaactcatagagattaaaggactccttactagattactagttgctgaattcatcaaagaa

SEQ ID NO: 28856 - DNA, 1173 bp, Mus musculus
gtgaaaactttgagcctttactggtctatcttgtactaggaaacgagtatgttgagaaacggcagaatacacagaattgcaataggtaagcacttgggtaagaacatacaattacttagaatataatctctgttgattagacttcatgccaggaccttagtttgtgttagtcgggaagcttagagatccacagtttttctttaagaagactgaaatctatactttcataaagtagtataaaacagtttctaacacaccgggatgaggcagccttgacttttgaacttctggattacacaagcctctgaggcggctgcagctccgccctgttccgcccggctcctgctgcaactacatttcccagaagcgcggcggcttttacgtcagcgtgctgctttccggcagcattttacagcatttcaaagtgaaggctcggctcgctgtgcactcttctgacatggggtcctctttttcggggagtaccgagttttccgctcctgcccccccaactgtttccacagcggttcccgcgaacccacccgcgaaatccgccgtgccggcctcccccgcccgggaccctgagttaaaaacctgctggagttgtcgcgtgctgtcgggctctacactcttcggggcgggcacctacgtctatttggtggccaggcggcccctgaagcaaggaatcccacctggcccaggcaccgttctgcagatggtcatcggcatcagtgagcaggagcggggacagcgtgaggggtggggtggggtgggtgattactgggacgcctttcccctcacggccctgtaagaaagattaccgaatgatcgacctttcttcttcaaccatgagagggttaaataaaatgctttatgcagagcactgggtaaactaaaatgtaatatacaaaaggcacttttttttcttgttctttttttcaggtattgcctgttggggtgtagttgttctggtagaccccaaagggaagagccacccagttatttgaaaataccagcagttcattgttgtctatcatcactggcttctgggcagacagaacaagcgttgggttggtggatattcgttgcacacacggccaaggatgtacttaactgtaaggacataccgagaagattgtgaagatatgagctgtcattctttggccatggatgctt

SEQ ID NO: 28857 - DNA, 1134 bp, Mus musculus
ttggggtagggactcagtttgtgttttttcacgagatgaagatagagcgcagtggctgccagataaattaatttgttagatgaacacagattctaaatcttctaaagtatcaccttgaggactaaaattcctcttttgcttaaaagtcggcttgaggactcaggctccgaaaaagctactctctgagccagctccccgacaggaggctggagactagcctcagctttacagtttgcatttaaataaagtacctagagttccccaaaagaagttctgctttcctactttctcactgtctttcaagattttgtctttcaagcaggtaaatcaacattctcgaggcggaccagtggatgtgcatccccgcccccctagagcacacaggtggcagctgttacccccagtctcaggacatttccagcacgtggttttcagtctgagttaaaaattaggtttaccaagagggctagaaaagtagatatttctatattaataaagattggttttttattttgataggcaggcttagccccttagctgacctctggcttttcacccttgctgttactgcaaggtgtccttagctcaataggctgtggaaaaaacagggatgaggaggaacaacttccagctcctattttagccacaaatcgtggtgttactaacaacataattcttgcttaggctttactaattctgaggttgataattctcctttaggagctgcacagcactcagaactgtgcatactggtttgtgattgtacaaattcagtatgggcaccgcttggtgcagaactactgcaagggaaggtccagcttgaccatttctgagtttcctgtgagataaacccggtttaaaagaggttggtatcatattttggttaaaaataaaaaatattttccggctctacctcgcctccccaaaagataccgagagccacatgtgtgggttttaccagtacccacgggaggaatcgggtccatgtccacccaagccaaggttaaaagcccactcatctacggatgagaaaatcatttgatcacctcagttaagcgttgccttatttaacttaattaataggggggagagagattggagacgtactattgaaagggcaagcccttcactgcc

SEQ ID NO: 28858 - DNA, 1420 bp, Mus musculus
ggggatgagagtggcataaggagcagaaatcacatatagagtgaccatggcagagagagggaagatctatagtagcgttagacatatgccagagactttcttttctctctccttttctttctttcttcccttcttcccttcttcccttcttcccttctttcatctctctctctctctctctctctctctctctctctctctctctctctcctgttcttctatctctctttctttttaagataaagagatgaagaatgagtctaaatttgggggagatgcaaagtgggacaaaggacttggagggatggaaagagaagaacgtttggtgaggatgtgatgtatgagaaaagaataaaaggaaaaaaatcagagataatgcattttattaattagtgattggtggggaaaggcttccctttgaggtaaacctcacgcggcctggacatggacaggattgacagaatgatagctctttctcgattccgtggttggtggggtaaggctgttcttagttggcagagcaagttgtctggttaattaagataacgaaagagactctggcataataactagttatgcaacccccgagcagtcggcgtcccccaacttcttagagggacaagtggcgttgagcaataacaggtctgtgatgcccttagatgtccagggctgcacgcgagatacactgactggctcagcatgtgcctacactatgcccggcaggcgcgggtaacccattgaaccccattcgtgatggggatcggggattgcaattattccccaccaacgaggaattctcagtaagtgcaggtcataagcttgcattgattaagtccctgccctttgtacacactgcccgtcactactaccaattggatggtttagtgaggcccactggggtcaggccgtggtggagcgctgagaagatggtagaacttgactatctagaggaagtaaaagtcgtaatgaggtagtcttattcctgagcctgttttcctagattctggaagaaagaggatgagtaagccatgatgatcaagccagtaagttacaacccttttctggaaagttgtattttggccatggtgtttcatagtaggaaaaccaaaacaaacaaccaacccacccaactaagagaaggaaaaaattggcccttaagtgagagatcattatgagggcaatatgagaagtagccaaaggcagtataatgtggctggaagaaagaaaggcttttcatgaatacatggaaaagaactttagtaggatagacatctggcatgaaatgcataagaagtttctgaaaataaagtgtcttacttaggattcctattgttgtaatacaatgttgtgacaaaaagttacttaaagaagaatttatttgttttactcttctatatcatatttcatcatcataggtggt

SEQ ID NO: 28859 - DNA, 1224 bp, Mus musculus
ctcaaacaaatgagcagtgcctgtccaatttcacagtctctgttgagttcagttgtaaatatgtttcaaatgacattttcttgggaaaaaaaaatctctacaacgttgtggaatgtgaggggcaactgtctcccaggcataggcgtctcaaagctgcgtcagctggcgtcgtcatcgggcggttcatttgtgcttctgtcactgagaactttgagcaccctgggacgaggtacccccacctcaatgatatttctctgagaacaacttttgtaggactgtgtgtttctttagatacatttagtacaactgtaggtgacgagtagtcagtcattgcttgctagccacacaccagggttgatccattttaaaacttttggcatatttgtcctcctgggccataaatacagaaccttgtgttttaattagatttttggaaaaaaaataaaacgagtaaaaggaggcacatgcataatctccatgtaacaagcctttagcagtgggatgtattacaggacagttacttacttaatttctggagttcgggcctctgggataggccccagactgggccggaatgttagtgaaggttttattgtgcccggttggaggataatgttctttgtgtactttttgtgggtcgcaaatgaactcgattgccacaagttttaaactggtgtaaatcaagcttgacttaatgtgattgttactgttatatccagcctatactgctagcagctgctcatactgcagtcaattactggaagcggatatatttcctatgcaaaaactgtttaaaacaataaaatgagctatgctacagactctggcctcgtgttttatttttctcaatgtcttgatgctctttcagcatgaatgctgggtcagtaggattttgaaagttgatcctggcccttacatttggacgttgggtgacaccagcttactttccagcagctgggagggttaatatttcagttcagtgctgaactgcttatctgtgtagttcctcctcccacgattttttcagcagtgataatgaaaatacaagtgcaggtacagaatttcagacccagaacaccctttgagctgcgacttgaagacagcgtgtgccacagagaccagactgtggtctgttggacagaaagccacaaggacccacacacacacacactgtaaagggaagggaaacccttgcccctccctgtgactgtgggtttagtggtt

SEQ ID NO: 28860 - DNA, 1209 bp, Mus musculus
cgcctaccttgtagacagtaatttgtacactgtatagttttgttaagaatttttttttaaattaaaattcccatgtttgtaaagctaactttttaacaattataatggaactatatgttgtttccatttttaaagtaaacaagaatattccttgtttagagactggactcgagttaaaactctccaggctcttaagttatgtattaaaaaaaaaaaatctgtccatgttaggagatatttcacaggttcttgtgcttgaaaagcataggacgctaatccttaaaaaaaagtgtaaatggagaaaagttatattttatgaaggttattttgttgtatttagtattggaagagttggttttcagagcatttcagaatgttggaagcaccgctgtccttttgttagtatataaggccttttagcaaaggttttctccttttttttcctttttattttgtgattattccatgatggtatttaaggataagtttcacagagcattcaggataggcagaaaaaataatagtgcgatgtctcacataacgtgtcctcagggagcagaatccggatttgtgacttgtagcttcaaaaggactcaagggcagagactgcacgggaacaccttgagcagcgaagcagggcatgttctctacctagacgcagattctatgtaccgtgtgaaacgatgaaggctgcagaaagttaccccctatcagtgaacagtattccttctccatgaaacaacgctacagtcttgctggcagataggccccaagcatggcattcaatatcgcttacatgttcctgtcaaggtcttttgttcacattaaccagctgcatgcttcctggactttaaaaattggggtttctatatttaaaaaacaaaacatatgtgcaggctattcaagttcaatagtaaaaactcaaaattgaatgttctactccatgctgaaggagctgaaaactgccttcttcatgttttgcactttctagtagttgccctgtcttttctaattcctggaaattgtgtgggtggagtggatccctgcactggggggaataacatggaccactgattttgccctttgaccctgcacaatgacctttgcatcagccaaactcattgccatgacaactctttgtactgtgtcgtgccacagatctgttggtcacattgttaatagtaaaggggacaagttggagacggtcaa

SEQ ID NO: 28861 - DNA, 1157 bp, Mus musculus
agactggacaacagggagaaaggagagaaactgaagaaagaagacggtagaccagcattgcagcacttacagtcactaattcccttaaggttgagactatagtgacaggaaagggtcaatgacatctcactgatgctagactgcagcccctgcaccgtagcctttgttacatgaagtccgctgggaaatagatgttctgtctctatgacaatatattttaactgactttctagatgccttaatatttgcatgataagctagttttcttggttagtattcttgttgtttacgcatggagtcactattcctggttatctcaacaacgaaggctaggaggcggcgtcagaggtgctggggacagagccatgagccagccattttataagcactctgatttctaaaagttaaaattatatatatatatatatatatatataaaagaatctctgtagcctttagttatccgtacagatttattaaattttggcccttaacccagccttttccagtgtgtaacccagtttgaaatcttaaaaaggaaaaaaaaaaaaaaagagaaaaaagaaaaatagggaaaaaaaaaacagtttgaactcaaaggctctatggaagaaatgcctctatgtgggtaaagggttacctctgcatgcaacagtaaaaagtaatataatgttttccccacaaaagaaacacttaacagaggcaagtgcaatttataaatttatatctaaaggggaatcatgattataagtccttcagcccttggactctaaattgaggggattaaaaagaatttaaaataattttgagcgaatttattttcccctcagtttttgagggcatttaaaataaggcattaaatcaagacaaatcatgtgcttgaacagaaaaaaaataaaaaataaaaaaaatattgaaaacacagcacttaggttggcttagctgcagcctcctcagaggtcagattatttatttaaaattactggttgcatcaagaacccatagggtgtacaaacggttctatacaatctgcatcgtagagacaaagaggcagggaaatccatgtcacaagggtaaagctccccgtgtacaggctgggaatgccaggtaggctaggaaaacccgctcgctcttcagagaagtgccatcagggtgct

SEQ ID NO: 28862 - DNA, 1105 bp, Mus musculus
aactaagttacagcgacgtcaagaacagtcccctgcatctgctctacctagagctcaagtgcaggaaaggtcatgtgctcctcactggccaatcacaagcactttgtaggggtttttggttttggttttggttttttttttaccggtacagataatgaaggattttttctttctttgtcaaaaaattttctaccgcccttgaggacatttctcccactaaatagaagatggagctaagtcattctctgtgctgcagtccaactgtgttcctcttttagaaaagtattagtaatttttctttttttagttccacatctgcttaaccctgtctctaaaagctactacattccctgacaatctctgcctacttttacattaagaatcacaggtagctatcattgattgatccattagacataggagaaaagtgtatctatcaaaaaggactccagagtagccaggcctcagcatctagacagtaatatagccatagcacacactgagagacatccacaccgaaagataggttgtgatttattgcgtagactttttttaaaggggggggaaatagttgatttgaattcaattaccgtttctttcccattacttgctggtcactgagatgaaagagaagagaaatggagaaacccttttggtagtaaatcccacttctctgggtttcttatacatggacagggtgttcgttctgacagttcacaatttttatctttgtttttgttcttccttaatcagcctacacagcctcaggcacatctcaagccaatcgatatgtgggactaagcccaagagacccatccttcctgcatcagcaacaggtgggcacgtttcccccaggtggaatggggaagccacgctttgcttcggcgcttttctccatgttgcctctcagatctggactcaggatggggctcacggggcttctgagaccaaaattgatcattttgttttccaattttttttttcctcatttgtcctctgcttcttacttctctggagtttctgaaactagctcacagcctcttctgtcttcctagcacacagtgacaacactcacaggactgttgtacctcagccagactgtagt

SEQ ID NO: 28863 - DNA, 1034 bp, Mus musculus
gctgccccggctcttgtacctgtgttgccacgggattgtttcttaataattccactgcttgtccaagtcttaaaaggcaaagtgagtcatttttctcaagtaggaaaagagaggagagaataggagagagtttgccactgcttgctgtctcctggtgtgattattaaaaagcaaagaaaaaaatcaacatagaataaaagcaactaatgacacagaaggaagaaattcatcccagtcagaggtataggatgaatgggttgtaagcccaaggacagacaggaaaacagagggagcatggagttagcctggcaagtttaatcacttgacacacacctgtgccattctgatgctccaagtatttgctgtctgctccaattctcccatatccctaattgaaaagcactgcttgagtttcaataatggtgtgtactgtgggtgcctaggaagaccctgtcttaaaacttgctgggtgtgctttcattcagctggactgtgtgtaagtctgagggccttggcctgcatcgtctgctgttgtgttttgtctcttaccctaggaaacccttcactaacatttccagtgctagtggtaataaggaagagagtaggtcagagaactgtgagtcctttgaggagagggagggacatacaggcgggtgggaactgtgaggtatacttaattgtttagatgagacaacgtctacactggttcttctaatgaaaatggactatgtatctaccttaagaacaacattgcttttaatttattttagtgatttttgttttattcatgtaatattcaattttctttgcaaattgcttttaatttaaactgtggaatttttacttctcttgaaatgtactatgtactgtatttttagaaatcttatttttaaataaatatttttgaaaaacataggaatgtttttatcctcttacctccttaattattaaaatcgactaatattctaagttttagaactaccatgttttaagactccccccatcccaaactttgtgccctttgaataaatatt

SEQ ID NO: 28864 - DNA, 1894 bp, Mus musculus
tatttagctgttcttagagtctacaatattttacagtagaacatgggaaagtattagaagctgtttacatgaagtcctttataccagtattgtcaccgactaaatgaaccaatagttagcatttctgctacctttctgatggtgatgacttaacttcaagaagtggcttttctcacttcttccattatctttatgcattttttaaacaaaatttatttttaaaagccattttgttaaaaccaacaatattttgtgagttctttagatgtggcaatattatctgctagtgataatttgtagcaagttatcattattattattatttggagacagggttttactggctttgcactcagagtcctcctacgtttgcctcccacattctggggttataggcatatgctgctgtgcctggctcagtgcttaaaactcttaagtcattggtaatactgatttttcattatcatatcttttactatattacagctttcccctgtatctaccctagagttcaggtaccaatgagtaatgagtatctaaaaactagattaagaacattggggacgttagtaagatggagtgaaggctaagtggacagaaatagccagcatctgaaaagagctgactagagacagctgtgatagccagcactgtcgctgacgccacgtcactgtagaggtacctgcacagccattgtgggaagcatttggtttgagctgtttgatctccacttaatgttctttctccttagctggccagatgctcttgagagattatttttgatttcagataattgtgtaggataagttaaattcaagcatttttagcatgcacatgttaaaaataacatagaagtgtagctgtaatacaaaggagaagtgattgcttgcccaaagtttgaaaagatctggaacctgtctgaggagtcttttggcaaagaaatactgagtcaccagagaaaatcaacgactcagttatgaaggaagggatctgttgggcttcgtgagaccctagaggtcttcatttctgaagcccttcatttcctcatgtgtaaaagtagtgtttcccatagttgctcaactgtgtaattaactaattgcacgtataaaacctagttttcatctcactagctttatagggaaagatgtagcccgagcttccggggccacaggcatgcctcctctgggctttgcttgcctgtttcactcagcacagggtctggttgtttgtaggctgtcggttagagggaagatgcatctgcatactgatagctctgtgtccacaccagtgtggatgggtgatattttaacctactcgtgcctgaaattagtgttttacaacctgaacaattaaaacatcctggtgctattcactttatcattgagttacatttttaattcttgaaccaaagaattagttttctttttggttgactgagagcttctcacatctgtgtctgaagaagtgaacagtctattgacagcttaatttcagcagagtcaattgtgaatgaatcttagttagacttatttttttctgttatgcatattagtgtgggctttaattttgtactttaatgtaacatggctactatataaggtattttaataggctgaagctactaaagattattgaatcacttttcaaaagtctcaccaaccccccttggtcttacttcagcagtgaagaaaaattatctctataagcaaagtattctattggatacttttaatgactgctcaaccaaatgctaaaataaagggcaaataataggtccattttacattacaagtcaagaatttagtacctctgtgtgggggcagggtataaaccttaatggctttaaataatgatacaggtatttacctaatgagaatgaaattaaaggacactt

SEQ ID NO: 28865 - DNA, 2387 bp, Mus musculus
gggatgaaacaattgtacatacattttcttcagtactcaaagttttttaaattttaatttataggaaatttgacatgttttatgtttacctttaagcagtcctaaccaaatctgaatttaattcttcaagtttacaaaactggatacactttgttatgtataagttaaaatgttactacttgcttttatatgtgctgtaggcttttacagtgcagtgagcaacaaggggcagtgcctggctaggagcagctctctgatgcccttctttctccttctcaaaaccacagacgactccccgagtgtagtgcaccaactactaccttactgtgagggaaaaactatgtttcccttctgctgcaatcactgattgcttttagaatatttgctcccaggagaaatgtgtgaccagtcaggtttatattcctgttttaccctaagattctaatgactgaagagggtaggaagtttgcaataattccagttacttcttcaagtgcagttatattagaaagcagatgttttaaagtgctaagctgaatggtgtgtaacagtgtaaggaggagaactgtgcttttaaagtatggatacttttatttatctgccattagatctcactgtacacattgaagatttatatattatagaatcgatactggtcaactcatatcaaagtgtaaaagtgggtcactaaatttatataccagtaatcacccaagttgaaattgaatttccacttgtaattcgcatcactctagagaccttttattaatgtcaggaaattactgtaaaatagaatgatctatggtagtgatggtctcttaacaaacatgagccttttgtatacaaagacattttgtatgatttaatttttttcatttagaatactgcaattccatatgtttgtgtgcttagtaatcttttccctgaaaagagtattgaacaaatctaccatttgtgaaccatctacatacttttcttataagtagttgtaaagtaaggaatcatagctgggaaatactgtggctagttctttcagatactgtaaatgtcttataaaatattctgaatagaataatctctttgcagaaatattaataccatattttcatgttctaattatgtttatttaaaaacttagaagtggcagatgaaaatatttattggtgctaagacatatagtaagtttaatataagaaacatttataaaggttaggaaacataaaattagtatgttttagtaagggcgaaggggttgggttttgtgtaagctgattgactaacttggccaatgacagttactgaaggaagtggtgtacatagactgttgggaggtagaagttgaatgccttcagctgtatatattcagttcactcaagacctggagcatccaaagcagagccaaacgaaagcccagcgtggagctttgtaaactgctttatacttctggagcagtagtagctctgacacaaggtaacgggcgtgatcccttccccatgctggagttcgtgggtttggtctgcttacatgtaccacttctgggcacattatctaccctttctctttactctccctggtcctgacccctctctgcagtttcctaactagtcattgtacttgatgcactagtttgatctacagaaatgctgttattgatgtatttacataagaatctatattgcagtatatctatatatacttacatagtattgttaaatgtatatgtctaacccccggaggggtttgtaatcactctaaagattcctagagaaaaacctgttggccatttcctagggattaagctcctatgttctttctgcgccctcttttggctaattgatgtaattatcctggctcttgaggtttttactatcctgttagtgggttgtatagccaatctgtgaacatgccagaggtatacatgccagtgtatacttataggaacatatgtataaaagtgtaaagttttataaaaattgaaaatgaatgtgttattgttggtgatgttccttcttggtaaactgcctggcttcatgtatgtatattcttgtacactttttactgtcagtcacaaatttcgattagtttaagctgtttcatgtattttactttaaaccttattttggcaacttatcttgttagcattataaaaacttacttaaaatactattttactacaaaacaaaacatttattacagttgctgtggtaactgttattcggtatgttttactattttaaaaagtacatttaattttttcaattcaattttgggattgtccccttccacacacacacaaaggttcaattaccttaaaataattagtaattggttaataatattatttttctttgctttttaaaacgcttgtcaatgagagttaaccctgt

SEQ ID NO: 28866 - DNA, 1134 bp, Mus musculus
ggccagcctagtctacagagtgagttccaggacagccaaggctacacagagaaaccaatatatatattggttttctgagataggggttctttgtgtagccttgtgtgtgtgtatatatatatatatatatatatatatatatatatatatatatgtgtgtgtgtgtgtgtgtgtgtgtgtgtgtgtgtgtgtgtgtgtatgtatgtatgtatgtatgtgtgtgtgtgtatatatatataaaatggaaggtaactcgtaactctcagactgagagagattatcatttcaagatacaacagtagtaaaatcctatagttttcaactttctgttataagttctaaagttatttttaaatttttcaaatatttatgtgttgatgacatggaacaaaaggaggaaacagtaaggggaatacttatgtgccatgtattggctctgatttcagtagtcagcaatactgcaagtcatttaaaagcctgtcttcttctttgcaggatctctttgttgttcgccatgagctggctatcatgagactagctgccttcatgggcatcactatgttagttggaataactggactcttctatacacaactgattggcatcatcacagtaaggagatttttaatgtaaaaactgacaagtatgaacagatggtgtaattgtggacttaattctaaaatgttacaggaaatttacaaattaatggaaaaaaattacccacaattattatgtgttaaatgtacataaaaatttgcatccctcattttaaaatgtgcagagtatttttatatagtagaccttgtgcttatgggcttcatgattacatatgttttttctgttaattagtatctagtgtggaatcattttttttctaatcttatttccttttataccataacaatcactttgatttctttattacaaataatactttgaacatcgtttttttctttaaattatttaagatctatttctgaagatagacttgctaagacaagactacttttagtagtaattaaatcatttcttgaatgtcctaatggatttatcaatgtgcaaactaacttagtaagtgattatcactgtttagtatgcctgaaagactgtcagttcctccttctatatttgata

SEQ ID NO: 28867 - DNA, 1219 bp, Mus musculus
tgcgtctttgtaaagagatgctggagagactgacggagtcatccatcaaaataaatttggatgaactatttcatcataccatgtaagatacacatgaatagtgaccttctctaaagctggtgatgtctctgtatataaggaaaatatcagcagaccctaccctagtatatatacaatagactccactatagggaaactttttatatgttaaatgccataaaatgaacagtaataatgtgggagaatatttttctttattgtgcctgtaataaagtttaaaagttgtagcatctttatagagcaaacattcttaggctggtagaaaaaagagagagataagctattcatgaatatataagaaatataaattcccgttaacatgataaaataaaaatttaaactgagagatcttccttctgtgattttgcttcacagacaaggtgcgtttgctagtttgtttcactgccagcacagttgaaaacaaaatgtgcgtctagtcttttaattaaaacgttggaacaggaggagttgtctgtacggatgttaggtgccacctgatttagaatatcttagttggtaaagcgctccccataactacgagaatctgatttccatctctgcccccaggtaaaaagcagatgagccggtttgctggtgtgtgtgtatgtgtgtgtgtgtgtgtgtgtgtgtgtgtgtgtgtgtgtctgtgtctgtgtgtgtgtctgtgtgtgtctgtgggggtggggcgggttgcctggggagatggctcagtggttaagagcactggctgttcaatccctagcactcccacagtggttcacagctatctcttaactccagttctaagggatttagtgccctcttctatcctctacaggtaccaggcacgcatgtggtatgcagacacatgcatgtgcgtatgtatacatatagaataattttttaaaaaatctaagtgtagaggtgacacctgttatcccagtgctgggaagcagaggcaggagggctgtgggcctgctggccccgcccacatggcaagctccagaccaatgagagaccttgtctcaagaaacaaggtggagtttgcgcggggtgggggtgggggtgggggtggggggcagaaggtaggtgttttcttctctggtgcagcttcaagtaaataagttgcccttgcttaaggaaataatcctgaatgcaaggtatgtaaataaacataatt

SEQ ID NO: 28868 - DNA, 1123 bp, Mus musculus
aagaaaaagaaattgttttcagtggaacgtaactgataatgagagtatctgaataactgaacatattaaggaatattacttacatttatctaggaaggaattgcattattctgagtttgaagtatactcagattgaaggtgtgactcattctgcttgaggaatcacacacacacacacacacacaaacaccttactttagtcttatcttaatggagcaggagacccaggcaggtcacagttttggagatagtagatgagtataaataattttcacaaattcccatttttcctgaagtaattttttccccacagtagacagttaagtgttttcggtacagctctccccttgcccactcttgtattaaaccaaggttaccagcacgggtgctaagtaagctcgggaccacagagcacttggcccaagggatttatttttaacttgcacaaaagagagagattatggtaaacattttaaatctcaggctcttggttctgttgggtccagattacccaagacctagagagactgcgtgtcactggctcgtgctgtacaggaaaccacttatggttgacagtgggttgtgcaccgtcactgtgtcatggggattccagaagccacgtcttcaccgctttcatcagtttttccttttgttgactgttggcatctgaccacctgggtgaatatcagctgtctctttatagattactattttaaaatatttatttcagatgttcatagaatgttcaattttttgatgcaagttatttacagaggcatatatatttaataattgagatatattattttattgcacaacctattttccaaagcaaatttactttgtaggtgtttgtctttttgtgaagaaaaaaatgtttttttcttttgcctcaaaatacaagttgtaaacctgtcttctggcgtaagtgactcttgtgataatatttgctttccgcttatttgtgaaccagtttggagttgccagttgaaccctcagagctcccctctgacctggattcagtgcagtgctggtcaaacttggcattgtttccctgcctcggtttcctctcctcattgcacttgagtttggcctccgttagttcgtttttcagcaatcagtt

SEQ ID NO: 28869 - DNA, 2234 bp, Mus musculus
atggcatgcattcacatagaaacatacatacatacacattaagtagacaataaatcattttttaaatgactacttttatactatcaaacaaatctacttgtgctattttattttgtggttttcttttgtttatattgctcaaattctctctgtcagcactgtggaccatctatcagtggctttataagtactgcaatagaattaataccacagaactttatctattttctgtcatgttcaagatactgtaccggcaccaatttcttaggatgtttgtaagaatcatcttttaaaatctgttgtgatttaagatgttttgtgaagagcaagtgcctaagagacaacgttatctaatcatctttttgaggccacgggtaataggctgggtttccagtatgtctgattgcagtttctgtagctacctgcagaggcagtgttctgatcggtgttttgtaaatgtaaggattgtatttcagagccttgggagggaaagcctaatttccttgggagaattgatggaagggtaactacagcaactcccgagtatatttgaccacttgctctgtctgcacataggagatgttccctatttacactgcagacagttgagtggccttctagttgtcctgaggacaggaagagacaagtgggcaggagctaagggagatcaattcagattcctggacactgcagctgttcgagcaatccaacagcccaaccagctccttgggaatggagtgaattcagcagttctggtgactgtcatcccgccctggtctgagtgtctgtctgggttaattgaattggaggtcagctcattctacaatgctttgatcggggtctaaaatctgaggtagggaaaggtaaaaagcaggtaccctctcttcaaatagaagcgcatgttccttgtcaatcattctactgtgatgggcactagtgtcatctgctattgtgtttgttatgggtctggctggctcatctgtcctgtgccatctattctgggtagatccttgttagtagagacccgcaccctggacagtaaaaataatggaaaaagtctttatgatcaagtggaaaactaatcctggaattattctgcttaattctctggacattttgtttttcctcttcctttcttttcctttcctttcctttcctttcctttcctttcctttcctttcctttcctttcctttcctttcctttccttttcttttcttttcccactggtttgccaactttgtattcctgaatcaccagttctggtgcattcagttggaattagttcatgaagtaactgaaattctaagcatttgtgatttatcaggtctagaatggatcttagaaaactacattgtccctttcagcctgtgagcatgttgggcctgctgttctctgtctactgcaatagcaacttgtcagctgtcgctgctctactcttgccgtggccaggggacctccctcttacaccatgttgtgtcatacatctctcagtggtttactttttccatcccgtgtactgggcagatgatagagctccgtggcttgtttgaacattggcctttacccacctctcacccctgtgaacttcttgtgtgccatctcaaagtctttatttttaagattactaggttattttagaaactatcttcgatgtcacagctgttggggttgtagaaatatttgtagatttcatgagtaagacaatttatgaaaaatctagtgacccctttgcaagactttggcattatggaaatgctaacattggttctcgtagctagcccattatactatttaaaggttgttaggcacaatttatttcccttagggagtaacataaaaggtgacttaactaaatttaaatatttcatgccttccagttgcctattgtgaatatcttgagtgtgtgtgcctaagcgatatacataatacaagttttaatctctttaagcatctcttgattagatgcaggggtagctctaatgtatcaatagaccggtatcagtaagtaatataaaataacccatattggataatccttcatgcccttttaggatgaaagcatttctccgagttactttcttcctcagagcccagttgtctacgtactttcctttatgtattagctggccagaaccctgcatctttagttagtatttttttttggcatattgtacatttgctgttagctcttgttattttagaatgctgaacttgaaatataatgtaaagggc

SEQ ID NO: 28870 - DNA, 2206 bp, Mus musculus
tctgactgtacaattttatccttgtcttcagaaataactataaggattactccctggagtccaggctacacttcagaattcaagcagctcttcatctctggaagaaaccttccacggactgatccggaacacacaggatggatcttcccccccggttaacattgactcttgctatggagatcactctctgtgtcaaggtggacccatgatccatcaaataagaaacagaaagcctgctgtcagccacttcctgtcatcggagtggcgtactgtttggtctacatactttcccctctggaatgacatttaatactatacagaaattcttatactctgccttcactgtagatttcaattgagggggtgaagtcttttaaaagactggcaggtacaataaagcctagttagattatttatttttttaatgtaaaaattaatattgttcaaatagcaaatggctttatcagctgagccatttttagattggcttgtcctttaaacttcagagatattttactgctgtttaaatctctgagagtaaataaatatcacatctataatagtatgacagtgggtttctgaagattctggaagagagaaatgaggggcctgaggtgggtgaagtattcctaggcagaagggacttgtatctcagcaagatgtcacagttgtaagtttcaggatttccagtcctctcattggttgaaggtggtggcatttttcagaaactatcctgtatttgaatgtactcatatcagatccaataatagcattcaatcacatagacacatttctcatgtatctaagggaataaaaagctgtattttagatctccctaagcttagtgctgaagcctgaactacagacttccattgtgtttcttacaggaaggagaagctcctgttgctgtgagtgatatgtgacatgtcagtgattgtttacagtcatgatgctgctgacccagggccatggctgcatcttggttctctgagtaggaacccggatcagagcctgagcagatgcccttctggggtccccacacctgtcaatcaccctttgtgaattagaaagaacacgctcatttcgagaaacagaaaaggcacagatggctttaatttctctttgaattgtgtaactgtgagtctctgtgttagacactttcaacaatgcttagcattaatccaaactcttcccattagaatatagtttcttcaacccctcgctctcctcccaatcaacggcctatcaatagtgggtgttacagctgagggccagactccacccagtgacaaaaaccagttagagtccatggacctgggcttttgtcttgtttctattatttccaagaccagtaacttctctagagggtagatggctccaccttccctcgtcagcgccccaggtttgtagttctgagtctttctctgttggttaatagttaacaacataaagcaaataacttaccttttccaggacttgggttttccagtgggagaggcaaggtagcactcactgcctgcagcctccagagctggtgcatttggtagctttctgtatactggggaagctgtacacggaggagtgagtttgataactatggccttgcacatggattacaatacctctagtatccgctgagtctgtggtctcttgtctacagtgagatgaacgtgagcattcatgacctttcagtttatttatttatgcatttagcactgacagtggcccagattatggagttgctcctgctgtccccgactgcagttccccatgctcagcaggcactggtggcctgttacgtaaggtgccatttcttattcaacattgataacacggaggcagaaatcattatatctcactaatatgaatcacacaattagctacagatagtagggaaataaattgtcatgagctatagaaatatgtttaataattatatatatatatatgaagaaaagtttataaattctttagaagagctttgataacgatattttaaaaacaatctattcatactattaatgtgatggggtgtggtggcacacattgttaattctagcatttgggaggcaggggcaggcaaatctctgagttcgaggccagcctggtctgtttattcaaaactcaaaccaaccaaacaaaaagaatacccatattttgtgagaaactatcaaagctcatggtctgtaaattcccattctgatat

SEQ ID NO: 28871 - DNA, 1186 bp, Mus musculus
gcgccatttctgcatattggagcgcattactgggccgacacatgtttttaatgatataaaagaacctgagcccagtaaaataaatattccaatgatcatttctaacgatatgcttggaaacactttatgtaaacaagtggcagacattttaaaatatttccctttacttaaaagtaacaacagaaatttacattaaacaaaattgttcatagtgtcagtttaaaatactgttttccttccgtgtctatattgtatccaaggattgtatgctagagataattagtatttgtttgttgaatgaatcaatgaatgattttttagtaagagtataagataattgcttacttaccttagagcataaaagacaaaaggatatagtaaaccaggggaaattatgccactaaattccaaacaaggaaaggttaggaccaaatcctgacggtcctgttgaggttttcagcaacacctcacgtagctgccgatggtttttcatccttactccttaggaaatgatgtacgtctggaatggcttttcaatagtgggaaaaaggaaggacctttctgaaaatctcttggtgactgtggagaaggctgaggaggcattgcagaatcaaggtaagtgtgcgggcccaggccctgtgtctgctctccttcctcgcctgtgtctccccggtgcacatgtgcctgccttgatctgtgtgcatctcacgagcccaccttgatctgtgtacatctcacgagcccaccttgatctgtgcgcatctcacgagcaaggcttcagcttgtgcttgtcatcaagataaagagacagcacctcgttacatcagtgagtcttgagaacctacctctaaacaaagggcatgtgccacaaaagaccatggtataggatgagactccatttttatagtctagccatgaccagtgtttaaaggaagggtcagtcagcatctttgtttttaaggagcagctcttcttagtctttttcggctactgtaacaggataccataggttgggtaatttataaagaaaaaaaaaaaggatttttttttttctcagatgtggagactagtgggtgctgaatcaaggtgctaggacggaccaggactttcttactgccctgtaacgtggcagagggcatggcgtggggagagactgaggcacacagcacacatcaccattctcttc

SEQ ID NO: 28872 - DNA, 2145 bp, Mus musculus
cgcctcgactcgccttgccttgcctcatccccctcccttagattttttctccctccatcctccttttttagataaggttcaagtagcccaggctggcctcagactcacagaagaggaccttgagttcctgagctcctctttctgcttctctggatgctaagatcagctgtgtgtcaccaagcctcacccttttcagattttaaggtggtgcactgcccccattcaactggggaaaaaaaaatagctttgcttataaactttttccgaggaaaaaaagtccagaggctgcccccttgtgttgaatcagggaaaggcatgttgtccccagcacttcattctactgtgtgggtttcaattgatacttgaggttttaaagcaggctttttggagcttgtatcatttcagtaactatggaggagaagttgagatatacacggtgaggattaggtattgttggtatcagaaaaaacctgggcttttgtgtctttcctttccattgtactgagatgtactcaccggctgtgttttttccagggccaaggagagcatgtaccacgccttgggctacagcaccattgtggtgttgcaggctgtcatgaccttcgagcagcaggacatccagaatggcatctctgccatgaaggacgctttacaaacctgccaaaagtatgactgagtaatttatatccgagctaagacaacccctgccttcccgccagagtgccaagtgaatgcaggtcgctgaagtaaggggttggtttgaggttagccagagctatggagcaggacttgagatttaaagtgtcttggacagttccgttctatgcagtggaattataatacagctcccacttagcacctgtgccctctgctgggtacatggggcctgagctatggtacaagtctgagggaggcttcagaagggctagcagagagcatctttctagttcttttgcggtaggttggttaagaactgggtgccatgtcaagtcaaacagggagtgcacctgttctatgtgggagaaattgcacactcagaagggaacttttatttgcccgaggatgcctttggacacttgatttgttggaatgagagtgtcagttctcagctgtactctgcatgtagaaggccatcgtgaaggctcttacttatattggtgaattttaatgtggctaagatgaatcgtcatgtgactttgttataatctcaaatggagaacattttcctgactgcactttcagtccactcttttctgaggtaagtggaggcacttacctcaggcattctgctttcatccacaaaggaggggaggttcgtatgcagtgggcctgtgggctcctctacaccacccttagtaggctgagtgctcatggttggtggttcaggactaggcactgtatgcagaggagggaggcctggccttgcagagggactaggaattgccatgtggcgacatcttgctgtgattgaaaggatcaccagtgacagtgagcttcgcctgatgctgatctttgcccttgtcttcaatgcagatacaggaagaaatgcacagttgtcgagtctttctcaagtctcctttctcgagggtccctggaacaactgagtgaaggtaagcatccactgaggcttggtctctctgtcttctagaggctaagagcccctgaaccatcactgaagtgtagagaatgaaggaagtggcctttccttttcccagctcaccctggtccctggttgactttgaagctgtgtacacatttgtgcaaacagaaatgcatataagggacgcgcgcagtttgtttttcacttgctcttttttttttttcaaacattgaaccacacacttgtgctacaatgtgatcttgccccacaccagtgtccgtaaatgcgttttctctgtttggagctgtgcagttgtgaaatgggatggtactcggtacagcaacgtgattgttctttcatcactgaaggacagctctatggttttaatttttggacagctctatggttttaatttttttcctgttaacaaatattgttgtcctaaaatccttgtgtgtgtgtgtgtgtgtgtatatatatatatatatatatatatatatatatatatttgtgtattctttcaagtacttcatgagacagttttc

SEQ ID NO: 28873 - DNA, 1200 bp, Mus musculus
aatttaagtatttgtaaccagacccaggtctggctgctcacctacacttaggaaataagaggccggtgggaaggaatttgttttattgaagaactggtattcagggcctggcatgggagcatacacctgcaatgctggcactcagaaggctgagggcaagcaaggtttgttttcagtgtcagtctggctatagacaaaacttttctcttacaaaaaaccaaacaaaccagcaaacaaacagtgggactggagaggtagtttactggttaagagcactggttaccctttcagagggacctgagttggattctcaacacccacacagcagctcataaccatctgaaactccagactcagaaaactcagatattcactctggctttctggatcaccaggctctcacacgtgatacccatgcagccagaacagccatgcacgttaaaactgcaacaaacccagcagcctaagagggtgggtagctgttgcctcagggctccatcttataaatgtaataattatttcaataacgttctaataaaatatgtatagctttacttggggaaaaaagttctgagccatgcttggtggctcatatctgtaatctcagcccttgggaagtcgaagccagaagattgttgtgagtagagacagaccctaacaaaaaacaaaacaaaacaaaacaaaacgctggaagactatacatatagtaatctgggctaagcagtgacgcactcacggtcccagcatttggtacatagagtcaggaggacgtggcaatttgagaccaccctgattcacataggagttccaggccagccaggactatgttgccagactctgcctgttcctgccctcttcctcaaggggggtggggggaggaaaaaattaaagaaaagggatacaaaagatgaaggctgtgggttagtagttttaacctataggtcatgtttcctttgagtggattgcatatcagatatcctgcatttcagatatttacattatgattcatatcagtagcaaaattacagatacgaagtagcaactaaataattttatggtttggggggccgtcaccacaatatgaggaactgtattacagagtcacagcatttggagggttgagaaatattgctgtgggtgattttaatatttatgtatgttaaaacataaggaaagttggtaagtctcccagtggtttta

SEQ ID NO: 28874 - DNA, 1132 bp, Mus musculus
aatgcagctgagtggaaggagacagccccagctgctatcagcccagctcaggttaacaagtcacctcccatcactgagatgctgggtgtagaatgtcttttggaatcctagctagtcgtggattgtagctttctcagcagaactttccttggtgtcccccacccctccacagacttgggcacctccctcccctcttttcactgcttacatgggcaggtggcatctctccaggtggtgtctgccttcttggttctctgccttgggtctattgctaattgtctatagcaagaatctgatactgtgactcccaagagactcttgtgtttccatctttcggtctatggacagttagttcccctgacctgcccctctggggcccagtagtgcatcttgactggagtcacattcactaccacacctcactaccacacctcaattgaggttcaggcccagaggaagacaggaggagaaaaccctttgttagcagctctgttaaaactccttctccatccctgggctcaatgagtctgggttccctcacacttcaccagatttctgtgccactgtggccagacagccatgttggtgaagtcatcatagctctcggaagggactcgaggtgtgggatccttgggagctcctaatgctatcgtaagccttaaactctttacttaaatacctaaagatcctgtagtatgtgtgtgtgtgtgtgtgtgtgtgtgtgtgtgtgtgtgtatatagccaatgctttctcgatgtgttcaccttggccttgatcatatactggcacttgtatagggcctacgtatttaaattatctctgtaaatgatgccctttgtatgttaattgggtcgtatggtaactaataagtggtgcagtcttgtcttgggtgggaagagctagggatgggaaactcctcctctctaggcggggctctggagggtgggactgggtgtggcaggatgccaggtggcactggggacagagaaagagggtatctcactgggagaagggtgaagtttttcatttacaggatgaataaaggttaacagggtttggtgtgaagggagttcagtatggacggtcagcagggtgtggttttgaaggtgtgtcctgtcccagaggaaaggg

SEQ ID NO: 28875 - DNA, 1405 bp, Mus musculus
aattattcaatgatgtatttaggacaagctctgacccgctgttgaaaaatgcatggctgatcataaatcgttgcttttcctttctccctttcccaacctccctttctctaagccttgataaactgagatgcctcggggaagatgaagacccggaagtcatcccagagaacactgacctagtgactttatggtatgagttttgttttgttatatgctatttgttttggtgctggagatgaaacacgacctaccactaaactacagttagtctttctgctgtttatctgaacactctgaatgttttactccaccacttaaaattcaaccattagtttggtgtcctggcttttggctgtaatcccagccctcgggaggctgagtcaaaactgatgtaagttagaggttagccttagctacctagtgagttcaatgataattgatgactggttgttgttgtggtggtggttgttgttgttttaaacatttggacatcctttctttggctctgtggctctgtggctctgtggctctgtggctctgtggctatgggatacagttgtgtgtgtttccccaggctcttccattcagtaaatcacagatactgtgctaatttacccatcagttacgtagctccaaaagaagtaccattctgtaatttgggattagggtgatatttttttttttttaagatttatttaatgtatatgcgtacactgtcactgtcttcagacacaccagaagagggcatcagatcccattacagatggctgtgagccgctatgtggttgctggaaattgaactcaggacctctggaagagcagtcagtgctcttaaccactgagccatctctacagccccagggtgatattcttacatctaaagaaaaacattaagaacacaaaatccctaatatccactacatatttgaatttgcattgattttttaatgtagactttatctacttagatttgtaatgcaagcttaaatactcagatagtgtgtcccaaaataccggtgataaggaaggaattggtgacctacacctttaatcccagggaggcaggaacaggccgatctctgaatttgaggccagcctggtctacatagatctctgagttccaggccaggcagggctatatgatgtctgaaaaaaagaaacaagcaccgttattttgcttcttaatttttaatcttcaatggagccattttatttgtaaaatactataaaaatcaattcctaatcctggggcggtggctaagcactcaggaaggctgagctaaacccatcgccatgaagtcaaggccagactaagttcccggccagcttgaattaaatgtgagatcctgtctcaaatataataaaataataataatcccttcttaaatgtaataataacaataaa

SEQ ID NO: 28876 - DNA, 2503 bp, Mus musculus
ataaagtgaatgttacttctaagtgctcacttcttttatcagaagtgaccctcagtccattgtgctacgttagcttgcctctttgtaataatgcgtagtctgtatgacagctagatagccaccaggttgttatagaaggtacaaatttgtttactttccaaagtaatttagttttaggactgggatttcagtggcattagaactaaagagaacagactggtatatctacatatagaaagtccacctacaatcctttatagctactagtcacaaaaagctaaaactagtttgttttgaatcttacactcactaagaaagtcactcattaaggtgtgtgttttctttttttaattagaatcaatccatgatgcttgtaagtgataaatgataaataaggaaactagcttaattgaaaacatggccatattggaatgggatttttagtttttctatcagacatattagaggatacatcagttgctctaaggtagtaaccagatagtccacacacacaaacatgaactatcactctgtcccgtctagggaggacatgtcacaggtgttctgagcgatcaggccagctgttggtttttatcaggcaggatagttcatccttaggctttggaattccattggaaagtgacttcataccagggtttttgtgcgatgtgattaaatatgttcttgatttctcagataattattttcatctatgtaaaaattacttcaataattggacttttacaacttgactgttttgagcaaacgctgtacattatatacacaccagtcttttgctttgtccttagtacatttttaacttggacaaaaattattctagttaagccataagtgtcaatgtgtaaattgttttaattaaagttttttctaccaaactctattagtaagttattattactaaaggaattctggatttcctgctaaggaagtagtagtgttctccttagctgtcactgagaccctgctaggagatgcaggagctatgcagtaggaagctcaggagagaactgccacttgccttgtgttgacttccctttcttcctagccacaggtgttaagttatagaacatccaacttcagaacattaatggcactcctaagttatgggatgctgccttgctctgaccatgtatgttcattttgaagcacagctgctttttttaatttggaatactctgtctataaggctaattcacagacaagctatcactctcaaaactctgataacaacaatggctgacctaagagatctagtgaatgatagccacctctcccactgtgaatagagtatgcatgtataatgtgcatgtatggatacctactttgatttctcagctgcttggatcaacttcagatatccccctaatgagaaaatctggttgtaagcttgtatgtataaacaattcggccagagctcatctgaccacatttgctattctagttaggaagttaccaaggctgtgatgtgatacactaaaaatgttcctactcatatcaacttacctgagtagagatgccaggtaaaggcaagtccgccatcctgtatgcagaacgacggcgtcaatgaatgagttttattccattgctcagagaatatgcaaatagctaaattgtagcttgagacccttaagaaatgagagttactaaaaaatgtgcttaaatttgtgccacgtaattctccaacagatactagaggtgactgccccgtgctgtaaaactgccaagtataatcattcttaaagaattgtgaagcataagcaagacacttgaggaaatagctattttccatgcaggtgtatccacagggatgttcactgacaaagttgttccattcatatttacctatgtccttaaagtgacacatgatgttatatttaagagattgatattggcataaaatcggggactttatagcttgtaaactttataaagttgaaatacttttgatgtgaactagtgagtaaatataagtgataattgcagtaacttggctagcctttcttcattttcaccatcaaagaaatggaaggtatgtgaacttttggtgaaaaagaagtagaatagcattctcaataaataaataaggattccatagagtaatgtttatctgtcatctttgtctagtaaaacggggtaattggcattatgtgtgttattaggggaaacttgctggaatgtactttctgagagtacaatcattagtacaagacccacatgaactgcaataataatctgggggttgtaaaaccattcatcatgaatgtgtgattatgcagcagaatcctcagggtacttagcactattcaaaacaaagtaagaaatttgggcacaatgtgagttagccttggcaaggagatagtaccctgtgttgcctacagcattaagtgagaatccttgtagacataccacaagcaggcacttgtcagctccacgtcagtcgccataactggatgtgtaacattatgtccatgacacgtgcttc

SEQ ID NO: 28877 - DNA, 1195 bp, Mus musculus
cggcgcggatgggaagcgggcggccgcgctcgcagcctccctcctctccccgccgcgcccctccctcgtgggctgcggcccgtgggaaaagccctgggagcgccggggtgggaggccggcggccgggtggcgggcagcatccctgcctcaggtggccgcgaccgcaggccccggcgctgctcggggccgaggccgcgctctgtccgaggaggcgcgcaggcggctccccctccccctccgccgcctcccctccccctgccctcctccccgcggcccctccctggggtttgcgctttaaccgccctccctgctgtccctcgcaggcgcgtcgggacaccccgaggcatcctcccccgcccgcgggcccgccagtcccagctcgcgtctgtgctctcgcatctcctgatcgcggctgcgctgctcccccttctggtcttgggactcccggcgtcgcccctcaaacatgactcgcgatttcaaacctggagacctcatcttcgccaagatgaaaggttatcctcattggccagctcgagtaagtgatttgtagccccggtgtagcggtgcggcctgcctcccatcgtttcttctcggcttcctttcagtccttcctctccttttctctttaccgttacttggaacctttcattttagctttctttctttttttttttttctgtatactcacgtacaattgtaaaattctaggttttccttcatatccgcggcggtttccctttttgagtctctgacaggtgttctatatagcagtttttggggatgacattcaattaacgtttcattgaggcgaaatcatcaagtaggatttttgtgagttgaaatcatgacatttccttaaaatttggaattttgaacaaaatacaaagcgtcaacgaaaaatgcagactccaagcccttgcatgtcagctgtggtttaggttgcttcgtaccgatttgcagttggcggctcatttggatctttagattcacagtctttggctttatgaccttgaagatgttgttttccattttttgttctccatagccaaagggagaagtagaccggacactggattaacctaactggagaagtcctaagggctcaagatgttacattaaacagccgagctccattttcaggaaaaaaaaaataggttttttttgttagtttataatggtgtcaaggttcagaata

SEQ ID NO: 28878 - DNA, 1113 bp, Mus musculus
tctcccttttcatgcccatgaaccatgggatgactgacacagatgttccacttagggctaagcagttacagtcacatgttctttttcttttgaaggacttacttatttattatgtgtgtgaatatttgcctgcttgtattgtatgtgcactgtgtgtgtgtcgagtgactgtggaggccagatctggatcagatattggaccccctggaactgacagttgtaagccactgtgtggatgcaggaactgaacctgggttctctggaaaggctgccggtgcttttaatctgggccatttctctagctcctacagtcagttattcttaacactttgactagttatcatctgcagtaactgttaaccactacaaaaagatgcttttctgcgtaaagctgttagcagcagtaatctgtgggcataaacgtaaatatttaggtaaatatttaggtttttgttttgttttgttttgaggtcatgttttgctatgtagctctggctatcttggaactcactgtgtatactaggcctgcctctgccttctaagtgctgggattaaaggtgtgcactaccactacactcagctatacacataaatgtttagaaggtaaaaatttttgattattaaaacttcattgtaaagaacttgcaaatatgaaaaaaatccctcattgagcttagtcagacctaaagcttatatacctcaataaactcacatagagttagaatagctattctaaagctgtgctacttcatattagattttacactttcactgtaagttatgtttttacatgcttttgcacacatgcacacaaagcaacacacatagtgccttggaaaatctatgacagagttaaactagaaaataattagctgtctatcctctttcatgacttcaggtgtcctttatagaaggtgatttgacaggcacatcatgtgcttttagccatatcacagctgtatcctctacactagtgcctgtgtcctttctagctatgatcttttaacaaatttcaaataccagatgtgaattcctgtagaacaggcctcaaatctaatccgagggcttggtcaccctcattgaaggtcatgccacgattgcaccaatgtgcat

SEQ ID NO: 28879 - DNA, 1116 bp, Mus musculus
gatggcttagaagttaggagcactgtctactcttccagagcacccaggttcaatccccagcagccacatggtggctcacaaccatttataactctatttctggggatctgctctttccatgggcaccaggcagacacacacacacacacacacacacacaaaataacaaaacaaatattgttcatttatattttcttttgagaattctgttcagttccctagcccattgttgtattctttgttagtgtttgaggcttttattaattctaaatattattccctgccagatgtatggatggccaagattcgctctcattctttaggtgacctcttcacacatccaactgtttttggtgtgcaaaagcgttttactttcttgagatctatttgccaacgtggtctttatttcactcgtggctagagtcctgttagagagttcgtacacgcccatttacagactgtgtcctcccagtttcagagtttcaggttgtgttaaggtctttgagcctgttagaattgatattgtgcagattgagagacaaggatctggttttatttttctgtgtgtagatactcagttttctcagtaacttttttgttaatgaagagaagaggtcttctccggtgaatatttgaggcaactttgtcaaaaccaggcgtctgtggctgtgaagatctccattctgtcccttgaagttcgtgcctgtttttgtgtttaccatgctttttttgttgctgtcactttgtcacacagcttcaagttaattttggtgatgcttccagccttatttttttactccttacaattgctttggctaactaaggtcttttgtattttcatatcaattgtaaaattgttttttctatttctgtgatgagtggtgttgggattctgatatggattgagttgaatctgtaggtttcttttgatagtcagcagcacaatatgtattctttgagtatatgaggaccagaggtatttctattttcttgtgtctttttaaattcatattttattttatttttaaaaagaatttaaattttacttacatgggtgttctgcttccatgtatgtctgtgtcatatctcctggaactggagttacagacagttgtg

SEQ ID NO: 28880 - DNA, 1190 bp, Mus musculus
taaaattccaaatgcctaataacaggacttaaaaagtcgggcatttttacaagtacaccaaactgaatgctgttgttcattcatatatatatatatgtgtgtgtgtgtgtgtgtgtatgtatatatatattatatcatatataaaacatacatttgaagcagcacactacagttataagactattcttctccaaagtgttcttataaattcatttgacctttattgcagggcaaaaaaaaaaaaaaaaaatcatagtgttcaagacaggctcagtttgtaacaaatagcggaccattacaaagaggaaaagcaaaatccagggctgagcagcaagaagctttggttcaatttcacctcatatctttctaataacgtacttgtcactttattaccttccagtaatgtgaacgctgctgacaagactgtcacactaacagcagacaacaccctctctgctccggccccagttctcccggctacttattgccctggccctgaagggacacaaactaatagtgtgctttccagttcagcacttggccatcaaatataaaaggatgcgtaattgcctgtttatccctggtgaaggggaaattgagtagagggccaggctttcccaccagttgcctgctgtacacaatcattcacaatcagcctgcctcctccatctctcctgcctctttctgtcatcctctctctcccccacctccctgtttctttcctccaagcacatatgcacaacgactgtgttttcaggaatcctaaggctgcttccatgtgctctccccagctattaagtggacagatgacttcttacataaagggtcagtagagagttgctgactgttctcggttactttgaagtagtaattcaatcccatgtccatccatttggggagtgttgggtgtggtcattgcaattggggaaaattttcctgcacaaataggaggaggttgcccatattctgtgaggaaaggattagaatgcttttcttcctggtcaaaaagtgtgtgtgtgtgtgtgtgtgtgtgtgtgtgtgtgtgtgtgtgtgtgtgtgtgtgctgtaaacaaactgctcatgaatggtggctgaaaaacactgtttggggaaccttaaatgtttggcattaaaccatttgctaagtgtacacaagtatctttcaataatggactctaaatccatattta

SEQ ID NO: 28881 - DNA, 1102 bp, Mus musculus
actcttctgctggtaattgtattgacataaacgagtcccatgtagctcatccgcagtctgagttcagctgccctggtccttctgatccttcttatggtttaaacatacaagcattcccttctcaacatgactagcttctctctagacgttagtaccagtgacctagtggtgtgacttctttggtcatgttttccataagaggagggagagagacctctagccagttataaccagttagttagtgtacacattgtttcgaaagggagggtctgagtctgtgaagaatgggctggcatggccccattggactcaggagaagtcatataatttctcctctccatctgtgtactctataggtacatgccaggcacatagatgagaacgagggaggacccttggcggttcaaacacagacaagccaataatcagactgagatggacacagcacacctgagcagcccttgatcacatctagtctgccagcattgtgttaagttgaatgacagtaaatagaatccacctgccctaagacgtgtagcatctgctattgtaaaggaataagacgcccaggagagagaaggacttccatctgtgaccacaccctgtccttcagagcgttttaaaattatgacaaatttactttttctccaaaatagaaatatttaaattagtggatttttctctttctctcccagtctttgtttttagcaggagggatctgagtaaagagggcaagaaaaggcaaaacaaacaaacaaaacactggcaagtctgcagttcttgtagaagagacagatctgactctggtcctggcttgagtgtagctggaaatgagaacggctaatgcattacaagtgtttgttcaggagaaaaatcaaagtcagctctgcctcgtagtgggtgccagcccagcacatccatcctccaatatcctgcagagttccctgtgaccaggcgagccgctgcatacaccgtgggaggacttaacactatcttacgttccttatgggtcaggataggcaaaataggcaggtgtgagtttgttatgattattatttttgagtgagaagtaatggccagggttcccttgggaccacaaaga

SEQ ID NO: 28882 - DNA, 2727 bp, Mus musculus
tgtcgttatttaatgaagattagggtacaattttttttgttgcatttttcctaggctacgcagcaagagttcacatcttatactaatatatgctaaatagttgcatggtatatagatcattgttgttaaaatggcagtactgaaggcattttagatcacaaagccccagtggtctgcattctgtttgctctgacattattaaactcaatctgtttctataactgtgactgtaattgctacatttgcatggcaggaaagtttgcttcgtgcattaacttttctaacgctgcttacatgttgctttctgttcttgctctccgcgtttcataaactggcagagcaccttcagttgcattgagtaattatgcacaatcaataagtttctgtatttgtctttgttgtttctttgatgtggcctgtaggacgctgctggcaaggtactggaccgctgggccatcatgtctcgggaagaagaaatcatcacccttcagcagtttctgcggtttggggaaaccaaatccatcgtggagctgatggcaattcaggagaaagaagggcaagccgtggctgtaccatcttcaaagacagactcggatataaggactttcattgagagcaataatcgcaccaggagtcctagcctccttgctcacttagagaacagcaatccttccagcatccatcattttgaaaacataccaaacagccttgcatttctgcttccattccagtatataaaccccgtgtctgccccactgttagggttgccgcccaacgggctgcttttggagcagccggggctgaggctgagggaaccgagcatttcaactcagaatgagtacaatgagagcagtgaatctgaagtatcgcctacaccatataagagtgatcagacgcccaatagaaatgccctgactagcatcactaatgtggaacccaaaaccgagccagcatgtgtctcccccattcagaattctgccccagtcagtgacctaagcaaaactgaacacccaaaaagctcattccggattcaccgtatgagaaggatggggtcagcctccaggaaaggaagggtattctgtaatgcttgtgggaagacgttctatgacaaagggactctcaaaattcactataatgctgttcacctgaagattaaacaccgatgtaccattgaaggttgcaacatggtctttagttcccttcgaagccggaatcgccacagtgcaaaccccaacccccgccttcatatgcctatgctaaggaataaccgagacaaagatttaatccgggctacatcaggagctgccactccagtcatagcaagtacaaaatcaaatctcacactcacgagtcctggccggcccccgatgggttttaccacccctccactagaccccgtcttacagaaccctctcccaagccagctggtattttctgggctaaagactgtacagccagttcctcctttttatagaagtttacttactccaggggaaatggtgagtcctccaacctccctcccaaccagtcccatcattccgaccagtggcaccatagaacagcaccctcctccaccctctgagccaatagtgccggcagtgatgatgggcactcatgagcccagcgctgacctggcacctaagaaaaagcctaggaagtcaagcatgcctgtaaaaattgagaaggaaatcatcgacactgccgacgagtttgacgatgaagacgacgatcctaatgacggcgggaccgtggtcaatgacatgagccatgacaatcactgtcattcccaagatgagatgagcccaggcatgtccgtgaaggacttctctaagcataacaggacccggtgcatttcaagaactgaaataagaagggctgacagtatgacgtctgaggaccaggagcccgagcgggactatgagaacgagtccgaatcctcagagcctaagctcggtgaggaatccatggagggggatgaacaccttcacagtgaggtgagcgagaaggtcctgatgaacagcgagaggcccgacgagaaccacagcgagccgtcccaccaggacgtcatcaaggtaaaggaagaatttacagaccccacttacgacatgttctacatgagccagtacggactatacaacggtggcggggccagcatggctgccctgcatgaaagttttacatcgtctctgaattatggaagccctcaaaagttctcccctgaaggtgacctgtgttctagtccagaccccaaaatctgttatgtgtgcaagaagagcttcaaaagctcctacagtgtgaagcttcactacaggaacgttcacttaaaagagatgcacgtctgcacggtggctgggtgcaatgccgccttcccctctcgtcgaagcagagacaggtcagtaaatctccattggctcctcctgctgagggtgggggtacagttcagacaaggttagatgtttgtgatgcactgtaaggaccgccatattgaccatgtgatcactagactgccatgctcattggaggatttgtgttttcagtgcttgttatgattaagcatgcagaatcgtgccatctggtaatgcatgccatctttctctgtgtatgtgtatatgtatgtttccatgcatctaggtgtgaatacgttaacagtacacagttccttagaagccacagcttctgtcattcatatatgctttgccttgtggcttttaaattaaaccaatatat

SEQ ID NO: 28883 - DNA, 1211 bp, Mus musculus
caaatgactttgaaaataattatatgtaacatttttttgtacaggtagactataaactgttcatctgagagccggggaagcctataatgcaccattagtgtacaagtcattttatctggctaaaactcaattgtcttgtagccctcaaggcatcaattttagcattattgctctcaacaacagtatattgaatattatgtcagttaaaggagagtaattatcaaggcaagttagggtggctgttagtcttaccacatattgacttggttagcagttggctatagattgtgttaccgggcaaataaagatgtacggtaagttgaactggtcaagccaggatattaatctaagtccctctgggctcaaacctacattctttatgtatatccagatacttctacctttagcaagagttttgaaagtggaagagaatatgtcacctgtttttcaaaacgggagtgtatggttgcaggggaagaagaggtcatccggaattcaagaaagctatcatttgtatatgatgttcagagaaaagtggacatgacagaaagccacacagtcattgaaaagcttcggggatctgttaaagagcctttcactagggtggcatatgtaagccagccagttgagtgtaaaatgaatagcataaattggaccataaccacgtaagaaggtgggccatctcctaggcgtgaaaatcccagtggtctctggcgtagttgctaaagtcttcattcagaaaggaaagccggattgctttccagaaaagtaagatggaaatagtcacttaaatgctaaaatataaattcaaaggagcctatattttctgcaatcaaagaataataattattattacttcaggacatcctctagagacacatttattcacaatcaataaaaacagtggcctgcactcttatgcctgcactcttgtcccagtctcatttcctttctgtctctgacttatcatcattgaatgtagtcatttaaaaataaaattttcacatagcctctctttagctggaacatgtagctaacatgcctgggtgcatgttccatcctgcctttggaaaactccccacttggaagcgagtccttccagaattctaagaaccagttcagtctttctgagtaattagcagaatgtcagcagccagggtgtcagaggctcagtgatgcacactgcaagtaacctgggccacatggttcta

SEQ ID NO: 28884 - DNA, 1242 bp, Mus musculus
ctggtgttggatataacatgttacagcagacagcattgttggggaaaattcccagggaagggccctggcttcccctggccttgtgggcagtgatcgtggcgtttcgtggagtacgcacgagtgtgtatctatctgtgtgtctggagaggggttagtgcagggtgtcatttggtgcctgacagtggaacagtgcagtgactcctagctctgctatccaatgacatgcagtggctgagggtttgaagctgatggttgggtctccagtgcagcctgcacacctgacaggcagctgttaaaccgagcaaaggcaagctaggggagtcacaatctatgcataaatgatagggatatctgtgcagaaggtgcgaaggaagctctgacccccctcccccagatctcccccttcccaaatgaaacgcacagttcagccagcttcttaactacagtatactcctgctactggctgccaagaagctcaaaaaatccaccttcacttttcagtcagaagaggcagaagtggatgtgagagaaagagacacacagagagacagagagccaaagagggcaagagacttgactttaagagactcctgtactgacaactccatgcagttcggaaccagaacaactgcggctgaaccagggttcatggggacatggcaaaacgctgacactaacctcttattcagaatgtcccaacaggtaagttactttcattttttttttaaagaaacctcgagttgttatgtgcccttttcttcctgctacttttctttctaaatgtttctgaaatttaaaaatatatacattgtcatttctgtgctactggattgtgcagtgttacttcctggcttccccaagggtccttaaggaaaaggggggaaaggacatcgaagttagagaaagcaaaggcatttgctgcaaagtttcaccgtgtgtagcctgggtcctgcgaagccttaatttatttctttgtttcccgctaaaaagagaaaaagccactactcaacaaatgtatctttctgagtatgtgaaagacttggtcaaagtgtctgctgtctcgaagtaggtctttgcaagcgaacagtcctaaagcgcgggcccctcacagcagcgggtctgacttctggtgtctggagcagctggactcagacctgagcgaggctgtgcaggcttccctgccggccgggtcaacccggagggcggcaggctgcgctcccgcttgctctcggcctccgttcc

SEQ ID NO: 28885 - DNA, 1195 bp, Mus musculus
ttacattcatgatataaggtttttttgggggggttatttatttattatttatttatggttggctggcttggttttggaggcagagtctctctgtgtagcgctgtctgtcctggaaagagctctgtaggccaggctggccttgaactctcagtgattgacctgcctttgcctcccaagcagatccttgcttcttactgttttcagtctttattactgattaaaattaatttatatacttatttttaccacaatttaatttctgaatgcataattgaaaaagcgatgcttgatgttgatggactaaaccaattaaatgcttgtttgtttttaaatttttttttttaattttatcgttcatcacttttcacctgcactgtacaaggtcctgattcattctgctgcaggcacttccccatcatggtttgtgattccatgcatggacttatagtgaggttttctgaaaggataggagagggagttcaaaatttagatttttaaaaaaatttgacaggaaaccaaaatttaaaagtttaaaaacctatgtaaagagtcttactggatgtgattggtgtagtgcagtcgtaaaacaaccattcagtattatttatgggatgtgtgttctttgtcactcatgtgttttatgttagaatccatcagcagatcacctctctgatatcaggcactcttctaatcgtgtgtctgttgctctttcgaccttccccccagccccaaagcagatgctggtatcggttgtctcatttaactgatgggactggcacactgaagagataagcaggggctcctgggcatgcagatgatgagggggcagaaccaggaactgaaatctagcagaggcctactgctagtctgaaggataatcattgaatcagaagtctgcaggtgggaaagaagtagccaaggtggcttacagggcagaagtggcgctagagaagattggagtggtgagaaagacttctcagcaaagactctgccacacttgctgacttgatggacaaggaggaagcccaaggatgaaggttggggctatctcaagtaagtgtgacacagtggtttgaaattcagagatttgggttcttggggttttctgatcacaaaatgattcttatttatggtaagattgtacaacttttaaatatgtcaactgagtttcaagtgatcacaggaagcgtgataa

SEQ ID NO: 28886 - DNA, 1178 bp, Mus musculus
gttgcactttcccttcctaaatatgtgagtcacagaattgttggcaaaaacatcccctcaccagcaagatgtctgctggtttaagcaacttggtctcttgatgccattagcaaaagtattaattgtccaaagcacctttgttcactaatatctatctatctatctatctatctatctatctatctatctatctatctatctatctatcatctatctacctacctatctacctatcatctatctatctatcatctattatctatctatctatctatctatctatctatctatctatctatccatctatctatccatcatctatctacctacctatctactatccatctatctatctatccatcatctatctacctacctatctactatccatccatttatctatctatctatctatctatctatctatctatctccctcatacttctgagacatggccagttttcttccctccctgctgttaagcacttggcagatgagggggggggtcccatttatttctgagtgagatggtgagcaatctgtatgttggctgaaaagaaaaaaaaatctccagtctgaattgggaagaaatctggtctctaagctcagattccttgctgtacagaagctgtgtatatacgtagcccgtttctgaagggtacaggaagggggcacggctgtcttcccttctctgtttacttacccaggaatcagtccattccctgagtccctttaccacaaagacgtaggagagaaacactagtaagcatttcccactccatagaacaagacagtgagcatcgctccttcccacgtttacttgtttgtgttccttgaacatcatttgtgcatattctgccctcaatgaggaccaaataaagatgatttttgtgcttagcagtttaaggtatgtggctgcatatgcaaaccccttttccactccagtcattactttgaacgcctcccttcctcattttgtgtgtacagtgctgtgtacgctgatcagtgttgggttttcgttttgttctcctttcagttatggaagtcccgataggcacccagagttctatttatctagctgtacaggctccttcagaggtttagcgtgctgcttccgatatgccacttgcggtagtggatcgtgtggagtgaaaggcaaatcttcctgcttaatgtat

SEQ ID NO: 28887 - DNA, 1237 bp, Mus musculus
tctatctatagatttccttaactgcttctatcattacttggttaagaaattttggggaaaactactatgcataggaaaaataaacacaaggccttagactgggaagttccttgtttccctgagtgtgcccccacccccacccctggctgtcagaatgattatctttgagaggtaaggggactgagactgagatttacagaaactgaagtagcatcctcaggccatgaggaaaacaaaagccccatcctttttttttctcattttaagggatcttcccttttctgatgcagaacatttagcattgccaagtctcctcttggtgtttgtcttagtcactgttagattgctgtgaagagacaccatgatcaagacaactcttataaaagaaagcatttaagtttcttaaatttgggggttccttaagtttcaatattgttacagtttcaaatattgtccaaaagccttggacaaatctttgagtgccattaactccaggactttctaagttgatggtagggaaagccaaaaaaaaaaaaatgttttccctttgaaggtgctgcttcagttctgttaactgctttgtaaggagtaagatttctgaactataaaatccccaatgtttcatcatgacatcaggatttcaaatatgtgcatctgaggctaactcagttggaccaagcatgatggtatgatcgaggccccagatagaatccaagcaccaaagcaaaacaaaacaaaaactcaaacaaacgaacagatagtcaggccttgatcatctctaagaactggcattcccagcttcagagaacaaagcaagttttgtccatgactataaccacagcacaatgcctggcacaggaaacagtcaataaatacttagttaatggagactgaacaaagagaaattctgattatctttaagggcatcataaacttctaagtagagggatgcggggtgttttatagtctttgcacacagacaaatgtaatcaaggtatggtgaaaacatttaccatttcagtctatagctgacctcaagttctgaatgccaggcctaagtgcttcatatgaaaagtgaaatcgcagtctccctagggttctttatcatggaagccagtttctgttttgtgcagagatgtttctctgtgttaaatttggttccaggtttgtttttcctaatagaacctatgcatattttctttcttatttgcaaaccttttattttataggaaatata

SEQ ID NO: 28888 - DNA, 1144 bp, Mus musculus
ctgagttggttgagattattaaagtcccacaaggctggagcatagattgtgatgaaagaggaggcatagtcttgttacagatgacaaaaccaaatctctggaccctgacacaaagtgctgacctaagcattccacttaggaaacttacaaatgtaagtaagtgtccaagtaccacaggcaaacttaacactgctcatgagaactaactccagagagcctattgatttgctgggccaaccacaactgaatacaccaactaggtgatgacctctggtaacaattcattccccagccagaagtctgaggtaaagaagtgaaggatgtgctcccaggagctgtagggagggcagctgcttacctcatggccgtattcttttctgttcaagtatatcttcatacccaacttaatccttaattctttaagaccattcattttaaattaaagtctgtcctattgacctcagttacaattgtccttgacaaaaacagatcatactctagtggatcatgctgggggttgggttttccaatacacattgggatggcacacaattcaacccatgggaggactatagtacttaggtttatagcgtttccatgtgaaataccacctctaaatcactgcgtgtctagagatgtctgtcctgactcaatggaacgaaatcacttccttacctttaaaccctgcattccaaatcttgaaagctttgtgttctacttggaatgatcagtagggaagaaacgaacaaactggatcataagatggcctggcacttagctcagagcagcaaagtaaatgaacacagggagggaagggcttgaatctgacctgtaggtaggaacaggaagactctttcaggcagggaatgttggaaataaatgttcaaaggtgaaaaagccaaggtgtgtattgggacgtgactgagcccagcaggagctcacttgcttgaaggagagtttttctagaaaaagaaggggcttcgctatgtttgtgtgaaacaacaaataacaccatgttgattattccacaaatctattcagtgtctttgaccacaggaaagcaactctggaaagctggaataagaaatttctacctagaattctagacaagccaaccaaaatatcaaactcccaagaatcacag

SEQ ID NO: 28889 - DNA, 1175 bp, Mus musculus
aaattttaaactggcaaaactaatttatggtattaaattgctatggtatggtataatggggcaagaaatgtagctcagttaatttgtctggcatttgggaggacctggcttcaatacccagcatggaaaaaacccacaatggccgtgttctacttctgtagatgtggtatagttttggccaagcactgtgtgtacagtaaaaatgctctgatctatgtaaccatactgcattcactttctgtgtgttatattcaaatttcttgtagttggatgaaaacaaggaaattgtagattcctaattagcttaaatttgaacagatcccccattgtaagaatcaaacagaaggcaagtcaaacaaggatcataaagaatattctaaaaggtcaagatactgtgcatttctgccacccgtggagcctcggccatgatcacccagctttgccactgtcacatagaagcagttagagcagatgcataaaagaatggatatggccacgttccaacataatgtacccttgccggtagtggtggcgcacgccggtaggatttgctgaaggaggcagaggcaggaggatcacgagttcaaggccagcctgggccaacataatgtacccgccaacggtgaacttcaaatattgtaattttcaacatgtcttgaaataactttttcagttattgaaaattataaagccattcttagcttcccatctatacaaaagtaggctgttagctagatttagcctgcaggtagtgacctttgccctaaggtgatgtgcatatacccatgtcttggtgggtctgtagccctggcctgacctcttgttaatccttctctcacctttgtaggtaggcagatattgcattatcttgtcaccatttggaaatttactgtcccgaggtttgatgaggccaactggacaggtagggaggtagttaaaatcgtgtttatacgttgtgagtaaatccatagtctcttgactcggaacatatgtgtcaggctggtggaatgtcaccggtaacattttgtgaagcccaaaatctctcctaggaaaagaataaacacaagtcattgggatccttgctcagaaaaaagacagtgttgtccccttggctcgtattaacaaatatttcattctaccctatctccttaccttctatttttctctcttctact

SEQ ID NO: 28890 - DNA, 1212 bp, Mus musculus
catatttagtccctaggtaccgttaagaagtggcacactattgtaagtatattgctctaggagcccttcattatgagagtcaaaagatgaagtatctggctattttgggtttataagtcactaaaatttacctatagtcggctgagcatttctgaaatgatcatttcctgtttcagtaccatgaacaaatctcaactctcacttctccaaaactgattataacttagtgtttcagtgccttcctgcacagtagtgccttctcctgcagttagttccctttgacgtttaggaactactttgatcatgtcaggcccttgcttaaaagcccattgatggttcattgtaattatagaacagcgttttggtataaagaccccttcttctctcctcccacctcctgctgggatcttttaccttgtcctcctagttcacctcagttctttgttagtttgcagactctaataacctttaattataccagttaggattaaaaaaaattatttattttcacatgtaggatatttttcttctaatttttaatttattttcatgtgtgtggatgtttgccaacatgtctgtgtacctctttggtgcctggtgctccctgaggagggagtcagatcctctgagactggtgttagcatccacataggtgctaggacttgatcctgggtcacaggatgagcagccactggggtatctcttcagccagctatagttcctttaaaattcacagcagcactttaaccctttaaacacctttgatctcagccttggggaggcaggcagatctgagtctagtctacagtcagttccaggacagccagtgcaacatagtgaggccctgtctgcaaagacaagactgaaggttcagacaaatgacattttctaccttgatgtcttagtttgccctccctagatccatggtcttccatcttttctgaagtatatagtatagctgttttgtgtgtggggagggtgtggtggtggggagacaggaattttgctgtttttgttcaggttagcttcagcttacagctgtcttctgcctcagtcttccaagtgctggaactacagatgtttgcctagcttttccttaatgtctttgttagacatctcccccgactttatgtgatttctgatccagctgtatacacaccttggtgctgagcatgaaaagtggtactaagtaagataaagaacatttggggg

SEQ ID NO: 28891 - DNA, 1153 bp, Mus musculus
ccagcaaccataaattataacctaattatgtacaaatgaatgacacaatgagatgtgtctctgataatagaaggcaagaacccagacttaaccatcaaagtcctaaaagatctatcaacccaagcaaactactgttcaatactaagtgaatgccaggtttggcggctcacatctttaatcccagccctcagataggctgaagcattcattttttacaagtgatagattctatcctttcttcataacattttatgatcaaaaacagtaattttatggtatatatatttcacaataaaaataactagaaagcaggtaaaggcacttgccaccttgcctgattatctgtgtttgatcctagggtaccacttggtaaaaaaaggtgagaaccaggttgtcctgtgacctctacacgtggaccatacatagtgtagacactcacatacacataaatttgcatacacatgaatgtaaaaaaataactgaaaaatctaaataacctataaattgagaaataaggccatgggcagtagtgcaggcctgtacacgcagcactcaggaggcagaggcaggagaacagcttggagttccaggccagcctggtctacacagcatgtttcagctcagtcaatgcttcacaatgagatactgtctttaaaaggaaatggagagagcttaccaacctggaagtgaagcaggatacttaaaaagtatactctttgcatatacttcctctgacacaggatcaaacgtaagaggagacatgggaggcaaaagatccacagccttaaaacacagaatttacaatatgaaataaatacatgcacaaacaaccataatgacaaagctaaataagttcatctacaagtgaattttctccctaacaataaattaccaaacatttattctgtaactatttgtatgtattatattttccctgcatatgtacctgtatactatatgtgtgtctagtgcccacagaagccagaagatagcatcagataccttaggattgcgttttagctggttatgagctaccatgtgggctagaaattaaatcctagtcttcttggaagaacagccaatgggcttacctgaaaaaccacctcttcagcccctgcaaacattttttttaataaaatacaatatttgcatg

SEQ ID NO: 28892 - DNA, 1197 bp, Mus musculus
cacaaaaagaaatactttgtttatatttgtatactttagacacgagcttccggtttcaggccccctttcctccttataatttaatggaaagaatgattctattattactatatcaccatcatcaccattattactatttttttttttcgagacagggtttctctgtatagccctggctgtcctggaactcactttgtagaccaggctggccttgaactcagaaatccgtctgcctctgcctcccaagtgctgggattaaaggcgtgcgccaccaccgcccggctactattatttttattttgagacaaaacccccctctctgtagtaatgggaggtgtgctgggattttaattccatcgccttgctcctccagattgctgttttgcttgcttgtatgtcttgtgtgaggttgtcagatcttctgggactggagttacagtttagatctgccatgtggattctgggaattgaacccgtgtctttttggaggcgcagacactgttagtaacctgagacatctctccagtctcaatgaattttgtcttttgtttgatttttgtttttgtttgtttgtttatttttcaagacaaggcttctggacctctttttgtggacaggctagccttgaactcagataccagcctgcccttgcctcttatgtgctggggattaaaacgtcccaccaaccatccctagttaaattaactttgttttgttttttgatgctttagacatttttatgcaacctcagttaagtaggtatatgatagtatgcaatcattcacttgtagtaggttatacatgttattttaaagcaattccatggcatacatgtaattttactattagggacgaaagtaaatttgcatactaaaggatgctcccccatttttttcctttgagatggatgattatataccatggcctccagctctgtttgcctctcttgcttaagtgttgatatcatgttaacttttggttgatgcattttcagaaacttttgctgctgttacatttcagccctcacataactatgctaccagaatagggtgatgaagtttccagaaacagggctggctgggcatgacggtgcatgcctttaatcccagcactcgggaggcagaggcaggtggatttctgagttcaaggctagcctggtctacagagtgagttccaggacagccagggctacagaga

SEQ ID NO: 28893 - DNA, 1729 bp, Mus musculus
gactcttaacatataagaagcatagttacatgcttgttgacaaagataagcggtgcaggcatatccagtatggactgcatgctgtgtcatacacatgatatgcccagaggaggagggtagatgtttcctgtaagaggcgggcttggatagatttgggctgtcctttttctgcatgcactttatgtagcttctagatgaaaaccaggcattttaactgctaaacgccttgggagatgctgtttctataccctccagattctctgtagttttgctctcagcataatcagaatagttactttgctactttggaaaatcatgatgtttcaccttaatatattgctgtcccctttaggtagtacttcaactgtgctattttctactcaagctccagtcgaggatgcagtcttcagtgaggttactaatttcaagaagaatggtgatagaggagagaaaaaacagaagcatttccctgagaggagctgtagctttagttctgaaagtcgagcggggatgctgcttaagaagagcagtttggacctgaattcaagcgaaatggccatcatgatgggagcagatgccaagatcctcacagcagcactgacatgtcctaagacttccccgcctcatgtcacaagaactcacagctttgagaatgttaactgtcatctagctgacagtaggactcgcatgtcagaaggcacccgggattctgagcacagatcatctcctgtgctagagatgctggaggaaagccaggagctcctggagcctgtggttggtgataatgtggcagagactgcggcagagatgacgtgtaacagtctacaaagtaacagtcacagtgaccagtccagagacacacaagctggagcccaagatccagtgaacaagaggagcagttcatatgctactaggaaagccattgagagggaggatgtggagacgggactagatccgttgtctcttttagccactgaatgtgtagaaaaaacgtctgattctgaagataagttattttctccagtaatttcacgtaatctggctgatgaaattgaaagttacatgaacctaaaaagcccactaggcagtaaatcttgtagtatggaattgcatggagaggggaaccaggagcctggctctcctgctgtgtttgctcaccctttagaaaggagctcgagtctgccttcagaccgtggcccgccagcacgagacagcaccgagactgagaagagctcccctgctgtgtccagctctaaaactctgactgggcgtttcaagccacagagtccttaccgcgcttacaaagaccggtccacttccttatcagcattagtacgttcttcaccaaacagctctctgggttctgtagtcaattctctatcggggctaaagttggacaatatactctcagggcccaagatagatgtcctaaaatctagtatgaaacaagcagcaacggtggccagtaagatgtgggtggctgtagcatctgcctatagctactcagatgacgaggtaagaaaattacactatgtagtctgtctggtgtaggaatgctttgtagtgctttaatgtatatgtatatgtttgtgtttgtataatctagaggtttctgctaagggtacttttatattttaaaaactttatacatgttctgttatataaagtgacttaaaataaatgatgtaaaaatacattgtcagaattgccaggcatgatggcactcacc

SEQ ID NO: 28894 - DNA, 1200 bp, Mus musculus
atcgaggtggatgacgagcgcaagctccgcaccttctatgagaagcgcatggccacggaagtagccgctgatgctcttggtgaagagtggaaggtaaggttgttaccggcatccatgtcccagcttggcgagcgcaagggctgttttgggttaagtttcattaatagaaccaagtttggggaaatgggccgaaaggacatgcttctttcttgcttgccgtacggaattcagggtcttaaaaaaagcctttcatgttcatgctagtaaaaccggggtagtcagggtaagtcaaaaggagagagatggctagtttaccttagttggaaacggagacaaaacgtgagtggttgaaattggtctcagttattctccctagtcgggtgttgaacctaagaggttaagaacctgcacttagtaggttggaactgaactagtaaaatgttgttattttatgttcaacgcagggttatgtggtccggatcagcggtgggaatgacaagcaaggttttcccatgaagcaaggtgttctgacccatggcagagtgcgcctgctgttgagtaaggggcattcctgttacaggccaaggagaactggagagaggaagcgcaagtctgttcgtggatgcattgtggacgctaatctcagtgttctcaacttggtcattgtaaagaaaggtgaggcttttgttgaagcttgcttgcttgtttattgagagagatctgcctcctaggtagtgggcattggcccaagaagttgtttcccaagtgataaacatttaatgtctctattttgattgtttctttaaggagagaaggatattcctggactgacagacactactgtgcctcgtcggttgggacctaaaagggctagtagaatccgcaagctttttaatctctccaaagaagatgatgtccgccagtatgttgtcaggaagcccttaaacaaagaaggtaatggatttggggggggggtgtattgtgctactgctgcagctttgcttgccagcccggagtctggcttaccagactttatgttcatggctttggggttaggaatggccaggattctgagattacgaaggcattctcattttaatacatttgaaaatcctttaaagcacttgatgtatatgtaggggctagaggacaacttgcaggagaggattttggagagaccgggttctaagctggtgtttt

SEQ ID NO: 28895 - DNA, 1183 bp, Mus musculus
ccaatggcacataggagttctaatgtttttatcagcatttcctcctactcttcattttgtcttttgctttttttcaaaacaaggtcttgcagcaacacctcaggctattatctagttcgtagtaggcatgctgactctgacccccaatgcagtttatagatgtaagctaccacacccactccagtttctccccatcactttgtaagatccctctgttcataccaatgcatgtgagtgtgaagttatacctcagggtaattttatctgcattttttgatggatgatgatagcgttattaagatagcgttttgaggccatctatatatcttctttgaggaaatgttcattaagagtttcttgcttgtttttaaattgggctatttacttgagtgatttggttagtagaatatataccctaatcaggtatatgacttacaaatatttcccacaatatttgaggtttttaatgtgcttctcaggtgaggctactcctagcctgggaacccatgaagacttaacttttccatattgttctcaaggcataattgtgtggaaagaaatttggggtccttgagtcaaccctgaagctgcatcctgctgggagctttgaaaaaaaaaagttggccttttagaaaagattgattcccttgaagttgaagcctttatggatccaggccttgtttgggggtctctgacttcctgactatagagaggctgggagtgtatctgcatgaacattagacccagcaggcatgtctaatgtcagggtgatgtatcactttccacaccgctttgtttccaaaatgttctctgtcttacctaaaacggtttgctcacatccagttaccttccttacgtcctgctcagaagcccttcccataacacaccaaggccataattctcttcagtatctaatgtgggcatttttttaatgtgtgtgaatgttttacctgcatacatgctcatgcatcatctgcatgcttgctgcccacagagaccaaaataaggcaatgaatctcctagaactagatttacagatggaagtaagccactatgatgtaggtgctgagaactgaatctaggacctctggaaaagcagcaagtgcacttaactgctaggccatggctcccagtctccacactataggattttgtctcatctactgtctggcattagccctta

SEQ ID NO: 28896 - DNA, 1178 bp, Mus musculus
ccagtccctggaatgtttacacacacgcacacgcacatacgtatacacattcaatttgtgtactctctttttaggaagaatttatttctactcagggatcttcttacatctaaatctaatgatagtcttgtaaatcaggggctaattgccaaaaaaggtcttgagctgttatcttttactacctatcctagtaaaatgatctgttggtgatgtgaattggttattgaccatgaacagtcaaaccaggtggtcctttgaggacttgttcagaaggtttaatatatctttgacttacatattgactaacaggtagtttggaaatagtatagccttgttgtgattaataaaaatgattatctcttggttccatgtctgagcccctccattaccttctctttgccatttgacatctgttgcttacagcccaaactttttctttacttctttagatcgtgaaccttatagaggaaactggacactttcatattacgaatacaacatttgattttgatctttgctcgctggacaaaactacagtccgtaaattacagagttacctggaaacatctggaacatcctgaggatacaacagctggacgcatcaaaaactatttttttttttggttgtgatttttttttgttgttgttgtttatatgaaaacactcggaatgatacaaccaaaagggaaaaaaataaaaatgaaacaaccttcagctttatttttctttaaagccagtcatcatctcttgataaaggagaggttacctaaaccagcctcagcggacactcctctgcaaggaaatccccaggaagaattagcctggatagccttgaaaacaagcagacacaacacaagaaaacttaaaagaatgtgtatggtaccgtggatctttctgtggtggttcattccacaggacgaatgcatattcaacacactgccttattacataactgatctatttattaccacatacagataaagttgtgagggaatgacaccaccagacgtcctaaatactcggtcccgcggatgctctttcaatgcagcgcccttgccgtcccaagcccagtgaccttattcgtatactgtgccactttccaccaactcttcccaggtcctttaacttgttgcagtctatggtttccatctttgttttcccagttccaggacatagtt

SEQ ID NO: 28897 - DNA, 1137 bp, Mus musculus
gcacaagtgtggatggagctgagtatgtaggtacatgtaggtgcacgtaggtcacagaggttggtagtagaatagtgggaaccctttgaaaatatcattgccatagaagcttcaggcacagacagtatttggagttcagcttggtgaactgatagaccaacggatactgttggggtccagtcaaaatttgcagctcagcaggtgatagagccaagtcctcactgtgttctgatgcttgaatttggcttgtacttctgcctacagccagccttattgtgcaagcaggcaccagggagagagacactacatccaaacaaatctatcccctttcctggaagccagattttagttccctgtaggaacaaagtgacaacagcatcctccttggtacagaagctagcccactgtgagtgaatttcgtgttgatgaatggttgtgcttgcgtgcgtgtttctcctcaccctaagtgtcttttaatcactggtttgctttcagacggctgccttgaacttgctgtgggagaagtgctgcagtgaccatgtggttgtgcggacagcctgcagcgagggactggtggcacttgtcgcccagggtcatgcagagttcagctatgttctcaatgggatactcaacctgactccttctgccaggtacacgtgctgccatgtttggttaaagcttttagaagcacatctaactgatgtctgctaaggatcacacattagtgctgcagtaatgaactgaccaattttaagaaggatacctggcataagcagttctactcacacagtggcacggttcttaccttgttttggctgtctgcagtcagcccttggcaccactgttagaaattagcatgagctgggcgtggtggagcacgcctttaatcccagcactcgggaggcagaggcaggtggatttctgagttcgaggccagactggtctacaaagtgagcgccaggacagccagggctatacagagaaaccctgtctcgaaaaaaccaaaaaaaaaaaaaaaaaaaaaaaccaaaaaagaaaaaaccaaaaagaaattagcacgaatttttcctaaatttttgataacataggaatccgtcttctgagtatttccagggagcaagttctttgaacttgctt

SEQ ID NO: 28898 - DNA, 1151 bp, Mus musculus
gctaattccagatgcagtcaagtcgacaaccaagactagctattacaacctacctttgactatttggcacataatcatatctctttatgttgcgcttaatttctaaatgaaaacagtagccaggtcatcattatgcctaatatgatataactattccatgaataaccataaacacgtaatatattttagaaaaggtagcagtgttccttgagggacattcttttactgtctcatgacttgaatatgataaccattgatattatttcaaatgtaaaaaaattgtggaaagttaacacaacaatttgcacaaacgttattaacaaagtctgacaaacatgcacaataattatagcccttttctttctgcaactggccacatgaccttagctggtatttagctccaactcctgtcctcggctacctattctgtattatctccatccccaataagctccttggctgggcttggctctttttctgaggagtgatccatcttcattcctggaagtctgggtcctttgtcatcatgcctgtattggcttattgtagactcctgttgactttagtcaaacaggacatggtagcacaaagagacatcttgaagaatcttttgcatttcagacataatctttcttacctccagagtggagaagctatccaatttccccatagtaatctggaccaataacttctcataacagtgttatacctttctgagtctgttttcttaagggcatcagaaccttaatgtagcctggggaattcttgcgcatgccctggctcgccagcaaagcagacgccacaacaggatccttctgcacacgtttattgggagagcttgattgcagaggcgaagagaccccaagcccagaactcgtgctgcttatataggcttaggagaggcgtgtctcacaactgaattggttatgcatgggttatgcttaccacctcatttgcatgcctacatctgattggttaacttgtctctcatctgattggttaacttgtctctcatctgattggttaacttgtctctcatctgattggttaacttatctctcatctgattggttaattctcaaaaccttatcttggcaaaaaaaactttactgtctatgtatgcgtggtggccagcggtagccagtgccacc

SEQ ID NO: 28899 - DNA, 1199 bp, Mus musculus
acagaaggggatatttaggctatctggataggtgtctttcacttggcaagaagggaacatggcagaaataaggccatagggagagtcatgatggttccttatttgaggtcagaggctgtatagttttttggcagtgttgtttgtttttgtttgtttgtgcagtgaaagctattgggtggtattaagaacataaagggcaacttcagcttctggctagaggacactataggggtgatcacgaggaagaagtgactaaagatacagcttttatattagtatatttgaagaagacaaagataataactaggcaaggctttatgagaatggttgtaaaaggaggactctgaagatggagccacaagaacttgccagtagatgatctgtaagaaatgaagaagaatgaaagctaggatacctgagcactgtagtactttgttcccatttgggagcattgaaggcagagatggtgctcagtggtttcctgtttgcttggtgaagttcaacctgagacagagctggatgcctgtgcaccggttaggaaggaacatgcctcttctggacatctcacatttatttgggttttgaactcttgttattttattccagcattggaagaattctttacatctcttgtgagacaagagatggtgaatatgccccgtgggatatatcactctgcattgaaaggaggcgtgcgctcagaccaagggaagacagtagcaggaatcccgaacttcatattgaagacatacgaaacaaacaagcaaccaggattgaaacctggcctggcaggtaagaatactgcacttggtgaagtgcaggtttacagtgtcatgtctcaacttgtgcttccatgtgaaattgtaataagttacatggtaggacattgcttggctgctgctcacatttacacacagctggaacagttacaacaaacaaccgaattgaaaaggaattcaaaaaatgcagaagcaaagataaatagatagcttcaaattccagaatggggagactattttagacctttttaccccttggaacatattctattctaactgtggatttgattggcagctggctcaggccagaggttaggtcttgttggagaagtggccaacaaatgtatggaaacaattttaatattcttagttatcagggaaatgcaaatcatgaatctattgagactccagcttggtcca

SEQ ID NO: 28900 - DNA, 1149 bp, Mus musculus
ctggcctgtagatgttaactttgcctaatagtactattcttttcttgggacctgtgtcttgacagtatggtcaacatacaataatccctggttcctacttgcccatttcttttagatcagataaatcagaactatttgttctttctaccagtagttgttttaattagtaattacaatattaccagatgttgtagtttttcagacttgtctttttgttgttgttgttgttgttgttgcttttttcccccataaaataaaggttaggggctgtagagcagactcagaggttatgagtgcttgctgcttttccaaacaacctgactttggcacctagtaccttgttgagtggctcagtgtaactgactgtagctccaggggctctaatacactcttctagcatctaagggcatcatgtgcacacactcctacacaggcaacaagcacagacagaaaatttaaagtaaaatgaatcttaaaaatataatcaaacataggggctggagctatagctcagtggttaagagcactggctgccctttcagaaggctggagtttgagtcccagcaccctcatatcagctcacagcatctggaaatccagccccagaggatcctggtcccttttctgccttccttgacacttccttgacactaggcacacacatggtgcgcaagcaaacgtacaggtaaaatactgacaagtaatataaataatataagataaagctaaataccaagagagctattggcttgagatgggtgtgtgaagtactccttaagagaacagatgtcagcactgcattgttctcagagtattccccctcctagaagagactcatcacagttaatctgacttatattttcctgaatttgaattcctagctagggttattcaggaaggttcattacacaaagctcctaacctgtagaggatatacatatgatctcaatatgagaatatttaattatgccttattcctaagaatcattctaaaggaatttatttatttaatgcccctctcataccccgtgtgtatgtgtgtgtgtgtgtgtgtgtgtgtgtgtgtgtgtgtgtgtttgtatctcatctgcctgtctgtctgtctgtccatcagggcttctctcatgccacagtagaatccatgtttat

SEQ ID NO: 28901 - DNA, 1136 bp, Mus musculus
tctctctctctctctctccccctccccctccccctccccctccccctccccctcccccccctccccctccccctccccctccccctccccctccctctccctctccctctccctctccctctccctctccctctccctctccctctccctctccctctccctctccccttttctctccctctactgaaaattgaaagttaagcctcagtcaagtgcattactaatgaccaacagtcccaaccctgcatataggttttgatacaaacttttccttttgagaaaagaagtcaggagtcagagagcaccttgagccagacagaagtggaaccctctgtctcacttcagcttcagagcaccacagctcctgtgcaagtgtggaacagtcacgctgtatatgtccctgacactgtctcttttggcatccaagcaccggctgtattctgggagttggacttgccctgtccctcatgagccacagcagccacacggagtcccgggtccatgtggcagcatctctgcggaagctgtctacctacctagatgagagcgggagccagagcaggacatttcaggaggtaggcagtgggccccggtcctgctctgctgactttcgctgctatgtcactgctgtttttcatctcatggtttagtggccctccaggtgaaggtcccacttagtgtcgcagtacggggaggggctgaatgacaagccatacaataccatgttctccagctcatactcagacgggacaaggaccactagagaatgcacacatcttctggaggttaaaccaaggcttgtcctcaagtgaaatgtaactttaaaaacaagtcagattcaaacttaaggactcacacataagtgcacagtaatatgaaaattatggaggaaattccctttaccacatttggcgaaaaggtttttttctctggtgtggcagaaaaatatgcgtctagagtttggtgtgacaccgctgacatgtgtgacctacgctgagctgagatgctttagctatgggtcatgtcctctctgttgtggccaggtaaagctgagctgcccatgcccgcggttgggaggggcagggatgaccttgtggccgggccagattctccctctcattagagcagattcccag

SEQ ID NO: 28902 - DNA, 1169 bp, Mus musculus
tgtgacccataacacaatgggaaacacatacattacagatacatgtccaggtaaagtttactgtgagtacacttgcttcattgatcataaaagctcagccttcttataggtgtaagggcttctctttaattaaacacttaatggagataaaccagttcatgtctaaaagaacacaagtttaaagtaaattgttacagaggcagcatctcatgtaaatagtaatgacattaagaaaaataattatcactagcatgccaaacatcaatggttctgcaaaatttctcatttactgctttgacacctttttgatcaaaatgatattttcagacaaagcatagctgtgtcaagtgcatcagtctgcctgtgttcttttcctcctagccaccctgctatccctgagagttctcccagagtttaagaagaaagctgtatggaccagagcgtatgggtggtgacagtcacaggacccagcaacattctccatgggaggagacagaccagagaaacagaagctttttaggactgctatctgagatctatgaaaagtgatcctcaccattggaggtcatgagaagatggctacatactgacatctcactgtgtgcgtggccaggagaagggtgcattccttgggtacctgggcatttaaaactgaaatagaacatgacttctatatggacagagttcattgtaaaagttatcttttctttgtgaaaactagagtatattttctctccctcaagttctagtaaaataatcttatgagttttgtgcaatgtgacttttatttttaagtgtgtgggaagattttgccaatgaaagcaaaccatacaggtgacaaggttgtgataatctattttccatgaagctgtgtcattgagttttattcttgttgataaaacccccacttaagagaactgctaggcacattccaatcactaggcatgatactgactggtacccaagttaaactcatcagtgataggtagaattcccatgctgggttgtcatgaatacacgtgaaagttatccaattcacaacattagtggccacaaaggaggctattagttcacaaaccaagaaactcatggttggtctgataaatcctgatgctgtggtctctttctctggagagcatgcctcctacttagcaaaacgtccgccagct

SEQ ID NO: 28903 - DNA, 1143 bp, Mus musculus
aaagtatggctcaagtgtaactttttaaaagatctatttcatgtgttcataagtgttttacctacctgtgtctatgtgtactatgggcatgcctgctgccagaatagagggtatggatcccctggaactgaaattatggatggttgcgagctgccatgtgggtgtccaggttctctttaagaacagtaagtgctcctaagtaatgagccatcacttcacatcctacaactgtaagtttttgttctaaagtttttcttgagcctttatcaccaacttcctatttgcctgctcagggtgctagcatgtaaagccaaacagaaaacaaaatcggtataaatggggaaaaatagataatccttctatttcccattttatataatagttgtgtccttgtggtccaaatgtctatattccatgcatcttgcaagtatattttctgctagttgcattgtttttgttggaagtgaaattgtgtaatacttggtttcgtggtgccccacaaaaagcactggggccttaactagacaatctagtttgactgtgctgggcttcctctttagttcctctccatttgctagtctgtgtaggacaatgacagtataaaccaacacacacatgaaggatgccaaaccaaatatctacttacctatgaagagcatcatgaggtacagcttcagcacataagggaaacaggtagataggtcgaacggaagcacggtggagtttgtaccaaatgactcaaaataaggcagtgactgatagatggtgaatgctgtttaaagaaaaagcatcatgaagattccctttctgggttacagaagggtacgtgcatgtgtttctaagaaaggagatttcgaattgacaataacagttttgtggtgattgccgagtcctttagttaaaggttcagcttgacacagaaatctgtggcatgattatgtgtcttaaattgttctagcattattgttaattattgcccattgtgcactgtgccgttggttgaatccacacatttcatgcttacatggaaagactatatggcgcttcttaaaatgatgagttaaaaatacatctgtctcctcgctcacaaatagggagaaagtcaggatggaaagtgctgcatactattttcttcttggagtt

SEQ ID NO: 28904 - DNA, 1165 bp, Mus musculus
cttctctgaattaagtaaagggattccactatccagtctgctcaaataactgtcgatggatgttctgagccttcagtctccatctccccacactagtggctgtaaagtctcattgtttcctagcattgcttaaagtgggacttcatttttcaggaaataatctacgagtgaggcacagcaaaacacatttgcatgtgagcacaaaacagcgttacctttgtccaagaaggtacctgttctggcgtgcactttattaaacctcagagaaatgtacctcaaagaatgagtcccttaacaaaaaaaatccatttgtcttagagggaaggatcaaaccagagctgaccacacttgccccaatcaaatatacatcctgcctcagtagctaagcttgtgtcatccctctgtccccaattggctttgttgtatgttttttgctctgctctttggagattgacattaatatgtccagccattcatagcagcactagactttttgtatgataaatttctacatggtcagttaagagtctaaaacacagggtacttaagaaaggcctggagttacagttttcatattgcccctgagtgttctaggagtgtgctgtggaggatgaagaaatgtgttggggacctagggatatgggaacagctattttgatgttttcccagaaattgaaattcttaaatccgttagtttccaacttggattaaatgaatggatggatactttgctgttcatgagctacttttagaagctgatatttaatacatacatgaaatttgacatatttatcagtaaaatattacaattctgagcccttagggagtaattttttcctttgatgtttatccctccagccagctctggctgcttttgtgctgttaatattgatctctcagattgttaagtacattgtgaaattcactgggtctctgaacagttactgtaactttagggaatactaccaaacacaaggaaaggagggaaataacagaaaagtcctttttttttttcatttttttaattctttggtttttcgagacagggtttctcggtatagccctggctgtcctggaactcactttgtagaccaggctgtcctcgaactcagaaatcctcctgcctctgcctcccgagtgctgagattaaaggcatgtgccacca

SEQ ID NO: 28905 - DNA, 1642 bp, Mus musculus
aatcatgtgtaaagaagaatattacctgccatagtaaaataatcaaaactatctgaatatcaaaaaaaattagctgtgccgtgtttccgttatacttaggttatggagcaatcaagtggaaatcatgtttcctcacgaagaaatgattaatctttttctctacttttaaatataatcaaataataaagctgtaaaaattaaaatggacttagagaactttgaaactcctttggtggtgaagtgaagacaacaacaataatataactgcgctgtgtatgtgaatcaagatatataagccaaataaccccctttcccaaataaagaaataaaggaaaatgctgtgtgaggagcttactaaacctttgctaagaaagatcctgggtcaccacacagctaagatgatgtaactgagaaagccaaggccggtgtttaatgcaagccagtgtgactcatcacagtgtatcgagagttgacacataatcagttggcaatttttttcttttgtttaaaagaagaaagtagaagcctaactttttatttttcaaattactgttgttacaggtgccctacagcgcccgtaaagggtctgtaaagtgagtgtgcctgtgtctgaaattgacttcaagataataagctgttgattgtaagcaataaatgaattatttgctccagtgttaatgtcgagcgaggccctggataagtgcaattgttacttccgcccatgttgcagtgctcccatctctggctgtaagcagtccgtggagactccgtgaggcctgatcagggctttaggttgtttttactcactgcagtgtcaacacttctttccccttagccactgcggggtgggcatccgttttgttgcctttagaaaatgctgctctcttcaacatggagaatgactttcttcagtggcctttctagcatcatgtgcaggcttcttccccttttccttaatccttcatcatgatgaaacatgcatataatcactgggtctggctcaacatgatgctgtccgttctgtccatcttcctacgggtatcgtaattccattctttttctgacaagatgaaatctccttgtgtatcctttccgcatccttatccatgcatgtgttgatggacgtgtgggctgctcccataatgtacctgttctgagtagtgtttcaataaacatcagtttgcagacttctcagatgatcagattatacttgagcgtttgtgttgggtcttagctattgctgtttgtatagaaactaaactccactttgagaaccactatccaaaccatttctctggttgttctttagattccagacctcagacctagtcaagggcatcacttggtccatcgtacatttttttttcacaactctttattggttctaattggttgaatttcacatgcacaccaaaccactcatctcccctcccctcatgcccactctccacccttgccccctcccctgccaacagaagcggtagtgagggtctcacggtgtgtcctacagtatactcttggcttgccagtgttggtggcattgagttgctggtctggtacaaggccctttgccttctgctacactagcaatactggaacctcactgggactcttcatatatcctgttgttgccctgtagtag

SEQ ID NO: 28906 - DNA, 1100 bp, Mus musculus
gcgcagagaagagccgctgcgtgtacccgggaccagggcctgcacgccgcggcggaccggtaagtgtgtcccggccaggcccccgcgcggtcgggcagacacgaggccgcagcccgaggacgttgtttattttcggttttaagcgcgagcatccccggctcttcctctttccccgccccgcgtcgcctccttctccggtcccctcccccctcccggctgcccccttctccgctgcctcctcgcctccttctccgcctccaccccggcccccgcgaaacaggaaaagtgggggaaggagaaaaaggagcggttgacccgagggccgagttgatcggagcgccggccggggacagaaggagcgcgcttggtcagtcctagctccgcgcgggtccggagctcggagattgagaaagcgggaagtcaagcccaggatccccgtagcaggcctgccctggggtccagtgctcacgggacagagggccatccgtctggactagttctgagttcaccggcgggagcctagctgatctgggtggcccagatgtgcaagatgacgtgggacccaggctagcttttggaacctggattagcggccctgagacttggtggcctttcattacgagcgcgggcctagtggtctggctgcagtaaagtagcaatccacagcagggtgacagctggcagggtcttatagagcggattccaaatgccagtactagacataggaagatggcaaggcctggaaataaccaaactaacccagcaaaggccttgctgcaactgagagccgcagggcaggtccagctgctgcttttccatctttccctctagtatgtgactttgcagtggaacctttcaaatctaggatcgaagaatggatccgttaaataaaatgagttttgagggctccctgagtatcagtgtagggttaaaacaaaccagtgcataccttgggttagctccacagagaatttgaatttcccaaataccgtgggtggccctggggcttcgggctaccctacctggaattttctccctcttcaaaaagctgctgctcctccaggtatctgggcagaaggcattttcccacttcctagggc

SEQ ID NO: 28907 - DNA, 1219 bp, Mus musculus
accatttatttgacactgaacaaccagctggagtcctcttccctgggaaggatgaccttgcctgctcccaggtttcctcagtgtggacagtcttttcaagctccaagtggcttttgagaacagagtggttgtttgaaatatttttaagttgtttgcttctatccttcctctataagaaaaaaggaaacatggcaaataaatttgtttcaagaagacctatatcttgatctggaaagatctgcacaaatattttgatcccatgtaaactacatcaaacaaacttttcagttgtttattttctaagttaggctgctttcagggataaggattgtaaaacctggcattgttgacatgtattttgctttaatattttttttgcagaaaccagaaccttccagttttattgcatggcagaactatttactgacttgtctttgcagcagattattgcatttaaggtgccatgaccgtctaagaaggcattattatttttaatcattgttattacttattatcttttatttcagctaaaaattgaggatgaaagtctaggtgactttctggtggctgtgcagatgagaagtcggacagtggcactgcagtttgctctgattgactctggagcctgtgtttgaagctacagcaatacaacagtctgctccagcgctgagcttgtaggaaggcgaccactccaggccgactcaatggctttagcctccagagttatcgtcggtgagactacaccagagggttcagtttttgaacagcatccttttgttgcagacccttcgaatccaatccttttaaagttcctaggcccagataatattactaccaccgttaagttgcatatgggaagccaggaccttggggcttgggaagccagcacagttgttttgtgaatggattcgctgccttttcgttttctattgctgtgatgagacactatgtccacaagcaacaaggaaagagtttgattcagtttacaactggtaatatacaacccaggcagtcggagtaaggattgatgcagaggccatagtagcgtgctgcttactggcttgcttacgctactctcttagagtaccagaatatcggtccattccctcccatccccaccacatacaccctttgcccagggattgtaccacccacagtgagctcctacaccaatctcaaacaggaaaatgcacacaggtcagtgtggttggagtacttt

SEQ ID NO: 28908 - DNA, 1631 bp, Mus musculus
gtcctgaggacttgaatttacagtgcatcagattcgttggctaattctgtctgtagatagtctagcttcagctgtttatggtgatgctacattttcgtttataaatatgtttgtggtaaaaaaaaaagaaaaaaatgagtataaccataggttttgaacaaatttccttacatttttcatacaaaaatcataaatatctgtatgctattgaaatttaactttgtatgatgcttaaaccactatttggggaaataataaaataagtctttaccatgtatgaaagaaattttaaaaaatacaaaatattttctgattagcatctagcttataataaattttcaaaaaagctgaaggcaactgtggccttcatcaggatgcactgagaactatatagttacgtcctgcgttttgtataaactgagatgctcatgtgcttccccttagaacaggcaatgtgctatgcataacatagttgtacattatctttgcagttgctttgagttttattttttattatttaaaactgtagttataaaaattttcagtatagtacagtacatatactgtgaggcgcgtgctaaagtgaacaagcgagttttcatgctgacccactcaatgctattcagaactcaattggcttagcactttctcatatccttaggtgcatttagattgtcagagttaacctgcgttaaaaaaaaataaaataaaatacatgtatatatttaaaaaaaaaaataaggtttcccttgtgggcaaacagcagctacacgcttctttcctgtgctactgtagcaaaccacagcattgatgagaaggcatgcggactgtgcttcacttcacagtgtttacccgagcacttaataaaatgtaaggctggtatttatttgaagttgtacagtatgacttaattcacatctgttggaatagaaaatatattctgttgagtatttaagaggctgtacatgttttcttttgtgtttggattctttgtgctttttcatgttcggtacatcaataaacaaagttgaagggaaagaactgtgtatctttaaatacatctggattgtggggtacctatgcgcagtctagttcaaaaataaataaataaataaaaagccttactctctttaatgaaaagaggtgttctcagaggtcgagttgaaagctgtgctatctaaaaggaatccagaaggcaagttaactgaagggggtggggtgggggggagacttaaaggaaaggaaaagaacaaaaacaacaacaaaatatcaaaccctaaaagagaaacaaaaactgtgacagaatactcttgacttcattaactaggtgacttttacagggacgtgttgtttcatcagctaggaatgcaccgttaaccctcgagcattttcaggagtggttactgcacaccctatgacttgggcatggcaactttattctgcctctgtccctaagactgtgcccaccagaggaggtgttgggtgacacttgtgttgagcaactgctatctcattaagagacaactttctgttaggttaacaaaattgtgaactgtgccagctccttccatgcttcatttacacatttaatcacaacacatctccggaaggtaaaaggatagaaaaacagt

SEQ ID NO: 28909 - DNA, 1197 bp, Mus musculus
tgattttctcagtatgggatggttcaaactagtttatcttcagaattaatcttagttcatggcttagctctctaaaatggcttaatcccctgagtgacattaaaagtatcaggcgtgtagtattaatcacagcttcctgacaatttgctgacccttctgagaccccctgttaagtattatgctaaattgagcaaaaatgcccactatgtactgtaggtttggattcttacatagtatctgtaaggtatgtttcttaaaatgccatctggctctcactgttagctgtttagtaagaaaatgttttgatttggctagctgcatgaatatttttatgctaaagattttttccttcaaataattgatggtatgtactacagtaatttaaatattttgtacttagaacatggcgtttgatggatgatgaatagtctgctttctagtaagtaaaaatattcttttgagtacgtgaagaaaatatatcctagtctgtaggcacagttaaggtacttgtgtgtgtgcacatgtgtgtgtgtgatgtgcacaccataacaatacctttttttgtgtagtacctggctctttttttctcttttcctttttttttctttaaatctccctccccttttccctccttcctttctacttcctcctcttttggtcttgccagctctgacagttttataagttgttctttttatccattctttaacttcttattaaaaagggattttttaaaaattttatttatttatttatttattttagcttggtatggtggtgacacctttagtaccagcactggagaggcagaagcagatagatctaaatgagtttgaggacagcctggtctacaaagcaaattctaggacagccaggactcagagaaactctgtcttgaaaagccaaattaaaaaaaaatatatatatatatacacacacacacatatatagacatatagacatatatacatatatattatacttatatataatataagtatatattatgtaatgcaatatattacatctaattatataatcaatataatattcatacttttttaaagaatgaaaaaacacattatagctaggagaacttgccaaggttaaaattccttcagaggtcaccaaaacactttgagctagatttgaactggttgcagttgtccgtggacctcgtgtgggctttcacttaat

SEQ ID NO: 28910 - DNA, 1349 bp, Mus musculus
gaagctgttcctgaagtatctgaaaaatatgaaattagctctgtccccagcttcctgttcttcaagaattctcagaaagtcgaccggttagatggtgcacatgccccagagttgaccaaaaaagtccagcgacacgtgtctagcggagcctttcgcctagtactaatgaacatcttaaagaagacctcagccttcgcctgaaaaagctgactcacgctgccccctgcatgctgttcatgaagggaacacctcaagaaccgcgctgtggtttcagcaagcagatggtggaaatccttcacaaacacaatattcagttcagcagctttgatatcttctcagatgaagaagttcgacaggggctcaaaacgtactctaattggcccacctatcctcagctctatgtttctggagagctaataggaggacttgacataattaaggagctggaagcatcagaagagctggacacgatctgtcccaaagcacccaagttagaggaaaggctcaaagtgctgaccaataaagcttcggtgatgctctttatgaaaggaaacaaacaggaagcaaaatgtggattcagcaaacaaattctggaaatactgaatagtactggggttgaatatgaaacttttgatatactggaagatgaagaagtgcgtcagggattaaaaacgttctcaaattggccaacctaccctcagctgtatgtgagaggggatcttgttggaggattggatattgtcaaggaactgaaagacaacggtgaattgctgcctatactgaaaggagaaaattagtgaacataagcatggtgtccaaggactgcaagaagtaactaattaccttggaacagtagatgatttggtcctgagaagtggactaacagtagagatacaacacactcagccatgctcgatgcacttcaaaaggtgtgctgaagaaacatgctacgttctccacgaagcagagaaggcaataaactcttcagactcagctagaaaaaaaaaaagaaaaaaaaaaaaaagggaagtagacacaataaagaaaactcaaagcaaggcaatgctggagatagaaaccctaggaaagagatctggaaccatagatgcgagcatcagcaacagaatacaagaaatggaagagagaatctcaggtgcagaagattccatagagaacatcgacacaacagtcaaagaaaatacaaaatgcaaaaggatcctaactcaaaaaatccaggtaatccaggacacaatgagaagaccaaacctacagataataggaattgatgagaatgaagattttcaacttaaagggccagctaatatcttcaacaaaataatagaagaaaa

SEQ ID NO: 28911 - DNA, 1196 bp, Mus musculus
gaacccaaaccattttctatcatttcctggttacagaagagaaactatatggtcttaaattttattactgcattttgaacattttcttttaaaattctaatctatattacaagaattatgtaagtaattaggatacataggggtcccttggtcttgcaaactttatatgccctagtacaggggagtgccagggccaagaagtgggagtgggtgggtaggggagcagggcagagggagggtacagggaacattcagaatagcatttgaaatgtaaataaagaaaatatctaatttttaaaaaaatagttaaattactgaaaaaaaagttattaaagccaaccctccagtttccctttccatcagatcttgacactggtcttggtggtcgtaaaagaggaagagtggcctgacactggcctcacagcgatgcagttgctgtagagcagcaggccaaactcagacatgcctgggctttgtgaagtgggaaaacttgagaactgtgcagtagtattgctaagtactggcttactttcatgttgtttgtttgtttgtttttaggggcatgtaaccaatgaagcagccattatatatgatttggtctacacttgttggaaaaattccacaagaggatctcctggaagctagcagaattttttggctagtacctagccaggcagtcattggaatcagagctacagtcagattaaggccagcctggcctacattgagaaacctcattttgttaaaagtgaaatacttttcagttagcatgcaattggttcaataaagacttttgggaagtgtcaaaaaaaaaaaaaaaaaaaaaaaagctgaagccagataaagagagagatttggtattttcctgacatgatggatgtagtatttggggatggggatatatgaagagaagggatgcacactcaatttgataaaatacaaacaaattgttcaaagatgacctagtcggccatcactgcaaagagaggcccattggacttgcaaactttatatgccccagtagaggagaaccccagggccaaaaagggggagtgggtgggtaggggcttggggggatgggtatggcggacttttgggatagcattgaaaatgtaaacgaggaaaatacataataaaaaaatattaaaaagaaaaaaaaattgttctcattgcctaagatcttcacatttcttcag

SEQ ID NO: 28912 - DNA, 1660 bp, Mus musculus
tggtccaggtcttacattgctatctaattctcaaatcagctttctttgaaaagtggttattgtgcttctgttttcaaaaggaaaggtaatagaataaattataataggaaggttaaacatgaacataaaggcatgagtactccatgtagtctagtctacacagagcacttgccatgatgcagcttcctggaaagccacaggtttgtttctaaacagcccagcaactaaaacaaaggagacatcctttaattgaacaattcattatgtctatgacagtgctgtttcttctttctttttttggtttctccagacaaggtttcattagcagctgttctggcactcactttataaaccaggttggccttgaaccccgaaacctgtctgcctctgcctcctgagtactaggattaaagccaccactcccagctcagtcccttttcttaagaagtgtacttatattggtatgtgtatgtgtgtgccttttggttttatttgtttttcggtactagggaccaaacctggttgcatgttggggaaggtctactcactggattacattcccagttccaggctttcgtcttgattatggaagaaatggttttataaggactttgttaaaaatggtgagcagtgatctcaacattgccattatggagagccatgggtttcctgacttaatgccatatcacagtctaagaagaacaaatttttttccactaaggggaagaagattccgagtgttgagattaatacaggaaagaacttctagaatatcaaaagggagtgaggaaatgtaaatagaggatgtgtgctttactgagtattaaattccaagttcctgtgtgtacctgaactttaaacttcatgttgctgtttcatttatgtattcatactttacctgtattgaattgagagttaaatttttatatcagaattaaatggtaaaaaaatcatcctggtgccattataacacttggcttgttaatacatccattctagcatgcaattttaagtacaatttatgttatattttgaaaagcagggtgggtatctttgaaaaaagaatggatgtggtcttacttaaaacatgagttcactcttcagaatgtaagaggtggcaaattgtaaatacttttgtttcttatcactggcttttttataacttttatttgtacagcctaacaaaaacataatctcacttgaacctgtcaaatggtggtttacatattttgtttttctttaaacttttttatagacctcttaatgttttcttgaatataaaagaaataaacattcatttagtaaagcatacacacatcttattgactgtaatcctactaagtagaaaaccattcttagttttatactaccatgacatgtatgtaaatatgcattttaatttttcaaaaagggatgtattggtcagaaactttaatatcccattatattaatatacccattttctagtatctgaaactttcctgcttttgattatcaagcaatgctattaaagattgcacaacaatcttaccattcccttaggaatatattttatgcataaaattgatggatcaagttaataggcaattttggattgatgtctgtctaaatcaactccactaggacaattacaggttagtgaatctcctactgtattttc

SEQ ID NO: 28913 - DNA, 1621 bp, Mus musculus
tctttattcaacaaatagttttaaagtaaggagctgaattcaaagcatcacttggtatacatgaggatctcctcattggggacaaccacatcttgagggccagtatttagcattaaaatacatagcaacagaccaaatctcaacactgtgcaaatataaaaataactttttatatattctaaaaacaattgttttgtagtgggaaaataaagtacatttgaataataggtataaggaattttctagatttttttttatacacgttaatgaatatttctttttaacagacattgtctttcctgcacttgacattcttcgcctatcgattaagcatcccaatgtgaatgagaatttctgcaatgaaaaaggagaccagttcagcagccatcttatcaaccttctgaaccccaaaggaaagccagcaaaccagctgcttgctcttaggactttttgcaattgctttgttagtcaggcaggacaaaagctcatgatgtcccagagggagtcactgatgtcacatgcaatagaactgaaatccgggagtaataagaacattcatattgctctggctacattgaccttgaactattctgtttgtttccataaagaccataacattgaagggaaagctcaatgcctctcagtaattagcacaatcttggaagttgtgcaagacctagaagccacgtttagactccttgtggctcttgggacacttatcagtgatgattcaaatgctatacaattagccaaatctttaggtgttgattctcaaataaaaaagtatgtctccgtatcagagccagctaaagtgagtgaatgctgtagacttgtcttacatttgctgtagcagtggggaaaagacgctgaggggttttctttttttgttttgttttgttttgtttttttccacattttacatgactgattgcagatgtttaaaaagaaagaaaggaaaattggattaagttcagatcttgtaaagttgtgttgaggagaaacaaattataaataaagtttttgcactgatggttgtgaggttttcctgtgtaatggagtagattttcaagggtgtagaaatgttaaaaactataaccaataacagcacaattataacagcattttcttccttaccttcaccactcaggagaacacagaggttctataacctgtttctgatctatgacatcttgttcagttgactgttctcttttgtacattagcttctccactttcactgttgtattctttcaatagcactgatgcatttcaaggtcttcttttaggatttacttgaaaaatcatttcaattaagtttgttataaattgtaaattgataaataacaataatttcttgagccatttgtaaatagaaagtatcatctttcatggttcaattttacatgaagaaagcacattggtaagctgttatattacatatcatttcagacaactgaggccttaaatgagtatggcttaggagtttctttcactatatgaggtaacttcattttttctagttttgatatcttacaagttaaatcatttcttttatccttcaccatttgaagtagtagtgtcatctttcatttcagttttgtacatgttgatcatattcatt

SEQ ID NO: 28914 - DNA, 1127 bp, Mus musculus
aaggcacttattaatgtattgtgctcccccaaatagtacatcggtttctcgtttttattgtatactaaaatagttgtccagatgtatctattatactatgctaagggtaggaaggtagtagttcattgagcaaatttactttactaacagtagagttcattatcttaatttttgtttcagttccccaaagatttcttagagcagcaatacctgataagtagaaaagtggtggggaatgagaaaagggcacttgcagtattcatcccctgccctttgctttcttgtttttcctgctaatcagtgtactcgtactgagacatcacatcagatttttcccaatctgatatataatcccttactcatgcaacatagctatttaatgtttgattaaaaacagtatgttctttgaatggtgtattactactcaacctgcgtactgagtagtaatggatttcttttatgtttgatgtcttagggtaagccaggggccaagtgtgtttgtattaatgatcctctctttccagtcctaacaggggctttacagaaatgcactgtatgagcggccactctaattttgtgtcttgtgtgtgtatcataccctcaagtgacatatatcctcatggactgattgccactggaggaaatgaccacaatatttgcattttctcgctggacagtccaatgccactttatattttaaagggtcacaaagatactggtaagtataacatgatggtatttttgtatttgaagaagtttcactactttgaattacaatccatgtatttttcttccttatatttttagctatgtttattagtggaaacctttttggaccgtcaattatgtatgaatgtctgtgtgggtatatacacctgtgctcaggtgccatggagatcagagacaacactgagctatatgttgtcatcagccactagataccagtctgggagctgaactcaggatccctagaaaagcagtttgcacttttaataatagaggtgtctcacagcctcctatactttgtaaagtatgtgtagaagtttggaacatgatttataaacacttaacattaattcctgtacagagtaaagatgtttgtgtatatgtaatattttatatacaga

SEQ ID NO: 28915 - DNA, 1151 bp, Mus musculus
tgggatattgaggttgcaactgtgacagtacaactcagccagtcagttgtcacttgctgcattttgatgatcattttagacacataactgtatacttattgaatattattgctgtatttattcttttttggttttaatttcttggtacaaggttttgccatgtaacctagggtgacccagcctgcaacttgctggaatcacaggcatatatcaacatacctggcatgaaattttattaatatgtaataatatatttgacttgatacctgtttttaactaaagatgtttggtttaatatttatatagctcccccttgctcttttttgtttactgtttacatggaatatgttttttccggtgtatttgtgtttggggagctaaactgaaactctcgtgcgtagacagcacatactcagatcatgtttttaggcattctgccaatttgtcttctgattagagcatttattccattgacatttaaagtgaatacattttattattttctatattagcttagttgattttggggagtatctgaaattgtgtttgtgtgtgtgtgtgtgtgtgtgtgtgtgtgtgtacagctagtaggagctaattctctcctaacagctcttgggtgaagtccttgacctcaggccagtcaggcttgtgagtaagcatctttacctgaaggctggcctcaaggtggaggctctgccttgggttcccaagtgctaagattatagatagctctgtgcctttagcacagatgaggactgtcctttctttgcctgactctgaatttatttcatatggaaaacacacacttcttggagggcaagtttgatagtatgaaattcacttgcttttgttatctggaaatgtcttcatttacctcctttttgaacagcagttgaacaaaaacatagcattatttgttgatgggtaggttttgtttggtgtgtgtgtctctgtgtttatgcgtgtgtgcaagtgtttgcactttgaatacattggtctagtgtcacatgcctcaaaaattatttgtataggtgcacagaggaaattgcacagagactctcacacatgtaaaatacttactctcctactgagccatgccttcataggttttgttgcttttgttttgtctttaatgggaaatttgcctg

SEQ ID NO: 28916 - DNA, 1137 bp, Mus musculus
gctgaaggcaggcaggcatgacactggagctcagagctcacatttgatttccgagttgtagtcacagagcaagattggcacaagctgggatggtgagatggctcagctggtaagagcactgactgctgaggtcctgagttcaaatcccagttgttttttgagccatctcttctgccccagagacattttagaaagtgttttatcttaaatttacatggtggctcacaaccacccgtaatgagatctgatgccctcttctggtgcatttaaagacagctacagcgtacttacgcataataataaataaatctttgggcctgagtaagtggagttgacctgagtgagtagggcgaccagagaaactggagcgagcagaggtcctaaaaattcaattcccaacaaccatatgaaggctcacaaccatctgttcatgtactcacatacataaaaataaatgaataaataaatagataaatctttttaaaaagattgacataagcttggcttttgaaacctggaaggccaccctcaatgacctaggtctttcaataagaccatacctactcttaacaaggccgcacctcttaatctttcccaactagttctactaactgggagccatatatacaaataatataagcaattctcattcaaaccaccacagcacgtttgtctccatgcttttgcacacacccaaggacagctttgagtattgtgtccaggctaggctagcagtcaggctccagagattctcttgtgcccacctccctctgggcagcagtgattttacaggtgctcacagatgggactggttacttatatcagtccaagggatccaagctcaggtgcctgtgtggaatgtgagcttaccaactaagccgttgatatccctgcccaatttctaataaactacaacagaattgacagtatagtttggtggtgtttactacagtcataacattgtaccacttttagcagcatcatcttcataatctgttcttggaaaactgaaactatatatccattaaagtagtagttagctcctggcaactaccattcttctgtatgtcttcaagattttgactaagtaacttgtacttcatataagtgaactctacagtattcactttataactg

SEQ ID NO: 28917 - DNA, 4505 bp, Mus musculus
acaagggaaataattagctccaactctgtccaattgcagtagcatgtgacaaaatgtcattgaactagacttggtaatgtagccctcaacctagcttttttccctactgtcaggagaaagagaaaaatgagtcacatattacaatagaaaaaaaaatgccatctggtattttacatagcttaacccagtttcatgcacttgctgaatattaaaagtaaacttttttcatgttgtaaattcaaattgttcatgtaagtattagtgaatatttctgcttgctggagaactggtgtttgaccctgtccaggccttcttattggcaacagttttgttatattgaaactgaatgtgagtttagagttttcttttttctttttttttttttttttttttgctgtagttgtagccaaagggggaggcagcactggatggagtgactgcagtcataggtgacctgaatctgatttgggcactgtgatttaaagaaaaggcgtttgctttctctaggccaagtttgtcttatgtagctgaggctaatccagccctgagtgttgctcctactctgatttatctgctggcttgttaggctgcacttttggaactttataagatcgtgtaattgcaaaattaatgtgtagctttaaaagagaactagcagtttttccatttccctctgtacatttaatacgaacaatgaaacatactttgtaaaatcctcttgaaatctggaagtgcaaggactccagagcaaaaatcaggaatcctgagctctcaacctaatctgcttaagctttggtaaggggcctcgctccacgctcagctctctaaactcatcagttgagattcaaagagctgaattctatcacttgttgtctcttcaagcacacaaggctacaaaagtcagtagcaattaattcattcctttctgttttccttcctcttcacctgtctcttcataggctgttggcacagacctgaaatggatgataatttactttcttgcaattttcctagaatgctgttgaattttaaaaagttctttctcaaatctggactttacacatgccagtggttaagagtattcactaccctgatctatacattgtaaggacccaacgggtgccaatagtcagagtgtagggccttgagaacagaagtttttaagcaactattgagaaaatacaactattttctgactgtagaatatatttgtaatttatcttatgaaatatttttaaatacagtgaaatatatacaaagtgcaagtatctcaaacctactgttgaggaaatattttacataggaatcagattcttaaccagtttttaacagcataaattcaggatattcagttattgtttgtctgcttttgttttctgtctgttctctgtgctgccttctcttctcttgtcctagtgtctacttgctctggcagctgtaggtggccaacctaggcctcctgagactggttagagccaagaccttaaagaagcacagatgagtctggaacttgaggggacatgtaacacagaagttcatggagagagagagagagagagagacagagacagagacagagagagacagacagagaccgcccttcccaacagtgtttgcagaagtggaggaccagcaatgcctgagtctctttatcctgggttctatttttattggtgcataaaaatagaaattgagcttaaattttgtctcttattctgacatggttaaggacacttaataatagtacttctcttatattagacttactgttcttcaaaactaatactcaagaaagcaaaatcagtggaacaagaccagtaaggtaaaactcgctggccattgtttaaccttggcccttcttctccactccttttaaatggctaggagctcccagtcttggagttggtatggccacctgctcaatgctcatgaggttttaggcaccaagcactttagctcactttgacctcttccatatagaatttaaaattacattttataattgtgtttgtataacatgacagtattcacattttggattaaaatattcctttaatctaaaacttggattatttttcctaataaaattaagtaaaatgtttgttatacacccttcaaaattctgagaatttgagactgtacctgatgaatggtttatgttctgagagggttgttggaaaaatgcagaccgtgttctccatcccttaccaccactcaggtgtttgtttcactccagccaggagcactgcaggtcctcctgtcacaagcctggacatctgaacttcgtccttcccatcctagccagaactcagtatggcttagatcatccatgggaggcggaggtgcagtagttagaaatcagtagataggaattttatttaggttcctacttttacagcttgtgcgccacctcacagggtgaggtgccttttttccctttactgtcaaaccctcatattcatctattcatccattctcacagctcataggtacaagagctttatatcattcattgaaagtaattaaacagacccattcagaaaatgcctgcagtcatttattgtttagcattggtccaggcttctccacagaatgttcctctcgggctaggtgaggttggtagcatgcagactggaagcaccgttagcctcttcgtttctaaggacagagaaagtggcagccccggcattccagcctaagctgtcctactgctctttagtttaccttttcccatgtacattgctgagtcctgacggaaggaaggcgctagagaagccaacaaagcctgtgcacgcctccactctgtctctgctctgtgccaactgaagacacccaattggccacctgcttgtggacacacttgaagttcaccggcagacatcctatgttggtttctcagcaggagaggtggccacccaaatttcccttttctacttaccagcaaggcacttaatctggtgtcacgtgacactcatagagaaaagcacctgcacagaagcacaagaagagcacacacattctgttgtgttagcattaacaaacttaacgaacaaactttatctctagagcttcatctctagttttgtatttagctcttagaacaatatatcttataatgtatccagaaaaatcagaataatgtaatatccttcgattattatttcctgacctttctgaaaaagtttcatgcatgctttcatttcctgtaactttgttttctgatatctcttctaccttactcccttattgccccgaccaaatcaggaggaaataaaagcatccaagaggaacttaaaaggttctaaatgaaactaaactttaaagccgaaattaattcgcagcatctgtgtagcttttatttttgtcctttgctgtttctgtcatatattcatgtgagttccagggaaaataacctgctttgttgtgtctgagggttcctagtagcttatcaggaattcaataaattcatatttccggtgttatatgttatcaaaaaattgaggcctgtgtggtggtgcacacctttaatcccagaactcagaagcagagtcagggagctctccagtgctcaaggttagcctggaacaggaggactacatagtaagaccctgtcatttaaaaataaaacaaaacaaacaaacaaacaaaaaaaacaagacaaaacaaagctgggcatggtggcgcacgcctttaatcccagcactcgggaggccgaggcagaggcagaggcaggcgaatttctgagttcgaggccagcctggtctacaaagtgagttccaggacatccagggctacacagagaaaccctgtcttgaaaagaaaaaaaaaaaaaaaagatcatctgcttcagcatatgagtactaaagttgtaattagattttagcatgatttatgtagaggagtcttttataaacgcctttaaatgtgtagattggagttgatttatacagttgtgttgtatataagatattgcatgacagtttatgaacttgttgctgttttctcacaatattaacagttttgtaaattttttcactatgcatttacagtgttctataacaatatatgacttaaaactattttatacatttaaatgttatgttgtatatatctacattaaagaatattgtaaatatcaatgtttgtaaaattataagttttccaaaaatataaactcatttttccatatctacttgtggcatattaaaaataccagtttttaagctttgacgtattatcttgtagtgaaagaggaggatcatgctgtcaattcaatgtaagcaaatgttaaaaataaaacaggtagtttttgatgtctttgtaaattattagcaatgttattgaattacagaagaaaggcacttagttaccgtgctattgctgtaacaaaacatcatgaccaaggcaacttacaaaagagagcatttaatttggggttcacacttggatccagagagcccatatcagggagtctggcagcaggcagttaagcatggcattggagc

SEQ ID NO: 28918 - DNA, 1198 bp, Mus musculus
aaagattttaaccaggctaattttgttacgtttgcctttatttttgttctgaatgtagcgaacgaggagacgcagggtccgagatccatggggaaactggtgtgatgcaaaagacttagaaggacaaacatttgaggtaatttggccatatttgtggttcatccatgaaaccttgtttcattattttaattcctatatattatgctgatttcattgttactgtgtgtatgatcttccctatgttaattagtttattgaaaaattaccattaaccaagccataggcaaatggtagagttaattagaagtctgacttgtgctgagaattttgattctcaatctccacattgttgtctcttaagtcaagatgtgtagcatgtagttacataagcatgcacgagcggacacacacatacacacacacacacacacacacacacacacacacacacagacactaaaccggctaagcaccagcaataggcaatggtggtctcactcgccaccatggttcctgtgactagcctgcagaaagccagcaacagctcgctcttcccttagccccataaaatgcttgctcgctctctttctctctctctctcaaatgatattcttttgaatgatgtttgataaccaattgaaatactgttctaaatattatacatactgaattatatatattcaagtgttatttctactaatagaagttgggtccctgataggaaacataggcaacaaatattgtacatatatacacatgcacacatgtgtacacatataaaatttgttgtcaataattagtgtagtagagtggaaagaaagtattagttttgttatctcaagtagctacttaactgtactaaatcttaaattttaacttatgaagtaaggatgatagccctctgaaagaattttaaaagaactgagaggaagtgtattaagatcttagtattggacatccagtaaagctgctcagacgaggtactcagaaatgttaccttcctcatgccccctacctgcccccagccttacacctgaactcttgctggcataataacaagtaatatatggttccttcccataaggttggtctaaggatatgaggtactcccagagtgtgatgaggaaagagttcataaaaagtgagatgtttgaacccaaggatcaggagaagaatcacctcaaaatgtagatggaag

SEQ ID NO: 28919 - DNA, 1170 bp, Mus musculus
agactctgatttcttggaaaaccgttaagttctttgcttcacagattcccagcaatgatttgtatgtatatggcaaacactcagggcagagtttaaaagatcaatctaccaagctctctgtttgaacaatcacgtcagttttctgagtctatttacttatccataaaataaaatccgtgaaacctgcatccattccactgggtcattctaataattcacggtggcgggcggggcgggtaggcgcgcgcgcgcgtgtgtgtgtgtgcgaaaatgaaccagagacaatggatgccacaaagcagggtctctcgcctgaatggaaaaagatctgctgtgagttagcccacgtaagacgtgagagaagtgagataacccatgcggtccttggggaagcagctttcacgcagtctcctggtcttactcgccggagttccccggaagtgcgccacgccaaggccccgcctccggccctgggcccgcccccggtcccgccccgccgcatctcgcgggatctcgcgagtacgcctgcgtcaggtgcagtcatggaggcggaggaggcggatgtggatgtggaaggagatgttgcggcggctgcacagccggggtgaggcgcggagcggggtcctgcgggccgggctgtgctaggcaagggtcggaggatgcggttggccgagggtccgtgtggacggcgtcgggacccggggtgctcccagccggaagtcggccgggtccgggagtggacccggtgccccaggttgcactgtttatctccactttctgggctgcgatggacagtgtttaattcggattcctacctgcattcgcgctgtctcaggcgcctcacagcatcttgaacactggcgtctaatttagtcctgcgcccgctagcgacctggtccagtcgtttgattcctccttctcagagcaagttgttgaaaacttgggggaaaggcagcttaccctaaaggatccagattttagagttggacaagtcatgtttgccttttgcttttgctcttcctgtttactgtcactctgaccgtgatcaaggcatttgaggcatttccaagcaaggctccgcttgcttggaaaccaagaatcacttgtcgatcttactgttgtaagcatcgaatgaaataattctgagagatgttttagcatatggagaat

SEQ ID NO: 28920 - DNA, 1187 bp, Mus musculus
atggggagaaactgcatatatatttaaattattcataattcaaagaagggtcaggaattcatttcccagaaagaagagtgtgcgtgcaagtaattcatgtttgcatataatttccatgttacagctataactttgtggcgggcatcatatcagggattaaaataaaggctttgcatttactatagtatactcatcccactttgtgccaattcaaccattttccacttatagacagatcttcaatggagatcttcaacccaagcccatagttttagtgaacttgggtgtcagtagggtttggagaaagggagctgaccatgaggaggcatggatactcatctgggaagcaggaggatgatacgccatccttctctccttcccctctattaaaggtggctccccgttaggaaatacggcagtcacagagaggaatctgtgatatacagaatggttggggtgttagttacttttctgttgctgtgataaactatcatgagcaaagctagttagagaaggaagaatttattttggtttaaggttccagggggaaaatccataatggtgggggaaggcgtggcgggatgagactagaacagaaatctgagagtccacctcatcaactctaaacacaaatccaagagctatatgccagaaatgtacttccttcagggagactatacttcccaagggttccacactgtgcccaagcagcaccacccagtgggcaccagggctgaaatatctaagcctatggggcattcttatttagaccaccactgttgattatcatgcctctggaactctttagatgaattccttagttctttttagttaaaaaattatttatttgattattttatatattaacaatcttccaatctcacaactcattaatccttcttattaccataatataaatcaggttggagggacggctcagaggttaagagtacttgactgctcttccagaggaccctggctcagttttcagctctcacgtagttgctcccaaccatttctaagtccagtcccaagggataagatgccctcttctggcctccatggatatcatgcaggcacatggtacacatgaggaacaatccagtaatcatttgtccttctatggtcgttgttttagttgctgctccaggttactgccgtgaactcctgccttgattttccttaaa

SEQ ID NO: 28921 - DNA, 3353 bp, Mus musculus
ctagtcttattttggtttcactttgagacagggtctcataatcctgaactggcatagaaatgacagtgtgttcaaggatgaccttgaacagcggatcagtccttcctgcagtctctgcacgctggtgggattaacggaagtagttgtagaccacatggcaggtttgtatagttctaggggtcaaactcagaagctctgctcatcgagctgcattctcaacctcacaatcaactatatttaagtcagattatatcaaattaatattttcagcttacttagaaagcagagcacagtatcagctctgtctctgggcaggacattggagtagttggaagtgtgatgaagcgaatacttgtcttgaaatggcatcctgtgagggaaagcaaatgcatattccaactttatgtttttagttgtaacagcaagtcaagttaatttgcataaagtaatgggtagtttgtcatttaatatctagatttgctttatggaaaagtttcctgttacacatgtggagaaaaactgtgcaaggtgaattccttagtctggtgtgtatagtttcctctctttgcaaattctgccctctagaggatgcttcagcatgctgtagaagctataatgcttggaaaactgctgttgcagtgactttgtctgtaaaagtgactcattagaaatttgcagcttctctgagttgtatgccagtttgaacatgtactgctgtgaatgaggactgaactattaggataggaagtaaactgacatttgtgtttctgatgaaaagcaagctacactttgcaatagccacatgctttggagcatggtgttcttgtgggcattgctttctaagaaggagtatatcatgtataattttgcctctttattgaaaagaaatagtgatggaatagcttataaccattttggtttctgcttgcctctaaggagtgtctggagctgtatttgtggcattcggttcatttctgcccaacattgttttttccagaggtgttactttccaatttggggtcactttttaaagtcacagctttggaatattagttgttaaatcccattgcttaatgtagccacaggtggtttgctcttgagtcagtcacacatccaacactttgtagccacgtttccatcattgttgagagtttgttgagagttcatgtgcagcgagtcacaatcttggtttttggtaacttgaagaaattctttgatccttagactacagatttaagaagtgttacgtccatttcacttgtacagaggaatcagatggggaaaggagtgcagcagacacaagggagacaacagtgtgctttcccagaacattgccagtcattgggtgaaggtgtaaacttgcaggctgcatgacccttgttgggtcagcttctcacctctgccctcatcatagcatgaaagaagggatatgtaatatataaacaaaaagggggtggtggtggctgagtaagccagattgagctggcaggctgtggagctgtggtctacattttattcttagtccttcataaatatgagtattgttctatttgcagtgttaactcatttagataattgcctgtaaatccttgcccagtaattcttaaccacttaaaataacaagaatttcacaatgatttggggtctttgagattagtggcatctgccaggatattttgttttatcagggttccttctgttcactacctcttagattttgatgattcttgtctacattttacactgttggtttgtatttttgtatgtttatggtgtctgcttgcctgtgtcttttagtaaaataagactttaaaattacttagcatgctatttaacattttctaaaaattatgacatttgggtatatttttgtcaataaagacattgatggtagtgtttgtatttgcttataattgagattttacaagttcccttttcatggaactgactgtaaaacgtcaacttcaataaatttatgtttccaatataattgctcataaatttgtaagtaatgtagcataaataagaatatatggatagtttcttttttcttaattaaacaagcaaattttctgatttttctagttttaagtagaattttgaatgtttgatacatgtttatacaaaactagtgtaaagttctatatcatctagattaattatagaaattcagctgtaaccagggtgagattctttccttgtataatttatgcagtgagactgctgcccagccaggtagaaatcagatctagaaccatgacttctccaagtgtattgaagggaagattgagtgcataaaatggatttgacaaaaaaatgtgtgttgcagtgactataaagttaaaaacaaccttgaatttcaagtggctgttcctcgactgatactcctttctcttttttggatataattatgacactgatgtttatcttgggataaacttaatgtattgagaaatatttgaagtttattctatttttttaatgatctgactaatgatttagtataagtgaaaaaaaaaatgtcttgcctagcaacctctagctgagtatcccttagtaatatctggtctttgatgactggatgttatacacttcacaaccacacgtacttctgtatagtggtatatctggcatgtggggagtgactgtggtttatgccagagtactgacaatttgtgtaaaaatgaatgtaaatgacttgttatacatacagtcttactgtgatcctgtttgttgcacacatttataaagcacaagtcatcagaggaaatagtgtgtagttactaaacttgaagtttcagtgaagtgtttagtttattaaaaaggtcctttctattttctatggcaaatgctgtcacacttgaaaactagaagaagcaatacttgatttatttttgtaagtatttagaatattattttgaataaataattgtcaataaaattgtgcaatgttttacgcaaataaagttctgcttctgattcagtttgctgtggttttagtggctacaaatgcatatttattttccattttagcgaaggactaaacccacttcgattggtaagcaaaatcacgtgaattcaaacttacattttgtgtgtaaacagcttacataaaagtgatttttgcgcctggcagtggtggtgcatgcctttaatcccagcacttgggaggcagaggcaggcggatttctgagttcaaggccagcctggtctgcagagaagttccaggacagccagggctacacagagtccctgtctcgaacaaaacaaaaaacaaacaaacaaaaaaagtgatttttgtgtatttttttgtctctagcttcaccattagaatgtagatatcttttgataat

SEQ ID NO: 28922 - DNA, 1224 bp, Mus musculus
tttttttctttttaatctttcatttgttagatttttaaactgtgctgcaataaaatgtgtgtggtactatttaaccctataatggtgatggaattttcccaaaaagccatcttcctactgtttcccttgaaatcccatcctgcttttcctgtacactacccctcacaaaccacaagccgcagcaacatggatgccagtttggagcagcaacagccaggatgacctggagccaggggggccttcggaacagatgtatacccttcctggatgatgttttcagccttgtgagaaacctcatcatcaaaggagatggctagcaatgttaccaacaagacagattctcgatccatgaattcccgtgtattcattgggaatctcaacactcgggtggtcaagaagtgtgatgtggaggccatcttttcaaagtatggcaaaattgtgggctgctctgtgcataaaggctttgcctttgtccagtatgttaatgaaagaaatgctcgagctgctgtagctggcgaggatggcagaatgattgctggccaggttttagatattaacctggctgcagagccaaaagtgaaccgaggaaaagcaggtgtgaaacgatctgcagcggagatgtacggttcctcatttgacttggactatgactttcaacgggattattatgacaggatgtacagttacccagcacgggttcctcctcctcctcctattgctcgagctgtggtgccttccaaacgtcagcgtgtttcagggaacacctcacgaaggggcaaaagtggattcaattcgaagagtggacaacggggatcttcttccaagtctggaaaattgaaaggcgatgaccttcagaccactaaaaaggagctgactcagataaaacaaaaagtggattctcttctggaaagcctggaaaaaaaattgaaaaagaacaaagcaagcaagcagacttgtccttctcatccccagtagagatgacgaatgaaaagtctgaagaagagcagagcagcgcctctgtgaagaaagatgagactaatgtgaagatggagtctgaggcaggtgcagatgactctgctgaggagggtgacatgctggatgatgacgataatgaagatcggggggatgaccagctggagttgaaggatgatgaaaaagagcccgaggaaggagacaacgacagagagagcgccaatggagaggatgactcttaagcacgtagtg

SEQ ID NO: 28923 - DNA, 1150 bp, Mus musculus
ttctttattttttgagtcccctccctcaggattgtggattctctccctcttcccgccttagtggtttaggctctatgtagcgcagacgggtggcgctctgcatagcttgtgcccaggatctaacctgcagtacagaaggatttaaaaaaaaacaatctctcatcttgtatctgatttggtttgataatgtgcttttgggagaatctcagagtccaagctgtcctcctagtcatgtgacggaggctgacacctcagctccacctcctaagtggtggaattaaagaggaaaaaataagatagtttactatggagccattttgattgtctgagtttcaggcacacagatgtaggttaccacaaattccatattccatcatggaagcagtttgttccataaagttttataatcttacagaacaaatttaaagtacattgggtgtggcgggtagacaggtccggagagtctgggcaagcatttctgcagtaccaagatgctatctgtcatttcttatgagttcgtggatggatgctctgtgtagtggtgtgctagattaataggttctaaaaggttcttatctgttggtcacaagacacagggactgtcctggaacggtgtcctccgagctagaactagcccaagataagataatgaacctctggacctgcagcattccagtgtattgggtattgcaggctgatctgacaattagcctctgcaggcaccagtcttccaggaactcatgtgtacccggtgcagaaaaatggcctcgattttgtttgtttgcttgtgcttctttttcaacttcagtactattgcctattcttttgtagcttccccacatatatagactctataggtgctggaaatgtgatattttttgtttaacaatgcaaaagttacagacttgtttttgctatgctggagatctgaacctagggccttgagaatgctaggtatgtgttctttttgtttgttttcagacagggtttctctgttgtagacctggctgtcccggaacttattctgttgaccaggctggctttgaactccgagatccacctgtctctacttccccagtgctaggaataaagtacagtgccatcttttttttttttaatttatgtatttacattataaatgctgtcccct

SEQ ID NO: 28924 - DNA, 1106 bp, Mus musculus
tcagatccaatctctaacagaagtctgacttgagtgtcaagatcccggggacactccagcgacaagccagcgacaagccagatcaaggtggcatctcaacagatgtgcacagcacaacgttgttcttggtatctgttcatagatggtccagtgggcatcatggtgttctaggcctgtgagctagtaatgtcactgagttctggttatcaggtgcagcctgactaagctccttttacatatctaaaaggcttccccccagacagggtttctctgtgtagccctggctatcctggagctcactctgtagaccaggctgacctcgaactcagaaattggcttgcctccacctcccaagtgctgggattaaaggggtgcaccaccattgcccggcttaaacgccatttttttaaaaactatcagtgggagtattatacacacacccatccgtattaaatgctgttgttgaaatggactagcctttcccttccagctctaacttgaatccacagtctaaggatctattttggtttttgagatgaggtttctctgtttagctgtggctgacctgctctgtagaccaggctggcctcaaactcccagagatcgtcccacctctgtctcctaagtgctgggatcaaaggcgggcgggcaccactgcctggctagtcagtctaagggcctgtcagtacagattgggcctttgggaggagaaaggggaatgggatttattttgactccttcaggaagtatctaacatttttcactctggaaaaaagtaatgttcttaggtcaacctcaaaacttttgtttgtggtacacacaactttttacctttccattcattttttttaaatttatttttgttatatctcattatatgttttgttattttatttatttatactttatatgttttgttttattttatatgaggacaatttgtttttgttttgttttgattttggctaatacatttatagaaagttgcaatcataaaggatatgggaagacactacctttttttagtttttattttttttattagatattttctttatttacatttcaaatgttttcccctttcctagtttccctctaaaaatccc

SEQ ID NO: 28925 - DNA, 1958 bp, Mus musculus
atgggcttaaagaacttgcctttagttacctggtctgggactctaagaaaaaaaagctggtgagatgccaggagggaggagcagctgctgcttctactcaaaggatcgggatgccgtgtctaaccttatatttgacttctccatcagaatctttaggggcaggtagcgatggtcctaaaagccattcatgtacaaagttgagtgctctgtcacaagtcactccacttttaacgaacatagaaaaggggaggtacaaggtgccgcaaacagaagagccaacagccaaagaagcagacttgatccttgaaaccgaagaaaacttcaagagaggcgtgatcagtgttatcagacagatgcaaagggaggtcgacaaaatcaaaaacatttacgtttccgacgtcctgaatatgaaaagttcactggatgatctgaattccttagcttgcacgattgaggccagggtgagcgaacaggaagatgccgtggagggactgaccaaggatacaatgcagttagccagggagatcgttgataaagaaaggctgagagagagggaagataggtttcgaagctccaacatccgagtgatagggattccagagaaagaaaaccgggagaacggagcggtggacataattaaggaagtaattgaagaaaactttgccgagctagaagaccagagcctcgagattgtcagcgctcatcgtgtccctaattcagtggatgagcacagactcacgcctagacacatcttagtgaagtttgggagtgctagtgataagcagagagtcctaaaagcttccagagcaaaacaagaaataacctacagagggtccaagatcagactgacagctgacttatcacctggtactatagatgcacgcagccagtggtgtggtatcataaaaattctgcaagacgaaggctttcagccaagaatcctttatcctgccaaactggcatttgattttaaaggtaaaaccaagatattttttgatattgaggaattcaagaagtttatctctgatataccctatttgaaagatctgttgaacaatatacattagcaacctggagtgctctctgtccaccaaaatacaaaaccaagtagagttggacagtggaccatcacgtctctgtcttgaagggtggacggctgactttttttcccccagggaaaggggctggggaagcggtgtaactccctgagtgttggttgagttagacagcgtatgtagcttttcagtagctatctaccttggtaaggaggaatcttgtcagtgtgaccacacacggaaaaatactagaggccacagtgggatgggaaaggacatgataagttagaagagactgcaggctgactgactcaacaagattacattgctttattatttactattacatattaaagcttgaagtttgcatttgtcattggtttacttaatgtccctgcttattttccagagaacctgtagattgtctaatcgcttctaccttgtattgcttcaacccatccattagtggagtctttaccttagcacgtgactgtgtgtgcatagatagtgcttcctttgaaatcagtctttagtgaggagacactgaagaaatctgagagaagaaaatagcatgttttgttttgttttacactggtctccagtatcccaaattgtcctgaacctctccatgtagctaggactagcctcctgcttcagcctgccaagtgctgaagttatgtttttgggaaaacaccatgcagtgaaaattgtgtctaatcctggggcaagttaggacaactgagcaagccctgacacccctgtgaggttgggggactctacagaagacagtgccaggcacccctggttttattatttttcccatgttgggagtggaaccaaagcctgctagctctcttgctgtgtcctcactcagacctgacataaatgtcagatgtaaaacgg

SEQ ID NO: 28926 - DNA, 1417 bp, Mus musculus
ccagttgtggcctaccagataggctcctatggtttgattttggaggcagaagaaatgtctccacagcctactccctggggagttctgagaggaagaagagaggtagcttgctcctggcagcactgggtttgccagctacccttcctgtcttaagtgcccacaggaccccacacagtagaagttgcttggctattctccccatcactaggaatcttgctgattgggactgtaatcttaattaacttttaactttgtagaagataagggttttcctaagccaaatcctggtcaaatgtcaatcttcagagtttacagagcctccctgctaacatcaggtatcctggacacgccatctccactttgatgcctatgtgttgaggtagagagtgtgagcctcctcaaggctgccaaagttgagggttagctggggatgtcagtgtcccaggaggaccccttgggccatgccaggctctaaacagaggatgatggtaaagctcctgtgtgctggcaggaggctggcacaacaggagggagaggctcgctgtgcacttccgctctctcttcctcttgtctctacatcagagacaccaagtctcgacctcctcttcctttcatgttgagtctggcaaccaggacagtgcctgtttcctggttagttagggtccatctgaagtgtttcttcagcgcctggtgccgctcccaggtgtacctgtggaggggaggggctttggttttgactacacttcatgcagctcagagtgttcttcaacttttaggttttttaagacatggtttcactccgtagccttggctggcctcaaactcattgagatccacctgcccctgccttctgaatgctgggatcaaaggtatgcaccaccacgataggcctaagacattaaaaggaaggggagtgtttcttagtgcatgccatgcgcgatgtgcacgcatggaggtcagaacaggtcttgtatggacccagctatcttgtctcccttttgcatggattcagaggactgaactcacattgttaggttttcacaggaagcagcaccttttcctggagccttatcaccagtgggtttcaggaaaggctttgatgaatggcatttgctgcatctgtcatcctaaagtgaagagactatattttttaagcactgtggccatgggttcagtcatcgtaggtgtcatgtctactaagaaaaatccctgtgagcggaatgtattaagatatttctaaaacttctcaatgcaaaagccgatcctccaaaaacactccatcactgcccctgcacatgctcatccacgtgtgtaacacacaagaaaggtgagtgtgagctgaggcagggctgaatatacatcccaacaatagtaatatatgtgatctgagagtctttgggagtgatgttgctctcaa

SEQ ID NO: 28927 - DNA, 1490 bp, Mus musculus
tcaccattggagacagaaactatgtcaaatatgcacagtacattcccatcatataattctgctcattaggatgctcggtagtgttttgccttaggccaagcccccccacactacatggggtgcagagtgcaggctgcagtggagtcatccagaaattcaaaacgtcttcggctttgaattcctcgtgacgttgtctttgcagtcctgtgtagcaagcaggtaggtcagggcacccttgcacaatagaaaaagcaatactttttacatggagttttaaagcgcactgtttttttctttgttttgtttttaatcaagtgtgtatacaaatatgttccagtgactatgcatgtctagagagaatggcagaggagtctaaattcgggcaaagtgggactaagcccagtgatgtcagtgccagggtgtgacacttctaagtacccgaggggctccattccttctatggaagtaagcagaaaacaaatggttaatactagtgatgcatgcttgacagagtccagttatttcacccattcccagcctacgagagaagcaaatgaactggccagcttcttgctgagagtgggtcactgtagaagtcaacattactcacccgtccctagaagcacagggcccctagaagcaggtaccagctctgagaacttcctggctccttggtgcacagacatccagctgggctgcagtagcagccagccagggtaagatagagctttctctggactgacatctctcccagggatagttctttcctgagcatccgtatcccctgggtcctgtacatggaaggctcataatcatagctctgaaaatctcacgccaacattatatatatatatatatatatttcctttatataaaaggaagagcatcaaaattggtgatctgtacactgaaaacactgaagcaagaattctcatttgggctggggtgcctatttgtttggtacccctctgctaagtcacaaagcttttgtgggtaacaatgtcatcgtccccaaggtggaagcaagtatacaacctacctctgggagtctccataagaaacagcttataaaagttttggaatctggataacccagaaaggctgacttcagacattctgtagcaaagtccttttcacagcatgatttgtgagagatgcccagaatccctcgtgtggatgctgcttagagataggaaggatggcaaaacagacgagctttaaagaatgctgtaagaggatttattccaatgtcaaaacgcaaatgtaaaagcaaacacacacttttaataaacgttagctccatgctttacaaaggttaatgtgtatccagccccagggatcttgttatgcagcaggtctgaaaggaggcctgagtttctgtgtgtctaactgggcccagaggacgtcaatgcggtcagaccacagccacgcttcgagcagcacagctccggcctgtcctttttgtttataaattaaaatgttgcctctca

SEQ ID NO: 28928 - DNA, 1599 bp, Mus musculus
tatgagctgtacaacaaagcatctaatcctgataaggtggttgggacaccattcaccgacaatagaaattctgaaactaatgatactactaatgggacccacgaatctgacaggaacaaggaatccagtgaccaaacaggcgttaacatgaacggacttgagaacaaaatttcctatgtagtgcaaagcttaaaggagtacgaggggaagtggttgctctttgacgattctgaggtaaaagtgacagaagagaaagactttctgaattctctctccccttctacatcccctacgtctactccctacttgctattctataaaaaattatagtgagtatatttcccctgtaaatattaaacagacctggacagatgttggtaaagttgattacatctaagagtctttagtttatcttttgaagctattggatattattggtctctctaggcttttatataaatagtgagattttaaatactgaaaaccatgttaatttttagaatcattttccttagtagagactagtgatggatgagctgggaacaaacttgtgtagattctaaatgatccaaaatggaagcttgacacagttaacacttggatttacatgatcttttgtgtttgctttttaaaataaagtgcttgtatttgtattctccatattctggagtaattatctacttgatgtttataggtctggctttttcacccaagaaacaatctcattcagtatatttagttttataatagtcatgaagccaaatctctgcgctgtatcagaggcacaaagtctagaatatgtatattcacaatggtgtatattttgtgccttgaataactttggaaagtgtctcagaaaacctggcaatcccctctatcttcataagaattttatatgtatttatgaagatggctctgtactctagtcaatctttttggcatgactaatttgtatctcttcatactctttctgcacgatctgtacatagaacatcaacttagatgtgtgacctttaacttttttaaaaactgggaggtcaataaaatttaagctgtttaacaaccaaatgtgtgatttttttttttaaaatgtatattctaatcaaagtggagttcttagattaatgtgtatgtacaagagagtcatcaagcataaataacatttaatactcagcaatggagcagaggccaacaactttcagaggaaagttaacaaccttaacacatctttgcttaattttaagtcatttgtctaaggacttggccaagggacactcacctgaataaatatacaaatgctattggagtaacattccatttcaatggaaaaattgcttattaacatttcacagatggtgtgatggcaactagatcatgcgtccttgtactttcccttaagtttagaatcactagtagaacttttaaaagtaaccatcctgtgctatttattaaaggttgtgttttaggaaacattgtcaggaagtataacaaaatggagtaagaaatctccattgcagctcatgagaaaaaaacccggtattttggaactaaaccatacatacataactcttaagagttcttcacactatctgagctgtc

SEQ ID NO: 28929 - DNA, 1194 bp, Mus musculus
agtcccgaaaccgcagacgctcaccgtgcgtggcgggtagtagctgaagtccagtagttacagttacgagggacagctgtaaatctaacttgggcctgcccctcacaaatgaactgctctaggctctgagcttgcagcccgggagcttagggtctccgacagggcttcctgcaggaccgcggcctgcggaggcttcggtgtgctgtgctacggtggccgcgcggggccgcgggccgcacgtcctgcggtgcgtacgcgctgttcggagcggctgctggagccgacgcgcgtctggtgtggggactcctgcgcggctgtacagttatccagtcccgtgtcgccgaggggtcggctcgaggctggcggagtggagaaggttggagcttggtgtttgtagtctacgaatggccggttctgggggcggccctgcccttggtgcagacccgtggccaaccgtctgggttcctggagggttttggagcctctctcgattctgcttcctcctgagggttatcttctgacgactcctcctcgccctttgaactgtaagccttccagtggccggctgttctacccttcttgaccaggaaaggttttctccctagccgccgtatcccattgactcttccttgtttctcttcatttaaaacaaaaagagtgtatgtgtgggaaatgttagatctcaatctgtccgtctgtagccccgttgcccctttcgttgtttgaaaccgcaatctgtagcattatataccctggctgtgctaataacgctgacttcatagaccggcttttgctcattctcacatgcccacccacatctgagggttattgaagttggaaactcagactacaatcttccgtgcgatgacccgacatcactgggtcagctcagcataactctgcttgagtttattttcttagggtttttgtcgtatatttttgttatctttattgattacttttccacacgaggttcattgcgacctcggggctaagactgtattattttatagctttttaatctttgaattacttaggtgaagatttccttctgtttgtttaccttttctgaccttacattcccttgggagtttggaattgattttgtgtcagttgatagcagatagacacaaaggagtgatctttcctgcctgctgcttgtggcttttaattagattatgagtctttggaagt

SEQ ID NO: 28930 - DNA, 1186 bp, Mus musculus
tacccttttaaagtatcagctcctgtgatggtatacatctttacatagtgacaagtcatgacgtgactgtatacatccttacacattgacaagtcatggcatcttatttgcgtgtcatctttcaaagaactcacatgtgtgtgtcctgagccaaccaaggtaaaagagaaggtgttttaaattaccgtcttgtccaaggagtgattttacagaggtgcagagggacactgttaatagcagtgttactgtagatcctatattggtcccccagtgtacagaccacctcagtgttcattctcatttgattgggcagtggaaggcttacattcattcctctgaaatgagatgacacaataatgatagacacacataattaccattctgcacacttgctcacctatctctatactatataacttacaccttaaacattttgtagatgaaagcaagatgttgcctgcaagatcaggatgtgccattgaagatcatgtaattgcagggaatgtggaagagttccgtaaggatttcatttctagaatatggctgacctacagggaagaatttcctcaaatcgaagcttcagccttgacgacagactgtggctggggctgcacgctgcggaccggccagatgctgctggctcagggactcatactccattttctcggtagaggtaaatcaagtctctgtgtttctgctgctgctttcactctgagcatcggtttgtgtagcacacccaccttgctgaggttaaggtgttccactgatgttccatctgtactgagctgagccgcgtgtcttacacgtgcgtgctctgcagatgcaacatggctgtctggtcaccacagtgaatttacctcacattttattgttttggttgaattttctagagtgccgaattaagtaagtcctgggcagaagaaattttactctttttttttttttttagtacatgtcagtagtatcttgaaattttatcataaataattacatttatcatacttatcacttatatttatatattatatcacttaatagtatatattaattatatattatacattatgacattatatacattctatcatatataatataattataggttaataattttgtatataatatatacaaatatattacatagaaattatatattatataatataattatatttaattaaca

SEQ ID NO: 28931 - DNA, 1383 bp, Mus musculus
gctacagctcaacaccctgggcgccgccgcggcagccgcgggcacggcgggcgcggcgggcaccacgtcgctcatcaagtccgagcccagtgcgcggccgtcgttcagcatcgagaacatcataggcgcgggatccgcggcgcccgggggctcggctgggggtggtgggagcggcggcggagccgggggtggcgggggcagtgggggcggcggcggcgcgcagtccttcctgcggccgcccgggactgtgcagtcggctgcgctcatggccacgcaccagcccctgtcgctgagccggacgactgccaccatcgcgcccattctgagcgtgccgctgtctggacagttcctgcagcccgcagcctcagccgcagcggctgcggccgccgccgtgcaagccaagtggcccgctcaatagtgatgagctagtggccgggccggacggcggcctctggcagcagcctgctcttccaggcggtacgccctctctgatcctggtccatctgtcctggtcctggtcctggtccctctacccaatcctggactctgctacccgcccccgactccccaacactgaccaacagcggcctccatcccctcactcacctaagctggcggagcaaactcaacccgcgtccgctgggaataactttccgtacaggtaaaactgataaccgaatttccaaaaatgcaccccgacggcgcctgtgttctcagtactgtgggggtgggagggacattctttgtacatatttgtataaaaatcattgactttccttttggggtttttatttttttaagaaaataaaaagcaattcagtagatttagagctttgaactttcatatttttttgaaggttcactctgcgcagttttatctgagaaaaagaatgtataaagacgttgggagattttaaatccaaaaaaaatttttcaaaaaggcgaagtgtcattgtattataaaagtctgtttatatatgaatgaatatatatggtattctaaatgttattccatcgtgttgtacacaattttgtaaataaatttttaaaatgctcagcctagtgttttaattaggtgtctagcaaatggcaagattttacaatggaatttgcattgtcttccccagaaaatctagcagtcttaagtaatgaccttttcaaacgttgcaaattcacaatttgggtgtagaaacatttgaatttgaaaatggaaagagcgtacttaatttaaattatattaatatgtgacttttcacataaccaggataaggatgacaatcccattcatatcaagccactgtgaatgactcgcagctcctgcaaagtgtgctgtcattaaaaatctaggcaaaagcagccttgttcattttaaagaacattggt

SEQ ID NO: 28932 - DNA, 1162 bp, Mus musculus
tgaggagcatggaacatgaagaagtttgaaaatggttgcctcgggagtcactttgtgcttgcagagtagaaggaaatgctttctctggtcttttcctcaagggactgtacatgtggcacacgaagtgtttgctagtgacctagtcaagtggctgttggctagacgtgtggagaagttgacacttcctgaatagtcacatgcagaccttttttcttttaaactaatcttgaaaatcagacatgcagagtatatttattttttccaggctcggagtaaaattatattctgtaacattaaaatgctttttcttgtcattttagaccagtttgcttagttttaactgaaattcctttcatgtcaacctggtttttactagtttcaacatttaggtgagtcaaaccaatttccatgtaatatttccagtacgattattacagtcgttgaaaaatttacaccgtagctattgatgcttttgcggctttattttcctttacagcatgctgcctcttctattaaaggatgaactcctgctgccctcggttgtgacagtgatggcatttgtaatagcttgtggcactttctttccaatgttggagaacacttccgaagaacaactgcagttgaagtcctttgctgtctctgtaaggaggcaccttccgggcttcacatttttgcccagaattatgcagtgtttggtaagttaggcagcagcttgctttccagtatttaatttctgcatgtatactgcttgcctagcaatacatgtggaggttagagggtaacttttgggagttggctgtttccttctaccatgtgtgttctagggcttgaactcagattgtcaggcctggtggcaagtgtctttaagtgccgttccatcttactggctctgttcagttttaaaggagtatattttttagcatattactagtttttttgtaagttactgaatttttgttgttgttggataggatcatactcattatgtagcccaggctagtccagaacttactatgtagcacatgcagcatttgaactttgcccttcctgccttggccttttatatgttaggatcatagacttgaaaggccatttataccctgttgagatgtgttctataatgcatccatataacttacacattttactggggttaagtatg

SEQ ID NO: 28933 - DNA, 1744 bp, Mus musculus
tgtttgtttgtttgtttgtttgtttgttttgctaagcatactataattttggtaatattcacagatatttaatggtaaaacaagaaaaaaaattgtcccagctggtcgtagtagctcatctttgcaatgtcagtaccaggaggtagaggcaggctacctagagatcaaggccatccttggttataaatagcaagtttgaggctagcctaggctatgtgagaccctgtctcaacaaaagggttcccaatgccaatatttaataatggaatgcatcctataaattgtaacttttaaaaactatgtattttatatatagttttaaaatgtaagaccagtcagaatgcacacagagccaggcctgctggtacacattgggcatctcagcacttggtagggacaggcaggaggagcatgaatttgaggctagcctgagctacataaaatcctgttttaaaaaacaaaacaaagtcagacaaagtgtgcttcaataaatttaaactgagtttattggaagaattaagcacctgacttgtttagcgacaagtgatgagcatctcattcagaagttgtatctctgggctgaagagatggtttagcagttaagagccgtggctgctcttcagaggacctgaattcaattccagcaaccacatggtggctcacaaccatctgtaatgggatctgatacccttttctggtgtgcatgaagatatcatacttgtatgcataaaatatatgtatatatgtatttgtatacataaatctttagaagtatctcagggaattaacatttttcttaattactgagaaggtacattatgctatttgaaatttgaatatccattattgcatatgcaaaattggatacttatagattaagtagtattcttgtttccaagaatgtagaatctcttgatgctattttttttaaaaagaacttttattgaatataaatctaagaagtttgaagtctttttagttactcatggtatttagttctaaatttctagagtcattctaaattgactaccatatcaacgactccatctccctttctgttaccttgttaacaccgaaataactgcatattcaaatcatggctaacaccggctctgtcccattggtagggttatcccttcacccatatcaattcctaaaaatcatgtagtgtgttttactttcacaggaaagctgtttctttagtctctgatgaaaattaaagccactttacgactagccttgtttgcgtgtatttctttcataatatagtcaccagagcattaagtcattaaatggcatattctaaagtggtataaagaattggagtctagacttggctatccataggctgatgctagaaaatatgtatttctcagtctgacaaagcaaatgtacatgaggacttcagggtcaaggtcagcagagaggcaaccttggtggctgcagaatcagcaggcagtatcactgcgtcactgccccactatccatggccactatctgtaattgttgggcccagcaggcagcatcctggctacttttacttgaacctgttttacttttaataatgtatcaaagtttaacacagaattgctgatttccattaacttcccagaaattgagtagtacaacttcaaaataaaagtattaagaagtataatggaatgccagattcagtgtttgtcctgcacgtaaattctgtcaataaaaatacattttttcggggcctagcaaacacagaagtgga

SEQ ID NO: 28934 - DNA, 1963 bp, Mus musculus
gggactcataaattgcaagaccttctttttccagttttcaagatctaaactgagctctgtatgtagactttcctggatgggtcagacattgacaaacagagaaagaagttgggatttgtatctgtatgcccaggagtgttcagaccaccacagctttccatgtgggagagaggccggtcagctctgtggggaggatcccttcagctccacccttgctcacaggggcctcattcagcagtcccctggcctatgcccaggacagagaatgggtggggaaaaggaaggctcccaggcaggagtgagccttgtcggtaggagcttttagcatagtgtgagttttagggttcaaatggatttctgccactttgggagtactgtggagtgagaaggaaagcgtgaagacaacaacagaaagttactaaacatcatcacgcattagccactggcctgttgctcttccctctttggccaaactctaatagttccaggattcctacactgccactcgccaccttatcgtcgtctaagccctgctgcttccgcctctctgctgaaacgccccctcagggagggtgactctgcttgctcattccctgtagcactgttgtgggcctttacctatgccctgcatttggctgactttgcgcttaacagtctcattccttgtcttgatcacgccactgatcgttcccaccatcccatggctcgccatacttataccctaggtctttgtccccagcttgctgctcagattctcttaagcatcgctcctccccaggggtgattcccttaagatcaaatctccataaagcaactgctcctttctcatagataccactagagtagattaacacaattccagtgaatttatgtttgtaagtcatatgtgcccattggagactaagcttaagacaggattgcattttacatgaaggtctttccttggtacattcaagggtatcagtccaggacctctgcagttagcaaattctgtaaaagattacgtctgtaagaaataaattgtcatggtctgttttcagcgtgaggtgcagttagagctcatcagagagtggcggataagcaggagacctgggcctttctctgctagctgctagctgctagctggcatctgcttgtctgaacactctgaaagctgagaagttgcgggcaggctgcactttgactgtgccataattagaaaagggggtatctcaggtcccagagtactcaccaccaggtagggctttgcattgtgagccaggagaacaggggctttgggaaggcaggcatgctagaagaactgaagactgggcctctctggagcattggtctatgggagaagagagaacaggacatgatcaagaacttcagaaaaccctgacctgtgccaaatcagccatttttgccttttctcaatgctggtgcctctgtctgcaaaatggtttattaaaaactgcttcactactgctagtctctcgaatttgttattgtatagtgagggtcctgtaagatggggtgcttaattgcttataatccacacagttaccttaaatcatctttatattagaaaactaaatatggcatagacgctgtgctgtgtgagaatacaatgtaggtgtcacatttgtctcatattactttttttttttttttctaaacagggtttctctgtgtagcccaggctgtcctggaactcactttgtagaccaggctggccttgaactcagaatttcccctgcctctgccttccaaagtgctgggattaaaggcgtgcgccaccatgcccggcttcatattactttttaatgtttatttgtgtatgtgcatgtatgtgggtgcatgtgtcacagcaagcttgtgggggtggggacaagtgtgggatgtggttctttcccaccatgtgggtcttgtggactcaggcttagcagcaaatgctctgactggctaagctatctcactggcc

SEQ ID NO: 28935 - DNA, 1197 bp, Mus musculus
atagagtgtctgagggctgagtggtatgcccacatcttcattaaactaacaagtggcaaagtcagactttaaatcccgttttgattctgacaccacatttctgagtactggtacagtcattcctgcacagcttccagtctgaggcagaagcgggacaaacgctgctagttggtgtgcagggtgaagtggatagcagagggtgtggtgtgtgaggagtgtttcctcctggcacttgttacttagtagaactgaagatactaagcaccctgtaatgtgctagtgagtgagtcagtcatacccagggaaggattatgccttaatggcattgtttggtaagaaacagtatgggatccctctctatgagacatgtgttcttctaggaatctgattctgttctgcacactcgttctctgggggaacatcctagaatggtggggttgtttttatccccagtctattcctaacctccaccactagaagaagctcccccacccccattttccttgccctgatgtgctgagatgttcacgtgagaggctctcagaaaccttctttcaggaggaacaataacttcaacctgatccctgtgatctggacaccattgtggtgggaaggggagaagaagagctttgtgggggccccgatacttctgtgggtgcagaagcaactggcatataattgcaaaaagggttgaaaggagtaagggaggagaggaggagatttgtcgggacggggcgggggggggggagtactgcagcgtggtaattggagatagtagatggcaacccccagtgaagctgggaagaaaagactgtgtgcttcacaaacacaggacggaaggggtttcatgtttaatgtaaatacacctgccgtttgttctccaaagcactggttccaggttttgagataaaatagcattttgaacattgtgccagtggaatttgtctttctgtgcccaggcactgctgttcactttgttctcagcagaaactagagaagggagagagccctgactggctccaaggtcttaccccagccagcattgctacatccaccgagtctcagtctggatctccccccttcccccccccccccccagacagggtttctctgtatatatagccctgactgtcctggaactcactctgtagaccaggctggcctcaaactcagaaattcacctgcctctgcctccca

SEQ ID NO: 28936 - DNA, 1109 bp, Mus musculus
agttcttacttaatgaattagttaattgtagtagcctatttatagaagtactaggtggcttccaggatctgtttctctttgacttgaaacattacattgctttccagctttgaaaaaacaatgcatttcccagcatcttcacagagatgtgctgtgactgtgccactgtcccctgcttcccttatcctctgtagaatgcaaatgctggcatttctgcggtgggggacagggagcagattgtgaagctgccttccagtcccagattcttcgcagcaagaaacatgcttctattgaagctacttatttaaaggttaacattttggagaaatgtagctaagcctaaccccaaagatgggcctagaatagtgctctgtgtgcacagtctcccttgatagtaacaacatgcctgtgcatttagttcatccatattggacagggaaagcaacctaaacacggaaacatcacttactctaaataccactcaagtctcctaacagttcagccctcatctctgccaggttacagcaaatgcctgctacactgaatcatctgaaccaggctgttttcacacacttgctttgggttgagtttaatggtaccagtttaacgtggcttcacacacgcacacatacacatacacaaacacacgcacgtacagtcctccatatccattgaccaccgttatatcaaaagtgtagtagtcctatgattgttcttcctgtaattaaagtacataaattattcttgtgacaccattccctaaagcatgcaagtgaatatttatttacatagcatttgcattgtcctaggaggtatagataacatatagataatttaaagcataggatattcatagcccattttcaactatgtcacagtttctgtaaggggtctgcacatctctggcttacagtgtccacaaaggtgccctaggatgccacagaccagttgtatgtgcagaaagtgacagttgggcattgtgataatcatagcattttaaggataaagcaggagaattataaatttaacactagtctgggctacgtgggattcaaggttgactcatacagcatagtgagactttgcttagaccaaataaacagcctgac

SEQ ID NO: 28937 - DNA, 1107 bp, Mus musculus
cctcccaggcatggaccatgctcagctggtggctatcaaaaccttgaaagactataacaacccccagcagtggacagaatttcaacaggaagcctctctcatggctgaactacaccaccccaatattgtatgcctcctcggagccgtcacccaggaacaacctgtgtgtatgctctttgagtatatgaaccagggagacctccacgagttcctcatcatgcgatccccgcattccgatgtcggctgtagcagtgatgaagatgggacggtcaaatccagcctggaccatggtgatttcttacacatagcaattcagatcgcagctggcatggagtacctgtctagtcacttcttcgtgcacaaggaccttgcagctcgcaacattttaattggagagcaactgcatgtaaaaatttcagatcttgggctttccagagaaatttactctgctgattactatagggtacagagtaagtcttcactgcccatccgctggatgccccctgaggccatcatgtacggcaaattctcctccgattccgatatctggtctttcggggttgtgttgtgggagattttcagctttggactccagccatattatgggtttagtaatcaggaagtgattgaaatggtgcggaagcggcagctcttaccatgttctgaagactgcccgccgcgcatgtacagcctcatgaccgagtgctggaatgagataccttccaggagaccacgctttaaagacatccacgtccggcttcgatcctgggagggcctctcaagtcacaccagctctaccaccccctcgggtggaaatgccaccacgcagaccacttccctcagtgccagccctgtgagtaacctcagcaacccccgatttcccaattacatgttcccgagccaagggattacaccccagggtcagatcgctggtttcattggcccagcgatacctcagaaccagcgcttcatccccatcaatggatacccaatacctcctggctatgcagcctttccagctgcccactaccagcctgcagggcctcccagggtgattcagcactgcccacctccgaagagtcggtccccaagcagcgccagcggatc

SEQ ID NO: 28938 - DNA, 1197 bp, Mus musculus
ctctccatcacagccaccacctgcaggcggcagtgaccgtgcacactgtggatgctgagtgctaacaaccctctcgcctcccggagcagagtggccctgcgtgacacagaattctctgcgaagaaatgagccggcatacagccctgtcacgtgacgcactctgtccagtgtggttccactggtttgctgcctactggcttgtggggatctgatgctggttctgtaacggagggggagcctgatgaactgacctgacatgatggaatgggaccgtaggcacaccgccaacacagacaaacatagagggaactgagccggaggagtgctcccagcaccagaagcactcagtcccttaactggaagaaagctggagccgaggcccatgaacgtggcacgccagatgctaccagccgctggacggactcccgtgtttcctagcggtacctggacaccaccattactgtacagagctcaccttaggctctaaacgatgcatctcaaaatttctaagtaaaggattatttttctactatttattgaactttcaaactttgtgggaggggaaaggaactgagagattctcagccttcaccctggctgttatgtgcgatgtggttctctgattaaggagttgtgtttcttaatttaactggtgatctgcccactgtcctcatccacaaaacacacaaacaaacaaacaaacaaacaaggaaaggaaaggaaaggaaaggaaaggaaaggaaaggaaaggaaaggaaaggaatggaattggggaaatgaagaaatctttctctggcttatttatgtcacttcctagaaaaaaaaaatgtcatctgtgatagtgtcccctctttcaaggggcagtgatctaagatgctttcaaagaaacttcattcctttagaattcatttccacctcccatgtgatggttttccttaggtttctacgaaatctactattataaccgtagccttccagtttagggaggcatgggtttattctctttgttttaaagactataaattttaagatgtctccttttttactctgagaatataaaacaggtaaagggagacattttaaaattgtaaaattgtggttcttaaaagatttcttttgaaatcacagctccaagctgctgccacggatccaccaaactgcttttggcttccacggggcttcatcaaatggctactc

SEQ ID NO: 28939 - DNA, 1192 bp, Mus musculus
gcagagcagtgcacacagcccttcctgagggaggccgtggacagcgtggggcagttctgagctaacaggctctacctcactctggttatttactcactctttggtagttgttaagctgaaaggaaatggccgcttaatccaattcacttctgaaagaacacttgtctttatttgtctgacttttgacttcaccctttgccgaagatcttggtattaagtgagcaacctttttccatctagaaatttctatgtgttcattgttaagagactacaactgatgaagtgtaggatctcaatgatcctagatcagatcattaaaaaaccttatttggaggacttatcatttttgactgataatgctctccagcattaattataaaatctaaaactggtacatatgttacatgttttataatgaattttacctggcctaatttattgcatataccagctttcattgaaaaaatgacagctaaaaaatgaaaggaagaccgtcctagacacgcttcctataggtgatgaccagcacgaggtcccagcagatgactaatggtgtgctctgaccctgcacctcctgcctctggctgcagctctaagtcacagaatagtggaggctagagactgctatctgggagctgcagtgtgaggaggaagcagtggagggaacttagagacacttcacattccatgtgggtcctccactatgccagcctgtgcccgttattacaagacagaaatgcaaatcaagtgatgttagtacaaggtcattacaaccaaccccccaaagtctacgctgttagttttctgtgtcagctaatggtttgaaatgcttttcaagatgcaagcttaatattaaaaggcatatgcatgtgaagtctttagtatgtttattgtataaagagtaaacaaagtgcatatagagcgagacacaggtttgacgtaaacaggggctatggtgatatacagcaactaaaccaatttaaatggcaactgtactgttgctactaaactgatattgaattctttgggaaaagggctcaaaaggtgaaaaaatatcaaacaagtattaaacagcattaatgagtttgccagactcttggtcatgagtaactctgcggttcacattgaatctaaagtgaaagctgttgattacccagctacctccaagtcaaccaacaacaactacctagtg

SEQ ID NO: 28940 - DNA, 1262 bp, Mus musculus
gcttatgagaaaatgctgggaattccaaccatctaaccggacaacttttcagaaccttattgaaggatttgaagcacttttaaaataagaagcatgaacaacatttaaattcccatttatcaaatccttctctcccaagccatttaaaaacgttttttaagtgaaaagtttgtattctgcctctaaagttcctcaacaaatactcgagttacacatatgcatatgtcacactgtcactcagtgtgtggatatgcctatgtcacactgtcactcagtgtgtggaactttctctttaaaggtgtaacatcttaaatttggtgatgaatagtgacaaccaaaagactagattgtgcctaagcactccttctggaacaaccgaatgatcagctgcatagcaaaggactgtgccgctggcatattgatctcagataaaaacttgtggacttggctgacactctcccttgccctgaaatctcaatgtctattcagtgatagtacaagcacgtagataccacttagtatactattgtttctattaaaaaaaaaaaaaaaaaggtctgttcctgctaccttttaggactgaagttttaagcactggtacccactgtggggcaaacctgtgctgcaggagggagcctggcatacacactctgcatgttacttcttgagaactagacctgtgtgcctgtgttttcctgaacagctgctttctgtcaggcagactcctctgacctggatgcggtcacatccacctttaagattgtcagtgcatactccttcctgacgatcccctggggcaagctgccgacagtggcgtaaacaggagacatcaccctatactgcgaaactacagaaaggaagacagcttggcccagcgggctgaagttcagaattcactaggtagttgttgttggttgacttggaggtagctgggtaatcaacagctttcactttagattcaatgtgaaccgcagagttactcatgaccaagagtctggcaaactcattaatgctgtttaatacttgtttgatattttttcaccttttgagcccttttcccaaagaattcaatatcagtttagtagcaacagtacagttgccatttaaattggtttagttgctgtatatcaccatagcccctgtttacgtcaaacctgtgtctcgctctatatgcactttgtttactctttatacaataaacatactaaagacttcacatgcatatgccttttaatattaagcttgcatcttgaaaagcattt

SEQ ID NO: 28941 - DNA, 1195 bp, Mus musculus
tgaactctggtcttctggaagtgctcttaactggtgagccatctctccaacccaacaagtgatggctgttgcttatccacagagtgggatagagacaatatcaacttctatgacgatttgaggattgagagactactaaacattttgaaatggtgtcaggcacatttcaaaggtaatttctgaggtaaaaccgttctgattgttttatttttttaacttttcaaaatgattggagtatatgctttcggtcaatttttaaaaagctcaagttatatccataatgtttaaaagatggtgtggcatgtccccagaagataccaaacaaagaatacctgttatattgtatttttgaaagatttctgttaagagaacataataataattttaaaaagttttggtgcttaaccaaggcagtttccattgagatgctagatgaattgttttattttttaatggaaaattagaaaattgtttttatgtaacctctgtaggagctgtccaagatataattgggaggagcatactgggcatcccagaagaccgatataaaggtgctgtttagcttttgttaagtccatgcttatagccagtggtgggctgctggccaagagacgcaggcagacctgtttataaaatgatgtctttagagttgtgtcagaattaaacattttataagggagataatgctccagggagctttgctgcctaaagaatgataggaatttaaaggaactttagtttgttgttttcctttctacagtttctgctgtgttatctatcatactttcctgaagcaagatttacccaaagcagaaaattatacagtcttttctcctaatcatgtgtatgtgcacatatagatatatgtatatgtcattcttagtgatgttcttgtacaagcttattgaatttaagtattcatagagaatgataggctgggcatagtagtgtacacctgtaatcatagcacttggcaaatgggggcaggaaggaggaggtcagggtcattgtcagctacagaaagtttgagcaggcccaggctgcctgagactgtctcaaaacagcaagcaagcaagcaagcaagcaaaaacaaccccctctctctttggggagagaaagaaaaggataaaagaacgagtggttggaacagcagtcttgataacatttttaaagaagatttatttattactatcta

SEQ ID NO: 28942 - DNA, 2875 bp, Mus musculus
aaaagatgaatattgaacatgctgctaaatattaacgctgtcagtgtttttcttctgtgagtgactaaccagacggcgagaggtcagaaaagggagcaagcctctgaggcttggagcatcttgcactagctatacacagcacctgcactgagtaagacagctttactgttgtggggatgcagagtccttttgtttgttttcttcctattccaaagatgcagtctataggtggtcataaagtccagaaatgaagatactaaggtcttatcagtcattgtgtgtcaagaaagcatttgtgaagactttccttcctggatctcagacttgctggccaccttgttacaatttttattcttttctgggaagaacagggaaatttcttcccactgccttaaaaaggtgtcctgcacctgcctgtccccaggaggtggtcttttattactggtggtgacttagtgtgacatctcatagtctgtgtggggtcagggtatggggtgggcttagcactttagtggattgagacattattccattctgaaggtgtcgtgtgttctgtgctcctgagtctgtctgccttcctgtactacctggactcccatggttcctctcagtcgtttttttcatgtgcatgttctgcggctgccttagtggagatgcaggccagcattcccactcgtgttctcagtacagagaagtaagcttccagagtgcagctgcacggggcaggtgaccatctgggcagtgtcgtgatgcagagcaccttggaagcttacatctggatgtcacttggtaggggttgggtgataaaagcccaggcttcctggaggggcaggtcgggagtgggaaaccctgagattattcccaggaaccaagggaagtagggagttaaagggattcagggtaattcaagagaggtaggaaaacttcaaacttttcttcccctcttgtggagtctggggagaacaatagggtgtgagcagctccttgcctgcacactgctgtttctctatgcagttcaagctcagtagactacggtagccccagtgggacaccaggctcagaagagcagcaaggggcaaagacatcttttccaaagtcttgggtgatttcatgtctatgggtgtaaaggtgttttctgcagcaggcttggctgattttgtggaaatggtcataaatactgaccgtgtcttgacaaaggtgcaatggaagcagcatctttgccttctcaggcgacacatggccaagagtctgggtgctctctgaggttctgactttacattcatggactccccgttcagcttgcatcccacaggcctcatgggaaaggctgcatgtttattcctccagtatttatgacaaaaaaggtgctatgaaggaggccctctgagtaaagtgcgcactctccggacctttataagcattgtggtgaatcttcccaggcacaaccaatatttcctataaacaagagtccaggatatgaagtcttgcccaggctcttcatatgagtaaacactaaagctatgattcagtcccaggttttcctgcttctgaaacccttggccttttacaggatgttatttgtctgtcttgacctaagcaacctggggccatgagcctgcttaggtctgcttgtggcctcagggagagtggctgcgtgaggctatttctttttatgctctttgcctaagcaaaaggagttcccagacacaagacgttaaggcaggctgggtttagaccaggtcaatctgcctcaattctaggcgtcaggaagccatatgaaagctgacatctactgaaacattaaaattaaccataacggttacccttatttttggtgtggcaaactgcacaattcttgccagaacaaatgccatcaactgcctcagggcactccttggtttgactgttctttatgtggttgggtgtgagggagacaggaagccattgcccaggactccatcctgactccctctagtgacagacaggaagcacagtgtcttttaataaaaggctcctgtttaaaacctttgcagggagtaccgcaccttctctctgggatttgggaaaagggaagaaaaattgaaaaccccaggctctgtgtggactgcaagaaatggtagagctcaaggcttctctagtcttatgagaacttgtactactgaatttgcgaattttgtttttttgagctggaccgatctctgggggacgacgttgagctaggatggcatttcactgtgatcccccaagttcaagccagtctttaactcagtgttggcttaagtttccctggagctggcacgtcagcttttcttcagtgacagttggtgttcctcttgatttgggtatatgtgcttagttcagagtctgttctgtatctgctatcctaactattcattgtattcattgatttttgttttgttttgttaccttgcttgaagattgatttgtattgaatttgatagaaataaatgttttttccgcttaatatgtgatggaatttcataaatgcattattctctgttttgctgtttataccctgtaaagcttcacaggctctctctgatttgtaccacttgggagttcttctgttatccacagttgtcgataatctgcaaaaagaggcaaacagtgtaacaacctacacaaagtaatgatggtgaagcaaacatgcctcgggttctgtttgttttcccactgtatcgttgctatgtccttgtgccctcctgttccctgcttgccccgtcctttacctgttaaacccggagccctttgcgaggttgtctgctgaactggggctgtaagaagttcctaagtgccctttcagaagaaacctgagagaatgaaggcatagcccttttcccaaccctggtatggc

SEQ ID NO: 28943 - DNA, 1149 bp, Mus musculus
agagtcttgctatgtagctctcaaatcaaatttgctatcctaccgcttcagcccctcagagctggcatttcaggcataagcctccatacccagtgtcctttattaatttttatttaatcattttaggaaaacatttcctatgttcagataaaaaaattgaccagcctattagacagtgccaccgtagcgatgagctctgtgtccattcagatgtaaaccaattttggcttcttctatttttaagcagaatgctgtgtttagtgcacagggaagcttttaaagctcccgttgccttaaagcctggaaaccaacaccctgatcagccagtctcatgtccctcctctggatctacggtctctagagtcggtcttccttggatgacagaagtggtggtgagagacttatgctgggctgacaggtgaccagaagagatggaaggtgaactggtgagctttatctgtctttggggcaaagctccttgcttttatatccctagtatccccaagggggtatgaggaaggcagctgcggttataggccatagactggtggaacatgtggatgctgccttctccagttcctaagagacagaaaggggttcttgtcagagtcagactccacaggtgatacaaactctttgaggtcagtttgcctcatccagattacatccctgttgtttcttatggaacctagcatgcatgagctgttccatgagtatctcttaaataaccagtgagcagtttattgtactgttgacttaaaaaaggaaaggaaaacaaaacctgcccagctcgcatcatgatgcgtacctgtatcacctgagcaggagactggtgagttcaagcctgcttggttccacagctaaaagacaaacataaacagatgaaaaccaccaccaccaccaccaacaagaaatcaacaaattatatagttgccagatatttcagaaaagcacagtgaagtcttgtacatacttcctgagtataaaactttatttatggggctggaaacatggctcagaggttaagagcactgactgctcttccagaggttctgagttcaattcccagcaaccacctggtggctcacaaccatctgtaatggaatcccatgctctcttctggtgtgtctgaagacagctacagtactc

SEQ ID NO: 28944 - DNA, 1782 bp, Mus musculus
tggcccatgctgtgtaactgtatccatttgttagggtatttaattaaactcatagatcatttctaatgcaacagtcatctgcccatttatccggttgattgtgtatgacatggtctactggatagtaggttggttcacggggctttgttctgacaggaatgtttttgaattggaacaataggtggctgttcttgtagaaaatggaaaacttagtctcagtagtaccttacatacgtgtgccaatttatacagaactcttggacatttaccttatttccaagaatgccgtcacacagataagatagtagcacctgtctgtgtgccctgagacttggggagtggagcctcagaactgttgttttcagctggaaaccccgggtttaacctctgctgttcctctgttgcaaaagaggaaacaggtagacattcttaacatgcagctttagctgaagcgcaaagcaatatggccggagttgcacattttctttaccctgcggtttgtgtgctccctaattatggcatgagatgatgatgatgatggagacttgcctaatgaaaaggagctacccagggactctagtcttcttcttctttttttttttttttttgaaaattattgcttttattcaaatttttatttgtgtatctgtgtgtctttatgtgcttgtgtgtgtgtgctcgagcatcatatgtggacataagaagacagctttcaggagtcaattcttcccttctaccatgtagatcccaggattcaagctcaggccttcaggcttggtagcaagcaattttacctcctgactcaccttactagttttgtttggtatggagatagggtctcaaagcatagccctggctggcctagaatttactgtgtagaaagatcaggctgggcttagacatggcctcagcttccgaaggctgagattacagatgtgccgtcatgccatcggtcttctgggctgttttcttccattgaactaaaatgactttctgtgtaggcacagtgccaactgattgttgaaatccaataatgttttctattttgattttccatctgttttcaacggaaagagagacagctgttctgaagattgtaataattttctaactcaacagcttcttaagtgttagagtccagagcagtctcccagtgatccagccaggtccctggcgctggggctgtcctactacactgcttgagaaacttcatatttctcttgtgtataatctgccttctagggaaggttgaactcataaaacccacagaagtcaaattatttagattgagccgattaagtccaaaccaagttcatacctataggctataaaagacagtcctcttaaaatctggaatatattagtgaacttgaaaaaaataaagataatgaagttttatgatttgaatctgaaatgtttctcatggactcgtgtgttagatagtcggtgctgttgggggatgggggaggatttagaaggtactgcttgtctggaggaagtgggccacatgggtacctttcatggctctgcctttggtggtctcacctgggccagccctttccttctctccacttcctggttgctatggtggaaggggatctgctcccagcatatcctccctgccatggtggaccgaaaccactgagaatgtgagcctagataaagcctttgcctttttaggtagattatagcaggcatgttgtaacggtgacgaaaaaggactaacacagggagaatgctaaaatacttattaaaattgagtgggaaaatttgtttggaaat

SEQ ID NO: 28945 - DNA, 2406 bp, Mus musculus
gctgaccttgcagagtcttgacattccagcctgtcctttgggaagccgactcagcattttgcctggggaaataggacctcggccacccaaggtgaaggcatgacatccatctcactgtctgagattaagatttatgagtggacattatgataatgggattgcgtaatggttttaaggaattgatttagggattgtgtatgtgtgggttttttgttttgttttgtttttaaagatgtaatttgaggaatggctttacacaaactccaagaatatcaccaaccaagtattttttaatggaaacttactgaagcctttagcttcttcagtgtgtgtcctttggtcaagagcattaacaattattgaagtgacttaacggtggaaaggggttatgtagaaattgaggaattacccctttcttttcctggatgagctataacccaagcacatgataaagaaatcaggagccctaagatgccaaatcttgactccaggtcaggacattggggtaccagctcctttttcctttaagtttgctgttgattgaagaaaaactcttgaacgataccaccaccataattccaaacctatttgaaatccccttctaattgttgccatgaggctcagtgctctttcttttgcttagccaagaaaacattcttcatgggtgacagtttgcaaagcagcttggcccattcacactttgtatagacctggcattctggtgactgcaagccaggggaaaaacagagaagataacactgagtgctatttagaagggtttggttggggatagagctgtggtgtgccttcagatccaattggatagcttgccagttgaggagtcagagtcccacccacccagtggatctggcccctcccaccccgggattatctccgctgggtttgctgttggatgcatgtgaaaactatgcaagaatgaaactttcccagactgacatcagctggtggcagttcactccagtgctcagagcttcccactttgcaggggaagcagctcctactgctgggacttcgctaggtctctgggtgagcacatgtgcggcatctatttatctatccatacctgcatatgaatatgtctaacgtgcacacacacattcacaaagcaggtggtcaaaaagattatcatgctgatcttaaaaggttcacattcaatattgtgaaaagctttcagaagttgtgtttccaagacaatcattttgtttgtttgtttctgttttaatattcttgtgacaactaagttgaaaaagcagcatgtcagaaataattttgattctatatagacctcttctctttttttaaattataaaagtttattatttattttacctttaactgataatgtgaaattctcaaaaatatgttctctttaaaatatacagttgtaaactcttcaaagtaaacataacaatctaggtgttatttattaacgtattatacaatgatgtctgacccagtatgtgcttgtcctatttaagattggaatgtgagacatgttgctgtgacctgttttgttttgtttttttgtttgttttgtttttgcctcattccatatttgtagatattgtgtgaactacagtatataatgacaataattaagaggatattatgtggctgtcacatacattttgagatgatagaactatattagctttgtgtcatgtttgcataggtcattaacgttcacggtttaaataccattaaatgttatgcgattagcaatgaggaagaacccttccttaaatctgggagtttcccaccgctctttccctgatgcattatgatcctggacgcctgtctatctcaaaactcttaacacgtgcagaccaataggttctgtgttccttttaaataccaggttgtgacagtttgttgttggccagatccaccatctcattcatatttattgtaatatatttttgttttgtaaatacatgaaacaaaacaaaatgtcattgttctaaaatatttgtaatgtatattaaaaaggatacaaaatacttttagaaatatacattatttttgtacctgcgggagtacgaggggccagagagatgacgcagtggttagacgtgcacactactcttgcagaggacctcagtacccacactgcctgtgtcttcagctgcagagggctctgatgccctcttttggtttccacaggcacttgcattgacgtgcacacacccctcctctatacacatgattaaaataaaatagatcttaaacaagcaaagaagcatcccaaaccaaacaaatgagaaatggagtacaatggcaaacttgacagacaccctctaacccgacttgcttttaaagatcggtaagggggaagaatctgaaaagtgtggagtacatttgcaccaaaaggtaacctgacaagat

SEQ ID NO: 28946 - DNA, 1192 bp, Mus musculus
gtgaaaattggccttagttacttgcaggcctgcgtttatttaaggacctaaagaaatccggacccacagagtttgtaatgaatgagggggatagacggacgcggtagtttacacaaaatgttaatgtagtttgctacaaagcaagcaaatctatacaaaagtcaaagatcttacatagggatatctctaatcctgatttctggtgctgtcactcactcccgatctctactatatcagccacacactctcaaaacaaaccacacaggcacacaggaagagtcgtcctggaaggtaacctctccccatccttatcccgtgccccactttttccaccagtcctttcaggcaagtttcctaacagccagccagggtgatggtgagcatctagaatctcctgaggcagagcctgggccccaagtcacgacagtgaggaagggatggaccccagattgagaaacagggctgagatgtctcagaatccaggatcccccgaagagttaaaataaaggagttattctgaagtaatcaaagtgggagggggctgagactaggagcggagttcccggccagcggggcggtgctgaacaaactgggagactactggaatgaagttctgagtggcaggaagtaggaccagtagagtccgagctatgagtggcggaggcgggatcagtccaatggggtggagttctgcatggcggattgggatccgtgctggcagggactgagctcagccaactgggggcggagtccgcgaagtggaggaaggcgttgggggagggtctccatgagctggaggcaggattatgtgccagagtggcggaactgtgggccgagcggaaccgggcccggcagaggaggagctcagagtggcagggatcagaaccagtataggaaatactgagtgcctgtagggcagaatctggcataattgggtgtgaggttgtaattggcagaattctaaaccagtaggaatcaggttctgcatggatggtgggattgggcttctgggggcgggaagccacgggatggggcggagtctaaaatcaggggcggggcctaatgaaggggcggggctccgttggttgggtaggaagtcaataccgtcagggggcgggccgggctttggattcgcgcgccggccctggctagtctgggtgtgggcggcttttggagaaagccggaagcagcg

SEQ ID NO: 28947 - DNA, 2291 bp, Mus musculus
tgtttacagtgtatcttgcctagaaaagaagcaaacagattcgtaactttccaatttctgttctttgtgaaagaggtatttgcacctcatgttggatcactgataatcttgctccatgtgtttttcttgaggcagttactgcaaactgaaaacaaccatgagtctcctcaggacgatattaaggatgctactagacttaattaacaagcgttgtggaatccattaaacatgacccggaagttctctgtcctccacccatgacattcctagccccttagcagccttgtgtcatgcttcagtgcggtgtctgatgtagaagaatacaacctgaaaaggacttatcccttcttttgtgtttcagatcaagtggggagcctgtggtcttgtgctggccggcaacgctgtcattttcctcacaattcaaggcttcttcctcgtctttggaagaggagatgatttcagttgggaacagtggtagcccctcctccccatggaaagcattgagtcttagaatttgtactgtacgtatatgtgtgcacatgtgtttcagatttgaatatgctgagtttttttatacctttatatcatgatcatcttagggaagatgttgtaaacaaaagatgagttttactcctggcacacaggtcactccattgactcaaagtgaattatttttatcttctagcttccagaaagcctgttactatggccttgtagacagctgctcacttatccagggggtctaaaccttttgccttgggttaggcttgggagacactggggcagatctcctacagcccaaacataggtggcgctctccctgtacacttagactcatctcatccacacagagcatcagcatctgctaggagcccattggggatgcagggtcagactgggtaactttgatgcgattgcacacttggcgcacgcacattgacgggtgaggaggtttgttgtagaggaataagcatcatagctcccctgccctctctgggtgttgcatgctcatttgcaggaaaaaaaaaaaaatcacctgccccctgctgtgaatgagttcagacttcaggtgtttctaacatgttcaatacttgtgttgttcctcaaatttgggggacctgttcttaggcaggaacagataagtcatccaaaaggcagtggctgattgctcagaataagatacaaaataaccaaaaaacccctctggggtgcaaggagggaaacttggctggaatggtccctactttaagtggagggcaggatagacaattcttggaaatgtccctctacggtgcctcccatcccccatgcagcatttggtttgctcttggtggtgggtctcctgaagggtatgaggcaagagtgagcagaggggagggagtcactgaagttacacgctggtgcacttttcatccttgatattgaacttgatgtcacctccacaggacacacagggatccacatcattttggttcttataaacagtttttctagctcatcttttttatctggagcctactgggagaaggaagtgagaactacaagcacccagtcaggatgccatcagcggtgtttaagcattgatgctgctcgctaatgagtgtccagagcactctcccttgaggcttgcggtccaaggagtcagcatccaggccagggctggtgtgacgctgggaccagcaggtgaatggacagaggacagtgtgcaatgttatattttggccttgtgcatgacattatgttttgaatattttgtgtacaaatagaattgttagcgttgtcatttctagtatttacattagaaaaattatttagatacttgatcatttaactggcatttttaatcatgacacttgctattgtaataaatttgacttttaacactgaaggagagttgcatttcataaatctttaatctccatttaccttgtgttaaagatgagtgacaatctcttaacactttggaatggacagttctgagtagtgatcctgtcttggaatggacctctgtgataccattttgaccgtccagttggctgtaataacttttctttccccatgaatttatctgactatttttggaagtgtcttggttgtttgattacctcaaataaccaagatggctttcatgtaggagcttaaagtatcgctttttccctcttccttttctctttttaagatagggtcttactcagtagcccaggctacctttaagctcacttgatacttctctttcaccctcaagcacatagaccgtatctggcttaagagttatctcttgatttgatttc

SEQ ID NO: 28948 - DNA, 1099 bp, Mus musculus
tgtagacctccttctggagcactgggattaaaggtatgtgccaccactgtcctactcataattctcagacaagtggagccccttctgacctttttataacctgcctaagagtttggatgttgagattccaggccggggatccaattgactactcaggcttggctttgatttcttttggtctttcagtgtttcctgctagcttcttttaggtgtctcttttgttttctatgtatgattgttttgtctgcatgggtgtgtgtgcaccacatgagtacatcgtgacctcggattcagaaaatgccatcagagcccctgaaattggagtcttgaataggtgggagccaccgtgtgacttctggtaatcacgcccttgtcccgggcaagagcatcagtacccttaaccaccaagtcatctctccagatgccaaggtagtcagggttttttgtttgtttgttttgttttgttgttgttgttcagttaccacacatccacacaaacgcttcagcagaagaacatgagtctcatcttcatctccatactatatgcatacttattattctaaactatgcagatgtggaagtgggtgtgtgaatgagtgtgcaacagtcaaggcagccagaggccttatacttccccagagctgaagctccaggaagttctcagatgtccaacttgggtgctaggaactaagctcaggtcctctctaagggcagtacacaccacagtgtgtacctaaggaaccatttctccagccatggcattctatttatttattgtgtgtgtgtgtgtacaaagaacagcattactgccttggactgcttgaggtcaaagaactttaggagtcagtactgtgcttccactctgttcattccagggaagatggttaaaccatcaagcttgttactggacccctttcccttcatagcaaattctgctacccatattgagaaagaataacagtgaggggtgaaataactatgtttcaaaattcttctttgctatctattcatccatgggacatgggtacaaggactaggcttagggactcagaacaatgaggacagttgatagttgaacatttgtaatgcaggttttaag

SEQ ID NO: 28949 - DNA, 1175 bp, Mus musculus
cttctctctccaatgtcacggcaaacaatgaccagcaaagagtggcaaggtcagtcaacactacccagcacgatggtgcaatggagagcctgggtgccgtgaatcaccagtttactatgcatccagtgaagccattcaggtaccatccggtgaagccactctctccgtgcaatgattccgtacgacttggatgttgccttgaaggcttcaggagtcagatagatccctggccaggcacacacaaagagaaaaggttctaagtaaatcattatgcttttcacttttctttaataagactcagtgggcttcctcccactgacgactaactcggagagaactgtagaggggtggaatttttcaaatctcccactgaagagctcctgtgctgggaaccaatcatcttccctgtcattgtctgactcacccaacctcctgtggcagcccaaataagccaagtccaaagggggaaaggaaacagtcttttccctaaacataaaaacaaatacaaccgggctggtgagatggctcagtgggtaagagcacccgactgctcttccgaaggtcaggagttcaaatcccagcaaccacatggtggctcacaaccatccgatcacgagatctgactccctcttctagagtgtctgaagacagctacagtgtacttacatataataaataaataaatctttaaaaaaaaaaaaagcattctcttataaaaaaaaaaaaaaaacaaatacaaccaaagaccctcctttctcgaacagcatcctaaaggacatgtctctttatgagtctgtctgtctgtctgtctgtctctctctctccctctctctctctctcagtggtgagaccttccttccttttcctgtcttttttattctttaaatggagaaaaaaaaagaagtgcaatccccaagaacatcatgctggacacccctgcctctcccactccccattagtcctgctgagactgtgaaaccttagaaaggaaaggttgaagggagggcattaggatcattgaactccaccctcgtgaatggattcatggcccacttcaggggtttactgattttcactttcacaacagtggacttttctaactagctaatctgcctcctctcgggcctcttcttcatgtctagcagtatgccccatacatgcagagttgtaagcag

SEQ ID NO: 28950 - DNA, 1220 bp, Mus musculus
ggatggggagcggcagacctacacacctgccttggagcagtctgctgatggacataaggacacgggggcatcatcaaaggagggaaaagagaagaaagagaagcataagacaaagacagcccaacagattgccaaggacatggagcggtgggcacgcagtctcaataagcaaaaagaaaacttcaaaaacagcttccagcctattagtgctctacgagatgatgaaaggcgggaatcggccactgcagatgcaggctatgccatccttgagaagaagggagcgctagctgaaagacagcacaccagcatggatctcccaaagctggccagtgatgaccgcccaagcccacctcgagggctggtggcagcctatagtggggagagtgacagtgaggaggaacaggagcgaggaggtcctgaacgggaagaaaagctcacagactgacagaagctagcctgtctgctctgccgccaccagtttcccagcaaggaggcactcatccggcaccagcagctctctgggctccacaagcaaaaccttgagattcaccggcgagcccacttgtcagaaaacgaattggaagcactagagaaaaatgacatggagcaaatgaagtatcgagaccgtgcagctgaacgcagggagaagtatggtatccctgagccaccagagcccaaacggaggaagtatggtggcatatctacagcctctgtggactttgaacaacccactcgggatggattaggcagtgacaacattggcagtcgaatgttccaggccatgggctggaaagaaggcagtggtctgggctgcaagaaacagggcattgtgacacccattgaggcccaaacacgagttcgaggttctggcctgggtgccaggggcagttcctatggggtcacctcaacagaatcctataaggagacactgcacaagacaatggtgacccgcttcaatgagacccagtgaacaactttgaaagcagtttctacagacgtgggacagagaagatgaagtgtggaatggtctaagaaaggctcttctatctaccagcctgctccccaaccagagaagccaaattagacttggagttggtgacttctgctgggaaattgggctcagatcatgttccttttgtaataaaatctaaaaagcctgaaaaaaaaaaggtataagtactactaagaatgagtaaaataaaagagaagaaaacaaaaaa

SEQ ID NO: 28951 - DNA, 1243 bp, Mus musculus
ctgagttcaaatcccagcaaccacatggtggctcataaccatccataatgagacctgatgccctcttctgggtgtctgaagacagctacaatgtacttagatataataataaggaaatcttagaaaaataaaaaactaaataaaaagaaagaaagccaagcactaaccttggtttggaagtgagtctgctaagttcctgccaaacttttacaaaccttttatggttttacccctttatcttaaagctcagacgtaagtgttaggtctgtgttaagcagtgggctctagcactagtttccactcattattgagtagagacctaaagacttcaatttctaaaaatttcctagtgttgccaatactgctggtgcagagttgtcctaagtgtagatgttcaaaaacacaccccaagttgacttttctgattttcagggtatttttattattttaattaagcaaaattcacttactaatttttctctatatcttgtgtgttttatttatattacatttcaccattatttcccatccaggcatctaagcctctagctattatgaactcgttcatcctcacaatgtaccatgaggtagtaattggttttatgacagagaccagagtcagtttacccaagaatatactgaggctagacatgaacactgcatgtctatcaccagatcttttttatgtttaaaataggaaatcatggtgggctccatgtttcaagctgagattccagttggtgtttgtagatacaaagaaaatgaaaaaggtgagttaaattaaattaagtccctgaacttttgaagtgatggacttttcctgagggcatggtgtgagtttgtgtgtagatacacatacctgtttgtgcttatgtggaggccagaggtcaaggttgggttccttcctgtgttggctcttggccttgagacacagggtttatttagctaggcaggctggccagtgagcatctgtctttctaccctcagcgcctagattacagatgcttgctgccactctggctttcacacatggtgttgggcatccagacctgtgttttcaggcttgcacagcaggcactatacccagcctggtctgttaattaacatacagaatgtgataagaacatgatagcctattaaataactcttaatggcttctataaaggaagctgttatatcagtcataatgatcactgtttccagttttctctgtataaatctgacagaaaacaagggaattctg

SEQ ID NO: 28952 - DNA, 2974 bp, Mus musculus
cttttacaagttcttttacttcaaatttttgaagccctctttaaggatataaaaacattggtaaatttgaatgacccaaagacttaactgcaccttctcctttgaaaaccaaatcatatatttgattaaaaggtaatctttccttattctttatgaggaagaaaagagtttgtgtttctgctcaacatcaaattttttattatctggaaatgtctttacaacagacatttttctctccatacaaattgaacatcgttactaaggaaaccctcatgaatcctgaaggttatgctagcatgatttttatatgtagaagtttaaaaataaaccaagtcaggtttgtatttgtaaaattgttgacatcaatgatgtctttccatattcttatctgggcttaagaaatacattctgtatttttccagattctttgtagcctttgaaagatttttacagtacatatgtcttgactgagctgtcttttcttaatacaaaaagcttgtataattttcttaacttgtacagttggtaaacttttatgagaggaactgatattctgagtctgtcagctttcattttattttgctaagatttttctaatgactttttaagtgtgtgtgtagttaaccaagtcatgtttcttatccaggtggtaaaagcattcataaagaattatgaacatgcgttattttcaaacttctacttactgacaaataatttgggatgtctaaatttcagcatgatactcagattacaagcttgtttgcatttgctataattttataaattaattttgaaacaaaacaaaaacttaccgtcagcttaagtgcgtagatgtatcatgctgaatagaatcctgttcagttgctctcatgtgccctataagatttctcatcgtttccattaagtcaacagaaggggaagaccaggtgatgttgcaatattgccacatccaaggagtaactgttgacaggtagcaatattcatttttatgagaaaataatggttttaagaattttcagatttttccagttgtaatccagtttgtcagatttgatagtttttccaaaatgaaacacatacaaaataatcattgttctgtgtgatttttaaaaagggttatctgcactagccttgtatggatgggtgccattttatttttagtgcaaaattcttcttaaaaaatgtagttttttacagctgatagaccaatctatctccagactgttttttagcgaatgattattagctatgttttctcacacaggcacatccccaaatgctgctttcagtttgatctcagccatcagttcaagagccaatgctctcaaaggcagatctgtgctcctttcacaggctcagttgtctgatgcaggttgggtaaaggttcgcactgagaatgatcgcccaggcctctccctcagagtattcttagatttgtccagactgcttcctttccctcgaccagtattggaaggcactttgacagtacatcacataatatgcatttattgtttttgcagaaatatcccagtaagtcagtttcagatggaagtgctaagaagcatgagaggattttgtttgtttgtttgttttattgaaaaccattaatttatccagaatggcagtaggtcaagtagctttagcagatggatcatagcctctgtttccctgcccacccccacccatttctattatctctcttttttctgtgttttttttttttttttttaaaaacaacaaaaacaaaacagagtctcactgtgtagcccaggctggcctggaacttaacaatccttctacctcagccctctaatgctgagattgaaggtgtttcccaccacacccagcaacaatctattctctaaagcaggttttattaaatgagttcaaaccattctaactctttgtcacagatggtctctaggaatgtttttttaaaaaacagtgatgctttttaatcattacactattggaggtgtcagcccaccttttaaaggctacaactgctgggcaagttcctagagttcttgaaactgttgttacaggaactttttaaggaatttctcaggcatgttgggaaatgtgccaggtgtatatgtgttcatatatcttacttttctttttaaagtatgcataatgaaacatttctctaatacacgatgctcagcttttccaaactacattgttctgtgtttgtacaggtatttcaccctttgttcaaaactgcagccactgaaacttaagtcattgcacttttaaacaacttggcaatatcatgagtaatttgttaaaggtttagtatatttcataactcttgagcacttaagtaattgagatgagaaaataagccttcaggagtagggatgtagctcagtagtttgactgttttgcccaacgtgcatatgaagcctgggttccatgcccagtaccacataaactgggtgtggtggcacatgcctgtcatcctaagcacttgggaggtggaggcaggaggatcagaagttcaaggccgtcctcacctacatagtgagttggaggcaagcctgagatacctgagatgctgcctcaaacagaaatgtctctgttggtagttagcattgtcattttcctttgaaacacaatgtttatgatgtattctcagtaaggttcagaatctgtaactcagctcaacgcggatctgttgagctttaaaatgtatttgaagtaatttaagtaggcattcaaaattataaattagatgtttttaaatttctgcataataatttgcactgtaaaatatgtccttcctcccatttccttctgccattctgatatgctcattaaaatatttttgtaaacatacttgtgtggtgtctagttatttcactgttttaatttcagtgtttaaactctgtgctgctcggaacacacagtgaaggttgtactatccctgtgcctccatgcccacgaacagtgcaatcaacggtttttctgt

SEQ ID NO: 28953 - DNA, 1833 bp, Mus musculus
gaagcatcagtgttttgaaatcctttactctatagcttgctatctgggtggccctggcagtgtatacaatgtgttccagctagagctgccttccagtgggctgtctctggaaactagctggaaatgcagctgaggatctgaaatttcttttttcttttcttttcttttctttcttttcttttcttttctttcttttcttttcttttcttttctttctttctttctttctttctttctttctttcttcttcttcctcctcctcctccttcttcttctcctcctcctcttcctccttctcttcctcctccttctcttcctcctccttctcttcctcctctttctcctcctccttctccttctttctccttctgcttctttctcttcctcttcctcctcttctattttgttcttccttccatttccttcccccacctttttaattgcactgtcttcatagtatcacatttgccaaaggtggcagctttggcactaaaagccctgagaagtgttttgctttcctagactgtggggtgagcagagtgtgcctgggaatgtctgcttcctctttgttcagctggagacaagcaagggtggaagaagccagccattcactcactcgttcagctggagtgcagtgaaagtccctcgcaggcactgtgctgagtgctggaatacagagatccattggtaatggtcctgctctagactgaatggaaaatggaaaacgtggttctctgtccaactggaaaaatccgagactgtgcaccagttacttcagctctttggacctgcaggtctatgagattagaagcccctgctctgcctaccccacgccatgagtccagagcccacaagagactgaacagctatattttgtacaccagcatagcagtggctcagcctaacccttttcttaaagggacaatcaaggcagctgccaccccgtccccatgccttcatcatgtggatgtagttgctgctctttgtatccctgtttgcaggtcctcatttccacacaaaggcctacatttctgaactgattggtgtgagggaagagctaggtgggcatctttccattattggaacttggtcttttcttggaaggatctaagtccctctccctgaagtgatgtgaggtcagctctcacctacagatacgtctacctgatgagcatctcagaatggatatatctcctttcctcattctgagagagcctgtgtgagtggacattgactgaactgccttagggaggagtgattgccagagctgggtggcatggctctgaagcatcgctggctttggaggggcttgcttgggccagcatgattgctagggaaggagcttgcttctgcttccttggtgcttagctgactgcaggtctggagcttgtatttttttgtgtctcagtggggaataggagagttttgattttttcccccccctctatttgaaaattttcatctttaggctctatcttgcatataaattttgtaagaaggacatttgttaagttttctgtgatcttgtatcagaaatatgtgggaggttttggtcagtaatgccaagacaggctctccatggagtgttagtgggtcacagggccactgagggctttaggtctggcctttgctttccatattgagggctcttagtgaccagcacattgttaaccacatggacagatagagggggcagagcctggaactctcaagtgtagtcctcagccagagtcggaccttagttgaaaggacacaaatgaaagaagaaaaaaaaggaaaagaaaagagtcagcgatttgtaagtaagacctacctgcactgattttaggccca

SEQ ID NO: 28954 - DNA, 1197 bp, Mus musculus
tttttttttttttaaactgtggtaaaaatatcagtttattgttttaatccttggatgtgcaactctcaccaggcaccctccccaaaacattcaccgtgtcagatggaaactcttgtgggaacgaagcaatcatttcctgttctctactcccctcctcaaaaccaagtaacctgtgttgtgctgtcaatctctgtgaatctgactattctgtatatcacacagatgagcaatcgcacagtatttacccatccgtgactggcttaggccagttacacaatgtgttcaaggtacatgcaccctgtaccgtgtctcagaactggaattcctggcagccagcatggcatccttgactgttggtaacctcctttgcccgcacctccagatgcctggcttttcccctttcctgagttgtagctaaatcaacaacaaggctcacatctctctttcttcacttccatttcacaatgcccctccctcatctcttcttgaattattacttttccttctatattgggcaaaacggtgcctgttttctggggagcctgtctccagagatccccttcatgccttataaaaagtgacctctccctctgtgcccttcccatcccgtgcactgcttttagagaatgtcttactctgtccgtgctaccattacatattgcccgtgactggaccatttatagagaacaaacattctggatggttttggagaataagaaatgcaaaatcaaaaagcaccgccccatcgggtgtctctgttaaggcctaagccctctgattctaagatggtgccttgatcactggtcctggagaggtgaaaaccactgtccatggacagcatgggccttatggacagccgaagagacagaaggacaaaggagggcaagtgctaactgaaggctggtgtctgcagcatgagctctgtgctaaaggcctgtcttcctgattcagtcacattgacggttgttcccatgtatccaagttacccaaaatggaaataaatgtaaaattatggggctaggaaacaatgtttttctctgcctaaaaccatatttacaaaaattaacagatacttagtaaggcccgtcacaggccaaggtctacctaccatgggttctctcactcctgataatgactgggctacaatgggcctctgtaaaaggctgtggaatccggtgatcaaagattgtcacttgg

SEQ ID NO: 28955 - DNA, 1342 bp, Mus musculus
ctctcctctcctctcctctcccctcccctcccctcccctcccctcccctcccctcccctcccctcccctcccctcccctcccctcccctctcctcttctcttctcttctcttctcttctctttaaaaaagatttatttatttattatgtgcaagtacactgtagctgtttacagacacaccagaggagggcatcagatctcattacagatgggtgtgagccatcatgtggttgctgggatttgaactcaggacctttggaagagcagtcatgctcttaaccgctgagccaccttgccagcccctcagcatgtgtttcttaagcattacattcccagtttgtaaatacatgttttccacaggtgtttatatcttatttgtgtgtgtgtgtgttctagataaccaagcaaaagaaagatgagcctcctttatggactgcagtctaccaggataaatcggtttctctctggagtgaataacctggccaacaggagacagtggacccccccagcaagctgtccactggcaccaaagctccgagcagtaaatgcatactggggactgaacacagtcagtcattgtcattcagtgaccttactgcctagaaactttcttttctgtaggactctcaatcacaaaaaatcaagatgcctctcaagtgcccaaagcaaggaattgggggtgcttacctacagatgtactgtgcggggtgattctgttctaagacaaggagcaaggaaagtggctggcgttcctgctctcgcggcctcctgttctccaagctgtcctgccgtaatagaggcccggagtttccgtacatctgcaagggttcaggctgccccagtccctctcttgctgctcattctgaagccagtgcaaaagctccttgctatcatcgtgggcaggtaaatatactttggggggaaaacagtgtttgtgttaaagttcatgaagttttatgttcacatgtgtatcaacatataatactttttaataattaaactttagtatttataaaactacttttaaggaaacctttccctaggccatatttagctcaaaatttaaaggtaaattctatcagtcttgtgtgtatgattttaataatcttgaaatataatttgttgcaaattaattgtgcacaaatgtgatccttaagttttgttggttgagatatttctaaaagatttcacatttctaattataaggataacgggcaatattgacaatgatttgtgtaacaacagcacttaagaacattgccctttgattttgtggaattttaggcagttggcatgaaatgaaggacttcatttatatagttaggtgctcagccttagccac

SEQ ID NO: 28956 - DNA, 1453 bp, Mus musculus
agactggccttaaatttactgtgcagcaggcatggccttatacttgtaatcatcctggttcctggtcttcagtgtttggaccacagggatgtgtaagcacactgggtgtatgtagtgctgagaaccgaactgtgttcttgtatatgctatgagagtgagcactctatcaactgagcttcagttttcttttttttatatgagattttttaatgtgagatctagtcagctttattttctgaagttcttaggaaagtagaaatagttcattttacttggcatgtagactaatagaaaagaataaaacttggattgaagcatgtttatataaaaaaattataatttattcctatgtgagaaaccatactgctctcccatgaataattcaaatttcagaaatttgagtgtttaatatatgtaaatttttgcacagttcaagattaaatgcccaatactcatcagatacccttccatgaggcagcagaagcattttgtagtgaaaaatctcttaatagtactttttaaaaaaatcttctagtggatggaagaatttaagaacgatctgctgcctgagagagacccccgctacctgactgtgaaagaaatggtttatcatctgacacagtgcaatcgagacgtcccggggatctcggagaccaactgggtggttcatgtggttgactccccagccgtcaatgcctttgtgctcccagtaaggaaattctttatgcacgtttgctgttgttgctgctagcttgagcgtctttgagttttactgtgagctaattgcttatcctattctctctgtgcagaatggacaagtgtttattttcaccgggcttctgaatagtgtgacggacgtgcaccagctgtccttcctcctgggccatgagatcgcacacgcagtcctggggcacgccgtgagtaccgggatgtgcagctgctgaatgtttgctttgatattagcaagtggaatcctttaaggaacacagtcttttcttctttcaatttcttcttcttcttttaatagatgggacgtaattgccttattctgtacctgaaaaaatgtgattagctgatttcgagaatttttgcagtctttcgtatatgatcctgaataattagtgtttcccttaaatactgtttttatcacctgtctcttttgctaaaaagtaattagtctcagactctaattatttcactttaagttttaaatttccataattattaacatacttgtaaactagtcagaaaattaattgttgtaaagttatactactatttaagtggtaaatcagttttattcttactattttcacatgatggcttggaatgttgttggaaatgcctaaatgatatgcaatatggagttaatgtggaacagtaatgacatgggccgattagtttacagaacttcatctagtatgttccttctcattcagagctttaacttata

SEQ ID NO: 28957 - DNA, 2597 bp, Mus musculus
ggattcctaagtacaaagagagaaaggtaatctgacgagtaaatagatgtagtaatggtgtcatgcctagtgataagaggagtgacagagcccagaggaggaggagctgatccggactggccagttccaggaggctgctatgtgaaccattgcattagctcttctggctgcctcacagtcagggaaggttttgattctgattctatcagaacatttattggcctcctacccggtcctttgattctttctactctttcccttttcttttactatttccagcacatgctcagtggcaggctgaatgtggatctgtagagttcccacccacaagctacagcagacgggacatggtggctgagctgtgcaagggcacatgctcttctgtaggccaagcccactattgctgtgtggaaagcctcaggccaccataaagaatttagtggtttgtttataccctacctcattccaaagtatcatttgaaatgtcttcaagagggtctcacactccgccgccggcttacactgcgcttcttgccgctcctccgtcgccgccgcgtccttcgccgatcgcaatggaagaagaaatcgccgcactcgtcattgacaatggctccggcatgtgcaaagccggctttgctggcgacgacgcccccagggccgtgttcccttccatcgtagggcgcccccgacaccagggcgtcatggtgggcatgggccagaaagactcatacgtgggtgacgaggcccagagcaagaggggtatcctgaccctgaagtaccctatcgaacacggcattgtcactaactgggacgacatggagaagatctggcaccacaccttctacaatgagctgcgtgtggctcctgaggagcacccggtgcttctgaccgaggcccccctgaaccccaaagctaacagagagaagatgacgcagataatgtttgaaaccttcaataccccagccatgtacgtggccattcaggcggtgctgtccttgtatgcatctgggcgcaccactggcattgtcatggactctggtgacggggtcacacacacagtgcccatctatgagggctacgcccttccccacgccatcttgcgtctggacctggctggccgggacctgacagactacctcatgaagatcctgactgaacggggctacagctttaccaccactgctgagagggaaattgttcgtgacataaaggagaagctgtgctatgttgccctggattttgagcaagaaatggctactgctgcatcatcttcctccttggagaagagttacgagctgcccgacgggcaggtgatcaccattggcaatgagcggttccggtgtccggaggcactcttccagccttccttcctgggcatggagtcctgtggtatccatgagaccactttcaactccatcatgaagtgtgacgttgacatccgcaaagacctgtatgccaatacagtgctgtctggtggtaccaccatgtacccaggcattgctgacaggatgcagaaggagatcacagccctagcacctagcacgatgaagattaagatcattgctccccctgaacgcaagtactcagtctggatcggtggctccattctggcctcactgtccaccttccagcagatgtggatcagcaagcaggagtatgatgagtcaggcccctccatcgtccaccgcaaatgcttctagatggactgagcaggtgccaggcatctgctgcatgagctgatattgaagtatcaatttgccctggcaaatgtacacacctcatgctagcctcatgaaactggaataagcctttgaaaagaaatttgtccttgaagcttgtatctgatatcagcactggatcgtagaacttgttgctgatttttgaccttgtattcaagttaactgctcccttggtatatgtttaataccctgtgcatatcttgatttagtccttagttcatgtggctcggtcacttgggggctggggagagcacgctgtagatgagaaagccccagcctggtggatctctgtgagcaccactgagtgatctgtgcagggtattaaccaacagcagacttccaggatttcctgaggctggcaagggttcctgaaccagttaccactccttcttgccagtataacagggtgggaaagtccgagccttaggacccagtttcagttctggtttcttccctcctgaccaccatcggttgttagttgccttgagttgggaacgtttgcatcgacacctgtaaatgtattcattctttaatttatgtaaggttttttgtactcaattctttaagaaatgacaaattttggttttctactgttcaatgagaacattaggccccagcaacacgtcattgtgtaaagaaataaaagtgctgcagtaactgaaaaaaaaaaaaaaaaaaaaaaaaagaaatgtcttcaagagatatgaataatgcaagtccataggtaagggagcaaagaacaacagaaacaaatatctgtatttatttattcattgcatgcatgtgttatgaagaccaggcgagaatcagtaaatacgcctctttcttttctcttttctcttttctcttttctctctt

SEQ ID NO: 28958 - DNA, 1151 bp, Mus musculus
atatgtgcttcagcaagacctttgagataatgctgagctccaacatattgcctcttcctgcatagtgaaaggtggacactgaagcattgattatctgcctagcctagggtgtctttacacacaatgctggtactttaatacactctacacataggattttcttgccacttctatgcttgttttgttagctgtttgtctttacccatatgctatagagtgtcaataactgtaatggcagccagaagttgcttcagaatttcagttgtttaggagcttggctacagccctagtcagctccaatccaagaactactttattcttgggatccaggctctgagaacagctccatctagattggctagttctctattactgagaaggaatgtaaaagcctgcactgtatgatcacgtgtgtttacattttcttccagactgaggtagcgtgcgtcacatccatccatgttccattagtcaaggcagctcatggggccaatggtcagacctgacagttaaggggaggctttccatgaactttgaggtgctggcagtcacatgacacaggcagggctgcgtaattctcttattaggaaagacacagatattggaatccacagtatagtattctaccatctgcgtgttcctagactcccagtttcattcatttggaaagtgaaggctggagatgtcacatacatataattatgtgatttggactgttatctgactccctgtccatgttctttcccatctggtacccagttttatctctttctgcttgaagcatgcactcgtttcttgggacatggcgagttttataggatttatcaaagcaatatgtgtactcacatatctgtgacttcatatattctgttacatctgtaattgaattttttttctcattcagtgcagttaagtgttcatttctatctccagtggaaacttaggctgagatgcaaacccaaagccttcctttttattccatggaatcctttctcttctccttgggcttatcttaacagtgtgtgtgtgtgtgtgtgtgtgtgtgtgtgtgtgtgtgtgtgtacgtgtgtgtgtgtacgtgtactctgctcatctcagactttctatggcagaaataggagtcagtttttacttatgggtccctatgtgac

SEQ ID NO: 28959 - DNA, 1160 bp, Mus musculus
tgattttataatcacattctcttcaaggctgaaatagcaagagcatctaataccagggatctgcataaggaaattgcagtgccactgtgaagctcgtgattggaaaatatgaccattgtcagatggggaaggggacagaagcaggtcagaagcagcgcccatcccctccccccaccctccgtgcgcagggagcagcagagttttccctcactatgtatttcattggctagctgtattccatcacggagtggggttctacacaggcagggaggtttcctcttttgtttattaaagtgtccatgtagctagaatcccttcagttaagtcacattgataaaacaaaaaacaataaatatcttgtgtgttgagttggttctattttaggtggtataatgagaattacagatagcagaaactacagaaaagaaaaatggaagctttttttttttttttccagtgttctgttggcttggggaggtaaggtaaaaaattaccaaatacagtatataccatatgcaaaagacacgcacacacacacatacacactagagccggggagcattggaggtgtcctcccaggctaagaactctttcagaggtttgagttctcttgggagtctgcttcctgatactacagttggctggtgtgctgcagtctagctacataaagaagcaccagcaggcagaagcacaggggcatgctcccattttcagcagcgcaaagaattcccttagtcttttagagacctggattccagccaaattggggtgcctgaagcaggtgtagggggttctattgagctttttaagaaaggaactctcacagagaataaaagcacacctgagaaaatggttgcagccttattggggggtggggggtacgaaaacccaaagtgcgatatacccaactgtataggctcctaaagggcgcgtcacaataaagtgtgccttggcaccagccaagcataccatttcggtggctctcaagttctattaccaaagggtgctaagaaacccttttctttcctgaagcttctgtcctttccttttactctttgctttggtaagtgtggctggagtacagtttcagagatgccttggaagggattttaatctgataaggtaaaaaaaccaggagtccctagatttgaacaaaggcc

SEQ ID NO: 28960 - DNA, 1106 bp, Mus musculus
tttcttagtgcttttgcggacacttggaaaaatgattccatgcagagatagttgtgtcggcggctttatttcccttctgctgtcatggagttggaaagcaaagtccctactcttcttatcgcccttgcagccactatctctagctgtttttattagaaatagccacccagttttgagtaagcaaggatgacatctgttgataagttaaagccgtatagctccagaataaaagaaaacagacagactcaatccgcacaggtggaagcttaggggccaataccaaatgtttctgttttagcaataaagaaaaatatcttcaattatttcactttcttcctcttacctttccatctgggagaatcatatgtcttttaaagactgagtcaacgggggggggggggggaagaagaaggaaggaaggaaggaaggaaggaaggaaggaaggaaggaaggaagaaagaaaaaaaggaaggaaagaaggaagaaagaaaagaagaaaggaaggaaggacacaaaaataatattataatggctggtgtgtggatggcaggtaatttgtacttcactgatgtgttgctggagcaatcttaagggcgaaatgttagcctttgaagggatgaaagaaaaatgaaaacatttatttggttaaatggctaagtaaataaactgcctatcagacttccccagctgtcaggtccaagtagcatctgtaacaataggaatcgtttggtctgtctccctttgtaacaatagatactgccataaataataaatcgctgtcacttttttaatactgatctctgtagtgggaacccaaagcgtataaagtattgcctgatagtttcctagcgttcagggagaaagaaagatggacttctaatgctttgggagggtgagtgttcagttttgagctgttggtttgtttttaatgactgaaagaaagaaaacagagggccagagtctaaatgagtctgaaaatcaagtggcaagcatgtctgccctcccaagaagagggccagtgatacagtagtgctctgttcaggtgttccagtggtcaagtgatgaggatgaaagtgatgaggatgaaagtccactggtcaagtgat

SEQ ID NO: 28961 - DNA, 1121 bp, Mus musculus
gaatgaaaaaaattttttttggacagactttttaaaaaacaaggtttatacagatttttttttttaattcaaggtttgctactttgtgtttatttaaatttgcaaagagaaaccgaagcctcctaggaaagagttgcattgttatttttctcctgctagtctgaatgtgcattttcacagctaaaagtcacttgtaaataaggtttgttaccacattcgaagcccatgttttctaaatggagaacattttcccagaatcaaagagacatagacccactgtctacacaaagaaagaaagcgtacctggtgccttctcaaataattgtagagtcaaagtgaacgtgttccaagtctgccccaccccaccccctctcctgttcctcgggttctctgtgacctacctgtccctcccacagacggtcacaggatttgcttctgccctttcagttctacttgaccaaacctcacagcatcaccagtgacgttcttcactgaatacattttctctttcacttatttcactttttaaagccacctgggaaaatatttggctgccttcttatgcttttaaaatgaatgcaattattagcagtgtttatatttgaaagtttataaaggaaagaaattcagagctaaggactgactcttaattggatctaattccctgtgtgttacgatagcagcacaagttatgtaaccttgtgtagttttctcttgtacaaaatgtggatgataacctacctcacagatgtgtgtgagaagccgtttcaaagcccctaagtaggggtttatagtcccatcctcagtgtcaatcctcccttttttactagacacctttgagaatggtaggatgagtatcttgtttttagatgtcatatgtaataagggcatagtgctgagaatgtttaagacacagtttcacaaatcatagtgttcttactgtaagacacttaaaaatttcttgaaaacctcaaatgtttaaatatcgaatctgtcttttgtttcaataaatattgttattcaaagtgttgtctgaagctgccttaatgtaccaaaatacaactgtcaaaactgttcacaactatattcatggttgtactgttttgagtgttcattttgaa

SEQ ID NO: 28962 - DNA, 3131 bp, Mus musculus
aaaagcactatattgcaagatagattaagttaattgattatatgttgttttggtaaaagtattttaaattatgtgtaatttatctaataattatttattcatctattgtatttatgttgtaattttaaaaatcattgatctgattcaccctagaaaatattaagctcttgaaaaaaaaaaaaagcaacattgccttgacaggtttctcttcaccaaaaattgtatattttctatttaccaagaagcaaatgagactgttagaccaggtttctcatgagattccagaagacaagtttgtctgtctttaaatagctttttgaatcaggaatttgcatcatatcacatcagataactttgtagttcttttaaaaagatggtcaatatttatcactccaacttctcaatggtaaaataaaagaatctttgcccactgattgagaaggagagtgtataatttaaggtaccttaagtttaatctttgaaagattgccatcttgtggcaatagatggtaattttagtagttattttaataccaatacttagtcctgcctgggttatctaatgtgttttatgaatgtggcatagttctgacttctccaaatgtgtctgtatccttgtttgtggggtgggggagagatcaccttatgatgtttgcctaatcatggcatggaaggccttgaagtaaggaactgaatagattctttacctctaataacagcatccacaacagtgatgaaggcaggaaggaggcagaatgcttttagtctagtgaatttaaaccaaaattactttatatgaatgattatgatgctattcaagagctaaaagttatttactattgtcttaattcattccagtattatgaatacccaggttgacagttacctgctgaatttcaggagaactgaaggtcattttgtttcttttaacattttaagacataattatttaatgaatctagatgatagagtaagttggttttcagagagaattcagtgactcatctcgaaaagcagaggcaggaattcagtcacagcatagggatttgttgctcttggaaacagagaaggaaagaattctttgcaaatttacagttcctacatttcagtcaatcctatgggtatggtaggtactgagtttagagcagcctatcctcttggatcgtgcggagaataactattaagttatagatgtggtatgtcttggaaacggagtccatctgtttccaaaatagtatttcctaaaacaaagaaatcccacaaaataattttgaaatacattgtgttctgctctgcaccttgcagaggacagtgactattaactcgaaagacttgcagactttgagaaaaaaacaaaacaaaaagaccccacataactgcaaaaaccctactttgcccaaactagtttactcttttaaaacgtttgctgagtctggttgcttacctgtaatacgactggggagtatgaggcaggaagatacgttggggcctaagaactagatagatagcaagaccttgtttcaaattgaaacaataaaggaactgtagcatcccataagaacataggagaaacgattgtctctgagcgccacggtgtggtcgttagtgacagtgagtaacacctcttccccagagcctgatgctaattcagatctgctccattgaccatgcacatagggtcatcctgagtctgggcttgtaccacatgctggttttcctaatcatatgatgctttttaggtagaacatctattctttttttcccttagagggtgactgaaaagtcctagacaaggttacttatggaaaaccagaagagtaagagagcagtggctttctgttgtggcttcatggatagcaagccagttttattcatttttcaatggccactgaacgttttctaagtccttttatttaggaaaccaaaattgaagctatctcaaagtaaatctacagggagagagaaaaccaaaccattcacaagttagggttctgttttgatcaagaactcttgtaaaaggcccttgcaacatctggttatctgcagagagaagctaggagcctaagctaagcagaaacattaagaccctctgtgttagggaattgggtatatgtagcacagtaattctctactttatgcaagtaagtattcaagaatatttacttaattctcaatctactcttttcttagctagtttgtactcagggaacacaaatttaatacaaatgaaatgaaacacaatttggaaaataatcgtaaacaaccgaatcagatttttatactgcttcatctgtagtctctgctaacatgcaagcatgcttagttaatgtgggccccacactgatgttcataagacttaacagcctggaacatacctaacacagataccacagctctgcctggtcactcccagggtgaagtctcatacctaaatgtgagactgcccgtagacttgtctgctttgtgtttggttcagtctggcaacttgtccttcagttctctgtggcttgttaagtagggcttatggcttagtagttcttggcaactctgttgaaaactctggatagtaagtgtgatctaggacttggcctcaatttaaaaccctaaaatgaaagggatggacacagagctatcgtccctctgagctctgaagtcatgccttgtttactacttcagagcgtcagtgtgagtgttcacattttatgtatttgtttgctagtatgagtgttttttccttagtccgaggcatttcaaaggtacactaaccaaaagtacttggactactggaatgcaaaactgaaaacatggtgtggatttagcattcattagaagatgactgctaggtagcagtggtggggcccatgcatttccaggtctgctagtgctccctcgcagtacccagtccagtaagcaggctcactgcagttgatcatcttctgggctgaacagaaagagtttgtgaaacatctgagagtcaagtaataaaaataaacactggtgtgttgtttgtaagtcctggaatgacatatagtagttataagtgaatgtagttagtctaattataaaagctagttgattgcactaactagatgtaattttgtgaaatatttatgattatattgattttatta

SEQ ID NO: 28963 - DNA, 1184 bp, Mus musculus
ataaaatggccaacattcttcaggcttgcttacctacttggtaattctgcaacaacacacacaggttgtaagcatttgaccacttcaaacttcttttccttaaaaaccaaactcattcccagtctcctgctcggctgatgccatccttgtttttgtttgagaaagagccccaagcgttctgtgcactgcccagccatagtttcctcctgttggcagatgacctcctgtgttctcactgcccaatagcctttcctgacactgatgacagctaagcttgccttgagggctaaggaaatctggcctcaacctttctcagcatagctgtagtttttaggatttgtgggccacctctaatttttctttccaagatagccactgtttctttttctgtgctgttgtcttttgattttcatatgaaagcagcttaccttgtttgtatttgtggtaattatacacacacacacacacacacacacacacacacatatatgatatgtacaataagtacgtagctggttgtggtggcgcacactggtaggatttgctgaaggaggcagagtcaggaggatcacaagtccgaggccagcctgggctacacatttttagccaggtttggtggcgcacgcctttagtcctagcacttgggagacagaggcaggcaaatttccgagttcgaggccagcctggtctacagagtgagttccagaacagccagggctacacagagaaaccctgtctcaaaaaaccagaagtatgtatattatatcctacttaattaattaatctggcttttggtgaagacagcaagaggcccagagaagaaattcacattgcaggatagcaagtacctttaactctgtcctgaagctttgcttgatcatccttttgtttagcaaatacccacttccaatgacccaaagttttagccaatgaggtgtcatcaaacagaacacaagtagaggccaaaaatgtattttcagaacaggcttcttgtaattctgctattgtcaaaataaaaatgtgaatcacctggctcattcatcctgaaggttgagacagagcctggtgtcagagacatggaaccaacacttggctagccacattcagcagacccccagattcatcgacatggaatcattgctcattcttttaagtttcgtgataattttttttgcagcattgtc

SEQ ID NO: 28964 - DNA, 1188 bp, Mus musculus
agttaatcttaggaaattattactgctttgcattagtagagttgttattcactgcatctggttcccctctgatgtctcctctattaggcaacatagaccaagcacaatactgtgatcgaataaagggaattattgaactcttgggcagtaaattgtcactagatgaactcactaaaatttggaagatacaagtaagttgagcagaattatttttgcctttttctgatatgtatggactataggagagggggtagggtggtgaggagtcagtcaaaccagagggacctcctctggtctgtactaggtgagctatacctagtctgtgaaagccggtgctcttcttacctgtggccacttagttctgtagcagtcaaaatctggctggaaataaactgtgctagacatgtcagacacatgtcagacacatgtcagacacatgtcagacacatgggcttgacgctggggaattgcttacaaagcacgcagtcatgtggtgcacaggcatatttgccgataaaatatccacacacataaagaatttttttaaaagtttagaacaaaataaaaaaaaaagtgttgctaagatggaagatggctgggaggaatctactttgggaggtgcagacagtgaaagtggagagtgccactcccactagcaatgccagagcccctgctggcccaccagccctgtattcattctctgagcctgagcccaaaccactccttcctctcccagtcctgctactcactgctcatcacaggaagctagctgacaggacactgtgggagcacagttagctgattcccctcccagcagtacagagagggctacagttgggcaggattacagaaaagcactcctaggtccctagactttgcttcccgtatgtggccgctggccttggtgaacaccctcatgtataatgttttctcagtatacattctgaacccacaagaggtgaagattagtagatgggacaggggagggggacagagacagaatgagaatgcctgctacatttaatgaacagctacatatccatagtggttttggagaaagttaactgaacctacatgactgaggttataaaatgagcatcagtcattcacagtagggtctatgctactggccattgggtcaaaagtactagttgaagtcataaagattttataagcaacatttaaaat

SEQ ID NO: 28965 - DNA, 1205 bp, Mus musculus
taaatctttaaatgtttatctgatctctgggtcctagggggtgtggaaaaggaaagtggtataaatttaatgacaccgttattgaagaatttgacctaaatgatgagaccctggagtatgaatgctttggaggagaatatagaccaaaagtttatgatcaaagtaagtatttataagtagatatagtctattcattttattttttattatttagggttttttcagattagaagctataattctttatataaaaatacaatagattttgttcttattttcctaatgcagagatatgattacttacagaagacagttctagcagctgtgctttcaaaacctcattatgtagtgtgttcccttcatcctctcaccccaaggggatgcaccttaacgtgtattctcagcaacactaaaaaggccttacacttcttacactttgcactttgcaaatttagtaaataaattgttgagtctggaggccctttattataaataatcactctgaaaaacatcttatttaccaaaccttctctcttaacatcttataaaatagcaaacccatacactgacgtccgtcgaagatactggaatgcctacatgctcttctatcaaagggtgtccgatcagaactcacccgtgctgccaaagaaaagccgagtgagcgtcgtaaggcaggaggctgaggatctctctctgtaagtctctgccatgtgattcagtgggtgatggcatcttcaagatacaatgctttttttttaaggtttatttatttattttatgtatatgagcacactttcaatgtcttcagacacaccagaagagggcatcagatcccattatagatggttgcgagctaccgtgtagttgctgaaaattgaactcaggacctctggaagagcagtcagtactcttaactgctgagccatttctccagccccataatataatgcttaatgtttaaaaatatttaagcatacaagaaatcctaaaatgaaaataagttgtttgtttattgctccccagactttattgccctgacaagaaattactttgtatttagaaacatgtatataaattagtcatggcagaggcagaattgagatttttaatttcaatccgaattgaggtgtgtgtatatatatatatatattgaatgtactttttgtccaaagcataatgctataaccagaaagattttttttatg

SEQ ID NO: 28966 - DNA, 2569 bp, Mus musculus
tcggaatctcccatgatgattggtgaattaagaagtgaccttgatgatgttgatccttagagcagtgtgcccagacaggatgctcagcaccttttgggaaaccagaatctcatcattgaaggccttaaataagccttgagtgggagccaggagtgggaggagaaccgcgtgctccagaggagagacttctctggccactagaaggctgggagctgttgggagaattctgcaatgtggaccagctgtcccagcgtctacatgtgcattgacacatgattttagaaaataaatctggtggcaaacttgtgattcatggacataggagagtgaggacgaggaataaagctgtggctctctctgtgacacagggagaagaaatgggagggaaaattattaatctgcagtaacattgaataggaatatccaatttacagtgatgtgaagatatgtggtaaaattctttctgttgtaaaatagtaatgaacccagttgacacaggcctttgtatttaatatgtctcctctgtacagacccctggtgtctggtgaaagccctcagcatggtctcagaccttgatgacatgcttccagcatcagagactgtggcattgttaagctctttgaggggttttctgattcaagattgacaagagcaataataaatttacaacaaaacaaaagctatgttctccagaagagtaaggtgtgttctctgacgtcagtcagtaaggactgatgggttgttcccaaaatagaatttaaaacaaaccattaaaagcactttataagtttattgagtttgacttcataaaactatcctttttaatgcttggagacatattgaataaactagtcttaagtcatgtgatctgcaatcatttgctttgcttaaacataatttctgtggccctcatgttgattgtgtattgagttaaataccaaggctgggagctgctactctgtgagattcagcagaattttactttagagaaagaattcaagacttagtttctccttaatgtgactaatactgaagagacaagatttaaaatatactttctctgaagtaactagaaaataattaaatgccatccatgtagttgtatttgccaacatgacatctctcattcgtttgaggctgggcttacatagccattccctgtgttctttacattttgtatcttcagttgctcagtgtcagccttgtttcacctttagttctgccttattttccacttgccatgcacagaactgggggagcctctggaagtgccaggctgccactgtcagctagatttgccaagtcaaagaggcacagccagcccctaagtgcctttttggttgcttttgcattgtgaggacattcggcaggcaggtcacagtccctgctgtgtgtttcagggactcttcatctcactgtagatgttccgtgcaaccagcttcagttgtgggttctgtagcctaacacagaccaaagccagctttggcctgactcacaaagatggtcaggacagcatgtaagagcagagctgtgtcctcagggaaacagacaggcaagtggcagagctggtcggatgctggtgttcttacagtttttgaatgtgagggactaaagttgattttgaacacctggacacccatcccattttctcccttcccagtccaccacctcttcacacccatgcttataggaagattgtgtgggacccgcattgaaacgctggccttgatacatggaggaatatcattgccagcaactgcactcaggagcccgaattcaggagtgaaattgccacttctagtcagccccttatttcctatggaaacgacgccttccgccctgcgcctgctgtcctcacataaagctgaatcagggtcgccgacactgttcacgttggtccatcttcttcctttgctgctgcagtgagcatccttccacgccatcaggaaccacttgatttccaacagcttcagtccactaaccttctgaggacttttttaaatgtagtaccacaaagtgacaattatggcaggcctgccttgaaagaattgtcatttttactgccaatttttggatgaagatgtttttataatcttttacagtggtctgcaatcaagcaggaattgcacaattgactcaatgctatgtgttctcaaggagctccttcagtctaggctgccctccggactgccctcctgcccctaaggcaccgggacacacagatgagcctcccacaggcagctcctggagctccccaggtggcctctcatggtcacctacagctatgagctgtaaggcccggagcctgagccaccagactcacctggctcgccccaccctccctgctagcaccaaggcgtgtacagcatcttaagcttggaacaagcagactggaattttcctctgctacctcttgtgtacagaatcttgtttataaatttcaaaaggaagtagctaaactagggaagactctggattctaaatttggttcatgtgtggtggagttcttagcttctaagagtataaaataaatttttcaaaaatgtagaattggagtctcacagacttt

SEQ ID NO: 28967 - DNA, 1163 bp, Mus musculus
ctagtagggacccagctcatgttccctgcactctgcccctctctgcccccttagtcctcccactggggttttcaggcagttctagttatgaccttgctgggtgcttcagggcctaggcctcagcagcaggaagtggatgctgtttacctgagcatctctgaaacagggagcagtaggaggttaaagtcacgtgaagcagaaattgcagagggaaattgaatacaggtgaaagcaacaggcgggaatccagtccaggccctgcgccccctcgctgccctatcaggtcaagctctcagcctatgccaattctctctcccagtctgaaaactcagacctgttctatgccgtgccctggtcctgtgggaccctgggcttcctggtggctgccgagatccggatcatcccggccaagaagtatgtcaagctgcggtttgagcctgttcggggcctggaggccatctgtgaaaaattcacccgcgagtcccagcggctggagaaccacttcgtggaagggttgctgtactccctggatgaggctgtcatcatgacaggggtcatgacggacgacgtagagcccagcaaggtaggccaggggaagaaaggtgggcaggcactgggcctatttagactgcttcatgtggcatggtccaccaggatgcaggtaacaggcttcctcagaaatgtgaggggccataagaggcctatctcctccactgctgccacccgccagtcacgtgcttcccttatagacagaacctgttgtctaatgacagcccatgtcatagatgaagaaaccgatgctccaagggctaatttagatttctacaaggtggcagagccaagatggagtaattgccttgatacttcctccagatcaaatgggcacacctcagctttcaccatacaacgtttagtgttttattaacatttgacacataacaagtgagtaatgtgtaacttattgttacacataacaagcaagtaatgttttagtctttattttcagacaaggttacctacctactagctcaggctgacctggagcgcactgggtagtccaggctaacctccaacttagggctatgatctgagtaagttctggaaatataggtgtgaatcactatgtaatattttggagtttgtttgtttgtttgtttgttttt

SEQ ID NO: 28968 - DNA, 3332 bp, Mus musculus
ctgggaccctctagtgggttacaaagtcaaagttcccgtttgcaaggatgtgggtgagctagtcccgggtctgctacctgctgggaaaagacagaccaagctgtttctctgacctctcactcaggtctaccccatctggctgtgcccattcatcctgcccagccagccaggactagtgcatcccaagggagatgaagcagagctctacgtggacatcggggcatacggggagccacgtgtgaagcacttcgaggccaggtcctgcatgaggcagctggagaagtttgtgcggagtgtgcacgggtaagtgacccggggtctgggggacacaggggcctcacacccaccttgtccatcctcaccgccgccgcactccttccctcccatgcaggttccaaatgttatacgccgattgctatatgaaccgcgaggaattctgggagatgttcgatggctccttgtaccacaagctgcgcaagcagctgggctgccaggacgccttccctgaggtgtacgacaagatctgcaaggcggcaaggcactgagcagggcacctggggagccagctgcatggacctgctctccctcgctcgctccggcttctctgctttcccaggtctcagaaaagaaacccctccacatccccgaggcagcccgatggcttccagggtggctcgggcaagtggaagcacgtggagtcagacagacctaagtcccaggcccagattagccactcgttagctgtgtgactgactctgggctagtcacctggcccctgtgtgccccgtgttcatctgtgaaaggaggtaaaaaaaaaaaaatatctacctgctggatgtcaccccacactaagggcttccaccactgcttccatgcaacctcacgcctggctcctgctttggatctaacagctgagtccagacaggctccccacaggtcacccttgcacgggtttggccaacaccatgaaggagttgccttggagtttcacctgcatagcttgcatcagccccgagagggcaaaggagggtcagccttccacttggcctcgggggtggggcagggggcatctgattggcaggcaggcccaggatgtgctgtgccaaagccaggtctactccaaagtcctctctgccatcttcggaccatcctggccctacttctgtgtgctcgagctgccccagccatcactgagcccactcaggactgctcctggaagacatctcaaggtgggaagcctggctttcctgggctttgctttcttaactcccaccatccaggcctcctctagagtccactgagtcacaatgggggcacatgctcatgactgtgtcacttaggggcggtccccacactgagtgagaaaggggcatctgccctgttgctactgtgaggaccctccctggggttagaaagaaagcatccagggtcactcatctccccctcccccattttgttccctccccccccctccccccccccccccccccggctctagttaatttcagtgccttacaaatcctaagctcagagaaagttagctccatttccgttcccaagggaggggcctctgaggtccttctgccttgttgatgaagagtggttggttgtagagcccccaccttcagaactgcctggcccagctggaaacccagagtctgagggggaatcaggttctggaaggcaagccagaactccagagctgagctggtcacagtcactcctcccccaccacccctgcccctccagaggctgcagttttctcgcctgtcacttggaacattagagctcctgaagcctgtctgtcttaagacgttgggaaagcctcgtgttgaaagccgggggagcttaaatgatccaggtggtagctagggaccgtccatcagtggtccttccctccaccgccacgccagctcctgggtcgttttcatttatctggcagagcccaggacccttagaatcatattttagctgaaggatgctcactgatgcggccgagggcttgggatactgcacagtgctactgtgtcctgtgaaggctggtgcactcagggctgtgggaaggcagaatcacctcatccatttggcctgtgaaggaagtaacctcactttgctgtctgagcagcatgtattcctggcatgggctctcctagtggtccatgtgcatccttgcgcatgtgcactcgctcgcagactgatgaccctgcttgctgcagatgaatggtcaacgcgagctaggttagttagtgtgatgtataaggcgccatcattcctcaagtcaagcctccatcccaaagcacctggagctgtggcaatgatgccagcaacctgtgtcacccaaaatagtcaaaatccagccctccacagacactccccaggacctggggagggaagggattttgagtcacattagcctcaggttagtgtttggctccagtaatatcttgcccgaaaagtggtcgtcttccaagcatggtgttctgggtcccagccttgtcttatcgcctgtcctgtcagtgtccaaccacacggtggcttggtggggtcactcagctgctatgggacagcacatgtgggaagtcaacgcaagcctctcccctccgtggctctggtttcttggctgcatggttctctgtaaattcagttgtagccactgtctttggctagaaagctgaattggctgttgctgaaaggaaggaggggatgggtgtggcgatgtgtgctgtgtgatttgttgtttttttttttttaatttggtcatggggaccaaggagaaggcatgaatccctgtatttggctcttgcagcctcaggcactgtgcctactctccaggtcatgtccctgtggttctggggccaccacttgtgtaaaataaagtacagcctggacgctagtcttttgtcatttattcagaggaccagtgtagagtcggacaaggacgcagccaccgccactggtgccattcagctccaatgtcctgtctgaacacaagcacccacagatgagggctaaaaacatgggggaagcgggtagcaaatggatttctgtcattccagtgaagaaatgctggcacctcaggagggatgggctctgtcctcaggcaccaggtacacttgtcaggtctggctggtgttctggcttcatcaatcggttgtgacaaaccagttttgacaagctcattgttcctgtgtcgatgtcctcatccaaaagccgaaggcacaacgacccttccagcagaacacagtgccttcctctgcacactaccagccttcctgtcagccagatgtgtccacagggattaagtggttagctttgcagtcactagagaccca

SEQ ID NO: 28969 - DNA, 1193 bp, Mus musculus
cagtctgcaaagttttggtcagttcttgttttgtgccaatctcaggaacatagatgcttaagtgttcaggagctaagtgtgttttgagagctcagagtcgggggctctgaggaggggcacggacagagacagagactgggctcctgccagctcccttcttgctggtttcctgtttacagctgcccatcccgccagcacagcacacagatgctccagagaactttggtgaattttcagacctgcagttcaattacagaaagagaagcaggcaacttggaatccgccttcagcagccctgaaaacctctgaggaagcccctctaatccctccatgtcacgcgcactcctcgacttctgccttcctctctctcccccccatctgaggacatatggccccttgaagtttttgtttgcttgcaggggaaaaacccaccctgccagtgtggagtgtttctctttctcttattattattattattaagcatcaggagacagcaatctgcgtgcagataccgtgcgtgcataattaataaaaaatctcattatttatttataaaaaagacgcatggggaactggggaactagggctatccccattatctgtggagagaaggggagagacagtttttgaacattggatccttccagagaagcaaatctctatgcatgcaatgaataaaaacccatgtgctcctgtggggagtgaggatctgtgcccagggggcatccgaaagcaaaagcgtggtcaggagcttaaaaaagaaaagggactgatgagagtctaaggctcactcacagagcagagtaagtataccatgtttgaggagaccggcaggatagaaatactgagagacacgggtttagtagctagtccaaggaagataacctggggcagactccagactctgggagaagcagctggagggagagatgctggcacaatcccatcactagttaccacattaaaaaaaaaaaaatctagatgccaggtgaggggagcccctgggttggctatgactaggtaggtagatgattttaacttgatggtgatggcggggttctacatggccgttttgcccttggcctcctgcttctctgatgcccgggcaagaccttcagaattaacaatccaacttattacgtaacaaaccctgagatcagggaatcagggaccagcctttccaggtttgcaga

SEQ ID NO: 28970 - DNA, 1184 bp, Mus musculus
tctgtcttaaaaaacaacaacaacaacaacaacaacaacaacaaaaaaccaaaacaaaacaaggggggcagatagctcttcaggtaaaactgtttgctgtctatgcttgacctcctgagtttgaatcctgaatgtaggacagaactaacccttgaaagttgtcctctgacctccacaagggtatatctccaaaccccaaataaaaattaaaactaaacaaaagagggttggagagatgactcagaagctaagagtaccggctgctcttccacaggacccaggttcgattctcagaacctgcatggcagctcacagctgtctggaactccagtttcagaggatctggcgttctcacacagacatacctgcaggcaaaacaaaaatgcacaggaaataaaaataaatctaaagcagaggagggtgtgctggagagatgatggctcagtggttaagagcaccaactgctcttccagaggtcctgagttcaattcccaaaaaccacatggtggctttttttttttttttttttttttttccaagacagggtttctctgtatagccctggctgtcctggaactcactttgcagaccaggctggcctcgaactcagaaatctgcctgcctctgcctcctgagattaaaggtatgcaccacaacgcccggctttttttttttttttttttttttcagtcttgaattcacagaggtcaccagcctctgcctcctggatgctgggattaaagatgtttgccaccatgacaacagggcagaggctccgtttttctatggcttggtctgtgaactttggaacctcactgccccatcccactcatagcctgtgccacacctgggaagatctgttggtctgccttctggtctagggcatgtaacccagagtcactcagcactgaagtgacagaccccaagcagccaagatttctgacagtggcagggactggcagaaaagaagcgacattgagtggacagctggggacctggcagccaagagtgagctctgtcatgaagccagctctgcttccctaatactgctgcgaactataggtctttgcttgaatggtcccctggttttctcttaggagatccctatggcttgcagggtaatgtcccaacttctgtcagcacactgtgaggtgcccgctgtgctacgggctgatccttacctg

SEQ ID NO: 28971 - DNA, 1240 bp, Mus musculus
gcaagttccaggttaactggagaaacaaaacaaaacttcaaagcaatattcaggacttcaactgtttaggcttgattaagcgtattttcttttctggcaaagttattagcagtttattaggcctcatatagtaaggttgagtgagggcagaggcagagctgttgcctggcatgcatatcccttggttccatgcccagtgtcacaaacaataaaatcgggaaaaaaaggctacaggggctgggaatgtaagctcagcaggtaaagtccttggcatgagtggggcccagctgtaaccccagcactgggagagtcaaaggtcaaggtcatttccaactctacagtgagtttgaggtcatcctgggctacatgagaacctgtcttaaaacaacaaaaaccttacagaactagagtgaagctccagtagttgggaatgacgttttcagcgtgagcacagaatgctccagaagtttaagccttcctcttggctccagggtgtctcaccatatcaatccagcgcttacaatggctagcggttaagagcactgactgctcttccagaggtcctgagttcaattcctagcaaccacatggtggttcacaaccatctctaatgggatctgatggcatcttctggcgcgtttgaagacagctacagtatacttatataataaataaataaatctttaaaaaagaagaagaagaagaggccaggtcctgagatcttctgcctctttccttgccacatcagtgaggagggtctaaggtgtcttgaccatgttccttggaacatgttgggtaaggagcagtattcaaccctgaaactaaacctctcaagcacattggatacaactatccccatacaacttatctctgagacaaaaagggttggggctgatttagtactgggccagtacagtcagtgggtgggattcaggatcatctaggacatcacagagaagttttggaccctgtctttattactgtactattaccgtaaagaaacattgtatccaaagcaacttaaaaagaaaggtattgggctggtgagatggttcagtgggtaagagcacccgactgctcttccaaaggtccggagttcaaatcccagcaaccacaaggtggctcacaaccatctgtaacgagatctgactccctcttctggagtgtctaaagacagctacagtgtacttacatataatcaaataaatctttaaaaaaaaaaaaaaagaaaggtatttag

SEQ ID NO: 28972 - DNA, 1333 bp, Mus musculus
aaactggacagtttgcaattgctggtttatttcaaaagctgtttggggaaaaggaacagaaaccaaccctttccacatgggccttggggtttgcaaagctgggcgaggagatgcaggtgtcagctttgctctggcttgactggccatcacaacacactgggccagaggacccagagcctgctgtcacccaacagagaccatcgctgtgatccagcgtacacactgttccaggatggctgcctcttctccagacctctcgtgccaagccactggggcctccagtctttcgatccccaccgtttcctggcaagagtcctgctggctgggtagtggcccaggccaaggaggagaggccccgccaacgggatgactacaatctgggccatagccctgacctccatattctggtcccgagctcctcacatagtgcgcactggcagggcaggctgaggttgtggttttcttttttttcctcctgtttgtcctttttcagagatgggtgttggttggaattgctctgtatttgcttgggactggatggacagacttcggcattgctgtgggggtgggggagcaccagcaaccaaacagacactgtttctggtcctgtttttattttcaaaaaccgatgaacctgatgatggagcctgtcccctccgaggaggggtgacttggctgccctggcctctccccgtggcaacctttgtgtcttgccccggaagacactgagttcattgtacatgtacaccctctgcgccctgcccacccttgtagctggtctttgttttcttacctcccctttctgacccatgtatatcatattatgtgagataccatctgcctgaaaaaagaccttgtgcggattcttgggaacattgtagctgtttctgtgttttttcttaccttgtagtctggttctgaattatgagaggaaaaaaaaagtaattatgatacattgtagtttgtgtacgatatatgttgataacgttttattaaagggacatcttttttccgcagcccttcctgacatacttgtggggacccgggtaggagctgatggtaccgatgaggaaggagacgctgtacccggtgccgagtacagttgccttgggaggggtttgggacagatggaggctatccttactcaggctgaggcagctgtagtcttctggcttgcagtcacatcttaccttccaaagctttgcttgtacaagtcaagaacggtccccaaagactgttttctctacaggtggtgggcagacagcaaggtggccttcccacattcctaccttcttccagaggccaaatttgttaacttcccatgcccaaatgc

SEQ ID NO: 28973 - DNA, 1160 bp, Mus musculus
atctaacttgtaggtaagttcatggcacaggaggtgacattcagtaaatggcagctctaaatactttatattttgttaggtgctagagagccataaaacatggcttgagattgctagcagaaaaacatcacagagctgggattttatttgaagggctggtatccactgaactagtctcacagctttgatttctctgtggggagtcagcagggaactcagctgtcttgagcatggtttgaactcctcctgtttttaagcactcattccccgtattctgctcttaccacctggaagtttcggttttcagatatctcaaaaacaaaaccagagtcccttgaggcagccttttctctggtgctccctgacaggcataaacatctcttcctgagccctcccctcccctctcctctctctctctctctcttcttttggttgtcccacagggatgaagcaggctctctggcttactaagaccaagttaatagaaggcctccccaagaaagtgcttagtcttgttgatgatccagctaatcacatagagaaccaagaacagcgtgttttggatatcatctcccatgcccggctttggcactccactgaggacatccccaagagagagacttactggtaagtttcctccagataagataactgaggagtgttgggagttatatgttgctttaagtctccaaatatctcttctttcctccaagcccactcattgtggacagcctcatacagctgtgtaaatcccagattctcaagcacccttctctagccaggcggacctctgcccaaaactgcaccttagccaccacctggaaccgcggtaggtcaccctatataccagaaggccttgctgggctttttgttgttgttgcttttttatttgtgtgtcttaatctctcttactgtcagccccaccaccaggtcccatccctctcatcctgctacatgctctttgggttcagaagcacccttccttcagaaatacccttcactgcatagcacaggctggcctcagacttgtgatcctccagtctgcaccaccaggcccaactttctcgtttctgtttttacctgcttctaagactttattccaccagtgatggctgactgtgtctgttgagtccccagagcatgcgggagtgtgtaaatgc

SEQ ID NO: 28974 - DNA, 1196 bp, Mus musculus
gtgggggggagggggagagggggcaggttgctggctcgagaagggagggccactgttgctcatgcagggagcagaagctcaaccacatggggtcggggagggcgggcgcagggagtggggaccttgtcagggaccactgagtgggaagtgaccacagtgggcccgggaagcttccagcaggaagtgttacagcagctcttgtatgacagcagctctcagaagacccttggagtaattcttacaccgctgtgttatgccttctgggtagggtcttatgtaatatacattttggggtggattaagggtctgacagcagatgctttctattggcttggtctgagatgttagggatgcctcatctgcacgtggaaggacttgggatgctgcacctacatgaccaatcctctccatggggtgtcgtggtcacatgacaggggaacaggtgaagcacttactgtcctctggtatgaggtgccgggcttccgaatccacacaaccttatcaaatttcctggcacggtcggtccattgccccgcagataaccataagtacagtttctcttccttacaaatattctgtagcactttaacctggtctaggtctgagaacatagctcacaggagagcgcttgcctcgcttacacgaggccctgagtttgttagatccccagtgccgcagaacaaagagcctttgccttatttccctgtcttcgctgaccactcttcgcagttatttcgcatgactgttgtgaggtggtcttgccacgcagcccacacaggcctgaaacttgagctgcccctgcctcagccccttaaatgctgggaggcttttaagttaaatcttatttgctgctttgtgtctctactctttctccccacttggagagcttccagttcctggaagtagtgtttgagttttcctcccttctgagtctccagtaccaggaacagagcccggtgccagttaggtgtccatagctgttgactgtataattgagcaacccgcagtgagaaaagaggagcgggtctaattaaatcagggatgcttcctggaggaagggatacctgcatggttgaggtgcttactcagcagagaaggcaaactgtggaaagccgcagaagtagagggacaagtgacaggtctagctgtccgggagacagcatgtcgggcaagtgtgaagtgtgactttcatgttc

SEQ ID NO: 28975 - DNA, 1196 bp, Mus musculus
agccaaagctgtctggagggctcagtagtctgcatcccaagcttgtgctccaggtcagagccacttagtaagaaactagaactgggcttgagcagagttgtccagttggtattaagatcttgtcagcagcatctatcacttaataccacagaatgtccgtcagcagccacgtctcatattttctgcatacatttttgcctttgatgttcataaagacatgatttccactcccaggaatgttaaggataagaatatgatttctcctttcccattcaaaatctgtcttttggtggtccatatttaatgagctcttaagagtgtccatgttcaggggcttggctctattagactacaatctgttgctgatgcaaattaactatggtaaagccaacatccagggtactcaaattcaccaaacactttcatacacaacccacaacttctatcagtataacaagctttgagccaaagatgattgtgactgttcatgaagttatctgtaacctcttccaggaagatttgttctcttgcatacacacaccataaataatatattccttactacttaaaagtgtttgtttgtttgtttgtttagctcatgtccctgatgccaagaatgcatctcctcttccctctgactctggtgaggtcgttctggagtgacatgatggactctgcacagagcttcataacctcttcatggactttttatcttcaagccgatgacggaaaaatagttatattccaggtgacaactgtgttttacacattgacctaaattcagcaatagtcaatgtcatgtcttacatgagggtcttggcatagaaccatgtaatcagtcacctaagtgcttttgtccagtaatgctgcttaactggccttcagtgaaacccgagcagcaggacacagtgtaatttaccacctttgcttcttcccttgaaagcattacctcaagcttagtggttatgtggtcttcttgattttatagtgactaaattgattaagtgagaaatttagacgggaaagtaagaattgtataactcaccataaatagtggcatacaacacagacactaggacattaatgacataataggaagtctatagtagttctccttttaactgcctgtaagaacatggtacagatacatttgccctctaggaggtaatttttcttttgtctaataattgacagtg

SEQ ID NO: 28976 - DNA, 1221 bp, Mus musculus
ttgctttgtctaatttagtaattagaatgtattctccgggtttggtggtctaaatttgcaatcctagtgagggaggaaggcaggagcttcaggccagtcttacaacataccaagtttgaggcctgatctccatgaagtctgcctcaaaagtaaataattaaaatgctcttgacagtaatttgatgggagttgtttttggttttgtgggttttttgttcttgttgctttagaatagggtcttcctgtataggctgactgtcatagagctcatttagaccaggctgtcctggaactcagagatccatctgcctctgcctctgcctctggagtgctgtgatcaaaggtgtatagtaccaatcccaacaacttgaggaaatgttatatacatagtaggaagtctatgtgtctgatttcatcattatttgtaataggtatttagccatactacagacattttagagatagaggaaagaacatcaaatcatcctaataaactagatgtaataaaattttgttattaattttaaagacagcgcacagagttttgtattgtgtgtgtaaggcaatgtgactgactgttgtgttgttttgcagtaactctggatggattttaaccacaacccttgtcctctcggtgatggtgttgctctggatctgttgtgcagctgttgctacagctgtagaacagtatgttccccctgaggtaagtctggttttaacccctgggctacttgaagccagagtcacatgattaatcaatttaagtgctgtttaactagaaaaataaggcccttctgctagaatgagagatttggtggttttactcaggtgagattggcccgtatgaaaaccacgtttgtaagcccagctgcagtggctcgcactctgcactgacacgtatgtgccagtgggcctgagcacagcgccctcacctcttctctgagactgaagcaaactgctggtactgctctctaagctggaatgtgagagagggactgtggagccacttaaaattatgaattaccataaatactgttttagaaactaagaaaatctttgattctgagttcttctgttctggtagctaacctcaaagagattatgaccttgttccttagtaattaaaatttaactggctcaagatacagttgttaaggtaaaggatatttgtttgggggaaaagctgtaatttgctgattcaacttagtttccaagaaaaga

SEQ ID NO: 28977 - DNA, 1099 bp, Mus musculus
aatgaacaaaagctgagcagatacccagctccttctcttgtgattgttaggtctcagactgaagaacatgaggaggcagggcccctgcccaccaaggtgaaccttgctcactcagaaatctaagctttttaaaagagtcgtggacacataaacttccattcctcatagagctttttaagatggtttcattggacataggccttaagaaatcactataaaatgcaaataaagttaccaaactctgtgaagactttatttgctgtgactttacctgtatttttctagtcatttaagatggacattgggttgtatttttattttactaatatctgtagctacttagttagttgcattggttttggtttttttcctctcttcgccaaattctatgagctgatcattgtggccccgcccctgccatgccccccgtcagtcatctcacttaataaccgaaaccttagggtgtgatgcttctgcccggaaatggcctccaaactgtcctctggattatagcagaaatgttatttaatgacactacattttcagttgtattgaattgaaatcattaaaatctatttgaataattatgttctgaagcttgagtgttgggctttcttgttcttccctctcctttcccagtgcagagtcgtgggttgctgtgtgtctgctgttctatggcagctcgatcgagcgatgctgccgtgaaaacaaaaatggccttctcagaagtggtgtaaagtgtgtgtgtgtgtatgtgtgtgtgttggatgttggatgtcggggacatctgcatgccacagcatgtgtgtgaagatcagaggacagtgttcaggagtcggttctttcccttgccaggttgagatgggtcctctgctcgtattttgctgctgcactgtgtactccaggcgggctggcctgagagcttctggcttattccagggactcaaatgacaaattcaggttgtcaggcttttgaagctaatgctttgtccgctcagccatctctcttgaagttccacttgatgtggttttttttgcacagcttagagttgaaagaatttttccaaaggagctgtttgacctctttaaaatcgcatca

SEQ ID NO: 28978 - DNA, 1184 bp, Mus musculus
ggaaattaagaaaattggttattgttagactcactgaacccagtaagtgcccacctctccctctgccgtgatagtgtatctgccactcctgctgccgggcattcagtccagaccaccccagggccttgtcttagtcctggatggtatcagactttggcaggccctggcccacgaacacagaaaactcacccatttcttatttctacagaccagaatcgagctcgcacagaagttacaaggaaatgtcccctcgcagagacccacatgaactcttctggaaaactccagttctatagggaggaggctccggactgccatgagccactgttgagccaagaatcaaagaagagcaagaagagagctttcaaggagtcagagcaggagcagagctcgccccagtcggccaagcagaagtgtgtgtgtctggctgtggaagattgggatttgctcaattcctactgactgacacatacagtcgacctcccccacctcagtacgaggaggggagactgctggtgattttcttttggtttggatttacctatggcattagcatagcaagcagatatttctacttttgtggtgcgggagggaaggctatggacgtatgtaataatttctaatgtatattttcaatacatagtaattttttcaaataaactcttttgctctcgttgaattctgcttttgaattgcagattggagccacaggagatagcaccatgtgaactaatgaatttggtatgacctgttcttgctacagtttggaacagctgatagaatgtagatgtgaatgaagctgctgctgactgtatgcttccctgggccatgccctggcctcgtagcatatacatgaaacaagccaaaattcagagccaagaacctttaacatcaagttaagtggcatgttcaatgtcatagagcttacagtaggaagtgagagtttacacttctttctacttggctgcaaagcccatcctgtgttgttgccttctcaacaatcattagcatttattgaaatcccagccattggaggtattcattaaaacccaagtgactcacagcagtcttggaagtaagagggcagaagctttttccaacttaagacttcctggaaaagtcccaatgataataaatactgtaggtttcttcaggtcacaagaattttcttacagatactcagc

SEQ ID NO: 28979 - DNA, 1164 bp, Mus musculus
ctgtgctgctgtgagtctactttgaaaagaattgttgctggcatttttttgtaaattctgggtgaattctccaaatgaaatttgagctcaaagttctgaaagatgagtagattactaaataggtgagaaaaatgcaaaagaggcacttcaggtaaaaacagtagaacagcctcatagtgacaaagttctcagcaactggtgagtcttgctttcctggtagtggtaggatcataaagctgtgggcacagcaaggtgaagctgcagatgacattctaattggatttgcctccacacaccttgcttttacagttgcaaccaaggcaatggcttactacctcaactcagaagcccacctggatccagggcccatctatgttcgagaaaatgggcagctacacatggtcaacctggctctggatggtgttaaaaacagcctgcagaagccacgaccattcagactctttcccaaaggcttttccgtggagctgtgcatgaacagggaagacgacactgcacagaaagagaagaccgatcactttatcttcacgtacacccgagaggggaatctgcgatactctgctaagtccctcttcagtctggtgctgggcttcatctccgacaatgttgatcacattgattccctcatcggctttcctgagcagatcgctgagaagctgttctctgctgctgaagccagacagaaattcacagagccaggggcagggctcagggcgttacagaagttcactgaggcctacgggagtctggtgctgtgctcgctgtgcttgcgaaacaggtgggtggtagtattctctctcgttagctagtgagtacttgagtggatgtttagcctgtcaagccccgggccttagtgggctcataagctctaccatcagatagtactttcaattttgaacttacacatttaaagtacaggtcattttgaggggggctagggaagcaggagggggatcagtaactttttctctcttcatctcatagacaatatttagcattattttgaaaatgttctgtaaggattagcttggctaccgccgcttttccaatagataaaaatacttggcaaccaacttctctctttttccctttgagatatggtcttgcaatattgcccaggctggtagagaacaactaggctcacca

SEQ ID NO: 28980 - DNA, 1137 bp, Mus musculus
tttaccttaaactgtcttttttatttatttatttttatgtgcattggtgttttgcttgcatatatgtctatatgtctgtaagagggtgtcagaagccctggaactggagttgcagacaggtgtgagctgctttgtgggtgctgggaattgaaccacagtcctcaggaagaatagccagtgttgttaaccactgagccacctcgtcagccctaacaaacgttttggtagtggagttttgtaggttttgctttgctttttgcatctctcatggcagaaggtattaaataatactgtaattttttttttaaccttggaccatggcacagagcccacactctgtggggaagcaggccacttgtggcaagtcagtggctccctggaatccttgactgcctaggttccctttcttaccttaagaagtcaatacttgccgggcgtggtggcgcaagcctttaatcccagcaatcgggaggcagaggcaggcagatttctgagttcgaggtcagcctggtctacaaagtgaattccaggacagccagggctacacagagaaaccttgtctcagaagaaaaaaaaaagtcaatacttggctttgaaaagtgctcatccatctgtgttgttctccccaaaagtaatgggttttcttaattttatatttcaaggtatctgagattagccccaaagatactgccaaatgttaatgaaaaatgtcaatattccaatgtaaaaggtgtcacttttgctacacagtaaattaatttttgcacatatgtggtgttacacatgtatgtggtatgtgtatgttgtgtgtacacatgaacacatgcacatgtgtgcacgtgtgtgtgcctgtgtggaaatctgaggctgacaccgggtgtctttccttgaatgctcgctacctttgtttttttctttgttttgttttgtttttgtttttgtttttcaagactggatttcattgtgtagccctggctgtcctagaactcactctgtagagcaggctggcctggaactcagagatccacctgcctctgactcctgactgctgagattacatgcatggactatgtccagctggtggattactttatcattagaaagagaaaagaggacagctcccaacacgtagtcaca

SEQ ID NO: 28981 - DNA, 1134 bp, Mus musculus
ggagatggaaacaggctggatgcttattggaatctttggatgtgaaaataaaatgatgatgttaggagctggaaagacgctgagagggtaaagtgcttgctgcttgagttgaagacctgaatttagattctcagtacaatcaagagtcagctgtgtgatgcatatcctaaccccagtgttgtggctcattggccagccagccagctgctgagctctcggttccgtgagagaccctagctcaaaaaataaggagagccacagaggaagagagctagtgtcgctgtggcctttacatgtgtgtgcatgagcaagcacactcatacaagactcattatggtccatgagttcactgaagcacaaattaaaaaaattaaaaagtcataaaggtacagaataggttttgaagtcttgaaaatattccctaagactaaaaaacacaaattactttgggagattttttttctcaataatatattccttatttttcttataagaaagtgtaggccatcaaggagttagaatttgttgtcgttgttgtttggcctttgagaatatcgctactaagcgatacaatcatgctttagctgatgtgtgtcatatttgctgaatcatgcaggactgatgaacataacccataagccctggcagagatggcagatgattaattgttggagacctaggaaatctgggattaattttggtttctgaattctactttgaaaataattgctttcattattaagtgagtctattcagccagcatgtctcatgtctctttcttttgttcatatttttagatagtaacatactcatagtttaaacttggaagcatgttggttgttgagtgtctggttgggttttgttgtttagactaaccctttttaggactggtaagttacactgtttccacattacttttccttagctgaggcactaattgcctttactatataaagttcagaaatactgtttacattttgaaaacaaacttggcttgttactatggtagctttcctatgatgaaatgtttacatatggttgtattttctctgttagcaacatctgtgtgaattaaaagaaattctaataccattttccagtacccaaaacaaaatctgaataatttactttgga

SEQ ID NO: 28982 - DNA, 1474 bp, Mus musculus
tctaccaagaagctgctgctacaaatgggaggatgtattcatcatactcagtggaacccaagaaactgagctctgcaggtgactcctagtcctacacaaaggggaatgtatccgtttcctagggaagtgacagtagttagttcctggctaattgcatgtgtgaggtagctatgtttagcatttttctccttgcccatcttttccataagtatgatgtgttttgttagtagttaaaatagggacgcagagcagactgggtagactgacgaggtaaagtgcagatggtgagttcatttgacagtgcttagaggactgagccccgggagtgaacagaaaacataggtatctacaggctggtgacgcaagcctgacaggctggctttgatcctggagcccacagtgaaaggagagaacaactcctaaaagttgtcccatgatctctctgcatgtgcctgctcttaagcacatactcacaatactaatgcatggaacaaacacatctaaaactccttgagtggtttctggattacagaaataaaacatagacattgggacttaaatctaaatggaagccatctactgtgctttggtttaaagccttaagagggcggggaggagtgtagaagttgaacccctgagtgctgcctgcctgggccaagctttcttatcaccactgcatatgctctgttacagaagaaactgcttttcagactccaaaacctagtcagacgccttccgtgccgccgttagttaaaacttcactgttttctccaaaattatctacacccaatgtttcaagtccttttgggaccccgtttggctccagcgtagtgaaccgaatggctggaattcttgatgtaaaccccttctctgggtctccccaaagtcctcagctcataagaagaggaccgaggctgtggactcacacttctggtgagggctggctactttccaggtttaaagttgtatagttgtagcttagacagcttatgtcctcatctcatcctttctcttttctagatcaacaagtgtctgcaatttctaacccatctccttgcgcctctgttactgctgagggtaagacagtgagacagcccagtgtgatctactcgtggattcagaataaacgagaacaggtaggaagacgcatctatgggctttatatgtatatgtgagatctccactgggagagaggtcagagctctcacagcagtagctttctgtttgttttatgcttctggcatcagattggctcatgaaatcacccatagttgagtattttgacttatactgcatttcatatgacttaattctttaagagatagttgagttaggctctgggatagacagcaagtaaacaaagccatttcccatatgtttatatcttagtaggggaagtagatgaataagcaagtatattactctatatatctttataatttagaactgaattaatgtcagggctgttctggga

SEQ ID NO: 28983 - DNA, 2243 bp, Mus musculus
ccctgctgatacaactacagatgggacagtaaatgttgagcattcttggatcagaagagagcggactaattagacgcttcctttgtcgtggtgcttgctttgaaaactatactttaatgggagaaatcatggaaagaaattctcagcagaataaccgaaaactgccttttctgtacccagtgctttttgtgtgtgtggtataataaaatctttattcagttttacaggagcgtctatggcagccgaactgtctcttgctcatataacttgataatgattattcacaattgtttgtagaatttacttttgaaaagagtggagccagctcagaagttaaagcaggtggtctttcccagctgctctaagaggttagctctttgtaaactctcaaaatacataaacttaagattagtttgtttactaaaggataaaaatggtaacggtggagaaaaactcacagtaaaaatgttgtctacaggacatattttgttaatctgttaggttgtgtttttgtttccagggacaaattaaatttgcatgattgtccaaaaagagtctcgatttacagatgttaactctatataaaggaatgtagaaaaattgaaatcttaaggtacacgactaagcattcacattcgggtagagcaacgtctctgagttcactgtgtgatgctagtggaggatgagggcatcttgtttcctagccaggcttgcttgcttttttgaaataacattaaacagttggcagaggttttcaaatgaggggaaaaggagacctggaaacttccctttccctacggtttgtctttaccaggtcaaattatgttgtgagtctagtctgtcttcacatgggagcagcctctgctgtgctaactggctaataaaaacacagtaggccaagctttagagccaaaagcacatagtcatcagataggcaggtgaatgtcagaggctctccgcaggagcgggtacgccccggatgtactgtacaggcggtcattttatgacttatgagatcatttctttggagatgaaacatgggaggtcctgctggcagatattcattggaccagctttgggccaaatcctcctttataaatccttttctgttatctttttctttaaagtcagcacagtattgtatatgagtcttaaatgtgatgtgtatgcctagcctttgtcggcttcattaatgtattacatctttacagtagtgtattttagccccagatctactgcccattcaaccagcacatggcaaattataaacgaatcccgctagccttaaaaatgtctctatgggacaattcctcaccttaattgttaagttttgggtcttttaagtcccctctctaccttgtgtgtgaagttctcttgatgtgttgtgaaagttgggtttccagtgtgttggtttcttcagatactcagaggagcctggctagataacagaattaaagccataggccttttgtgtttgctggctgcctctgactgaagcatttcgggagacaaatctaaatgttgtgtttccataaagaactgtggcatgtgtgtagctcactaaagagagcattcattttaacttggacttactcctgtgaaatgtctggtccagtttaggttcttgcctttcccacttcctctgggtgaaagtatatttgatagaaatatgaatctttctggatgttctgtgtctgaggtattgaccacaccatgtctgcctgctggggagcaggacactgccatcccctcagacctgtacagtccctggaaggtgaggggtcattctttttctccattgtatattggtgggcactctttttttttaaaggcacctttcctcccgcatgcaacgaggacttgagggaggccagcaggagagaagcgttggctttggtgaagttgcagcctgctgacgtgatggcctgaagttagccttcacaagcctttgtccctgttagtaacaccatgctccgagcccctctgtgtgtgtctctagtgggacatacaaagccacaggctgcttgtgcagagtgacgggacactcacccttatcctggtgagtaggcatggagaagtcccactcgttcctgtgcttggtttcttcagcagtgttttgtatgtcttcctgttagtatttatggcagtctgcttatatccttctgtatatcatcagtactgaattggtagaaaaataaagtgacaattcctaactgagactgttcatcaaacactgaatctct

SEQ ID NO: 28984 - DNA, 1148 bp, Mus musculus
ggggtcaggtggctcagggaatggggtcggtgtggtgacgctaactttttttttttttttgagatcaggactaaatagaacgtgactgcccaaactgtgatctagggatggagtttcccgctttctaaagctcggtgctttcttccctccgcaggagcctggcgcgacccccagccgtgcgccccgccccggcgccatgcattgcgaggtggccgaggcactttcggacaagaggccaaaggaggcccctggtgctcctggccagggccgcgggcctgtcagcctgggagcgcacatggccttcaggattgctgtgagtggtggcggctgcggggacgggaacccgctagacctgctgcctcggctaccggtgccaccaccacgtgcccacgatctccttcggccccggagccctcgagactatggtgtgtccaagaccggcagcgggaagggtgagttccaccgcaccagtgtgctgaccgcgggcatgctgaggtcaggtctgtggtaccggtgtctctgccaccggctctgtagggattctagaacttcatggaacttccttaagagttccttaatgtctcagtatctctgtagttgattgggactcgcctgtcagtctgaactgatgcctggaagcatccaatttaaaccaaataggcatgtttgagaaggagatgtgtatgtagaaagcttacattacataattttgcttctatatgtttctgatgaaagtcgtgtgaaatgtcaaaattttattgtacattagtatctagtaattttttctaagcaacggaaggcatattttgaactatcacagtctctctaagaaaggaaggaaggaagaaagaaagaaaagacaaaaccaaatggaggattttagtaggacctcttccttaggaacctcagttttctcatcggtcaaattaggaacttattatgccaaatgatttttctgactcctgacttaagttcttttgagcctgtaatctgggttgggtcaagtgttgacttagaagtgacttttctgtgcttggtgaagccaaggcaggcccagaacccgctatgggcaaattcagggacaggtgctggtagactcctgaagatattcacccaatcatagttaattattaccgacatgttattta

SEQ ID NO: 28985 - DNA, 1214 bp, Mus musculus
gactcttagactccccgagtccccagacttatcccctttaccctgtctgcactcctggactcttggggggctacaaaggaagggaaataacacccaaggatctactcctgtaccctgtaccccccacccccattcttaagaaagatgcctccagagcacgccggccttctgcagtgggggcagctggggaccggtgagctaggtgtgctgtgatctgacaggcacagccaggtaggaagtcttctgttgaagggctccatgctggcactctgcagacaggccggcctccctgttaattttgaagccttagaatgttcccaaggatcccgcggattcctgctcatgaaactgcgcaggtcagaggccacacgtgttttgcttttcttacttgaggtattatgtgttcaaggtagatttatgctacaacctttgcttattgacttgttctttcccccgtgaacctgatggaacatgacagacgatatttacaaggcacgtgtttccgattaaatcatgtgagacattaaagcccgataaatgaaaacccctttgaaaggccaagttcagaggaggaggccatccctggcggggccttgaaggtggaatcgtcccttcagctggctgcagaaagtgctgtggagggctggcaggccctttgcctgcatggggccatttgtcactttttcccagccagtgactatggctgcttaaaactccgaggagccctgctccctctcacctgcctagggcggcaggagggacaagatgctccttgagtacctactgtgtgctgggctctgttgcccgagtgagggctttcctgcagtctagcaggacagcccagaaactctgaggctgctgctatctagtagatggaataagagtggaaccagccaaatgtgaccacagtccccaggatgctctgctttcactgcctgtgaccctggtcaagtttcttaacctcaccatcttggtcccttcccccgtgaaatggggacagtaatattgtctctttaggtatgctccatggtacccaggcccatgtagtgttcattattaagattatactttctgcagacactaaaggcaggcagttatagctgcaatctaggcctttggaccacaaagtttttctcagtattacctaggtggttctgccgggtgatacaggccagtcagtgactaccaagtgtggcttggctgcctgctgctcc

SEQ ID NO: 28986 - DNA, 1157 bp, Mus musculus
ctcaggcttggacggctacttgccagagggtaactaggagtctggctccacccaagggtcttttcctatccctgtccctcaagtggagccacaaagcttgcaagtgatgcttgtggtgtggggtgtcccagattgcttcttcctctaggctcgatctaaacctcagaccccaaaccagagcaaatggtgctaatttgctgaatcccaaactgaacccagggattaattttttgtacctgaaccaagtctatgatttcttactggaaataaagagagaaggttctatttaatttaaagtctaaccgccttttctcctctacgattgcccggagttgcttggacaaggtcctgttggctgttggctctgggtgattttacaggctggggtggggatggagtggggagatacagtccccattgagagcttttgagggcaggtttggaggaaagggtggtagacagtgtcagctcaacagaagcagccagggggctggatggagtctgggtctttctgttccctgcttgtgtagtaagctctctggagatgggagagctggcctgttgcctggagtgaggggagtggggcgcaatgctctggaggtctgtgcatgaggtcagccacacaagctgatctgggtgatgctacctgccggcatggcttcgtttttcaatatcctcttaggtttccccgaagaccaaaggcaaattagggtgtccctgccggctgtggggcatcatggtccccttatttgaggctgaaccaggtacaaacccaagcctctgatatggggggggggtaatgggtgggatacaggcatctatgtccactcatcctgtctctctgtgtgctgcacgcaggtcagtaaacttctctaagcctcattgtaggcgtgggaaagatggcctagtgactaagggtgcactcatagtgtttctccaaaggacccaggtttggttcctagcacccacatcgtgcaactcacaaacactttaactccatgtccagggacttccagtgccttctggcatcagcaggcaccacatgtgtgtagtggacataaactcacacatcacacacacacatacataaataaaataaaaataaatgaattttttagaaatccagagaaataagaccctgaggtactgaatgtctt

SEQ ID NO: 28987 - DNA, 1193 bp, Mus musculus
ttccacggcagctttgtggattgggaccacttccttcatgatcctggttcttcccgttgtctttgagacagaaaagttgcagatgaagcaacagcagcaactgcagcagcggcagatacttttagggcctaacacagggctgtcaggaggaatgccaggggctctatctccacttcctggaaagatgtagattcttccttcggtatttgtccttgtgggagaactttgaaattcatttgtgtttgaactgctgattgttggaactttttattcttttttttttaaccttggcacatcgatctatttgaacatagtgggaactttctccgtttctcatggagagaccccaggtacacctgtaccctacataatgaagtccctcacttacttcttcctgttctcactccaatgctggagtacagccatgtggaaggttagcccactctctaataaactgctcctaaggaagttcttacgtacccattgtgggaaagaagtaagtacgcccgaccataaggccttttttaaaatggaagtgtctaggacatgtaagcactgtggcactgacaaaatccattatacctgtagtacaggagtcaccaggaatccctgtgtgtgccagagagaagggaggctggctgtagctttagccagagggggactgggcagagcaggcactcatttcctctgcagagtttggctcttagacctgcgtatgtataaaaaaagaagtcagcgctcactttttgtatttaaatattaaaagaactcgaactgaaaaaaaaaaagacgctctaactaagacaatggggtagcgaggggttcctttcaccgacacacagccacccagcacactttaaacctcttgagcactcaggcaatgtaatagaatggaaatcgttgttctgtgggcacttgagggacaacggcagggggaatctgtacgtgtccagtggatgcacctctttctttttcttctgagtgtttttgagcctcagacattgcggaccagtgacacgtttcccctaggctctttcgttttcagcttctctataaatgaactatcataaccatcccacaaagcagatggcgtcaggaatgaacgaggtggaatcttgtgacctggcccacagcaggttttgtgggctcatggcttccttcttttggtctttcagttggaagccagggggttc

SEQ ID NO: 28988 - DNA, 1796 bp, Mus musculus
gtgtgtgtgtgagtgtgtgtgtgtgtgtgtgtgtgtgtgtgtgtgtgtgtgtgtgtgtgtatgtgactttttttaaatttatgttgcggaaaggtaaccacaaagttatgatgaactgcaaacatccaaaggatgtgaaagtttttatatgtataatgttttatacactttttaactggttgcactacccgtgaagaattcatgggacagccactgctgagtgactaacatgatgcacataaccaaacggggccaatggtacaaacttcactcatcatttgaatacagtatttacagaggatgtttgagttgagagcttttttaggtttgaggggcttgatttttttgtaaataaaattatgctttgtggctatccatcaacataagtataaaaagaaagaacgcttcaacccccttccccatttagattatttattaacatatttcgaaagtaaggttagctctataaataatttagagaggtgagagtatttatttttggtatggctggctcactgcacagactctgtgtttatgtgtgtgtgtctgtgtgagagaagaaaaatctgtagagaagaggcacgcttatgactattgttcaaatacataaaaacagttattttaaaacagtccacaagaggggtgtctagttttcagagacacttcagaaactttgctcagaaaacagatgctacagtttgtgcaggcatgcggtaggaaaggtagatcacctctggctactcctgaggccctgctgagccagcaaaatgctttccagttcctctttggctctcacgatgcccacctaggctttctggccagtgtactgaacagtgctacaagccctcaggagctcaagatagcagagtccttctttcaaagcccagcttagtgaggacttgggtcaacttcagtaagcttcctctgaagcaactgaaggccgagcctttagagcaaccattgtcaacctttgtgggtcgcctaagagcatcgcaaaccagatatttacattatgattcataacagtgacaatcacagttatgaggtagaaaggaaagggattttatggttgggggttagtccaacaagagggacagtgttaatgcttctgaagcatcaggaaggttgaaagccactgctctagagccaagtgagtgcatgtctagggttcccatgtttacagtaaggaccggctcaggcactgaccctctgagtcacgtgaatgaggacgaagaatttggaataggtttggttacatctatttctcatccccttattttccaccatttaaaaataataaacatgtttcttaccaccgtatgttcatatggataagactaagtccaaaaaggtgactacatccaaatttatatttcggggaaataccatgagataattatagcatactgggcatgtgtccacacacggattggtttcactgctttataaataaaaggaacaactctgggtatttgtatagaattttcttcatatgtaacatctttccatttcctgagccttgggggtggggtgggagaatgccacttgctgtctgtgaagtccactgttggaaacataattccatagtcccagaaggaattcagtccccaccaacttactctttcaaagtgtggtcttcccgcgactctgcagctctgcagttcactccagctgaacgaccagggacaagtacaacacaggagtttggcttaagtggcagcagactaatatctaaagttgacataactgaaatctgacatttgaggcatatgtctccgcgtccccacacaccggct

SEQ ID NO: 28989 - DNA, 1207 bp, Mus musculus
agcctacctggtcaatgcatatcccctggatatgtcccaatattttcggcttttcaattcaactcgtatacccaaacccagtcgtgatgaactctttactgataccaaggctagacacctcctggtcctaagaaaaggacatttctatgtctttgatgtcctcgatcaagatgggaacattgtgaatccctcagaaatccaggcacatctaaagtacattctctcagacagcagccctgtgcccgagtttcccctggcttatttgaccagtgagaaccgagatgtctgggcagagctcagacagaagttgattcatggtggcaatgaggaaaccctgaggaaagtggactctgctgtcttctgcctctgcttagatgacttcccgatgaaggatcttgttcacttgtcacacaccatgctgcacggtgacggcacgaaccgctggtttgataagtcctttaacctcattgtagccaaagatggcactgctgcagtccacttcgagcatgcgtggggggatggtgtagcagtccttaggtttttcaatgaagtgttcagagacagcactcagacccctgccattgctccccagagccagccggccgccaccgactcctccgtgtctgtgcagaagctcagttttaagctcagcagtgctctaaaggctggcgtcaccgctgctaaggagaagtttgatgccaccatgaaaaccctcaccattgacgccattcagtttcagagaggtggcaaggaattcttgaagaagaagaagctgagccctgatgcagtggcccagctggccttccagatggctttcctgcgacagtatggccagacagtggctacctatgaatcctgcagcactgcagccttcaaacacggccgcacagagactattcgcccagcttccatctttactaagagatgctccgaggcatttgtcagggagccctccaagcacagtgtgggcgagcttcagcatatgatggctgagtgctccaaataccatggccagctgaccaaagaagcagcgatgggtaaggcatgctgggtaaggcacgggtggggagaacaccttgggtctggccctccgtgagcctcggtaatgctccactcacatccgatcccttacccaccactaggtttaatctacttgccaactcccaaatggtctttttcctgtgctgtgtcgaaacagccaaagcag

SEQ ID NO: 28990 - DNA, 1197 bp, Mus musculus
gtgctgtttcccacactgggcgttctctgtacagattactagttattgtcattagagtcacaggaaaagaaacaggagaactgttcatagtctaggcctctgctttgagatagtcatctacagactttaacaatacaatggcttccagttactgtgtcctgttctcctctgtcccaagctttatcttttttaattcctcgagatgacattattatctctcttttatgcaaatagaaactgagacctggagagatgagcatcttgtctgaagccacccagtttgaatgtggcagagctaggattcttacttggccccttttgacccagagctttcctcggtgcctctgtttggcctccagtggacaagtggttctgtgaggagccactggccttccagttccctaagtgtagacattttaagctgatctgtgctcttctctttggatcttatttccaggttctgggatatacttttgaggacccggagtctgagttcctggccaggaagctgtaaatcatgcatcccccactgtggtttgacctgtgttttcttgaaaattacaggaagacagaagtgttgtgtaaggattttgagaacggcattgggaaggagctgcatgcgcacctgctcgctcaggataaacagaataagcacaccagctacatctcaggtaggtgcgcgggtgggcggggtcatcatgcccctcaggcatcccagctccttcccttcctgtgtgtgtggacccagcacttaagcaggtgtgcactggcagctacacaagaccagtagcttgcctttacagtacatgggcttgagacagaacttaatcgattctgtctgaaaacgatgcaggagtcctgtgtcgtgagtgtccttcagttctgccctgctgtcctctgcagccttgtctcacttgcctctctgatgccagccagtcatgtgtcagccaacctgctgcgtctggcttcccgaactgtccccatggcctcatgcacatcctgtccctggcaggttggtccttcctcagccatccaggtagagcagttggtctgaggaaacccagttctctttgccttcggtctagagtctgtggtgttctctcctgttcttacacttaaaaaaagtaggtgtttttttaatttaaaaagttctggtggtgcaggccggtaggatatgccgaaggaggcagaggcagg

SEQ ID NO: 28991 - DNA, 1123 bp, Mus musculus
cagtaacagtagcacatccgtctctaagatggacagttggttttcctttacttctgttgttgaatactgtttttgataaaaaatggtgtccttgctgaggtttactgtataattgtctctatatcattgttgtcacaagtacaacacagtgcttcagctcagtacagccagcatcaccttagtgacaatggctacatcgtattccatggtaaggacacactgctttcttacccattggatgctacaacgccattgagcatcaaggtcaccctgtcttaccagactgccacagaagtgtccctggccactgccctcatgctgcttcacttcaactgtgtctcatggaaggagtagtgtctgggtgtctgtgtctgatgttccctcttctctttctcctcgtctcctgcacatgtctgctttagataagaaggctgactgcacaatcaccatggccgactcagacttgctggctttgatgactggaaaaatgaaccctcagtcggtgagtacaggggctctgaccctgacgggacagacatctataggaccatgttgtcctgggtattagagaagcctgaaatgtccctccacgtagtgtggaagaaacagatcggtaagagttcagctcagggagagagcttaccctataaagtgcctgccatacaagcatgagaccctgagtttgggtggctcgcacccggcatggctgcacatggctgcagtctcagtgcagcggagacagagacacatgaatccctggagctcgctggccagctagcctggtgagctggtgagctctagcttcagtgagaggtcctgtctcacaaaataaagtcagtctctctccctctccctcctccctcctccctccttcctcctccctcctccctctccctcctccctcctccctctccctcctccctctccctccccctccccctccccctctccctctccctctccctctccctctccaaacacatccactatgccattcctggtctgtggtcagcccacacggaggaaagaacaggcctctggaaaggcttaacacacagagttagcaggcgtggtagaagggaacactttagggaggaagaagtgaggttggacacggtcttct

SEQ ID NO: 28992 - DNA, 1194 bp, Mus musculus
agctttgtattagaggcagtgagtttcttgcttcaccattttagtatgtgcctgcaagttctcacatgtaaaaggtgcaatgtataatttccaccataggtgaggtccacaatgattctatgacccgcttccctagtcctttggttctttttctctctgctgagacagggtctcactatgtaacactgtcctggaactctgtgtgaaccaggctggcctcaaactcatgaatccacctgcgtctgcctcccaagtcctgggattaaaagcattcgcccagccagctctttatttctttgtgtaggtttccagcagcccttactctgcccatcttgcaacccctgctctgtttgctgcctctgtagtttgccagtgagatcataaaaaggcaaattatagaggcactcttaattttagctcccattgatgatattctgctctaaggaagaaatttccctccttttcctgtctttaagtgtattcatatacactgcatgaagtcacaaggccttattttatccttgagatcacagtcctttagtatcaattattttgttgcagtgactgcccctggtttggccagtggggaccctctcaaggtgaccctgtgtccccgagtctgtgtaggccttcctttctctcttttctggctcgagaagttactccaatctcttcttccactttgtttttacagtttttagtatttatgtgcttttgggcttggctatgcagtaagtgaaggcaccagcccccccccccccccaagctgggattacataggtggttctaagctgcctgatgtgggaaccacatctgggtccatgtccgcagcccctcttgtcctttctatggcccatgcctagccccgtcatttctccaaggagtcttggtttcctttagtggaaagtgatgctgagacacccaccatacatggctgctggctagctcatccttgccactgccaggccttctcaggagacacatatgtgaattatattagtttagcttgtttttaagtagaaacttaggggtaatattaggtggcttatgtgttgttaatactcaccactggtttttagcagttagagcaggaatttagaaaactagttaagcaccatttgtagatggtgtcacttttgttttgtggggttttatttatttatttatttatttattggtggttgttttccaggc

SEQ ID NO: 28993 - DNA, 2626 bp, Mus musculus
ctagacgtgtgctatctttcaaatacaaattgtgatgtgaaggtgatctggtgtgacatctataatatcattaatgccatgtaagcagtgaactacttcatccccgcatctcagttcctttcaggtctggtgcagttgacagataagaattgacagataaactaatatcctgagacctgcccttgtgttatataactaaccaccagcccaaacacaggtacatgagctgaggaccgtatgaggacctgctgcccccccctccccccagccaattggctaggatgacaaatcctgaccagtagagtcttacctccattcctctgtcgatggcaactttgcccaggcgcacagcaatgggagcctaggagagagaacatcccgggtcttgaacttgaacttggaatgtgtagctcttacaaaggaaggtgcaggtctgggtctgggtccagctttcccactggtagggattatttctgttctgttcatccttctatgtcttaaagcttcctcccagaagttgtctttcagcctattctccaacatgcccttcacattagtctttggtgctggacattaaacctagaacttcacccaagctgggcaagtgctctcctacagccttagacccacagtgggcccctcacttccgagcaaacacttgctgagctgctgaggcctgtctttccctgtggtccttagcctcagattataggcatatgccacgtggtcagagtccttatggaaaatacattatattgatgcgaaatagaggctcatgggatggaagcactgggccacatattcagtgagtctcccaactcccagtcacctccccattgctgttcctccccacccagccctcatcccagcaagtgctagtgtttgagtttctatttggtttgtttgccatgagtgataataaacagtactgattttgtcattaaagtaaaaacttaatgttccccagaacagcacgtaggaggtagaggcaggaagatgaatttcaggctacatgagactccagctcaaaactgcaaaaattttaaaaatttaaaaaacattagcatgtttctggctatgtgactatattaaaattagaatacagtggataaaatttcagatgttacttgggaaccagtagtgtgtcttagtatgtctattcctgatatctaaatggaaaccagtcagctcctttagtcaatcttactgcatctacactccagaaccactccctcttcagtggtttgcccactaggtgctaactgctcatgccatccctatactaaaagttctagcagtggaaaaagtgaccagtgtaggtagacagccagtattatggtacacgaaggtgtatgtttgctttactttagaggccaggtatcattatgtagctctggctagcctggaacttgctatgtagaccaggtgggcctctgtcaggtttaaaggtgtgttaccattcctggctttttatttttggtggcgctaaggattggacctagctagtcttgtgtactagggaagcactgagttacacacacacacacacacacatacacaccctttcccttggctactttagaagccccaaatgcccataactctagggtaaggccactgtctcatactccactatttggaggcctgaatcaccttgaacttgttgagtgtactcaaaaggcaaaacccagcctctgtgtccagctggcttgctaacttggttccctctgtggaggtttcagtcactccgttggtcattctgagttctatatgagtcagggacactttccacctatagactgtcccttgccaaagaaaacacagaaaattggtgtgaaacaaattagttgtccctgactcctaaattaaagaacagtgtaagcgagggattatctcactttaagaactggagaagttccccttttctgtggggaaaaaaatcacttgcaggtctggagacttaagacgggatctaagtaggacaggttggtcttgaactcaaagaaatccacctacctcaaccttctgagtgctaggattacagttagctgccacaactggcgtcatatgtaaggacagggtttctctgtgtagccctggctgttctggagctcactctgtagcccaggctggcctcgatctcactgaggttctcctgcttctgtttcccaagttctgcgattaaaggtgtggctcaaatgtaaatttaatgttaaactgatgtatggctaatatttttgtaagtttatattttggcagttttgttacactttaaaatgttttggaattaatatatttgacctcaaagttattaaaattttggtacatattctacttcttatgagtgtctatgtgtttgtatgtatgcatacctgtgttggtgtgtggagaccaggtgacagcctcagcctcactctcacatttcctccttggggatgctggtccacatttttggagacatgatctctcattggttccccgattaagccctagctttttttttttttttcctttgtcagttctggggattgaactcagattctcatgctgggaagcaaacattttgcttgcttccgtccctagtcccatattctgaaatctcaaaaatcggccttgttgcgattgg

SEQ ID NO: 28994 - DNA, 2704 bp, Mus musculus
atttaagtaaaatataatcccatcatttatctcatcccttttctttcccctacacctcacctcttgtctccacccccacccccccaagtttacaggttccttattttaactatttttgtgacatatacatataaatgaatcaacatgacctgcactccggtgtgggatgtatctagagctctctctcttgaacccagatgaaccgccatgtgaaggaaaacacaatacaaacttagttcagaaatgacagtaacccaatctcttggctcagggcagcaactaaaatcctaatcttctaagccttattaaatctaaatcctttggtggtgaatctattattcagatctgctattgaagccaggagacactggtagctacatcttgctctcatactatccctgtccaaaaggtcggtctctttctctatctcacaacagcatctttctataccgggtaccccttcaagtttgtttttcctaatagtccactggggtcctctgcttactcagcagatcaggaaggttggctgtgaggatggtgttgattctaaggccctgactcttgaagctttggcagcacatcagcaatatagctggtgtgtgtcccaacccatgcttccatgactccagaccaagcttgtgctgaggatgctcagccagagctcaggtcttggtggagggtgatccctaggcaaccttgctaggagaggaggcaggcacttaggtatgcagaggtctgaggagctgactctgtatcccctttattttccaagctgacaccttccaactcacctttgctggtgccaattcaaatgccgcttgtcctgcaggcaccaggtccactgttgcccacctgattccctgtctcttctctttgtcagtgctcctggagactactaaagaaaggtcttcctgccccccaccccccaaggcatcccagccccaacaattccagcacaagctaacagttgcagcatgtttattaacacagggatatcagagagactgatagagaggttaaatagtttgtccagaattccccttgcgttacagagagctggagggctcctgacactaactcaaagaaactctgtgagagtaagtaagtcctcattgctctatccatggtgatcagagccaatgacaaagacccgaagtttttgaatgcagagagtccagtcactagccaaggtgagcagtatggaaggtggcagtgcactgcatggtcagtaccttggttctctggatgatctagactttatggtgtgtgcttaaagttagctgggtcacttgcccacaaatttgggagctcgtttctccctgaaggctgccattccttccagcctgtcctgggttgggatgttctgcaaagatacaatggatattagtttgggaggaataggaccagaggccaaaaaaaggccattgcataagtagatctaacctctgacaacatctgggtcattgtgagcctcagacactgctgtctcaggaaggccagcttctagcggtgtgcagtcactactggcctctgcagagctcagagtcctctctgagaatgatctgggttctgttcacaagtcccaggactccttgcttaggattttttctatttgttatggtggagaggaggctttctgaatgttctaggcaagcctaagcatagcaacttcagtttagcccagtgccgggcagcagaagccactttctctgattaaggagagtctccaggtgaagaaagacctgtgagtcccttggagctactcgggttagttaggaggcactggcatagttaaactgcataaggtttgccttgcccccaagtgtgcacaaacaaacagtagttatatacctgggcatagcacatctgttctatggccatccctgatgcaatgtccacctgcaaaaacataatccccaagtcaatatgactttgtccaaccacatctacacagaagagccggcccaccctactgcctgtaccagtctgaacagaaatgattgccacttagtaactggtgcctggatgtcccaatagtggtaaagggtgctgagagaagtggggtggggggttaatgtgtgatgtggctgttaggtataggtggcttcttccagatatagaaacacgggctacatgtttcagccagtgtctcttccccctgactgcctggccatgccttttgttactctagggatagtctttgacaggacttaggaatgaggttccagtctttatgacactggtgtagtcactagtaagcatggttcctaacttactttccaaagcacgtgtttgtatctgttaatgcatgggagaagggtgtggtgatctaaccagggtcccaggggctttacatcttgtcattcctaatccaatcaatcctcttctatgcctgtcttcctgtttgtactttaacttttctctggaaattcccctgccgccattcactaaagcacccatacacactcacatgccccaaatcaaggaatcagggcttcaggaatgtgagggagagtagtttcgggtaatcacgagttctcaactgaattctgggatgataggtgccatcatgacttcccactaatcttcagctcaagcaaacatcctttgttattttctgagatggggttcctctgcatagccctggctagccttgaaatccatgatcttcctgcctccagagtgctggtattaaaagcatgcc

SEQ ID NO: 28995 - DNA, 1107 bp, Mus musculus
gcgaccggagacctccacaaccccagggccctttgtgacctagcggcctttcaggggtgctgcttcttaaagacagggtttctttttgtctttgagcaatgggagtttgaaaccagtttttgggtttaccaattgttagcatttatcaattgactggttacttttctctgtgacaaaaagattgggtcctgggctgggccgtggaaggcagagacaggtggatctctgtgatttgagtccagccagggctacacagaaaaaccctgtcttgagaaaacaagaaatgattgggtcctttctattccttcagaagagggaaggaaactttagggagaccttggtcttgttccatttcctcagctgctccaggttatgtgtggccgagactggccttgagctcagcaatcctgctgtttcagtgctggggcttccagcatgagctgccacaccctggcgcctttaatgttcttttccctccaatttgaggaatcagatcattgagtgtgtgaatgtgtggggttgaagcgcaggcctggactgaagttagaatacattggaaattctcactttggaaaagctctgaccaaagctgagagaaaaagactgcagaacatttcagtgcatgcttttcctgatgtggacacaaagcgggtggttttatgagaaccatccctggcagtagtgaacaccatccagtctgtcctgcaaaactggaacagagtgtggacgccttcctttccctgttgagaagtagttttcactcagtcaagttttgaagaatggaagtaaatagcaaattcctctgtgcgtgtgtgtgtgtgtgtgtgagagagagagagagagagagagttttgcatgtttgagcctggtgtccactaaggtcaggactggaactggggccaccacatgggtgttgggaaccaaaccccagtcctctggaagagcagcagatgatcttaactgctgagccatctctgcaggccctggatgttagagttttgtgcttttagctagtgtggtccggacttagtatgtacacgcatgtttgtgtgtacatccatgcacgcgtgcaagtaagcacctgcagagggcaaaagagtattgaat

SEQ ID NO: 28996 - DNA, 1103 bp, Mus musculus
gagttaagttttttttgttcgttcattattgagtcagagtaagactcaagtgtatgagtcaaatgtgtgtcgctcttgctgtcttagcacttgctatgtagaccagccctgcctctgcctcccgaatgctgggattaaaggcacatgctaatacaccaggctcttttagccttattttaatcaactttagagcaagatattctttaattaatgaaaagttaagacactttcataaagggaagtcttttatagcatttttttcctcaaaaaaaaaaaaaatcaatgttacatgaagatttgaattctcagataatatgtagacacgtttttttagtcactgacttgtgggccagtgagatggctcagtaggtaaaggtgcttgctgccaagcccgagttcaattccctatggtggaaggagagaactgagtctcacaagttgtcctctatctccatgtgtgcatcatgtacactcatgctccatattaaatagataagtaaatataccaaacttaatcaacgtttaacatctccattcagaggcagagagcagaaggattgtgagttgggaggccggcttgagctactgaatgaggtccaggccatcttgggctacataaaagatcatgtctgaaaaatccaaaaaaaagtaactaaattagtgacgaaatctccgttgtttaggattcctctgtgaaagactggacttatgattatgagaagctgtcttttgcttgaattctcatgggatttaactctttccaagaaatgcaaaacccatcagaaagttgaatgtgtgtgcatttcagatacaattctggattgtctgggctgaaggtattccagttatggcctggtaaacaggagtattctgcacgtaaatcatgctgtatattcagatggaacatcacttaagtattaatgttgtatgtacagattgagatttttttttgcctaaataaatgttacaaattttatgtaaagtgtggtctactttcacgtcagatactttgaaatttagttttaagtcaagctccatattccttagtaaatccattgtactttcagaaatctacaaaagtctgtctactagagcatcattcc

SEQ ID NO: 28997 - DNA, 1709 bp, Mus musculus
tctgaagtttgttttccttctgggttgagagtgcaactcagctcagtactggagggaagcacaccgatttcaactcctactatcagaaaaggaaaagatgatatttaatgttttcttttttaagttatcaataaaaccataaatcaagaataggggctgggcggtggtggcacacacctttaattccagcacttgggaggcagaggcagctatatatctctgtgagttcaaggtctggtctacatagctctaggaagccagggctatatagagagaccttgtctccaaaacaaaacaacaccaatcataaaaatccatttaataaagttctcttactaatgagtccttttaggctggtctctggtcaatttttgacttttttcctttgtctcatggaatcagagctagcttaaaactctcaaccatcctgcctacgtccctcagcacaccccttgcttagctttttagtcccttcgttgtggtggtttgaaattacaggtgtgttaggataatactggtttgtctttgatgctctttgaccataggttccccccttggtacgtgctgatgaaaacatttaatgtgccaaattgggataaattaaggaacagtaaatttggctcagtttttggttgtttgactttgttctgtgagacaggctcttttgtagcccaagctggtctcaagctcactgtgtatctgaggatgacttgctactctgcctgcctccccaggccatgctgggatcacagtcatggccactatccccagatactttttgccttttttgagataggatcttgatatatattccatgctggccttagacctctgagtgctgagattatgggaatgcactaagccaggtttgctccatgtttcaaaatgcatcctcctcctcccccaagctcagaacaatatataaccatattcaaagttgaaaataggagaagaggggacagaaatgagccattttgtaatggtaacctgcaatctgtctcctctccaatggcacatttttatcagttggttactgtgggactttaattgggttttaaacagtgttaataagctaaaggcatagattaagtgccttctcttagctgatgtgggctcctccagttctacctacatacttatgttgagagagtgtttgggtcagatctgctctgagactgcttcccaagaggtttgcaaactgttttccttcataaaccctgtgtagtgacttcagatgacctcgtttatctcatggatattggatgtttagtccttgtcatttgctatgtgttgacacagttttaattttcagtgtttactcaaaagttttcattttagtaatgatgcaaaccccaccagtgataggaataagagtatggtagagaagtttgcattggtttttaggctcatcacggcgtgtgttccctaggatctcatggactttgcatgatgtggcacactatggcaaatgcagttgtttgtttccaagacttaacccaagacactgatgactaatagcctaagaaaaagaactttctcccgcctttccactgatctactttttaaaaaaattaattatgcaaaactgaatgcagtttcttactactgtgctgacagggtgcctctttaggacacagcctagctgacagatcagtgacaagtaaaaatatgccagcagtttagtagcttatgcttgtgaccctaatgtg

SEQ ID NO: 28998 - DNA, 2110 bp, Mus musculus
tggttttgatcggttagtttttaggcagttgcctttcctataagataattgatatatgaagaatcagttatcatcctatgaacccgggaggcagcaagttagcaacaaacttaaattccactataattttaagttgggaataattcagatttataatccagtaatagcaaggatgagacagaaggaactacagttggagaccacagagttgcaagccagcctgggctacatgggaaagaccctttctcacgaaacaaaacaaatattttaagggggtcttggtggcacttgcccttaattcaaaacactaaggaacaggtggctttcagggccagcatggactagacagcaagagcccatctcaaaacaaaccaggatgctcacatcttgttttgtaaataggtttaatctgaaatctcttctgaccacattcatacatgtctcaaatgttttccgtagttttaaagtaagtcaggaatgtttcagtttagaaaggagctagattaagctgtgcatctgagtgtgcacctgtaccctagtgcatagaagacaaaggtgagaggaatatgagttctgaaccagcctggactataaagagtgaccagcaagcttattgctagtatgcttttaccatgtctgactcatgtttcatactactgtcacactccttggacttgaatgtttcaggcttcctttataaggacaaatactgaatcaaactgaaagaaaacagacacatagaattatcaaaaagccatataaaactatggtttatttcttacttcattggttcaaggaattttaagagctatacgatacatttttacccaagatggttgctcagattcaccactggagacaagattgccattctgagactagcctgggctacctagtgatgcttgtctcagcagcctccatctcaaaagatgtctttttcatagttaaacacatttggaaaaaagaaaattctttcaaaggagtagtttttgctttttgttgacatttccccctcaattttaacgtctaagacaaagttctgataatatgatgtagtctacaataactagcaagcttgtggtgttgatttgccaagcttacaaagtacacttgtgaaatagttgagaactttggctccaagtgtcatgaccaaagtacatgtgctataggctattgctaaccttttacaaagtttcagaaaaataagtcaggtgtggtagagttcacctgtaatcccagtattagcagctgcgtagcaaattcagaaccaacgtttggttacctgatatcctatctggagaagcagaaccagacagaaatggtcaaaaggtctacagagtgattgagaataacctgatacatgaaggctcaaaaccaattcaatttatattctccaggccagtcagggctagattgccccaaaacaaacaaacaaacaaaacttaaaaacaaaagcccacaaactcaaagtgacagattgtatcccaagtaaatcaagctattagtgcccgtgttttatttttgtttttgagtctcaccatgtgtagacccaaggctgtagtctatattgatctcattcagttgacattcctgagtgagtggtaggattccacacatgtgctaccatgtctggctaagggatagctcttgctttgttttgtttgtttttgtttttccagacagggtttttctgtgtagtcctggctgtcctagaactccctctgtaaactaggctggcctcaaactcagagcttccagagtgctgggattaaagctaaaatgtagtaaatacatatgtgtatttataaattacgaatgtccagccagcttctacaggcctcccatttgtaattggttggtacttccaaagccactggcctagtggtgtgctttcaggcatagtttagactgacctgaatggccttgttgaactaactcatcagtatgctcagacaccagccatagggtcaggagtagcaagacttggatctgctggaagaaacacatgcacaaggacccaggttcagttcctgccagagaggaaacagaattatgagactttgtaagactggagtcgaataaagcaaaatatagatatcaaagcatctgg

SEQ ID NO: 28999 - DNA, 1134 bp, Mus musculus
gcagaagttttacacacaggcatagctcctctgcatgttgaccatgtagccagcctgtgtcttcatctagaaatggacttgtaggtttttttttgtttttttggggggtttttttttacttgtagttttttaatggctttttaaccctcctagagatgtggtgaaggtcagctctttctctcctagcaatcacctcccctgctcaagagaaacatgggcagttcctactgtgtgatacggtatattgttaacaaatatttgttgtaggaaaaccatgaacacagtggggtacttaggaaatcaacagagaaattggccatgggtgtggcaatggtgggggagaaaaggctgcaggaggaagctacctcagattgctgtttttcaggctccaaggagatgtcacctgaccaccatggtttgaacacagcaatcccgatggaggtaccaggggtaagctctccccggcagagttcatcctcgaacacacatctggaaagcaacaagaagcagaccgtgagccccacatgtctcccccagaaccagttcatggccacagtgactgctagcaacattccaggcagtcctgacgagatctctgtccccacccctggcccacacggaccagtcccataaacatccaataaaagtctttgcatcattacttctggaatctctttttttttggtgaaaatgtggggatacgaagagccaaagagactttggagcccagtaagatgcatgagggcttttcctaacaaaagcaccaaggtcttgttatagacccagctgtcttgttcagcctgaccaactgaggacgtgagtcacgtgggttactaacaacagcacacaatccagaaacctgaggtagtggagtctcagagaagccctccttctgaaaagtcctgacttgtttttctgtggcttctctgccccagagttgtgtgtgtaaaagtccctgggacggggagctatactcaaagggtagatttacttgtctaccctgccacctgtcctggagtgagcccctgttaggtacacagtgagagggagcacagcagaggctccaccacagtgagagggagcacggcaaaggccccaccacagtgagagggagcatgacacaagccaccatca

SEQ ID NO: 29000 - DNA, 1158 bp, Mus musculus
gccttcaaagaagtccttttttttattctatatggaacctagttgtcaaaataaggtccttaggcttggtggcaaatgtctgagccactgagccatcccactagtcctagcctatgattagactttctactaggccctatgtttaaaagtttccatcacctttgttattgatgagtaagcgtgggccttttgcaaaaaatgagatccaagttgtgtagcataggttattctggttttaatatatttgaggtgcctttataaaaccacaatgcatttgggcattttcatcatcagtgcacaaatgttatactgcaaaacatttttgttttgttttgttttttgaccatagttcttagttcaaaactttatcctgaaggcagacttgactagccagtaagtaagctcctgggatctgccttttcacctctggttgcccactgctaggagtacagatgtgcagcattgcgctgggcttttatatggtgattgggatttgaagtcaagtcttcatgtttttgcagcagatactttgtccatttagctatctcttcaggccactttatctgtatctcttaaattgtcctttatgaatgtttataaaaataatgtttgttacatttcactccagatttatttatatgtttgctagaaaataaatgctgtgtaattttcagggcccaatacaatagagtctcttgtttaaaaagtaggaacaaatccctattaagctgctagaatatacagtttattctttattaaggatatttttttgttttggaactcactaaatttaactgttttgtgagtatggatttgtagctaggcattggagcctggctggttcagtagtgggcacacaactggagaatattatatccatctcccattttccagtgtggcaataggtgaataaggtctttgcatttaatttagcatgtatgtgtgcacatgcacatgccatagcacatgcatatgtggaggtcagagagcaacttgtgggagacagttttctcttttctactatgtgggttttgagattgatcttagactatcaggcctgttgataaatacctttacccactgaaccatctcatttgccctagtgaggtttttataaaacagaacaaagaaagctaggaaccaaagttttttggaaac

SEQ ID NO: 29001 - DNA, 1337 bp, Mus musculus
aaatacctaataaaaaatggaaaaaaaaatatacgaaaatccatcaatgtaatccaaaaaaaaaaaaaaaaaaaaaaaaaagaattgagcccggccaataccctatttattttaacacttgagcatgtaagacaagtgtggcaagatgcttgcaagttcaaggctagactacacagtaaaatcctgtatcaaaacatgggggatgtgttcaggaaatcagtaacgtgggtattatattctgaatggtaagattccagattatttcttaggtttcatttttatttggactttttgtaaaacaaaacaaaaacagtgaagaacgagctactgtgtttcacatgagtgaagaaagctcaatgctagaacttttttctattttattttgcagctgtgctatattgactcccaaactgatggtggaatcccttcttactgctttgctttgatggtgatgttttttcttcaacaaagaaaaccccctcttcttccttgcttacttggaagttgggtaagcatgcgtttgcattgcagtgtgtgtgtgtgtgtgtgtgtgtgtgtgtgtgtgtgtgtgtgtgtagttcttatggagtgttgtgctcaaacattttaaggtggaattctagtttctctattttttctctttctctctcttttattttttaataattttttattactaatttggaatgcccatttatatagattgaaggctttgacccgaaaagaatggatgactttcagctgaagggcatagtagaagagaagtttgtgaagtgggaatataattcaagtagtgcaactgagaaaaacttaattgctgatgaaaacaaagctaaggcagacgaaccaaaagatgataccaagaagacagaaacagacaaccaaagtaatgctgcgaaggcaaaacatggcaaagtaagcttttgtttttgttttttgttttggcttttctacatgtagaatttatgacacctttagtgaacttcttgaatagcagtagattgagctcttggcctcatttcctcaactatacagtgaggggttgaactgttttagtttttggtactgagattatctaatacatttatttcatgtattgtttgaatcctgtcaaggcaattaattctgtttcctcattcctttcctatcctttttttttttttctttcttttctttctttcttgatttttttcaagacagggtttctctgtgtagccctggctgtcctggaactcactttgtagaccgggctggcctcaaactcagaaatccacctgcctctgtctcctaagtgctgggattaaaggcgtgtaccaccactgcttggcctgtttcct

SEQ ID NO: 29002 - DNA, 1156 bp, Mus musculus
tcattgctatgtagagatctgaggatgtgtctttggagaaggagtgaggcacacatattcttaagacatttgtatgatccccttgggaaggaaaaagtaatataaatgaagactggaacactgcaagaacattagaaaatcatttgctagtgtcaggcaatttgaaatagtagagaaagtcagtcaagatgaagtgtcaaggttgcagggaggtagattgatttgtagggaacttggaaatctggacaagatttaagtgggtgcgttggtaactgaacctgttgagatggaggaaaataagggaaagagctaaatatctaaagaaagcagtattaattagttttcaaaaggtaaatgcatgtgtagaatataggggagattatcaggtaaaatatacatatgtgctttaaggttttcttctttgtctctttgcccgttctctagtttcatttatgggtttaaagtcataaaagtaaataagcagtaaaaatattgagagtcaaaatttttaagttaaaaatctgaaaattttttatattttgttttcatgtttctttttctctttaatatagatgaattatcaccaccttgctctgaacaacacaacagggaacaaattttaattggcttggaaaagtttattcaaaaagaatatgatggtatgtcataggctaaaagttggttgttattgctactataatcacatagttttgagtttgattgacttaatgtttaactgttatatgttatatactattttagtctctgtggctgtgttactaataacagagataagaactgcttgcatgaggagtatatttaagacaggatagtagtcaacttgagagataaatataaatatttcagtaaatattaaatgatattaaaagtattgtgataaaagaagtgataggttgggtagtaaatcccttttgaggtagcatttgagttgagtctgaataatatgaaggaacaaattatatgaaatcctggagagtacattatgtaaaggaagggtagattccaagacttagattctatctgatgtgtttagagaccaactgggaggtccagtatgtttggagtggaatatgcaagataggttgtaaatagaaagacaaggtcatagagatattttaaggactagatcattaga

SEQ ID NO: 29003 - DNA, 1218 bp, Mus musculus
gagatcagtgtggtctagtgagttccagatcagccatggctcttagagaaagagtccttgtctttaaaaaatattttaaataaattaatatttatgaatattttgcttgcatgtatgtatgtgcagcatttgtctgcttggtatctttagaggttagaagacaagttgtgagtttattgcaactagaattaaggatgattgtgagccatcaggtgggtagtaggaattgaacctgcagccttctgaaagagcaatcgttgcttttttttaaaaagaattattcattttattgtatatgagtacactgtacagatggttgtgaaccaccacatgattggtgggaactgaactcaggacctctggaagagcagtcagtgctcttaacccctgagccatctctccatctccttgttacactgatttctacatttagttgtaatatataaaaatgcctgttttctcacaattttgtaatttgttacaaaatttctgggtatctttcagttcagtgagttttaaaaataaagtaacagagtagtcagtggtttgtggaatgagtttaatttttatttgtaatcattgtattttttagcgctgtgacattggagatgcatctcggggaagtttatcttcatatgcttacatccttatggtgctgtactttctgcagcaaagaaagccaccagttatcccagttctacaagaggtgagtgtttaagaatattataagcccaaagcatagtggctgatgcctgtagtcccaacactcgggactacaaagaaagaagtgtaatcattaggcgtttaatgccagcctgtgttatgtagtgtgtttcagaacacactaggcaactgagcaagaacttgtctcacaaagaactgttacaggtgcttttaaataaatcatggatttaaacaggagatcttgctgaggtcatgatggattttctgtcatcgatgtttttttgttaaaattaatgctataattaaaatagtgaaccttttgggaaattttactattggagtgtattgactaccatagtaattgttgagtatcttcggtaatattttaaaattttgaagtcttagaatactgaagataagctgggcagtggtggcacatgactttaatcttaccacccatgaggcagaggcacgcagatttgagtttgaagtcaacctggtttacagagtgagtctaggacaaccagggctata

SEQ ID NO: 29004 - DNA, 1102 bp, Mus musculus
acgccaacaagccataagtaataataaatgtgtatggagaatctcagcttgggttaggtatttcattaatcacttacttggcatcaagctataacattctaatgtttttccttgggaagtaattcattaatgttttttgtagataaatcctaaaatgatccggtcttgtaggttattaggttggataacttaaaatctaataataatactttttatgcagatctttgatgggaagcagattccgcagagaatggttgatggatggaatgcctttttctttgataaaacagaagagctggtaatttttgtataattattacattatagtatactggatggcattaggatatgcatactttaataattttacttgtttttattctttatatttttaataatatgtaacctttctcttctttttccttatcctcctcttcccatatttctcttttccttcccattttgttaactgaagaaaaagcgtttaccttcacttgggaagaacacggaatcactgggagagctttggttaggactgcttcgcttctatacagaagagtttgattttaaggagtatgtaatcagtattcggcagaagaagctgctgaccacttttgaaaagcagtggacttctaaatgcattgcaattgaaggtgactgtttacattactttcaattcaagaacacaaaaatttagcagggaaagctgatctaaaaagagtcaacctcttgttttcaatcacttaattttaagaggataattcactcacttggatagtttgcgagtatatagcactagactcctgtttggcacactctactttatggcataatatttataaatattaatttatgaatatttcttttctagatccttttgacttgaatcataaccttggtgctggtgtttctagaaaaagtaagttttaaaagtagagaatatgtgcattcaaatttctgataagtagtgtctaaatcttttgttatattctttcttcaacagtgactaattttattatgaaggcgtttatcaatggaaggaaactttttggtacccccttttatccactcattggcagagaagctgtaagtttatatttga

SEQ ID NO: 29005 - DNA, 1125 bp, Mus musculus
gccaatttcattaccatgtgcaaatgatttaaatctctgaggtgcagtttcttttttcataaattgtagttgaaaataacatttaatttattgaggttccacttctctgtagcctctttgcattgtactctataatgtggtggatacaaagtattagttctgttaccacctatgactttataataattctaattttttaaatcaattaattatttttgttttaagccaaggtttctctttgtatgtctggctttcctagaacttgctctgttgaccaggctggcctcaaacttaagagatctacctgcctctgtcttccaagtaataggtaaagatgtgtgccaccaccaccacctggcataattctaaattttatttattttgtccaaaatttcaattacagtgaaatatttgctaatgttgggactttttttcatatcgatctttgtattttggacattttacatttttttaataataaaattgtattatttctataggagtacttctttgattcaagagtactaacagatggagagttggctcctaatgatcgttgttgccgtgtgtgtggaaaaataggtcactacatgaaagactgtcccaaaaggaaaaggttggtaaatcattttctattaacattatagggaaagtatatgtgagactaacttgtatttataattttattcagaagtgtcttaagtacgaaagtttaatttttttaagttcaaggtttttaattggcttttaagtaaataaatgttcatctgagaggaatttttgttaatggtactcttatatcatttgcttattcactcagttttttttaaatagaaatgtttattgaaacatgctatgtgtttggaactgctatgagcaagaagaaaaggacttcctagttaatgcaagttcatacagtaaactgaatcctagagctacatgttgggctgtatctgtatatgatttgaattgagaaacacatgtcctttataccacctcaagatatatctgctggtctggacatggtggcacacacctttaatcccagcacttgggaggcagaggcagggaaatctgtgaattacagacctatgtaatagaaagatcctgtctcagaacagcagc

SEQ ID NO: 29006 - DNA, 1306 bp, Mus musculus
gtttatctcttgagcagagatctaaaactgaagaagtcctgtcagctataaaagaatttgcagtttttctacgtgtgaggttctttcccttgtttcttgccctttgtttcctgtcttcatacacctatatttgtttttcctccaaatgttgttatgtggatttttaaaaacactgtataactagctaacaaatttattttaaagggggagttgaggtaagtagatacaaatccttcaatctgctctctgtattgtctccagcagacagatgtgccacgcgtcgctgtagagagcgctgtccccacccaccacgaggaaacgtgtccgagtaatgccagcccacagcaaccagccaatcctgctgtctcaagggtatccgtacctcagtgtcagttacactcagcagaaaaagtgacattaaggaaaacaaaacaaatcaggttctgatttaaaattttaacacacgtttagatagcttatttaaattctaagactgtttttaaacactgtattatttgtatataaatatgaactatagtttttactggtatcactaaattgagtgatacaaatttcatctattttattaccctatttttaagggaattttatgttttgtttaaccttgatgaattgtataaagagagaatttaaaaaattacattctttattttctattagctgtattcatactttggttgcttcagactttatatatattgttcttaaggattaggaaaggatttcatgtgttttaaatttgtcacttctattctttacagaaccttgtagtgccaaaaactttttaaaaggtcaaaaaaaaaaataaaattacaacataaagattctgaaatgtttttcctttacatacttgtatattgaatatattcaaatttgaatggaaagttgcttttgtctgtatttgaagttctattttaagttaataaatctttttgacaagagtcaaatttggttaattcatctggtatagatgttagaaatacatttgtaataattgaaagaatttactctcagtgactgttccagatcagacttagttttagagattcaaagatctttcccccatttttctggattttcacaaccaccgtataaaggtgatagaagcaaatgctgtgtccatatgtgtccattgaaaatgaagactgaagagcagagcagtggagtgaattccaaaggtagcagtttgactcaaaatagatcattcgagggttgtagttgatttacagagagctttcccaatgtgcaagagactatgttcaatctgtagcagtgcctttcctcc

SEQ ID NO: 29007 - DNA, 1099 bp, Mus musculus
ctactgtggacagatcctctgttgagattccttttttccaggtgactgggttgtcaactggacaacggactcaataaataaaatgtagatatgacagtcacagcttccagcctgcatatgcactcaagtatatgtgcacattcaacatcatgtaacatacacaaatacaagtaaaattgcactgggtaaacctgtaatcccagcactgaggaggaaaaagtgggagatgtcactaaaaccaccacattatatctaatgttgatgtcacctgtactctgtgtcatcttatttgctacttaattgaatgattttcatctgttccatttcaggtctaagaaaagccacaagaagagccggaggggaaatgagtaatggatgcatcttgactttggtccaaatgacctcctgtggctatgagagcatctgtttaagtggaatgatcaagatctcctcttcaggcagctatgagtattttgggtttttcaaaatcaacttcttcttttgttgggttttgtttttattttaatattacagaggtgctaagttttgtatctctttggattataaccaacagctttgaagagtgtttttgaccaaatcaaggtcaagttttggcctaacccactatggttattcatacttagcagggtcaagaagacctgggaatttgagaggtaaaaagatgtgatcctttcatttgtaattaaacttgccacagttctcattttctctggctttttgtttcttctctataattaactgctttgagaatcttctggtttatgctgctgctatgtaaacatgatatgtaaacacccaggtagtgaaacatagtaattcctaacttctcattaggaattactacagcagtagtggcaataaacatacaaaatacctagttagtagttttgcaagaacagaatacattgaaacataaagctttttctgaattttttaattcaggttcattaaacaattcaacatgattacacttaacatccttcatacaagctaggtatcatggttcacacctgtaatctcaacacaggctgaagcagagcactgtttctggttttgacctaaattgctagataacata

SEQ ID NO: 29008 - DNA, 1789 bp, Mus musculus
ggggcctgtgaagaggtaggtcgccctgctaaaacttccttttcacccatttctggggagaaagcatttgatttaatcctctgaaggaaactaaatgcagaggtgttgggaagtgtttgtgggttgtttctaaagttcctcagtagacttggggcaggaagggagcttttcaaggttaactgttgtcagaagttttttataaatctggtttcctttgtgcttttgccttgtgaggtggacatccttggtaacagctcactgacccagctgtgccggctcaagagccgttgtacatcagagatgctgctacacacgcaccaaagacctgataactaacagtggcctgggctttcctcctgctgcctctcctggaccttcgtggaagcaggcctcccaccctccctgtgggcgaagacaaggataccccactgctctgtgccacagagtcccgtaaccgctgcatagtaattgcgtaccgcttaacccagcccccatttgcaccatttctggatgtgcctttcaaagatgtaactgtagggatgggagaactcgagggtgatcggaacatcccgtgtggggagggacaggattccgtgactccagctggccagcggcagactgtcccgctcagctgttttccctctgcctgtgcctttgttcctgacagctgctgcactagcctttctgcttcccagaggactcgggaacaggaacgttactttggtactattggtgggaagtaagggaaggttctctttggtttggtccatgtacctaaggtgaaagactgttaattggggagaaaaaaaggaaaaaagaaaaagaaaaactatcagttttatgtagccatttttattttaaaactagatctaattcactgtagggactttatactctgaacagtgtgaattacctagaaaagtcttcaaatgccctgctctctgtcactttatctatttatgtacttatttattttgagacagggtttctctatgtaacagccctggcagtcctgaaactctttgtagaccaggctggcctcaaattaagagatccatctatctgtcttctgagtgctgggactaaaggcgtgtgcaaccacacccagcttccctgtcactttaaaagcagaagcagtgatccacagagccactgcacctgtgcattcttcttctgagacggcatgtcatggagctgatcacctggctaatccctggctggccactctggccaatcttagcttttgtagtaaatgcagggaaatgagggggcagatcgttgcaacaattaatagtcacaaatgcattattttagatttttaaaaaatcagcatcccaactctttcccattttaaagcactaagttcagcaaagtatccctccagatttactctttactctgtatatttggttgtaggaggcagggtctcactctatatagcagtccacctgcctcagccttcctagtgttgggattacaggcctgagcatgtgccagccaccagcctggcttcctcaaggtgacttgtgaaggctctgcgtgaagtaaacactcagctgctggtcactacactgctgcagaagcagctcagggctgagcttctcccacttcacgtaggagatcccagggctggagcttgtccaactgttagtgcttaacaaggcagaaactgcacacaagtgatgccccagaacacactggccaatcttagccaccatgagctcgcaatctctcctatgtaagagatttaacaatgatattcacatgatcaagcagtaatttgcaatga

SEQ ID NO: 29009 - DNA, 1194 bp, Mus musculus
ttgatatccatctgcctttcagagacagtggcaaagctcattatcaccagtacaccatgtccagtttcccaactatgtatttacccttttagtaataactaatatatgcagaacttttcaatctatgcaaagatcttgctcctcaaaattccccttcggtttagcaccactgatgttttcttgcctgcactgctctttcactatgacagctgtaaaatgactttctagtttcagcatggccctttctttatgagctggatttaatagactcaaaacaaataagcccctccttcctttgtcctttattcatggagttttcttgttggtcctgtggacttctacggtcttagtcttgtactcgggtgatgtcttctttggttaatttgaacaccttcaagctggctcctgcatccttttcaaggtatacttaggtttaatccttcctgtgtcgcctaacaagaagccccaggctaatcttgcacttaccctgctcactttatctccaggcagccctttaactggagtacaggaaacaaagatctggttcaccgaagatatatgtgatactgactggctggcctggagctcagagatctgcctgcctctgcctcccaagcgctgggattaaagttgtgtgccattacactcaactttgtacactcttgattttctttgttaaatttattttgatcacaggccaaatgcatttctctagtttataatatcctgcttgagggcagctgatactggtgtcagtggaggccgggctcacacaggatttagtccctctgcagggaaagcagtttattcacaacgcccctgggttcagatgcaggcctgtgggacagtggtaggctgccaccacctctctcccaaggcccttggagaatgtgtgtccatcctgtgggtgaggggtacactgtgcacctactcttcaaaggtgctgatgaaagtcagagacccaggatctggacctttctctacaattggtacaaaacctcagaagtgcccttgaacactgcacagcactaacttgtaagaacagaggtctagagccatctgcagacctacagcaggaagcgcctgagaggcacagtagtgttaattttgagcgtagtctgaatagacctccgacggtgggcacctgtgcagcagctgcccagtcctcctgcccagccaactgtaccttgcctt

SEQ ID NO: 29010 - DNA, 1135 bp, Mus musculus
atggtcccccactaaacctggagctcactaatctatcactcacctacacgggcttggctcaccagtgatcccctgggatggcagccgctatcatggccagctttttctgtaagtgctagggatctgaactcagggcctcaagcttgtccaacaaggcctttactcatggagctgtcagctcccaggagaagtgatttttttttttttttaacagtgacatggaggtctgtatctttgttgtctatttaagttttaaatatattttctttatttttttttacttcttttaacttccttccaattattttcctaagtattgaggtacaaacaaacaaacaaaggcattgccatattttattttctacaatgattctttgtttatgtagtgaccatttaacatttaaagttgaattgtatgggcttacatgatctttccttttttgctgtattgtaacatttctttgtatccttttgtgatcacttattaagaagaatgtattttacttcccctttagatgtgaacaggaagtgctggtgttttacaaccaaagggatgcatgccgtgggtcaatctgagatagttattcttctgcagtgtctgccagatgagaaatgtttgcctaaggacatctttaatcactttgtacagctttaccgggacgccctggcaggtagaatgctttataactttgcaccattgtagatgatgaaaatatgaactcatatataaaacaatcaatcctgttaaatgtggaaacatgacattgagcttttatattttcttacagtgctaggaattgaacacagatccttatttgtgctaggcaaacactaccattgaactatatcccagcccttggactatattagaggcaagttagaacttcccatagttgggaaaattatgtattttattactttctgtgattctctttatttacaaaggatagactcaaaattataagagaatccattgaccttggggtaagaatgtaagttggagttcctaagggtcgtaacattggtatccagtagaaggaagcataatcatgagtcgtcgtcatacccccttgctggctgctgcagtcaggagctggccctgaccctggcctgagccaagcggggagaggtggtt

SEQ ID NO: 29011 - DNA, 1184 bp, Mus musculus
ctaaagattagatactgtcatattctggggacattttcttcaaagcacagctggaaatatttgtcaggtagccctaagtagcttttactgttaccaacaaacttactataattacttttttttttccttcagatgaaacagtttctcctactttattggatacaaagtggaataagattttagatccctcttctcacccattgtcttttaaccctgcattagccagtgtgaatgaacctacagtttctgagacaggaccacagctgaaagtcttctctctggctggctcagctccccttacaaaggaggacaaagatccctgtgctaacggacaggactgtagtctaaatccagagactgacaccatgtggattgatgaaaatgctgtgacagaagaccaactaattaagagaaactataatcaggatgatcaatttagtgccgttgaagtgggagaggagaaatgtggaagcctcacttgtctgccagacgagaagaatgttctggttgtagctgtcatgcataactgcgataaaaggacattgcaaagcgatttgcaggattgtaataattacaatagtcaatccctcatgaattcttttagttgttcactggataatgagactagacaaactgatcaatttagttttagtatgaatgggtccacggaaaaaggtataaactcggagaaacaaatggatgctttgaataaaccaaaaccagagagggattctgtgaatcatctctgtgcggcttcatctaacagtgcaaccagtatctcttccccttcacaattgaaggacggtgagaatgtgggtagagacccatctacatctacagttacaagcttagcagttaattcatcccagggaatggatggagggcctgccattaaacagcaaggaaattatatgccagatgaggatctttctggcatgaacagctcttccaggacagacctagggatctccaactccttttcccactcaagtggagagctcttaataaaaacagagccagctgaggagaggacagctgaagactccctcccatctgatttatctttgaatctcaagccggatactcctgctttatctggaagggacaattgcgaacagtcttcagactgccttgggtctagtgaaactagagctgatgaagatgaaggtaatgactctcagatg

SEQ ID NO: 29012 - DNA, 1190 bp, Mus musculus
ctctcctgcctagcttgagacagaagttctccatatagaattgagagagtgcctaattcctctttttgttcctcacctcgaggaacaatgccattgtcaatgttttattcctttcacatttatagttggtagagttcaaactggaatagctagcatgtgcttcctaattaactttatactcggcttatcctgtttcctaggtgttcttggtagcaggtgcaggggtgcctctttttcagcaaagttgaacctgggaatgtccttttgaatgaaaagaacatgtaggccatattatctcctagcataaataggcattctctgaaatggtactggctgcaggagaatttcttcaggcagtttcctattcttggccttgaccttacctctgagtagatctaattgattgtagctgctcttaaccccctcctgcatgcttaggatagtgcttcgggggaacagtggtaaacacagtatttaattgcttaccttcttccctagaacttggaggtaagttatattcattcactcaggttttcttgctgttctgataaaagcttgtgttttgacatatcaacatttattatagccaatattttaggataagatcgaaagaatctgttgttttctggcccatcaccaaactaactgcagcttaaccttgcagcatgccaacttttgtttcaagctagatatctttccttgatacttaagatgcaagaccaacagcatattgagagatttacagacatgaaggcaaatctcccgtgttctttttcatccaaacattttcaacttattttataaatttgttgattttttcccctgttatgttttatatatatggacgtaacaaaataaataacagtaataaaataacagtacaaaagaggagatatttcctctagtgcttctgttaattgttgtcttttctatttctctattctccatactaaattaattctcatgtgggcattgtttaaaataatctcatccattgttaggtcaatatttgtagctggtctacttacttcagaatttagtcgttcctttgcctgtccaagcaaaagacagaagcagagagcagcgggcaatgttgtagatgaaaaaagagagtatatctagaactgagaaaatgtgtgtcctggtccagattcaggctctctgttgccatgttcacccacatcacccag

SEQ ID NO: 29013 - DNA, 1482 bp, Mus musculus
aagtgagcacgtgcagccatgacgggggggtcagcaaaagtgctagaggttaaccaaagtaacaactaacaggtttgtaggtcttgatatttatgaaacagttgtgttgtcaattctctgattaatttttgtcgaagtccgatggaagtagcattctctcaagggaaaacaggtccatgacgccagggctgaaaactagaagatcttgatcttgttcttcctaaaacatttaaagtctgtgttgtcacccatcagatattaaaggcgctccacacttcccaaccccttacctttattccagttgttcaagggatgaaggaagctcaggagaggctgacgggcgacgccttcagagagaaacactttcaggatgagttgtgacatgaatgagtgttctggaagaaaagcagcagagagcgaatcctaaagaatcacccagaaccgctaagccaccagaaaccatgcttctacctacactggcaggagctctcactgtggagaggccactgacagaagctgctctgtggagccagcagcggggccgactgactctcatctgctccctttcctaagtatccattcctttgaatgtaaagaatgaaactctttgatactaactttgagccacttggggattaactccatgtcagtatttgagtctttacccattttctcctactgtactcaagctgaagtgaaacaaaccagaacgatcttttctatagtgtacaaattgcaggagttaccaattttgaaaggtggcattctccttttgtcttggtaaccctcctggacttctcccggaacccctgcgcccgcccaccctttgctcaggcatccccgtttgcacgaatgcgtgtcaagaatggctgtgcactgagacagccccaactggaagcatgctttccctgttgctgttagagaaactctcaagtctgcaaaccctacatgaagccattttgtcaattcaccaactgtatttttgtactggggttaaaacaaacacaagagataaaatatgtttcattaagctttattaaaacttgaaatggaaagatgctatggtggcctttggttactgggcagggaagaaggggtagccacagaggaggaagaggaagaaaactggtctagtctgtgcagagagtcctctcctaggactcctgtttctccagcatccacatccaggtgaataccagggcatttcctttgttgttattcaatagaatcttatgttgccctggtgtcttcaaactcaagttcaatgattcccccgtatcagcctcctgagctcttggaacacaggtgagagccacctctgcacatttaaagcttgcctttccactgccttgctggcacttttagcatagcacaggccttttctctttcctgggcgtatttgttgtgacagtcccattatttcctgttacttgcctactcgcctgtgatacccttctgtagcccatcttccttgccttcccc

SEQ ID NO: 29014 - DNA, 1224 bp, Mus musculus
ttccaggtggtggagctgccgagcggccaccacctgtgcaaagtcagagctctgaataaaggggatgccaactctgaagtcactgtgtactaccaggtgagcttgcctcacacactaaagtgagatgggcatttctatgtattcccctaactgagcccaggcagtaagaagatatttgttaaaggacaacttggagagaaatgaaagtaaacctagctaaggaatcagcatagaaccaccagaatgacttccaaatgagaaaaatgttcacctgcttttagtgggatggtaaatccaaggcagagttctttattctttgggactcagatctctacttctgtgttctttccacagtagaggaggaggtctgaacaagtgcttttcagcagccctcagtcagcccagagtctgctttagtctttggttgatcccgctcactgcttatttgtgaacatcctctccaaacctgtcctgtccagttggtggtctagcctttggataacatggctttgtttactctttttgactttttattgtgttgctgatcttgggtctgagtaccacccctctcccctttattttatttgtgtgtgtgtgtgtgtgtgtttgtctgtctgtggaagtcaaaagtcaaccttcagtatcattcttcagtgccatccatccccctactccatcctttttgtgtaacaacaacaacaaaattgagacaaggctggtggccagtgagcccaagggttacaagtacgagccactataccaaaattctttttttttttttcccgagacagggttcctcaaactcagaaatccgcctgcctctgcctcccaagtgctgggattaaaggcgtgcgccaccaccgcctggcccaaatttctttttttaaaaccctttatttttattagtgttttgtctgcatatatgtctgtataccacatgtatgcctggtacctgcagaggctagaaaagggtgctggatccttggaactggcgttacagatgtttgtgagctcccattgggtgctgggaattaaatccagcagcaccccagcattccttaaatgtggctccttgtgttttaaagcaggcacttgaccatctgagctgtctgcccagcccttctctcccagtcctgtctgaacaaagtcatcaccaaaggatgccacggtcacttcatataaactccttcctgtaggaaactgtgtctccacagaacacacgtg

SEQ ID NO: 29015 - DNA, 1134 bp, Mus musculus
ttctgctggcatctgtgggcacctttgcataatagcatacatgcacagatgcacacacagatgtaaatataaatacatctcaggaggcagagccaagtgcatctctgaatttgaggacagtctggtctactaaggaagttccagatcaaatcatttgtgtgtttgtatatgtgtgtatgtatatatatatgtatatgcacatatatatgtgcacgtatatatagtaagaccctgtctcaaaaacagcaaattggatatgagaacaatgtgcaaaagctagtaacattctttaataattcctgtaatcaactaggaaaagagttaaaagaactatatttgtaataataggtgggcatgtttaaaggacatgtatatatgagtgcacagttaagttctactgttgtttctgtagccagggacattgtgtgcttagtgtaaagtgggaatagtgtgcttagcagcaaccatgttccttttaggaggtgggtgagcaatttatgctctggagtggtcatcattcctttattgcctttggaatcagtttaccaacctacttctctctctttctctctctcgctcactcgctcgctcgctctgcaaacaaaacacacaaaacaacaccttgtatcttgttttgccttgttttttttctcccaaatcattaaaacaaaactgattctatcttaggcttttgcatcattattcatgtttaaagtctttctgtgtgtatagaaaaaagagaaaaagaaaaccaagaaatccatccacttggagaagactctgaagctgtagctactgtctgcagcctgaagaagtatgtactgatgagcatgcctcagagaagaccagcagtggcgcacaacttaatcttagcactcaggaggcagaggcaggcggatctctgagttcgaggccagccaatctataaagtgagttctaggacagacagggctacacagataaactgtcttggaaaaaacaaaagaaaacaaaacccaagacacaacaaaaaagaaaacctcagagaaaaagaggccatagaagataagtatgtattatgttggggtcatgagccttaaaagcatcacaataaaaggttgatattttggtgggttagaacaacagttttcttga

SEQ ID NO: 29016 - DNA, 1436 bp, Mus musculus
aagacagcaacagtatactcatatacattaaataaattaattaattagttaaaaaaaaagacacacacaaacatacagacacgcagttaaaaaattgtttttagtcatgcattgtgattcctttaagtcccagtactcagaggcaaaggcaggtaaacctctgagttttgaggctagcctagtttacatagtgtgttccaggccagccaagatttcacagtaagaccctgtctctctctcttaaaaaaaaagaaaagggctgttaaaataatcttttccaaaagtctttattatatttatgggtgggtttagcacgccacagtgttcttgcggaagtcagaagaaaacttgtaggagtttgttttcactccctttaatgagtcctggagacggaactcagttgtcaggctcagcaacaacacatgccatatcccctgcctgagacagagacttctctgtcctgctcacgtgtgtgtctttgtaggtaagaagtagtcctgaaatcgcaccttctgatgtgactgatgaaagtgaggctgtgactgtggctggtaatgagaaagttactccgagatttgacgatgacaagcactcaaaagaggtgaagataattgtacattcgattgttcttgttattcatgtcttaaatgatctttgtagctgaaaaatatttactaaaatttttcaaagtatgtatatgatcagaatgtaggtcacttgaagtacttctctaaacgtttggttactaaaatatcttttaattaaaaattatttctaggaagatccatttaatgtagaatcaagttcactgacagatgcagttgcagatacaaacttggattttttccagtctgatccttttgttggcagtaagtatctttcttttgtaagtatatctaaaacaatatttctgctgtgtaaattatataatcattaaggcttcagttttgagagcgcatttttttttacaatataagcaaagctgaaaataagggtctttagtcttacatttgctcctatttaattttaacattctaccataggattatctgattaagagaatgtttcttcagagtaaaggctaatggaaagatatgttataagccagtgatagagattgcacactcatgagtcagcatcatttagctaataattactgaaatactaacaccagaccaggcatggaatcacacttctgtaatcccaacattttgcaaatttgagtttagcctgagctacagaacaaagctgcctcaggaaactttttaaaaatgaagaaaagaaaaacaacaaaaaaaagctaacagtgtaattttgaatcagtagaaggtgtcaggcatggtgacataaatttttagttttagtactcaaagggcagaggtaggtagatggatctcttgagttcaaaaccagcatagtttacatagccagggcta

SEQ ID NO: 29017 - DNA, 2331 bp, Mus musculus
cattctttggatcttttaaatggcagtatccctctgaagaagatatgattgaatgggcaaaaagggaaagtgagcgggaagaagaacagaggcttgccagactaaatcagcaggagcaagaagacttggaactggccattgcacttagcaaatctgagatctcagaagcatgaagagttatctgtcctttgtcagcagtacagtgctctctggaacactgaagctatttaccatgtgcatcaaactacctatgagcatgggatacaaaaggtttgagattcctagaaatgtgacaaaagtctagtttgtttttttttttttttttgggggggggtgctatttcaaatgtgtcttttattttttcttccaaaagcagtaccctaattaaacggctttgcctagacccctgttctggtgtgcatttatagtgagctcttgcctgcttgcactagcccctgtaaagctagagcatcaagcctctgccttctggaacctagcagatgtagttttgcgctgtgctacccttgtcctgtagttactatgacaacgactggagttctgaaagtgtgcaagtattctccctgagctgagtgcttgaaggagggggagggaaagagtatcctgtttcttctgatcggtacaaattagtcagtttaaagtgcattatatgtacttctggagaaaatatagttaagttacttagagacaggggaaaatattctgcatagatctactccactattgaaaactggataagttaaaccattattgctccagccgcaagtaattcctaaataaaagtattaaagccttgtatatgaaacatgtttttagaacaattttctctggacttaaagaattttacgattaacagatacctcacgacatgtttcctagttaaaaacaaacaaaccaatttcttacaaataaaatttgtaaggatatgttcattttaagtgctagtgaggaaaatttgtaacttaaaatataacctatccgtttaagcaaacacttagcctgtacccattttgcctttgtggctgcactgaccgtagttcataagtgacctgaagtctaggaagctagaattggaaggtactttggtattcattatgtgttttgtttctttagtgaaggcccagctatttgcagtgatacaaatggaagaaataacatttgttatatcctcttactttctgtccatctttgtagtttaaatttctttatttgctttatttgtctcaccaataaaattgacaagctaccccacccccaaaaaaatcctagtttttaaattgagagaaaaataaaccaagttgccaaattatcagagccctacttttgttaaaagcccatcttctgctgaactggcctgacagacagctggattttaaatggatttgaagtaaactataatttgtaattttttagataagagttactaatttagtgtttgtaataccaagataaacaaaaatgcacctacaaactatttaaaattctttaggatagccaagttaaggtggtattgaactgttgttagagtaatttactgcctggcctataagtaaattctagtgtctaatcagaccattttgaaatggtgcttttttttcttttccacatactattggatagctgggatttaaaacaaacttcaaccactttcttgcactgctaacttttttctacttttgtaaataaatatttcagcataaaagttaaaacatgaagtaagggctgaatcgtaatcacaaggctttaattgtgataactaattccgtggcctaagtgcttgctgcaaagggtgatgagcaggtcaggttgggtggtgttcctgtttgccccttcctctcactcctcaggagaaaggtaagttgacttgaataaccttcgtttgcactgagaaaagtgaaaaatgtttgaaatgctttaattttttttaataaaaaacactctggaaatattaaatatctataacttataaacagcaacttttgatgtgtagtaagtgtgccctaatcttctgtgcgcttagctgggtcatagaggttcttatcctttgttaagatgtgtgtgctcagtgggccaatatcatactaaagtatgtaatatgacataaacatatctatatctccatgcttgagtgtatagaatgaatgtcttaagagccatttgtgatgttttatggtgttgaccctggctccaaagcctgcgcttgaaacaaagacagagttttaaccatcttccttttatgtacttgttcagctttatctgtgctctcttcatagatgttctctcatgtttcaaacttataaattactgttgtaa

SEQ ID NO: 29018 - DNA, 1186 bp, Mus musculus
gtttgcagttaggaaatgcagaattcacagtgatctcctagcttgtaagcaaactgagatgcactatcccttttctattaagaatgagttgatgtgtcaggaaacaaggctagcaaagtggatttgatatccctttccttgtgtgtcttatcttattgttttggtggttaatatggtgataattgaaagtcaagttgaaattcaaatattaatatttctgatttgttgagctttgaattatgccaccatgcttatataaaaacgaaggtggcaccatgatgaaacttaaagaaacagtttctcatctgtaacagttttgattctctttcctgtgacctctttccccactgtctggaaccatagcaaaaggatactgcatctcttgttactgtagtgctgaggttattgaagttacagaaacacatctggtgtgtttcctagaaaagtacctgttcagtcttgctaggtgactgacaggagaggcaaatgtgttatgttttgcacaccaatgcagcagggtttgtataaccacatgacttcatagttgtgatctcaaaggaacttctcctttattttttcttgcaattaatgtaagaatactctaaatctctgcacttctgaaggattagaggtagaaatggtctagtaaagtgtaatgttttattcatttagcatgtgtttattttccttatgttctccaggtgattcgttccttccactcagtgatattgtggttaaaaaatgatgagcagaagcgctctccaccttacaaatgagaaatgttcttttatattgtgttgagtacttgactaacacttttttacatacaaaagtttcttgaaggttcttcataattgcggtgtagaagaaattatgtcataaatagttaattgacattgagttgaagcagtcatacattgcttagattcccagtagatcccatgatggaaatatttaaagatgaacttggaaatactgaaattagactatcaggttctgttaaattgtctcgtatatcttgcttaatttctgttcattaatttatatccatccaattataaagtaaatttggaggaaacagctgaagttgtgccatatttttagtgataactctttttaaattcttatgttttctaattatacacttgtgtgtcatcaagtattatagtcagacttttttcccagg

SEQ ID NO: 29019 - DNA, 1108 bp, Mus musculus
ccctggcattcccctgtactggggcatatcatataatcttcacaagactaaagggcctttcttctcatcgatggccaactaggccatcctctgctacatatgcaactacagacacaagttctgggatatactggttagctcatattgttgttcctgttttgttctaatgatggtgtcctttgccttaaagaaaccttttagtttcatgaagtccactttattagttgttgatcttagagcctgagctattggtgtgctgctcaggaggttgtttcctgtgtcaatcaattcaaggctattccccactgaaattctctttctttgttgagtctttgtgtggtttaggtatcagggtgtctgtggcttcatagaatgagtttggcagttgtactggttggttttgtgtgtcaactttacacaagctggagttatcacagagaaaggagcttcagttgaggaaatgcctccatgagatccaactgtaaggcattttctcaattagtgatctaatggatcaaagggtccattgtgggtggtaccatccctggactggtagtcttgggttttataagagagcaagcagagcaagccaggagaagcaaaccagaaagtaaggtccctctatggcccctgcatcagctcctgcttcctgaccggcttgagttccagttctgacttcctttggtgatgatgtggaagtgtaaacagaataagccctttcctccccaaattgcttcttgatcatgatgtttgtacaggaatagaaatcctaagacagcaatgtttcttgttttctattttgtagaatagttgcgtattggcattagctctttgaaagtctggtagagttctgcactaaaaccatatggccctgggcttttttttggttgggacagtttttattgactgcttctatttccttaagtgttataggactattaaaatggtttacctgatcatgatttaacattggtaagtggatctatcaagaaaatcatccgtttcattcagattttccaattttgtggagtacaggcttttgaagattctttgaatttgctcagtgtctgttgttttcaatttcttgtgtatgtggaggcttactttg

SEQ ID NO: 29020 - DNA, 1169 bp, Mus musculus
tgttaaaaaacataacagaataaagaaataaacaaaaaagttgacatgttttatataaacacagccataccaacaaaatatgttgttccactattagatgttttatgataaacattatgttatcaccatttagaatgtcattaattcttacacttggttatcaattctaattaaaagtttaatcatcacagtgctcatattgcaattgtttaataaaaacattagatttgtgatatggttgtttaaagttttcttaatttgttgcgatttcaacattttagatatagtttgctttcagtaggtgaacattaaaaatatcaggcagaattggatttgatactaatgtatatactctcctttattatcaccaggttgtagctgaaagtatcataataatgaacgtaccttggtattgtgattacatctctttaataatgggcaagctatctgaatagaatgttagtgatgatctgttggcttgtttaattggtacacatatacacataagggaccagtagagctaaaccagatgtttagggagacaggtcacagaaatccatgaacaccaacaaaagatttttttttttgctgctattactgttgttaatcagtggtttgtttttgttagattttgaagtggagggaattattggcagaactatagataggaatgaatgctgtagtagcagtttacagaaaatattagacacagagagattggatacaaataaaatattagacacagagattggacacagctacatctatatacatgtgtatagatgtagctgtgtcaacaattatttaaatccatgacacaataatagtatcgcatagttcacattctttatgatcctaaagagcacatcctcttttttctttctttccatatatgcatatcttataatagccacaagttgctgatttctctaaaatattcttatgaaatcatcaaaatattaagtaggaaaaagacaactgtagcataggcaagcaatataaataaaaaaaattttacagaaaggaaacagaaatacccaataaaatatgaaaagatactttccatatttgatataagaaatatagataaaatcattctagtatattctctcataatggcaaaagtattttaatgtagatataaaaaagatgtaaacaaaatgtttgtt

SEQ ID NO: 29021 - DNA, 1142 bp, Mus musculus
actaatgctagacttcagtatgctaatatctctgagcttttttggccaaaagcttagaattgcttttattccatactaaatacaaaactagaagaccactacttctagaggaaacatagtgcttccatgtagatcttgattctaaggacttagggaaatgttgctaaatctattttagaatgatactagtcagcctcctttgtaccacactctgtcatttatcctagttaaggaattctctcctggaaattcttttgttttctcatagtttaaaaagtagaacgtcttgcaatatttgagacttaagaatcctgtgtcgtcagcccctgacagcatttagactatgcttccttcttttcttcacaataaccattaaagatttagttgaaaactcaaccaagtataattttccatactgatgtaagttaggctatctaatctttacataattagtaatggcatctcagatctaataaatttgtttgaaacttattttggattttgctttattttagatttctgacaatgtgcaatagacactttggcagcgttattgcacaaactattcggactcaaaagacagatcagtttccacttttcctgattatcatgggaaagcgatcatctaatgaagtgttaaatgtgatacaaggtaaagtatatttcacaacggaaataaaatgttattgataactttaccatttcttccattaaaatataaaatatcctaaagaacatcttttaaagcatatgtactatgaaaaatgaatatggtgttaaaagtctagcatccaataaaattgcatagttcttcagacataggacagtgaagttatgttcagaaattgctaattccctaaaactagcagttatgttataatcatttgtcagatgtgacatttatttctgttgatttttagctgtaatattgattagttgaaagaattgcttatctttaattatctagaaaatccagtgactatacattgcaaattgaatttttcacgtgtcagttgttcctccttatttgtgtgacttctgcctgagatacacccctgaggcaaaaagctgtgggattcctgtggatttagccataatttacattttcctggaaatttaaccatactttacattctttctta

SEQ ID NO: 29022 - DNA, 1221 bp, Mus musculus
tcttataaatgcaagtagcttttgtggttcataaatctgcagagcctctattctatgaaacagaaagtaagcttccactgaacattaacagaactgtgggtttcataaagtgggaatggggaagcaggataattaggagggagggtcaggaaactacttaactgggttacttttttgtcagggttaaagcagagtagaccccttatcctgactcactaggttgggacgcagggaaaccatctgcttggggatctttttatctccttagagattagtttgattgtgggtcgtgtagcatgagtgacttcacttccatttgttgtgctctacaggagcttagtccagagcagtggcctccagtaactttggcttagcagttttgtttaacagttaccatcttctgttcagctccctcctccgtaagagtatgacaaatggtttaggacattagcactactctcagttatggtccttggcatttctcttctcaacatgtactcacacatttctctgaatgaatttttgtcatctcattccaagatggaccatttgctgtgcggtggacggctacatgcaaacctttacaactgtagagaggatacagtatgccagggagatgacggttgtgactatatgggaaataataccaaaacctatgcaccttaccaaaaggccccatgaatcaaaccacatagaactgaatggactaaagattgagttggatgaaataaattctttcctccccaagttgcttttggtcgtggaatttaatcacagtaccaggaaatcaaactaggacaggaaccaaggttgccctctgcccctctccacaaaggtcatatatacatgcacaaaaacaaaagtctagaaaacaatgttttttaaaggtagtgtttcaagatttttttaagactgtaaaaacccttagctctgtatcagttcactaagttttatatagctattctgttctgcttggtctttagaactttcatacacctcagtttcttctttacaattctggaacgtcttatctaatccaatggtgtaatctcaaagttatcataagcctgcatttttgtttctattgcatgtaataaatgttgactggtgatatttcacatttcttggcatttctttcaacttttagaagacaataataacaaatctatgtaaagataactatctttgattaaatatcattgttaattgaaagtgttttct

SEQ ID NO: 29023 - DNA, 1142 bp, Mus musculus
acccctgctgctccctctgctccgctcgcctcctcaacacgcgctcaggtggatggcaggatggaccagcctcttgtgtgtcctccaatacccgttcccctttcgtttttaaaaaatccgctctaacaaatataaatttaggatgtatacatctcttggcactgactcgagtctttgggacacatatatatcagtatcaactgtaaaaaaaaaaaaaaaaaagagacgtcctaaggtgcactttcctcgttgcggtatttgtcgctctctttgttgcttatgccgataagcatgggtttccttggtgcagtgtgagtttttatatatgtataaatctatatataatctatacatatatatacaagccagtgtataatgttataaaatggaattctaagttattaattgtaatctgtaggtgacctcggtattaacgtggaaaacattcaaaaatcaaagcaaaaaaaggacaaaatggaaaaaaattagactattcgcacattgtacgtatcgggttttatagctgaaatctactgtattctggggaggtaccctgccgacccctggtcccccggcctgcggctgttctccaaagcggtccaggctgcgctgaagcacgaatagagcgtcgggtgagtgagccagaagctcccggactcgccagcgagcgacgctgcgcacagctgctcactttgtgctttcctttgcataggtatgagctagaaataaatgttattttctaaataaagtaacgctcgaatcccgttccgctcctcgggcggctgggaggaaaagctttaatttcccactggggccgcggtggcccgaagtcacggatcgcgcctgtgccccgaccctgaaggaacccagacaggaagctgcggggtggcgcctgggaccgcgcagtggggggcgcggctgggaacctgctgttgaggtgacgtgagggcgtggtgagcgtcgcctggcctggcgcaggttcctgcaccgcaggccgggccccgggctcttcccccgagcagatgacctagctgcggtcctggacgcacatctcactcttggcttcttgagaatttctggggtccagggcgctgggcagggcggctgggagacgaccagcgacacttcttttgccaggacct

SEQ ID NO: 29024 - DNA, 1149 bp, Mus musculus
atttattataagttgtaacacttggctagttttgtttgtatatgtcttaagatgttttcttatgatatttaagtgacagttaaagaggtatcaaggtaacttgtgtagaactattgtttgatatattgtcatgtttgttgtgaatattttttcttactgcacagtagaaaattaaaaaaaaaaactgggtctttattttaatgtaattcagattggggaaaactaaacagagctaagggaacaaaaggaccgtgggagcaaactcccacgtccagtgcactgatcattttagtacgtttgtgctttgtatggttatatatttaaaacaaaaatgaaacaaaaaaaaatacaagagttcatgctcttccctgggtaatagaaacagttactcgctatgcataatctagttgatagtaaaatttgctattgcttttcttgtcttgttacataaaatcttttcaatacaagtttagtcttaatggtaataaaacgttatggttatttataacttgtgcttattttgtgcattttttcccatgctgaacccactaagtgcatgtagacaggactgttgtttgcacattgaagaggcaaactttgtagtagtcgttgtagtggtagacagataacgaaaaccgaggctgcatcatagactactcctttaaattttttttctatttttttttcctcttttcggtttttggagaaaaataaataacaccagatttcagttcagagaacactcgttcaacattcagggaaacctttatatgtcacctgctatgaatgaatgcagtttgctggcaaagttctgatgcatttgctaagcattcatgggaaaggcatgccaaaatctcttctctatgatgtgttcaatctgagggaaaaaaaaggaaaaaaaatcttaggaccaggcagttgtatactttagttataaatgaatgacttcatgttaatcttgctagtttagatgatttctgagggaaagtattgtaaatgtttttttttcataatcttgttgtgtttgaattatttgtactttatctgtccagacaataaatgaaagtgtgtagaatgaatttgagcttcccaaatttttaaatgtgtttattcgaacttttttttccatagtctatgcagagttccctg

SEQ ID NO: 29025 - DNA, 1109 bp, Mus musculus
ttggcaaaggattggtgtaaatgccatgaaagtgcccctggctttgtaaggtttgggttctttacacattgttagttttccaaaaattcatctaagcagccaaaaatatcaccctggctggccatctaagcctgtagattcagtactcagctaaagcctctctacacccctcccccattcttacacagcccagccaggcttgccaagaactggcagaaactcttgctgcccttgggcaggggacctcttggggaggagatgcctggattgaaaccctgcccatgactccagctcagagccacttcttagtcagtgcccgaccttgaggaagggaaatcagagcttataagggctcttggaccctatctggccctttccaggcaatgtcagctcctcaccactgtctccaaaggcagactttgcctatagagaggcctttgcttgctgcttgggaagccacagaagctctttcagcttctgtttcttcatggaccatagggagagtttcctggggccaggaggataattctgtgtatcatattgacaccacaggccaccatgatgggagcatgtgacagataagaaaacataacttaaaggccccctccatcctaaaacctgccttggggaatgtgatttttaataggatccaagtctaagatgcctggagtgagaaaccaaggactcttagactggagtctctctggttgcaaggctgaggtgggtgtggctctcagctaaagaagggggaagttgaccttagcttttgcccagttctgtctcagatttgttggctaccccactgtgcctcactgtaccaaactggcctcagctctcaccatgtttgtggtgttctttatcacctcttccttcacccctgccccatgaattgtcatgaagagttctttaagagtataatagaagacaaagaaagatgctattaatgttattttgccaaaaatatttttgtagcataatatattaattaaagatgttatgaacttgaccctggtgttactgtttacttctctgttttccttctgcagggtacatttggggaattgtctggcttgtgagggcgagagcctaggacagtatggcacagagaa

SEQ ID NO: 29026 - DNA, 1458 bp, Mus musculus
gttttattttttaattttggcgttgagaatttaacccaggacctcatacatgctacactgtgttttaacaatatctgcttttaaaattgtctttttcctctacaggtttttggtgaagttgtgaagatttttgacaaagaaggctaactaaccctgaaggcatctttgaaatcatgcttgaatattgctttgatagctgctatcacagccccttttaaggcagttttaacctttcaagattacatctcaattaatgtctagaaatatatagtaagacaaattaaattatgtgttttttttttatttgtggtcacagtacacagtgaattcaggtttaaatcattttaggtattatggtgctcacaaaatgaagaagggtatcagctaattcttgtttgtggtaaagactaccccttttatcccttttatgtctgtgccttcggtgagttaattttttttagtatgcatgtatatccctttggtaattgcagtatattgggatttgagatttccacttcctcttgcttcacatttaaaattttcaacctgctaagtgaatttgtggaccaaatttaaaggaactttatgtgtagctggctcttgctcaaggtgtttagtaaacatactcataaaatggactcctagcaatgctctgtttatcagatgactgaccatttcctgttgaaagttaaaacttagagactgatttactacagcttgtgcaacgttgtatgatagtgcatagtctttgcttccaaggtttgagtcagggcacggggcttcagagcctgggcaggattgtcagctttcttctgacatagtctgtggggcaagggtcacaagtagtgacttgtattcctgtgctctgtgacacaggactgactagtcatcataaagtgatgtaacaagagttcctaccagtagacccttgacatgcattcactagtttatggtaatttgattcagttcttgttttagtaatagttaaaaagtttttttgttttgttttcttagactaaatatagagttagagtaaattagataaagcaatctaatggttaaaattcccatttgtattttattttctggaatatgtttttcatggttacttgttttaaaagattttaaaaatcattgcactttggtcagaaaaaataataaatatatcttataaatgtttgattcccttactgcttgctttttcaataaagtttgaagtccaagtgattttctttctttaaaaaattaaaaatgttttcttttttcttttttaaaaaagatttatttattattatacataagtacactgtagctgtcttcagacgtgccagaagagggcatcagatctcattatgggtggttgcgagccaccatgtggttgctgggatttgaacccaggactttcagaacagcagtcttaccagctgagccattttgccattttgccagctccctgtt

SEQ ID NO: 29027 - DNA, 1108 bp, Mus musculus
aaaggactgtgccacctcatctggtttgagctctttttataaagctacaaaagctggtgctgcttaagcttcagtattttaatattaatcagctaaataatatttctgaatcctagttgaagttgaaggtctccagccttctcattaaatttgtctttatagagaatccaggattcaacataataaaatttaaaatctgttgaaggcagtcgtacagaaagttcctttaatgttaatgtttttttttctttacagttagtgtgttaatgacattgagaaagatgattcagaaactcatatttattcagtgtcgattaggtgttttagtgtgcatagcatgtttggttctgtgttagggcttaaaaccccttctcaaagaatttaaactcaaagtcaggtgatattcacacagagagagagagagagagagagagagagagagagatcacgaaaaagaaaaggtatttgcaaatgcaaaatagtaatcaacaattagtatatgatttacctatgaaatgaacactgaaaaataaacatagtgcctgtggctgggcagtgagggcatgcacctttaatctcttcacttttgaggcagacacagacagatctctgtgagttcaagttcaccctggtctacagagcaagttctagaacagccaaggccacacagagaaactgtcttaacagaacaaaacaaaatttaattaaaaagaagtaattatagcatttttgtctgttttttgaggctggatttctcagggtagcccttgctgtcctggaccttattctgtagactaggttggccctaaactcagagatctgcttgcctctgcctcccaagtgctgggaataaaagcatgtgccaccaccacctggcagttgtgggcattttcttgtaaggtatctctacattttgggatacctctatgtatatattacagcactttaacctctccacaattcctagttttaggcacaaactttggtctcctctgattgtgttcctttccagtccatgctcacttatttagatacctgtgatgccccccatagacctcttttctctcccacatccaaatggaagagataaacaccatggacttggctc

SEQ ID NO: 29028 - DNA, 1119 bp, Mus musculus
tacaggttgaacaataactcattaggagttattttaatatgatgcctagttaacagtaataataggtagttctctaatagtcttttataatcataaattctttattcaaacaacaacaatagtgacagatatgggttttatattatggagctgaacttaaatttaaacataaataggttggttactcccattatacttgtgccactattgaaccagtgggtatctcaccagaccagtcattattgtagctcacaagactcacatctagttaagactgtctattacttttatccttcggatccatgtatagaactttctagcactgaaggctagccagaaagaacaatgctttaggacgaataccagcttgaaatatccatgttttgggactcaagtatgtgatatcttcaactttagggtcttaccatcaagttctagaaggtaatgtaatgtttcagggtgtctgggacctcactggccaacaaatgcaaaagaggtaagctatcttggctctgggatttttatatgctagactgtagtatgtggtgggagtattgttcttccactattgggtgatatggaaacttctagtttctttggaaaggtggttatatcaaatgatgttttgttggggcacagaggtgaaaggatgtcttgctaggacagacatgtgaaagaatgttttcctgaagcagacacaggcgaaatgatgttttgatacagaaaacacatgaaagaacccatgatgaaggagtataaatatgaccccacagacagggggagacaagcactgagcattggtttgctttgctccacatcactattcttcactaaagacagccatgtattggttcaatttgcataccgttgttgagctcaacttgtattaatgctgccattgaggaaaacctgcccaaaaaattgctcatgaggttcctgctgcagcttgctgcttcttaagccttgccttaggctgattagtgagcctggccatttcttcagaaatgagctacagctgcctgtctgcttgtagaaaggactaaactctagtcgatgcttcatgcctggtgtctgcctgtttagagaactgagctgcagctgctgaattgtatttggtgt

SEQ ID NO: 29029 - DNA, 1182 bp, Mus musculus
gggctggagagatggctcagcagttaaaagcatgaatgctcttccagaggtccaaagttcaattcccagcaaccacatggtggctcacaaccatctgtaatgagatctgatgccctcttctggtgtgtctgaagacagctacagtgtactcacatacataaaataaataaaattgttttttaaaaaaaaaaaactgaaaagcttattaagaggagctcagattcctggggtaatctgggtgctgctatccagcctctgcttcaggctgggcaccctcaaaagtccatgataccttcgacacctttcagatgggtcatactataaatttgggggaactactgtagattaatctgtagctatatcctgggaaggcaagtgtgttccagggccatccagatggttaagtaacctagtagttaattgttgcttgtatactaacttccatttgtgttgacatttcctaaaggagaacaatggaagcaaccagatcttgccatcaccttcacctccatcagagcttgacaataaatcccacagtgaaagtgcaaaacaggtactttttgcttgggactgtggtgggccctggaggcaggctgagactgtgggcttcacatctactgccccagcaggtgcctcacacctcacccctgcctgagagctgagcagaaagggatacatgctggtacttgggaattcgtctcttctccatactctgcttcctcccaaccggtggaataaattccttttcacatcttgaaagatataaaatgagcagattatcctataactatgacaagatataaaatgagcagattgtcctgtaactatgacaagtagcagccaggaccagggaaggatgggtgcaaaatctagaaagtctgctgttttgagccacagaaaactcttaagaatgttgagaaacatattcttgaaacttggcgttttctaaagtctgaagataaaaggcaggagaggaagacgggagggatactgggatcagaatgtcattaaagagtaaggaaatctctaagaatttctgtcctgagtttaatgccctttaaaggctatagtcatcattccttttcaagtagtaatcagtactagaagatgtcaataaaaataattgagtctagtactaaataatgcactacttgctgtgctcttgttttatgagccaattca

SEQ ID NO: 29030 - DNA, 3343 bp, Mus musculus
agattagctttaggtatctagtctcatcaggtatatttgaaacggatatgtagcctggactacctaaaaatctacttaactaaaaagacagaaaaaaacaaaaacaaaaaccttcttgactaactcttcagccctccagtcctttatactactataacaaacacattgtcaccttttaacttgtttgaaaacactatttaaaaaattatttttttaaaaaaatttacttaaagtatgatgtttagaaatctatgatttcatgaagccagtgagatgttgtaacttaaagttgccaggaaaaaaaaataaagccctcttctctctttcctgttttttgaggggaagagaatttaccttttaaagctggaaagtgtatgtatatagagataataagtcagtttatatttcatatgaatttgccttaaattagatgcactttatagagcctcagaatatgtcttttctttgaaagatgagtctcttctgtttgtaaatatataagatgaaagattgtgcataatgtgtagaaagacgattggctttgaatggaatgaatgaatgacttgttatgagtaactgacagtctgctctgggtggcaactgaacctcttcacacctccttaaggcagccctcaaatgcttgggcaccaccatagggtttgaagctggggcatcagttcaggtatggatgctgtgcagagggtgccagttccaaactcaggaaagtcagattctgggccactgctcctattcctaacctaagaaccagagaagtcttactgggattttcctcatttttaattatctttcaaggattatgagcgtaaaagttactcggtgggaaattatatgttttcccctcaagaagtgggtcttctctgcccacccactctagactaccttaaagttgtaactgcctaccttcagcaccatgtccagtcagaaatgggaaggttcatgtccttggctgctatcccaaactagttgcccagagcactagagaaaagctctgagtaccctttgattttacctttaggataaccaagaatttgctctatttcttggcaggatgcctaaagccaaaatgtggtctgatgaaacaggaaatcatattctttcttcctaattgttcactcaaaaggagctatgggttttctgtccagaggataccacatggagcaggcgtgcttggagcaggagccttctggtgatggggctgttttcccaggtctaaagagcatctgtgatgcttccgcttacatgctttgtgggcaggccaggacaggtctgataggagcagatcaccattcgctgacatgttgagacactcccagtgctcttaggcgtctctggcagctccagcagaagaccttacagaaccgcaggttgctgtagccgtcagggaaacactggagaagctgttgtgatggcagggcttctttactaaagatcattgctgtttaatttcgatcaagttgccctgtcagctatagatacagtctagtacctttaacctttaaagacatttggttttcgctttgctttgccttgctttttatattttgtttcttttatatatgatattcagcttagtgttggctttttttttctctagacattaaaactcagtgaaggcaagacaagttttcctgtgcatgagtcttcttagctcatgtttctctctctttaaattttttgccttaatgtttgccttgctcatctatgctgtcaccttcttggaaaggttaaaaatacagttcaaacattatcctggctctttaggtaactcttgttctcctggctgccttccatactaaacacacacacacacacacacacacacacacacacatccgtacagattttgtaacaaccaaataaagttctagcaataaattgaattattctgctatatttgtatatattgtaccataaatagtatgtctgtacctggaaggtttttctttttttctttctttctttctttctttttttttttttttttgagaactgatttatatgaaatatactgagggtaatgtagcttgtcctttttagtttcaagttctcatttgtaggcagatactttcaagacaccttaactctttgtggtatatgcttttcagtgaggaagcaggatttgtttcttggactttcttctggtttttccatgtcaagaagcttgtctgccagcatcacccctgagccatgtgatgtctcttatcaaactgaccagaggtagccataactgccctctgacattctatacgtttctcatcctgactatggcattaccagatctaggcagaggttgctatcctttgctagaaattggacagactcactggcttaggagccccaaaaacctatcaatcggtgaagattgggtcttcatttgtttattgtcttaccttgtgcatccagtgccttgtgttagtcaagcttcaccagccacagatcacctctaagagaactcaatggtagtggtggtgagtttggctttggatttcaatcctttggccttatcagtcagtagctaagagtacttcccaccttagtttcttaaagtgttacccttggtcctttgctttatgtaccatctaccataatatttactgaaagaccattcacaagccagtcatggtagtacatacctgtaatcccagcccttgggagactgagacaggaaagtaatgagttctagtccagtctgggctccatagtgagatcttgtctcagaaaagtacctggcttaaatatgactgtagtaacattcaaggaggagcagagcaatggatgcttggctcttaagaatgggtctaatgcagaagagctgaggcagacagtctcacttcacgaccagcttgtttcccttccattgcagtttgctctttaccattgctggacagccccatcagccccctccctggtcccagcgtcacagctgaaggttttgactgtgatgggctcacacttataatggcctattgagttgtttttagtgacagcttttgtttgctacacacctcattggcttgcttaccaaccatctagatgtggtcccttctctcatattcaagccagaacacatttgggtattcctgagactagagagtgtgtattgtttgttatataaacctaacctaccttgttgttttctcatattaagaacggtaaatctactttatattaatggaactattttggtaatacataagcaattttggttttgtttagagtggattcaaggtttccatgacttcatttgagctttacttacttcctatcaatatagccattttaatttatctaaataaaacattacgtttctctcactgtgtct

SEQ ID NO: 29031 - DNA, 1662 bp, Mus musculus
aaatgcctttcaagcttctggatgatacatgtcccaagactcttaggcgttgggtagggttgcttttgtgggtatccagttatgtttgtttttctctccagatagacccagttctcagccatagaacattttcatgatgcctctactagatggtgagaacacgataggggaagaaagaactagccatttatttcctagttcttcccagctttgccctcagtcccatcttaccaaagaaggaggatacatccacgggtaattatagcagacgtgactaaagtcccatctgaatgttgataatatttactttaccaaagagatctagcaaataataagtgaaaaccatagctagtctataaatttgttccctgactcttgaactcagaaatccgcctgcctctgcctcccaagtgctgggattaaaggtatgtgccaccaccaccacccggcccccgaatggtatttctaagatggtggtaggctttgacacccattgaattgggttcaaatatcaccattttcattagcttgttaatgactaattacttacactcttaagtcttccttttcttctgaaggtgaggatgatatctacctcataggattgttgtgagaccccagttagcatgtgtgcagagtactgtggagcctaggacgtgctgaatcccttcctctccttcacttctcttcttcattaaagaccaatgtggggctaggactataacttgggcgctgagttcagttcccagcatttcagatgtacagatcactcttcatttcagcttaaacaacaaaccctatctcactgattcttaacttgagatacagtggcgtcacttacgagctctttaaaatgcagttccaggaccctgacctgctgaatcagcatgtcccagtgctgaacaaagcaccaggaacctacatgttagtatgtattctagccaattctgatgtaggtgatcaaccattgccttatccattccttatgaaaatgtccactgcatgggtctttctcacctgcagacattcacacgggacttagattcctcttcctgatagttgctattgttccagtgtactccagttacattgtgttatatttatttctgtgtgtttaccccactagactgtgagctccttgagggtcaggatttaactttattctcagtgctagagacatgacctgaaccacagaagaaactcaattgttgaactaataaatgatacagatttagcaaaaaaaaaaaaaactcttattgacttacacatttctctgttaaatcctatagcattgtgatttgaatgtaaatttccccacagctcctgagtttaaacatgtggtccacagttggcagcactacttggggggtgaggggttatgaaacctttgggaggtgggacctcgctgacaaaggtaggtcagggagcatggccttaaaggtagtataccagcttctagttcaagattactgtttcctgattgttggcctcaatgtgaacaagctttagctatcactttccactgcatggactttgccaggccttctgagccatgatagactctacctgctgaaagcaggagcccaagaaaaatccttgcttaagctgtctgtcaggtgtatgttcacagtgacacaaaagtaactagtgatacacttggaa

SEQ ID NO: 29032 - DNA, 1123 bp, Mus musculus
ggatgattctgtcatagtagaaatgagggtgtaaaccaccaggatctctggcctggatgtggggcctgcacatgcactggctttcccatgcctctagtggcctttcctggccaggcaggattgatattatttatctctaagaggtactgctgtgcaaagagggtttgagtcctgcctccggttcgtactaagtaataattatgggtcctcaggcgggtggcttcacctttacacattacctacattttatcatatctggaatgactatcagagccatcagcacaattgtgaagagcagagggcagaggtacaaagggcccagctcacagctgggctcacagagggaaagtcccttatattattgaatatctgaaggaatgaatgctattctgaagcagttcttggagtgttggcaagcgggtgggggacgggagagtaatgagccagctgtgagaacagtaagcagcagaactgagcatgcgactggagagggccatcaggattggctcataaaagctttgcaccttgccatgctgtgataataagacttaaccccgaaggcccatgtttttaaaaactggcccacgtactgacaacctccccactggactgtacaggagaaagtggtgtgtatgtatatctgtatgggtgctcaggtttctgaggaaaggttatgccataattttcactgtggtctgaggcagactggccagtgacaagcttgcaaagccctaccttaaggagtgggaaatgtggaaggtgatctgggatagagcaggaagaaggcattttaagatctgctggggttagggctcatggtgtgaatggattcctagattcagtccccagcacttcttcccactcaaaaagaaaactataggagaaagcgaaactcttgttctgcctttctctacgggtcctgtgcggaggaggggtgaagactgcctgggtggggggaggcagagttttctccctaggattttgattcctcttccactcatctccatccctaggagttcccttccccaagaacttccagcaggtctgcaccaagatcctgacccgactcttccgagtctttgtccatgtctacatccaccactttgacagcatcctcagcatg

SEQ ID NO: 29033 - DNA, 1141 bp, Mus musculus
ctataagtccatgaccattttaggagtaatgacagcttagtgacccaactctgaccatgtgtacaagtgtacaaatgtgtgtgtatagatggaattgtacctctgaatcttctagactaccatcttctataaacatgagtccctggcatttgagtggaggttagacagtgcagctttgccctgagttccttaaacctctgacctatcaccatgtgggctgatttgcccagccaaggatgtctatggattgttagttcactcatctctgcctctagcagggcctgatatcattaagcctatgagcctggcagtggtggcacacacctttaatctcagcacttaggaggcagaggtaggttcgatctctgagttcgaggccagcctggtctacagagtgagttccaggacagccagggctacatagagaaaccctgtctcaaaaaacaaaaaacaaaaaaacaaaaacaaaaacaaaaaaaacaagcaaacatatggtcagcctcttgagggttgggattgatccctcagggtcccctggatcttgaacttggacacaagatacttcaatctcaaacccagaatctactgacatgactgaaggccagcacaaaatagccctccagaccagggagccactggaacttgaatgaattgaagaatccaattttcttctatctcaggacactgaggatcatgcaactgatggagaccttcccatcctaaaaacacctgcctcggcccagcctcctgatacattcaggcttcttggatttccaagccacagctatccagagaggctaggatgcttattcattagccattacttaatacctccatgctgagccctctgcacagactcacaggcagggaaaccggcagaaataggtttctgcccttccagagcctttatcctgagaggccaggagggcaagaagtcacataagaatattgtctctgtctctcaatatgcattggaggaaattgaaaccggtaaaaattcaaagctcttgacttctactctagggcctgctgattgcaacaccaagatgcatgtgcaaatagaggctgtcagacactctccaggacacaactgtttctgctttgagtaaggatttctagcctgatgccacaaagccctacc

SEQ ID NO: 29034 - DNA, 1298 bp, Mus musculus
tgcataatcgcctgcagcaggaccgtctctgccgggctccaaaggctgctgatgtgcagatcccggatccagcttgcggttggggctgcaggggctgcagccttcagggagtccagcttccaggagctgacagatctgcggacgtgcatgcctcttccctgcactgtcacctccttctggcgatcctcccaccttcctctgtcctacagacgtcctctctgcctgtcctctccctggctgagcaaagccatcccctcaattcaggaagggcagggaaccagatcagtcttccggtctgtaacacagagaagcacataatctttctttgccgtgaccgaaatgttcctcatttatcatcctcttccatgtttgggattgctgctaaagtcagtattatttctttttaaaaatatatttgcttatttaaaccatgttcttccagcaatcatagaacttcaaacttgcactgcaagcccgtagatattccccacgcggatatccacgcacttagtttttaatcctctccccgacagtctcaactgattttaagctgttactatgatgaaaacgttagagactggtgtctttgcatctctgtctgccgctgctgcctccacaaacccagggtagtcagactgctgtgtctgagaggaagccctgtgccctgctatgaggaatgctgcgccctctgccccagacatgaaggcacagccactggaaaataagctgtggagtcacgtaaaacagatttgcatatatgacatacaacattagtcaaccacaatcaccaaaattctctcataacttgtgcttgttttaataaataatttaaaattctgcctgtggcagccttggtggtccttttgtcgactgcaggcttgaagaggaggcagacctccaagatgggggctgagcctagtgaggttgcaggacggattcccaaatattgatccacaaggtgagatttgcttttctgtttgtagttgaggaaaggaaatttatcagacatcatgtctataataaacaactctgcttttgagaggctgtttaccaagaagttgaggtggggtcagtagccatcacatagcaggtttcaaaaggagctgtaatagaggaccctgtacccacccccacagaaggccatatttccctgtctaaagcattactatgcctttattgcagacctgatgtatgtccagaactgcagttgtcctaccaaaatagatgacaaaaagaaatggtgcttcccactggtacccagactagaaggagctgggtggaaaaggcctttgtaactt

SEQ ID NO: 29035 - DNA, 1143 bp, Mus musculus
ccaaggaccaccaacagtcaaaaaaagcaatgtgtttctgtatttttctgggtatttttctattaggaccttggaaccagagcctgctgagagggctgtgctgtccctccagagctggctgtaatcatgtcactctcctgctccaaagcctccctaggccatcacccacaaggtagacacagggacatgtccttggcacttggctcctgcccttccttccttgttcagattggccccagctttgatggacaccgcccgggtcttcctccctcattccacctctctctcttctgacttggcctttttacttctctagctgttgtagagaacaaggtttctctgtgtagccctggctgtccaggatctcactctgtagatcaggctggctttcagctcacaaggctgcctgcctgggtgctgggattaaaggcgtgtgttaccagagtctggctggctgggatatcttttagggtcatctctgtaacccattttctacttacatatccacaagtcagaacactggactgaggaaggactatgtcaccctggatacctgtcagggaacacttacagagataccagtgtcatcaatttgagcttcccagccaaataagtctcctccagtctgtgtttggttagcttgccagtattgacctggctcctgacggctcctccatgtaggttgtactggcgacctaggataccccttgtggtgagtgagtgagaccacttgtggtctgggctctgtaaggtttatcatcacatgcctagcacccagcatgttacctggcacttagtagatagccagtcaggcttgttggagggatggcagatttatttctagcgaatccattttggcacctcccgattacttcctatgccatccataatagggaattttcagtttgcctctgacctgctacctttatctaatctacttaattcactttgattcatgaccacagggacaaatatctctttgtctgtgatcaacgtagagcttcctcctggtcaagaaggctgcatgcatcaacttctaccaaccctcagctcctccatacttcttccacccagcccacaagcacattgaattcctcccactatgctcaggataagcaaacagaaacagcccctgcttgaatg

SEQ ID NO: 29036 - DNA, 1176 bp, Mus musculus
ggaactcacagagatccgtctgcttctgccttccaagtgctggaataaagacatatgccactctgctcagccaaacgatcatttctaaaaatagtgatcaccccctttcttcttggatcctaagcggcgtagtcaatttgatagtctcagaaagaacacaaaattaggtaccgagtcttgaaaagaaccgtctaaaaggaagatcttgaaactggcttctatggcttcctagcaattccgcttctgtctatagtctgctctaatttcgttctacctcggcagctttctccatgcaggttgagcccagaaggccttccctgcaacttcctaggagctcctttagatgctctagcacagccaccgcttcgtgtgcgccccgaggattctggtgggtggggtgtggaggtaggcggagccctgggggcgccgcaagcctagccccgccctgtctgccgctgatattctaagcagccctcaatccttcccggaacccgcgagagcgcagctgcagtttcagtcggaattattggcgttgttagttgacatggctgcgcccgtcttaagatgtgttcggaagctgctgaagctcgtggacttcacgccggtcccgcggagatatcgatataagaagaaatgggtaaggtctgacattagagggagacttatccagcccttgcgtttcccgtcactcacagttgcattcgggacatgaactccagggaccgtaaccttcttggagctcttgtctcacgcctgcctgtccttttattaaccacaagcctcttcctgttgcgtaagcagccccctgactccgcccctctctgttaagtcacggcctgagctttcattcggtgacgttacatcgcctcatgttactttttcttgcttacttttatcttgcccttcccacccttctttttccttttctttcctccctcttacccttcccctccagtcccatgaactcttcccctcctttcctccttaaaatttcagccccttcaacttcacctcaagcagactgccctaacaactactccttccctcctgagtctccgtcgtcctgcaggaaaggattcacccctgttctcactctcgaggtgcctgtggcgcccgggaaagacttcaacgaccacctttcctgtaatgctggcctttctccaaatgcaggcaaca

SEQ ID NO: 29037 - DNA, 1270 bp, Mus musculus
ttttattttcgccagcaggcgtgggatacatgttgtggtaggtgtgctgggctcagtgcaggtgtggatggggtcgggggaggtgatgacttggtggttggatgggaactgagaggattagattcacttctgggaagtttggatgaaagaatcatggcacgctatagctaagctgccaatgaggttgagaaactcttggaaatctagctgcccgtcacagttgaggtccagcttcttcatcatgcggtcaaggacaccaggatccttctggttctttgtgaaggcagccagctctgtgttcatgaaggaaaggaattcagttttggagagttgagtgttgtttccatccttcccgctgtacttttggaaaacagcaatcagggactcaatgcatctctcagtctctgtaggcatttttgcttcaagttgaggagcgaggtccagctgcgactgtggctgacggtggctgggacaggagtccatgacattattttctttttcttgtctaggtggcccacaagctctttaaaaacttgaagtaaatgtgcagattcgtcctcctcagccttgtcactgggaatcaggaacagttccttgtggttctggacgtcggtgtctgatggagtgagttctcgagaacctcactgactttggcggtagcttctcttctgtgtgactagcagtgacttcatcttaataaactgatctgcaaacttgctctttgtccttcctttgccatacccttactttattattttattatattttaaatattaaaaaaaaatttcccccataaaattgaacccacagtattgtacatgctaagcaagtaccttaccactggactgtatctcacctttctattttactttgtaagtcttgcaaaattgcacttgttagttctcagatttttaatcctgcctcagcctcctgattttcatattacagataggtgacacaaactcagttcctttgagattcctccctaccccctcccctcttttttatttatttatttatttttgttgttgttgttgtggttctaggacttgtatccgggttgaactttgtatgaggtgtggttatgcatgtctgtaatcttagcaacagggagtctgaagcaggatgagttcaaagccaactgaggctacatgaaaagacccacccctatcccatacatgtaaaggataaaatgtaactaattcctgttacctagcaagtaaataatccctagtaataggatgggtctgtctaccatacagaatatgct

SEQ ID NO: 29038 - DNA, 1146 bp, Mus musculus
gtttcttgggctagatttctcagatatgtttcagcgccaaggattttttgcacatattttaaaagtagcaatggaataaaataacttctgttaaggattcatgagaagccattgagaaaaccactataactatataataaccttcacaattactgttttggtatagtttttatagatggttaaataggtcttcctatagttagtacacactagacctagcttgaagcaatctggctctggagtatttgtttctgttaattgtgccatgctgctcatgtagttaccatgtttgaggtattacacttttattaacagatctgaaaaaatccaactgttttacctacatgttcactatcccttgcagcagaaacaactgcaatagcttgggtcacactctcattcatatttttcatggccatataacttgcctgtaaaattgaaggtttattaacgtttgaaacaggatctcattatgtatctctggctagcctgcaactcagagatttgctcgtatgcccaggattgaagccatctacttccatgctcaactttgtaaacgattcccaagactgtatgttaagctatctgcatgcctataatcccaagatgctgagggaagcttgagctacatagcaagatcttactctaaaagacaaaaacctgtatgtgggcaacaaatatgtagggaaagtgctagtgaggccctgaaggactcaagaacatcctttgctaccacttaaaactaagcagaaaccgggcgtggtggcgcacgcctttaatcccagcatttgggaggcagaggcaggcggatttctgagttcgaggccagcctgatctacagagtgagttccaggacagccagggctacacagagaaaccctgtctcgaaaaaaaaaacaaaccaaaccaaaacaaacaaacaaaaaactaagcagaatatggagaaaggttcagtgttaaaaatctgttgtccaagggcatttgttgaactcaagttcaattcctagtactcacatagtggccctttctgattcttcaaactaggcacgttgtacagttatacatacaagcaaaccaccaatacacataaaattttaaaatttgttgtttaacatgcacaaggctttgggttcaatgcccaacatt

SEQ ID NO: 29039 - DNA, 1556 bp, Mus musculus
ggaactggtagggatgccatgaattagatatccaggaagcaactaggcttttgtctacattgatatccttttcttcccccatcccttgtctcctaacccctagcatacctgatgtccagctgacagagagaagaggaagaatcctctgagaaaacatctgctagggctaataggccagcgttccctggcgagggagagaggaacactcattaactctactcacaaacaaggaaacaagggtatcctatcccagctccaacctgggagaaccctagtcctagcagttctgaatacccagtactcaaatacctatattacaacctggtcagtacctttaccccaaaagtttctagttcctagttccttctttccctcccttctcccttcctcctctccagggtatggtccctacccaggcggttccctggtagtcgaaggcccttcagtgtagagttgcccttcatagcagcaaccatctcaggaagaaattggactgggcgcttctcaaacagacggcagaaggagaaggtaatctctgtcaagagaaagtagaatattcagatgactgaagcaggggtggtgctgtcctcctgtcctaggttggcctagcaaggtactgtgaacatttatacagatctgaaaaggataatctatatagatccgagcaatattggaactcaattcaaataggacattgagcctgtttgaggaacatctctgaggataaattttttatccacttcccgctctctatatatagtcactgatgcttttgcagggggggagactagtcacagtgagtgtctgactagtcacacccacacacagtagcatgtttatttctccccactatctttttttttttttaaattgaaaccaccaaggtgctaccaccatttctgacagccccttaaaacaaaacaaaactgggtgatgtactaaaacttgggatattagaaggaaggtcatgtaggttccatatcctttatagtcaaggaagatagagacctgggaaaacagtggtttgcagactgagatcatgacaaagctacagtaaggacacaggaatgcgcaggctctgggttaggaacttaccttgaagggtcagattctttagcaaaaaaagcacttcactctgacagtctgcaagattcatatcatggaagctcagcctcttcagggataggttgtgttctggataggagacacacaccatgggtggtggggcttaattttcccagggaacaatgttaggtccctacctacccactttcaccattcctacctttgagtgtttgcaacacaagcccaaaatcttgaggcgaggcaaaggtggcactgtccagtgacagctgctgtagagaacctgaggccttgaggacagagcagagcagtggggctggctgggctcctcgtggaaatcccatttccaactgctcgaggcagttttctgtatgagaggaagaggacattccacttagttttctctacttcacttaaaaatacatatgttttaggtgtgggaacacacaccctttagttccagaactcaggag

SEQ ID NO: 29040 - DNA, 1279 bp, Mus musculus
gtggcaaccaccggggcctgtggagattatttcggaagaagaaccactttttggtggtgggggtcccagcctccccttactcgtgagtcaccccgttctgccctaggaaatggccttctgggtctgaagcatgtcctctcctctgtaccgttcatctgttatgtttcagagtgaagaagccaccatcagtcacccctattttcctggagccacccccaaaggaagaaggagccccaggggctgctgaacaaacgtgaagcctcctccaggactctgcagggctgggtactgtgtacccccagacaggctagcccgttgccctaccctgtaggatttagtagatgctggtaggggtagggctggtttgtttttaacatggaatttaattactaactccaaggggaaggatcccctgccccaacacccctattcctgagtttaaggtctatttatttacttccttgtcaaagaagagcaggagagttcccaggacctctttgggatccctgggtagctgatccactcttttcataccctgtcctcccaggcctggctcagaacctatttattgactgtcctgggggccttgggaataggcccaacccggggcctttattcctctctggaccaggatgctgccctgagggtgggactggctcatactcaggaaaactgttgtgcccaactgatggacaggcccatatggggtccatgtgctgacagactcacacagagacctttagacactggaccaggtctcctcttagccttctctttgtccagatttccaaaactggataaagatggtcattgattaaaaaagaagaaaacctctgggggtgtattttgtaatagttttgtggggagtatggcgtggtggtgagggagaaaccattactggataaatggtgaggtgtttggggtttttggttttttgttttatctgccatagtttatcttctgtgtgaagccatttggccaccaggggatgcccaagtctcaagcttcaagtcttttgtttcagaagggttccaccctggtaccagctgacttatatgccttgcctacttggcagccatctcacaccccttcctcgctattctaccaccctgctagttccatcctttgtgtctgagcccagcacctgtccccagaaacggagtaggtaagagaaaccaaaaaggacagatgggggtggttgaggcaatgctctggacgtaaccatagtggagacaggaagtgactggatcagaaacagtggcagccacagcagtgtggg

SEQ ID NO: 29041 - DNA, 1151 bp, Mus musculus
taccgggtagccccagatgctgtgcactcaggtacaggggtacccctgcaaatcagaaaccatcccttgggaaattggaatgaacttgagccatctgcttcccataggccaactctaaagctctttgagcataaccttgaagatctataagtgttgggaagattgatgggtgggggcagtgaaggtagattaagtggactgtagtcaccagtggtaaaaagtgaacagcagtcttggggcattctagagcaaagttctgccttactgctcagtcacttctaacagctaacactgatgtcttgttttctgtttgtctgtccacccatgcaaccatccaaagtaggagggaattcctcgcagagcagctctcccagctccagtgtgcccagttctcctgctggctctggacatacacggcccagctctcttcacggtctggcacccaagctccaacgccaataccgctcaccacggcgcaagtcagcaggcagcatcccactgtcaccgttggcccacaccccttccccaccagcaacggcagcttcacctcagcgttccccatcacccttgtctggccatgggtctcagtcctttcctaccaaacttcacttgtctcctccgctaggtaggcagctctcacggcccaagagtgcagagccaccccgctctcccctacttaagagggtgcagtctgctgagaagctggcggctgcactggcagctgctgagaagaagttagcaccttcccgcaaacatagtcttgacctgccccatggtgaactaaagaaggaactgacacccagggaagccagccctctggaggtagttggaaccagaagtgtgctatccgggaaagggccacttccaggaaagggggtactgcagcctgctccttcacgggcccttgggaccctacggcaggatcgagctgaacgccgtgagtcactgcaaaaacaagaagcaatccgggaagtagactcctcagaagatgacactgatgaggagcctgagaacagccaggccacacaggagccaagattgtccccccacccagaagcaagccacaatctactccctaaaggttcaggagagggtacagaagaggacactttcttgcacagggatctaaagaagcagggccctgtactctc

SEQ ID NO: 29042 - DNA, 1096 bp, Mus musculus
ccctcactctgtgtacagctccaaacatattttccctaaggcttaacgttgaacctaaacaaaaccatgcttttacttcattgggtatttactggagaaaaaggaagtggaacaaacaagtattttagcagatgcaatctttgaatacagtattcccatcctaaaaacttagtcttatcccagcaaggcatgatgaatgtataaaggcctggatcccttccttccgtctcctaaatgatagtcttgaaagccacttgcaaattgatttcctgctttctattacctgtctcctacccatgctaatagcagaagggctggggtcccaggctccagcatcaggctgttctgtgaggctatttccttacgttctacaaagcctaagaactgactggagcagggtcctggatcatgatagctttttctcatgatagcctgggctctttatagggggagactgtgccactctgctcaagaacatcggggccctacctgtggacatggtacgcctgtactttgcggaaactgtgctggctttggaatacttacacaactacggcatcgtgcaccgtgacctcaagcctgacaagtatgcccactgtctagttctgttgttcagggcatcctcttgataattgagacaaatgcatgttcggatcatcttagaatggctactaggaaacagaagaaaccaagcagaacaaaagactcagcacatctaatagtgacatagaaaattagctttgaaacacagacctctgtcagatgccactcatgctggttaactctgagtcagtcttttaactaaagttttgaacctcaaattcccctcttctgaaatgaaatcagtgcatttgctctgctgcatgttctagaaatatacccccttccttctttggtgctgtttatcaaaatcaaggtctgtgcatgctagggaaattctttaccactgaactacaccctcagttccagaatagtttagagacaatcacaggactcaggagatcacagcacttgtttcttgctcagatgacgagccaggtaggaaacctgactttgagatatatggcctgggcagctaggctagcccattaaggga

SEQ ID NO: 29043 - DNA, 1192 bp, Mus musculus
tgagcatggctttaatgactaagtctgctttccttggtttcctggaaagtgaagaattaggtaaaatgcaggttagaacccccgaggagctgcacctccctggaagaaccccttagataatgttggcactgggagtgacaaggagtcattggccaggtcgcaaagacatgattcaaactcacagattgatgaaaatgtaactgcagcttctcagtgaagagtggacaatgcagtgagggtggatcccaggcagtgttttgatttcataaaggagcccctaaaccgtggtggtctcaccgttctcatgggctcctttaaagtcagtgagattgggaggattgaaggaacattaagggaagtccctaagtgaatcaagaccgaagcgcacttctaagcctaacctagctgatagctgagatcttgggtttgagtactaaactgggtactcatctgtttgactgaagattacaaatgtttaagaagatatgatcacagtgttctacatgaaaatatagagtttactatgaaaagataataaaaagactgaaaaattactaccaatatccagttaaaacctagacttagaactcattttggcttttgtatcctctaggtgacagtcagggtagcattgactgtgacttgttttagaaatgaaaataggtatatacagtttttctttgtttcctcgattgatttgattcctaggacatgttggggtagatgtcctatctttcactaaccaaagctataagaacagcaagttattttctgggaaggtttccctagagaagccagcagtagattgattgtggcaagtagattcccctcttttcagccagggcagagagctaggagagagctacacttcttgcagcaaggtagcttattttaacattgcaccattttaaaactataaacaaatattctaggagctctaagaatatagaaagcctgaaactttgctttcatgaatgtaggaatatgtgagattctgaagagaattgagctcagggactccaagggtggccatatttctccttgattttccctggcactaaaataacatgattcttttcttcttcttcagtcctggacggtccccagtttcctttgacagtgaaataataatgatgaatcatgtgtacaaagaaagattccccaaggtaaggatttgttttaaaggagaaaa

SEQ ID NO: 29044 - DNA, 1180 bp, Mus musculus
tgtagcatcccctggaactagagttaacaagtgttgtaagctgcctgatgtgggtgctggtaactgaatgttcaggtccttagaaagagctgtaagtgctctcagcttttgagccatctctctaatgccccttaatgagttgttttttaaatatgtgggttagagttttaccggcagttgtgtctggaatccagcattactgatggttgtgaactgccatgtgagtgctgagagccagtgctcctaactactgagccatctcttcagtcccttagtgatggttctttattgaaatggtatgtaatgagtgtaagagtcttccaagcatttattacttagaagtttcttctttactttctaggtagtcaccaaaatgatctgtttagttttaagagggacttttgttagattatcaagctttgtttaatttacttgtatttgggtaagtgtatataatagcttagtataatgctactgcctggaaaaacccaaactgtagttacaacttttgattgttttagcccaggttaatggtgaactctcaacattctttctgcttcagcctttgagtacataagccaccacatatggccctgtagctttgagcatccttactctgaaatctgaaagtttttgagtaggaatatccaattaaaaaaaaaagttttggatattgcatcattttagatttctgattttcagaatagggatattcagctgataagtgctacataaatattctaaaatcaggtgtattctcaaatccaaacatttctagtcccaagcatttcagatctttatcagggatttaacctgtatatgtggacattttttatagacaaaaattttaaggtttttttttttttggtttttcgagacagggtttctctgtgtatccctggctgtcctggaactcactttgtagaccaggctggcctcgaactcagaaatctgcctgcctttgcctcccaagtgctgggattaaaggcacgtgccaccactgcctgtcaaattttaagttttaaccaccttggttctaaaactgcttctaaaatggttcttttccttgatagtcactttagcagttgtttttgctaagatctgaaggccgtcgtcattgcttttatctctgcagtctgtcagttagaaacaactcattgaggttttgcatactttacac

SEQ ID NO: 29045 - DNA, 1208 bp, Mus musculus
cagaaaaagggcccaagagacccgattaaatagaaatataaaaatactttcttggtattatttacagtgtctgtggaggccagaagactgttgaatcccctgaagctagctttttttttttgttttgttttgaagaaatatttgtttattttatatgagtacactgtagctgtcttcaaacacaccagaggtgggcatcagatgcccattgcagatggttgtgagccaccatgtggttgctgggaattgaactcaggacctctggaagagcagtcagtgctcttaaccactgagccatctctccagagacccctggagctagctttacagacagttctgagctactcaatatctaggctgggagctaaacttgggtctagagcagtacatagtcttgagcattgagcctgtatctcttatcctgtaaagctgcattttagcatcacaattatgttcctcctttggctccttcctccccacccccacccccccacaggtaggaatttattcttcatacatagtttttgtttttgttttctaaagagtatttcttttagccagatggcggtagtacacaccttttatcctagaagaaaggaggcagaggcaggtggatctctgagttcgaggccagcctggtctataaagagagtttcaggagagccaaggctacacagagaaaccctgtctcaaaaagttacagatatccacctgcctttgcctcctgagtgttgggattataaaaattatttcagggctggtgagatggctcagtgggtaagagcacccgactgctcttccgaaggtccagagttcaaatcccagcaaccacatggtggctcacaaccatctgtaacgagatctgattccctcttctggagtgtctgaagacagctacaatgtacttacatataataaataaataaatctttaaaaaaaaaaaattatttcaaagtaacttattttgaaaaatgtcctaatccttattatgtcatataaggttagtttacatttttgtgtgtctgtgaattgtatagtcatgtacctaaacatttcagtgttttgattatactgagaaaagtaaaagatgaaaaatcctgtattagaatctagcaatcatgaagtcatatttcatgaaaagaatcctacttgtggtttgaagagatttggctcccatagactcatgtgtttgaatctgtttggcccag

SEQ ID NO: 29046 - DNA, 1108 bp, Mus musculus
atgctttaagcagttgtgtgagatagtgagatttatgttaaaagcttctgttgtggatagtttgccactggaattgattgtgcagaagctctcttacagtgctttactattacatttgacctgtcaccttgatgacatttcttgcccacatctgagaccatttgtccttgtagccatgaccttgttatgaacagtgcttgcactcactgtgcagatgtccatgttttgcctatttgagcaacattacagtgccattactcaaggcagttgaatgaggtgaacatagacatagcttcccccctttccccccttttttaaatgtaacaaataaccttttatgttccccttcccccccttcccctccccctcccccctttggaaaagtgttgggaaggaggtattgaggatgagccgttgagaggattaagagggtgggccacacagagctgggcttttttgtgcttcatcacaaggcgtgctgctggccaggctattttagcacccttcttacaagaacacctcgtggaagatacaggcggcaactttggatacaggaccacagaggtgacactctgagggtaaatatcattcatgggtcttaacctttggagaaaacatccattatatgtcatgaaaaaatgcctgttgtgttgtgaaggatttaattctcagtaattcaggaacaccagtgaatctcaggtacaagttgatatgtgagacgatattcctaaggtaaatggaaaagctcttgagaggttctgtagcagtgacccacttaatgcttcgacccttattacatcagtaaccttcttcttcgtcttttaatatagttaaatattaataaatattccttgtgttgtggtgacttccaatcataaaattgtttttataagtataattttgctgctgttatgaattataatataaatatctgctaaaaacccttgtaaaagtgtctcttgaccacaaatggggtcttgtcccacaggtcaagaaccactgttctatatgtatttatggtaggtgtttttgttttgcctttttaggcaaaaactcaagaatgtttttgcttccttcctgtaacattctttatttccatcatatttgt

SEQ ID NO: 29047 - DNA, 1234 bp, Mus musculus
ctgtcaacacctgtgtctctcatgcacatagccaaggcaaaacactagtgcacataaaataagtttaaacaaaagagtttttaagggtataaaaatatactagacaatgtcttcaagagtttcgtgttttaagggtgaaaagtaacaagggtaaaatgacagagcttaacttcagtttagccctttgttaggtgtacagaagacagaatgctaatatgctcttgtccttttaaacaggggtgataccagtgctcagataaagtgttctctgtactagcatgctggtgaagtttgaatgaatcctatcacctatactttaaaacaaaacaaaacactaggtatatatctatctgtaagcccagagctgatggtatgatgaagataggccaattccacagtcttgtagataagccagtctagctgagatggcacacacacaaaaacacacacacacaggcacacagaggtaatgataccttaatcaggaagctgaattgagcaagacaggatgacatagggaagcaaattaaagagaatagtaaatggggtgtagtggtctgtaagttctaggccagcctaactacatagtgagacattgtctcggatggatggtatgtagatagatagatagatgggtgagtgtaatgacagcattctcccttgggagactgagttaactatgagtaccttgagggtgaagagtttataatgtggctggagttcagatctgtagaactaaagtaaatcaagataggcttagcagcctgcctatagttacactgcttacaaagtgaaggcccagacaggccggtggtggcgcatgcctttaatcccggcacttgggaggcagaggcaggcagatttctgagttcgaggccagcctggtctacagagtgagttccaggacagccaggtctatacagagaaaccctttctcgaaaaacgaaggaaaaaaaaaattaggaaggtgggtaagagcatgtactgcatcatggaaaggaattcttttcatagaaactcttttctctgttttgtttttgggaagtaagttgttttgcgcttatttctgttccactctgttgacctctattgtcttctttggtctctttatttttcaacacaggctttctctctgtttcagccctggaactttctctgtggaccatgctggcctttagccttgaacacacagagatttgtctgagtgctgggactaaagatatgaccaccacac

SEQ ID NO: 29048 - DNA, 1844 bp, Mus musculus
ggctacatagaaaaacactgtcttgaaaaaccggggcggggggaacaggaactgttttagaaataggaactctaaacccgacacccatcatactgaactctagactgactttataggaaaggggggaaatgtttgggtggcccagctttggttgcatacatctttaagcctagaacctgaggcataaataggcagatttctgaatttgaggccagcgtggtctatatagggtgttccaaaactacaatagtaagactgtctctaaacaaaagaaattaaatccttgtaagtttgaaaagtactgctttaagagatgttaggtctcttgggaattcccctccacatactcctctagaccggtgtagtcattgaaggttttttattttctttctcctatgctctgtagctacgaagaaatgggtttggaaagaatggcctcttacaaagccgtagttgcagcctgtcctccccgtggagaagcacttgcattgcagagtgtgaggactcagactcggaaacgagcagcagccagacgtcagacgacgatgcctggaagtagagataaaatgctcacagtgacctgccccgctgagctcagccttgtgtttagagaatataaagtgttcttttccttttcttatgttgttgaatacttcatgcacaagggaaataatcatatcccaaagagagagcaattgtcttgcttagcctttgttttcttccctgttacctgcttaataggcatttgtgtggtgggatttttttaagcacacacacagtacctgtggggctgtgcacaagtgggagctgtcagggcagagatgcagggaggagatgctgctctgctcaacagcttctactaccagcccttggggactcacccctgtgctcaagcaatcattgtcaatgacaaagtgactattgaagttataattgtattaaattaatgctaataatttggatattttattttatttttggctgctgggtaacttagcccttaaccaagcatatgtggttgtttttgttttttttttttttttgttttgttttgttttttattttctctttttttttttttttcttttgggtacagctgtaaaatatttggatataggaaatgttattcttgcagccttgatattcagggtggattgtaaaatatgaatttttgtgagatttcaaagattaagattattttgataacattatttacagatttaaaagatgtggttaccacaagtctgttgaggggaaaaactactgcataaaataactaacgtcgaataaatattttgcatcagtttggattgtcttgtgtaagaaatatattttctttaaaattagagagtggattctttttttaagggaaatatttttagaaaactaggggaaaactgaattcagccccacctgtttctcttttcagcaaaaattcttaatgtggaaaaaacctgtgcaataaattattcataataaactacattttttttactgaaggaattttttagtgcccaggatttatcaatatacctgggtttggaggcctccccccacctcagttggttgtgttttatgtgtaggtgttttgcctatgtgtgtgtctctgaatgccatgctgcactgattgccagaggaggccaaagggggacttctgctcctctggaagaacagctctgaactgctgctgagccaagtgtccagccaccaatatgaatattttaaagaaggcctgacaagtgcttcctacttaattaaatgggtgcatgggggtgattgaatgaagtaagacgacagtggagatggaggaatgagaatgactccgtgtagggttagcacttgcc

SEQ ID NO: 29049 - DNA, 1341 bp, Mus musculus
tgggtatctgggagatggatttgatttatggcttctttaataatgaatatatggaagagtacctggtcaacaatttatttgatcctttgtgtgatctcctgggtttgtcaaccttatcatctggtcatatatgatgggatgacttatgtcagggtaagttatagctaggatctttgtctttcaggctgagaatcaggctgagagccaaacagcagaggggaccgtggagtctgcagctacaattaaaagcactgcatgttaagaggcgagcagaaccttcctcctgagggaaagtggttttgtacataatgtattttttcacttttggggattctttttgtataactccaataaagattgtaggcaacagctgaggctttgatggctttttttcttaaatattggtggaatgctttggggcactctacatttcttgtgtgtacatgtttgtgttttgctattgcacaacccacttcctgtctaatgtggaggtgatcaagtgtggctagaagcccttcatcttctactggtgctatgttctatttcccaatacttggctgaaatcaattactgtgtaagctttcagtggtgctgtccttggatggggtctgctaaataagaactggtagaaatcagtttggtgctgaaaatggatgatggaatatgacccaggtcttggtttgtccctatctgctgttcatctggtttccatttaaggccataatcctatcctgggaaaactggtagaaacctgggaaattgttcctgaggaaaacagttgttagactcaggctcacactgtagtataagacactggggggagaaagtgtgttattttctgtatagaaaggttactatatgtcaataagtggaattgttatattgtctgcagttttgtctataaaaataaatatgctaattttaacaaagcccttgttctggaattatatatggaagactgaacaagtacaagaaggttcttgggctgctgggagtgcctcgtgcaatatggagttgagtggcaaactggtccatcacttcttggtgtctagttgtgggatggtggtcagggtttttttgttttggtttggttttggtttttttggtttggtttggtttctctgtatagctctggctgtcctggaactcactctgtagaccaggctggccttgaactcagaaatccacctgcctctgcctcccaagtgctgggattaaaggcatgcgccaccactgcccggtggtggtcaggattttaatgccattgggctagaacaggcagggtgcagagtctgagctgcctcatactgacttgttaaatgctacaaagcctgctgacag

SEQ ID NO: 29050 - DNA, 1196 bp, Mus musculus
gtgttttctgacagtcagtccaagcattccggaggggaagcagaaactccaggctagccagatctatatagtgagaccctgtttgcaaaggggagagatgagtccattcataactgaatttatgttaacttctgtccatggtgttatttcttcatttatcagagaattatatccaagctgtggaggagtttcaggcttgcctaagcctgcaagaacaatatttggaagctcacgatcgtctccttgcagagactcactaccaattaggtttggcctatggttacaactctcagtatgatgaagcagtagcacagtttggcaaatctatcgatgtcattgaaaagagaatgggtgagtgaacagaaattactgtatgtttaggtgataccgtcatttacattgtggggggaaactgggtttttttgttagtgatttaaagctgttctttgtagctgtactccatgagcagatgaaggaggccgaaggatcgtttactgaatatgagaaagaaattgaggagctgaaagaactgctacctgaaattcgagagaagatagaagacgcaaaggaatctcagcggagtgggaatgtagccgaactggcactgaaagctactctggtttgttgagttttatttttattttttatttttttgaaagatttatttatttattatatgtaagtactctgtagctgtcttcagacacaccagaagagggagtcagatcttgttatgtgagccaccatgtggttgctgggatttgaactctggacctttggaagagcagtcgggtgctcttacctgctgagccatctcaccagcccgagttttatttttaaataaaatacgtgtattacaataaatgtttatagtccatttaaaaggtacttttcctgacttgagttagttggtcagaatgtgagctcatttcacttgtataagttgtcccatggctagaaagtgtgttctgaatgcaggagacaggtgtacattctgtcactgctactttgttttttaccttgtatatttctttgcctttcagtataaatattgtgttactatttgtaaaatgtttttgagaataccattaaaaaaagcttacgtcatagatggagtgtcttagccataaattgcctggctctgttcttggcctgacatgctggggtatatataatctgtattgtaaataggacat

SEQ ID NO: 29051 - DNA, 2672 bp, Mus musculus
tttcttatttaagccagtcagtggtgtcacagcacttgcgagggagagacaggccaatctcttgagtttgaggctagcttggtaagcacagctagttccaggacagccagggctacacaaaggtactgtctttaaaaaaattaaacaaaaattctttttctttaattataaatgcaaagtacttcccagggccagaattctcagatctcatagagtcttgagtactgacatttgtaagctaatatggatggtagcaacggaaatcaggtcctcttgagaggaaagtgcttttaaccactgagccattgcttgggcactgcctctccctccccacactccttatttttaaagactaggtcttgctgtgtggacctggttggcctggaacttgtagaacttctgttttgaatatatatttttgtattctttttacatgatttctttttctgcttttttcgtcacaatcataaaatacattgctaggaactagttatacttttgtgctttttcttcttatagaatggagaatggagtgttgggaaatgccttagaaggagtgcatgtagaagaggaagaaggagaaaaaacagaagatgaatctttggtagaaaataatgataatgtagatggtatgtagagttgcatgttacagtcaagagttgcgacgactgatcttcctttaaataagtcacggaaatagggttctccttatggtggttggtctctccaaagatacttgggctgatgcagtaagtgtaggccattactaaagtgatagtgagcttttaagagaataactaaatgtatcaaatagatagattcttttaaattggcattaaatattaagagaacatcaaatatttttctgataaatattttttaaaaaaccttccatactcagttattaggagtccttggaggacttctgttttctatatcttagaaaagtaaatattttctaagtttggctgttagaaatcaaataagtatattgtttaagagagggagggaagcttgacatctcttctgactggtatcagattactcatttcttttgcagtatgttgctttgctagcttggattctccctttctccctttgcttttctcatgggggcatctgataaaacttaggcttaaagggaatgtatttctactttcaatttatgcttttatcattaaactccgagacatgtttatgcttcatgttctttaaccatgtagaggaagcaagggaagagttgagagaacaggtttatgacgccatgggagaaaaagaagccaaaaaagcagaaggcaagtctctgacaaagcctgaaactgataaagaacaggaaagtgaagtggagaagggtggaagagaagacatggatataagtgagcctgaagagaagctccaggaaacagttgaaccgacttcaaagcagttaactgaatcctctgaagaggcaaaagaagcagcaataccaggactgaatgaagatgaggtcgcttctgggaagacagagcaggaatcattgtgtactgagaaaggaaaatcaatttcaggagcttatgttcaaaataaagaattcagagaaacagtggaggagggagaggaaataataagcttagagaaaaagccaaaagaaacttcagaagatcagcctatcagggctgcagaaaagcagggcactttaatgaaggtggtagaaatagaagctgaaatagaccctcaagtcaagtcagcggatgtgggaggggaggagccaaaagatcaggtagctacctctgagagtgaactaggtaaggctgttcttatggaactgtcagggcaagatgttgaagcatcaccagtcgtggctgcagaggccggagctgaagtctctgagaagccagggcaggagattacagttattcccaacaatggtccagttgttggacaatcaactgtaggagatcagactcctagtgaaccacagacttctgcagaaagactgacagaaactaaagatggctcaagtgtagaggaggtcaaggcagagctggttcctgaacaggaggaagctatgctacctgtagaagagtctgaggcagctggagatggggttgagaccaaggtagcccagagggccacggagaaagcacctgaagacaaatttaagatagctgctaatgaagagacacaagagagagacgaacagatgaaagagggtgaaggtaaccgggatatgatagagctgcagtgggtggagtacatttctagatttgacgcactaatcattggtaaaagtcagccttccattcaggattttcagtctgcctttagaaactacaaagtaggtcgtctgatttctgaaacttggctagcagtcattaacttgttatgccatcatgctagccaatgaaatgatatgaagggtggattagaaatgggttgtgggatagatagggacatagtaggctaggctggcagagaatgctgaatggatgttcacttgcatgcctttggatttttaagtttactgttcacatggtttctcctttgttgtaggaagtaggaacagagcagtagaatccactgaattggtacacttaagcaggcatgccatttaagtcttctggtgcccttatcaattttagttcatagaaatgtttagaggattattcacactaattttaatcttcagggac

SEQ ID NO: 29052 - DNA, 1167 bp, Mus musculus
atctctctaacccctaattggggtgtttcattgtgtccccacgtaggcctcaaagtatattatccatactgttcttattcagttctacgtcagtgtgaattacatatgtgcctttagtatttttacttttctttttttcctgtgtatcccaggctgtcctggaactcactctgtagaccaggttgtcctcaaactcagaaattcacctgcctctgcgactcccaagtgctgggactaaaggcgtaagccaccactgcccggcaatatttttatatttttttgtttgtttgttttgttttgttttagacagggtttctctgtgtagtcctggctgtcctggaactcactttgtagaccaggctggtctcgaactcagaaatccacctgcctttatcctagagtacttggattaaagcatataccaccagtccttcaagatgtgtgttgtttaaaatatgaaaatttcttatgtgtttatgtttttctgatactacttaatatccaagctaaaaagagcttccattgtatttttttcttttttattgattatagaattgaagatgctcctgctccttctacctcggcagataaaatggagaggtaagattatatgatacaattatgtaaacagtttatatctgctcactgaaacatatctgaaacagtttatatctgctcactggggataaaatctgaaggctttacacagagtagtatctctgaaattgtatcttctgctcctctccttttcttagatgtctctagggtcagcaaaacctgttcagggattcatttagcttttttttttttttttttccccaagacagggtttctctgtgtagccctggctgtcctggaactccctctgtagaccaggctggcctcaaactcagaaatgtgtctgcctctgcctcccaagtgctgggatgaaaggtgtgtaccaccactgccccgccatttagatcacttttataaagaaaatttgcacctttaattttttaattggcactaatgtaaacacagtagtaggtaaacctgatatcccttcaacatgtgatgaccattatgaactgctaacagatttttcaaataccggggtatttggaggacattttgtccaaaatgagagcattccttaggggaatcaactcacagtgttgtttccag

SEQ ID NO: 29053 - DNA, 3147 bp, Mus musculus
ctcaatcttttgacattgttatctgcaaagagttacttaagagtaacatggtggcactaaaaagaaaacctctctgggtggtgatggtgcacacctttaatactagcacccaggagtcagagctaagcagatctctgagtttgaggctaacctgatctacagaacaagttcctagacagctagagctgcatagaggaactctgtctggacaaaagggctggagaatatggctcttgtcttgcagaggccctgggttccgttctcagcatacacatggcaggttgtagttgcctactgctccagttctaagggatcttgacaccctcatacaggcctacattcagacaaaacacgaattcacatgaagtaaaaaaggaaaagtgaagaaaagaaaaagaaaaccacttactttaagtaagttatggttttgccttgggtcacattccgaggcacactttttctctcagaggtgttgtaggtaagtttgggtgctcaggactcttctcacagtggcctctgcctctctcacaggcagtccctcgagaggagctgtttgtgacatccaagctgtggaatactaagcaccaccctgaggatgtagaacctgccctccggaagacactggctgatctgcaactggagtatttggacctctatttgatgcactggccttatgcctttgagtaagccatgtttctacaacgtgttctggaagttgaggggtgggtgtggtagcattggtaattgatgatattcacagctgcagagcagggtaagaacaccaatcagtggcaggagcaagcagaggcagttccttaccatgggatttttgcctttcctgcagcccggtgtttaggtctatgaagagagtagcacccagcacgtaccctagtgttccacacatgatgctcttcttttgaagtagcacccctaagattttggccatgaatttctcagcagaggagggtgtgagtagtcttatgtaagcactgtgcccttgtcagatgggcagaacccctaccaaccccccagagaaagtgacattaaggaagctatgctagaggggaggagatagggtctggcctatgaatgaggcatgatggcacatgtctttaatcctagcacctgagaaatagaggcaggtgaatttctgagctcaaagctagcagaactagtttcaggatatcctgggctacttaggaaaaccctgttttgaaaaacaaaaaaaccaacaaaacaaaacaaaacaaaacccaaacatagaaagcatgtgctatgaatatgaagggatgggcattccatgtagatgaagtgcctaaattcttttttttttttttaatttatttatttatggaagtacaatgtagctttctttagacaccccagaagagggcatcagatttcattacagatggttgtgagccaccatgtggttgctgggatttgaactcaggacctctggaagagcagtcagtgctcttaaccgctgagccatctctccagccccctgcctgagttctaactagaaggataagaaagcattgcagttcctaattcttgtcactttatcccttggtcttatggtgtggtccacagaatagctggataggcaggcaggacagtagcctgacttttgctgacacttggggatggggtctgtttactcaggcggggagacaatccctttcccaagaatgccgatggaactgtcagatatgactcaactcactataaagagacctggaaggctctggaggtactggtggcaaaggggctggtgaaagccctgggcttgtccaacttcaacagtcggcagattgatgatgtcctcagtgtggcctctgtgcgcccagctgtcttgcaggtgagcactacaaacagaccaaaggaaaatgtgtgtgcagagcatgaataatcaagtggggaatctccttaatggaggtggcaagttgtcagaggtgttgttgaagaaattctctgtataaaagtggatttgaatgtaaatggggaaaatacctaatttaaaaaaaaaaaaaggaaaatagagttttaaaatttcattttccagtacaaggaaaatgaaattttaaaaataaaacttgtttcttaaggggacaattttgtgtatttagtaacactgtaaagaaaagagaattactaatgacaaaaacaacccccccccccccaaaaacaaaccctaggtaacagctaatgctgaggataggatgataaatgacatcgagggacgagagtggcaagacttgtgtgtgtattcaaatatgtacatattgttctatgtggatgtttcctttagtttttaaattaaaatttacattaagttttaaaaaaaaaaaagtggatttgaagtcctggaagagaatgaactcaccagtgaaaacaagcgagctttaaggcagcagaggttaacagtggagggctattccgctcagtgtagaaggggtcaggtaatctgggtgtggccaccctgtgctgaaggctcttccttgttttaggtggaatgccatccatacctggctcagaatgagctcattgcccactgtcacgcacggggcttggaggtgactgcttatagccccttgggttcctctgaccgtgcttggcgccatcctgatgagccagtcctgcttgaagaaccagtagtcttggcactagctgaaaaacatggccgatctccagctcagatcttgcttaggtatgggactttttttgtttccttccttttttggcttttctagacagtgtttctctgtgcagtcctggctgtcctggaactcactctgtagaccaggctggccttgaactcagaaatccgcctgcctctgcctcctgagtgctgggattaaaggcatgtgccaccattgcctgtctggtatgggacatttttgagaagttctatttgggaggcagggactgagggaattttttatttgaaaaggcctgggggccggagagatggctcaatggtaagagtgccgactgctcttctgaaggtcgtgagttcaaatctcagcaatcacatgatgactcacaaccatccgtaatgagatctgatgccctcttctggggtgtctgaagacagctacagtgtatgtaaatataataaataaataaatctttaaaaaaaaa

SEQ ID NO: 29054 - DNA, 1099 bp, Mus musculus
ttcagtttgtagatcatttactagatgaattgcattcttgccccccttttttttcagtgtgaaaagaacttggtgtgtatgctaatattaacctctcagaagatcaaaattgactgaatagtgtttattctatagttagcaaaccaaagaagaaacagtcattttaatttaggctttcttggtacaaaggttataaaagtagctgctaagagctgtctttattaactatgctaacattgattaccgtgttggtgattaaaatcttctacaggaaaatgtctgcaaaagaatcttttggaaatttcttgttttcattcagacagggtttctaaacctggctggcctggttcttactctgcgtggttcaggttgacctcaacttacagcaactgtcctgaatgctgggactttaggcatgttatcagtgcccctagatcagaaactcagcttcaaagctaacttcttgattgctttttccccccacaggaaaatatgttgtgttcttcttttaccctcttgactttacttttgtgtgtcccacggagatcattgctttcagtgatagagccgatgaatttaagaaactcaactgccaagtgattggcgcttctgtggattctcacttctgtcatctggcatggtaagtttttggtctatgtggtacgtgaaattttttgttatttatttaagtatatgagtactatagctgtacagatggttgtgagtcttcatgtggttgttgggaattgaattttaagacctctgcttgctctggtcaacccagcttgctccagtcagccccgctcacatcagccagccccactctcagtccatccagcccaaagacttattatacattaagtacacagtagctgtcttcagatgtgccagaagagggcttcagatctcattatgggtggttgtgagccatgtggttgctgggatttgaactcagaacctttggaagagaagtcaatgctcttaaccactgagctatctcacccgcccatttttttgtttttagtcagggtaatttttaactcaagctggcttttagcctcatgaataccttgtaccaccagcttcatgagtaggtagg

SEQ ID NO: 29055 - DNA, 1436 bp, Mus musculus
tttaaattaaagtttatttttagaattatgcatgtagaaggtgttgagtgccaggcagttgcacaccgtcagatgtgggctgtcttctccagctgctttgggtttggggggggagttgagggacagagtcttatcatccagtctagcctgtggaatttggccaagataggtctcacttggctagaattcagggctggccttgaacttatttccagagatctgactgcctttgctttttgagtgctgtagtaaaggtgtgtgccataaaacaatgtgtagcctaggttggcttcaaattcataacctgcttgcctccatatctttaccatagcctgtcagcatgtgccacagaagacatacaaggatgaaggggagggaaatacacagctaaacaggttactaattaaaaatctttctcttggcagtgtgtccagctggctggaaacctggcagtgataccatcaagcctgatgtcaataagagcaaagagtatttctctaagcagaagtgagcactggaccatttttctgccaggcagcattgagcagccagaagaaactcttgtactctactcgtgcttaaacacatgatgtggtgtgattccagataagcctttcctacagggctggggatggatagcctttcttccactattggtaatggtctgagctgtgttttgggcagaccaatcttctatcagtcacagaaaacaacctgttaattcttttttcttctttttttaagtatctattaaacgtgaattctgagaacttggtgattcattctttaaaggcaacattggaattttaaaaaggactttattttcatgagtaggtaaaagtgtttgagtgttgtttatcttttttaaaaagaatgtttccccagcatgtgtaccatttacctgcctgttggataccctgggaccatgtgggtgctgggaattgaacctgggtcttctataagagcaacggggttcctaaccattgagctgtctctccagtctcttaacttttgagacaggatctctcactgatctagaacttgatgtatatgtgaggctagtaagctctcaggatctacttttctagtgctggttttataagcatggattaccatagttggccttttgtttttcgagacagggtttctctgtgtaacagccctggctgtcctggaactctgtagactaggctggcctctgaaagatctacctgcctatttaatctgccaggaattaaaagtgtgtgccaccactgtctgcttcatgcctagcttttttttttttttttaaatgggagttccatggagtaaattgcttcctcacaagcatgtcacagctgaactatctccaaagcccctgtttttcttagaaaattgggtttgaaaggttgaaaggtgcctcaggtctggagacaaagcttttggtagagtgcttg

SEQ ID NO: 29056 - DNA, 1520 bp, Mus musculus
ttgggggctggtttgccatccgaggggttatgttgctgccagggattgaagtgccaaatttgccacccagaaagccccctgactgtgtgcctacaagagctggccgcatcactctgcttgaaggtttcaatttccattggcgggactggacttaccgtgatgctgtgactcctgaagaacggtactccgaagaacagaagatctacttttccaccccacctgcccaacgcttggccctattaggcttagcccaaccctcagaacaccctagcactacatctgagcttcctctttccttgcttactaaacctcagaattccaggagagctcgaagctggctgagtccaagtgtctcaccacctgtatccccaggcccttgataacttttccccttcaggatcccactcatagtagatttattttaagtaggatttgggttttgaaaaaaacactttctccttttttagtttttttgagacaaggttcctctatgtagctcagaccaggttggcctcaagctaagagagatccatctgcctctgtcttctccagagtgctgattttttgcactgtggaaaaaccattttattttaggtaggatttcctgataatagtgcttcagacagtcaagactcaatttacattggtcaagataaatcatatgccaaggcagactcaaaaatcagcagttgacttcaaatattagactcatgcccattactatttttttgtttttgttttttgttttttcaagacagggtttctctgtgtagccctggctgtcctggaactcactctgttgaccaggctggcctcaaactcagaaatccacctgcctctgcctcccgagtgctgggattaaaggcgtgcactaccaagcccggctttgtgtagtactcttaagatactatttaagaaccatggttctcactgttcgttcctaaagctgctatcatttaatgcagttcctcatgttgtagtgaccgcaaccataaaattatttttgttgctacctaataattttgctagttatgaatcaattgtcttagggaatccagtgaaagggttgttcaacaacccctgggggctgagaatcacagatttagcagctcctaggggtacccaccacattgagctatgctgaattaatatttaagtaaactacattgaaactgccccgacctacagtgtgctattactaaaggctcaggcaatcttatacttatgctcaaatagatgtactttgaattctggaatgttggaaggacatgatgtcataggattattttgtcaaccctaaccaagaatccagaagaaacttcctgactttacaggatcagaaaggaatattctctcatcacagctaaaatacaagtagttgaatacaatcatatccaaagccaccaactttgtttgcctgtttgttgattccagagatagtttcccaattctgatatttcaaatttcactcccagggtccagggaggttagttggtaaattgtaatgtgctgtttttact

SEQ ID NO: 29057 - DNA, 1224 bp, Mus musculus
ggcttgctatgtaacccagactggccttgaactcaaaatcttcctgcctcaagttcctggtgttaggattacagtcatgggccaccacattttcatttaaccacttaattgtagttggggcataggtacagacagatagtcagaaatcgccagagaatcagcacattcagatcaggcctgtgtgtcttttccagggtggtccagggcctagttctgtgcatggcagtcttgctaatttctttctttttttgggggttggggggagttggctttgttttttgcttttttgttttgttttgttttgttttgttttgttttgagacagggtttctctgtgtagccctggctgtcctggaactcactttgtaaaccaggctggcctcgaactcagaaatctgcctgcctctgcctcccgagtgctgggatgctaatttctttttaaatttaattttattttccttcatcttagaactccagaacaactcccttcctaacctggaacccagcagctctcagttccatgcctggagtctagggcaagaggacctgttccttgagggccccacgatcttccagagtgacctgtaagaacttgtgagaaaaatgaggtgcagcttctatcccaggcagcctcctcatcctctccgttcatgccctctttaccgaggcatcgcactgtgcagccagtccttctccctggctaattcaaaataaagtagcttcattctccctgatgtgttctctgtaaatcttgccccacatgggataggctgggccatacctttccttcttgttacttacctggttcctgtgacccctgcctttgaaatctgacaatcataggtgcacctttgactgagctccagtgaacttgggaagaaatgatctcttgtttggtgagtagaataggttaggatgttgggagtattgaggtgatcacaaaggagagtgtgatgttccggtgggcactagatccagtcagtcacactgctgggaggcttaccccagcttctccctacctcctcaccctcagtagcccagtctgtatgtctacagttctgtttctctgaaatcgagttgtcttcaaaacaaacaaacaaaagccaacaaaaccaaaatctctatttcttattttgagaaaggatctgtttaagtagccctggctgttctgggaacaggctctccttgaactctcagggttctcctgcctctgcctccctagtc

SEQ ID NO: 29058 - DNA, 1128 bp, Mus musculus
cagcttgttttatgtggttcttctgatggtcagtatcactgcagcattaacagttgtttgtggtggttggtttgtttgtttgttactgctttttaaaggtagggtctcagcatgtaaccctggctggctttgaactcccaaagatcctggtgcccccacttcccgagagttgggattacaggcacgtaccacacgttcaccgccagcctcaaaaactctgtgtgctgggattatgtaagctgtgaactgccagatgtactttaaactatttagagagacctcattcatatatcttctacctgttttttttttgttgttgttgttgttacaatatttacaagggaatccagggccttgtacatgctaggcaaacattctgccacccctcttttgtggtgtgtgtatgtgtgtatgcaggagtgtgtaagcatgggtgttctggctagcctcaaacttactgtattgacagggctggttttgaacttgcattgattctaatacttctgtctctagtataggactgtattactgaatctggctgtcttgtgtttaaaaatatactatttttttaattgagtttctaattttgtttgtttgaattgaatttatctttaattttatgcatctgggtattttgcttgcatgtgtctgtgcaccaagtatactatgcctggtgctaatggaagccagacagggcatcagatcccctgggactggagttacagtcagttgtaagttgccatgtgggtgctgggaatcgaatctgggtcctctggtagagcagcaagtgttcttaattgatgagtcatccctctagccccacatttgttttttaaaaatcacgttcatagccgggcgtggtggcgcacgcctttaaacccagcacttgcgaggcagaggcaggtgggtttctgagttcgaggccagcctggtctacagagtgagttccaggacagccagagctacacagagaaatcctgtctcgaaaaacaaaaacaaaacaacaacaacaaaaaaccacattcatatgcattttggttcaaatatggtttgtgcatccaaaactaatgataaagtttaatcaaatccactgtaaatatgccttcatctttggtgcttagaggtgtg

SEQ ID NO: 29059 - DNA, 1135 bp, Mus musculus
cagctcacactctcctgctgggcatgcagagctccggccagccgcagaggaacaaggtgtgcccagaggatagggcgccaccctccagcgggtctcacacagccacctttcccatacagacttccaaatcactaactcgggcatttccttccttccttccttccttccttccttccttccttccttccttccttccttccttccttccttcctaccttccttccttccttccttccttccttccttccttcgttttttgattgtttaattttgttttgttttgttttgttttgtttttgagtcagggtctccctgtgctgcccttgctatcttggaactctgtagaccaagtagtcttagaagtcagagatccacctgcctctgcctcttctgggattaaaggtgtgtaccaccacgcctagctcatgacaacttgtttttgttttccttcttctgtttttttttttgtttgttttgttttgttttcaagacagggtttctctgtgtagccctggctgtcctggtactcactctgtagactggctggcttcaaactcagagatccctctgcctcttcctcccaaaggattcctcccaagtactggaattaaagacctgtgccactaccaccaggctgccattcttcttgtttaaaattttttacatgtattttatgtatggctgcatatgtgagtatacatgagacatgcatgtgtggaggtcacaggacagcttgcaggaattggctctctcctttcaccatgagttctgcagtgattgatcccaggtcatcgatctttgttgcaagtacccttacatgcaaagtcatctttctgtaccctacctctgtttatgagacaggatgttgctatgtagccagcctagcctcaactttgcaatcctcctgcctcagtcttctgctaagtttttcaggtgcatgcattgatctcaccaaacatactactagtttttgttgttctgtttcagtacagctaatttaaagaaggactcactgacgtattacgtcctggttcctttctgactactggtgtttgttcaaagtttctccagctcaagatgggcatggtggggattgcctgtattcaagatggaggcaggaggattaagagtacga

SEQ ID NO: 29060 - DNA, 1173 bp, Mus musculus
gagagataggaagctacagcccacagctaaaggtaagagatcagatcagaaccccaaacttgaccccaaagggagggaagagactgtgagacatttcctctagggaaggctgggttcagaaggaggagggcagtggtcatgggcagtaaagtactaggctctcatacaggggtgacttgtcacactgcttccccgtttgctccctcgttgatgaaatggacaagaaaagtatgtaataaaatactgcttatattgcctgagagtaacccaggcttgctgttctttaggaccactggagaaagtgcctggagggaagcgactgagttcactggatgacaagattccccacaagtctccacgtccaagacgtactatctggctgtctcgaagccagtcagatattttttctcataagcccccacgtacagtcagtgtcttggacccctattaccagccacgagatggtgctacacataccccaaaagtcaaccctttcagtgcacgccaagacctcaagggcgggaaggtcaaattctttgacctacccagcaaatctgtcatttcccttgtatttgacctggatgcaccggggcctggaagtacaactctggctgactgtcaggagcctttggccatgtcttccagacggtggcggtctttgcctggttcacctgagttcttgcatcaggcttgtccatttatgggctgtgaagaatcactctctgatgggcctccaccacgactcagtagtctcaagtacggagtaagagagatcccaccattccggacatctgccctatcagctgcttcaggccacgaggccatggactgctctaacccccaagaagagaacggttttggacccaggcttaaggggaccagcctatgcactggggctgcctctgaggagatggaggtggaagaggaaaggccacgaagagcttctgtctacttctctatctctggaataagcttgcaaacccaggcaaagcaggatgggtgagatgggggcaggactagtccctgcctgccatatgagaggcgtttcagtagttagggccaacctaattttaagcctctgaaatccagcaaggaggtttggttcccatggaccacagtgcacgtcctagacaggaccaaaaaactcttcgtgctaggctgggctggcaggta

SEQ ID NO: 29061 - DNA, 1198 bp, Mus musculus
gccgagaagcctgcgctgcccatgccaaccctgagtttgtgtaagtgaaacgatcggctgtaattttaagattccacgttcccgccaccacaaatgaaagcacagattacctcctgcgcagtctccgaccggccgctcccaagaaaccccgaagggggcgtggcttcggtcagtaggaccgtccagccaatagacactcagcgcgcgcaaggcccacgctccgcaccccgcccgaccactcggaacggaagttgaccctacgggacccagacgccgagaccccgccccatcctagatccgtgtcgcttctggagacgaagcggaagtctctgcgtacctccagaaggctggcgaggggcgtcatggccgcggacagtgacgatgatgtgcctccagttccaacgccctctgacggtgagcggctccccagggatggccacagaagcctaaggggtcctggggagggaaaagcctcggcccggtagctcggagacaggcctgtagttcttcttgcctcagctatcttagactacaactcccagtgtgcagcgcgtgcaactgcaaaacccgaactgttgtagagtggagcagtgaggtgggatgggtggtgtgttttggacggagccggtggttgtcagtcggtaataccagagtgcgtagtcgtccacagtaagtggagcttgggtttaactttggagcactccggtagctgttgaggcatcatgtatatgtggctttatgggatcggtttgtgtttgagataggagcatgctctgtaggctagccttgaactcgtggtccttcagcctaatgctccctagtcctgggattacaggctggaggataaagaatcctcaaaggttatctagtccacttttctcctgatcatgatgcaaaaaagaaatgatttcccagtcccacataaaggcactaaaagacacagatgccctttttccaaatttagggcactgcccatttcagagcttgtgtttagagctggtagatgtaaaatctttaagtgaaagcttgtcagtgggcacccctttgcccacatctagcttggtgtttgctccacagggaccttgtgaaaccatctaaatccatcaacgcccttatccccaggtggtgtcaacaaaaacacacaacctgcagaggagtttgtggttcgggttcctgtggtagacgtgcagagtgacaa

SEQ ID NO: 29062 - DNA, 1149 bp, Mus musculus
ttagctactttttgggttcttctttttcccaccctttatcccccattttcacccccatcactagataggaggaaaagaagcagagagagagaggagagagggagggaaggaggaagggagggagggagggagagagagagagagagagagagagagagagagagatcctagaatctaatttatttcctcttctttgaatatgactactgggaaacagcgaacagccttcctaaatgaccaccaacaccttacaacacaattgcagaaactatccccagctggcaaaagtcacgcctctgctagagcacaaggcaaatcaaatccccaaacctgggattaaaatgaaagcacattcttataatatttctgtggtttttttttttaaattgtcagtacagtatagttttgtttgttgttggctttacttttgcttctctgtgtgtgtgtgtatgtgtgtgcacatgtgactacagatgttctcagaaggcagaggcatcagatcctcaagctggaattacaggggctgtgagctgcctgacactggtcctggaaacacaatccagggtctgcttaagaacagtgtactctcggggctggagcgatggctcagtggttaatagcactgactgctcttcaagaggtcctgagttcaattcccagcaaccacatggtgcctcacaaccatctgatgacctcttctggtgtgtctgaaggcagctacaatctactcatataaatgaatgaatgaatgaatgaatgaatgaatgaatgaataaaaaaatattaaaaaaaaagagagagagaacagtgtactctcttaacctccagtcatgtctccagcccttggttttgtttttaaggcaagagagagagaacagtgtactctcttaacctccagtcatgtctccagcccttggttttgtttttaaggcagggtcttactgtgtagccatagtgcctggaactcttcagaccagactggtctcaacaagcaagatctgcctgtctctgcctcctgagcactaagattaaaggtgtgagtcaccttgcgtgacccataaagtatatatgtagtttttaacaaactaccttgtgatttagccaatagtcttattaaacttctgctatttttgtagtgctagggccata

SEQ ID NO: 29063 - DNA, 1194 bp, Mus musculus
atctacactggtttaaccaattatgtccctttttgtaaaggaacctgccctcagcagatgtcatcattgtctgtcctcctgctttttcccaactgtcccttctctctcctagttccctcctttttctgacatgtcatttctctcctggcaactcttggctacaattccatatcttacctatggtgccaggcaggtcttaggtctcttttttttaatgatttatttttattttatgtgcattggtgtttggcctgcatgtgtgtctgtgtgaggggtcagatcccctggaacatgagttacagactgtgagctgccatgtgggtgctgggaattgaacctgggtcctgtggaagagtagccagtgctctaaccactcagccatctctccagccctacctgcctttatcctaatactaccaaggtggacactatctgttttttagtttggtcgtttggttggttggtttggtgtttgagacaggggctcattgtataaccaggctgtaggcccatgaaattgaacattagcgaccctccctcccttgtacggtgtgtgctctctgctctggtatcggtcaccagccttgccagctgacatttaactttctctgtccacagtttacccagaggattctttagtcttccagtgtgtttgaagtgaactgtgtttcttactccagccttcttattgtgtctctcccagtttcttctcccccatgcctccatgtccatccttacaggggggttcctctctgccctgccctccttccttctgtgtagcagccattattcccagcctggtggaaaaaatactgcaatatagtcggagagcactgtggcagtacaggaccattcctgggggagggcaaaggattgaacctgcgtagaaacctaaattgggacgttatcaggggtttgaggagagcctgtggtcttggaaaaggaattggctactgggaatggtggcgcacacttgtaatcctagcatttggaaagtagaggcaggaggattgtcctgagtttgagaccatcctgactacacagtgagttctagatcaggcaggactaccgagggagcaggagaggggaaggagtaggtgaaggcggatctcacgcctggattcgggaggatgacagaggccaacaagaaaggcctccaggcaagaaaaagccagacagagtctgggagcagac

SEQ ID NO: 29064 - DNA, 1139 bp, Mus musculus
cgctccgactgcctctgcctccctggtacagagattaaaggcgtgtactatcgctcctaattctggctttacataaaaatatattgcttatgaattaaagatgaatatttgtattctgtcaagatggaaaaggtggctgcccagtgggaccactcctggcacccttctttggatcatgaacactgaaagtaatttgctgcttgcttgcctgttccatgcttttgcttcctttacatcaactttagaagccatgtactaatctgtactaatactgcgcttccattagctttgctgtattgtgatgaaaaggcttttgaaattattattattttattttattttatttttttggtttttttgagacagggtttctctgtgtagccctggctgtcctggaactcactttgtagaccaggctggcctcaaactcagaaatccgcctgcctctgcctcctgagtgctgggattaaaggcgtgcaccaccacgcccggcctctaaattatttttgggagcttggagagtcttcagattgctttaaagcacccatccttttccttgaggatagaaagcttttgttcatgcaggctgtcttctggacatgtgttctgcgaggcaagcatagcatggcggcatacataggtaaatgtcagcacttgggaagtggacggaggaggatcagcagtttgaggctagcctaggttagttacaaggtgagacctgtttcaaaaaataaactgagcatgatgttacacagctttaatgtcagcattcaagtttctggtttggtaaatcaactttgggaatgttggtaaacagaactgaccgagtggaaccctggaccgcagccactgttctccctggttctcttgacaattgcttgactgggacctagctctgtcttccctcctagggtctgggtttggtaaattgttgcttctaatgttactgttttgttttcagagaggggcagagcaccccatttagactgagcagcacaggacagctctcaggcagtagccggaccacacaggagccgtattactaccccttgtgcaggtctcatctctgctactttttttattttcttggattttgagaaagggtctctctgtttagccctgattgttgaaatcactac

SEQ ID NO: 29065 - DNA, 1175 bp, Mus musculus
agctcgccccgtgggacactggccagcagtggagatggtgaggagccacaagatgagaggtgctaggggctgctgaggtagagaccaggggctgaaggaagtagttggctgagggtgaactgggcccagggtggctcttgcctaaatgtcagtgccctattcccttcagggtttgaagaaggtttgactgtggccacagtggtagagtctgccctctgtgcactgagaaactgtgtggccttcatgcccccaggtaaggctggactctggtgcatatgaatagtttgcaagtccagaggcggtgggggggaggggggttgggggagtcttcatttccctcctctcctcttaacagccgaacagaacccagccccgctggcacagccagagcctctggtgtgggtcagcaagtgggttgactactccaacaagtttggctttggctatcagctgtccagccgccgtgtagccgtgctcttcaatgatggcacacacatggccctgtcagccaataggaagtaagtgctgttttggcgtgctttgtaattaggcttgctgggtaccacaataccagcagggttgcaccgtggtgtgtgtttctgtgcttaggggtctggggaagaatggtggtgccgggttcctcctcctcctctctacgttcccactttcaggacggtgcactacaaccccaccagcacgaagcacttctccttctccatgggttctgtgccccgagctctgcagcctcagctgggcatcctgcggtattttgcgtcctacatggaacagcacctcatgaaggtgtgtaggctgcggtgggggcactttagggggcaggggtggctcaaaggtagtggctgagggctggggagatggcccagcggctaagagcatggacttcacttccggaagtcctgagttcaaatcccagcaaccacatggtgcacaaccatctgtaatgggatccaatgctttctttttgatgtgtctgaagacagctacagtgcactcacatacataaaataaataaattgtgtaaaaaaaaaaaagtggggctggagagatggctcagcagttaagagcactggctgcccctcagatcctgagttcaattcccagcaaccacatggtagctcacaaccatctgtaattctgtaatgggatctgatgtcctt

SEQ ID NO: 29066 - DNA, 1171 bp, Mus musculus
gcctctgtctcccgagtgctgggattaaaggcgtgcgccaccacgcccggtttaaaaaaaaaaaaaaaaaaaaaaatttaaaggacaaaatgtaagcacaacaggcaggcaagtgtgccctatagctcagcttaaggagcccgccctccagaccgcccaaggtcaagggatttgaggcggggtccgcgtgagttcgcacgccgcaggaccctcccctgtgccagcgtcccaggctcgccgcggccccaggtccttcccggcaaccggaagagacgtaaagaaggcggggctgagttttagaaaccggaccgtgaagctttgcgcttcctctttccagccagcgccgagcgatgggtgagtgttgctgcgggccgggtcgggccgcgggggagcgagctccatccgtctccatcctgcctcccgacgcatgctcggcccgaccatgggccacgggcagccgtggcaagggcctgcggtgggctagggctgtggagatcgctgcggccgcctccggggctccgggctgcgagcgggccaacatggctgccgcgggccgggccgcacgcggatgatgacacctgggtatgctgcacactcccgactgcgtcgtggggaagccaaccttggagagctgagcgtgcgggcagcccgcgcagcgcggggctcgggagcgggctgattggccggcggcgaggcccggttgctcaggcttgcgtcctcgctcccacacacaggcatctctcgggacaactggcacaagcgccgcaagaccgggggtaagcgaaaaccctaccacaagaagcgaaagtatgagctgggacggcccgctgccaacacgaaggtgcgtgcgggggtcggggggaggacgactgggagaggctgccttcccctgcgctagagcgtgtttgctggggaacacgagtggctgtgatcacctttgtaaggctcaggtttctcggtgctggcgactggacatggaagtgtgtccacgtgcagggtctgtgcaccctaatctccaagcttagggtctactggagcctaggagtgggagagctgcaagcttggtgtgttccttactggggttcttcctgtgttagggggggtctggctttttctggaggtaactagggtgatgaaaacgtatccttaggcgtggttatggccgtcttgg

SEQ ID NO: 29067 - DNA, 1171 bp, Mus musculus; identical to SEQ ID NO: 29066

SEQ ID NO: 29068 - DNA, 1185 bp, Mus musculus
ttcctgaggacagggtttcaggaggcagaatgaaggcttggcctcctgcttgtgtgtctatattgcaggtggttgagctctgtttgcaacttgctggagtgttgtggtgagtgtatgctgactgggttctccctgttgttgcagcaaggaccaaactggcttgagctctccgagatgacagatcagccagactatgacttggagacctttgtgaacaaagcagaatctgccctgacacagcaggctaagcaggcgaagcacttctcagcccttcgagaagtcatcaaggccctgcgcctagccatgcaactggaagaacaggctagcaaacaaataaacagcaagaaacggcaccaatgatgacttcaaataaagatctgtttgatatcacactagcctcttcccctccccagaaaactttgggcaccttctggctttggttaggaactgagttggacaggttgggtaaatttcaacctcagggcatcatgcccaggaaagctggggagaggcgatgttcttttcctcagtttggagcgggaagaaggagttttaatgactgtgcttcctcttctcctccccatggaaggggggggggatccctggctcagcatccactgctggtggaaacctcgctgcgaggtgccgctgtgaggtgtgccgctgtgaggtgcgtgctctggaagagaggcggagcttgtccgcttcctgctgcctctgcctgcagtaccaccctcggtctaagcactcatgattttatactttcagaaaaaagttttaagacttctttgggttttttgtttttgttttgaagcctaagaaagtcactagttcttgcctttatgtatttatatgctgtacctaacaataaagaaagaagaaaaaaaacaaaagcagattctgtgtgattatcagaagactatagtgtgtcttgagccttctgagtccagggacagagcgaccaccttgggctctgattttgttttttttttcctcagaccccaagcccacacctgagacctctcagcagggtagagctgtagcctttggcttgtctgccgtagatgtgcattgagctccaggttctctagtgagtggggctggagtcatactgcctgctgttgtataaccctagctacaaagcagcagtgatttaacctggcaggcaagtgctctacagctgtc

SEQ ID NO: 29069 - DNA, 1217 bp, Mus musculus
tggatcgaaggaggtaccacaaaaggcaaagaggtaggtcctctgaggatgcttgtgtggcatctcccatgatcctgtgcagagcatctgtgtgaaccggtgacagcccagcctaatgctgtgctatcctctccagtcttaagaaatggtgctccctggagacattgggattccttttagtcagatgttctaaattgaagcaattagccatttctggtttgtctatggagagcaaattgcatcgaaccctaaccaaggctctgcccactcacctaagcttgagtcctgagtacacagtaccagtgtcagtttgggtaacaaaatctgcaacccaggaaaggaaatgaaggtgtggttttgacaagccttcaaggcataaagccgctgttaatggatggcacaggtgagcatcgtaagagccgctccaggttgggacttgcagggatcgtgagggcttagctgaagcagtacggtggcatgcctcagccagagggcagaatgacagcactggccacaggcagagcagactcagcaggcgatggcagcaggaaaatgcctggaaagggatgggaggaaggcattgtgaaaatgtctctctgatctgtgcatataaaccctggatttctcctctgtctctgcctcttttttacatgagcttagtcacatttccacctataaagtgaaggtgacaatgtctatctcagaatgttgtgaggatttaaccacaaagtcctcctggactgattccaaaatgataggtagtgtgtggaggcctgggggtgtaggtgactaaggtgcagtctctagtggtgttttagagggtgacacagcaggcctgtggtggtgcatacccttaatctcagtgcccaggagccagaggcaggcagaattctatgttcttgaggctagtcagggctacacagtgaaagccttgtcaaaaacaaacaaaagaaaagtatttgtttgtttgtatgagtgttctctctgcatgtacacctttcatgccagaagagggcatctgatctcattacagatggttgtgaggcaccatgtggttgctaggaatttaactcaggacctctggtagagctgtcagagctcttaactgctgagccatctctccagccccagggaaatatatatataatatataaattaaatacatatacatattatatattttatatttatatatatatatatatttttttttcttt

SEQ ID NO: 29070 - DNA, 1203 bp, Mus musculus
ctgcccagcacggatgagattaaggcagagaactatgctcaacttcccaggcccacctggttccatagtgagttcaaagtcagtgtgaagcacagtctcaaactttcaagaagcaaaatcaaactacgccttcctccccggcttaaaaataaaaaagaaagaaagaaaagaaaagaaaacttttacttggtgtaaatttctgtgactccggcttctgcactgccctctggcggcagctcggcatctactaagggaaaataaaataagggcaggcttatttacatacccacaatacattgcgcacggatcagtgcgtaaatttaaattagtaaacgcttattttttttctttcccgttatattttctttacagcgatgtgttttttgagagacctgcgtgaaagcaattgagaagtcattatttatttttgtgtaactaaccaccatcggttatctaggaggtacagtcggtagagaaagctcactgacgcgggtttagcatactctggtttctcttcagatcgtataaatctttcgccttttactaaagatttccgtggagaggaacaattctgagtcttaacccaattttttgaggtcctgctcgtgcagggctaataattctggtttaagattagaacttatgttcctgaaataggaaaacttctgagtagttacttatttcagtttgtctgcctatcttctgagtaattagtactattagtatttagttcaattgaagcctgttcttgggctttctttcacatctctagcagtacctccccagaaaaaggattactaatttagtcagacagtcatgtttatgtttatacagatcagtaagtgctcttattttgtagcattttttttcatgactaaagtctcattatgcaggccaggctggcctgcctctgtgctgcatttaaattagtgtaccagtatgagcatactttctactaagttactagttctaggttcctcaggatgggggtgggtggtaacgtgtctgtaactccagcactgtggtcatggacatgcaggtggattcctgtatccatactaactgacactgcttgggtgacaaagagccagagactaggtagctcagagagctagggagaaacaacacagcaggagctgcagaaatggctaagcaataaaaacctgttgctcttgcaaatctgttgctcttgcaagttttttg

SEQ ID NO: 29071 - DNA, 2842 bp, Mus musculus
tttgtgggttttttgttttgtttgttttcgagacacagtttctcagtgtaacagagccctggttgtcctggagctgtctctgttaaccaagctggcctcaaactcgtagagatctgcctgcctctgtctcccaagtgctgggattaaagacatgcgctgccaccacctggccagttagaccaatctttaaaaagaaaaaacaaaaaaaccaaagaaatccataaaggccccagcgtagtggtgtgttaagagccgactgaaaacaggctgattgaagaccagtaggttgctggctgttgccaagcacctgccttagatactgatcaggtgatgtgcaagggcggatcctagctctcccctgggagtggttggcaagtggagatgttgagaagagattctccgtgggattctgggtctaaggttctacctccaccctcctaccctgtgtgttgtctttacagaatcaccgaagagtcagctgtaactacatttgaggctctgaaggctcgggtccgggagcttgaacggcagctatctcggggggaccgatacaaatgcctcatctgcatggtaagtaggaaggagtcaaggcgtgctctcggtcagctcagtgccctgtgggcttagaaagcggccttcagagggtgagcatacttcagcgaccctttctctgcccacctcctccctaggactcttactcgatgcctctgacgtcgatccagtgttggcatgtgcactgtgaagagtgttggctgcggactctggtgaggtggcgaggtggcgttagactgagtgggtgggcagctgttagtggcactgtccagatgttcacattctgattgcacctgcttgggggaggcaaggaacagcctgaagtcaggaattcacccccaagttgaatgtgttgtctgcaccctcattgaaggtttattcagttctaccctccacgcactcactgcaggtgccctccttcccacccctgtcagaaagatgctggtagtgagtggataagccagacgaggagggcctctgcccctccccctcccattactaagctccttctgctcctgccctgttcttaactcgggagcagccattaaaatgtcgcccggagacagcaataaaaggcccggacgtgggctctgtgtcctgatcaaaggccgcatgtaatctcgttagggccaggcagccacagctggacccagccttgttctcattacccgggctcctgctgtggggccggccaggcggtttgatcctggcgtctccccaacacaggagcatgtctgcctgctcagaagcaacccatgcatccctagcctggctgacaagaatgagggcccagcacaaactgatgcgggaaaaaatggctgcaggcctggtgcccatgtgtacaaacatggcatgccgttctgagccctcccctttcttctctcttcagggtgccaagaagctctgccctcagtgcaacaccatcacagcccccggagacctgcggaggatctacttatgagctagctgtctaggcaggccttgcctcgagcaacgcccctgcccagcctctgtgacagtgactccctctccccttgtacatactctcacacaggttccccttgtacatacatgcacatacacacccaaacacacatagaggactctggagccgcagtgggacagccctgcctgcttgttcttctgaacttggggaccatgcctctttgggctctgcttccaggatggtttgggaagcatagcagggcacggctcggctcctgagatccatcccctagactgactgaccgacagacacacaaacaccagactgaagcacatgtaatatagactgtgtatgtttacaatgttgtgtataaatgggacactttgccctctaccacctcccctttggttgtatgattttcttcttttttaatgactcctggaagcagtgccccttcagagctggctgggagcttggctcagccacctcttagggtgcctgcctctgccatggcatcctgtccctttcccatgtgctcggtgttcagtggtgtatatttcttctcccagacatggggcgtgtgccccaaggggtctgatcccctccttagtcttagctcatggggcggctcatgaggagctgggggcagggtagaatgggaccgagcaggaacagaggctgcagttgggctggctgactgagggtgcctggctgcccagcctgcggtagccgtgctccctgccctcctgtggccctatggtgtgatgctgtgtctgtatctatgtgtctatacaaaggtacttgccctttccctttgtaaactacatttgacatggattaaaacagtataaacaagctgctgtctgtgtttgaagatcttctgggaaggtggtggctgagccagttgagagggtcatcctgtgcagcgttacactgcagtgtgtgaagtcatgggtggggggtggcatccggaagcatcccagcaggtgtggggggtagggctgaggatctgggctcctggctattgatgggtaggggctctaggttaattccttatcgatgtagaatcgtcagctcattaatcacaaaagaggtcagagcttggggtacagaggggatgtaagctctagtccccaacctagggcagaagcagctacagacaagtcacacaagctctgggtctctcttacctttcagtctcctgaaatgtgccatagatcatctgagttccagggaataggggtagcctgggataattcctgcctagatcctcaggtaaaagcagaccttcaagtaaaggactgctcttagctgccaggactcagagcaccttgttagctcgac

SEQ ID NO: 29072 - DNA, 1185 bp, Mus musculus
aggtacatgcgggtagcaccaggctgccttcaaaaggaacagtcctggcataaaatgttgcgataattgctttactgctgagtgttggtctttattttgtgtgtgatttgtcccttaagccagcgtaacattctccccacggctggagaatgcagagagtaaactgaagggctgagcaggaacaatgcgacagggcacactgctgggttttcttttttcctctttcttcgtttctcccttgacctccctccaatcctctccgctcccctcccccccccatgccctgccctagtccccgccctgggctggttggtagaatccttctcccccatctttgacaccctaccaagttatcccatctcttccctgtagtttgaaaagcaagcttcttctttcttcgccttctgcaggcaacagaccaaaacaaaaggataatgatggaaaaggactcttccttctcggggacccaggtatccaggcccggggttgtcctcccattcatttcttacaaggcagctgtgtgctaggacccagtctcatagtccttcccagctttgttgtagtcagacagggttgggtatgcaagaaaactgggggggggggggggctgtggcaccttccaattcctagagaggacatctttcttccgtgtgcactgggactctcctggcctcagtgtactgtcaccaagtaggtagaccactgaccctacctgccacataccaaacccaagattcccttgtctgtggaagaaggatagtgtataagccatggggtggatcagatggtagggtgtgaccctaagtgtgggtcagtctgtactgtcccaggagatcttagtggcttcctctgtttgctccagagggtcagtctcctgccccagtgtaaccctaggctgggtgaccccaggaaagttaacgcttgctctcccctcttcatgtagagcaggcctagaatcatcctacaaggactcagcgggactttgttgacctctgtgagtgtagctctctgtgagtgagaagggattcatcacgcctgggcatgtccttcatgttctccggacttgtccagagtagaaacttgtagaatacagagttcttcagaaactttccatcttagttttctctgtaaaaaatcgagcataatgtacctgccctatggaaatgacagctaatccagactcca

SEQ ID NO: 29073 - DNA, 1147 bp, Mus musculus
ctgagggagttgtggaggtgggggacaattgtgtgggcccctggaatcacgagggaagctgaaatggtaggtacttgccggtcagggccccagagcaaatctgtgtccgtccacccattcgccagcatggcgaggagaccttcaaccgagccaagctgctcaacgtgggcttcctagaggcactgaaggaggatgctgcctatgactgcttcatcttcagtgatgtggacctggtccctatggatgaccgcaatctgtaccgttgtggtgaccagccccgccactttgccatcgccatggacaagtttggcttccggtgagactctcttagtgagactcagacctacccacccccacttcacccaagccctgagtcccagcctcagtctcctcctagcctttggcccctggttcagatccttctatgtatgcactacctccctgggtccttgttacacatggtccctacacaccatctatgatcctgcatcttgaatctccttgcaaccctaacacctgctctcttgtgtcataggttgccctatgctagctactttggaggtgtgtcgggcctgagcaaggcccagtttctgaggatcaatggctttcccaacgagtactggggctggggtggcgaggatgatgacatcttcaaccggttagtagaggtggggcagagagcaggctggtcagggagtgaggaggcacagactggatggggttccttccccttccccgtgcctcctcagtctgcctgtctcccatcctaggatctccctgactgggatgaagatctcacgcccggatgtccggattggccgctaccgcatgatcaagcacgaccgggacaaacataacgagcccaaccctcagaggtgaccccagcaccccaggtgcccctgacccctagacgtcacctcccagtatcccaaatgcctttgatctctgaccccatagaggaggcctctgagcatccttgactcctgaggagtactttccagaggcagctgattcctagaaatgacccagatgttcctgacccctgacctctaaaggtgactcctggcacccctggcctggttcgtagaggtgactagagtttagattccagcttgtgttgtaattgcttaggcacatttccgtcagt

SEQ ID NO: 29074 - DNA, 3056 bp, Mus musculus
cgcggcctggacgcagcgcccgttccctccggcccgtgaaggggcttggtgtcattaagacgggttacctagggagtggccgaaaaaaaaaaaaaaatggaggcctgggtggaggtgctgtttcgctccgggactcttcgcttgtctagatgtaggtggctgacagtttgacagttgggcagttttttttttttcctaggttggggactgtgtctcgaaagagcaaccctttaactcctttcctcattgcttcaggaatctgctacaccatctttgacctgggctttcgctttgatgtggcatggtaagggagggcatggagaggattctcctaggagcctcttctccctgctttggtctgagccccagcccagctcttcagacacacggacctttgggaaatagaaaatctagagatgcaacgtctgggactggtgggctggagctgggtggacactgagttttgtgtggcctccccactcctgccctttcctgtccatagctcaatagctttcttccctgtttccacaccaggttcctgacggaaacttcccccttcatgtggtcgaatctgggcattggcctagcaatttctctgtctgtggttggagcagcctggtgagtgttggagtggcgggacgagtgggaggtgccaagtcgtggcaggtggaatcatcactgggttcttaatcatcctggggacagcaactccttgggctcctttaatcagtttcttacccttcaccaggggaatctatataaccggctcatccattattgggggtggggtgaaagcccccagaatcaaaaccaagaacttggttaggtaagtgtaaaggcttctgcatgtcaaaactagctgcgatgggggtcgggtgacatgctggcttgtgacccgtctcatcgtagcgtgtatgtgagtcagggaaagttggctggggattttctgcagaaatggctgatttccttcttaaagagtttccctccccctcccccaccatttaccatcactgttgccagtattatcttctgtgaagcggtggccatctatggcatcatcatggcaattgtcatcagcaacatggctgaggtaagggaaaaccagcggggacgggtatccattgaaatgcctatgctttccctaaagatcggagggaagaaaaggtaggtgcattaaggaatgccttctgaggacttattctgcccctcacagcctttcagtgctacggagcccaaggccattggccatcgaaactaccatgcaggtaagtgggtaacatagagctcactcggcatggtgctctgggcctttaaccccagtcctgggacgggggtagcaccaagtgagttaagaggccagccagcactacataatgacatagtgagacagacaccctaccacacatacacgcctgggccttacacacttgcttctaccacacgtacacacctgggccttacacacttactcctgcttcctggctccatagctgagagtctcagctctgcagagttggggtgggactggccctgctagcccacactggaccattcctctcctgcttgcctccacctcacgagctacttcttatcctccaggttactccatgtttggggctggcctcacagtcggtctgtccaacctgttctgtggagtctgcgtgggcatcgtgggcagtggggccgccctggcggatgcacagaaccccagcctctttgtaaaaattctcatcgtggagatctttggcagtgccattggcctctttggggtcattgttgcaatccttcaggtgcgagtccccctagagaggaacagaagtgcctcccttttttccccttcccatctcttggtccccctttgtctcctgctctagatgcacgcatctttcctaagtctctccattagcatctctttcctcggctgcctctgaaaatgtctttgtggagtttctgtctctcagggtctgtgttctgtatgtatgacacacttgtcagtagactagcatgtctaaattcatattttccagtgtgtgagtttgtgacttgggtgcttgactgggctgactcttggcgacactaacactgtccatgggacttgtcttctctgttgtacagctgagctcctttgttactgtccatgtctgtttgtctgtcatagtgtgtctgtccgtctgtccacccactggcctgctggttctggtcttgtcactggtcactgtccctgcctgatttgtcctgtttttcctttgcagacctccagagtgaagatgggtgactagatgacctgtatgggtggggccgtgccctactgttatttattgctggttttcctgggacagctggagctgtgtccctcagcctttctggggcttggtgttcagggtctcccctgcactcacctcttgctgcctgttgactctggaggcattgcagtccagactgaaccccagtgtggggagtgggctgctgatggtgactgtgtacagctgtgcacctgtgcccccctcaacccccatccagcccatcttcctagtgtttgtgaaataaacttggtatttgtcccagtcagtgaggcttctgttggccccttgcgacacctttcacaaaggaaggggaggacctgttcactcactccaacctcctgtaactttctgtctacacatcatctctgctctggaccttgctggctcctgggtggcagatcagggtgctaggctggctgtaatgctggcacctcttcattgaagagtctgggctctgagatcctcctagccctatgtctttggacccctgtgcactagacccaaactcactacagctaattctcctctctgtcgctatactcctgaaactccccgcacctggattttcctggagaacagtgttttacatttgatagtccagtatgaacacctaacccttccagaaacctcttctatggtcttagttcctagggccttgttcagctccgcctattcctatacaattcttgattccaacaccaccctaaatcttacccaacctgcttttacctaataagtccttttcagtcaaca

SEQ ID NO: 29075 - DNA, 1201 bp, Mus musculus
ctggggatgagacatctcttactttgccagacttcaactctgatgcacctctttcagagcctttggccatgctcctgctcccaaagtaccaagatctgctcatctcccgcccagctcttcccctgccagtgggatccccgagctcacagcctgagtccctggagcgttttgggcgctgcttccccctgaatccagggagacgtctggaagaatatggtgccttctatgtaggggcttctcaagcaagctcggactccagccttgatcccgacctgagcagactgctcttgggttggacaccagggcggcccttcttttcctgttgtccagatacaggacagacacaagaccagggtgccaaggctgggagactaagagcacgaagactgtatctcatagagagggccagagatgcccgtgtggttgggctgctggcaggcacattaggtgtggctcgacaccgtgaggcactggcacacttgcggaaactgacggaagctgctggaaaacgtagctatgtgttagccgtggggaagcccacacccgccaagcttgccaacttccctgagatggacgtctttgtgctgttagcctgtcccctgggggcactagccccccagccttcgggtggcttctttcggcctgtattgacgccatgtgaattggaggctgcctgcaaccctgcctggcccccgccaggcctggctccccacctcacacattatgcagagctgttgcctggtgagtggcaaggccgcatctgggtttgaaagttggggttggagttgaaaaaaccgggatagctttcttttctccttctacgtcaggttctcccttccatgtgccactccctccacctgagtcagagttgtgggataccccagatgtgtcactcatttctggggagctccgaccaccacctccttggaagtcatcagatgacactagatgttcggccttaattccgaggccccaactggagctggcggagagcagccctgcaggtaaacatgcaagcagctgcccccgctagagttttgcccaggtccagcccacacagcttatcttctttccctctgcagcttcattccttagttctcggaactggcaggggctggagccacgcttgggccagacaccagtgaaagaagccgtcagaggaagacgaggtatcgccatcgcctacgaggatgaggggagc

SEQ ID NO: 29076 - DNA, 1172 bp, Mus musculus
gggcaagattcaggctttcaaaaggtcagcggaatcctgagctctctcccttcctactcactccgtcttcccccaagtcagggagaggcagcatcttgcaggaccgagtcccaccctctgttctgggctctggcaggatccagagtagccagcacctgctcagtcctgtgctgtcctgcaggcgctgcaccagctctactacgaccccaatattgacaacaagaacctggctcagaagtggctgatgcaggcccaggtctctccacaggcctggcacttcagctggcagctactacagccagacaaggtgcccgagatccagtactttggggccagtgccctgcacatcaagatctctcgctactggagcgacatccccaccgaccagtatgaaagcttaaaggcacagctcttcacccagatcacccgctttgccagcggctccaaaattgtgctgactcggctgtgcgtggcgctggcctcactagctctcagcatgatgcctgacgcttggccatgtgctgtggcagatatggttcggctcttccaggctgaggactcgccggtggatagccagggccgttgcctggccctgctagagttgctgacagtactgcccgaggagtttcagaccagccgcttgccccagtaccgcaaaggtctggtgcggaccagcctggctgtggagtgtgggactgtcttcccattgctggagcaactgctacaacagcccagctctcctagctgtgtgcgtcagaaggtgctcaagtgcttctccagttgggtgcagctggaggtacccctgcaggactgtgaggcgctcattcaggctgccttcgccgctctgcaggactcagagctctttgacagcagcgtggaggccattgtcaatgccatctcccaacctgatgcccaaaggtgagttactctccagcttcccagaaagggagcgccccatccatcccgtaggcatcaatggggtgtctgtcatacgcgtcatcctacggagacaaaagatgcaggcgagacacggtccctattctcactgtggcaaaagtgaggcagacattaaacaactaaattatctggtagactattaacacattggcctgttcacttgccctcagccagtcactaagtccgtagcatcctgctcccagcaaataatattg

SEQ ID NO: 29077 - DNA, 1197 bp, Mus musculus
aaccattagagtggggttagcctgtgatccagcaattcttcgtctgtgtacatagccagagtagctgaagtcagggactcaggtatctgtacacccaaggtcatagagtcactgttcataactgcctaaagctagaagcagcccaagtgcctatcagtagatgaagggaaaacaaagcaagttcaggcagagaagtatttttttctgcagaaaaaaaaaaaaaaaaccaactctgactcattgcagtgtgaacccctgaaaacgttacacccagtgcagtaagccaattacagaagggacagatgatggcaattccaggaacattcaataaatacatatttccatcttccggctgaagaacctcttttaactttgtgcatgtatgtgtgtgcatgtgtgagtgcaggtgcatgtgtgcatatgtgcgtatgcttgtatgcacacgcatgtcatgtaaagtccttcagtttgcctgagacaaatctttgttatgcttttggcttgggaggttttcctggaggggtaacagctcttctctcggccacacctccttgcagggtttgaaagcagtgtcatttcttttatcactactactcgtgaggttattgaattacttaacaagcacttgctcggggcttgctcttctctttacctaacgcttgtgtaattaatcagaaagtttcctcctcttctgagaagcctttgcttctgccttttgaggtttctctctgtatccatggcgtctgatatgatgcttattttgcttggtggtctgtggattcatagttttgtttgtttcgtctgattttttttcttttgtaacatctaaaactatatttaagccacagtatctataactgttataaggtataaacaatccaaacacacattttgtatattttttagatttcatttttttggttttttgtttttgttttttgtaacatcttttaggtctttttatatcttctgtctggctctccccccccccccccccgtgggttgtttcctttcctcccctttcccttcctctttcccttcctctttccctccctccctccctccctctctctctctctctctctctctctctctctctctctctttcttctttctttctttctttctttctttctttctttttctgcataatgaacatatttgtagtaactgtgtcaaaacctgacctaggctcat

SEQ ID NO: 29078 - DNA, 1252 bp, Mus musculus
tttggacttgaagaaatctgtttactatgccaactgtatgtctgatggttagatagcactgtggccacgcgctttggggcttggctagctcttagcagatttcttttaactttggccgctgagcttcagctgcatgagggaatgacagcatctacttgctcataaccctgtcataggtgaattatgacaccttatgcccgggacttgcgtttaagactcctgaaaatgaatggtagatttcttacatagcaaggagagggagaaattgggggccctagaaggtgcacagttggttccaaccacgtggtggccttgtcggtgagagctagttataggaagccagttctcacctagaacctgtgcgtgttgtagtttaccaaccttccttcatcaagttttcctgcctgaatctatctgatcagcacctatgtttcagattactctgaccccactgaagtcaaatttgaagagctgaagaatgtcaaactagaagaggaagatgaggaggatgagcccgaagcagccgcactggacctttctgtgaatcctgcgtctgtaggaggacgcctcgtcttctcgggttccaaaaagaaatcatcttccagcctgggctccacttcatctcaggattcagtttcttcagattctgaaaccgccgagtctgtctcttgccagggccaagagaaaacgggagttctcaccgtgcacagctatgccagaggggacggcaaggctgccacaggagagccgagtgtgaagaagaagcgcagtgctccccgcagcatcagcgagcaggagctggcagaggtacaggccctgcaaagcatccggtgaaggagggggcctgtgagggtgaaggtgctgtgggctgtgggagggcaggagaccccccccccccccactgctgcatctgttgtgtcggaatgccaggccatatttcccgtcttcccagtttgctcttcactggctcttaacctttgctctgtgtgtctttcaatgcagaggctcacacctcagcagcagctcagggactgtgccgtgtaaaacgcaagcttggctggctggatgctctgctatggtgggagctcttcctctgactcgttgcctagagactggaaggtttgagtggcagttgttgcagcccagatgttttgagatttgagatgaggtggcagtcttagtcactgtcctattgctgtgacaagacagggtgaccaaggcaactcttacaaatacttacaagagataatta

SEQ ID NO: 29079 - DNA, 2745 bp, Mus musculus
cccacgtgtatttgttctccttatagctctgtggtattgcttgtcccacatggcgtgcagggaagaggagagggagctgtgttcattccgtagccccttcctgagcgccagtgtgtcatgttgcctttggggtcagaagtagacgtagcagtctgtgtaagacggtgggtgagtctgggtacagacaagtggtttgagtagcagaggtgaacacaggcctgggagaggcaaaaaggagaaatggcctttcgagacttcaattggagagtacctgggtagttctcggtgttcagcatctgctcttagccaacagaggccatttctgtggccactggctgcagcacatgcaaacccttgtgtttggaatagctattggctctgttcacactgaccagtccccctctttcctcaaaggaccaataccagctgtgctaccgtgcggccctggaatacctcggcagctttgatcactatgcaacgtaactactgctcccctctcctccgacgctcccccgcggggctccggaggggacccagctcctctgagccataccaaccatcgtccagccctcctgcacggatgctgttgccggcagagcacagcccactgggatcacagcatttcggggaacattgccacaccagtcagagagcccagaacacctgggcaagtaggcggactggcagcctggctctgggccctcgtccaccgggccaagtggagccccgcttcaagctctctgttcagctccgcgttctcatgcttctcatggggtgggaaaagggggcaaagcccccactttttatacactaggcggggtagactgcggggtcctagcctcttcctccgactttgcttttgcaggtctttcactgcagatggggctgctgtgggagttgggacttgtttgttttcctttttgagttcacgttggatcctttcttgtacaacttctgcggaaggacacagtagtaactcgccttccttgtgcagagctagggccctacctgagcaagtcggctgtggcccgggaggcagcgtgactcctgctgtcctccagcctttcagatgagatcctattccagccaaatgcagggaaacactttattttgtttgttttaggttttgtttttccttgagagcctttttttaggccccacagacagtggtgggtggggaggcgataggaaacacattccccagtgtgcatttaacattcatagcctacaaccacagacgtgtctgggggagcctggcaaggcgttcctcgtcaccatcgtgtttgcaaaggttcaaaaaacaaaaatcaaaaaaaaaaaaaaacataaaaatatttttttttaagaaaagaaataaagattcatcccctggcctctacttcagattcgaagtgggaggcaactcaatgtgcctggggctcgccatgggcccacagagtctcgctatcatccccagcgtcgcagtgtggcaggtgtttgtaggctgtgggttctggccacctcgggaaatgaatggcacaggtgagggcctgtgccacgccccacacacctcagggccaagcgggggcgtggctggcccttcaggtcaggccagtgggcctggtagcacatgtctgtcctcagccggacagatgctttctctcctggtttgcagctgtcttcaaatccccccatgacccgctcttcccactccttcaagttgccctcacaaaccaatgtggcaagactactggacttgtatccatggtactatactcagtcctcttatctcagcttgctgaggggcagggagagggtctcttcctctgggcagcactatctagataggtaagtgggggcggggaagggtgcatagctgttttagccgagggactcgataccgacgtccccagatatagctaggctaagtcaagatcaacagtccggggttggtggtgttggatgaaacattcatttttaccttgtggatgctagtgctgtagagttcactgttgtacacagtctgttttctatttgttaagaaaaactacagcatcattgcatacttcttgatggtaataaatttgaataatcaagatttcttacacactaggcctctgtctcagctcctgtatctagagtgtggtatcttaagtctatggctggggtgggttctgaggagtccattccaagaggacgatgagccccaacctgggtgagtgcctaggacgggccagattccagccatggctgcctgaatggaggatggaaccgcctacctgagctgcagctgtggagagcacccagggctctcagaccctcgtctctcctcaccttgtgctgctgtgaattgacaaatgaaggatgtaacacaccatcaccgccttcatcctctcccatgctctaaggaatgggataaccctgtggacttaggaaatgactatatggaagtcaatcagtaaaaaaatcttgtaattcttgccatgtgggtattggacgcacacagtgagaccccctgggctcagggacacagcaaggagggtttactgaccctggtggtcagggggctccgcctgatctcaacatcctgggcaaaccagagaagaaataccctcagcagagttgtcacagactctgtggccctggggaaggcctaaaggaggtgagcgctgcattctgtgtttgtagagggtgagcagaagttagttgggggggggggggcgcgatacacaagagttcctagtggaaaaaagactgcaaaggatt

SEQ ID NO: 29080 - DNA, 1217 bp, Mus musculus
cctgagtgttgccccaggagtccaaatctggctgtcagccgctctctctctctctggggagaggacctctgaggagtatccccaggagaatttttaaaactccggaagggcctacagggacttccctggaggtatttggtaagaatcccatggtataggagtcactagagacatttctgcagctctcagtgtggacctcagagatgcctgtggtgtagagctttaagcctaagttctcctgaacagatgaaatcacctctttcctcctcacagctcatgtcaaaactgctttctctgattaggataaggttattcatgtggcccttccttataggctacaaggagggtctcgctgtgatgtcagaagtatcctgtaatggctatggccaggccaggcccatgagggtccccaggaagagggaacctctatatctgcctcagtagctaatgccccaggggaggaggctcccaggccttgtgtgactctgtgctctcctctgccagcttctggaggccatcgagcagggcgaggagaaacagcggaggcgccggcgccaagcagagcggctgaagccttatgtggcggcccaagtggatgtgctccctgacaccttcaccctgggggacaagaagagctaccgcggcttctacaaccggcccctgtctccggatctgagttaccagtgcttcgttctcgcctccctcaaggaacccatggaccaggttggcctgagctggcatgactttcagaaccccaagaccccaggcttaatctaagaccaggccagcttcagaccttaggagaccccgggtctgcattatcctgagactccagcatcctaggactaggacacccctgaggacctatactggatatcccatgacactaggcctcagggtgtgaagatcagacctaacatggcttcagtaaccctgctgacctgtcacatgtcggtctcactggtctcggtgccctccctgggtttgatggatgagggtggggctttcttgctgtgctgtgctcatagcctttgctgttgcttccttccctggaccccagaagcgctacgcctccagcccctactcggacgagattgtagtccaggtgacgccagcacagcagcaggaggagcccgagatgctgtgggtgacaggccctgtcctggcggtcattctcatcatactcattgtcatcgccatcctcctgttcaagaggt

SEQ ID NO: 29081 - DNA, 1179 bp, Mus musculus
acccctacctgctctgccctcatcgtccctggcactgctggtgggccctaccctgtccactgtgtctctccatgagtcctaagtcctctgtgagcggcgtggtccgtgtgcacctgtgtgcacgtgtgtgtgcgaggggcacaggagtcctgtcttgtctctgtgctgtgtgggcagatggaggttggcctgtttttactctctctgtgtttctccttgtctttttttattccctctcatcctcatcgcactctgccatcaacccaaactctcatctctcagatcagcgagaaggttggtcgttttcacttcttatccatctacagttcgcccaccgactgtgcccgtcagttgggaccagcgggcttggtcggctccctcaggctcgctccagccgcgcctgcccgccagttggcctcttctcggtgtttgggctggctggcaggcaggaccagggatgggtgggcaggccttctgccctgcatgtacctgttgcttgaccctgattcgctgtgtgtctgcatgtccccttagccaggctccgctgttggagtggccacacatgcacggtgcacggcataaaactgtaccctacagaactgcactcagctttgcacccagaccaggctagccctctgtttcaggaatggtcatggggatctctgtcagagaaactaaactacatgcttggcatgtaggagttcagggaagcttctaccatttccccacccacccttatgttgtctgcggaactaagagaaggcagaactgcaggaggcaataggaggaggctaatttagagtgagttgtccccttgagatctcacagtacgcgacacagtcctgcagtgtctgccctgcccttgaggcccccagagccttaccaatgctccacaaagcagactggctgtactgagacttaagaccagccttggtctgcctctcaaagaccctgatggccgtagtccaaggcaggtggcatcattttcatacactgagtaagtgtcccgacattatatcttttctgtctcctaccgggtccaaaccaaggtcaccctgcctgcccagaccactctacccgagcttccaagccagcctctgtgcctctccgagggtacagtgtatgtggctcactgaccagctaacagccctcagtcccatgctgggcagtggcactgag

SEQ ID NO: 29082 - DNA, 1105 bp, Mus musculus
gatgggtgttgccaagtttgatgggacaggaactgatctctggccccagcacttccaacccaacccccactgaaggatcgagagggtggatagactcggatctgggtcagtctataggttcctgggtcagtctaggtcccactgaaggagctagagggtggatagactcggatctgggtcagtctataggttcctgggtcagtctaggtcccactgaaggagctagagggtggatagactcggatctgggtcagtctataggttccactgaaggagctagagggtggatagacttggatctgggtcagtctataggttcctggctccggtggttgaactggaagtctcgggacaggcacctgtggaaggcaaacctactaagggttcgtaacaggcctggcttaggaagacaaatgcctgcctcttttggctgccgatcccaggggtctgaagcaccagacacacaggggtgggtgctgaccctttgcctctcaccagataggctgaggagctctggctactctatcctaataggggcaggtgggttttacaggctgttagccaccggggtttgagttgagtcccacgcttcccctgttggatgccagggctgctctgtgccttgggatccctgattcatcatggtaacctatgtgagctctccccttaaccctgcctgcttaaatgccctggttttgttttggtaagtgctctccttggacgcttaccctgtgggatttgggcggtctttggggtggttgctgctcccgtttctctccatcagcccagccagcaagggtcataggagcccagccccacctccctgattcctgtcaacgcctctgccagttccagttctctgcttcccccgagcagtgctagtgacccaggggacatgcttcacccacactcagcctggcccagcctagtgcttgctcacacaacactcgagtcacctacactgaggccgcaagttctccatatatatatagttaaagccctttctagtgttttgttttatctgatttggctttgtgtggctttccttccttttgtactaatgtttctctctgatcttatttgcattcaaattacctcgccaggt

SEQ ID NO: 29083 - DNA, 1218 bp, Mus musculus
agcctctgcacccagcctctgtcctttccacggcctttcacggcttcacttgtcatgttccccacagtctctgacggtggttttccgagagcccttcccggtgcagccccaggacagtgagagccctcctgcccagctggtctctacctaccaccacttggagtctgtcatcaacacagcctgtttcaccctctggacccgccttctctgagaagtggaccagtgactctgttgattgaatcatggatctataagcttgcccgcttgaggcaggacagactggcacttaggaaccccagggtaaactcagacacagaatgacactaaaggactgagtatgtctgggagaagtgctgctacagcctggcaacaggaacatagctgctgaacagcccggactcgcctcaggcccctgggcctgtgcagaagaggatgcctccttcctgcacacctggtggagtgccagggaatgtcacatgatctgacaagctctcacctctaagagctctgccacttggccatcactgttggacattaccattgagatagacttggttccgatcttgactcggcctgtcaagcacctgtgaccagtcttacctcctcccgtccccactggacctttggttcctcatctgtggataaggagggctcagaagtctcctgtgtccacagcaaccctggaggatttgagcttgagctgtgtgtcccttctcagtgggagggaattaacctggagacattgaagcattagacactatgtgtcccccacccctgtaatatacacatatgagaacgctcagtgtgattttaattcagaggaggggactccggacactaacacaccgccccagggcagcatgcaggtgctgtgcagaaccttactggccagtccgtgggtggccccgcctgtcccagtatgaacgtagccaactcagaccctccactgtgtctcctgcagtaaaagagagacaatgccatcttaacccatagggaaagaaccacccctgtccaacatctgcccctccagtgtcccctcacctcgaggccgatactcgcaacccacaaatccttggtagccctcatcttctagcagctgaaacaggtaagtaaagtctagctctccagagctgcctggctccccgcggtctgggacctgggccacttgcacatgccctggggacagaaggggagaggcatgggacagcacagggtgga

SEQ ID NO: 29084 - DNA, 1203 bp, Mus musculus
acaggagcgcaacagtgacttaaggcagcaagcatggagggacgctggtgctggtgcacgtgcgggctcctgcttagctaacattcttatagagcctgccatcaccttcccactgtgctgcccacagtgttccgggtcttcctgaatcaactattaatcaagccaaacctcctacagatatgctcacaagccaggctgacctgggtagtgctcaactgacttccttctcagatgactctcggctgtgtcaagtagtcagttaaagctgagcagagtacatagcttcccttttagtagttgtaacacaactctgagattggagatgttaaaatcaccatttttatataagggctttgaggatttttaggtaaaattcatgtgtccagaatcacgttgagtagcctgacgaagcgaaagctttgtgcgggttcccttttatctggaatgcatagctatgtccagtcccgtagttgtgatcgatcaggggcttcaggcccggactgaagatggctgaatcctctaacagtctcccccacctttctaacacggctctctcaaggtcctgaaatcacagatgagttagtgcgggttctgcgccggcggctggacgaggccaccctggacatcatcacagtcatgctggttcggaattgcaagctgaccccggccgacgtagaggtcagctgcctgtctgacaccagcatccttttcagactcagccacaggtgctggggacatctaggatagaatccgtggcttcagctctgtctcttgtacctgcagttcatccaacctcctgggagtctcccctcagaggtgctgcatctggtcttgcctccgtcctgcagaccctgccttcctgccctggcctggtacctccgccagaacttactcaccttcctgcactcccccaagtacacagacagcaatagccggaaccacttccaagtgagactgctgtcacctgcccgcactcatgtgtcctcttcccctgcacacccaggctgggactttcctcaggatctttgcatctgtggctgtgcccatgagcccgtgtacacccctgcccgtgtcttctgagccccatgagcacctgtcccctcctccctgttgtcaccctgtgtcttggtgctcacggctattctctctccagcatccactcccagcacagggtggcctccccgacttggacatctacttgta

SEQ ID NO: 29085 - DNA, 1116 bp, Mus musculus
gtacacagacattcttctgatgtcttccatattaatcatatgagttccccaactgaagggagtgtatcgttcatcgctgagtccccacagtggctacatacaggaaaggacaaaggtaggacggtagatgctctgttagcttatgcagtgttgctgctgaggaaaaaacagctagaaaagcgagggtcccactggctccaccccagtgatttctctcgaagcccagatctcccgcactctccaagtgagcacacattctctctgacaagctttgctgcttctgttctccttgtatgctgagtggtaccaccctccacccagtggtgcaaatcagaaaggggccacccttactgtaagaaatgtgtagggcagagcccgaagccagagggggttggctcccatggtcacctcccaggctctgttctgactccttgtagataacaacagatgagggctgctctggggcttggcggttcttaaccctgatgtgctcttccaaccccagtatagagaccgaggacctaagtgagcccgagtttcagagcagccgtgtctctgggaatttagaccctggtccggaaatttctctgacagatgtctgccagctcagaggagaggcacatgatgcccttcacagcctcatccaggtgggaactgggaggggaactgaagtgggtgaagtcctgcttaggccacccgcagattctcccccgggttgaggatagttacgtgtcctggtctagagaagagagcagggtcctttcagggatggctgacctcatggcctcttcctgaacaggagaagttcctggagatcagccgtctgcacttccgcaccgttccctccaatccccactacttcttctattgcccgccatccagtaggcgagaggtgagaattcctaaccttcagcatgcccaaccagagcctctcagaagccttttgagtcttgcttccctgatgcctggatgtcctgctttggtcacctgtctgtcccacttcctcctcaggatgagggaccccgagacactgtggacagaaaaatcagtgacctggagttttcagaagccgagcttgtgggcgaggaaggtgtgtgagccttcaaactggtcaaa

SEQ ID NO: 29086 - DNA, 1162 bp, Mus musculus
aggttgagtttctctctctctctctctctctctctctctctctctctctctctctctctctctctgtgtgtgtgtgtgtgtgtgagagagagagagagagagagagagagagagagagagagagagagagagagagagagagagagaatgtgtgtatgtgtgaacgtgtgacctaagtaccacccacaggcttcgatgtgacctttcaaagattcccagatgctctaactgccgggcccaacccagagagatggccggcagagagcggatcccgaggactaactgtgcgggacccgcccccgtgttccgattcgggctccgattcgggcagggacgaaggctcccagagatgggttcgggatttccttccaaatgcttggtcgtcgcactctcgtgagatttgctcccggaagacccggccctcttcagtgtagcgaccaatcggcaagggcgacggttaagacagttgggttttgaaggagccaatgaacgctagcagcggagagtttaagaacaacagtccggcgtgtccttagcttgtctggaaaagaacgcgttcggcaggcgcactgacgcgctgcgaggagctgggggtttgtgttcgggagagctgagtacggagagggaccgggctgctgcgagctgtggcaggcggagcccaggagcccggcgaggatcgcgcttggtcgcctttcgccccggtagcggtgccatggcgcagttcgtgttcgagagcgatttgcactcactgcttcaactggacgcacccatccccaatgccccggttgcgcgctggcagcgcaaagcaaaggaagccacaggcccagccccctcgcccatgcgggccgccaacagatcacacagcgccgggcggaccccgggccgaactcctggtgagtgggtggagggagctggaatcgctgagagtccgtcttcatgctccctccgggagcctcgtcaggctgtctgacttctctctccctgcccccaggcaaatctagttccaaggttcagaccacccctagcaaacctggaggtgaccgctttatcccccaacgcagtgcttctcaaatggaggtggccagcttcctcttaagcaaggaaaaccagccggaagacagggggacgcccaccaaaaaggtatgattccacaggggtcatg

SEQ ID NO: 29087 - DNA, 1183 bp, Mus musculus
tggtaaaaccctacctctcctttgcaaagtcagtaccaccatgtgctctactccagtggatccatctaaagaaatgtttctccatcttcacatctgtgccaggtccacagctcgtgaccgagaagcctggtctgtagcttcagaatgactaaatgggagacagtcacaccagcggtggcagaaacccagacatcaagctctttgggaaatggagcactgatgatatgcagataaatgatatttctctacaggattgctttgctgtgaaggagaagtatgcctgccccggagtgagggacggtatgctgccaagtgcttccagaaagcacactgtcctatcatggagcgccttactaactccatgatgatgcacggttgtatcaatggtaagaacctcaggactgtgaatcatcaaaggtgcctttgagattgtccacctgctcactgatgagaaccttctgtaggtccaagtgaatgccatcaacagtggcctcaggaagactcaacacacatcgggcgggctgggacagcgagacagcaggctgtggatgtgtccccactgagccaagtgaatcaggccatctggctgctgtgcacaggtgctcctcgggtttcagggacaccaagaccaccaccaagtgccttgcagatgagctcatcaacgctgtcaagggctcctccaattcctatgccatcaagaagaaagataaactgaagcatgtggccaaacctagccgcggatttcccagctgctgcctaataaactgtgagctcctttggtactgttccaaaaaaaaaagtttttccaggtttggccacccagacactcttctgcaaccatggtccattggggcatggtagctgcccaagctggcagtagaattttgtatcatacatgcagtgctgatcaatggagttgcataatcatccttaaagattctagagaggagccgtgaggcccggctatgtagggttggagtccttacgagttatctatgaacctgtgaaatgagttccaagttgcagtggagactctagggtgtctgagatgccaggaacgtgggtgtctggttgaagagagctgcaggtccgaaatggatccagaccaagagagaggccatgtgtgctaaaaacagaaaaagccacagagctagtgctgtccaggtctgctggagcgcacgtc

SEQ ID NO: 29088 - DNA, 1268 bp, Mus musculus
gcgactttaatttgactggtatgaattgtggcttaagatgcgagggctacaggcagggtcctgctgcctcccttggccatgaggaccgtggggcttctcattcccgtccttccctcctaagcttttctgacagtggaagcctatgtatggtgctctgctttctgggctggtatttattctttgattaggctatttagaaagattcaggttttaaaaaatatattgtttttcaagacagggtttcttggtttagccctggctgtcctggaactcactttgtagaccgggtgtcctcaaacacaacagacattgcctgcccctgcctctgcctccggagtgttgggattaaagctgtgtgccactttatgtgacagattcaggcttttatctgcctagtaacccctctctgccattttatcatctcaggaacttgtgctttcccacagttacagtgtcctgatgtttcctggatgggaatggtaagttttgagaatattttcttctgttcccttcatcctgtttgaactgttttcttccttggacatttggctccaaattacattttgttttgagacattctcaaactgtagcccaagctggcctcaaactgctccccctccctctgcctcctagtgctgggattgtaggcttgctggcatccccattcagatgcagcactttagtgttaatggctatagtgtatatgtgtacagtgttgatggtgatcagtcaaggtaatgggcgtttgtatctcgttctcactgccggtgcccagagcttcctgcttctaaaagggcagatggctgtgtattaggcagacctgcctctgtgctgtagacactcagtttttatggctctctctaccctgtctccctttctcacgttaaacactgcccacttcacaattaaggtataaccctatattctatatccttaagcagtccctcatttgggatttattctgctggggttttgtagtaatatacctgtgatggtttgcatattcttggccctgggagtggcactattaggtgtggccttgttggaggaagtgtgtcactgggggtgggcaatgagaccctcctcctaaccagatgggagccagtcttctagcagccttcagatgaagatgtagaactctcagcggtgcaatgcttgcctggactctcatgctccaccttgatgataaaggactgaatctctgaacctgtcatccagccccaatgaaataaatgttgtgcttataagaggttggtcatgatgtctgt

SEQ ID NO: 29089 - DNA, 1268 bp, Mus musculus; identical to SEQ ID NO: 29088

SEQ ID NO: 29090 - DNA, 1196 bp, Mus musculus
ccctcactccacctgcatcttgcaacctcctccccaacagagagagagaaagagagagagagagagagagagagagagagagagagagatctcattgtagaagttgtatgttacagtgtgttccacaggatgccttttttcctcacacttctttgcttgcaaatgttcattgcaaggagtcatcggtctggttatgagggctctggcttctgctacactatcaatactgaaccttgctgggactcctcttggatatcctgctgttgccctgtgtcacggaatcctgcagttttagatctgtaggaccagccctttcacataccccagcacttcatcgatggggcagatgtgggggtgggtcatttcaaagctctggatctggtcctgagaggtatctgagatggtcagttcactagctctcccgcatccacaccactggagtgagctctcctgtcctgccctgacttccccatccgatgctgcagccagcaaggagcagagccaactcttctgctctcatggcttcaggactggctcatctgcaccctcaccatcggggccaggtctactgtgctgcccaggttgggtgcagggagggcatcatcttccaagcgctgcagcaggcaaggggatgggccagctcttccattcttatgatgctggggccagctctcccatttgccataagtggtgaaggaggagggagagaaggagggtatctctcccttgcccctgccactgagcagcagacaaaaggcagggctgcctctccatactcatagccttgggctggcttacccacacccccccaccgtagggccagttttcctgtgctgcccaggtgaggttcagggcttgctctcctgagtgttgcaacaaatggacagggccagctcctctgttctcatgacccaagggccagctttcctgcctgccgtaggtggcaaggggagagaataggggaggacatctttcccttgtccttgcctatgaacaacagacaagttgtgggcccaactctcccatgctcacacccttgggccacctcacttgagtccttaccaccagggtcagctctcctgtgctttccaggtgaggtgcagggtctgctatcttgagtcttgcagcaggtgagggcaggggcagctctcctgatcccagcagggccagttctctctcctgctgcagatcctaag

SEQ ID NO: 29091 - DNA, 1223 bp, Mus musculus
gcaaaaacagaaacgaagagggagaaaaagctcggagccctgtattgtgtagaggaggctgagtggggaccagaagccaggcagggaggtgcaggtgtgtaggttcccacttctggaaccagttagggcaggttgcaagtcccagcatctctactccagggctgtgtgacctggccaggctgtgatctccctgagcctgcctcctcatcaataaataacacctacctcatacctccatggcagctgaatctcaagacaagacctggggtgctgtcattaacagataacccagcacagagggaaggctggtagtggaggtgatagagggagttaggagccctaccgagatgggagaggctgctctgtagggaggagccctgctcaagtctcagctcttctgacagggggtcaccttgcgcaagtggctttcctttcctgggcctcctctcccttatctgacacaacagagggggagggtatgctcttcctgaggtggctggaggaatttgttgagtgggcaagaactcagagagttcccagagtggtgatgggtcacctcagcccatgtttgttttctgtctcttcacaagtagcatggatgcttgtgtctcacgtgaatggggcaagctggttcctgtggacagacacccagatgcgtcacttaggaggtgaaaagggggcacattcaactgggaagcaaggactgtgtgctttcaagcaggaacaggtgccctaggccttcctgcctcccccctcccccacttcttcacagtgtccttactttagatttgggactaacaagaactcactcagaacaatgccagtccatgattggatgctcattaaataaataaatgaatgttatagaataaaactcactcattcttttccctgttaaccagtggacataagtcatgaatcctgcctttgtgaataatttaaaattaacaagctaggcattgggccatgactcacgcctttaattctagcacgcaggaggcaaaagcaggtagatctctatgaatttgaggccagcctgatctacataatgagttcggggccagccagggctacatagtgagatcttgtctcaaacaaataatttaaaaaataaatacatatcaagcctagaaaatgcagctgactgaaaagaacagaaccagctccaagagacttaaacaccagccaaagagcttacaaagactggacctagcccccatctc

SEQ ID NO: 29092 - DNA, 1210 bp, Mus musculus
tgggcacaggaacacggagcaaggagagagaattcagcttcggagccagacctcccgtggtctctctaatgaacttaatgccactttacacataacacacgcggttgtaaacaccatccaaatactaactcgtttaatcttcctaataacccaggaggttgtactattattatgactagtctaccaaagttatccggcagcctagtgaggaagccagagtcctagcgctggcttacagccccgcaccaagcgctaccattttgctagtggccattgagactcagagaggtgtgcaaaccagctcagagccacacagcgagcgcccccaacgggtgccccgcacaccctgggactgcaggttctagcatccagagccagactgtggtcagtagccctccgtccctccccacctccccacagaaccacgcctctcagagtcccgccccggacgtgctccccaggccccgcccccttcgggcccacctacaccccagaaccaatggcggcggtcctataaaaaggcagctccgcgcgctctcccccaagagcagaggcttgcttgtagagtgacgatctgagctacggggtcttaagtgcgtcagggcgtggaggtctggcgggagacgcatagttacagcgcgtccgttctccgtctcgcagccggcacagctagagcttcgagcgcagcgcggccatggatcccagcagcaaggtgagtaacggggctgggagtcccgggtagggatgtgctgccgagcgcgggccggggcgcctgtccgagtccccgcttcctcacgcagccgccgcgcgcttcacgcggtcggggcgggggccgcggatcaggggcccaggcgccgcacgtcgcgcacgacctcggcggctcctcccgcgcgggggagggggccggagcgcggcgcccattggctaaaagagccgagcccccggccgggccccggctaggagcggaggaggcgggacccgcccggagcccgcgccgcgcccggaacccgggccatgggggtggccaggaggagaaggcacttcctccaggccagggtcgggggctgacgagctctgaggacctcacgatgcgcagtcctccagggatgtggggcctttccccggggcaagctactgactggataagatctctcttcacctgtgatcaggcttgccctgtatgggccggatttacggaacccctcctgga

SEQ ID NO: 29093 - DNA, 1207 bp, Mus musculus
gctagagaagggcagggtcatgtctccagtgctgaacaatgtgactgttcccattttgcagataggcacatggagggtagggaggcagtggggcagggaaacccagctagcctgcaagaattcctattggctagactcaggccattgcccttggctttgaatccagagcctttcttccccatctgcactgtccctttcattcagtttggccttcctggtgagggagggaaggttggttcctcttcctcccacaatgtggggctacctgaaatgtaagtatcactcctacctgggtagtgagaccttggaaagccaaaggctctctaactgcataaagaaaaacctgattgctctctctcctcagagaagtctagaagtcagctgggcaggtttgggcacctgaggccaggaagtagccaggtttcctgggagaaggacaaatgtgttgccaggagtcaggcgaggcatatctgaacatgggaacctgccagcattgactttgctctgtagtactctgggcccagacatgcctgtaaccctgtggtttcttcctgcagaaggtgacgggccgcctcatgttggctgtgggaggagcagtgctcggatcactgcagttcggctataacactggtgtcatcaacgccccccagaaggtaagtgtgctatgccactccccatatataccatcacccacacacattcatggtgccacctcggtgtccatcattgacatcaactgaccatcttccctcccagctggaattctagaatcccagggccatagaatggtgctactgtggtaggctgtcttgactgtttcccaaacagcacagacatttacactgatcagtatagtggaatttcatttatatagtatttggggctcctgaaagctccacatctgttgctgggcaagtgggcaggcagtgggggaaatggtcagagaagaggagccttccccagtgccaccctgtcgtgcagtttttatgttctcacacgccagccacttacagcatagtccagttccagactgtaacggcttcctgtccctggaggtcccaggtcaatttaagtaaacatggcatctcaccctgaggtgctgcaggagctcggcctggcttccttctccccattgcacacctcagatctgcccccacttgtgttctctctgggtgtttagactggaaatgactgtggcattcacctc

SEQ ID NO: 29094 - DNA, 1111 bp, Mus musculus
acagctttctttttctcctctaggtattctaagtgccttaaaggtggtccttcagttgttctcatgataacctcgctaagtaggccccataacctccattttgtaagaaagaagcacagagatgtgatgaaactacaccaaggacacacagctagcacagagcagagctggagtttaaatccagggggtctggttctgttgtatgctctgtgctcaacctttgggagacaggcactgagcaatgggggtggattttctctttctctttctcttcttcccctctctctccctcttactgtcccccttcccctccctctccctcgtgtccttccctctccctgcctctccctctccttccctctccctctcctttctttcttcccctacttctgtccctggacccttgctcacacttgttgcactgctggcccactcccactgtgctgagctcagagctgagtcaagtccggtcatgtacagatctatctcaagaacttcccacacaatagttacgcaattcctcacgccgtcacagcccgtcattgcaagcccccccttgttccctgcacccagcagcagtgacactcaaatcagaccatgttgaagtctgctcttgatcatagtgtcttctagtcagctgttcaaagaccgcaatagaaacatggacgggcacagtagggcagaggtggcagttggccctaatgatgtttttcaaccttagcaccacgggtactttgcactggacagccctttggtatttattgtgatgggctgtcctgtattcagtagtaggatgccagcagccagtgtgaccgcaggcactgtagacatactttgatggaggaggggtgctggccaggggaacttcccagaggggaactgcattccctgaaaggtgatcaaatagaaggaaagagcagtctgagatgtgggtgttactgtctgcccagaggatatgagtcagagtgctgctgaagaaactcttcatcctgagggctgaggtggccctggctgctgggctgccacagtgaggtgaagctctctctgtgtctgtgtgagaagcccctccaggctgtagagcagggaagggacccactagccagggcagaga

SEQ ID NO: 29095 - DNA, 1651 bp, Mus musculus
ggttcgtgttggagagcatggcaggacccttgcagccgggatgcgggctgacctgtgtctgttttgcagcaactgtgcggcccctacgtcttcatcatcttcacggtgctcctcgtgctcttcttcatcttcacctacttcaaagtccctgagaccaaaggccgaaccttcgatgagatcgcttccggcttccggcaggggggtgccagccaaagtgacaagacacccgaggagctcttccaccctctgggggcggactcccaagtgtgaggagccccacacccagcccggcctgctccctgcagcccaaggatctctctggagcacaggcagctagatgagacctcttccgaaccgacagatctcgggcaagccgggcctgggcgcctttcctcagccagcagtgaagtccaggaggatattcaggactttgatggctccagaatttttaatgaaagcaagactgctgctcagatctattcagataagcagcaggttttataatttttttattactgattttgttattttttttttttatcagccactctcctatctccacactgtagtcttcaccttgattggcccagtgcctgagggtggggaccacgccctgtccagacacttgccttctttgccaagctaatctgtagggctggacctatggccaaggacacactaataccgaactctgagctaggaggctttaccgctggaggcggtagctgccacccacttccgcaggcctggacctcggcaccataggggtccggactccattttaggattcgcccattcctgtctcttcctacccaaccactcaattaatctttccttgcctgagaccagttggaagcactggagtgcagggaggagagggaagggccaggctgggctgccaggttctagtctcctgtgcactgagggccacacaaacaccatgagaaggacctcggaggctgagaacttaactgctgaagacacggacactcctgccctgctgtgtatagatggaagatatttatatattttttggttgtcaatattaaatacagacactaagttatagtatatctggacaaacccacttgtaaatacaccaacaaactcctgtaactttacctaagcagatataaatggctggtttttagaaacttggtttcaaatgcttgtggattggggccaggcaggttgggttggatgtgaaaagggcagaatagcatggctgtgaccgtccagtggctggggatcctggcagtgtcccttttgttgctcaaaaacctgtttgacctctgacccggaggaaaactccagtcagcattttcataggctactttcagactgatagctaaccctgccagccccgagatggcctcgatgcgcaagcttcaacactatcttgaaagtgaagataggaatcctatctttatctgacaggcttcaagacgtttaacaagcatattttacaactccgtggccataccctgttccccaaacaaaaggagctctttgtgctgccacagtacgttgttgccacgctgtgtatccaaggcagctttcctatttacagaggccacctgagagtgttcaccgtgtctgggcagcactaaacaggcaggtcctttccagagaacctccctcatcgaattca

SEQ ID NO: 29096 - DNA, 1153 bp, Mus musculus
gcattttatgcatgcgtagaatgtattctgatcatattcaccttcattacactgttacccttccttttctcctgctgagcccctgcctctaccaaccatccccactctgatttctctttataattttaagattttcactatattagaggtggaggtaatgagagagcattcatgcctcccatgtgtgtggaggccaggggacaacttgtggaagttggttttccactgtaggttccaggcatcaaactcaggtggttgggggctggagagttaagagcatcaactgttcttccgaaggtcctgagttcaaatcccagcaaccacatggtggctcacaaccatccgtaatgagatctgactccctcttcttgtgtttgaagacaactacagtgtactcacatataatagagaaatcttaaaacaaaaaaaaaaaaatcctcaggtggtcagactttagtggcaagcacttcttcctgctgagccatctcgatggtcttccctcctcctcttctgcttcctccttatccgtgagctttaccagagttgcctgcaggaccatgctgacagcttcttgtcagtgactacagctggaagaaactatcaatccatccttcagcaaccgttagcatccatgaattctctcctctagaatgggccttggcccttggtcttgtgaaggttctgtgccccagtataggagaatgccaggcagagccaggaagcaggagcgggtgggttggggagcaggggaggggggagaggataggggatttttggagaggaaactaggaaaggggataacatttgaaatgtaaataaagaaaatatctttaaaaaaaaaaaaaagggcctcggtttcaatcaggaagtagctggttccgccatcagatttgtttctaacttgccattgagcacatctgaattttcatctttcttagtctgaaaattcacttttttttgttttttttttgttttttacgtgtccctctcaccattgttccccactcccccagtccatatcctccagagaccaagccaccttgtccttggctcctacaccctctttccctctgggtctttaggattcccttcacacaattgctcttccccctgttcctgactcccatctgggccattctggtgaggaaaccag

SEQ ID NO: 29097 - DNA, 1106 bp, Mus musculus
atcctacagcacacagccaggtctaaccccagtcggccctgccctcagaacagcacacagccaggtctaaccccagtcggccctgccctcagaacagcacacagccaggtctaaccccagtcggccctgccctcagaacagcacacagccaggtctaaccccagtcggccctgccctcagaacacagcacacagccaggtctaaccccagtcggccctgccctcagaacacagcacacagccaggtctaatccctcatcacttccacccttttttcttggttcagttcacctatgtctcaaccttaggcagtagattcctgtaggcctcctcgattccttccctacacttgagtgtcaccatggagaccattagcaacatcctttaacacatcccaaggctctgtgtgagcctccatggagacagtagagggcagtggtttggtgttggctgcatttgtagcgtactcttggccccaaccaattctttagttttcagacacccatgtccgacttctgttgttaaatccatctgtaacttgatgtttttccacctgtccactcactttgttcacagaaataatgactctgagacttaatatttcatgaataaatacctcggccaaaagttttgcttgttccccgactagctcatgacttaatgacatgtttattctagtcttcgtcatatcatgtggctggttacctggtctgcagttgcatatgaccatcttctgtgtttggggcaaatctaccgtgcccgactatcttccaggatccttgctggatgtcccaccttataggcttttttattgacaggtgaggcttccgtacagtgcacaagagactatctctacagacttcagtgttagattcttctcagagctctgcaagttcttattttaatgataggtgctggcagttaagtcaggggcctttgaacacactgaacaagtacttataataaagccatatactcatctcaggtccactgatgacgagtggtggcgttgacagtagatgaactattaaatccaccatttccttgagtagaacaaggctggatatgtggcaaggtcagtctaaggcccaggtagaccctgtgcac

SEQ ID NO: 29098 - DNA, 1547 bp, Mus musculus
ccagggagggttctttttggttgaaatgtattggatatgccttttaacctcatcagacaaaggaatcttggtctttacaaggagttgtggtaagactcttctgggtaggaaattctaacagctaaagaggtggatggaggaggaaaagacgcagctgacaaaaataacaagaagggcattgatagccacccgatccgtgtggaggtacagcggctgaagtgagccctggccggggtgatggcagccggaccaaggtctgtaccactggccttcaagaagccatgtctcatccagcaggaggcagtgaggatctggactgagctagcagtactggagttcgagatgacagattgtgtcagctgtacagtgttatctgtgttatctctgcaatttcggtcctaaaagtcagtgtcctgttgttttgttttcttgggaggttacgtgtgggtgcccatagagggattcttctctgcaagagcactaagcactcttagccgctgagtcatctttctagcccgtttgctttgtttgggctttttaccttagagctgtgtgatggtgtggcttagagtgagcaccgtctggcttgatgatgcccgtgtagcattctgaaggctgatggacggccaccctgttagctagtagaatgtgaggagataagccagaggaagactctaaactggttcttgaatgtctggctcgagtgtgtttacccgctcaacagaatgtggaagagaaggacactgttgtgggtgtgcaccagagaagactgctcagacacgggctaagccaacagaaaggctccttatcagctatttattagctggttgatgactccactgggtcttcaggatcccagtgtagcattgagcctttctcagggggagcttctaagcacaaaaacaatgtcctggtttgacatacttcagttagcaagaacatttagccagaagcagaagcaagaaagcaaggttagtgcatttagagattttccccagaactgtggcttttgatggattaggtctttgttttagtgttggcgggtgctgctgtccacgtgctgagttttacagcctgaatggcacgtccaccatggagtcagttgtgctaaggtctggggccctgttatagacattctgatatcttttaacataattagtgacctatattttacttcaagaatcaaccttgggactggagagatggctcagtggttaagagcacctactgctcttccgaaggtcctgagttcaaatcccagcaaccacatggtggctaacaaccatccgtaatgagatctgatgccctcttctggtgcatctgaagacagctacagtgtacttagatataataataaataaatcttaaaaaaaaaaaaaaaagaatcaaccttgctggctctgccgggctcactggatgtaaccactgacagagccccctttccacccctaggaccgaggaggaggcctaactttgtatttacctttccaagttattcggtctataggtaaggagatagtgtgtctagggaactttttattcgatct

SEQ ID NO: 29099 - DNA, 1166 bp, Mus musculus
tgcgcctgcgctttagactgagctccctgcgggtggtgggaccgaggtgctgttatggcggaccccggggttcccggccggtacgaaagtggtacgggaaatctgggggtgaaggaggcggcgggtcctggaggtaggtgggactgagttgcctgggtaggaggtcgcagccgggtggctctttcctgctggctcacggaaggctgagggtttcaacttacgcctgtgttcgggtgtgtatcgcaggagccctggtggagctcaccccgacccccggcggcctggctctggtgagcccctaccacacccaccgggtcggggaccccttagacctcgtggcgctcgccgagcaggtgcagaaggtgaggaatagccatctccgtactttaccctgcctctttgggctcgggacagcctgtgaactcggcagtactgaagttaccattccatttcacacgaagaggatcactctatcccaattcctctgttgttgtttgttttgagacagggcctttctacataactctggctgtcatggaactctctatattatagactaggctggcctcgaactgacagatccaccttcctcccccaccctccaaccccaaaaccctatgctgggattaaatgtatggcttctataccaaattcttaaatagtcacattttattctgcttcccataaggtctttatctgttacccaggagcttgtggaacttaaatatatgctctttctttcctttttaaaaaaacaaaacaaaataaaacaaaaactgctggggttgtagtttactgttgcctagccctgaatttgattcttagcactaccaaaaacagcatgcaaaaaggcacagggtaaaattcctattgaaaaaaagaccacacacaataaaactggaggtagtttcatttgctgtatagcccaggttggctttgaattcagcctcccaaaggctgggtattacaagggtcgctgtcacacatggtgaatttcagtggatacagtcagtattactatgtccagagcttaggcgtcggtttccataataggtaaaataaagaagatatgcaaaataatggaaaagaccgtagaagttttgacagattggttttgattgtttctctctggagctctggatctgtaaaatgagatctttgaggtg

SEQ ID NO: 29100 - DNA, 1148 bp, Mus musculus
atgagattagaggcggagcctcacgaagagtaagtgtttggattggttgaaagcaagaggcggtacaagtttccttgccacgagcttctggacttggggcgtggctcgtctctgggcgtggcttctgtggggggcgggactctggaatgtgccccaggcgagcagtcccgttaagtggaggagcaaggccatggcggtgagcgaaaggaggctgctggcagcgatgctagcggtcgccgccgccgccgccttacgggttgcggcggagtctgagccgggatgggacgtggcagcccctgacctgctttacgcagaggggaccgcggcctactcgcgcggggactggcccggggtggtcctgaacatggagcgggcgctgcgctcgcgggcggccctgcgtgccctccgcctgcgctgccgcacacgctgtgccaccgaactgccgtgggcaccggacctggatctcggtccggaccccagcctgagccaggacccgggcgccgccgccctgcacgacctgcgcttcttcggagccgtgctgcgccgtgccgcctgcctacgccgctgcctcgggccgccctctgcccacttgctgagtgaagaactggacctggagttcaacaagcggagcccgtacaactacctgcaggtcgcctatttcaaggtgcgactggtccggagcccggtggccgggagcgacctggggaacttggggagcagagcagggatgagacggcagggaggcaagggacctcttggctagggagctcttggcggactttgggagcttcacccggttcttatgggcagatgctaaccctaaaggtccagccagtagtgacagcccaagccaagaaaaacctgacctttttcttttgggaaggcctcctagagggaaccgaggcggccgctagggtctcccagcagtacttcattgcaagtgtccaagtgcttctgcaacatcttccttccggttcgttctccaatcatgctttccctgctccctaatccaacagcagcgctctttcaggacgtgggattgccacgtcgccagcaggggctgcctggctccgccctgtggaggaccctctagctagtatttttgggttttttgtttttaagaaaatgactgtcttttgggatgccac

SEQ ID NO: 29101 - DNA, 1972 bp, Mus musculus
ttcaccctagaccccacataagaagacagacggtagggaggtccttaggagggagtggggaggagggcatggctgggtttgacacaaaggtatgctagctagggtgtggtggagtctccaaagaggggtgggggaccctgccagctgttcatggcttcagagacgcttcaggtctccagctgctagttgaaagtacacagaggaaataagccgtgtctggatgcctgcctttccagcgccatcctttacctcaatggcgacttcgatggaggaaacttttacttcacagaactagatgccaagactgtgacggtgagtgctcccctgtcctcatccctgggggctgatggccccagaggacagtagaaagaatgacttactgggcttcctccccaccccagcccacccctaccaacccccagcctgtttcctgtccctgggccaggggctttgggatatgatagctctcctctgactgtcctttgggtctttgtcctaatgatccattgctcttctgaggctttcccccatctcccctccccgcccacaggcagaggtgcagccccagtgtggaagggctgtgggattctcttctggcactgagaacccacatggagtgaaggctgtcaccagggggcagcgctgcgccatcgccctgtggttcacgctggatcctcggcacagtgagagagtaagggctgttgggagggccacttgtgtttccctgagactccccacccaggcactccctgcagtcattgcccgcccaccctccctgggcctttcttttcacgtggaagtggaagagggtggggcttgatgtggagttcttggttcatgccttgggcctgctccagcaaccagagcttaagcctgctgggaaggaggcagtcccagagcccctgtggtaacactaccattgttctcttggaagcggcagctaagggggtgaggggacctctccagaggccctctgagaagagtttgcctttgcaggacagggtgcaggcagatgacctggtgaagatgctgttcagcccagaagaggtggacctcccccaggaacagcccctgcctgaccagcagggctcgccagagcctggagaagagtctctgtcagacagagggtcgctgcacaaggatgagctatgacaacagctaggtcacagttgggtgtccttggactcatgagggtgactcagtccttcagcctggacttcccggcccctcaaggctgcagagtgagaggcgcttctgttggccccccggccagaggatcctgtccacagccttctgcatggtgctactgttcttggagtgggcatagcaggacacactcttctctgggcttggctgtaggctcagaatgcaggcccagaaccaccctggggcctatgtaggcagctgccgtcagcagcgtgatatatttaagtgtctgtaaagacaaccaaagaataaatgatttgtgtttttttcacttagtggtttgttccaagagagaaaatatttctactcttcctgggacgctgagcttggtagcagctcctctaggtagtgtgccgtggcacatgccacatgggaattcctctgtagcctcaggccagataacccaggtaccttgggctgttaccatagaaggggcatcttggtcctcactgcctaccttctatgggaactggatgtcccagatacagcacccaggatggcagcacatcatcagctttaaaggctttcaacatctagattgtcactaatcctcttctggcagagagcaacagtcagcgctgctctggcagggcagccgcaggcttcctgctcggctggctggcctcagagcccgcacctgactggagtttcagctcctccggccacatagctggcacgaagcccacccccttcagcactcctgagatgctgttgtacggagttataggaacctgcggctgagtagtcattggtcagtcgaactatt

SEQ ID NO: 29102 - DNA, 1326 bp, Mus musculus
gtgcaaagaaactggcagtaatagattaagataagacattttattatagtgttgtgcactctagcacaaattagacaaatgtacttttttgattatgagctgcctacattctgaatcaatgataattttggcagaaagctaagcaaagtcttacttcctgtgctctgaagacagtgttgtgaatttgaaggtttgaaaagtaaccttgccaggtttggcagtgcccacctttaatctcagcacccacacagaaggcaggcagatttctgaatttgaagccaaccaggaaatctgaggtctgtcatgcctagtttagcttaatttgactttactagcgagtaagactgtttacctgctctggttctggggttgccatatttttcaattagtgtccacttctcttcttgtaaatcatcctttaagctaaagccaaacagtgggtgaaatgtggctgctagagtgccaattctagagtgtggtccacgagctagacttcgggatggtaattaagagtcttttctttgcagtttggtcatccaacaagaagaaatgaatatgaaattccagcaataagaaatgaacaaagattggagctgaagaccttaagtgcttgctttttgccctctgaccagataacattagaactatctgcattatctatgcagcatggggtttttattatttttacctaaagatgtctctttttggtaatgacaaacgtgttttttaagaaaaaaaaaaaaaaggcctggtttttctcaatacacctttaacggtttttaaattgtttcatatctggtcaagttgagatttttaagaacttcatttttaatttgtaataaagtttacaacttgattttttcaaaaaagtcaacaaactgcaagcacctgttaataaaggtcttaaataataatgtctagttttgtcataattgagtactctctcccacttttagaataacaggtaacaccagcagtaagcagtctgtcaggagtgctgtgaggcatcagctgtagccacgtgagtggggtagagaagctttgtggggccgggctagtctggggtgtttccctctagagaagctccagggcgagcgcactggcatcgcactaaagaactgctgctgagtggggactaatggctgctagttgtccgccaagtccatcaactttttaggccaattctttgtagtagaaactaataggaattgatgaaagacttcagcagccctattaacataaacacacagagacatgttagtgttagctcataccagtcatggtgactgctgtaaatactctgctgtcaagagcatagtgaaagaa

SEQ ID NO: 29103 - DNA, 1237 bp, Mus musculus
atatttttttaaatacaaagagtataggccaagtatggcggcacatgcctttaagctcagcacttgggagggaggcagaggcaggtggatccttgtgagttcaaggccaggctgttctacatagaaagcttcaggtcagccagggctatatggtgagtacctgtctcaaaacaaaacaaaacaaaacaaaacaaaacaaaacagtggagccaggaactagaaataataattttcatcagtggggcaggattcagaattcctacatcagggacccaaagcccaggagtttcctaaattaaactcaaacactaaagagtcataagttcaaaccaaggtaagccagaggctggagttcataggactggctgaagagagaattgtgtctggagccactgtcgccgagcccaagccatgctgcttctgctcgcccgtcaccccccccatcgtgcactagcggtctcaaaagattcaaagtccaagatggcaaccctcaaggaccagctgattgtgaatcttcttaaggaagagcaggctccccaggacaagattacagttgttggggttggtgctgttggcatggcttgtgccatcagtatcttaatgaagggcttggcggatgagcttgcccttgttgacgtcatggaagacaaactcaagggcgagatgatggatctccagcatggcagcctcttccttaaaacaccaaaaattgtcttcagcaaagactactgtgtaactgcgaacgccaagctggtcatcatcacaggggtgtctgtcagcaagagggggagagccaactcaacctggtccaacgaaacatgaacatcttcaagttcatcactgccaacattgtgaagcacagtccacacttcgagctgctgattgtctcaaatccagtggatatcttgacctacgtggcttggaaaatcagtggctttcccaaaagccgagttattggaagtggttgcagtctggattcagctcggttctgttacctgatggaagaaaggctgggggttcaccctgagctgtcatggctgggtcctgggagaacatggcaactccagtgtgcctgtgtggaatggtgtgaacgttgccggtgtctccctgaagtctctgaacccagaactgggcactgatgcagacaaggaacagtggaaggaggttcaaaagcaggtggtggacagtgcctccaaggtgatcaagctgagaggttacacatcctgggccattggcc

SEQ ID NO: 29104 - DNA, 1238 bp, Mus musculus
tatgaacctaaacgaatctacagaacccagtctttggcatttggtgtgctgcaagaagtttccaaactgtaagaaagcccacctaaccttagtcaaaagtcggtccttggttgcttggatccctggtagggactgaccagtgttaactaactgaacttggcttgctttttcggatacagataacaatgaagatggtgccaaagatgctttcccctctggtcaaagactgggctcctaaagcgtttgtagtttcctttaagctggagacagacccggacatcataatcagtcgggctcggaatgctttggaagtttaccagcatcaggtggtggtggccaacatcctggagtcaataaagtcctttgtgattattgtaaccaaagactcggagacagagttactgctgtccgaggaggaggtggcaaaaggcttggtgatagaagagaagatagtagatgaccttcggtctcgacacacagcttttatatgtgacaaaaactgaaggaaatgctcctctaggatcaaacaccagagctcttaccactgataggaactaagattgatcctctgttaaggatcaacacagtgaagagatagtaaacgcggtgtgcaggcaagtgcctgctgggacttcagttctgagagtgaaacactggacgctctcctggatctggaaagtgaacaagagttcacaaagaggactgtgggattgcgtggcctgcagagcagatgagccaggagccgctgcgtgttggcctactgtaaggtcatggtgcgtgaatggtcatgctctgaagaagtgtttatcaagtgcctaccatgtgccagggcctttgtgagctgtgagggtctgaaagatgaatgagcacgtctcatttgggaactggatgtacaaaaatttatgtgcaataaagtatgtgcccacaaagggacacttggaaagggcgggtttctggttttttgttattgttttttttttcttttacaatttagttattttatgtgtttgagtgtttctgcttgcatgtatgtttatacaccatgggtctgcggtacctttggaggctagaagaaggaatcagagcctctggaacttgtgagcctccatgtaggttctgggaatcaaacctgggtcttttaagaagaaagacgtttttactaaaacaggagtaatgcagataaggtagatcacagacctccctacatctactttttgcctcttggcctagatttattc

SEQ ID NO: 29105 - DNA, 1172 bp, Mus musculus
tcagctcacagatggaggaaatcttcactagctgcacacgggacagaggaatgctatctagactacacaaaggactagagatcctaaataacaagaaatcaaacgatagggttaatgaaccagttagttgggtgtagtggaatgccactacacacctgtaagctgagcatttgggaggtagaggcaggaggatcagatgttcaaggtcatcttcaggtatatatatcttatacaaagatagcccgagatattccagaccttgtcttacaatgaatgaatgaatgaatgaatgaatgaatgagagtgaatgaatggatgaatgtgctaatgaaatggacagacattctcaaaagatgaagtacaaatgatcaattacttgtatgaatgaaaattattcaagccgggcggtagtggtgcacgtctttaatcctagcacttgggaggcagaggcaggtagatttctgatttttgggctatgcagagaaaccctgtttcgaaaataaaaacaaaaacaaataataataataataaaaagaaaattattcaaacttgtgctagcttcagcagcacatacactaaaattggaacgatacagagaagattagcatggcccccgtgcaaggatgacatgcaaattcatgatgtgttccatatttttaaaaaaagaaaaaaatgttcaaactccctggtaacccgagaaacacaaaatgacactgagattccatctatgtccagtgagaatggctgttactaagaagataacaacaaatgtagccaaagatgtgaccaaacaacgtttatgacctgctattggggatacgattccagccagggcactggaattcagcctggagggtcctccaaaaactaaaagcagatctgtcctgcaatccggctgtatcacttctgagtatttacccagggaactccaggtcaccacacttgcacatccatgtttattacaacaacacttacaaaagctagttgtggaaacaacctaggcacccatcaacagagggatgggtaaagaaaatgtgctgtaggcatacagaagggatatattttttattttttattagatattttctttatatacatttcaaatgctatcccgaaagttccctataccccccctccgccctgctcccctacccacacactcccgcttcttg

SEQ ID NO: 29106 - DNA, 1715 bp, Mus musculus
cttctttaaccctattctccctactataaaataaggaccagaggaaccaccttgttggaggatttggggtggattcctggcattgtgcttatgtcctagcacataggagacaagctctcagcctacttgatctcttcctgacttcctgcccagctcactgctgacactcccccctcctttccaggtcatcacggagccatgaaccagcagcacatgatgccttcccaagccttcccgatgcggcgccctctgcctccagatgacatccaggatgactttgattgggattcaatagtgtaggcttgtttctgcaagacagcagactccaggattctttttgttcagtgaaaggacggattagaggccggttgagaaaacaaagctatgttaccagtgctatctaaattcctttcgaagacaatcagagattctagctgggtaacttactgcttttatccaacccaagcaagaactacatgtttgtctccctgccagtaccctctgtagctcctaactgttgtgatttggacagctttttgcatatttgtgtcagtttgatgttgaccacaagtgccagactgatttttcagacagagcctattttgctgcgagcagtttatagatacatatgtgtaaatatgtgtacaaatattactgaaaggcttcaagttttttctaattggattattgtatcttgaaaagaaagttactgtcagtttttattccttgttaggccattttctgcaggatgctttcaaatgatacagagagctgaaaggaaatcagtttttcaaagcccagtttcctttatttaatcttcagaaataggagtaatcatgaatccaccgagtaagtcaaagaatctggagttggtactcaaaaacagtgcagagggccgttgttcctgagcaagcttgtcacttgtcattcggtgttgtagagagagtgttgtacctgtcagtgtgattcctcagctgcatcttggcagctctgaaatgtgtgggctgactgaaactgggtattgcttggctcttcaaacaaaccaatgtctccatagtcacttatgtatttattattcaaaagtgttattttaatatttattgctctgtgaatgcacagttctgttggattcactagggagggatttgtctgaaagcatggttatttttctggataaagtttacagacaaagacaatcagaagcattggtccttctcttttatcatcactccttaccaggtgagcgtgcttcctgtcttgcttagccttcctgctgggggagacttaatagctacataggaatttcctggaatttgaatcagtctatttaggcagcaagatacagaggctgggtttatacagcagtgtccctgctgttggtaacgctagcaggggctgcatgcagctccagagtcttatctgcttcagtcttgagtgcagtgactgactgcgtgacctgctgttgggtctgtgtgtccccaacatgaagcacctcagagctttgatcagttgctttgttttgtgtcatgtcacagctagcatgggttgaatgtgttgattttataatgaaagtaaagaaaggagattctcctccccacagtgaatagatcgttaattggttctttacagagagggaaatccattttaatgagaaaatagattctgtcaaatcaagaagaaataactggtcaccagttgcttgttagtgtctctgg

SEQ ID NO: 29107 - DNA, 1170 bp, Mus musculus
agtcgggcagaaagtggtactgccagatggcacaaacctcagaggaggacttttaaatgcaggagtggataagtcagggtttttaccttttccttacaggcagggttctcatctcttcatttttattcagggctcatatcaaatattgtttgcaccaagactcttttttgagtcttgaaaataaggaaacataccatatactgaatcttttctgcccatatataatgacaaagggatttttctatgttgcttgtaggtaagtaggaaacaattagataaagcagtgagattaacccatggttttgggacaatccagaagagtctaggctttggatttagaaacaccaggattcacatctaggctctgctatttctaaccttatgcctgtaaataccctgataaatattaaaaaaataaaaataaataatacaaataagttcttatttcatagtttcatagtttatttcataaacttatttcaaagtttacataaaaaacataagcactagaaaagcaattggctctttatataagtaaagtaaatgctaattttcttgtctttactgttaatgggcttatgctctgcttgtagaaataaagcttttcccgcacacttaccaaattattaggcaaaatacagtaagtattcttttatccgaaggactaaatgaacagtaggaaagagcagtcactttcaacatttggaaataagtttagtcttcacactcaagatacatttctttgggccctggagatatttcagtagattaaataataattatgtctccataccaagtatactctatcaagtgtttcaaattaattagatttgacacaaatttgggtatttgtttaagtcaacagtgggctatgtggctcgagaaatggactgagcttttctgtgagatccttgacactatcaaatttggaattggttccagatatattagtgagcgataggttgtacgtccatcctctctacctacatcagttcactatgtgttcatttatacacattaattcagaagttcaaatttttttattattggatatttatttcatttacatttccaatgctaacccaaaagtcccccacacccactcccccacctacccactcccacctcttggccctggcattcccctgtactggggcatataaagtctgc

SEQ ID NO: 29108 - DNA, 1196 bp, Mus musculus
tatgttcatgggcatctctttctttaggttagggaagttttcttctataattttgttgatatttactggccatttaagttgggactctttgctctcttctatacctattatccttatgtttcgtcttctcattgtgtcttgaatttcctgtatgttttgggttaggagctttttgctttttgcattttctttgactgttgtgtcaatgttttctatggtatcttctgtacctgagattctctcttctatctcttgtattctgttggtgatgcttttatctatgactcctgatctctttcctaggttttctaactccagggttgtctccctttgtgatttctttattgtttctatttccatttttatatcttggatggttttgttcatttccctcacctgtttgattgtttttttcctgtaattcaagggatttttttgtgtttcctctttaagaacatctagctgttttacctgtgttctcctgtatttctttaaggtcgagttatttatgtccttcttaaagtcctctatcatcatcatgagaagtgattttttttttaaatctgaatcttgcttttccagtgtgatggtgtatccaggacttgctatggtgggagaattgggttctgatgatgccaagtaaccttggtttctgtcgcttgtgttcttacgcttgcctctcgccatctaattatctctagtgctacctgccctcactatatctgactggagcctgtccttccagtgatcctggttgtgtcagaactcctcagagttcagctgtctctgtgatcctgtgattctgggatcctgtgattctgggatcctgtgatcctgagatcctgggtgtgtcagagctcctgagagtcaagctgtctctgggaccctgagatcctggtgtgaccaagctcctgagatcctggaattctgtgatcctgtggtcctgggcgtgttagagtgcctgggagtggagctttctctgggtgttgtgggactggctttagagttcgagcccaaggtctgctcagggcactggcccagactggaaggaacctgtgccactggttaggtggagttcttgggtgcccaggtcctgctggtcccggttacttctggtgttggggcagatattgtgtcctcctcagctctgaccctatgatcccgggtgtgttagagcgccttttggcattgcttta

SEQ ID NO: 29109 - DNA, 1191 bp, Mus musculus
agacttagcaaagagtacagtttactgtatgtcaattatgttagttgattgaatattaacataaaaaattaacctctaatggtctgtgtggtagaattagaaaaggtggatgctcagcagacatcaccggacactcctaccatttcttatactggtaatgagtagatacttgatacgtcacaggaaagtaacttttttccttcattgtattttctcatgcttcatttgtgtaaaacctttcttaaatgttagggaataagcaaggctggttgtccctgccccaagtgtatagccagtttgaatccaaatgcttgtttttttcaagttctacctccctagcattcctattgacatgcagtttatccgtagtctgcctaattcccttgccttgttctcctcagtcctacacacctccaagtaatgagttcaagatcagcatgaaattggaagcacaggatcccaggaacaccacatccacctgtattgccacggtcgttggattgacaggtgcccgacttcgtctgcgccttgatggcagtgacaacaagaatgacttctggagactggttgactcctctgaaatccagccaattggaaactgtgagaagaatggcgggatgctgcagccccctctaggtgagtatctagagccctgctctccctggccaattggctagcttccaaaaagtatacatcgtattatggaaaagtctggaacacatccctactcttttctttttttttttttttttcatagagtagttcccctgaaaggccacctaaaataaagtgacttatctttaccttagtgcagggttatagtcctcacacaccctggttaacttaacaagagaccatgctcttcccatttgtgccagtgctcatgggtcctgagagaacagaaggggattgctccatctaacctacctcaaaaacatagaggtgagagacagacagatagacagacagacagagggagcataaagctcttatcaaatccaaaaaaagatgagagagaaaattcacctggaagaaaggatacctggtcctctcccccagttcttctctcccagttcttacttggccattggaattttctcattaaggattcatctattcttttagttaaactaatagttacacttctcctttagatcatagtcattctttttgttttcttggtacctgaga

SEQ ID NO: 29110 - DNA, 1099 bp, Mus musculus
cttaaactacctgctctaaattgctttttttttttttttaaacatcagaacctataagaacagtccttcagttagaatgttgtattggataggctggagttggaacagacaaagacaacgtgttaaatattctcagccattgtcatttgggagccctgggctctgtttccctaatgaaaggcctgactggaaatctgaaagaggaggtgcatgagagggagctgcacaaagagaagaaacttagaacactgcccctcatgaactgggaaagtacagcggctgctgggggcatgcccgcagtgggcctctagtcatgaagaagagtaggggtaccctttctagctgtgactgtgtcccatcaaccccatgtcagacaggctgcaccaactctgagcctctctgcccaccaagctgttcttcatgggaggtttcagcatgttgtctacttgcatcctgccttctgtttacttcttactagtagttttaactgtgcccagacaagccaggcctttgtctagacttctgactcctcctctctgtagcttgtcttctctgcctgcctgttcctctgctctgatacctcattggcacctatatttttctggttatttaccggccctctgcagagccccattagtatctgtagctttttttgtttgtttttcctttaaacctgttttgttgccattcccccacatttcctggagccctttccccttcctgccttgccaccaccttgccctacgacatctgtggacttggctcagctgaccatgtacttacaatgtaacagagaaccatcaaaagttcatatcctgttaagtttccttacctgaactgagatttactgttctcactgctctattttagaaactttcaaacctatagaaaaattacaacaaaagtaaaacgcatcttcacgaagagtcacttttaactttttgtagcatttgctctgttgcactgttcacacatatactggtatctatatatttaatacatatctatgtacatgacttttgtttatttaacacacaagaattaactgcaagtgaaattttatcttgattgtttgttttggtttttcaagacaggattt

SEQ ID NO: 29111 - DNA, 1194 bp, Mus musculus
ctgtctgatattgtccatagaggtgcataattgtcatgggattcccttctcaaaggctttcagatgttcacaaaccccttggaaggcttcctgtgtgtggataaacgtctcagggtttcccacagtgtagtaagaagcagtctgctaagtgtcagagtcaagttcttaccctgatctgagtccctgtgcctgagctcccctggcttcttggaatgtttctgtggaacaaggtcagtacagataaaggactaggggcatcgaaggaacaggttctctgcagacaggcttctaatcagctgtcatggagtatttctgagatgtcctgctgatcagcatctgcttctaaagaaccctcctgtcgggatttactggctcagtaattaaaagcacgtgctctgaaatagtgaggatttgagtttgaatccctactgcccacgttaaaaagtaattgtggctatatgtgctagtaactccaacattgggggtcaaggacaagcagatcttgggatctcactagccagctagcctagttcaaaaaacagtgaacttcaggctcagtgacaaatcctgtctcaagagaatgaagcagaaaatgctagaggaagacactcaggatcctctggcctcgacgtgtgtgtgcatgggcacacacatccagaagcctcctctgagcatttgcatccttcccacagcccttatcctcattgtagcatcttaggactaaagaattatcttccgcctaaagtaactctattccttttcagttgtccttatccagaaaaggaagaactactactatctcaggccaaaaggaacagtctagaaagagagtccagggaggaatccaagtcctgagctcctgagccagaaacaggagtgatacacaggtgtcctgagtccttgtagggctttatgtcttgctgcctcttgttccactcaggaaggtacctggagccagcattctgccagtccctccaagctagtccctactttaactctggttttattattttccaggtgaaacctttgtcctggggaatagcctggcccggtccttggagacacactcagacctgatggattctgccttgaagcctgccaaccttgtcagcacatcccaaaaccttcggactcctggctatcggcccttgcttccctcctgtggcctcccattaagcactgtctctgctgtgc

SEQ ID NO: 29112 - DNA, 1323 bp, Mus musculus
aggcaccttagtagggctctgggtgacctcaggactctaggaggctggaaagccaccactgctacccttcctgccctgatgtgtccttccatgaaggactgaggagggaacagtgggcccggggctggtgctgctcttccccttagcctgctgtggctcccaggcccttctatttatttctcaaggctagccagcctctctccacaagtttagacgagcacctttcaagagatgaggaagacgccagccctaggaccttgaaaggccctggtacccaggccccttgccacctcctgggcttggcatagtgtcccaaggcccccagctcatgccttctcactggatccccagactctgaacttatggtgcagaccttttttaaagagatcctttcttattgctaatttattgcttctggcgtttggacttaatgcttctcttgcaccaaacagttttttggaagagggagaccatcctctggtccagagagggcctctccagagaagtgtggcctatttcagaagacactgccctagggcacttcttctctggaatggacaaagtatttggctcactgagcaaaaggtgagggtctctcttcctacactgggtcctttgtagccccagtcttcatctctgatggagtttcccctctccctgcccccacagctccctgccctggtcagaattgctgcaaaagatggggcctaatgcaattaggtcacggggccccaatggtgggaggaggacctcaaggctggaggagttctgccctctgctagctcctgtgctttcctcctaagcaagtcagcagcactgctgcccccactgccatctgaactattttgtgtccgtttgtttataaataaaaaccaatacaaatgcccgtgtctttttaaccagttgatatccaaatcactcaacaagcaggttaccccttcacttcatcttggttctttcacatgtaaaacaaggagcctgagccggatcatccctaggaactcttgcctcacagtcccaaagaacaggctactgtccaagtgcccacagcactcagcatcgtgcaggccccaggctttctcccagttgcttcactgtcaggttgacaatcatttgtactatagttccatcaagccaagaagcaatccaagagatagcaactccagagcctcagtaggctgctttccctcctcctcgtggggtgagaagaggcaatacagacagccttcatggtacccactgtactgagcaaggatcatgcagcctattggcttacagtgggagcaggtttacaggaggtgaagaaggctgactggagccagt

SEQ ID NO: 29113 - DNA, 1351 bp, Mus musculus
aagttggagactgacagggagatgtctgtccacctctgtcttccatgtattgtgtaagcacacacatagaagcacttacatttctccacttgtcagtcattgggagttgcctgtccctcagcagccttgaaacaggctggtgctgtcaacagaaagcttgtatctggctgagacagaggctgctgcaaggccttgaaggtctgtggattgcaaacataggctcctgccattctcctgcaggaacaggccttgttccctgtgtgctggcagctaagttctgacactttaataaacatcatataattctagctttttgtttttctttacaggatgagtcttcaacttcagctttgacagtttacaactatgattttacatcctgcttttgacacttcttttaaattatgtttttattaagattattttattatgggggaaaagcatttggaaaactttgtcacttgcatgtcccgtcatttatacttgatcctgcaacacatgtatttgtgcgacaataatacctttgcagtttttgtgcttctgtgatgggaaacaggactctggatggaacctgatggtggctgctggctgtggttaagggccatcaaccaccttgttttccagccactcgagtcactgtcattggagtgaattgctgttgtctccctggggtgccaggactcccggtgctgggctgctaactgggtgttgctgacatctcagtgctgctgagttacaggggactaggtgccagctgtggttgccctcgccatccagagggttgtttggttctttggtacatcaaactctgtctgtataaagtatcatataaaaaccccgggtctctggctacactttctattcctggggctgagaaaactccttgcatcaaggggtcaagaaacacggaattttagggtaaccggttctaaagccctctcttgtgtgtgcaccgttggcttgaaggtattttttttcttccagaatggtgttattgcatttgaaatgcaatttgaagttattttcttaatgtgatatggcaatgggcatgaccatgtgcctacagtatggtggttagcttgatgcatatctaacttaataaataatgcagaaccattggtgtgctttctcttgtcactggctggggtgcttttccatgggcactgagcttcaatgccagggcttctcctgggccagcctcagtgagcagtctgagtatcaaactaagatgcaagccttagtagcaactaggatttctcagcaagtcagtttggttgtcatgacatgtgttccaagggattaaaagccagttggtgctgtgtgacgtagcaggaagagaagagaggagcca

SEQ ID NO: 29114 - DNA, 1244 bp, Mus musculus
tttttcatgtactgtatgtctcctaacgggagagttgccaaattccattttaaaatggtccaatgtggtagatttcaaatttgactgcacattgcaataagtggggagcctctgccttcagagaccatgatctgattggttgtgggtacataggcttaggattcttacaaaccccctcagaggttcttctgtacagatgagtttgagaaccactgatctgtttgtggattcaggaacaggtcctctgtgggtatactttcatttttgtattatgagatagcctaagtctagactcctgggtgcaggaattacaggcatgtaccatcccatctggctctcttataaggatttttgcattcatattcataatggcctagccactaattattttctattcttgaatcagtttcagaagtttatctttttctagaaaattaccttttttgttccaaattaaagtgtcactccacccccaaggtcatatagatataaccaaagttacttgctttatttaagcacctattaaatcactttttttttttttttaaatgacaggtgatctgtgttcatgatgtttcatccatctaccgggtacccttgttgttagaagagcaaggggttgtagactactttcttcggagacttgaccttcctattgagagacagtcacgaaagatgctgatgaaatggaaagagatggcagacaggtttgcctcctcacatgcaattgggcgcacatgaattcatcttttgcaggggttccaccatgctgtaataataaattagcactcctaatagaaaaggtgcttggtaggaggagaggtcagaaagctaacaaggattttatgtcagcatgtggtcacagcacagaggaggaggcctggccaggcggggcctcttcccaggcctcaaggcagagagttcagattaaaatattatctctcagcagctcaacagcaccactagcagcccaggggcagagggatacacatattcccagagcccctatgaatgctggcattagctgcagtgctcctgttgtgtttctgttatctaagcggagtttaggaacattccattcactctatagaaaagggctcaacaggtgtgggctgctgccaccttaccctaaagctctgagattgtgtcatggtgtagagcagggtgaacctaactgtagttgggacatcactgtggtggtggtgtttgtttagggtttttttttttacacacacactcccccc

SEQ ID NO: 29115 - DNA, 1668 bp, Mus musculus
gggttctggtagactgtttgctcctggaaaaccactcaggtgtgatgtacccactgcagcctcagctaggagcagtagggatggtcacatggtcttgtgtccatgtgtggccagaaaagtagactgcataggtaggtgttctgaggtccttagggagccactcttattttattttttaaaaggctgtattgaagacaggcttattgggaagctgctctcaggtgaattcactagtcccaaggactgaggccaaggaagtcaccatgggggtctggggtggggggagaagcagcagagagaagagagtagggagccactcttggcttcatttcaccgacttccagcaacagtctggaaaggaggcctagggaagtgtgagcccaaacatttattgagtcatttaaaggtacttcaaaatgattatatgattatatttcttgtttagtcaaaaaggtaccccattatttgttcatccaggcagaaaagtacatcagtttgttttatcagtgaatgtatccagcaagtgcaagtcacaggtttcttttctctttctcagttgtccctcacatcactgatgcaatccaagagtgggtgatgagacaggcattaatacccgtagacgaagatggcttagaacctcaagtgtgtgttattgaggtttgtatgattcttttttttttttaaataatgttagtttttacattgttcttttttttaagatttatttatttattatatgtaagtatatgtagctgtcttcagacactccagaagagggcatcagattacattatggatgattgtgagccaccatgtggttgctgggatttgaactccggacctttggaagagcagtcagtgctcttaaccactgagccatctcgccagcccccttttttggtttttcgagacagggtttctctgtgtagccctggctgtcctggaactcactctgtagaccaggctggcctcgaactcagaaatctttctgcctctgcctctgcctcccaagtgctgggattaaaggcgtgcgccaccactgcccggcttgtatgattcttgtctctgtgaactagttcagtcattcctctccttaaccaccagtaggactatgcccaatgaaatcccacccttccattcctgtccatgcagtgtgcagcagcaggtggaatggagctcaggggaagcaatgctgtccccacgggtgctcccttctgtgtgtgctggatgatctaacacttgtgactcgtagtggcaggatacatttctgtccctcccttgatgttggcagccctttgcttgcctctggcagaatttatttaccctgttactgtcctttgctttgtttctgttctactgtcccttcattccaggactggagttcacaagtcccagcagttttgttataactggtagtttttaagtaatttatacttaaggagatacatataggtttcactctgtctgtctatcctttgtggctctcaagtgaattaaaggtacctaagaattacagtttagttcctggtacaggtttttttgggggggtggggtgggtgttcaagacagggtttctatgtagccttgactgtcctagaactagccctgtagaccacactggcttctaactaacagaattctgtctgcctcagcctctcaagtgctagg

SEQ ID NO: 29116 - DNA, 1204 bp, Mus musculus
acccgctgtacactaactccccaagtcccaatcgtctgtgaaaatccccatgacttgttagaagtgggctcgtttgcctctctacatttagtgccggatggaagtaggctcgcgacagttgttctaatgcaggcaccgtcagggtgcgttgtgtggaaaggcagctggctaggacgtgaagccaagcggcccggcctaagagggagacaagcaggcaccgggagaaggcggcggtgcggggcgagagcacgagatgatttggcccgcagcctgagggaaggcggatgggaggtgagagtgtccaccggctattgcgggaccaggcaaaggccctcagggttccggttagatgcgagtcaccagcatcctctagacctcgggcgaggaagcccacagaacccacaactcccgagacccacccgcagtagccactcaacaagctgcggcgagacgtcccgcgcatgcgcgccctagccccaccctcccctgggcccgcctctccccgccctctgcgtgcgcaccgcctagagcccgcctctcagaaagacggctggcgcatgcggcccggccgagcactggctgcccgaggctcaccacgcgcgcgccggccttgctgtggctgacacgagactccgaagccggcctcaggtaggcagacttcagggatcccggtggaacggctcccgggtgcaagagcctgtggcgccgacagagcccggcgcggacggccacgccgccggggcgataaacgtctcttctcaccaatcaggggagagctggcccggcgttctgcccaatgggctgcatctctaacgggagtggggcgggcagtcccggaacgcgagctgccggctcccgcgcgcgggccgcgtggcccggctaaggaaaggggccgagtccggcgacgcgggcagccgggcttggtgaggtagagagcgcggtgtgccgccgcggaggggtctcccagagccccagcctgtgatggggcccgactggcggccttgagctcctcccggcgctgcccggcgcgcgggaggaaggggcttgtaggttcgctgggcctcacggcccaggctacccagctgctgtctctctttccagcccagcgcgaagatgctggcgttcttgaggccactacgtcagcgtggctgccttacgtccacactcattattttaaatcctcagcagccgggtgacgcgggtg

SEQ ID NO: 29117 - DNA, 1194 bp, Mus musculus
ccctaaacctaccagacagtggcccaccaccaggaaccacaagcatggtccttttatttctccagcagaatgccgcacacaccgatgcacacgatgccacacacttgaaggcgtgagcacaaagccactggatctttcctgggcaggagaggagggtttagagcatccacgtgtctccccaggccccacctcagagtttgacttgctcccctcctcacaaaaggtccaatagtcctctggttgccctaaggactatgttggtgtccccatagtgtaactcaggcctaggccttggggccttgcacacctggagagaatccaggcacatcctcttcctagtctcagcgaggacacgtgtatccagtgctatagcaactgcacctggctctcaccggcaccggtctctgccccactttctcacttcaattggcagcgctgcatattggcacaaacacccaaacactgcgggccccatcctcagttttagagccctacccctttgctcctttcctgctaagctaatgcaggtggcaagagagtgaggggtggggttccaacgacaatactccgggggagacttgggaacaaggggctgaggccgaactgtctgcatctcatactgggacctgcatgtaccagtgccagggcttgggttgaatcctgctcagccctatggtgcccaatctctgtcctaccatctgcatgtaccatcaggccctggatggagcccatcctggctcacttcacttgcattgtattgccccctggtgagccactccaccccctcagagatggagctgtacagagggtctggagactaagattatcctgtgaccaaaggagacatgggaagaggccctccctccttccacgattgaggttcccccaccaacccggttctcagatatgcaagtacctcactttgttaacttattaacttattggtttcattaaagttttcagtaggaagtgattggtcttggttgtgctcggtgcctgaaggctgaggctcctggtttgatggtgaaagtgaaatttgggtttattgtaaaccataaaagcccagctccatatgactcaaggaaaaagaagaggcacgttgtcccagataattaaagcatctaagggatagatttggcttcacctacaggtaaatatagttgatcaaacacatgctaactccttgtctgctcc

SEQ ID NO: 29118 - DNA, 1184 bp, Mus musculus
attgcctcctgcaggctaagatactggtgcactactttccacgcctggggactgagattctacaacagaaagatgcaatattttttattttcttttttccatttttgtctccaaggaatcaatatttcaatattttgagctatgtgtccaatgctatgaaacgagaatattaaataacatatttatggccttttcttgaaacgtgtggttgaagaaataattctcttgtgtgtttcctggcttgggcactctccaccactgctaaggggcggcctgtgctcttccttcctaagggtgtacaggatttccactctgccagttctgccctcagaaaaaaagaaaggggcagaccctttccaccagcattcttctctgccccttccccagaaccttccgaatccagaagatgtggaaacatttcctgcctgtgggccatgaactcattctccacagagagctggtctcctccccgtcccttctctccagacccaggagaaccaggactttgagaaccaggactttgtgcactgctctggccactgttttattttttaaatacattaaagattgtgctcatctccgttgctgcatggactccagactgcatgaaatgcaataaatcttgttttcggtacttgagaatctgtgtctgggacattcatgggggctactcacttgggaaaagcttggaaaggttgatttgtttcaaggttggatgtcaggaaaggtggaccacttgtcaggagctagtgtacaaagccaaaggaactttcagactgagattcttgactggtttacaaatgaatttcatcagaacatgtcgcttgctcagaaaagccttgcctcacccagacgagctacttgtatggcattgtggggacatctttgcaggagaacacgggcttctctagcaaacaaagaacccaggaaatctctgcagccttcgttgtcataatggctcttgccactgtctgctgtagttctcatcaccaaaggcttggatctgccatagagggcagcccgtgccccttgccattcatcatgttagggcttctatagccagagcctgcttcctgtccattgaagcaggagcagcagaaaagagccagcagtgagcaatctctctggcctccttgtctttttccaaccatagttgggcctgctgtcactgtgtgatagtgcaa

SEQ ID NO: 29119 - DNA, 1136 bp, Mus musculus
ctagtccttccaacctgtatggagcagctgttctctccaccagcctgtttctgattcttcacgaagtgccagattgatctctggaaagcatggtgcttgaatcgtgttagatttcattcctatgggattaagagacatgcttcttagctctacagtcagggcccctcattgactgcttgtaagcactctttccagccccctcttccctgttgtgtttaccttctcttctgctatgctctgcttttgagccaatgaacatgcctgttccatggaccttcccagtggtccccactcttttcctgtcttcccattcccacccatcttctgctctgctccatacttcttcctgatgctctctctggttctccccatcctacagtgttctttctttttacggagcacccagagttttcccttggcatctctggtccatgagtcctgagaccatggtccacaggccagtagcaagctggtgaaaactacacaattccaggctccatctgtgagccctagagtcagaattgcatttcagcacgatccctaggtgatttgtgtcggcgtctgagcctgagaagcactggtttgtatgttcattaagtatactgtttgtattgatgcatggcccatcgccagaatatgggaggataatctctgatgccaagtttagcaccatcaggtgatggctgccatgttggctaggttccacagtctatggtggaggagtggatagtggagaaggccaagaagaccgtgtagccttcccacctggaatctctacctgcccaggcctgagctccagctctgtaactgtgcagaaagtactctggcaacccaaggaggagtcgattaatcaatagaaagcagtcctcaagcatggaacagaacttgtccctgtctcagaacacacatgggtgggaatgtctgttattctagcacatgggtggaaatgtctgttattttagcatatgttttggaaaggaaaatatttattgttttttcccctttattatagcattaatgtggtttctaaagtagtagctttagaaaacacaatatgtcacatgaagaaaataaaactgactcatggatcctctctccatcagcgttcatttagtactcttggttgccattcattc

SEQ ID NO: 29120 - DNA, 1151 bp, Mus musculus
tctcctggactgggtgggccagtctgcgtggaggagaagtgggtcagctggtagccatggtgacagcagctgctccctgccagcttcccatctctttaccacaaacctcaccgatgagcttctttgtccggtctagcagagatggggccaggagaatggggttgggggttgcagtgtgtatgagtgtgtatgtgttcaagctcatgcaagagcctgcttcaagctggtgtatgagcctcagcctagggagccagcctcgggataacacacgtctcgctttcctgccaatggaagcaaggggctttgctgttgctcctctgactgggcagggccaaggggaggagacactacatgtgactgtatgaggtgtgtacacagactctgaatagctgtgtggccgcttctgtgtgtctttgtgtgggtgagcgtcttggttggggcatgtgcatatccatgaacacatgtgtctctaaaacgtggatagtgggtttgtatgatgctatcatgtttgaaactctctctcactctctctctctctctctctcttatgctatcatgtttgaaactctctctctctctctctctctctctctctctctctctctctgtgtgtgtgtgtgtgtgtgtgtgtgtgtgtgtgtgttgggagtgttgttgtctggaaagacagaggtctccacactaggagattaggtgaggtttattccccaccccaccctggcagcctgtgcctcttggactagcctgcctcgcccaccacacaccaacccctgtcatcttcccaccgctccctaagtagaggaaggaggggctagagttaggtcctctaccatggtgagaggcagggttcttaggcaccagctccagcatctagcacagactctagatagatgctgacatagctacccaccatcacaactgagaggtgcatatgtcccccacacacctagagtggtgtttgggggtgatcttattagcccctggacttccctctgaacacgctgcacgggggtgggggtggggttaggaaccaactctggaaaagtgtttaccatgttccaggcaccgtcgttctcagcaagcaggtaactgcccagctggaaggcgcacacgtaccaatcttgttttgtaaccttttatctaccgctcct

SEQ ID NO: 29121 - DNA, 2544 bp, Mus musculus
aggccaggcacactagaggatgtactgggacctctcttcccctggggtgttccaacatgccagaggagctcccagtggacccaggaggctgcctgttgaagtagctggccttttcaggcatcaaggtggccctgtccccctttggggttattcctgagggagcatggcttggtaagaggtgccatgggtagggctacttgctggaggaaggagggctaaggttaatttgttttgagccactgtctggaaacctgtctgacctggggttagctgcacgaagctattctttcagggttctactttctttgctcatctgtagacaccagaccccatctggagttctgacacaccagagctccagcctcctagctctgtgggcagcctggctctgcattcaagggtgcctcagtcaccagctctgtaccagcaatactcacccctccacctccctgactttcttgagtgggcccctgctctaggcatcccagctgcctctaccttactacccccttcccttgtctggctagggctcctcccaaccactgagaacactgttggagggactagtgcctgggccagatcccaagatggctgatgtgaatactgaaggctggctctggactgctgcatctgttctcccctccttagctatagggtggggttggaggctgcctgggagatggcaaagtagccctggtttatgtcgagtaggaggaaggacacaggtgatgggtgggagatggggaagactctctttctgcctctctcctagcccatgcctctagcataagtgcctaggcagggagagctatggggataactgtgaagcagcgttggcctgtgtgtggatctcatttgtaccaaagctggggtacacaaagctgtctcagcccaaagggcctccctgtagtcagagtcctgcactcagtgtcaaagaagggctgtgaagaagcccccatgcaaactggggtgaggaggaggaagagaaggaacagaccggggctgtgtccctgcaggcaggagagggaggcgggggccagttctcttgccagcctttctggctagggagtatatatgtatctcccatatcactagatatggggcaaagtgctcttggtctccaagccttaatggtttgggggcaaggagaaaactagcttgtggaaggctgttttcgtcttgcttgaggtgtgcgcacctttaaagcagttaccggctggatggtgtgaaagccatctggagtggaggagtgtcagtgacccactgacaacagagagctttgcagatgtggcgtcgagtcactcccagaagtgggagctgccagcagagagtgtcccttgcctcttaggagggtcagcacaggggatactctagccagaggagggacttgatgtgctgggaactcgtgctgacctgcctacagtcagaggctgtaaactacctaagagatgggcacttggcggccccacctccatggaagatagcccccctccccaattgattttggggaattcacgcttcttaacactgagtaaccccttctagatgctcgctcccacgtgtgggttgtgtaaggctagtgtgtacatgtgatgaggaggctgggtttaacgctctgtttctcagcacactggattgggggctacactgggtgggatgccattccagaagcaggtgtgcccaagtgtgactcctgcctgggctgggagccatctgccctttgaggaaaggacaatggatcaagaattagccgggtgcttgtgagttcacctatcaacaggccacctcacataacctcttgctccaggggtcagtggttgcaggagtgggatttggtcatcccatctcctctaggcaggccagactcgtcggtgatgggctgggacaggagcagccctgcagcgatgctgggctgtgggcaggggcagtgataaatgactcagagcatatgtctctgtatttctgccctgctcagcctgtcccactttttaacagattcctttcctacaaggaaagcagagatgggactctgtgatatgaagcggtctctaggaaatgggccaagtcttggtttgacagggacatttgatcctttggggaggaaccggctccagaggcgctctcatcttgcctctcagctcaccagactctgaacatcacctcttcagcaggttccgggcagtgccagcacactatggggtggaggcagagctgcaggaagctccagagaggaaggggtggtagtgcctggatggttctgctcttggggactcggtgcctggagcactggggtcaagctaactctcccaggggctcagcccctgaccagggaagcatgccagctcttccttaactgccagcctgggagagaccagcagcctccgtttttgtttttgtttttgttttaaagacaactgagccctcccagggcatttctttgaaaatgaaatgtagcacaatcctcaactgtgttcccaggagccctgacatacccagggctcctgatacctcacattctccatcgcccttggcctaggaggcagt

SEQ ID NO: 29122 - DNA, 1223 bp, Mus musculus
ctccaggctttgtaagtctatggcttggagttgctgaggtggctaggggcctgtttcatcccccttggttctcactctgggagcctgtcctcatttggtccatgcccagatgctgctcctgaaaagcccaggtgtagcttcacctctgtgtggtttgccctcctcctcccactctctctggtcttggtgagaaataaccaagggtcttctacggtggacagttccctaggtgctgtaatgtcaccacctaggctgaatcctgagtagatctatgtccctgccagcagtcaggctgggccacctgtcattctgcttctagatgacaggccaggaagagtggacactcagagccctttcaaaggaattctctctgatgggatgagagagagaacgtccttccaagtatttggctttttaaaaccacttcttcccaaatttcttctccaaaactttctcttggaaggcaatttggctgcttcctcagggaaagcagacctgagacttcttagcaactcctgtagcaatgagaactcacagaaggcaggaaccccttttttagaatttccaattgcatcctgcaaagagagagcgcgcgagagaaagtgagagctgttagggactgacaagcacactgtttagataaaagcaattagccttttctatttgagctctctgcagcatcttcccaaaccgtggctcctgggtggcaggtggacagctgggagggaataccggctgcctcatgtgatgtccttgccaatccccctgaggagaaaattcttcacatggcttctgcatgtacagtatttgggcaaaaaacaaaaaataaagtccatttgaaattggttttatgtatggctttctgaggatgttcttcattccaagagagaagagttctgagtatttaaaaagggaagagggatgttggctgggttgcttgagaggtaggaaagaggtacagctcagaaaaaggtatgaagatgatgccggcctcctccccttcctggggtgcttagttgcctcagcaacattcctgagccatgattgaatcagactggcctgttggcttcccaggtggtaccctcagagacccttgctttgtgtctctacagactctacaagacacacccaaatagagaggacaggagagacgaggcaaaggctgactccagccacaccttataaagacagtcaccagtagccaagcttgcagtaagcaggga

SEQ ID NO: 29123 - DNA, 1228 bp, Mus musculus
ctgaactccctgggaaggatgacaaaccagtaagcttgcagaactggaaagggggattggatgtcttgtcacccatggagagattccacctgaaatatttatatgtcactgacctgtgcactcagaactggtgtgagttgcagatggtgtacgggaaggagcttcctggttcgttgacacctgagaaagcagctgttttggacactggtgctagcatccacctagcaaaagaactagaacttcatgaccttgtgacagtccccatcgccacaaaagaagatgcttgggcagttaagtttctgaacatactagcaatgattcctgccctacagtcggaagggcgcgtcagagagtttccagtgtttggggaggtggagggaatatttcttgttggagtcattgatgagttgcactacacatccaagggggaactagagctggctgaactcaagacacgaaggcgccccgtgctccccctgccagctcagaaaaagaaagactattttcaagttagcctatacaaatatatctttgatgccatggtacaagggaaagtgactcctgctagcctaatccaccacactaaattgtgtctagacaagccactgggaccttctgtgctgaggcatgccagacaaggaggcgtgtctgtaaaatctttgggtgaccttatggaactggttttcttgtctcttacactgtctgatctcccagctattgataccctaaaacttgagtatatccatcaagagactgccactatactgggcacagagattgtagcctttgaagagaaggaagtgaaaagcaaggtgcagcattacgtggcctactggatgggccaccgagatcctcaaggcgttgatgtggaggaggcatggaagtgccggacctgtgactatgtggacatctgcgagtggaggaggggcagtggagtgctcagctcatcgtgggagcccaaagccaagaagtttaaatgaatgaaggtacactttcagaaatgttgatcgtttctgttcttaatatacccatgtaagaggaccagtctctcagcttggctctcgtggacagtgttttttatgtttacaatcttgaataacattccatcccagggccaaagatcaagaatgtggagagatgtggtgttagagtgaccttggagctttcaggtaaactgcaaagaagacagatatacatcagtgcagcaaaggtatccctcactaatcac

SEQ ID NO: 29124 - DNA, 1412 bp, Mus musculus
atgttgtttggcattctgcctaacccagtctcccttcccagagtcatggacctctctgttgctttatgttggtcatgtccctgactgtccagatttcctcccaccccaccccaccctctcccagcaccagcaccttagaaactattggcagaagagggcacatgagctgcgggagagtgtatacactgatcagtacctcccttgaggctgagcttcctcgcagacccacagaaaggtctataaaggacaagtgcttggcagaggggaaagtagaaagggtctttattggctataagctgtttctaagtgctgagagttttgcttgaagagggagcgagccatcaagttcccagcttttcaggaatgaaagaagttcagcagtcagataatccttgtgtcttgggtcagtttggccctggccctagagtgaggcaagcccttcctatgaagatgagcaaaaatattattccacttcactctgagtgctttcaggatctggggcttcaagactcactgcttcagtcagccttcattagcaccaaagactccatgaaggtcgtcccccacacaaacataccccttgcgcaccttctgcctactttgagccggatctggcctgtgactagaagaccaacccctacgaggaaatgtggagctcaacgtgtgcactgcttgtatgcgtgtggatgtgtggatcccacctgccgcctccccatctgctctgggtgtatttttgttttttatagttctaggtttacaacagagaggagttaatttatcaacagcctaaaactgttgccaggtcatcttacagtttaaaacatgccatctcatcggtagtccctgctcttttccctctcccatctgccagtctctctgtgccctcgtgtctgagtgctgtttgcccaccttttccaggtgtaagaggcagagagcctggacagctttctctctcagccattgttcaccccacttgaaaattcaaacaagaaaactttgcttcaaagatctcatgtgtgggaaccacagcgcctggttgcctttctcctgtgtatgtgtaaattccttaataaatattgcagggaaagaccctttttgctcggctgtcactgtgttactcttggaagacagtgagacatacacaggatttctgctttccaagagcagctgctgccttcacctttgcatcttaaagaattctgtttttagtaccaagggcaggccagtccagaacacagaaagacctttcttcagtgacagtgggagccatgagctgaggggcctggagctctgcactgtaagggtcatagaacattaggatctggagtgctttccctatagatggaaaagctgagacccagagaaagaacacagttaccaagcatacacccttccttggcagagacaatagt

SEQ ID NO: 29125 - DNA, 1200 bp, Mus musculus
cagctttgtactgtgcaggagatagggacactctgcccattttaaaggagcatcgtgagaggtgggatcagaaaaggcataagtgagttgggcctcgcagctgtctccaccgtcatttgtttgtttgtttgtttgtttttgatagggcccccaaggcatcaggggctacccgggcatggcaggacccaagggagagatggtgagtctgtgggggctgtgaaggagttgctgtggcttctgggatctgaagtccatctaggactgatctgcaatctttcctcttccccagggtcctcgtggctataaaggcatggtgggctccatcggggctgctgggccaccggtaagcctgcttctgtctctaggccctacagtggaggtctatggcttcaaactgggtgctggtcttcatgggctcatgtgacttaggttcttgtcttcacaccagggtgaagaaggcccaagagggccaccaggccgagccggtgagaagggggatgtggtaagttctcaggcaccccttatctgaacagaccccctgaagagtactggaaagggattgtctccatccaaggctggtgtgtgtgtgtgtgtgtgtgtgtgtgtgtgtgtgtacacattggcatttatatatgtgcttgtcagtctggatgggggtgacttctgggtatgggggtgttctcatggtctgtggtgaaaacccagtcattttgcttatgttcagacttcacaagaagtcttaggatccaatcttgtagccactggggtcagacaatgaaagtctagcaaactaactatggaactaatggaatttggtctggatccaaagacatctctaacagttgcttaactctctctctctctctctctccccttcctcccctcctttctctctctatctctttctttctctctcttctttctttctttctttctttctttctttctttctttctttctttctttctttctttctttctctctttctttctctctctctctccccctttctcccctcctttcttcctttctctccttccttccttccttccttccttccttccttccttccttccttccttctctctctctctctctctttcttttttttcccatagcccctttttctgagcagggtctttgtttatttgttttgagacagggtctctttatgtagttccagttgtcctgaaactccct

SEQ ID NO: 29126 - DNA, 1107 bp, Mus musculus
gatggggaccgaggatccccaggggctccaggagaggctgggagacctggccggccaggcccagtggggctaccaggtttctgtgagcctgccgcatgcctgggggcttcagcctatacctctgctcgcctcacagagcctgggtccatcaaggggccatgagcaaccagccaggacagagcctattagtgtctagggtcacttctgggtggacatgtactccagacccaggaggctagatttctcaggatcttctggaaacccaagatccaggggttctgaagacaagttcagtgagggaggggttgggggagggagagcacgggagtaaaggtgaggccaacagagccaagtattggagagccacccctcccaagggaagagggtagcttctcttcctggagtaccaactacccctcacccatgcctttcagcactgggccatcccaccctcggggcaggggggactgaggcttctggtggtccttaccctattcttattctctggacttatttttattgggtatcttttgggggagaataccttgaggtggcagttcttaggccagccctgctattgcctgtctcccatcccagtatttaaacatccatcttccctgttccccagtctcttttgcccacaccactctggcctttgtgtaaataaaagttcctcagttggttacaaagtgacttcttgtggatgaggatgggtctccactgcttgggcaaagtggctgagggccaaaggggagggcaagtctgggtcttccatctgggtacatctcaagttgtgagcactgggatccttagcctgctcgagaaacttctgtagtaagaacctcggagtcgaagcagggttttgattcactgtgtaactttgggcaaactacttatgccatctgtccagtggtgacaagggcttagccatgtcatatgtatagaagtatccatacccactgggttgcctgcactctttcccattctctccctctctctacttcctttatccctttcattccttttctgactcatgtagtcagggtctcatggttttagactggccctgaacttgctatatagctgaggatggccttgaacttctga

SEQ ID NO: 29127 - DNA, 1920 bp, Mus musculus
tttaaatacatttactatctcatttcaaaaatgattttaataatccatttcttaaaacactggataaaattttgaggcttaatatttttaaagcatagttttatctagtatcttatttatcatcaatttgtaaaatggtttaaggaaatgcacaacttgttttatttctgcactatgtggaatctgcatagagggttttaggtcataagttcaaaggtggaagcatcacctccaagcactttttgcaaagcagaaacagagtggtcccaaaccactgcgctgtacctacatggaatttgtttttacctacgtgttgttataatttagcccagccaatcagtgttttaaataaggaagaaaagtaaaaattagtaaggctaatgctactgaaatgagttgttaggcatgctatactgtcatagttacaaagcattctgttctctttcttgccacaccaatcaggaattccctccctccttcctctctcctttccttttttttccctaacataagatctcactctagtccttgctggccccaaattcattctttagcacaaggtggcctagaacctgtatcaggcctcctgcctcagtcttcctaatgttgggattgcagttgtgagctgccacatatcgcttaggaattgttaatagtgcttgaaattagaaaccttttaaatcattgactttgggtttgcttttaagaaggtcttaattttaaaccaggcttggtagcacttacatttaatctcagcaactgaggcagaggcagatggacctgtgagctaaggccaagcctggtcgacatagcaagttccaggccagtcaaactggggtcttaaaggtggtagagtaaaagtccatctcggtttttatttaccctcccttccatcgatcttattataagtaaactagccttttctcattcattttttcccagtaaataatagtatatcctttaactcagctgaaattgccatattgtatacatctcccaatgttaattatggcagaatataaaaaaaaagaggggataacatttgaaaagacataaaggtgaaatattcatgattctcttattacaggaaaatatagttttctatcttttttcaaggacagaagtctctacttttatttttgtaattttttattcacaaatcataagtagaccagattccattttttaaaaattataattcttggtaggcaggcagatgttgacttgcagagaaagcgccataaaagatttccagtgggaaaaggtatgtgcttgactgcttcaaatgtctgtccacgtcctaagtgagagtcctgctgcgcctgccacgcccagtcactggtagcgagtgcctcctgggcattcagtccacagtgtaatcgactctacactatggcatctgcactctgctgacaagtgacaaggcatctgcgatgccttcacatggaccatagtagcgtcagctcacactcagcactgcattgtttatttcctacagctacgcagagcagcccacggtttctctccagcaccctttcctgtgacttcatgctcagataactgcctttccttccttctgtgcctttaaaaacatatttcagttctgcacaagtgagacattaaaaattgccaatgcagatttacgtcctggtgttgggtttgatgtgatttgtgcgtcatacatttcccagatgtgttgatcacctacagaaacagtgccgtctatggacctgtgaacgaacggccctgagtttggatggggtcagcaccagcaccagcaccactcatggctgcctcctgcctctccaacatgtgcatcaccagttcttgctgatgttccctcagaagcaacatttggaattattctttctccattgctgcaacctcaaattgtctggggcttgctttttattgttcggg

SEQ ID NO: 29128 - DNA, 1099 bp, Mus musculus
gacccacttaaccttagttatggtttctattgcagtgataaaatgccatgaccaaagcaacttgggaagttgtgtttctctcatatatatatctgcctgcaatggttctcagcctgtggatcttgacacctttgggggtcccatatcagatatcttgcacatcagatatttacattacaacttataacagtagcaaaattatagttatgaaatagcaacaaaataattttactgttggggatcaccacaacatgaggaagtaaatatattaaagggttgcaatattaagttgagaacctctaatgcataaaggaacattgcttattgccttgctcctcatggcttgcttagcctgctttcttgtacaatctaggaccacctgcccaggggtggcaacatccatagtgagctgggccctcccacatcaatcaagaaaatgcactacaggtttgcttagcatcctggtaacatacagtgttgtgccctcttttctagatgaattctttcctgtgttttttcttgtttgctgtattaattggtcgaagggaactttttgccgcctttggtttttatgacagccaacccactctgatcggactcttgatcatctttcagtttattttctcaccttacaatgaggtaatgtatgctttttaaaactaccatataatatagtttttgcctgtttcaaatctagactctttggggtagtgtaaaaaaataaataaagttctataatcttctagttcctcactgacagattggacagtataaaagtagccgggaaacctgagaggaagtaactgaagtaactgagtgctcataacactgtcaggagataaatgagagaggtggcgcctagcaaccaaaaccttgttgtgtacctcagagctgcaggagctggagtccagccatgtgatcaccagtgtaggtgtgagaaatctgtgtgtgagaggacaagacaaattataactgaataggtgacagctagcctggaaagagctgtgtgacagtgttcctctgactgttcacagcaactctaaagttccttccaggacccactaagccaaaagtgggtatttcactagtgagcttagaa

SEQ ID NO: 29129 - DNA, 1239 bp, Mus musculus
tgaactcagaaatccacctgcctctgcctcccaagtgctgggattaaaggcatgcgccaccactgcccagctcagcctggttttttttatacaatccaggaccatttgttgaagaatggtatttctcaatgtgagctgacccctcccttaccactcatcaatcaaaaaatgtcctcagattttcctacaggtcaacctgataaaaacattttcttggttgacgtttcttctacccagatgacccaccctagcttgatacaagttgaaaaacaaaacaaaacaaaacaaaacaaaacaaacaaaccaaaaaactagcggacatataatctcagtgctattgaaggtgaagtaggaggccatctgaaattcaaagccatcctaggatacataaaaattacaagaccgccgggtggtggtggcgcacgcctttaatcccagcactcgggaggcagaggcaggcggatttctgagttcgaggccagcctggtctacaaagtgagttccaggacagccaagactacacagagaaaccctgtctcgaaaaaccaaaaaaaaaaaaaaaaaaaaaagttacaagaccagacagggctacaggagacccaacctcagaacaacaaaaaggtggatattgttgcagaagaactttttacttttcagcttcatttcaatttaagtacccacataagtcctcttagatagtgtccatacagaaccttttcagtacttctctacaggggagcagttattttcttctgaatgagaaagcccaagttcattaaggttgagaggaatttgtaggtaagatttagaaagggcttttgttggggtgggcacagatgctcttgtagtcgcagagaagcagtactcatttgtttgtttgcttgattattatttaaagagttttttgtttgtttgtttttctctagtagcaggaataacccaattcaatggtccctttgtggagagaaaaaaaaatcgaaacaagcccaacttctagtacagaaataatcataatctggcataaagcattcagctgatgctgcctcagtttctttccagaggttattcattcattacatgactattcattatatggagaatgtcctcttccccagatcatctaattaatgcttaaataaatgcttaatttatttagactaattaaatagaattaaatagactaaaagaggaaatttcagaattttgaaagcttttttttttttttttttgagacaaggt

SEQ ID NO: 29130 - DNA, 1176 bp, Mus musculus
ataatttacaaatactggttcatgttacaaaagaaggagtgtggaaaaaccccattcttcttaaaattctgtcacaacagccagtagagacagaggaaggtaagtcttaacactctattggccatattgagttctaagagatttgaaattggttattgattaaaattttgtacctaagttttttgttttgtttttctgaatagtaaaaaatagttgctaatgtgtgtgtgtgtgtgttgcacactagaatcccagcatgcaggatctggggacaggagaattggttccaggtcagcctgttacagtttcaaacaaatatttgatattttacttttttctataagaattcttacttttagtgttgtatgtctttgtatttgctttaagttgtctcgaattgagtaatgattctcatatggagttcctgaaatgaagattaaattgatacagttcttttgttttgttttgttttttgtttttcgagacaaggtttctctatagcctggctgtcctggaactcactttgtagaccaggctggccttgaactcagaaatctgcctgcctctgcctcctgagtgctgggattaaaggcgcacaccaccaccaccgcccggcgctagctaacattttattaagtatgactactgtgttcatattgttcagggtttttgttgttgtctttttgtatagtaagcagcttagcataagggtttgtggggttttgggttttttgtttttgtttctcacatgaaataacctgttgtgtgtgtgttcagaagacatctatgggctagggtctctccttccaccttttcattgtggagaatcttacctcagattgctaggtggtcttgccagccttcaggtgtttagatttttctattggccatgacctttggggacctgtttggaaaagataattttccttcataaatgtaggcaagtgggagactaacaaatgattatcagtaagagctgttagagatcatacactgccaatggtgggttatgctttgcttttgttttgtttttcaaagcagcgtttcactgtgtttccctggctgtcctggagctcactctgtaggccaggctggccttaaacacacagagatctacctgcctctgagtgctggaattttaaaggcatgagccaccaccactcagcttatggagta

SEQ ID NO: 29131 - DNA, 1201 bp, Mus musculus
tagctgtttgtggtccttttgccctacacattgattctttaatgtacagatatgttgcagttatagcaaacttgagaactagagagccttcagaaccgccaaagggaaccgttgtaacaattcagataagagtactagggactgggaataagtcactggctgccaagatggtgggagactgagttgttttctgaactagaatcaacaaacttgatgctagtttcaaaattattttagtcttgacttctgaaaagaggtggaaataaaaggcaaaggcatatattttctggtgaagatacttggttttgtacatgttggactttgagactaaaatacaccatccagaagaaaatacaaggatttgagataatatagcaaggactatatacttgaggcagtattctgatagtaatctgcctggaacttgaataagaacaagcttgtaaaagtttttaaatagttaagcatggtgcctaaatagttaggtatagtagtctttcaaacatgcctatctgattttacttgtttgtggaataaatttgtttcctaaaacaaagaagaaatttcatcaatttgatctctatagaatgccactgaacttgaaagggtactatttatcatttttcactcccttgccagcttcattggtgtcttctaaaacaaaacaaaacaaaacaaaacaaaaaaacaaaccaaggaaactttttctaaaatgcttctgatgggatttggtttacatgaataatttatgttatttgaatgagtataattcattcaacctaaccttgcattaagaacagataaaactttgggagtttagcttagtggtagagaatttacttaccaagtacaaagcccttggttcagtctccagcagcgaatgaatgaatgaatgaatgaatgaatgaatgaaatgaaatgaaattactgaatacataaaaacattgaagattgtttcagtggttcttgaaatgctaagcatgatcctagtggctatgttaaggagactccattatttagtttaaactaacgtgggggaagtaaagaattaggagtataaaactacaagtcaagaagctggggaaatggcttagcagttaatagcaaataactacttttacagagaccttgagttggtttgcaccatccacattggatgactcatggggatccagtgtcgtcttctggccacctcagccac

SEQ ID NO: 29132 - DNA, 2473 bp, Mus musculus
gcaggtcagtggatcttcaccggaaggtgcagcttctcggcatcagcgcagctgcaccacaggctgagcttacagagcttcaggcccagactggggcaccgaagctttcagctttgggggtcattctaccaacaatcagtccctgagggttcacaacaccctggaaccaaacatcagaatgcacactattctcctaacagtgagcatggggggcaggagccagggagtctattaggttctaaccaacctagttttcattgttgacaagtgaggccaggcttccactcgaccaaaagctaaggattgccacccagcattccaagcagacttgtttcctaaaagcatccttcatctgcattccatcctgggtcagcatcaaccacaacatagcaggcattcccttgcagctgcagtacagtagcagtgtccttttctgaggaaggaagtcttaaaccctttccccccaccccctgggatgactgccttgattcccatggggaacaactttaaagaaaaccaccacagcattccaaggagtctggcgttcctcctccctgccagatgactgtcattgcctccactcacccttctgcttgtcactcggcagcttagggcctctgcgcaggaacctgactaggactatgacctccacggcggctgtttaggtctcgacttacatcagaatcttgcacagcattgcaaaatcccagtgctccctctaggacacactgaccaaaatatgcaacctttcctttcctatttttttttttttttttttttttttttggtgggaaaagaggaagaaagattgtcctgtgacttctgcccattacctgaggcctgtggaaataaacctttatgtacttaaaattatacagaaaatagaataaagttaataccaaacttgtttagttattcacctgatgttttcagtacagagatgtgaaaatactgaaaatgataccaagtataagaaactactctttattatttttaaagacaatctcaaaactatttttagatcctcccacttcctgcccttaaccctcatccttttatttgagtaggtttgagaaaggaaaaggaaaaacaggcagtgggtgaattctgtggtgctaatggtgctttcatgaaaacagtcatttctccaaacccgtgctctagaggacccatctagaacatgctgagatctcagcatgggcactagggagtccatgctcaactgtaggaaatgggggatcagggtggtttcttctttaacaatcaaagttatcatctgtttaataggagggaaaagaagtctacaatattccccaatcattttcttgaggaatcaaatcagcagcagtttgatgtatgctggtaaataggatgtagggtaggaatgccaaagccccacctttttagactatttctcccgttctttgcaatggtgtgacatttatgccacttataatattaagggcaagaacagacacctggttttcacttctatactccctcactatctcatagtatataagacacacattgctgtaggctgtggtgatgcatgcctttaatccctgtacttgaaaggcagagggggcaggtgatctctgtgactgtgagttcaagaccagtctgctctacatagtgaattccaggccagctagggttacaaagtgagtgaaaccctgtctcaaagaagagaagagaagagaaggtccatttcctttcctaagcaaccctgctggcagttcccccctgtgtgactaattctgttactgaggattaaggatacaaggtgagctctgaaggggacgtgatggtaggcttgtggggtgactgctaggtacctctagagggcaacacttacacaggaaaacagtcttaagaaatgatggggaaacatcatgcacggcccacacagcagtgcagagaaattgcttgtgtgaacatctcagacctgggcttttatttgctccaaatttgtatgggttttgccctcagagcttgtctctttttcacttctgtctcttttaggcacaattactgatctgcaacaacagactcccatttcttaaacgggagcttgaccatatcacaaagttgtaaaacaatctccatggttattagctaattaaacttgaatccaacaccatatggtgatagcaggcggcaaaggataagattgagatcttagatctttccaagtagggtatgttagatgataagaggagagaagggctggttgcaggctagattagagttcagggctgagcatgaactatgtacatggcttggaagagctgtggtttcatgaactctgctataaagtgccagggcttcacttaagaaaaggtatgatgtgggcagtaaaccattctttagatatttgaagatggtccccttccttagccagaaacactagctttcctgctttgtccattttctttagccccaggcggtcctgtagagagaaaggacataa

SEQ ID NO: 29133 - DNA, 1858 bp, Mus musculus
ctggggctaaagaaaatggacaaagcaggaaagctagtgtttctggctaaggaaggggaccatcttcaaatatctaaagaatggtttactgcccacatcataccttttcttaagtgaagccctggcactttatagcagagttcatgaaaccacagctcttccaagccatgtacatagttcatgctcagccctgaactctaatctagcctgcaaccagcccttctctcctcttatcatctaacataccctacttggaaagatctaagatctcaatcttatcctttgccgcctgctatcaccatatggtgttggattcaagtttaattagctaataaccatggagattgttttacaactttgtgatatggtcaagctcccgtttaagaaatgggagtctgttgttgcagatcagtaattgtgcctaaaagagacagaagtgaaaaagagacaagctctgagggcaaaacccatacaaatttggagcaaataaaagcccaggtctgagatgttcacacaagcaatttctctgcactgctgtgtgggccgtgcatgatgtttccccatcatttcttaagactgttttcctgtgtaagtgttgccctctagaggtacctagcagtcaccccacaagcctaccatcacgtccccttcagagctcaccttgtatccttaatcctcagtaacagaattagtcacacaggggggaactgccagcagggttgcttaggaaaggaaatggaccttctcttctcttctcttctttgagacagggtttcactcactttgtaaccctagctggcctggaattcactatgtagagcagactggtcttgaactcacagtcacagagatcacctgccccctctgcctttcaagtacagggattaaaggcatgcatcaccacagcctacagcaatgtgtgtcttatatactatgagatagtgagggagtatagaagtgaaaaccaggtgtctgttcttgcccttaatattataagtggcataaatgtcacaccattgcaaagaacgggagaaatagtctaaaaaggtggggctttggcattcctaccctacatcctatttaccagcatacatcaaactgctgctgatttgattcctcaagaaaatgattggggaatattgtagacttcttttccctcctattaaacagatgataactttgattgttaaagaagaaaccaccctgatcccccatttcctacagttgagcatggactccctagtgcccatgctgagatctcagcatgttctagatgggtcctctagagcacgggtttggagaaatgactgttttcatgaaagcaccattagcaccacagaattcacccactgcctgtttttccttttcctttctcaaacctactcaaataaaaggatgagggttaagggcaggaagtgggaggatctaaaaatagttttgagattgtctttaaaaataataaagagtagtttcttatacttggtatcattttcagtattttcacatctctgtactgaaaacatcaggtgaataactaaacaagtttggtattaactttattctattttctgtataattttaagtacataaaggtttatttccacaggcctcaggtaatgggcagaagtcacaggacaatctttcttcctcttttcccaccaaaaaaaaaaaaaaaaaaaaaaaaaaataggaaaggaaaggttgcatattttggtcagtgtgtcctagagggagcactgggattttgcaatgctgtgcaagattctgatgtaagtcgagacctaaacagccgccgtggaggtcatagtcctagtcaggttcctgcgcagaggccctaagctgccgagtgacaagcaga

SEQ ID NO: 29134 - DNA, 1124 bp, Mus musculus
ctgccggcctgagtcacatcctttcccctggaatctgggccttacagagagattcagaggggcaccgcttgcattcacctgatgcccccagaaggtaaacttacttcctggtgggttgtcagtgtacctctaggaacgctactcagccaacaaggagagtttgctccagctgtgttctgcaactccctgtggaatcaaagtacagccctctatcctgggaaagtcaccaagctagcagccgtcacgtgagcatctttcaggagatcctaagctttgcctgaaagaagagccagcctttccagaactctacccaggaaagcagatctgttcctgctggccctgggcttggaagtaggggtacagtgtgggggacagacagtaagtaacaacatgtggctctcaaaaaccagctaccacttccaaattggctcccaactgtgatggcctccaattacttcctggcctcaagtcctagaggaagcttcggaagttgctgttgtacctgttggggcaggacttctaggcaccaagggactcctggaactatcttgggaggacaagtggtgaacaggctaaagtctcatctgaatggcttgtgttttataagctgctgcggggttgtatgctgtgggcgtcttttgtttttgtttttgcttttttttttaatactgtatttttgtatgcttttttgcaaagtggtgttaactgtttttgtataagaaaaacaaaaaacaaaaaccctcctgttgcaagggtctggtttattttgaaaggtgcatttacctgaaattttgtatttagttgtaatcattaattgcttgattttaaactgttgccttctgggacatcttctaataaaaagatttctcaaaaaaatgtcagagtgggggtagcatacgccatctgagtcttcctgaaccagagaaaacttattttggagtagccacaagcaatctgggtggctgcatttttctaccatgttgctaacctggtcattccactctgggtccctgaatgccctttcagacatgtctaaacaatgtcctgtcggctcagtactctgtgagaacacaattctctagtgaattgcagagtgctgaattgtaagttacaaggcttgaaat

SEQ ID NO: 29135 - DNA, 1208 bp, Mus musculus
gaaggttggacttagacgctgtcagtgccacaggaagtcaaagtaattccccagactgtgacccggaacgcatcgagggggaatcctcggggcagcacaatcaagagctgaaggccagtgtttgagagacatgcctagtggcctttgcagagacgtggggatcaagcccaggagggaggggagtgtcgctctcccacgcctggactgaggaatgctgggcagaaggccccaccatcttctttcattctgtgctgtggtctgcagtggaaacagcaggcctttcagctccttgtgtgcctgttgtgtctggtaatgatgtagttcagagtgggatttttttctttgaaccttaaaggttttattttagaacgaggcacagatcgcacattttctacttgaggatcttttttagtggtgaataccaagattcagtgcatcctttaaaagagcgttcttgtccctggcgctggctaaaaatagctcgtttccagatgcttttgtagatgactgaagtattgtaaggcgcagtcaggagctctggactcgagaacggcagaaaggagtagtgcagagagatgattaagcaaactctcccagctctgtgaatctacagaagagggggtcaggctgaggtggttgtgacctggatcttgaagactaaaagacacagagtctgctgagctgctcctgtgcatggtggctgtctcttcatctagggcagaaatctatagattcttttgaaatgtaaataaaaagattgtaaacgccctatagtttctatacagcatgctgcattgtcaatttggtagctttttctctttctttttctttctttcttttttttttcaagacagggtttctctgtgtagccctggctgtcctggaactcactctgtagaccaggctggcctcgaactcagaaatctgcctgcctctgcctcccaagtgctgggatcaaaggcatgcaccactaatgcctcgtggtggcttttctcaaactccatattcatcatagatgtagctgtataccaaacacttacattcctcaaagatccccagagttccatttgagaactctgtgaggagtggaggaccatctctgataccaaccagtgtagacaggaatgccgagggaggccttcaatcccaggtctcgggagacagagatagatggatctctaagttcaaggtcagcctagtctacagag

SEQ ID NO: 29136 - DNA, 1185 bp, Mus musculus
gtgtgtgtgcgtgtgcgtgtgtgtgtgtgcgtgtgcatgtggggggtgtgtgtgtgcgagcgtgtgtgtgtgcgtgtgtgtgcgtgtgtgtgtgcgtgtgtgtgcgtgtgtgtgtgtgtgtgtgtgtgtgtgtgtgcgcgcgtgggtgcgtgcgtgttcatgtggggtgtgtgtgtgtgcgtgtgcatgtggggtgtgtgtgtgtgtgtgtgtgtgtgtgtgtgcgtgtgtgtgtgtgcatgcgtgtgtgtgtgtgtgtgtatgtggggtgtgtgtgggtgtgggagcgtgtgtgtgtgtgtgtgtgtgttcgtgcatgtgcatgtgcgggtgtgtgtgtgtgtgtgtgtgtgtgcgtgcgtgtgcatgtggggggtgtgtgtgtgcgagcgtgtgtgtgtgcgtgtgtgtgtgtgtatatgtgtgtgcgtgtgcatgtggggtgtgcgtgtgtgtgtgtgtgtgtgtgtgtgtgtgtgtgtgtgtgtgtacacgtgctctcgccctgacaaagtattcaccaccccctcatgtgtttctatccagagctgggcagcctggtacccactacgttagggtccaatctaatgatgggggacaaggagcagagctgctagggccggtgcactattgcctggccaaggagcagcttctccaggactctcagaaacagaacattgaaaggagcagccccagtccctcccagcttctgtcccagcctccaatgggcctctgccttgtgctgggcagggtaggagtcgctgtctgcagctgcttgctccaggcactgaggagtggatatttagtgggtcttaatttgtgaacctgtaaaatgggaaccttggcttagcagcacccataggctctcagtccagcccaccttactttgagaggctccaaatgaccccagccctccacccctctacctccgcacagcagctcccccctctggctttgaggagttcggcccagggctgctctgaagctgctctgtgtgtgcccagaagagcctgggagaccagttacacaaaagataaacatgcgactgagtctggagcactgatggcttctgtgtcccccagcagccagggctctgggacttctgagtaagtaagccaaggcctgccctgggcccaaggctgccccttgggtcatttgtagggtctgatactgtggctttcaagg

SEQ ID NO: 29137 - DNA, 1130 bp, Mus musculus
caggcagcgttggttcaggagcaccggcaacagggataagcagctctgacttccgctgccctgacatgatctgataggacatgtggcataaagatgacctggcatataagggatttagccccaggaaggaaggaaacaaagccacagggaaggtattacagctttccaaacatgccaccccactcaggggacagcctagccttggatgtgatctctaacagacaactctcagcaacttgcaggaggcaacagtaaaaaaaaaaacaaaacaagcagtttattttagcaaagaagccacctagcagctacagacagttcaggacaggtggcggcagcacactgcctatgctggctttcaggcccagtcatgcctgcagaaggcctgggcactgcagatgagcagctgctaaggcaggtgaccccaaggaaaggcttgtgctctacacagcttgctgcacagggcccagaccaggcagttcccctcgtcttacagaggtggagcagagagcgcagcctcacatgtactctccacagtcggcaatcatcaccttctgctttggcttcccatccttgctgccctgagcctgtgcgggcagaacagagaaatcaggagagacgcaggatgcgagagccgctagagcatcatcctctccccagacattcagggacctgctctaaatgcccccttccaggacatcaagagccctccccaactctcccactggggcacccacccacgcaaggtccaggcaggaagcaacttccaaccacccacctcgatctgccgcaagacatccaggccttccgtgacctccccaaataccacatgcttgccgtccagccaatctgtcttatcacaggtcaggaagaactgggagccgttggtgttcgggccagaattggccatggagaggaggcctaggagaaaataaacttgtcagctccctccacactgctcccagcccatggtgcatgtgctgatggctgccggtgcttctgcatactggctcaggccatggaagggtcctaacagacacagcaccttgtctttccctcactacagaaaaaggatgagtgggctgtttccgtttttattttttccttcacatttatttgtcttttcatttata

SEQ ID NO: 29138 - DNA, 1099 bp, Mus musculus
gcactgcccttcgccggcacccgcaaagatttggtttcccccttcctgggctgctgtaactgtaaaccgccgggagtccggggcctatatttatcacgaaacgcgtgttcccaaggcggccgtgagcgcagcatctgattgcctcttgaaaattttttgccccctttacgaggggatttcctactttaatttttattttttaagcctcaagccaggacagctggagagtacaaactccaggagcgggccatattgtttttgagagccttttgtcttggggcttttgcagtcccgtgcaagtcgtcccgcacacgggtcccggctcggagcctccctgctccagccttctccggcgtcgctggtgccacctgtgcgctgcggcgcgtgccatagctcctcggagccccttttgtcctgcagtaggccttgttagaagtcctcctggcggggctcggggtcgtggggggtggggagatgaacgctgcagccagcagctaccccatggcctccttatacgtgggcgatttgcactcggacgtcaccgaagccatgctgtatgaaaagtttagccctgcggggcctgtgctgtccatccgggtctgtcgcgatatgatcacccggcgctctctgggttatgcctacgtcaacttccagcagccagctgacggtgagtagtagcggtgtgcacacattcgggagattcctggggaccttgggaatcctgaaggcggaggccaaactgccaggaccggggaacataacagcatgttgcctgagaagccttgggtggaagcaaaatgagccaggcatgtggtcatgaccctggcttcagtctcccaccacttgctaacctgatgaccttgggctactgggtgggggtggggtagagcaggggttggaacccaaggagatttgtgtaattcgggatccgaataaagggacttgggtattctagtgtgtctagccccactcaggtagaagtgggtctggcactcagtgcattgaaatgacacctgaaagtgtaggttgcaaaactgggggctctaacctgaactgactgacttgggatggctttagggcagtggaaagcaaggagagc

SEQ ID NO: 29139 - DNA, 1160 bp, Mus musculus
ttaggagtccatagaattaaacttttggaaggcctaggtacctcaaggccggtgataaaggtgtgacagtttatccttccactttttgtttggataaaaataggcaaggcgtggtggcaatgcctctaatcccagaactctggcagtagcagactgtgtgagttcaaggccaacctgatctaaatataggttccaggacagtcagggctatatagagagaccctgtctagaaaaataacaatgagaataaaaaaaaaaactggggtggaatctagttagtcggtgggcctcagagtcccttgaacatgagcttagtccatggtgaggatcttggtgtcccgaggcaggccatcttcatacttttttaaatttgggattagtagttcaggaatctttctggcatggcatctgacagtcctcttagttgatcagcattcctaattgatgtgtgttcctctttgacagctgagagggccttggacaccatgaacttcgacgtgatgaagggaaagccgatccgcatcatgtggtcgcagagggatccctcgttgagaaaatctggggtgggaaatgtcttcatcaagaacctggacaaatccatagacaacaaggcactgtatgacactttctctgcctttggaaacatcttgtcctgtaaggtaagccccggtgaaatgatgttagcaggctagaggagaattactgcatcttgaaaacaagataaatgttgtacctgggtgtggtgttctcttggctggtgagataggggctatctagggagttccaggccagcctggagtatatgcaagatagtatcgaagggagggtgccttagaatttgagacaattggatgtgataactttttaaatttctggaagcagattctttctctttcagtcctggggattgcacatggcctgatgccagtgttctaccactgagggtgttttggcttggctttggtgtttttattagcattttggtgacatgtagtggtttcataatggtatttcatgtatatatgtgcatatgtgtcttaatatcatttctccattaccttctcttagcctgctccccataatccatccctagtgacattcttgactagtgtcctgctctgtgtgtgtgtgtgtgtgtgtgtgtgtgtgtgagagagaga

SEQ ID NO: 29140 - DNA, 1176 bp, Mus musculus
tctgttctttggtgataggtaagaccctaagtgtcaaggtgatgagagactccagtgggaagtccaaaggctttggctttgtaagttacgagaaacacgaggatgccaataaggtgagtgtactgtgagggttgggaagagcctgtgggctctacccattgcatgggagagcagctagagtggtgggtagtggagtggagtggtgggtgtgcagcatcagcactaatgctgggccacagttaatgtatctgcaaactcgtgtcacctcggatactgttggacgattgggacagatggttgttccattcttggatagggaaactgaatcctattgactaggtagggcagtgtgctggacccttaccctacttacagagggacctgaaacattgagcattgccagatcatcaggcccttgcctataaaatttatgcaaatactgggttttgggggccaccactacccccatcccaccaccccaagcgccctctgcactaaatctttcccaggcctgctgcttggtgccggtctggggacagacagtgctatactacagcagaggaaatccagacgggtcgtttccatctgccctggggcctgtctctacaactctgccacactccctgagaatggagacaattttgaagatgctgaagctaggggtgggaactaagagcagaagatgtgtctgggccagtaactccgatgctaactccacttcccacgggagtgtagcaggcttcagaggtccgacaacgctgattatcagtccagcggggaaaatggtttttttcttggtgttctggactctgctccagaagacgaccatgtctctctgcattatacatgtcttcattaaagatgtatattttctctctaggctgtggaagaaatgaatggaaaggaaatgagcgggaaagccatatttgtaggccgtgcacagaaaaaggtagaaaggcaggctgagctgaagcggaagtttgagcagctcaagcaggagaggattagccggtaccaggtgaggtgggctgctgatttgagggtgttgatgtggaatgtttgacgtgcctgtggtatcttaggcttctgtgggggctgggcaaccatatttacccccacccccgcctccacaaaggtcaggtttaaaggttgtcacctaccaaatcattacagagc

SEQ ID NO: 29141 - DNA, 1499 bp, Mus musculus
tgtattttttaagatttacttacctattatatgtaagtacactgtggctgtcttcagacacacaccagaccagaagagggaaccagatctcgttacagatgattagactcaggagcttcagaagagcagtcagcgcccttcactgctgagccatctctccagcttctggttttgtggttttaagttagggtcttgctctgtagcctaggctggcctcaaacactattcccctgcctgagtacaggggttacaggcaagagtttttgtttgattggttttggttttcccagacagggtttctcagtgtagcactagctggcctggaaatcacctgcctctgcctcccgagtgctgggattaaaggtgtgcaccaagcactgcctggctacaggcaagactttgaacttgacaggtgcctaagtatgttgttcttgggaagtgactgtgtatagagatgtagttaacagtgatcctctctccagggggtgaatctctacattaagaacttggatgacaccattgatgatgagaaattgaggagagagttttctccctttggatcaatcaccagcgcgaaggtaagagcgtgtgccagcgtgggtttggaaacaattttctgttgttgggttaatggtgttaattgtgttggtggtctagagagtaccgtgttctagcatattcctcatgctctggagaagtaggtttgtaatatgctatctacttgcacaactggagcttgggccagtatcccaatcccccaagcgccctctgcactaaatctttcccaggcctgctgcccggtgccggtctggggacagacagtgctatactacagcagaggaaatccagacgggtcgtttccatccgccctggggcctgtctctacaactctgccacacttcctctcttgagaatgaagactttttaaagatttagtgggcctttgacaggaaagtttggctgggcagccatggttctgtgggcatagtctacagtaggtccttggcacttaggggctgtgacaggctggtgtctagaagtagtgggttatgagctgacagaattcactgattggtagaggcacacacgaggcctttaggtagtaagaaaggcagttgggtggcgagggagggtttgatggtcttctgtgtaaggtgttgccatttgtattggtgtgggctttttgttggttgtctttcatacagggtctcacttttgtagccctgactattttagagctcaccatgtaaaccaggctggcccaaaacttgcctgtctctgcctcctggatgctagcaagaaagtgtgtgccaccatgccctgctatggatgttttaaatgatcacttttggagtgctggcaaaaagaacccagaacggctgtggaggtgacagacagccctggcaaaaaaaacttctggttcctcttgctgtcacccacttgactggccctgttggcatattcccctgcaaagccctattaacaaagtccaggtgaca

SEQ ID NO: 29142 - DNA, 1099 bp, Mus musculus
cccctacatagtcagatatacacaagcacccaaaagaaagcttcacacagtgtttggagcttatgtagccttagctgtgggccaaagcacaagcagttgtttcagaacatggagctgtttgcttgactgggccttgcccaggctgcttcagcataagctgccttgtgaatcattgcttgtctttctctacattctctcaagccaggatttttcttagaagcgggtactacttcacctgtaagggctctcacaacaccactgttgattattagtgatcctctagtaactgctaatctattaaaaacacctgcaccaagccacagtcctgtagaaaagttaaatttagccaggatatttggcatatcatagactcctggtgctggggtggtagacaaggttaggagttgaaggtcagcacttcgatacctactgagttcaaggccaccctaggttagttaggagaaaaaaaacacagaaaactgaaatggagctaatgaggcgtgtttactcaccgtggctcctggcgccacacatactgaaaataacgtaagggaaagattgaagagagggctgcatgtacagacatctgtgaactggcacgtgcttgtagtcctagcccttgcttggcacaggaatcaagaattcaaggccggccaagactacatgaaaagcacacattatgtctcctgtggccttgtttttaccgcagggccttgcattgtgaagcaggtttgcttggtcaggaccttttggcttcccctttccatgcacagtagttttaggctgcatagcgttctatcctcaccttgttccccagagacaggactgcggctgcctcctttttcacatggtctccttagtactaaccctactgcctatgctggttcacaggccccccagcctgcagtccacgtccagggtcaggagcccctgactgcctccatgcttgctgcagcgcccccccaggagcagaagcagatgctgggtaagttcgcctgcttgcagaagagagcccggatgccagtgctcactgggcttaggcgctgtggtgaccgcaaccgttccgcccataggggagcgtctgttcccgcttatccaa

SEQ ID NO: 29143 - DNA, 1228 bp, Mus musculus
ccttcatggggtttgcgggctatcaccccgccctctccatcctcctaccccaagcatagactgaatgcacacagcatcccagagctatgctaactgagaggtctggggtcagcactgaaggcccacatgaggaagactgatccttggccatcctcagcccacaatggcaaattctggatggtctaagaaggccctggaattctaaactagatgatctgggctctctgcaccattcattgtggcagttgggacatttttaggtataacagacacatacacttagatcaatgcatcgctgtactccttgaaatcagagctagcttgttagaaaaagaatcagagccaggtatagcggtgcatgtcattaatcccagcgctaaagagacagagacaggagaatctctgtgagttcaaggccacatagaaagagcctgtctcgggagcaggaaaaaaaagaaaagaaaaaaagaaccatctggctagtttacagtaaaggtgagagagacatttcacaacatgtgtcctgggcctgacctttctgcctgtgagcaaaggaccctgggagcttccagttccctctaccactgccgccatgctgaccagtttggggctgggcatcgagacaaaatgaacccttagcagaagcaaaaacacaactgaagaggctggttcaggctggcacatggtaggtgtcacctctcctactagctgatggcctgcaccagagatcttcctccaaatgtcccacgatgcacctggacaggatccccacatacatcctcagcacagacctgcggacggccacccagctgctcagaggaaaggacctttccttcttctctaagaagagccatctatcccaccgagggcacagtaacagccctccaaccaggcatggggcaaaggcaaaagggaagagtctcagcatttgcttatgtctgggaactaagaacaggttggtcgccaaactggcgtcaccctgggggcccagcagctccatcctgtttctgggacctgtgagtcaaagaaaaggcccctgtcccaggggactgacaggtggtaattaggctgagttgggtggggaggctcggaaaccactgctctcctggggcagccgctgggagctggagtgtttatttgatttctgacttgctaagcctgtaatttacctgcgggaacagagtccagctgcccaaactgtgtcattaagagcagatcctggactcat

SEQ ID NO: 29144 - DNA, 2307 bp, Mus musculus
gctggctgactgctactcctcctgggaacctgaaacttggccctccccacctgcacctctgttaccatctgctcacacccactgtaacctcaccagctccccacctatgccgtggtgatggagcggctttgaaaggtggtccagctgctgggagtagttgctttctgctcctcatcaggatggagtaggtagcctcacaaaccagaaacggctcagctcctgctgtcatgatgaagtgtggatctagaatggctgtgatttccccaagaccatgcagcgagtcaagagctattagccccagcccccagcccccggtcggtcacttgtgtttccatttcagtgtttgctccactaagtctcctgcttgattcttcaattccagaccctaagaagtctgccagccgtcctgggagtcgggctggcagtcgggccggcagtcgagccagcagccggcgaggaagcgacgcctctgactttgaccttctagagacgcagtcggcttgctcagacacttcagagagcagtgctgccgggggccagggcagctccagacgagggctcaccaaaccgtccaaaatcccaaccatgtctaagaagaccaccactgcctcccccaggactccaggtcccaagcgataacactgtacaagcgccccacaccactatccactttgaatcctgctccatacattgggtgtatatttattctgaacgggagaagttatattgttaaaattgtaaaagaagaattgtgttatgaagctgccttatttttttttcctttttgtaagttactattttcatgtgaatatttatgtagataaaatttgcttcctggtaaccctgtaacagatagggcccagagatgaaatatttgaggaaaacaaaaggtcaagacgcaaatgtgtattaaaaagaaaagcctctaaatagggtttcatgtggtgcagggttataaacctgctttatcttttaggattattcctaaatgcatcttctttataaacttgacttgctatatcagcaagataaattatattaaaaaaataagaattccgaagtgtttaaggaactcttctttctaaatcacagacacctcagttagcgagaattaaggagcggacacttaagattgcatttccattgttttactgttgtgtaattttagctgaagagacagaacctcatctagatagcttttgcacatgatatagcaaagagttcattgcaatactgtcttaacataatgtctcaatactgggtgttaaagggcgcatagctgctaggattcaggggtaaaggaaacttcagaacattggggttttaaactgatctgtaactaactgtccaacccagccctcagtgactcctgtgctcaccaggccccaggccctggtgagggggactccttggtggcactgtgaattacagatttgctgatctgctttttttttttttctatttatttaaatggtcgatcaacctaccataaactgaggaatgaattccataagcccagtttgaaatgtggacctaaaacacttgctcatcctttaacggagttcaccagcacacctgttcaccagtcccgtttgcttccgtcttttttgtgtgtaataaagtcagctgaccaagtgaccacagaggggctgtctggggctcctgttttttagctgctgttccttgtcagctctgaccatgttgctgtgtgattatctcaattggttttaattgaggcagaaactgaagctctaccaatgaactgtttaaaaacaagacacacttttgtattaaaattgcttgcagtaacaatgttttgtaattcttggctttattctgaaccactactttatatttaaatgttaccgctaaggtataaaaatgttgtagtacttaaaaacatcattgaacaagagttttcttgatggaaaaaaatcatagaactcattacttttttttctttatcttaccttgttaattttaacgaggcaccagagaagtgggatgttttcacacagatatagggaagggatcctgtctacctacatattacaacagatagtgtgagcagggcagtggtggtgcatgcctttaatcccagcactcaggaggcagaggcaggtggatctccgagttcaaggccagcctggtctacaaagtgagttccaggacagccagggctacacagagaaaccctgtctcgggaaagaaaaaaaaaaaagtgtgttgaatgtaccttgggatgggcaaacttcccaagcggtgtgctgaagtttctgttagatgatagtcacaagccagactttt

SEQ ID NO: 29145 - DNA, 1222 bp, Mus musculus
ttgacttagtcttcactggggtcctcttaactctccagcacactgtattcagaaggtgaccccttctttaaggagataaacatagccgggcagaggtgccgcacgcccttaatcccagcacttgggaggcagaggcaggtggatttctgagcccgaggacagccagggctacacagagaaaccctgtctcgaaaaaacaaaaacaaaaaggagataaacatcataagactgcagtgctcacttgggcagggtcttcagaagactccaagtgaacaaatcaaacccatctttcctcctttacccttgggacaggagtcagagtgtggccgttgggagctaactttaccccagcagaaagattttacaacattgcttcttagcttaatctttctgcttttctacttgctaacctttttatgacaatgtaaaaatataaaatcaagttcagaattcttcccactatcacgtcattcctgaatacagtctgctttctaggggactggggttgtaagtgtacattaaggtgttctcgctaactgggtttccccttgattccagtttggagattctcagcagttgcggctggtccgtattctgcgcagcactgtgatggtccgagttggtggaggatggatggccctggacgagtttctagtgaaaaatgacccctgccgaggtaaggaagcacctaccatgggtgacgtggtaggatggaatccgtccatgccgatttccaggaagcattgaagggggtctttctgatttttgtcctattaaggtgtctgatattatcccacccatcacccattaggtcggggtttcaggtacaaaaatctgaagaagctgtcagagaagaatgaaatgagaactaagagttttggtgtctctgggctctcacatttgggaggtagaggcaggagataaggagttcaaactcatcctcaggttcatagcaagttcaaggctagaatgaaagcccatctccaaaacaggaaaaaactgtattggtgtgacattacatttagggtgtgacaatggtactaacctagaccaaagccttgtgtatacttccaagctcctctttcgtcgagcctcagcgcacgctaagtccctaccatgcataggactagtgactgttctaagtaggggactctaaagggcttatatcagccaccacccccaggcaacagaagaccctcagtgtagtttgagcagatagtag

SEQ ID NO: 29146 - DNA, 1169 bp, Mus musculus
agatattttgctcagttcataatttgttttgatagatccatattagcactttcctctaaagaattttgaagcaatggtgaaatttttttttcatctgctatttttttttctcagtatctcttatctcaagtagggttatggctatttcaaataaaagattaatgcatgtattaaaagcctaaaatgaaccaagcacatgcctttaatttcagcacttgggaggcagaggcagggggatttctaagtttgaggccagcctggtctacagagtgagttccaggatagccagggctacacagagaaaccttgtcttgaaaaacaaaacaaacaaacaaacaaaacaaaaaaaaaatccagaaactgggaggcaaacgtaggcatatctctctgagttggggattaggctagtttacattgcaaatacaagacagccagggcctgagaatgggaacctgtttccgaaagaaaaaggcaaagtgtttaaaatgtaatgagtagcctctctacattttaaaacaaaaagctcttctctgctcttacactcttgctttatcaaccaacaggtcacaagacaagtggctcagtgcaagtgtgcaaaaagattccaagtggaacagattggagagaataaataccgggtaaggaagagaaaagccaaccatttgtggaggtcattgcctccggggtcatcctgacacacagcagagcagctcatgctgcctgttccctcctgctgcctccagaggcccagaacccaggccttcatccctaggtgtcaagtttcatgccctgtgtagttccatctgaaaagctaccattattacccaggtagactgtagcttatagttgacatggtagaaaatatttcatagccctcatctcactgctgagcaaaaccttaggtgcctttagaaacagttttattaaaggacttgtgaagcagagtctgagattcttcctgtaatcccagaacttgggaggcaaaggcagaagcagaagcaccattgcaagttcaagaccaactctacatagtgagtcgcagctaaccaaggccatatcacaaaaatgtctcagatatttttaaaaagcatggatcaggatgctgggaatggttcagtatataaaggtgcttgccaccaagcctgacaacctgagttcaagtcctaaag

SEQ ID NO: 29147 - DNA, 1193 bp, Mus musculus
gagagaattcctagcccatctcctgccactgctttcacactcgaggaagagtgattcctctcacaaatggtgcttcatgtctctttcgtgtatcaaaatccttcacttgccccgactgctctcagcagtacgatcctgatcccttagctggacacaggcctctcctgcctgcccctccagcctcacttcgtgctgaccctttgattggaccctctcttcagtgaatgaagagccctggtccagcactctcaggcttcctgttctgtcctgactctaccctctcccagagctgtccttcccaattcttgagttctttttctgtcgcctctctttttttctttctgtatgtggggtgtttgaatccagggctttgcatgtattcagcaaatgctttaccgctgagttatactcacagcccactttaaaggggtgagaaattacacagagcagtctctcacttggacggtttgccatgggtttggcctttgttagtaagaactttctattttagatgaagaaaattctaaattttctttcctaatttttatattttacagtcatttatggaggagatgacacgcaaacaacctgacgtggacagggtcaccaagacatataagaggaagagtgtagaacccacccatgcacctttcatggagaaatcccgcagtggtagcagtatgtgtccagccccactattctaggttgcttccttcctgctgattgcagatggaaattcacaaagtaccatcataagaattgtgtttgggtttcccaaatcatactgactctgaaccacaatctcacattttgaagccttacttttctaacaatgcttggaatatttatgtattggggtaattaatatgaagctacaaggtggtgaagcctgttctgttgttcagcagtggcctttccattgtacctgcgttgcgctggtcgagttgtaagataattccttggggagtccactgctgggtttgtgttgctgtgtccatgtcactaaggctgaggtgaccagatatgtgtgggagctgggtacacagggaggcagcagtgttggagtttgtgtgcctctgtgctagtgttgccactcctgcctcttcagttaccaaatggagacagtgtgagaatctaggtcatatatatagctttcttgattttaagacagtatctcatgtcataggccagcc

SEQ ID NO: 29148 - DNA, 1107 bp, Mus musculus
atgagtgtcccctgtaagggcagaccaattcagatatggcataccaaagtatataagagattgtcactaaattaaaataggagtaaggaagctggatagatggctgagtgactaagaacacttgttgctcttgcagaggacccaggtttggttcccagcatccatattgtggctcctcttcatgatcagttctaggtgatcaatgcccataactccaggactaggggatccaacaccctcttttgacctttgtaggcaccaggcatacataggtgcacagacatacctgcaggcaaaccacttataaaataaatctagtctagacataattgattttaaatctttgggcatttctctcacttgttattagttattagttattatttccaactgttgtaatatagaagttaatctgaatagagtttaagcagtattcccttttaacagttagaattgtgcgcattggttctttcttccttctttcttttaaatcactgagttttgtatgtcttcctcagacagcacaagttggaagaagccttactgttttcaggccagttcatggatgctttgcaggctttagttgactggttgtacaaggtggagccacagttggctgaggaccagcctgtacatggggaccttgacctcgtcatgaacctcatggatgcccataaggtgaggagcaagaattgggaagcaaagccagagccttgtctcgatccgcaccctgtgttgtgctgaccacctagagaggagggaatgcttggtgaggagctctggaggagcagccctctgtcttctgtgtttagacaaactttaaccacctttaatctctgagtccaagggtagtctggtctacaaggcaagctccaggacaaccaggaatacatagagaagccctatctccaaaacaaaacaacttgttgctgggatttttgcaacagtcacaaagaatttaccagaattggtttgattcagacttggaggcatgtgaagaggttctccctgtttatctcttcatccaatataagttgaaattgcattcaggggaaaactgtaaagaaatccatttccactaacacctatgggaatgggagaatttat

SEQ ID NO: 29149 - DNA, 1074 bp, Mus musculus
cctgattttgaacactgttctttcccagatagaagagcacaaggtaattgtgccttaagatgatgttaccttccctttaaaaagattcattcaaaggagtgttccttcacctgtttgtgtctaagaagagtactgtgttccccacaggtttttgctaatgaagtaaatgatcatcgagaccagatcattgaactggatcaaacagggaaccagttgaagttccttagtcagaaacaggatgttgtcttgatcaagaatttgttggttagtgtgcagtctcggtgggagaaggttgtgcagcggtctattgaaaggggtcggtcactggatgacgccaggaagcgggcaaagcaagtaagttataaatgaggcacaacttggtgggcagccttgagtcccgaacctctgaagtgatgctcagaggtgagctgtatagctcacacactgtttcctgttacaatgtatatcatacttgattttagttccatgaagcttggaaaaaactgattgactggctagaagacgcagagagtcatctggactcagaactggagatttccaatgacccagacaaaatcaaacttcagctttctaaacataaggtaaaatagagttaattgctgtgagatcctaagcttagtattcaccaaagtttgctatttgctgaaaatggaaaccagagcctgttaaaaaaacagttgatacatgttaaattatcaagaagggactaggaatgtaaataatttggtaacagtcccttttcttttcttattgggtattttctttaattacatttcaaatgttatcccctttcccagtcttgccccctcttccccccaaacccctatcccatcccctctcttggcaacagtccttgcctggcatgaacaaggctctcgtttgactccctagcacctcatgaactggctatggtggcatgtgtgtgtaataccaagaagcgaaagatcagaaattcaagaccaatctagaatatgtgagactttgtctccaaaaaaaaaaaaaaaaaaaaatcaagatgaaagccaagcatggtggcaaattgtagcactttta

SEQ ID NO: 29150 - DNA, 2573 bp, Mus musculus
cgtgggcggggctcagatgagaagtagcacagcagcccagggaggtattactagcagaatttgattcaaatgtttttcccatagatgaataatgcttgggagaacttaaataaaacgtggaaagaaaggctggaaaaactcgaggatgccatgcaggctgctgtgcagtatcaggacactctccaggtgagaggctgggagatgctcacaaaagaagtacaagtgctgctctctcttgtcatcttctaatagtagtggttcaccctctttactgcagtgttgggaaacctaagacagtcttgctttcacatttctggcctacatttcccacttctattgagaaagtgttgatataaaatacatccaagtttcacttactactgccatttttattgtcattgcctgcttgtcatagttgtacccattcagctgctcagtgaagctggcctaattgtgtaagtcactgcttgcttgtggaccaaaacccacacaatcatgaagcccaacactgataaggagatgttccttctcttctaacgtcatggttttctttttatgtatttgtgtttttatttcaggctatgtttgactggctagataacactgtgatcaagctctgcaccatgcccccagtgggcacagacctcaacactgtcaaagatcagttaaatgagatgaaggtctgtacccaggaaaggctttgaaaagagagttccttatttttaataatgaagacgtcaattaatgttagcattaaataaatcttttataggagttcaaagtagaagtttaccaacagcaaattgagatggaaaaactcaatcaccagggtgaattgatgttaaaaaaagctaccgatgaaactgacagagatattatacgagaaccactgacagaactcaagcacctctgggagaatctgggtgagaagattgcccatagacaggtaaggctagagtaggtaacatgggttggtgagctaccctctgcccgctctgatttcctaacaaatggtctttgtcttgtcctgagcagcataagctagaaggtgctctcttggccctgggccagttccaacatgccttagaggaactaatgagctggctaacacacactgaagagctgctggatgctcaaagaccgataagtggagacccaaaagtcattgaagttgagcttgcaaagcaccatgtaagtgttttcattcctacctaactttgccagtttgagaccagttactgccaccagaagcttaatatcatatggaccttaaggagctaggttcaatgacatcaaaagagataaattatgtcattcaacatttctttaggttctaaaaaatgatgttttggctcatcaagccacggtggcaacagtcaacaaagccggcagtgaactcctggagtctagcgctggagatgacgctagcagcctgagaagccgcctggagaccatgaaccagtgctgggaatcggtgctgcagaagacagaggagagggagcaacagctgcagtccacgctgcagcaggtacgcacgggggaggggcggtcacgggagggaaaggaggccatctggggttgaaccccttttgaaaagagcagcttttgatggcaggtatttcaggattgtttgcagttcaggttggttactattcagttagtcacactgaccaacttgttttgagattcaggtgtttcctatagcaagtcaggcttctccccagattgcagtaggcatctattgtgttatagggagatctgaaggatcttgctaaactctagccataagcaagcagatagtccctgtccagagataaaactaactactctgcctgagaccagcttcagaatcctcccagtgtgttcagatcattccaaaagtttgcctttacagctgattgcttactgatactgctgatatgtctttttttcaaaaggcccagggtttccacagtgaaattgaagatttcctcttagaactcaatagaatggagaaccaactttctgcatctaaacctacaggaggacttcctgagactgctagagaacagcttgatacacatatggtaacagtttcttcaaatggcacaaaagcattcagtagcctctctgagagacttatatcctgggagtctgcgatgttagttagttagttagttagttagttagttagttcagctcttctacagacttcagtccagacttgggcagcaatagaaaggaaagagtcagctagaaaggcgctggtgagctggtaacttcagtctgtctgtccatttggtgggtaccagaatgttgactagaagtgagatcatcaccaatatgtttgtattcggtaagagtttagagaaatctgaaaggtgctgacaggattttaagagagcctacaaacaacaaaagcaacattatttctaggcaaatccttaaaaaaaaaaaaggacaaatacattattacagactgtttttgaggtctttcggatccttaaaattttttttattttcttggtgagttgattgtcttcctattaaggaagaattctgggtttaatttactaacagctcatacttggaac

SEQ ID NO: 29151 - DNA, 1134 bp, Mus musculus
acttctcaagtaatgagtattccaaaagtctgtggaattcatttagaattcagaacacatttccctattgaaataaggttacaattggaagctcgattcccatgccaggaaacaaatgttcctttttaacccctaatgtgagtatcacagtatcaatagtgggcagaacataaccaccttttgtaacactttccatgggaaatttacagaaagtgcagtgagaacactggaaggaagcctttccatctcagcccttttgttttgatcttactggatattttgtgtggtgttttcagattgcttctgtggatcctttatgagggagagcaacataagtagaaaaaaacctagagtagagatccctgctgaagtgcagaggagaggtgatagtagtaaagccacactgaactataaataatgtcagggttacatgggatttcagggagaaattagattttgaacttagagagcttctgttcacatctcttctttgctccttcagaaatccaggacaagctggatcaaatggtgttcttctgggaggacatcaaagcacggtctgaagagcgagaaattaaattccttgatgtccttgaattagcggagaagttctggtatgacatggcagctctcctgaccaccatcaaagacacccaggatattgttcatgacttagaaagccctggtattgacccatccatcatcaagcaacaggttgaagctgctgaggtaacaaaaacacaaaacatcatctcatatgtatgtcctttaacaaaatactgtatccacgttgtgagggtatgcatgtgattgtatgtgtggtggcgtagtggtgatgatcatgttttgttttgtttccatggttttcttgcagtgtcgaggattgaacctgaggtttcttgcgtgctaagccccgaacccttgagttacattgtgttcgctgccaagccaaactcaatgttttgaaaactttgttttgttttgttttgtttttttaggtctttttgttttttgagacagggtttctctgtataaccctggctgtcctggaactcactttgtagaccaggctggcctcgaattcagaaatccgcctgcctctgctcctgggattaaaggcatgtgccaccacac

SEQ ID NO: 29152 - DNA, 1169 bp, Mus musculus
ctagcttgggttgctgaaaccaagcggaagctgatggctctcggtccaattcgtctagaacaagaccagactactgctcagctgcaggtgcagaaggtaagtatagaagagccaggcgctcccgtgtccttactgggacacgtccatgtgcccgtcccagattaagtagaatggtttaataaatgacggtagaaattcatcgataaatacttggcttcagtgagaaaaatatgttttgttttgtggataaataaacttttgaatccgagaaagaatagttaatgatttcctagataatttaggaagtaacgtgtttttgtgaacaactaaaatgatgagcattgaaaaatagttttgaagataagcacagatgataggtaaaagttaaacgttaagaatatcccttatgtctttttaaagctaggaatttcatttgtcctgtctgacatttcatcagtacaggcacagagcagggtcctttcacttcctgatgtaatcatagttcattttcaaaggctttctccattgacatcattcgacacaaagattcaatggatgagctcttcagtcaccgtggggaaatcttcagcacatgtggagaggagcagaaagctgtactgcaggtgagttgcacttgttattcagctgctggttttttaaataaattatttagtttacatcctaatcgaagcttcccctccctcctatccgctcagtccctcccttccctcctcttcctctcctcttcctctccctttcactgaaaaggggcggcctcccatgcatatcaacccaccttgccatgtcaaggtgcaataggagtgggtgctgcttctcctattgagcccagacaaggcagcccaggtgggggagggagacccaaagacaggcagacaaagcccctgcttcagttgttaggggtcctgcatgaagaccaagctacacatctgttacacatgttaggggcctaggtcatgctgcttttcttaatcgtggtaaattgaaactgaaactacaacataatgtcttcaaaggatttttcttttacctgctggactttctggttactgttggttagttaggtccgggcatagtggtgcatgcctataatcccaggacttgagagactgaagcaagagagtctcaagttccagaccagtctgtgttgt

SEQ ID NO: 29153 - DNA, 1275 bp, Mus musculus
ggttctaagtttgcttgctgtgtcacctataattcacctccaccattcattctctaaagggggcactgtttggagaccagaagacaagtgaaaaggaggcgagggagatggatgcgggcactagaagaaaaagaacaagaacaaagcaagggaaggaattaaatgggggaggtgcttcgtagttagttctaattctgctgcagtatcaaaagcagttcttgatgcacagaaatctttgtgggtatttgttatgttaaatgcccctagttagagcattaaggaatagaaagaaagaaacactgtttttacacagacagtgtgactcaaatcttgcagacagttgtaaataagcagcagctaagctgaaagtcaggcaggtttcaaaatgattgaaaatgtgaggcagagaaaaaaagagctgaaggaaggaggtcagtgccctgctgggatgtgtgctggagataggcttcccccaaccccccagcacacactgctgctgatgggcttaatttagcaaggtgtggcctgaaaacctttccctccttaggaactgaagaaggaggtcatggaacacaggctggtgttggacacagtgaatgaggtgagccatgctctcctagagctggtgccttggagagccagagaaggactggataaacttgtgtctgatgccaacgagcagtacaaactgatcagtgacactgttggacaaagggtagatgaaattgatgctgctattcagagatcacaacaggtaatgtttataatgctatgtgctagtgttttaggtcatgggatgtatatgtggtgtccagtgctataacctacataagtacaggctcaagaagaataatgagatcaaaataaatagaacaaacatactttaataatggtaaacacagccaggcatggtggcgcacgcctttaatcccagcactcaggaggcagaggcaggcggatttctgagttccaggccagcctggtctacagagtgagttccaggacagccagggctacacagagaaaccctgtctcggaaaaccaaataaataaataaataaataaataaataaataaataaggtaaacacttggaagagttttgatccagattaggaccaaaatactcaaccacttggtacagagaaaaaacttgcaagaagagccctatgttaaagctattttttaaatttatttgtttttgggtttttgttcatttgttttacttttatatgtgtgggtgttgtgtttgtatatatctgtgcatcatgtttat

SEQ ID NO: 29154 - DNA, 1107 bp, Mus musculus
cgaactaagcagacagtgacagacagcacattgtttatagcttaaggaccaagtccggagtttcagtagaacttaacttacatgtgtcctcctgagaagaaaagaggaaattgattttcactggtttactctggagtttgtcagactgagaaagttacacacttgttcatgtgtcatattgtaagatcagcaatagttagaataatgttgaatgtcataaatgagttgtctatatttttgtcctatttgattaatgttagcatgttaattatacataataatgggtttcattatggcactttcattcatgtacataatatactttgatcacattcacactccattactctctctgctttctactcctcctcttcatcttcccacctagccctatttctactttgtgagagagacctggtgagtgtcacgaaaatggctcacaggagtatgcataccctgccagtggctgtactactgaaaaattgtctttctctctcccatctactgtatcaaatcctctgtgtcacagatgctgtgcacgtaatcacagctgctgagaacctagtgaacagcacgtcaggtttgcacgtcagcattaggcgcatacacactgcttcacgggacacagagggggacagataaatgtcttcagggcttggaactcaatagtcttttacttttttgagtcagggtctcatgtagcctagactggtctggaacattatattgctgaggatgacactgaatttctgctcctcctgcctccacctgctaagtgctgggatcgcaagtgtaaacctcactttgtttatgcagtgcttcccgcatgctgagcaagcattgtgccagctgagcttggtctccccagtcttctacctattgtgtcagtgtgacttctgtttcaatgtagttttgtttttagtatttcttattttgtgccaagcatggtgacacatgtcttcaaaaccagctcttagaagactgaggtaggagaatttttttatagagtttcaggctaaccttgactacataggatagatcatgtttcaaaaataaccaggtacaatgaatgtacaccaatggataaaaaaactttttttaaaaaac

SEQ ID NO: 29155 - DNA, 1147 bp, Mus musculus
gaacctcagtctgagtccgttactttggaacacatgtccaaatctgtagatattccagaagtgcaaaatgtaaaaaatttgagagactgccaggacttcaaattccaacagcacagtgagagctctccccatgaattccagcctctgggctcagaagctgcagcagcaagtggtaacacagatgaaatgcaggagcacagattctcaagtgcaacctggcccagggccatgaaaagttcctccaagggaggcttcagtgagaagcagtatccccttggggacactgcctgtgcagtggaactaccacctctctctccttgcttgagtgaagagctgttggatccagaattgcatatgcttataacacctagcctgagagaaaaaacagagtctgagttaaaatttgaggaggatgagcgatggatcatgatggaggcagaggaggagtgggaggaagagaaattgtcagaggaaagaaagagtcttgttacaaatgaagagactagtttggcagatccccttgaagaaagtgaccaagcaaactcagtaccagcagtagaggatgggtcggatcgtgtggctgtctctggaacttctgaccacctcgctcttcatcagatgtgctgctctgttgacctgcagccaactagggatcagcttgcttctgtccccaggggttctccccctgactgcacctgtgtgcctgcaggtgacactgttatcagtgaggtgaaaaacagacctgatcaggggctagagggtctgacttcagggctccagtgccctgttgaagcagagcagctctctgacacagattctgtgcaaatgtttcttgaacttgagaaggaatgtttatgtgaagaaggagtaacttcttcagctgagctgctgagtcaggcctcttctgaagggctggccccaacccaggatgcagaagattcacttttaattagtcattttccaggagctgccttagaacaggaacagcatgtgggttttctaagtgtgaggataaaggaccctgacactggattagatggtgaatattgcaatgccctggattcttctcaggtgcctaaagctgttgaactttgtgctcagcctgatagtgggagggatgcctccactattagcaaggagtgtgaaa

SEQ ID NO: 29156 - DNA, 2268 bp, Mus musculus
aaaaatttttatttcatatgcattgatgttttgcctgcatgtatatgagaagaaggtggaactggaactcccctggaactggagttgcttgccatgtggttgctaggaattgaacctgagtcctctggaagagcagccagtgctcttaaccactgagccatctctccagccccactttcagttttatgacttgtgtcagatcatgttgtgtggttggtcagaagattgagtcagatgcaatgtatataggaacctgattttgttcttatttttatggcagattctcaattattatttgtttcttattcttaagattagactatacattgttagcaaacattttaaaccccatgttcaggcttgattgattttaatttcattttcttatgtcagccgaccgcatgaacagacttcaggcagctcttgccagcacccagcaattccagcaaatgtttgatgagctgaggacctggttagatgagaaacaaagccaacaagcaaaaaactgcccaatttctgcaaaattggaacggctccaatgtcagctacaagagaatgaagagtttcaaaagaaccttaatcaacacagtggttcctatgaggtgattgtggctgagggggaggctctgctgctttctgtgccccctggagaagagaaaaagactttacaaaaccagttggttgaactcagaagccactgggaagatcttagtaaaaaaactgcaaatcgacagtctaggctcaaggactgtatgcagaaagctcagaagtatcaggggcatgtggaggaccttgtgccctggatagacgagtgcaagtccaagatgtctgagctacaggttaccctggatccagtgcaactggagtccagcctcttaaggtccaaggctatgctgaatgaggcagagaagcgccgctccctgctggaaatactgaatagtgctgctgacattctgatcaattcttcagaaatagatgaagatgagatccgagatgagaaggctgggctcaaccagaacatggatgccataactgaggagctacaggccaaaacgagctctctagaagaaatgactcagaggctcaaggagttccaggaaagcttcaagaatattgaaaagaaagttgaaggagccaaacaccagcttgaaatctttgatgccctgggctctcaagcctgtagtaacaagaatctggagaagctaaaggctcagcaagaagtgctgcaggccttagaacctcaggtagactacctgaggaacttcactcagggactcgtagaagatgctccagatggatcggatgcttccccacttgtacatcaagctgaggttgcacagcaggagttcttagaagtgaagcaaagagtgagcagtagctgcctgaccatggaaaacaagctagaggggattgggcagttccactgtcgagtccgagaaatgttttctcaattggctgacctggatgatgagctagatggcatgggagccattggcagagacacggatagcctccagtcacaaattgaggacgtacggctcttccttaacaaaatccaagccctcagatttgacatagaggactctgaagcagagtgtcgaaaaatgttggaggaagaggggacgttagacttactgggtctcaagagggagctagaagcccttaataagcagtgtggtaaactgacagagcgagggaaagttcgccaggagcagctagagctgacgttgggccgagtagaggacttctataggaaactgaaagcgctcaatgatgccgccacagctgcagaggaaggagaagcgcttcagtggattgtgggaactgaagtggatgtcatcaaccagcaactagcagattttaaagtaagttttgccctccttttttatttcgtttttctctctaatgcttaatttttagacatcagttgagagtctgtctttttcacttggtttcttattcttacttccattaccaacaaaacatattgtgtagaaatctaagagtctcttaggtgtctaagaaaacagttttgaacatttttcaattgtggtttccttctatctttacagccaattaaggatatggaagaaagccttgtctcttagtctaagaatctcttcatgatttcttgatttaatagacttggtaactgcagttaaagtgttcatggtcctttttctcaggctgagctgtgagccttctccagaaatgctagttctgtacacattgcagagaaaccttattgatatattatgaaacagtgta

SEQ ID NO: 29157 - DNA, 1295 bp, Mus musculus
gttttccattggtgtcactagagaatattcaaaacactgcctttccactaagaaacttacattttctccatagagacttctccctaccatgcttcctcaagacctcggcttcctggccacccataataataaatcttatttaaaaaaaaaaaaaaaagaagaagaagaagttggttcttatttccgaaacctcttggattccaatatggaagtcaagtcatagtcttagtggcaagcacctttacctgctgagccacctcactggcccattcttccttgtgacaactgtggtagcttttctatctggtccctagagttttctggcttattttcaaaatgggctggcacagtccaaactcagtttttgttttgacactgcttttagatctgctttctctgtgtaaacatctctgtgttatttctgttccagtttatgctgaaggaatttgaagcacgaaggcagcagcatgagcagctgaacgaggcagctcagggcatcctaacgggtcctggagatatgtctccatctgccagccaagtacacaaagatctgcaaagcatcagtcagaagtgggttgagctcactgacaagctcaactcccgttccagccaaattgaccaagctattgttaaaagtacccaataccaagacctgctccaggacttatcagaaaaggtgaaggccattggacagcgactgagtggccagtcagccatcagcacccaacctgaagctgtaaagcaacagctagaggagaccagtgagattcggtctgatttgggacaattagacaatgagattaaggaggctcagacgctgtgccaagaactctcactgctcattggtgagcagtacctcaaggatgagctgaagaagcgtttggagacagtcgccctgccgctccaaggcttagaagaccttgcaggtatctaaagtgaataacaaaaggagtggctaggcaggccaagaatgtagaatgacccttccatagtttcttggggctagcataaggttccacttatcctttcttccagtgacaataagaatggagtggttgttacacagtgaacattggggtgtatggagcgtcactgtgctcaccacagtgctggagatagactaacaccgcatcagctagcctgcaggcactcacctctggatgtactgatgggtggccttatagacgcttttaaccacagcccttgttttctctatgttgccaatgcacatgcatagccaaccccatgattgcaaatgagagtgtattttgggatttttaagatttttttaaaaa

SEQ ID NO: 29158 - DNA, 1170 bp, Mus musculus
ctataagtccaacatgtagaaggtagaggcaggaagattggaagttcaggctttggctggcctttgctatatcagattatctcaaaacaaacaaaaatctagtctagcagtaatctttctctatctcctggctgaaatagtctccaaattatttctcagaaatttaaaagagaggggctagaagaatattccaagttgattaatcccaacagtatgaagtaagttgacatcttacttcacctcctcacttttgttaatgtcacatttacttagcattttatggcattcatctgtgtataaaatgccaaagccagaaaacagattagtgttatgttttgttttttactttgtttatttaaacaggaactttcgaggaaggtaatcagtagttgactagaagagttaggagggatgcttgatcctgacagatcatttaggagtaaaaaatgaagggaagaaggactatcaatctcattgttttttcccatgatactagatcttacagagattcagtgtgacatgtttgatgtaaattcgaagtatgagaaactgtgggaagtgctgcgagaacgacaggaaagccttcagactgtcttcagcagaatggaggaggttcaaaaggaggcgagctctgtattacagtggttagaatcaaaagaagaagtcctgaaagccatggatgccactttgtctccaaccaagacagaaacagtaaaagcccaagcagaatctaacaaggtactgtgtttccattgtgagctgcacctgaacaggaggggaggaggtccctgcaggggctcctgccccagtctggggtctaagcctgaatggagtctattctcgactggaattggtggtatgtttgccctccaaaattttaacatacctcattccagtctccgtgacaattcttgttacttataaaataagaaatggttatgattcagatttgggggagggggcatgttttcaaaaagaggctagctccctcctttcccacattattagctcattgagaattgagtcttattttccacgtgatacaactagatagctaagcttttcttgtccaggcatttttgcaactcttaggggaacctaaaaattgtggataggtatttattcttgagttggaaatgtatggtgcaggagagaagccttaacagttaa

SEQ ID NO: 29159 - DNA, 1128 bp, Mus musculus
ctccctccctccctccctctccctccctccctctccctccctccctccctccctctccctccctccctccctcccttccttcattccttccttttatgagacttctataagtcttaatgtgtagctctggctggtccaggaatcactatgtagaccagtctgtctacagaactcacggagtacctcctgtctctgccttcaaagcattatgattaaaggcatatgccactatatccaggataggcatagtttcttgtcaaaatggtgagagggttgctgcagagatggttcaggagttaagagctttagttgttcttcaggtgaccggggtttggtttttagcacctactgtctgtaactccagtcccaggggatccaatctcttcttctgacctccgcaggcatctggcatgcacatgtaacatgtatatacatgcatgcaaaacactcatgcgcataaaataaaatggtgggagctacgtttctaacagttgtccctgctgatgaggaaggcccagatgactcatttaccaatctggttcttttactaggatcttatatctgactgggaaagtaaaggagccctgctgggagaaatcaacgccaagggcactgccttagaaagtctcatcatggacatcacagctcctgattcccaagccaaaacaggtgagtataggctctgaaaaatataataaatgcatttaccgctctgcttgtggcctttggagatgttcctttgtttaattaaaattaaaaagttgaatatgagaagaaagaagatccacaaagccatattctctttcattctggtctgtttcttactgtgctgaacaatgctgctccattttgaaaaattcttcttgtaagtaagtgaattaacgggcctacttagggctaacaatgaatgtataactacattttttatcttagggaatctttctattttgagcatgtaaatgatacaggtatgataccatttttagccgtgggtgggtgtaagtgtctagggagaacctaggtatttgtgagtctgttggtacatcaaaggctggcatacttcttcaaagggaacataaatgttgtgctcagttgcatgaataatctttggccataaccaaatctttt

SEQ ID NO: 29160 - DNA, 1220 bp, Mus musculus
ctgatttgcaaccttaattttgttaagaccagagactttatcttaattatctttagtccttggcatgttgcataatttctgttcttattaaatgccaaattactaattaattgaatttggctactttattaatatagttcaaaaatattccatttgttttgatgttaattatttttaattaatatatacaatttaaatactactttctgagtattttgtttgtttgagtttttgttttgtttttatttgaggcagggtctcactatgtagccctggctttcctggaactcactatatagaccaggggacctcatatttacagagaccccttgcttcttaatcccaggtgcttgaattaaaagtgtagactattttgactgctatctgtctgtctgtatgtatgtattgtgggctagccttgaattcactatgtagatcaggctgacctcaaagttcatctgcctcaaccttctgaattaccaggattacaggcatatcctaccatactcatctttttattcttaaacatattttataaaaatagcatcctgtgttttttctcatggccttgattttccagattccatatccagccgcttccagaacctctcttgtagcttggatgagcggtctgctttgctgcagaaggcaattgctcagtctcagagtgttcaggaaagtatggagagcctgctgcagtccataagggaagttgaacaaaacctagaaagggatcaggtggcatcactctcatcaggagtcatccaagaagccttggccaacaacatggtaagagaaccttactcctgagagttacactaggagatgagtttgccatttctgtagtaatattactctgagaaagtagcagaagagaatagtttctgtccaagaatcttgtaataaggcttgaagatgatgactgatctatgtagccgttctgctactggggctgagaatgtaactcagtaatagaatgcatgcttattaacatgggaagatcctgagttcaatattcaacaccataaaaaagaaagagaatttttcttcctaatttccaaacccctgttgaatccaaggaaaagtgttgggagcaaataatttggtgaagtgaatagagaaatacaggatgtaccattcttcaggctcagtcacagtcctccaatctccttgagcatggagttattacaaagttagtagatggctcagatctactagca

SEQ ID NO: 29161 - DNA, 1215 bp, Mus musculus
aatcacttcattcagaatggtgcacttagaaaatgtgaaaaactacatttttatttaatagttttagatcatagttcatcatgaagaagtatggagactgtctggtctgctatccaagactggcaggctccattctgctagaatcatatcgtccttttatttcttccacttgtactcagagacagagttctagccctgcctggtctacagagctagtttcaaggcagccaggctacacagaaaaaccctgtcttgaaaaacaaacaaacaaacaacaataacaaaaagaaacaaagaaaagaaaagagttctctttgaagacaagttattgccaagtaaaaattttgctatttaatattgaaggcttgttttttgtttctttggtaaattatcatcagaatgtcagagattatatacatatatgtcatccttacagaagactgaaaggactaaaaggcagtcacctttgtttctctctgttaaggatttgcagggtgacattcagagtcattccacctcatttgccactgctgtcaaagacattgaagggttcctggaagagaaccagaccaagctgagcccccaggagctgacagctcttcgagaaaaacttcatcaggcaaaggagcaatatgaggttctccaggaacggacacgggtggctcagaaagagctggaggaagcagtgacatcagccttacaacaggagacagagaaggtagctggcctgctactggtttttcaaagacacattggagcagtctttagagttacagaagaggtctttaggagtcagtcttttcattctcaaaaaatatccaggagttcaggtcaggagtggtttgtaaaaagtgtattttaccaaaaacaaaattaaaacttgctagctctacttatagtttctactttggctttgataagctataagaaggaaaaagcagatgatatgatttttttgccccaatattgattggtgacctatgagtattagaaaaatatctatggggctggagagatggctcagcaattaagagcactagctgttctgccaatagtcctgagtccgattcccagtaaccacatggtagctcacaaccatctataatagaatctgatttccttttggtgtacataaaaacgtactcatatgaatatctctaatttgggcatcatttggggtcctaggctttgtttcccaggcagctgtacagttgc

SEQ ID NO: 29162 - DNA, 1172 bp, Mus musculus
ggaaaaggggtgtgatgaacaatgtgctcaccaaatacatccacatacaaaggctttaaaataagttaaagatgactaggtaggtgatagctaagtgagatttataatttgtttaaaatgagaatatctgtggaaggagtaaagacatataaaataaaactatatcatgcatttttagatctaataatttaactgaacaatgaatttatattatttcagcatccaaatttgtggtatatgagtaaggctaagaaagcaaggaggtcattttgattatagttgcagcactatgagcatagcgttatatagcattgacatcactaagaatcatggaatatgtgtgagatgccaaagttcagtataagagactggatgtattcagataatccattcatggcaacaatagagcagttttgaatatagtttggagagttcttgccttgagagaaatctaatgcttcgtccttcaggctttcagaaggagagaaggaacagatctctgagcagttgcgtgtgctgaacaagacttaccatgacctttgtgatggttctgcaaaccaactccagcagctccaaagcgagttggctcagcagacggaacaaaaggtatttttactttttggctccatatattatggaagccttttaagtggtatgaaagtggctttgctgattgagagtcatgttcactagcttgccatgaccaatgtgacttaatatttaacctcaccttagcagccatttgtcatgtgtttctttactggggttccatgatgtgttggtcagtcaaaaatatcagagggcatttatagcaaaccctctgtttctggtccactcccacctccacccacattttaccattgcatattggaaaacagttaatgagaatttaaattctgtatttgtatctgatcacaggtcactaagattttactcctttgagacattgtcacccaagagttgatagccaagggttgtggatattggcaagaacatgcttataaccctcttccttctgtagcgtgaccagggagagtgaacttcactgactgagacgctggttcccctcaccatccatggccatcctgtcacatagcacattaccagttctcacctcaccttcacttttgtaccacatggaagtcattatagttgctgtcgattgtcttaag

SEQ ID NO: 29163 - DNA, 1199 bp, Mus musculus
aggctccacttgctaaagatggtatatcctgtccaaacaacacctagtaacagcgactgagtgctcaaatgcctatgaggatatttttcattcaaaccaccatgtaatagaacctcagataatggcagaggcaccaggcaactagtttcttaatgttcactgcatcatttttgaataacctttggagtttcaaataaattttagtgggtgaaattttccaaatatacaaatatgcctgtcacttccacctttaaatattttcattagagaaagagatatgtctcagtcacttttctgttgttagggtatgataccatgaccaagtgagcttatagaaaagtttatttgggggctggtgagatggctcagtgggtaagagtacccgactgctcttccaaaggtccagtgttcaagtcccagcaaccacatggtggctcacgaccatccgtaacaagatctgacgccctcttctggtgtgtctaaagacagctacagtgtacttacatataataaatcaataaatctttaaaaaaaaaaaaaagaaaagtttatttggggccagcagtttcagatggttaatgtctgtgatcaccaatggagaaagcatggcagcaggtgggcaggcatgacactggaacaggagctgagagttcatctggatctatgaacaggaagaagagcacatactgttgaaattacaagtcttttgacacctcaaatcctttctcactgagccttctcccccagcaaagccacaccttccagtccttccccatcccatcaattggggaccaagtaatcaaaacatgagtctatggatgcactctcattcaaaccaccgcataggataagcagaaatcttcagtaaggcataatttgttggagaaaaatattagaaacctccatagtgtgtacagtaaaatgccatgacattattaaaaataatgtaatagatttaagtgaattagcatagaaagtgatttatattatattaatatattatactagatataatgattccagtaagaactatgtatcaacaaaggtacaacactgcatacaaacaattttagaagtgtgtttatgtgtgaacgtctcagagatagactctagtgtatataatatacattcccattcccgttttggtcctatgtagtaagtatgcaatctttttgtaattacaaaaatacttgcaagca

SEQ ID NO: 29164 - DNA, 1124 bp, Mus musculus
caataaatacatagataagtgtaagtaaagttattttataaatagtcacactcatttatgagacagaatcaatatttctgacaggtaggatggcccaatatttgccaacctgtagtctaaacaaacactaaatgaagtccagcaagaaaatactaagtttttgttgtgtgatatgttagctatgatcttaagtaaaggaagtcaaatttctcttgtcctaggactatgagttgcagcttatgacatataaagccttcgtggagtcacagcagaaatctccaggcaagcgccgccgcatgatttcctcttcagatgccatcacacaggaggtgagtggatgggaggaaaccatgtcttctgaggggaagtggggggagtggctgtgcaaggtgggttgggaagagaggagggtctgtgattgggatgtgaagtgaataaataaataaattaatggagaagaaaaagaaaacctctcatttctcttatctttctgttttcttccttattcaactgttgaattttacttttctggataataacttatctaaattgttcttttgaactatagttcatggacttaaggactcgatacacagctttggtgacattaacaactcagcatgtaaaatatatcagtgatgctctccggcggttggaagaggaagaggtgagaatagttgggtccccatccttttgaaaaaatgattaaaaatactgtgcctcaccaggcatgatggagtatccctttaatcccagcacttgggaggcagaagcaggtgtaggccagcctgatctacagggcaattccaggacagccaggactacacggagaaaccctgtcttgataaaccaccaacaacaaaatgctatgcctcaagcagagggcgtagctcactagtattgcttgtagctaacatgtaccaagtcttcaagttgatctattaatacatactagaattcccatgcctcatcttttaaaagataaataaaattcatgcagacattttttttatagtgaccatgttctagaaagtttggttgttggttctttaaaccagtgttcctagaggaaatagttactttctacaagccccaggtcacatacacagcctggtttatgtgta

SEQ ID NO: 29165 - DNA, 1194 bp, Mus musculus
ttagtgggttccagtcacttctgtcattttgatgccttgcttatgatgtaaggtatgactagtagagacagaaaattcttctttcttaggctaaggaggggaggaaaatatgtaggcacaggagtttaatcaactcatataagtctgtattgtctctacttaaattactaccctaaagctaatgagattgacagatatctaaagatagtaacctctatctttcatcacatcctgctacaagaaattacagtctttataaatcataatcctgttaccctgacaatagtctgtaaagtaaagatgtaaatggtaaatttgacaggcattatcttgagatgctcggctccatagggttcctcagagctcttaggattagttttacttactgttaggaccctgggtacattcacagacatcactctgccttgcatcacttatccccaagggaaatcccgcccttcatggttgagcccacctggaggcctgagtggttgctctctatttgtgttaacattaggattcttgacagtgcttgcatttgttcctccaggcaatctgaggtagaaagtatccaggaagttctgagagattaccgagcctgccatggaactctcatcaagtggattgaggaaaccactgcccagcaggaaatgatgaagcctggccaggcagaggatagtagagtgctgtcagagcagcttagtcagcagacggtgagtatgtctgcagaacaagggacaaaatagacactagctcatcttaagatggcaatactgcagcaattaaacctcttccaaatgagcagacatctaggtcccctctgttgtttgtgattttgaaaaagatactgattttacatttaggccagagagagacccattaggtcatctaatcctgattttctatggctatttattgaaactattaaacatctccattttatttcttgatattatattttattacactagaactggactataggggcttgaaaaactatgagtggaagaaaatgatttaaagcatttttagttggtgttttactttaataccatgtcattaagtacatgaggtctgactttaattgtcttgattacaggcctggcttatatactacttactagctagaaaacattgaagaaattaaccacctttcagtattctacttccttatccttaaaatagcacagttta

SEQ ID NO: 29166 - DNA, 1233 bp, Mus musculus
gtaagaatacacagagtatagagtgtgtgaccacttgtctacttttattaacttacatccaggctacaactaatggcatacctctgcaaccctagcccctggagttgagactcgaggattatgagttcaaggctaacatagattatttaataagactgtgaatgtgggaaggacaaggaacattgtacagtggagtttgagggatagtatggggtggggttgctactaatgttgtttagattggaatgttgattatatagatgaatttggttattgaaaatcaacatgtttacagtaattcactcattcattcaagacaaagtctcactccgttaccctggctggcctggaacttactctgtctgcttttgtctgtcctgtggtgggattaaagatgtgtgccattatgcccagcagatttgtgtatttttgaatatatgtttatcgagtcaacagaatcaataaaaaaagagagagagagaataagtggtatttttctattctaaagaattgtattctgttgtctttagcttcgttccttagcaccaggagagtgccaccaggttatgaaaaacctccaggcccactatgaagactttctacaggacagccatgactctgccctcttctctgtggccgatcgcttgcgaatagaggaggaggtggaagcttgtaaagcccacttccagcacctgatgaaatcactggagaatggtgtgtgcatgaggcagagggagagagggagggagggagggagggagggagggagggagggagggaacatggaagaaggaaacctttgaagggtgctgacagactccaaacacagacaatcgtacaaagatgaattctcaaaatcatactgtggaataagatattttggttgttaatgataatgaaagatttttttttaatttttattttatgtatgtgagcacattgtagctgtatagatggttgtaagccttcatgtgtttgttgggaattaaaatttttaggacctttgctcactctggtcaactctggttgctcaagcctaaagatttttttattattatacctaagtacactgtagctgtcttcagatgtaccagagagggtgtcagatctcattacatgtggttgtgagccaccatgtggttgctgggatttgaagtcaggacttccatcagtgctcttctccactgagccatctcaccagcccccgtcacatttcttcagtaccttaatgct

SEQ ID NO: 29167 - DNA, 1164 bp, Mus musculus
tggatgttctgatgctgtaaatagtgagtgtggaaaccatgaggccgctagacatacacaaaacgtgctctgaaacataaaggagaaagcattaaatctggtaataagaattcataaaaaagccagcatttaaattgtgtcttgtattaatagaattttatgtcagaggaggacattttgagctgagaaaatagtgaagcaaagcctgcctgtcagtgctctgtctccagtgtgtggtacttgtatggtgctggctaactagccttcctaaccatgtttgctcttttctgtgcctcctgagttctcccagtctactcagggctagctcagatcctattgtgttttgtgagtcccttccccttaattccataggttttgcccttttctgagatccctaggcatttgcagtttatacatcatattttggtatcaatcgttttatagactccttaaagtcaggcaggaagcactgttttctttattgcttcttcttctacaatagcatttattctataaaattaaattcaatttgcaggagttgacaatggaactggaagggaaacaagatgtatttcgttctctacaagatacagcggaggtgttgtcacttgagaaccacccagctaagcaaacagtagaggtatgtgattgtaaaatgtgtgaagttaaaagtattgtgataaaaattctgagatcaggagctttgttcttccaaggcctggtagaaattccacatcatttgtgggtttttttttttttttttttttttttttttttggtttttcgagacagggtttctctgtgtagccctggctgtcctggaactcactttgtagaccaggctggcctcgaactcagaaatttgcctgcctctgcctcccgagtgctgggattaaaggcatgcgccaccacgcccagctcacatcatttgattttttttttttttttttttttttaaagatttatttatttattatatgtaagtacactatgtagttgtcttcagacactccagaagagggagtcagatctcgtgatcggatggttgtgagccaccatgtggttgctgggatttgaactcctgaccttcggaagagcagtcgggtgctcttacccactgagccatctcaccagcccacatcatttgattttatattggcttct

SEQ ID NO: 29168 - DNA, 1147 bp, Mus musculus
cttaatgtattcctttctatttcaaaatgacttgcaaaggtatgctagcacatgtgactttgaaacactggtaatctactgaactcatttaggatgcagagtgtctaaagtcacatggcaattcagtatttattctgttatgaccttcaggagtcacaaacactatgctacttccttccaattaacactttaatttgacatttgccttgaaaaataccaaactagatgatgttaaaataccacttcgcattcctgtaataggttttcaaaacactttctctaatatagtctaatttttatttttaccatgtgcttgttaaataaataacgaacaatttattttaagcatgtgttaagtctcttcttgtacttcagggtcatgcgcctgcaggatgagctggtcaccctgcgcttagagtgtacaaatctataccggaaaggccatttctcgtcacttgaattggttccgccctctactttaaccactactcacctgaaagcagaacccctgaacaagacgactcattcttcttctacctcctggtttcgaaaaccgatgacccggactgaacttgtatctatctcatcctctgaagacgaaggcaatcttcgatttgtatatgaactactctcttgggtagaagagatgcaggtgggtgtagtccagaaagctgtcttaagatggccaggttgctttgtgttcttggtagaggaaaaccttaattgctaatcctgtctgcatctaagaactcttcttattaagtgtcactttgcctctccactatttagtccaggaggccagtgtagcctaggctgttcttgaactcatgatcttcctgcaccagcctcctgaatgctggaactacatatgccaccaggcctgattcctttctgctaatattctaaatgaagagagtcagtatagattataacaatcccacactgtttagcatctgttactttctgctgactgtgccctaagtggtagcttgtgggacacttgcacatctatgtattgcaggtatctgttctgatgcttcctttttggaagaggcgtttattgttccgtttttgttgttttggtcatatctcttaagattaagcaagactgatataaatatatttattacacatgtccaatggcact

SEQ ID NO: 29169 - DNA, 1196 bp, Mus musculus
aaagagattctggggtattgagtagtattgagatttcttgtggtaatggttgggggagactgtcttaaattcctgagagtgaagtaattgcaaagaagcagatctgcagtgttaacagagttctaatctttcttctacaaggtagctttggtggtttagggttgtgtccatttgctgctagcaaggaataatctgcgggtaaatgtgtgtgactttaagtagcctgttctgtgtataataagtgatctctaaaaagaaaacagcctctcccttctgccagcctctaaccacttcctgtaagtgacagaacacagatctctgtttcaccaagtgaaacatcaattgtattttcaccaagacagctcccttctcattctttttgccttcacaaatacacatacatacatacatacatacatacatacatacatacatacacacacacacacacttgaaaaggctgcagataaggatatctacctggggtatgtagaaaagcgatatatctaaggataatcatatcctttcagggatatttatacagattaaatgaataacatatgagggtatttttgttgttgttttgagatagattctcctcttatccctggctggcctgacactctactatattgaccaggttacttttggacttagagagaactgcttgcctgtgctgggattaaaggtgtgtgccgccatacctggtcttgaaattgcttatagtagttgcataaaaattgttatattttcttccaggtaatttcatctttgaacattatagcccagaagcttctctgcttgcttctccactgtggagagtgtcacagttatctttgtacctagggcatctttcagaaggctgggttttttgttttgtttgtttgtttaattgagtgaatgaagcactatttcacaagggaatccttattttttaattgaatgactgaactgttctgttttatataaaaaatgtttcactgaactgtgccattgatttttattcttcactgtttactcctttaacaagcactgttatgttacatttcattgcatttcatatgctaagcagaactggtttttggtacctggtccctcttactccaggattcctgaaaaggatcattcacatgtcattgatttcttctctttctctttgttcttgatttattctgatcagatattcctccaccaca

SEQ ID NO: 29170 - DNA, 1203 bp, Mus musculus
ttgcagcaaggccagggcatgaattaggtgtctggttgagaagctggaggaacaggtggcctgtgactttagcataaaacttccgactggaaaggtgcttttgtaatccatacttaccagaagtttccatcaacggccctgtcctttgaccctcctccccttttgaaatagggtcttactatgcagccctgtctggcctggaattctctgtggaccttgagctcctgcctctgcctccgcagtgctgacatttaagtgtgcaccactatccccagcactagctaccccttgactctctatttcctctctagggtctcctaggcatctgttggagatggaatataaggagttaaaccacactgaacttatagagaacgattaaacagtgcttaaggaataatttagcttctttatgggggacaattggaaacctccaggggacagatgtactgttttgactgacaagtctttgctgaccatggactgcctgccctcattctttttcatgtttagcagcaaggcgagcttgcacacagccgtctttcctgctgtccaccgtcgtctttcctcgtattcctcctgttctcctgcctcctccatgctgctctgattattctgagaaccacttatgcccacagcagtttgggtgccactcagttgcctttgtgtgtggtttctggaaggccttagggtgaaggatagatagggttggcacattggaaagctatggaattggtaggagaagcaccaaagtgggagctgaaggaagctgggtttgcattcagttgtactcctgaggaactgtttgatcctgggcaggctactccatctctctaagtcttgggtttctgcttctataaggtggggatgaagactcttgcctttatgaatagaaatagaaatgatttaagttatatattaaaggacattgcctggcacatatattaagcacttagttaagtctgttagctttgctgtgattgacaattcagaatgatttagattgactatggttagtttttttgtctcctctcacggtgttagtagtacactttatatgccatactttgaaattgtgcttttcttggtctttgttagagtcaggtagttgtagcacacccaagggtcttggggcttttagcttcgttatctccagcacctccctgaagctgctccagatacacaaagtgaagaaagcagtgt

SEQ ID NO: 29171 - DNA, 1142 bp, Mus musculus
aaagttgtgatccttgttcctctgctttcccaagtatagtacatgccagctaccatgcctgcttcaaagggaggtttgagtagattcttaacccaatcttactgagagagcacagaaatctgcggtgctgggttttgtcagggtattcataaagaaaggtatgagaatgtacctttgtgcatacaaaaccccactcttagaggactctgtctgtttcaggcacgaaacctacctgacagaatgggaacctcacccccaccctgtaccctttcttaaaaaactcaggcaggattatcaaacttcacatggacgttccctgaatggaaaagactcagtagaaattccaggcttttcttgggccccgagctttttagcatagctgttcagctcttaatcattggcataattccaattccaagacagcctgaaggtgcatcagtggtggcatggttggagactatagggaatctacctgtccataaaattagagaatataacttaaaacattttttaagagacagttttgctgtttaattctgtctggcctcaaactcaccgagaactgcctgcctctgttaacctaatgttaaccacattagggcagctctgactcagatttaacaataacctcaagtagatgtcttagtgtgctggttactgtttgtcaacatgacataaactagagtcattttggaagaggaaacttcaattgaaaaaaatgtccccagattagcttgtgggcaaacttgtgtttcattttctttctttctttctttttttttttttttttttggtttttcgagacagggtttctctgtgtagccctggctgtcctggaactcactttgtagaccaggctggcctcgaactcagaaatccgcctgcctctgcctcctgagtgctgggattacaggcatgcgccaccatgcccggcttgtgtttcattttcttgattggtgattgatgtgggagggtctagctcactttgggtagtgccacccctgggctgatattcctgggtgttagaaggttgaagaagccctgaaaaataagccagtgagcttcctctttccatagtgtctgcttcagttcctgcctctaggtttctgccctaagatctggccctaactttcttggatgat

SEQ ID NO: 29172 - DNA, 1099 bp, Mus musculus
cagaggagaatgctctactttagctggacacgtatgcatgcacttttgcacacatgtaagcatttacctcattcagatatgcacacacacacacacacacaatggttgagattcacctgttgtggctgtgccccaagtgccaggatgaaggcagaggcagtggggcctgggccagagacagccctttgcctgcagcagtctgagttccatatgaatactctatgctcaggataattcaggatttttgacttcattacacagaagaatttcaaaacaagccagcataaaacagagttgagagtttattaagtttcaatatagatttaagcagaggtttaacagaccaaggggctcgagtgtaattctcaaggacaaagtcatgcatgtctttataatagtcatatatatgtttgttaaactcttctaaacttattacattcattttgtgcatgtaagtttgcattgcgtgtgtggcggtcagaggacaacctgtgagaactggttctccttccctttatatgggttccagggatcaattttgggttgtcaggcttggtggcaagtgctttaacctgcaatgattttggtggcttctgaagttacaccttaaatgattgctaaggcacttaaatgctatcacaaggtagcccctgacctgaggtcgcaagggttgtacaggagtttttatttttgggattctcagaaattgtaggcttccatttaggggagtaaaatcatgtgcgtccagggcttcagcatacttgattgctatttaagcattcttatttggaatctatatagaaaaggaatctttttgttaaggatatagcttagttagtagtacttgcctggcattcgtgaagtcttggatttgatcaccagtcctctgtaactgcatgctagccagccacatgcctgtaatcccagaatgcagatagaggtggagccaaaattcaaggtcaccttgggtgcatagtgtaagaaacttgtttttaacaagcttatattatacaattaacagaaaataatctgagaagttctgttcccagacatatagcctgagacccgctttcttgtcagtgctatcaaaggagagggg

SEQ ID NO: 29173 - DNA, 1180 bp, Mus musculus
gttgtacatcctagcactcaggaagccctgggattgcttcctagtccttcatatactgagtgatatgttgaatgcctgtaatttcagcactcaggagttgtaagaagaagatcagaaatttaagccatccttaactacatagtgagttccaggccagccttgggtacatgataccctgttctcaaaccaaaccaaaccagaccagactaaaccaatatggaaccaaccaaataaaccccccaaacaaacaacaggcatactaacaagcagacgtaaccatcgtaaaacaaagtctctgcggatgaagttctgatgagcttcaaatcccacagcacagggatgtatgtgggtcggtgctggtcgttcagagatggcatcactggtgaggagaccagcctgactgactggtggctcagtgagagtccccgtccgtctcagtgaataaggtggagagtgattgaggaagatacctgctctcaggcttccacagcacatgtgtgtgcacacacatgcacatatacattttgaatacatacacgtgaatgcataacatttgtgcatgtgtgcatgagcacacacacacaggatcatgcagagagagaggaaaaagaaaaaggtaaaactgtaatgtgaatgcgaatgcgaacacctgtgttttatgcactgggcaggagtgacaagggtgagacactcactactctaggagccaggcactttagatcctagagtctagaggttcacattgcagttgagtcatgaaactagattaagaggtgatagagacctggagagattgtgagattgttcataaccacctgtaattccagttccaggagacctgaaacaaaggcaccaggcctgtgtgtggtatacatacgcacatactcagacattcacataaaataaaaataaagagagggggtggggtgggggtactagaccataccttgaattccagttttagggaaccagagacaggtggatttctaagttctctatgaattcaaggtcagcctggtctgcatagtgaggccagctaaggctacaaagagaaactgtctcacccataaaacagagagagacaaagagacagagagagagagagagagaaagaaagagagactgtgaactgtgagattgcaagagatagagacagagacatggcaagaatactgactac

SEQ ID NO: 29174 - DNA, 1117 bp, Mus musculus
gacagggtttctctgtgtagccctggctgtcctggaactcactttgtagaccaggctggccttgaactcagaaatccgcctgcctctgcctcccaagtgctgggattaaaggcgtgtgccacaacgccccggcttgggccccacttctgctgtaccccgagaaacattgctgactcacttttatctttaggttttcatctgttaaaatcaatcagtgatttattggtatccataagaatacagatgagctgctggcatacattatgctatcactgttttttaacgattttcattgagataacttacattttcaaagccatttcacattcatcttatttgagctttataacagtaccccatacattcagtattattaagactgggacatttggacccagggccaaccacaggtttcagagctctggatgagggttttacatgggtatagaggaaccctcacaatagagcattgacttgagttagttgagatgattgtgaaaatattagtaaaataaagctgctggtgtcattgctggcttttagcttctgaatgataggcacacactgaagtgccttacaactctacagttctgaactgtggaaaatttcttttcctttttttcgattgaggcagagttttgctgtgtagctctctctggactggaactcattatatagaccaggctgggcttagagttatagaaatccacctgcctttgcctcccaaatgctgggattaaagatgtgtctctcccccaaccccccagttatggggaagtttgtagtatataagtctccgagaattttatacatagcaatgcattgcaaaatatatgacttggctaacacagtggaaagggtaaaatgaggatttggaatttcttactcaagtaattctccttggttaaaagtaaactcagtttggcctggtgtggtggcgcaggagtgtaattgggaggcagaggcaggtggatctcttgagttcaaggccagcttgatctacaaatagagtctcaagagacccagggctacacaaggaaaccctgtctcaaaacaaacaaaaaagtaaacccagttcttctttttttttttttttttaagtacactgtagctatct

SEQ ID NO: 29175 - DNA, 1193 bp, Mus musculus
ggcctgcctggttgaggcaggggtctagttattattattattttttttcttcctctcagaaataaagattggtctcggagctcggatttcagcccctgaaggctggcttgcgaagcagttcagcgagttaatgtctaatctccgccgagtgctcgcagagaaagttttgacaggccagcagggctgcgggctgcctttccctaaccgccctgagtggaaggcaggggtgcgtggccctggagccccagctttgatttatcttcagtgtgctctggactgcattttttttttttttgagatgttgattttcctagaaacttcacaggcaggcacccctacccccctcttgaaaacctgctctcctgtgactagccttgcctttctttccacgtgaaggagagaaatcttcaacccttaggactgaggccagcattcttgtttacaacacctacccagtgaaggaaaactaaagacaaagctgtaacccccgcctcccagcacccctggccccacaaccctggacattaggacgctacctgggagtgcagcttgggggaaatcagatgaaatggtgaaggactcgctagggcggctgatggttttttgctgtatcagctcctgtaagctgttcggtcttcctgcctgcagggagttttctgtcagcccccctcccccttctcttaaggaacggggattattgcggagcacaaagaggttaggttgtgcggctgaacttctttgaaaaactgctgctcgctgagtggttccattaagtttcctttgcagccttttgctttgccctcctcagagggaggatacgctggggctgtcactggctctgactgctttcaaccagcagaattaaaaacacaaaaaggaagaaatctcagtacctcccagggtcaagttgctggtggcttctagctgaaaggaagttgggctcccctgttatggcaaagaggaagtagggcttggatgggttaccggcgggcgttcagacatccccctcagtttgactttactcagacggactttgttccagtatgtaggaatgtgagtcttctcagacacaagtctatttctttcctaaagacactgtatttgtattcatttattttaattattttacttttatatacgagtcttttgcttgcatgtatggctgtacaccacaagtgtacctggtgctggag

SEQ ID NO: 29176 - DNA, 1493 bp, Mus musculus
ttcttctttcttcttcttcttcttcttcttcttcttcttcttcttctttcttcttcttcttcttcttcttcttcttcttcttcttcttcttcttcttcttctttcttcttcttcttctttcttcttcttcttcttctttcttcttcttcttctttcttcttcttcttcttcttcttcttcttcttcttcttcttcaccaaatggcggatgacgccggtgcagagggagggcccggaggacccgggggcccaggattaggaggccgcggaggcttccgtggaggattcgtaagcggtcgcggttgtggccgtggccgtggtcaagaccgcggggctcggggaggtaaagctgaagacaaggagtggatccctgtcaccaagctgggccgcctggttaaggacatgaagatcaagtccttggaggagatctacctgttctccctgttctgaaaatcatgccagtgcagaagcagactcgggctggccagcggaccaggttcaaggctttcgtcgctattggggactacaatggtcacgttggtcttgatgttaagtgctccaaggaggttgccactgccatccgaggggccatcatcttgcccaagctttccatcgtccctgtgcggagaggctactgggggaacaagattggcaagccccacactgttccatgcaaggtgacaggccgctgtggctctgtgctggtgcgtctcatccctgcccccagaggcactggcattgtctctgctcctgtgcccaagaagctcctgatgatggccggtatagatgactgctacacttcagccagaggctgcactgccaccctgggcaactttgctaaggccacctttgatgccatctccaagacttacagctacttgacccccgacccctggaaagagactgtcttcaccaagtctccttatcaggaattcactgatcatcttgtgaaaacccacaccagagtctctgttcagaggacccaggctccagctgtggctactacataaggactttgtacaagaaaaataaaagaattaagtctgctttaaaaaaaaaagaagaagaagaagaagaaatgaaagcagttcagactccgggatgtgttttgtgggttgtgtggtttatttttgttttgccttacatataggaatgtgtactggctggatcaaactcggtgcttcattttttttaattagatgtattcatttatgtattgcctgtgtgtgtgtatcatgtgacccgcctggagccccaggagtcagaagaaggcattagatcctctaagagtagagttatggatggtgctgagagttgaatcaggttccatgtagaagcagcagctgctcctaaccactgagccctctccccaacccccaacccccaaccccagcattggcatgttaggcaggcaactgagcctgctttcttgttttatcttgaggtagcatggctaaaccaggtcaactttgaattcatagtgatcctccttcc

SEQ ID NO: 29177 - DNA, 1493 bp, Mus musculus; identical to SEQ ID NO: 29176

SEQ ID NO: 29178 - DNA, 2091 bp, Mus musculus
tgggtaccaggtgtgacctcaagagatggctgctgtacactttttgcaactggtttgatatcacatttcagctccaactttgcatcctgagaacacttaaatgtttctgcaggtccattttatacaacttgaaagaccttaaaactttctggttgccacaagcatatctttcttttctgctcatccactaaacagctgtgccctactgtgataggttttccagacaaagtacctggaacagcagtctagcaaagaatgccttcagtggcactcaacacgtggagtctccccaagcacagctctgtgagaagtgtgagtgtgtgcgtgtgtgtgtctgtgttttaagttattatttgtattgtgcaaaaaaaaattttgatcttggggattctggctgtgaatttgatgcacgacaattatggttaaaaacattttcttggtctacagaagatcattaatgtttggtgaccatataggttgtaacagtgggttgtttatttgtaggtattatcgttaaatacagggactgtttccaggcacagaatttgaaatgtaagttaggatggacattagatgtgattatgatgatctagggaaggtctgcagtcctgaatctgcaaatacgtggtgagaaattagaacaaactggagacaggctatcagtacatggactctgcctagctgtgctggaaaaatactttgactccaagccttaaaatatcctgtggagtctgagctcacctcattcatacagtcacggagctccctgaacgctgaacttctacagggaaaagatctcccctggagcggaagatcagggtgtcctcggagcgtgtaacaagtgcggggctgggccaggctcacagcactgctacctgggaggagccgctcaccttcgcatcagttccaacatagaatctggaccctttgtccaggttaccccaaactctcctgaggtgtccgtgttcaacccttagagcttggttttggcaataccctgcctgaagttgcttattggctgttctctgccttggtcccaaggctgtgagcagaaagcagcctctgttttgaggaggtgggatttaagtatacatttatttttactgtgacttgttcaggaccacattttacaaaatgccttgtttcctttactgttgttttggaaaggaaagttttatgaaaactgttttagtttgaatatagaatagttatattaattacggctttattttggaaaaatcttgagttttaattcaaatgtttgctaataccttccaaagtaaggtgatattcagagacagttgttgtgatcagctggcttgcggacatttctggggtattcacatttgaagattccttattaatgaatgtctttgacttaaatctaaccaaaaactgcaacattattctttgtacattttcattatatagtgttaacaagcttagttgcaaacgaataaaatacttaagctatttgtttaccttgccttcttgatgctgtgatgatgtgtattagttcagataactctcataaggctgctataaccattcccacagttccacagcctgttggagatttacagactctgagagcccaccagtgctcttttaataattaaagaatgactgacttgcttaaaggacagtttgtttcatcgcttctttctccagcgtagttccttgttccctgaagaggagccatagtaatggctgtgtgtggtgggtaaaggcatgtggggctgccgagacttgaaggctgctcaccccaaggcctatcagacaccatggtgctgtgcttccttagaaagcattccgtcagtggcttctggctacaagtggctttcatgatgaacagtcctgacacctcaactgctagcaagcagtgcctgcaggctgtctttaggttatcctctggggccactgagtgtgatacgttgtggttggcattaggtagggaatgaggctacatatttggggccctggaagcctgtgggtctttgaagttcaaggtcatccttggctacattgcattcaaggccagcctgaactatgtgagtacaggagcccctgtatatatgtatgtatgtgtgt

SEQ ID NO: 29179 - DNA, 1126 bp, Mus musculus
atcaataataaaaaactatcttagaaaaaagatttttgaggtcactgggcgtggttagccaccaaattcaggtcctctgtaggatcagtgcatgcaccattgaaccccttccagcatttctttctgtcaaggacttgagtgaagacaagatgctgctgaatggagtaggaaacgtatctgtgcagttcggctacacgtcaggggcttcatcataaagtaaaagttaggggctgtagacatggctcatgggcagatgtgcgtgggtgcaggcctgaagaactcagttcagtgcctgaatcccacaaggtggcaggagaatcatctcctgagagttgtcttctgagtgtgcatacctgcatactcataagaaatataaaactaaaagttctgaccaggcatgagagtataagcctatagtcctagcacttgaaggcaagagggtcaggaattttcgagtcatctctgactacacagtaagttagaggccagccttggctatgtaagactgtctctaaccaccctactagagtatgtgtggatttgtgtatgtatgtgtcctcacatcttgcttaccttacaaagttcatgttaggatcagattaaatacattggatataaaaatgccttgcaaactataaaggattacttgcagatcagtctgtcagatctgccttgcaaatcagtactggcacatctgtaagtatcatagaattggaaaggttggttgtagcctactttggatcaggtttgaacatgaaaatctacagtacctatactgctggccacaaacacatataaagtcctatagtggttaaagtatatagttatacaaagtgagtagggtttctttctttctttctttctttctttctttctttctttctttctttctttctttctttttttttaagatttatttatttattatatgtaagtacactgtagctgtcttcagacactccagaagagggagtcagatctcgttagggatggttgtgagccaccatgtggttgctgggatttgaactctggaccttcggaagagcagtcgggtgctcttacccactgagccatctcaccagcccgtgagtagggtttctgataaaatactagttctggtgatctc

SEQ ID NO: 29180 - DNA, 1203 bp, Mus musculus
ttcaggtagcagagggccgtgctctcctcgcctgatcatgaccatgcacaatgcaacaaagggaatttaagacagaaagacttccccacagtccccccagtgaagggacaaactcattatgtcactgaagtacttagctcacttttctttaatctcgatgccatggcttttattctatgctatgtaggctctttacgaattgtttttgaccacagatgaccctaagggctcctgcgaaccgtcctctggggattggcggaagcatgcggtggtgcagctgcagcgtgtgcaacttcacacactctgcggtcggttgtctgacaccaagtgtcagctgtgctactttgctttgcctgagatatgaattcataattgttccctgttgttcatggctgatacccttcccactgatttaggctttcacattttctttactacacatgcccagtagtcacattccaaagccactgggccccttgagtgcgtcagtgcagctggtgagtgaaatgtactcaggtctgtaacctagcagtgagacttggagcacttcctgcagatgactgactgttgcgaatttacatggaccacggtgatatccaaaggaaaaatgcttttatatttatagattatttcattgaactatatgtaaaatgggtatcaataaatgtatttactccaaagtcagtgtttgttgtgtgatgtgtaagagtgcttcttttctcaccattcctctgtcctttgctgctgtgtgcagtcaccattccttctgttcagcacatctgcttttgtcttgagatcattttcatggcccatttctgctgtggagtaggtgtgggctcaggtgagaacatgtttggatttgtggttttatgttaacagacctctctggtactggggagcatccagagcctggcatgacttgtacattgcatccaggcagaacagtaaggaggctgaggtgaaacaggagtagaaagagcatggtgggctggctcagctggtgaaagtgcttgtcactgagcctggtgacctgagtttaatccctgggatccacatggcagcaagcaagagcagagtcctgcaaattgtcttctgacctccacagatacactgtagctgatggctgcccctacccactaaccatgcaaaagagcccctaaaatcatggtaccaagtttcctaggtactcattactaacctttg

SEQ ID NO: 29181 - DNA, 1101 bp, Mus musculus
gcagcagctgcaagcgccccatcacaggtgggagcggcggcggcgagggcgcaggtaagagttcggatgtaacacgggtgaggttaaggggcagcagtggcccccagacctgcagagctaacctccagccttcctccaggactcggtggaggcaagtatgtgtccttcgaagaccgacattggcaccacagctgcttttcctgtgcccgctgctccacctccctggtgggccaaggctttgtaccagacggagatcaagttctatgccagggctgcagccaagcaggcccctgagtggaggatcctgactctcctctttcccaaaccaagagttcaagactttggcgccttttctgaaccacttctggggcccaacccctccctagaacgggccctcccccaacccccgctccccactcattgggacttcaggattcagtcacccaattttaacacaccccagtggtactccccgacccaggcccccaaatctgggctgttgtggaacacccatgacttaagcctttctccaagtctggattccagaaatgttccccacatcaaggctctgacaccccagccctccaaacctgaactctgaggcctaggcctctttaagtcaagacttctagggtagattttttttttttttttttttttttttttttttttttttagtttttctgcaggtgcctaagaagtcttcaaaaatagattgtacacccggtttgacctcacccccatcccactgctctctctgagctgcagctgtatgtatagcagattaggggctccctggttagagggttgtaaggtacagggtgctgtccagcctctgagtaccatgttatttcagctccatgttgccctgcaacaggaagcaggaaggttgctcgccctgtttccagagattgcaataaagcagtgtgaggggagcacgggccccgtgtatttgtcgagaggatgaaggaaggttgcgtggctgagtcaggcttttgaaacctcctagtgggcgggccgtggggtggggattctccccaggaagaggatcccctctggcagccacgcgggtccctcttgagcttggccaacctccccact

SEQ ID NO: 29182 - DNA, 1213 bp, Mus musculus
gagtttattcaccagttcctctgcggtccactctgagcctcactactcctctcctgttttccttaaggcagccacaattgtcagccccacctgtttcagctcaagaactgccttaagctggtctgaggctgctggaagaatggcagccacctgtttcttctacctgagcctagacctgccccttctccatgccattggctagcacacccatgctgacttgtgaagacatgggggcaatccaccatagtagaactgacgttccacattcaactctagttatttaacacaaatagctccctattcatttttatttaaaagttttaagtaactgtactttgccttattcagccagcctccaggacatgcagtcagtgagttccccatatcccgtactgagcatctcatggtcagatacttggactaactgaagtccctgaaggagaatggcttggggcggcaggactctgcttagaggttcctggataaacaacttttagccatccagatgcttccactgtccaagccgcaaacatgttcatgcatagggcacctgttccctttctgctcaactccaaggcctctcagtcgcccccaagagcactgaagaaagggggttctggtgaaacaagtgggattttgtaggatattcagtcctcccaactgtatataatgcagcacctctcatatatgtaatatattttaatgaaaatgtatttttaatggtgactatggttctctctttttttagttatgtgtatgtgtgtggtggtggtggtacatgcatgtgtgaatgtgctaggagaggccagaggctcagatctctctgaagctggatgtgagccatctaatgtgggttctggtttcaaaagaactctaaggtcagagcagtcagttggtcttctcttccccaatcctcctctctcaagagatggtagttcctggcagctagtcctttgtggcttaagaacagagcagctgatctgtggcatgctggtgcgccagagtcacttattcaaccttactcagagggaatggcacagcagtttgggcctgaaccctgatctagcctctaagagcactgctccaacgtaaacattcgagagaagtcgttcatggggtaaataagcattagcttatgtgagagtctaaaaattacatatacaggaatataatagaaacacgagaaaagtatcttcttgggctttgaaatatt

SEQ ID NO: 29183 - DNA, 1102 bp, Mus musculus
ttgcagtgtttgcatgtagcctgtgtacattctcttatatactttaaatatttacaatatttatttgtgtggaggcacatgtggaggccagaggtcaatttcgtgggtttgttttcttccacttttacatggtgtcccaaggattgagcttgacagcgtctgtcgctgagccatctcgctgctggcctccttctgtttactcatgatgcgttcatacagtataggcgcgttagacgttgttggggggctaataggtggttctgtacatgctctgcacaggcacttctttttaactgtaaccattttcagtccataattggctaagtctatgaatgtaaatccccagattcggagggctgatggcccagggagctgtgagggcctgtcacactgggtcctggggctaaggaccagtctcttacaaccatgtcagctgctgtggcaactgaagagtgagtgaggctctgctcttctctcagcacggtgatgaaccttatgatggagatagtccctgctcttacccttcggtgatggttgaagtttccgttggtaaagttagtacacagtcatgagagggtgattgccgatgtaagtgaagtgtcaggtgtgcgggaaagatgcatggtactggcttttagaggagggtgctgttgtgttgtgtggacatggagaggttgtggaggacctgggaggcagtgagacttgaattaaagcaagagtctcggaagtcagagaagggactagacctttccagtgacgggagagagcgcaggcaaggaggtgggaactgagactcccagaggaccagtgtgctgtggtgagtagctctaggccagcctttctgctctcctgggtcctgggtcacggaacaaacagagcgtcggaaggcctgggaataccctgaatatcctgcctagacactgggaccctatctgggagaggccatgtggacattgttttagaattgttctggcaatgacttcaaaactaggcaccaagactcacgcctgagtgattgagttcagggaacacagagcatgacctgtgtagcagtgagagagagtgactctgtgagcaagcacttgtgtaaggtcctgtcagt

SEQ ID NO: 29184 - DNA, 1149 bp, Mus musculus
tcttcctgtgagcacagcagacaggctgaggctcctcagaccctccgaaacgttaagtgccatggatgtgtcagagttcctgtccctccagagcctggacaccccgtccaatccggttcacagtgaagcactactgcaggggtagaggaaagagcctggccggcagcttctccaggggaagggcctgtgcgcacacccctccaggaacagggtgagcaggaagtaccggctgtgatgctgccgtcatggggtcagaaattggaaggatgaagaaatctgccatctgaaagctcacctttcagacgtattttctttactcgtatcccaggaacatccattttaaggaactgatctttggaggaaaaaacaaaaaacaaaaacaaaaaaagaaaaaaaaaagctaagttataagtgaactgtctggctgcactgtgtgtcacttttgcttattgttatgtgaacttggaaactaaggttacgtgtatgcataaaagttctaaatgaaagggtgtggtttccatcactttggtactgcccatcatttgcactggggtcactgtggattgggcaggagaggccactgtgcctgccgggtgttgcttctcttctgtgtctgtttaatccgaggcagtacctggagggccagaccaccgctctatgaaagcggggagtggcaagggcaggcgtgagttagactgggtgagttgctttgttgttggcacttggtttctgtggagcttggggtagatgcagagggggctgccctgtgtcctgcttagtcctagcgggcagctgcaggcctcctggccagagggaagatgtggttctgcagggccccgaggcagttgttgacagctctgttgataatgtgctagaccctagagctatctagcacagccacagtcttgccttcttggctctttccatctctcagtgcttgttagtgcttgaggcttgaagttcatctctcctacggaagcgccctgttttatcctaaagtgaatgagaggcttctggccagtggctgccagggtcttcctgccttcgatgatgtttgcttcctcagagcagaagggctgcttttccagagaaagtgcagagctaaaggagttagatggtgaggcagcaggtggtcggcaggcattctgg

SEQ ID NO: 29185 - DNA, 1199 bp, Mus musculus
tattcgcccaggctggtaagtatctttcctgtgcctctggggaatgtgagggaggttggagaaaagagaagatttaaagtgcaggttttctccaggcagtgttaattcacgccgttaatctcagcacttaagagacagaggcaggcagatctcttgtgagttcaaggctagcctggtctacaaagcaattccaggacaccagggctacacatagaaaccctgtcttgaaagcaaaaataacaaaaacttaaccaaaaaagtgcatatcttcattaccattttaaagggaccactaagggctgccacagagaggtgttaagtgggctgggactaaatttgctggtatagctggctttttaagattcatcaagtttgtttaacagtgggacagtaattagaattaggctactcagactttggtgtactccatcttctgagaagtcaaactcttaactaccttctatcttcctcagtgccctggaaaacactacatcgatcctccagcagaaatatgggctgctcccttcacaggggtcctgttcatgaaacttgggaggacccaaggaccatgctggatactatgtgtctgctactggatggcaaagcctcactgcctgaggttcctacatctatagcctagctttttaggcagcatccttggctctgaatcctgtaggccagccagaagctgcagggtgagccttgtccccgggggaaggttatatttatttattctgtacatttatttgtcagccaagaattaaatggagggaaggatgttcttagagtggccttattattttaagtgccccctctcacccccaccccctttaagtaacttgagtacagaattagaatgcattaaaagctgctttctggggaacagtgacatttgatgtcaaaccagccagaagcactaatgcagtctagaatagaagtcttaggaccaacgcagcaaagtctaggagccgagggcaaagctgtctgggtacaggggagtggttattggggaaattattctaggggtcccaagtgaaatattgaaaaataaaatcttgacttttttcagccggtgactttctaatttattggtatagttttatgtgtaatttatttagcttctttgtttatgcagaagccttttatccttgttcatatgtctaccaagtatttacataattattttggggtatttgaac

SEQ ID NO: 29186 - DNA, 1230 bp, Mus musculus
ctattgcctgtcaggtgctggggaatttgagcaaggtttccttcccaaagcttacaggatcctgcttttggtataactgtagctagcacctcggctgttttcgctctttgcagctacacccaggcctgggagttcagctattttttcctccaagataatacctctgtgacccggagcctttcccagatgaacgtttagctgcagagaggactaggtcactccttttagctgcctaggccggggaggccactcactagggccactttcagtgctactgtgatttgtattaagtatgaaatggtgtatgccagtacacattcctcttccagttctcctaagtgctgaccactaggtcagtctgggacacatcagtgtatggctaggctggctagctttagcacagtggagatggatctgcttataagactagtttacataagatttctagggagttaacgagccagtgcttactcacaaataaactaatgctacttgcaaggatccttggtaaagtaaaacctgatgaatattttcagcaagattcttgaaaaggaaatgttcactagacccttctggactggtttacaggctaaagctgagcctttaactctgggaaatggctgcagatggaggaggtgaaatactggtcactgcaaggacaaccagcccagtcaccgacacttaacccccgagacagatcagctgggctgaccacccagcttgcagcttagttgaaagggctggatttaaccctgcatatatattgtggatacagcaaggcagcaggaaggagcaagcaccctcagattttctgaagactaatctacatcaacagccataatgcacacatatatcttgactgagaaatcctactctaaggaaataactcaaaagaaaaataaaccatttacaactgtttgtagaagcaatatttaataacaacaaaagaaaatacagttcaaataccccaaaataattatgtaaatacttggtagacatatgaacaaggataaaaggcttctgcataaacaaagaagctaaataaattacacataaaactataccaataaattagaaagtcaccggctgaaaaaagtcaagattttatttttcaatatttcacttgggacccctagaataatttccccaataaccactcccctgtacccagacagctttgccctcggctcctagactttgctgcgttggtcctaagacttctattctaga

SEQ ID NO: 29187 - DNA, 1309 bp, Mus musculus
gaagggtaggtaccacaggagtcggacaagcctggagctgggatcctaatacgtacatcaggggagagtcatcctccagcatctgtgtgcctcactgcctcgtttaagaaatgagtctccactcagatccaggcttgggaagctggagagacaagagcacttgcgcctgcagaggacccaggtttggctttcggcaaacatggcagttcatctgtaactctagttcaggggatccagtgcattttctggcctccacagacacgagacacctccacacacacacaataaaaataaacagatctttaaaactgatcctgtgcttgagtagactgaagagctgactagactagtgtgccgggcacatcttgaatgacctttccttgtttcagagccgcctcgcccagatctgcagcagcatacggacgggccgatgagaggacaacaggacacacagtggcagcagggactgtggtagcagagtgcacacatctgtccttcttctgtggggtccttcactgccaacacctgcaacggtgctttgtctctctgacagctatggtgtcttgctgcacacttctagttagtgggaattttagacggggaacacagggctagtcagggcctttgtgtgcttggtgtggagtgactgagaaccgtctatggttcaaggtcccactggggataaactgcttagagcactgtcctagagggcaagtgtagccttcgcctccgggcccaggcaggctatgcagtcagcagtagggtctgtgctccatgcgggtccaggcgcacggctctcctattctgttgtcatttgtgccctctatgggcaggtgtgtttcaagttggttttctgttgctgaggctttcatacacatcagttaccatctcagctgatttgtctactgaaagcttgctgttttcaataaatcttagtttgccatggttttaagtcagtcctcggtcatctgcattcactctggttatttgggagctgcagctacatggccatgcctggacagccgccttctcgggagtgtggaaacatttccccaagatccagggttgtggtaactcagaccaggcctgttccccacgctgtcccaggagcttaggaggatggaccatcagaggatgggacttggctcacttccttctctacactgctccgtgcagtttggctcctgggtccctccattgagctactttgtgctggagcctctccaggaccccccctacaccctgtgctcactgaggggcctccctcctgtgctggcttcagctttctgtggtgaccctagaggtcagt

SEQ ID NO: 29188 - DNA, 1198 bp, Mus musculus
ggaacggagccagatcacaagttttgtagggattggaaggagtttgaatctgtctctctttgcgataataaaccattggagaatttaaaatctctctctctctctctctctgtctctctctctctctctctctctctctctctgtctctctctctgtctctctgtctctctctctttctttcaagctgaggcttgaatccaaagtctgttgttactaaaaactgctctactccagcctaaaatttaaaggcaggtatgacctgttctgatatttgcccgctcttgctggaacacttttagaaaggttcagagggcaaattcccatcagctcatgcactgggccgagaacaggcttctctctttttctctttctctctttttctcactaaacccaggactgcccggtgccctggacgttgctatggaagggacgcttgacggttgctagacccgggggaggcgggagcaggacagaggcggagccgggtcagccttaggcaagcgccgcgcgctctcaggaagtcgcgtagcgcgagcggaagtgacgtcgcgcgtgttcagggtccaacgtgcttcacacaggacgctttcccggctgggaagtcgtgaagtggtttacctcgcgagtagcagagcggtgtcggtactgtcgtcaggatggtgaagcccaagtacaaaggacggagcaccatcaaccgctcggcggccagcaccaacccaggtacggcggaccgggcgggaccaggccgcaggagccgtcggggacggaggaaggcccgttccggcctgggcggcggacccgaggtctaggcacctgctctaaagttgggggatgagtcacgccagcctctggcagccccgaggcctctcaggaggaggtgtagagaaaggcaagttaaaagtgggctagggtcctggagtcctggcacatgcctgtcatcccagcacttaggaagctgaggcagaggggatcacgagttagtggctatctggactacagggtacagactgaagacacagagtggagtaggttggcccaggtggcattttacccttaaccatagcattcgtgccaccttagctttgaccgtggaatcagaccatgcataagcaacacttcaggtaaatatagtgatttcaatagaggtggttttgagatacgagaaattcccatctacagggcaaacaaaacaggctt

SEQ ID NO: 29189 - DNA, 1147 bp, Mus musculus
cttccatcttgctgtaggagtgcaggggttacagtcctggggtagggtgattggctttacctgggttctggggtttgaactccagtccgcaagttctcatgccaagttgtctcctcacagagccatcttttcagcctccaatgagcttgaaagcctctacaccccatgagtgagtcggcagtccctctgtgagaacacagggatccaagcacaaagaaagctccttcttctgtctggggcctgtcagttattgagcccgtttcttttgtgtgtgcttgtgtgtgtacatgtgtgtgcattcatgcgtgttgaggggctgaggtcaacctcaggtgtaattcctctacatgctgtcctctgtgtgtgtgtgtgtgtgtgtgtgtgtgtgtgtgtgtgtgtgtgttaccagcttggaatctgatgataggagtaggctgtctgtgacccacccccctaggatctgctacttctgtccccacaagtgacttaaaaaaaatatgtcctggggatcaggtccatgtttgatgctcatgcctgagctaccttcccagtaccgtcccccatccccagcctgacacttttcctctctttaaatacaattttgtattttgagacgggtgtctcagactggcctcaaactcactacgcagctcaagatggccttacacttctgatccttctgccttcccttcccaagagccaggatgacagccatgcaccaccatcctagctagcttttaggcagtgttagagatggaacttggggctgcatgcatggtaagccagaaccctacaattgagctacatacatccccggcccttcacccgtgactgtgttcagtcaggagttagaaactggagcagcatcccgtctctcgggaggaagatggttaacggtgatgctctaacaggtggctctgtccagatgtcagatccagaggctcatctgggaaaccttatgggaagaaagtgagtctggtcagcatctgaaccagttctcaccatttggaaacttctctctgtggctgtgaagatgaaatgagaaaatgtttgcctcttgtactgacctcatatcctcctatctccctgttttcggccaggttttgagggtgaggctggcgcctcttgggctctttgcatctctttg

SEQ ID NO: 29190 - DNA, 1146 bp, Mus musculus
tagctgtggaagaggggtgggtatcccaggatggtttctgatgattgtggctgtctcattagaaacatgattacttcagaaggccaggcacacaggggtggggatggggaggtggaggggtggaagcaatggagtgcaggcccatagcgtggggctcacatcccatttgatgctaattggttggatgatggtaattgtcccgttgcagacagtgtgtctatcccctcatttaatataatcaataaggtagtatagctcgatgcaaatgaagtgtggggaagctgaggggccatttgttaagtcatgttctaaatgtgttttgctaattagctgtagcggggctcctccccctccccccagagtgggagcgggtggccaccttgatgccatgttctcttcagagaagcccactgaagactcatcagggaacttcagggaacggcgagattttgtcaggaccagctgaagtgtttcctaagacagcaggaagcaacggttccataagacactgcccctcaactcacagactcccccagcttgaacctctggaagcccttgtctcttccatctgactgggaggtgctaagcggctaggactgtgctttctccatcagacagctacccctctcctcgaaagtctcactgagtcaaaggtcccaatgcccctgctctttttcaatcattaactcaaggtcctatggaggccatggatgctcaccagttatggtgtcctctagagcaggaccgtgacactgccgtcccctggtagttgctcagatctcatgtctgcatctgtttccctgtatgctggagacagcgagtcagggatactgcatgctggtagacagctcagtacagtggttaagaagagactttgtatccagactctttgggtccaattctctggtccactaccttcttcctgtgtgttttagcccagttccctggtcttcctgtttggaggggtcaggttcacgcacaggtttcctgtgagatttcactgaggtaatatatttaattaataaagtgaattaataactcactttaatacttgcctgcgtattcatgtgtattcatgtgtgtgtagtggccagaggacaatcttgggtagtgtttctcaagagttgttccaccttggattttttg

SEQ ID NO: 29191 - DNA, 1164 bp, Mus musculus
cccagaccatttatatccaagagccctgccctatttgactcccagcccgaggactggggtgctgtactgatgccaaacgtgactactggagcagggccagctttgggtggaggatgggaaggatttgaggcctctgggcttctttggagctgcctgtccttctagagcttgaagttgaacctcagctggaggtagagcaccaggaatagggaagcagagtgaggaggaggaagaggaggaggaagaggaggaggaggaggaggaggaggggagaggaggggagggaagacatgctgcaacccaaagatactactgccttggctaggctggatgcagtctctctatccccatctctgggatctgaggcctctctcttggctggggctgcagggatcgaggccctggaaactgagcttctctgaagcatgctgggtgcttctgctggagcggctggagcttggagcccgaatccctcctccagcagccaggcgtcgtcgctgagcacaggaccagagagggtttacctgcaggtgcaagatgggctctctggcctggggagggtgttccccgccccttctctttgtgcctcttttgggggctgaaattccctcctagacaaggagatggatcgctcagcagtgtgacagagtgttcaaacaatctgtcttgaatagatgaattgcactgctctgtctttttgtaattgtgtctatcagagggagaggtcaaggcattgattgcttggatggtttgcaagtaacaaaggagagtgagggagagagagagtaattggattgtagtctgcgggaaaaaatgatcattgattattttatatgaatatgtggaagatgtattctgtgtgtgattatcaagggctgccatggaagaggcatattgttctgcgttttactattattgtcatcattattgttgtttggatggatccaggtcttcagttaggataagcagttagactctgagccttgtcagccaaatgagatttagtgaccttccattggggacttggatttataggtttataatctacaagctgcagcggagggttgatggacatagaggacagaggcttggatttcctcgtctttctgctcttaatgaactggatcactttgataaaattctattcttcttctttccacattt

SEQ ID NO: 29192 - DNA, 1250 bp, Mus musculus
aaaatgtcagcatcaagggattggggttttttttttcccttcccttaagaaagcagaaggagagcagcgccttggaggtcccgtggatctgtgtcttgcttcaacagtgtttgaacggaacagacccggggattcccactgtactcgcttccagccgcctttacaagtctctccagtcgcagcctccgggaccatctcctcgctgccttcggctcctaggaccagtctgcaccgtctcttcgcggttagctcctactccggatcagccatgacctctcagattcgtcagaattattccaccgaggtggaagctgccgtgaaccgcctggtcaacttgcacctgcgggcctcctacacctacctctctctgggcttcttttttgatcgggatgacgtggctctggagggcgtaggccacttcttccgcgaattggccgaggagaagcgcgagggcgcggagcgtctcctcgagtttcagaacgatcgcgggggccgtgcactcttccaggatgtgcagaagccatctcaagatgaatggggtaaaacccaggaggccatggaagctgccttggccctggagaagaacctgaatcaggccctcttggatctgcatgccctgggctctgcccgcgccgaccctcatctctgtgacttcctggaaagccacttcctggataaggaggtgaaactcatcaagaagatgggcaaccatctgaccaacctccgcagggtggcagggccacaaccagcgcagactggcgcgccccagggatctctgggcgagtatctctttgagcgcctcactctcaagcacgactaggaggcctctgtgccttccaaggggctcccccctctgctctgcaccagcccgccctgggacctccacctgaatgaacctctcaagccactaggcagctttgtaaccgccctggagcctctgtcaagtcttggaccaagtaaaaataaagctttttgagacagcaaaaaaaaaaaaaaaaaaaaaaaagaaagcagaaggaaaaaaaaaccaatcctgctttggaaatgtggctatttttatgctgtttgtaattttgtgtttatttcctgtccttttcacatggactctgggctgactcattgattcaccaaacattagtggaacgcccactctgtgtcgaagagcgcagactgcagggctggggtgcagctgcgtcctgagcctgagctctggagcatttcaggggcatcatgggagatccaggtagtga

SEQ ID NO: 29193 - DNA, 1132 bp, Mus musculus
tcccatatcacatccaagatcataatctgagagagagaaacgtatgcatgcttgcttatgctcagcttgagttctctattcttactcagctcagctctcgatgtcctgcctagggaatggtgccacccaccatggactgggttttcccacatcaactaatttaattaagacagtaccgcatagagagaactgcagacccgtttcagacaatccttcactgagacggtttcgaggggattctatgttgggtcaagttgacagttaaaactaactgtaattgatggacaggcgtgtgactgaccagatggatagatggatgaatagatgactgtatagacagactaatggatgaatgataaacagaatggtgggcagaccaactgctgtgtgaatgaatgcagactgtcatgtgggcgtcatgccctcatgtcaacccttagaacgctaaaacaaaagcttcctccaatgactctcttcctgggcaatgagtggatgccatagcagtctccagggaatgtcagagatgagggagaaggaagtgtgggtctctgggtataggaccctggggaaagctcctttagcctgaaggaactgagtccttcctcctctgagatgccatagtgaggagggaggggtgagtccacatccttcattgctggggaccactctataagagatcagacagaaaacccccctggtgtgctgcaggcacagaggaactcaaaccctcttctagctttgcagcaggaggcctgagagatggcaaagaccaacagcagcctggagggacaggaagtaccaggccctttgaggtttagtaacagctcctcccactctctggagcctttgaaaagcctctgcccttagtggcttgtaagtcaagactctcacccagacttgtcctttgtctctcaaggaaaactcatgctgcccctgatgtggctccagagacacatgcaggaaggaccactgcctttgcccaggcttgtcacatgcaaattcccttagccacagggcctgcctcagtcctgggaactcctgtgctttgaggccagtgttctgagcctggctccgtgggaggtgggtggccttgactttagtgtggactggctggcaggaggaggtgcatcct

SEQ ID NO: 29194 - DNA, 1136 bp, Mus musculus
acctgggccgttccagtcaaacctacccatgtccagcctcgtctggatcttgggacctagggagagtagagttcttgcaggctccacatcatcccattcaatatgggggctctgtgaggctgttaatgggactcttaggtctggtagtttcttctgaaatagccttgttgaactgcaagcatatgaaggagcccgctgtgaagaaggattgggagctgtctcatatagaggtgttgggatgctgactgaaactgaataaaccgtccatgcttcttcaagttctcttctgcctgcccagatgcctgattcatttctgcttagagaagttttaccattggtgcaggggtttctgagtgcagggttgccaggcccagggaggggttctactttgcagagaggtgcactggggacatccccctgcatactcccagcagtgtattaagcctcggtgactccaagctccatttgcataatgaacagaagaaaaggaggggggacaagaggctgctggtgactctgtcagagaagagctggcaggaccatcctttgcgaccacccacctggacatctggaatggagggttggagctgccgagggccacccaacagccttcctaggactgaggcaagcttcttgacctccatgtgtaaacaccctcacccagtgaaagcagagtctctgtagaaaaccctgctaattaaaagcacagtctaccaagtttagatagcttcagactcccttaaccagcaggatttcccctttttctgaccttgtctggggagtccgaccccccacatcctctatctggggaagttcaaatagtccttggcagacctacaagttcaaacctcccctccatatgtacttgcccagcaagtacctgggatttctggaaggcctctccacacagatgaggcattcacagaactctagccaatgatttttatttacctgaaaactcctttcccaccttccagggtccatatgtagcctcggttcaccctaaataaaatacttacacacaagctaagatcatgtaagagaggtgtctcacttagaggtattccactgaagatcgtggggaaaagccttcatcttcaagagctgttactgctaagatactctgagaagacctt

SEQ ID NO: 29195 - DNA, 1180 bp, Mus musculus
tgtttattcccggagctgttttctctgctgcctgcctgctgccacctcctccagacacacagaaagagccaaatgggcaggagtcctgccagcgtgatggagtggaagcctgagattagcgcctgcggacagacagatgggcgagggggacaatgggcatgcagcctaccctcaccccaggcttcctgcccagggccctgacccagggctggctaggccccagctaacatggccccttccattccttcccttcccaaattctgtcctcttttgtgacaccctctagctctgtccctcatcctccctgtccttgctactgccccttcccacttccagctcctgctctgctgtctaggccctgctggttggtgtccttctcttgatcttccttcagaatctagacgtatcataccctaaaagggggttggattagaccgacttctggctgcacacacttggggggacatttaaccctctggaggagaaataaaggcaggagggagaccgagcccctgtgtcatgtgttctgtgaggatatgttaagctgactctgcccagggtggtggtctgcaggagtgcagagagccatgtgttgggtcttgtgaccttgccaaggtgtccagcatcaccaggtccagtcccctgctcccctgggagctgtccttctctaagtcccttgttgggctttcttgctttgagagactcccatgtcttcccactcataaaacaactgtcctttgtttgcattcccagtgcacctattcatcccaactattggtgtgggaaatctgactggctttcaccgcacccctccaggctgtgtgcaccctgagcaaggcctttgggcttttttggtgctgctgtacaggtgtctgtaagggccttgcccagtgcctggcacagagcaagaacgcacaggtcctgggctgtcactaaagcgaagggggaaggatgtgcgacttgtcttgaggaaggacagcagcagcttgagggttgcatccttggcatcttgggcctggcagcacctcccggggccgatgtcctcaggctctcaaggtaaagctagcagcacgtttgagagcactctgtcagcctcctgttgtatggatgggccctgaggctcacacatcgtcctcagctgctgaaggaaggggcttcttgctgcctgggtccctgggtg

SEQ ID NO: 29196 - DNA, 1109 bp, Mus musculus
aggcctcagctattcccaatctggctgccgaggaggaagcccagcggtctgaaggaagaggtgtcactgagaccaatcctttattctgtccattatcagttcccagttctgagaatccgtgtccagaggttgccgatcctgtcacggaaggcctcggatgcaggctacatccaccccttgtggtctaccgggcagaactgagcccaagtcttgttgtccaagagcaagaggggaggagaggaggggacccctgactgtgagccagaggctgggggacagggcactgtggatgtctgtgtgcacacgagtacaaatgtgtgttagtgcacatccgtgcagagcatctgtacccatgtagcatgtgtcagggtgttgaccagccattttctgtcttgttgtacatgtaagcaagccatgtgctgcctgagactgtgtggagccaagcacccctcgtgtacattagtgcaccccgggaagttgtcagtatgggagcgtgcaccctgtgtgcaggctctgttgggtgattctggtgttggggccacattagtgtgacaggtatgcatatttatgccacctgtcagcctccatgcatgtgtctgtatgtctgtatgtttgtgtgtgtgtctgccatgctcagatgtacacacttcaccagagattggaatctcgcacctgtcccttcctgccctgctgacagggttgatgatagtggcccagagccctgctgttagtcatctgtccacagctgccattttaggaggggaagcaggtagttagccagctggcgtatttccggaatttcagtaaatggatgagttggagtcccgtttcgggcaccaggctactcagcttttagggggtgttagtgttgctgagagctggggctcaggtgggtcaatcctctgttactatccagcctggcatggcctgaagcactaccacccacagaagagctgtactggaaaggctgccactgcccttgtgacacacataggaatgtccttccgttcacgccttcagctgcctatcctttctgtacttccaggtgtgggtcaaagggcccctctactcggcgtgagcttgtgtctgttcctggatgtctccctggg

SEQ ID NO: 29197 - DNA, 1195 bp, Mus musculus
tctctctctctctacttctccagactttcctcatagatggaataaaattcccgacagaacaatgtagtgaaggaaggctttacagtttcatggtgtgggggacggggttcagcatctggaactccatctgtggaggcaggagctggtagatcgcttgttatatctctgggtcagatcaggaacctggaagctaagacctcaggttggaattggggccagctgtaaccaggccagtctggtcctgtctctataatcctacatctgataactaggtcctatagccataagatttcacagcttcccacaacagcacccccaactgggggccaagtattcaagcacgtaagcctgtgtttcccattaaggcttcaatatcctgtgatactctggtctctctggccagtgttggagaagatggttgctttggggcttcatgctcacagactcaagaaaagttgccattagacggtgtgatgaggttttttcccaaggttttcatatggcaggcagaaacctggaagccacatttttttttctttagttttcccaaataatgaaaacaatccaaatgcccatgagctggcagatggataaacggaatgtgatgctcaggaacgataaatgctcaggaacgatagttagtactgatgcatgctacatattagtaaacccagacacactgagcacacggagccagacccagaggaacacccactgtgtgatcccatttgcatgaaatgctcagggagaaaaatatttggagacaaaaggcaaattagtggtttcctggggctactggtgcaaacagtgagatggccacagggggtattatgggatagtggagaaattctgaaattgggctgtggtctgctcgtctgacttcttactcaaaaccaccatatacccaaaacaggtcagttttgttgaacaccaacaatatatcataaaagctcattacttactgaaagaataaaggcttgtctataaacacatgacaatattaaataagcgacggctccccttgcccaaatggctcacgcccaccggatcctgttccactcttctccccttcctgcgtttcctcagatctgcagcagcagacacatcatggacatttccacatctctatgacttttgaaaatagctgcacgtggtgatacatgccttaagttccaacactccagaggcaggcgga

SEQ ID NO: 29198 - DNA, 1301 bp, Mus musculus
atccagctgtgaaccatcagctcttaacctaccgggaaacccacacggaccctcggccggctgctcgggcttcatctcctcttgtcttgtctatggctttctgaagctgtgaaggccagcggaagcacatgcctctcaggctccatcaccaaccatctctcttctcctccatagccaggtatttctggcaggcctctgccgaggccgcagaacacggaagatggctctaaagctcccctcattcccctcaagccaggccttctagcacgcagccacgagagcagagactccgactcgggacaccttatgggtgtttggatgaggctgccagtgggagctcaaaggcagtcatccatacctggacagaagcaacgcttcagcccttaagggctattcacctgggtctgctcatctcaatatggcttcaccaacagcagcagccccttggcaacatgaaaagctgtgtggaaaggaggtgtttggtacgggagaaggaaacacagatggagactgtgatctcagatgcttcgggtcagtgtcctgagccacaaacgtctcgagagtccccaggaatgcgaacgaggtcgtcatcacagcagattgttctccaaggctgcacagaacagagaaggtgccctccctcacaaggaacgtccaaagactcagttgacattggtaggccagcagaagaaatatggactctataaaaatcccacaggcccttcaaccaatagaccaactttgctggcaaacaagccagcagtcgggaccctgggttctctaccatctactcattggcgatttcctgtccccggccatttgaatttggcctccctctgtcatcctgagaagagaagagcggtctcagctgaagcgcaagccaagtcaacagctcctcagaagaggaattgctgtcccccctccacagactaactttggggtaggtgggagaagccagaggggacctgaagaactttctgggtacgcccaacctaatgagccccctaaagaaagaaagctttcagggacaggatataagacctccagaggcccccagggtaggaagggagtagctgcctcctggaagattaaccaaagacccaacacagagacacaaggccattctggcccctgatctcttttctggagcagctatggtcttaggggattgaagggagaccccagaggagaagccagagaaggtgacagccaaagggatgagcagatggcctgtggttccatctctggaggtttgaaaccgtcatggtcattggaaaggatcagatgtgaggggttaggca

SEQ ID NO: 29199 - DNA, 3942 bp, Mus musculus
gtgtgccctgaagacagcacgggagggcagaccagactgctgtgcccattgggtgggtgtgtgctatacaggaggagtcgtaaaaatggaatgagtgagtgtgtgtgtgtgtgtgtgtgtgtatgtgtgtgtgtgtgtactcatacccatgtatgtgcagacatgtacctaagttccaattcaaatcctgcgttgaggcagcagagcagttagtacggcagggtaccaggatgtgtcagcatgcctgctatgggagggatcactggccacagctttcctgagggctccatgggaaaatgcacagggagacaccttctggggctcaccttctggggtgatgccttctcctttgctgttcatagagtgtcctgttgagaggggaaaaattcttccttccttccttccttccttccttccttccttccttccttccttcctgcctgccttccttccttcctgccttccttccttccttccttaaatcacccctactgacaggatcctcatgaaaccattgtcaactccgttctcatccgctgtagtctttaaccactgtcttctgttgtccaataccattttataacacacacccacctccatgttcatatcacacatgtgcttttgtgcatgacactgcagacgtgtcatgttctttcgaggctatgcacatatgtagactgtgatgggagaagggacggggtgtggttggtgggaagggtgttcagagaggtaatgaccactgggtgacggcagtgggggtgggggttggttatagactcattccgggaagaggggtggcgtgctgcaggatctcccctcccacctgagccttatatccagaggtatggctaacgcttgccctctggctgaagtcctgtgtttgttctagagaccagcccagtcccaaacagcctggagaccaccctgcccagctaagctgtgtctctgccagggtagggaagggagtcaagagggaggcagatcattcaagtgaaaacctgtcccaaccccctaaggggtgcacagagctgaggctggaacacacaaatgctctgaggagcaatgggaaacacaaagattggtttggatggagcagatgggacatacctgagcaggaccatggctggctggctctgtctgatcatataggccagccccgaatagaagaatgcctcacacaactatgtctgggcttgagctccacctatttataccagccctgtggtggggcagcacccattctgtccgggccctgggggctattggacaaagactgcctctaccttggcctgtgcctgctttctcttatggacagtcactgatgaaatttgagcactttgtgggggctcaggtggctcctgggcagttgtgttggccagtgagttggacttagaatccttgaggtaagagactgcccctcggtcagcctggactgtcacagctggaagagcacatgctgagccctgcctttgtagcatgcaatgcggggaggggtgtgcagattaaatatctccacgagggagcggaagtcagaccaggctcacgttcaccaagaaccgtctgtcccttcctaccttcctttctggtccagggagggctgaaggtggggtgcagctgctgctgcttcatgccgcatgaggccatgctacacacacacacacacacacacacacacacacacacacacacacgccccaaagccattccctactgtaggcaccagcatctgaacatgacaaactccatggtccacctctggaattgccctgcgtggatgcccacctggaagggccttcatgccatggacaaacaaccgtatggagttaacatctgggacccacccagtccagtggacagatctgagaattgggtccaatcctgtgcgcagatctctgagtaagatatatctggatgtcccaggttgttggagcaaggtgcacatctggaataggcctaaccacttgccacggtggaaggggccttgcccttttgtctctgtctcctagagttgaaattttagagctgaggtatatgtgaagtcacagaattgttttagatagaaggctaatgttctgtacaatatatatatgaatgtaaaaaatatatatatgcttatatatatgcacagtgtatatatgacccacaacccctgtgtatacaacccttccctgcacgtctacacacaaagtgtacagaacccagccagtatgggtggggacccagtgagagacaggggctgcagcagagaggtcaggtttacacagccctctggatcaagccagaccttgccagcatcagtactgtggaccacgtcaaagaaggcagactagtgcggaggtgacaggaaagggacagccatggatgagcatctcctccagggagtttgtatgaggcaggacagcgggcacacctgaggaaaacggccttgctagtcgttgatccctgagccaatatcacagtctagtcccagtacctagtgccagaggaaaatggaagtagattgccaggcctgcccttatccctgcctgcagagtagcctggaaagttgtcaagctgcatctgaaatcacccagatgtcagaggatcctgggtggcaaaggcctcacatatgcaaggtgcccacagctcagggctagagcgtgtctcttttgaagagaacagcccgagggcactgccgacatgcccgttcagcatcctgataaactagttatgaatctagttcttctaccctcgccttctagaatagaggctcccaaatcaccccgcagctgtctggtttacttttatagaccaaaactctgaggcctcccagtagtagaaaaaaacccatagattcagatgctagctaagagtctgccccagttcattctgagacaggtacaaagtggcagggagctatcaaggaaccagagagattcaagatggcagcgcctggccttgcacagccccttactgtctgccagtcctcgttgttgttcttctcccaacagggcagctggtagaaagcctctgtcaggtaggtcacagacctctgtccctgccgcacctggatctgtctcttgccagtaatttgaggccttcatccctttcctgggtccgagcatctctagagtgtgctggggagaggagacctgggctttgcttttgtgtggtctgcagcctgccctttgcttcaaccccagcccttgggccatctacacttaaaagccaggcccgctcctgcagccacggccaagcgcaccgaaatctccagctgccgctgatgagggtcctgtcctggctccacagagaccagaggctccaagagccctcacgccactgtgctctgaaaccccactttatccctgcctgggctgacttcctggctgggcctccgtggtggggacctcagctcccagctcttgggctgagcccccagacagtaccatgggactctaagagccctggcctgtcccactacccagaccagagtgcctggacaccccctcccccaactcccactcaacaaggttcccacacactggtctctgggccattcagggggtgccctttgtggacatgcagaatttctatgaatatagttttttgtaaacattttgtaacgatttgggtttcatagtaactgtgttacttgccaatcattctaagcggatgtaaataaatttccaaacaaatctgattattttcctttttaagacactgtgatatatcaaagtgcacagtttgctgtatgaagtaatatggttttaaattttaaataaatgtttttagaaaatgggtcccttcccaaggtgtgttttctgtccctcatcgcccttcagaaccagaggtctcgggcggtccacgctggccatcttcctcccaggaatgacagtctccagggaaggacaccctgtgctgagctacttcaggctcctggttccatttcagacatcagggtga

SEQ ID NO: 29200 - DNA, 1106 bp, Mus musculus
tccatgctggtctaggattaaggcctttagccaaggatggccttgaacaacaacaacttcctcctcctcctcctcttcttcttctttcctcctcctcctccttcttctcctttttgttttttgttttgttttgtttgtttgtgtttttttcgaggcagggtttctctgtgtagccctggctgttctggaactcactctgtagatcaggatggccagactcagaaatctgcctgtccccgtctccggccgccatagggagaggagccgccgccatgtccgcgcatctgcagtggatggtcgtccggaactgctccagtttcttgatcaagaggaataagcagacgtacagcacggagccaaataatctgaaagcccgaaactccttccgctacaacgggctaattcaccgcaagaccgtcggagtggagccggcggccgatggcaaaggggtcgtggtagttatgaaacgcagatccggtcagcgaaaacctgccacttcttatgtgaggaccaccatcaacaaaaatgctcgggctaccctcagcagcatcagacacatgatccgaaagaacaagtactgccctgatctgcgtatggcggccatccgcagggccagtgccatccttcgaagccagaagcctgtggtggtgaagaggaaacggacccgccccaccaagagctcctgagccccacaccccggaagcaataaagagtccactgacttccaaaaaaaaaaaaaaaaaaaaaaaaaaaaaaaaaagaaatctgcctgcctctgcctcccaagtgctgggattaaaggtgtgcgccatcactgcccctctggccttgaacttctaatattccttgccttctaatactccagtccaaccttcagagtgttggactggaggcaaatacaactacacttagctggtacttgatataggattgaggagaggggtgactgtggtggtttgaatgagaatggccccaaggctcacatgtttgaatacttggtctccaggtggaactgtttgggaaagctgaacgggcgtggccttactggaggagctgtgccacccagttcaggctttgaaatttcagaggctcacgctattctgtcc

SEQ ID NO: 29201 - DNA, 2185 bp, Mus musculus
tgcccaagcggcaattcggtagcatgccaccggtccgacggctaggccacgacgcacagccaatgacctccttggacacagccatcctggcacaacgctatctgcggaaatagtgccctcagctagggcactagcccagcacacctcttctcggcccacctgaggcccagccatcgggcctgcctgggcccgggcccagcagtgctggactgattctcccaggctgcagtagggatagggcagggatagggacagcccaggtcacagccagggtcaacagaggtaccacagagctaccttttgggatgattgcttgattgtttttttatctgagaattctagatagatagctaatctgcttttaatcatgacattttaatctacctctgtctctttaaccacgctgtctctggactgagtgtcaggagggaagaggggagtctacgctcacaacccaggcactggacagctgcagcctggctaggccactgaccccacagtccatataagctgaccatgcagctcgctgctggcccccagtaagcaccccttcccaccgtccactccccgtccccgggggcctgccctcagtctaagctttggaacactctcacctcacctgccgcccaagtcaaatctatttatttttttactgaacccaacttgtatctctaggttcagcccttggccactctggccctgagcctggctgaatagcagggcccgtgtgtgtaggctcccttctcaccccaggcacctaggagccctcttgccagttcctctctcgctctgtttccagacctgtctctctctctgtcctggcagcttctctgaggtgctgctcgtttgcattagtcccgcctcctccatctttcatgtggtacccaggtaaatgtggacatagtgtgaagggacctgtggccaccagaggatgctctgggcctactgaggacaggccacttgtgctcagagaacctcacctcaccgcagaagtggtgcctcttccagaagactctggaagattacctacttgggggtaggccttggagggaaatctgtaggggtggggaccttcctaccttcctggcttgagaacagccctgctaccctttttgagccgaaattttgaagtggatgcccgtcttgccagaaacgctgttctctccagaatgcccctccctgcactggacttggcacacccaaaaccaagcaaagacccaactccggaggcctacctcctgtgtaccctcagagagggcaatgtcaccctcctggtaggtagtcctagacccctcctgcctcttgctctccaatggggagaccatgtttcctagagtgtgagctgcccctcaccccctgaaaagctgactcactgtgagtgaccttgggcaagtccccaaacctccttgtgcctcagtttccccatctggaaaaaatggggccacctcttgccagcagtagcagggctgcccatgccccttcctccccatgccccatatccagccctgggctcctgtgcctctgttttgctgggtctgtggagcccacttgagcccagcagttaactcccctggcactcagctctgcctctagttcagccgcccagccactgagagtcagggcatggtgctgcgggggagggctcttttctatatttatttgatagcgataagtctccgaagggagtggaaatgcagtcagcctgggcccttagcccatgactaccctccagtgaggctctgaggcctggctagggccctcctgggcagagcccctgcctagcccttcaggcctgatgcctcaggcctgattccctccttttaaagcaataccttcaggtctgccatgccatcagccagcctggttccttctgagggcaacctgggtctggtggtatttctggtggtgcagatgaggggagggtggggccctcgctgctgtcaggcactgagaagtcctgttgtaaagaaaaacaaaaacaaaaaaacaaaaacaaaaacaaaaaaaacaaaatggaaaaagtcacaaaaaagtttgtataaagacgtatttttgtactacatggggactcttcctgcatgtcagcaataaaacttcctgatctggagccaccatggtctgtagcctgcctctgtgcttgtccgtgcgctctctagccctccctccatccctgctcacagcctgg

SEQ ID NO: 29202 - DNA, 2221 bp, Mus musculus
tgttagtataactttcaaaattcttttgaacaatggtattgtaaatactaatagtatttacataatggtagtggtggggtaggtggggttaaatgagatgatgcctcttggtcggtctgcgttttgaaggtgtcactgtgcagtgtttgttctgttgcattagttcttggagttccttagttacagcagggatgttcctcggtctgagcctgtgggagctttgagtgggagaagggcagaaaagaaggctgcgggaggcataggcgctctggcctgtggatgggtagagtgctagcactgatgccagtcttcttcccttgcagcatgacgaccgggaaggcgagggcagcgacaagtggatgggccgaggccgaggccgaggagcctttccccgggggcggggccggttcatgttccggaagtccagtaccagccccaagtgggcccatgacaagttcagtggggaggagggagagatagaagacgacgagagtgggacagagaacagagaagagaaggacagtttacagccctcagctgagtaggggccgctcttgatggagcccttgcccggggaagaaaggcgctgggagaggctggtggagctaaacaaggagcctcaagaagatcctgaaaacgccaccccacaacccacttgccacacagaatccatcccacgacagcagagtgtccctggtgccatccgtctcactggacagaggacaggacgttgccaccgagcctagatgagaccacacactgggctcctgctgctgctggtggtgtggggggtgggcagggtagggagaaggatgctgatgcttggactttgttttggttttgttgtcccacccccactcccaccccaattagaaaccaagttttcttcattgcatttcatttggaactaaatgggaatttggttttcagtctcttcctgtcctgagttttattaagaaatccttttttctttttcttctttttaggggatatatagtaatattagtgtaaagattttaatttgggcaactttgactcttaagagaaaacaaagcatgtgaataaaaattgaagtgttcacctcagtttgggaccaaactgcttggatcttgtacaaaccggttttgtatgttgaggaggagtttaaggcctttctgaccacctcgtgttcccctttctacacagccatgtatcccgtggagttgctcccagcctccccatgcaccctgctctgtctcatttctcctgggctgggcttcccattctccaccagcagctccagtgtcccaacctttgtagtcctgctggtcttcagcaagaggagtggaaactggagggcagtttctggacggttttctaagaaacttctgaattctattatctttacaaatacaagatgagaaaataattttttcaatattttttattaatctttttataaaatgaaaagaaacgcctatgattaaggatggtggttatggctgggtggtctgtggggttgtgtgtttttgggtttttccttttttttttctctttaaccttacgttttgggttgaaacattttcagatgttggggggcatcctcattaaagggtccttgtgcttgccttccggggcagcggtccccagcaggtgaaccgctgcctgcgcgcatctgttggacgccgactgcaccctcctccctccccagccttcgctcttgggttgttgtgcatacttccctttactttgctaatttcaatagttatgttggttttacttgaatgattcatgtttaggggagaacaaaaaaacacccttaaatttttgtttcaactcctcctgcaaataaaaacaataaatgaagtggcagatgtaaacggactgtgtttgttgcttgtgtgagtgaccctgggttaataggtcccatagaatataccatagttttcgtctctgggaagaaggacttcttgttctcagtggaggctgtgcattctgtgtttttgactcctccaagaaccaaacctagctaccatgccagaagtcaggactttggcttccttggtgctggggcaggggtcaaggctgcagtgagctggctcggcctttatatgttaacccacaaggaagaggtgagcctagcccaactggtaaactgggtggaccctaaccttcagactcttgccagcccttattaaaagttgattcttgctgcctttccccaaggagaatctgcagtagt

SEQ ID NO: 29203 - DNA, 1127 bp, Mus musculus
tgttagactgataatggaggccatggttgttttgtgttcttcatgtgtgatgcatactcaccacgggcctagaaactgttgtgtcactgaaaatgactggggaacagagaggaaaccccaggtctactggtgggcaggggtgaaaggggtgaacaggttggtgttgacttggttgtttggtagtttggctggctgacagaccagtcttgattttgtttttttgtttctctctcttttgtttctctctctctctccctccctccctccctcccttccctctctctctctttcttgctttcttgctttctttctttttcaagacagggtttctctgtgcagccctggctgtcctggaactcactctgtggaccaggctggcctcgaactccgcctgcctctgcctcccgagtgccgggattaaaggcgtgcgccaccacacccggctttctttcttttttttaatgtaggaagcaccgcagagcaagagaccggtccaggtcctcctcctcctcctcccagtcctcccattcctacaaagcagaggagtaccctgaggaggcagaagagagggaggagagcacctcaggtttcgacaaatccagattggggaccaaagacttcgtgggtccgaatgaaagaggcggcagagctcggggaacctttgtaagggcctcctcctaatcctagtgaaatctcagtaggataccagttcttttgcctctggtctgagctagctagttgtagattgtttggcttcctaagcttctacattcacttgtttctctgattctaatcacttccaaagccttttatagcttcccctcccagacttttcccctgcaccttagatcctgattgaaggaaggcctctgactatgtacaccccctggactgtctacttgggaggggtggagaaaggattgggtagaaactagtttaagtactagtgactcgaaaccagcttcccattccttgtcacaaaatgttctaacagaatgcaagggacattctactgctcatatgagtctctgttcctgttgctgcttttattcctacagcaatttcgtgcaagagggagaggatggggcagaggaaactattctggtaacaataacaacaacagcaac

SEQ ID NO: 29204 - DNA, 1761 bp, Mus musculus
tcaggctggcttcattctctgtttagcagctaagagtggcttaaacgcctgatccttatttacctcccaagggtgggttgataactgtgcactgcattgttactgctgaagaggggggattcccacaggaaccttaggagtgagtgtaaaaaggtaattctgctggttctttctgaaatacgcctacccctgagttgcagtgtaacttttaataagttgcttgagcaggtttctatagggcagtgccagccctaccaaagaacggtaacggggctaccaaatcactctaaggtgtcagaagaaccaagctcgcagaagtagacacctcaagatattctgtagtctttcttaattttgggggagtgggtgggttttaagacagggtttttctatgtagccctggctgccctggaactcactctgtagaccaggctggcctcaaactcagaaatccttctgcctctgcctcccaaatgctaggattaaaggcgtgcgccaccactgcccagctctatctatctatctatctgtctgtctgtctgtctatctatctatctatctatctatctatctatctatctatctaatatgcctttgtattttgcctgcctgtgtttgtgtgagggtgtcaaatcccctggaactcgagctgaggacatgtgtgaactgccatttgggtgctggaaattgaacccagaacctctggaagagcagccagtgctgtgctcttaaaccactaagccactctccaacccccgagctcgcacctgccccgttgggccagcaattaaaagcagttgtttgattcccagcatccatatgacaagctggaaccatccagccctggcaattaatgaacaccttttggcttcctttggacactgttggacactgcatgctttagtgccagagtcaaggacaatgattagattttatgactattcttattactctgtctctgtacaggtggcaaaaacttgtttgttttgttttgggtttggtttttcaaggatagggtttctcttgatagactggtcttgaacttactgcctcttgcctcttgagtgctgggatgaaaggtatgcaccaccactgcctggctcaaattgggacctcttgagagtcttaacttctcaaaagtcttgcactgagttttggagcggttgggtttttacatcctggtcatgagaagaacaactgtaagtctctccttttcataagtagttattaaaatgagggggagctgaaggaagtaggaggacgtcttagtcaaaggtctctatttttgtatgaaacaccacaaaaagcaagttggagaggagaaggtttatttggcttattcttccagatctatagtccgtcgctagaggaagtcgggacaggaactcaagcaggacaggaacctggaggcagagctgatgcagaggccatggagggtgctgcttactgacttgcttccccggcttactcagcctgccttttatagaacccacgaccaccagcccagtggtcctgggttccacagtgggctgggccttttccccactgatcactagttgagaaaatgccttatatttggatcgcatctgagccttctttctgtgatgactgtagtttgtgtcaggttggcacacaaccagccagggcagagggcaaagtgcttttttttttttttttttttttagtgtgtatgaatgttgttttttcctcaaatgtctatgtaccatgcgtttgtctggtgctgaaggaagccaagaaagg

SEQ ID NO: 29205 - DNA, 1166 bp, Mus musculus
taaggcacagttctactgactcttaaatgctgagttcataaattgttagaacaggtagacaggtctgataaaactggaatatagctatgaaaccagagcaggaacaggtgctgtgatggagcaggacgcttaggaggcctcctgtgtgtctcccttgtgtctttataactaggtatctggaggagcagaagactgagaatgggaaggataaggagcagaaacaaacaaatgccgataaggagaagctgaaggagaaagggggcttctctgatgctgatgtcaaaatgaaatctgatccatttgctcccaagacggactctgagaagcccttccgaggcagccagtcgcccaaaaggtataagcttcgggatgactttgagaaaaagatggctgacttccacaaggaggagctggatgagcacgataaggacaaaagtaagggaaggaaggaacccgagtttgatgatgagcccaaatttatgtcgaaagtcatagccggtgcaagcaaaaaccaggaggaagagaagtcaggcaagtgggagagcctgcacacagggaaggaaaagcagaggaaggcagaggaaatggaggatgagcctttcacagagagatcccgaaaggaggagcgtggagggtccaagaggagtgaaagtgggcacaggggctttgtgccagaaaagaatttccgggtgactgcgtacaaggcggtccaggagaaaagttcatcgccgcccccaaggaagacctctgagagccgtgacaagctgggaagcaaaggagacttttcctcagggaagtcttccttttccattacccgggaggcccaagtcaatgtccggatggactccttcgatgaggaccttgcacggtgaggagcgctccttgttgaccctcagggctctcaggcctaaatagtttccttacccagccttcctgaggatggaagtgttgctttgctgccaccgtcggtgccagtacctttatgtctgtccctggagtgcagatgattatggcttacagtgatggtggcccctgagcattgttggcctaaagaatctttcagcccttgctggctgcctctctttgtgtctgggaacttggagcggccattctggtctgttttccctccaagccgactccacccacattgttttacctatgaagac

SEQ ID NO: 29206 - DNA, 1202 bp, Mus musculus
tgtttgtttgtttttttttttttaacgagaatgctgtgtaaaaaaacattccccattcccttcctctgcagttctaggtctcgttccagatcatattctccagctcataacagagaaaggaatcaccccagagtgtatcagaatcgagatttccgaggtcataacagaggctacaggaggccctattacttccgtgggcgaaaccgaggcttttatccatggggccagtataaccgaggtggctatggaaactaccgttccaattggcagaactaccggcaagcatacagccctcgtcggggccgttctcgatcccggtccccaaagagaaggtccccttcaccacggtccaggagccattctaggaactctgacaagtcatcctctgacaggtcaagacgctcctcatcctcccggtcgtcctccaaccacagcagagttgagtcgtctaagcgaaagtctacaaaagagaaaaagtcctcttccaaggatagccggccatctcaggcagctggtgataaccagggagatgaggctaaggagcagacattctctggaggcacctctcaagatataaaagggtctgagagctcaaagccatggccagatgccaccacctatggcgccggttctgcatcacgggcctcggtttctgatctgagtccccgggagagaagcccagctctcaaaagccccctccagtctgtggtggttaggcgcaggtcaccacgccctagccctgtgccaaaacccagtcctccactttctaatgcgtcccagatgggctcgtctatgtcagggggtgctgggtatcagtctggagcacaccaaggccagttcgaccatggctctgggtctttgagtccatccaaaaagagccctgtgggtaagagtccaccagctactggctctgcatatggctcatctcagaaagaggagagtgctgcttcgggaggggcagcatattcaaaaaggtaagtatctcgtgtccccatccccaagtggtccctagccagcagcttagttgtaatgatagcgcctgagttagtgctctgcttaacagtaatagagtagcacctgttccctgagttcattaaaggcatcacccgaggaagccttagcttaactccagctttcctgaatacttattgtaatacaagtttcttccgattagtcttcagtgatgtttattcatttaaaaa

SEQ ID NO: 29207 - DNA, 1541 bp, Mus musculus
actcccaggccagcagctgcaggctagagctgtggactcctctgggcttcccagggaggtgaggtgttaaccctgaacccctacatccacagcctgccaagcaaggagatgccagggtccctggtaaatggcctgcagcctctcccagcgcaccaggagaacggcttctccccaaagggaaccgctggggacaagagtctgggtcgcacagcagaggggctcctcccatttgcagaggcagaagccttcctcaagaaagcagtggtgcagcctccacaggtcacaggtggggactctagggaccctggttctggcacccagctgcatcccacccatccctgcctggggctccccgggcctaacctttatccctctcccttcccttagaagttctttaagcaaattgccttggaccgaggtgcagctgtgaaggttcctccatatcagctcgtgggtgtctggaagagaaagagacagaacaaagatggaagtggcctggtggacccctgggggcagagttcctctttgtttttaatccgcaccttacagactggtgatgtctttggctgaaagcaggactgcccctcagtacatccgtgtgcttacacgctcggacacccatcttccccatacacaacacacacacacactcatagcctctctggtcttccccctggggaaggaccacttgtagtatttgccttggtttgctggggtacagtggatgtgaatactgtaaatagcttgtgctatgtggaagaggcgggtagggtacaggaggcagaacccccctcccaagtctccctgggcagatcttcctctatttaactgtaaccgagggggaacccaggtctgggaatggaggggcacctcgggccacacaatactggttgcttcaggggtgatgccccctgtcctcgcctggaatcagtgttattacatctgatcaaacttctccggaaataaagggagaaaaattctgccaaacctacgtgtccttggatctgggggagggggagggggaagagaggtacaagtaggtgacctgagctctgagaccttcaggagcctggggctggaggctgctacaccctgattggtgtagcagtcctggcctccctgtgctatggtttttttagtttggttatgaattccttcctttatttcctcaacagatattaattgctgtgcgtaacctagaagtacagaactagggaaaggcacagcctctgtgcgtgtggagtttctacccagacagcgagcatcacagaagctgggctttctgctcagcatccctctgccccttattcctgttcactacaaccctgacctctccaggtacccaagttctttcccagtaccaactcaccttagcaaaggtggcacctagcccacctctggccagtgaattatgacttcggtgacccaaaaatgatggccctgtgggtcatggataggcttgcatgtgtgcatgtgacagttccagccagcaggtgtgaagagaagtctcccgagagttttgtaaaggaaccccatgtgac

SEQ ID NO: 29208 - DNA, 1219 bp, Mus musculus
tccaccatctgtgcctcttgtgttgacctgctctgtctgatgttgtcccccagatcgcagcctgcagctgagcgcatgggagagcagcattgtggatcgtctgatgacgcccaccctctccttcctggctcggagtcgcagcgcggtcacactgccccgcaacggcagggaccagggtaggggcagcggccctgggagacgccccacgagggcccgggcaggggccagcctcgcgcccgggccacaccccgaccgcactcatccctctgcagccgtgccagtgtgcccgcgctcggcctccgccagccccctgacgccttgtagcgcccctcggagcgcgcaccgctgcaccccgtccggggagcgcccagagcggcgcaagcccggcgccggtggcagccccgcgctggcgcgccgccggctggaagccacgccggtgagtggccacagctaaggtgggaacaggctgcctccaggctggagtgcgggctctgctaacctaacctaacctcttcttctcctcctcctcctcctcctcccttccatccttcgcctccaggtgcagaaaaaggagaagaaggacaaggagcgggaaaacgagaaggaaaagagcgccctggcccgcgaacggaacctcaagaagcgccagtcgctgccagcgtctatcagacctcggctctccaccggctctgagctcaggtgggcggggcgctgagctcaagtgggcggggctcacctcacctggactttcactcttgtcaatcattcccaagtactttttaataagagcagatttttccgtgttcttgtctctccatttctctttttcttgattttttttccctttgaaacagtctccaactcctgagccctcaccatattcttacctacatgagtttaggactagaaatagattcccgggcctcccacacgctaggcaatcacccccatcactgagctatatacccagtcctttcagtattttgtctttggtttttcaagacaggatttctctgtgtacccgtggctgcccttgaactctagctgtggaccaggctagcctggaactcacagtgatctgactgcctctgcctcccaagtgctaggattagagtcctgtgccaccctggctccgccccttttcactaagttgcccagccctgaacctgtggtcctcatagttgctggggttacagcagacctgtgccaccgcactttc

SEQ ID NO: 29209 - DNA, 1099 bp, Mus musculus
gtagggatggtggacattcttgcatatgtagggatggctgccttctctggttcatgactttcctcagccctcacctagtcagcccacttccctgaccaagtgggaatctgggacatcgaataggcaacccagcttgggctccaatttgggcacagtcagctgcccgagtgacacactgaggatgagggcctagtctccttcccgcagcctgcaactgcaaggcagcctagtggactgctcacttcagtttccaaagggggaatctgcctgagacagcaaggaaaaaagtcctgcctgggactctgagtccttttttttttctgccacacctaagaggaccagctagagactagtatccctgtggggccttttcagtctcctccttccccaggtcaaagccactaatccaatgggttctggcggtaagagattagtcaactcccagagggagccctgaaggctggttcagggcagagctgccagaccccaccccaaagcctttagagaaggattctgaaacgtctgtggattggagctgtagatgtcactgaccagcgttgacaaacaatgtcaggctttaactatgacaactccacttaccttgtgcatttttgtattttggttcttcttcttctttttttttttttttttaaagattaagcttttccacttgatatttcatttctaacctggtacaggaagttcctctctacttaccacatatcacatatcaggttcaggaaaaatgcaccgggaatcagagaaaatgggatttcttttcaattgaaaagacaacgacagtgctgttattgaccacccccaataaaacctgttgtagaaacacatgctctgactctggcctcgatacagacatgtttcatgggcagccaggtgcttctctggccccttgaggaatcgtctccattacagcttctcattcaggctcctgaggcccttagagcactgcctgttcccctgctgccgcctcagcgccaccaggcaaactcggaggcagtctatgaaacccaagaagggcagtggctggagccggattgaactttgctggaacattcctgtaagctctcaggagcggtggagc

SEQ ID NO: 29210 - DNA, 1179 bp, Mus musculus
tgcctggtacctgtgccctgggcactgtgtggaggccttcacagtgacccgcctttcaacagccctgggagagagagagagcaaggattaaagacgagcgcaggactaagtgggacccttgcctggccaccagcaggcttgttgggtcccgagtagtcttacaatagagcctggggtctcaggcatggccctgcacaaagctgggagtgccagctcttggcaggaagcaaggtcaagttcctgtgccctggctttcccacagggaatggcattgccgcctttgaatctgtgcccaccgccatctactgcttcctgcgctgcatggagcctcaccctgagatcccctccaccttcaacagtctccagaggactctcatctactccatctcacttggtggggacacagacaccatagccaccatggctggggccattgctggagcttactatgggatggaacaggtgccggagagctggcagcaaagttgtgaaggctttgaggagacagacgtcctggcccagagcctgcaccgagtcttccaggagagctcgtaagggccgcagcttcggtgggcttgtcagacccatcaggaccaaggacaactcagattggactccacagttcccttaggttgccgcacctgccctcaatcctagagggaagactgaaggtacccttggggctggaatcttgagacagcctgtggaacagagaggagctggtgccttcttggggctgcagctctggcttgctgcagggctgtatgacacccagggtcctcagaaatatgaggggccagggcaggtcttgttttggaggggtatgggtggcactctttgtcatccaggacatggaacttgggaaggtggaatgacctctgggaggatcctatctcccggttgggttctagccagtgtgacagcctagtgctgagtgggcggagccagcagcaggctgtttggctcctgagaccggcattcagcccagccactggctgcctggcccggcccctcactgcagtgggctccttgacagcttctggtggatgtcacagcaataaacagttttttataaatcccagcatgtcctgttcctgtctccactggtggattgtctttaagtagtaactccctgcctggactgcatctttccagtactggacacaaggcagtagctgc

SEQ ID NO: 29211 - DNA, 1311 bp, Mus musculus
tgctttcttaaactattcattcctctttcatatttatttatttaaagttattatatagatatatttatcacatttgatttactggtgtgtaaaaaatgctatacaaaaagtacatttttagggcctagagagagatgctcaaatgttaagagcacttattgtgctgtcagaaccagaattcagttcccagcacccacactgacagctcacaaatgcctgggactccaacctccccccaccccggggggggtctgatgcccctcctggccacagtgggaacatatgcacataagtaaaataacaaatttatacacaccaggcatggggtcatacatttgtgtttctgatcagcctgggcaacataagaccctgtctctagaaaaagaaaaaattcaacccatctctagtcaggtgtgagctgtaaccaatgtgactgttaaaaggtctccctaaaagggggctattaagaaattattatgcctttgagagtagaaaggttggcagagcatatgccagagacttgcctgtcactcacactggctctgccactcatctgttccgtgacctctggctttttcttccccctctctgcctgtctccctggagtggtggcacctgccctcacctacctcaccaagtccccttgagaatcagtttgtgaataacccttgacttcccccagagaaaaagctattcagaagttcagaatggtagagagggtctgagggctcctttcctgttggtctctgtgaaagtgtcttcactacggcagatcgtttttatgagacaagcatgagagacatggaggcatcatgatgtggtatgtcctagctcttccccgccagaggtcagtgcgtgggcacatttttttctttgtactaaccgctggcagaaacataagttttcaaaactaaattcctttcggtggtgctaaagtagttgcagctgcactttgagttactggggaggccatcaggctcccagagtttattgccccgttgtctccaggtgcctgtgtttcctgtccacctcagctgctgttctgccaggccttccccagtgctccttggcagatacttggtccgtttcccttggagaggtgggtgggttctaagagcaaagtgtcctgatttcacttgtcacttggcttcaccttaaaaactcccaccatcatttatctataaaagttagagcataagccagacacctctagtcccagctcgcaggaggctgcagcaggaagagcacaagtttgaggccaaggctacttagtgagatcctctctcaaaagtcagagagactggccagctg

SEQ ID NO: 29212 - DNA, 1170 bp, Mus musculus
tccttccttcacccacaaagtgttcactgaatgtcagcatgctgattggacgagcttgttaactgttaaggagagactgggtcaagtggctcttttttttttttcccagccagtatagctaggtcaccttgaccactgtatcttcaattttattgtatgtcagcattgttccaagtagatgggcatagcatccttttacactaatgttcttgaggctgtctgaaatccagttttcttttctgaaagcttttgggtacctgagcttctgtgggaggctccacacacccagatacctggcatccatcggtgccacatcaacaatgaaatactgggtggtttgtttaagttcacagtccacctcttcagagccgagtatctgtgcagggaagtgtaggtcatctataaaagaaccttcgagaacagtcctgtgagtaaaaaatctgtgcaccttgctcagaaggcttccctgtgtttgttttattcttcccagtaatggactatgtgcacgtctgtaattttgtgtttgcagtttaagaggctatatcaggctagggatgtagctcgtggagaagactgcttgcctcacatggttgaagccctaagttcaatccctagtgcttcacaaactggcttggtggtacattcctgtaaccccagcactcaagaggatcagagttcaagattctctttgattatgtgctgagttggaggccgtcctaggaaacttgcatctaggcttcatcagagactggatagggaaattaattagtctggtatttcatgccaaaagctttcatcttcatgacttttgtttgaaaaaagaaaacaaaaaacaaaactgcctagacttagctgtttgataatcctcagctgaaagaaggaatggttccagtctcgtatgtgtgtgtggctctacccttattggaggatccgtggaaacaggaaggaatctatgaagacgctgaccagtaaagctgtgcaagcaggcagtgaaggggaatggggagacagtttccttgctggaatcctagaaaccatgtgttagtatttcccaaattcacagataacagagcagttgctgctgtttgacacagatgtcaaggaagggtttgtattagctctttgtcccaaacccagagctgtgcctgctcttggcaaactaacatctta

SEQ ID NO: 29213 - DNA, 1107 bp, Mus musculus
aatgtcaatctgaacaacttatagaatcgattctcttgttaagaagagttgagagtttaatgtatattcttgatggcaaatgtgtctgtagagtgtgcatgttacatgtctatattacagtatctaagcactggcattgataccatatattaataattctgtagctgctatatttattgaggcagagtctgacatttactgcactaaacaatgagacaagcaagatgccaggcagtcagacacttttggtttcttaggtaagtttaaggacataaaacatgaaggtaacgaacagcgggtacttgaaacagtgctggcttcagtttagtaacagaatacctttgctttagaaacgtggggtttttacattgacatccacatgagggtcttcagtcttctcagtcctgggcttgggcacatttctacataaatacggatgaccttttattttattaatagataattatcttttaacaattttccaggaaaaaatagtctggaaatacctctgcttatgacctattagtttatttttgttcctaaagagaatctggaagggactccagtaggaatgttctatgtgttttggaaggcatttgataaagattcatctctaccttctagcagagagactcctcaccttcaaaagacccaacaacttttctaagccaggctctctatggtgccagtagcctaataatgactttcatcgtgtcttgtagatcgcagggtggcaagtgtgtcttggggaattaaaaccagatgctgctgagtagaaatggctcgagatctcagtcacaggcggtgtgagcacttggagcccagccatagaagtgaagcccagagagctatccatccaaaacacgtggtgggcctttcagatgcttaattcttaggaaattcactttggacactggtagaatagtttgttccctttctgattaaaatttttagagtaatgttttgccaggaagtttaactgacatctctgcataattttgactgggtgtcagtaaactaagttatatgttcagttaagccaagttaaggtacacctataagcccagccctcaggagcatcagtaattcaaagccagcctcagcaac

SEQ ID NO: 29214 - DNA, 1142 bp, Mus musculus
taacccttttaatgcctttacctcaagttgcttagcagcacaactatctctgcaaaaaagtaaagaaaaattgaatggtggtttaaaaacacacaattacacaaataatgattgttcagttatatgtgcagaaaaagtaatgtgcatctattcttgtaaaggagtctgtattttcaataccctcacattacttcatgtgcatatgtatctagatctaggttactgatgtatatgtgtctgtgtgtatatcttatagttcatttccctggagaactctttccttgtatccctccttaggccgcactcgtttcctttactgtctcccttgccttcagcatctatactttggtccctatagctacaagtgacattcctatgttcacacatatggttcacttgaaggaaggtttgacaaattagacttctggttttctttatgtccctattcctagctcctttcactcacacaggagtcctcagctcctgacgccatgtttgtgagcgtctgctcccttttgctctggatttaccacatgtgcactgtgtttggaaacagtggcaacctggggattcttttttgtagtgagtttgttaaagctgctctaaatacgaaaccttgtcggacatctttctgatcagtgcaaatgttctaaagcctctgtttgtatgagttatacctggaaatccctccaaaactcgataggatggaaaaaggaaggaattagggttggtttggtttgttttttgctagtttactcactgcccttataccttaatgtgattttctcacatataaatatatacatacacacacacacattgaagtatagctccctttgcctttatgttcattagaatagtgctttaataattataaactatataggctatatcttttctagaactagaatcgtgtttaagaatggagacagttttttgctctcttttagtgcaataagcagttttacaggaaagttctgtctgtcatcctcaccgtggatagcaggaagaacagacatccgtagtttaaagggaacaaagtaatacagccttaatttcagaaggagagcttcataattttcagttttaaagcaattccttaaaataattttagccaaaggagtaaaaccgatcaaaggcgc

SEQ ID NO: 29215 - DNA, 4376 bp, Mus musculus
ttgtcctcaacccctctccccatcttgtcatatccgacccccttggaccaaaaggggcatcactagtacccaccatacacacagttgtctcatgtgactcacagtgctaaagactcatgctcaacagcctgctagggtcagctctgcagccctgtggtcaaatgctggtatgtttgggtttgctattctagatgagaaagtgggtgggaagagggcaggaatttttaggagccttaatcagaaaaggtctagatttgtttaagaaaaaggaaaacagactcagatcaatattttaggatactagatgttttcatgggttcagaatccactttgtaggaagatttttaatgctaatggtttgggttgctcctccccagctgccatcccctcccatcattcctctccacattctctaccccatgcaccttttccctgacagacatccagccctcgtaacacttaaggcactatggcacttagctctgaggtgacatgaccctgtcttccttccgcctgctggtgggtaaccagtgccttcccgcaacggtaatgctgcagaactgcaaccttttgtacctttctctgtggggtggggtgtgggtgggaaaggagggagggagggagggcagaaatagcccaatgccagcgagcctccagccagaatgccagctaattttcatttgaaggaattgacttccataatcattgagcttttaaaaaaaggtcacaacctcaagatggttaaaatccattgacatttgcactttcagacgtgacaagtctccgagctgctgagatgactggcccttggcctttcccctttagcttcctcttttccctggccccaccaccaccctgccagatctagagttactgtcatagtatttctcattcttggcttttttacccctgatggtaaagtctcgtttcaatatttcttaactggggtgtcttacagcagaagatcgtaaggactaaaataagaaaacaaaaaatctaaaggttatttttataccataacttgagtctattgccaaaatctggaaattccctcccatacctgatgagtctgcattccagaaacatggagccgtaagagggaactgtggaactgacttgtgttctggcctagctaagtagggggtggttgtctccccaaggtggggctcagcctctgtccttcctctgtgcagacaaagccttgttctcgagacagcctccctccagggcgctgtcctgccctcttccctgtaagtgcatcttccccttttctggactggactgtcctttgatccctgactaaccgagactctagcacgtcctctggacaggctggggaattttgctgctcccatttgcttctgtttacacaaatgaaattttcctgtttctcactagggcatgtgagtgggtggcatgggcttttctttttctacccctctcttgaggttctggggttcagctagctgtcttgcaggactggaaaagaagtgggttctagctttgtctttgctgaccttgaagcaaggccccctctttccttgaccattcttttttcttcctgcattattgcttgggatgggaaatttgaacctccgtgtacaggttccccttctgaggagcctgagcttaggattgccctactctggcgatgaagccatgatatgttagctctagcccaggcttagaggcccgctggagaaaggaagatctgaaccctggcctatggagtcaaaacctttccccaagagcccatgtatagacccagatttgctatgcaaatagtccagattcagttatggctggctacattattcagtaacttcccaacaggtagcacaaatattccttatggaaaaagcccaggactgttcagtagttcctcctgtacttttctgctggctacagtatggagtgccccatgggcacaggcccagccggagaacagaacggagggctctgggaagaggcagctcactggagagcctacattccttacacaagtgcctaaacagagtgatgccaacactccatctgccctgtccatcgccttcatagacagtctacttcgtgttccatcaccctttggggagggagctctttgcagacagtgtgttgtcaacttgggtacatttgggggcttggattaagggcactactccaggagggtccaatcattcaccagcatttgcagatgcccatagggaacaggtggctgtcacaactcccagcaacaagattttgttttctcctttttctttgcctcactctctccagttgggttttaagctagaatgaaaagcagtttcggtcctttggtatttatgtgccattcatgaaataaaagcaagagaatgctgggcacgatggcccatgtctgtaattctgttatctcagcactaaggctgaagcagaagatttgcaagttcagggtccacctgggctactcagtgaattccaggccagtgtgcactatgtagcaagaccatgtctccataaaaaagaccaagaaaaatgacttgggtgacagatcttgctgtgattttaaataattctttgagacttaactactgaccatgtgggttcttctcatttaaaggcagtatgcacacattacaaacagtgttgccaagcctcagcttgtttggatttggtttaagtggtgcattgtaccgagctctgggaggattccagcctcatcttagacagctctttctcctcccccaactccctcccatgcctccaccccacccccactgttcggctttccctttcctcttctggccttccctggcttccttttccttctccctcttccctcagcttgcttgctggctggcctgcctgcctgtctgcctgtgtgataatgaattctctgcatggctgcaatgatcccactgttagttggcaaggtcaggcttagctcattgactacagaagaccaaaatcctgtttctcatgcccagtggtgttagccctgggttgcactgtcctcaagcttacactaggtcagagcagcaggcctgtcaaactgacaaaactagtagggtttctggcaggttcaacacctctccattctgtggaggggcttggagaagaggcagtgaaggagaccgctgctttgaattcagtccagtgtgaccgattggttgaggtgctattggcagcctgttggggtcggcctggagctactgttactgggaacttaaacttggactttgactaaagttgaacagagtatgaaactgttctagaaatctagttctcaactgcgacatagctcctctgtgactgagcagcaaggctttccaacaggttccttttaaccagaattctatgaatgatgccggggacacagttttcttagctggcccatagaaggtctacaaggctgctaagtgttgtagacctggcatctggcatcacataggaggatggaatttcttccctttcaggatagaagagtcacctcttacctagccaaaaggcagttttgggaattcctgtcaggaggaaaggtttggttttgttttttaatttactgggctttagatggtagttcattatgccttccttgggcagggatcatggcagggatacgcaaggcactctaatactcggccttctaagcaggctgggaaagggggattctctggttttctctttctccccacttactaggacttgccttctccctgagccacgagagaggctgggttggtgctctccccttactctgctcctactgacttagaacctctggctgctgtatgatagcccaggaaagggaatggaaagaatgggctcaaaacaataatgtaaggaaggtggtttccttccttaaaaagggaaatcagaaactctccaagaattgtgtaagtaaagacaatgtgtctgaatgcactgagtcctctggtgtcatagcaataaggaaaaatgaattgactttctgtgcatacagtccagcctgactggtgtatgatgttgcacttagcagccatgtggtgggcatgtgtgactactctgggtttcactttattttctaaactttttattcctctcaagtccagcatggatggggaaatgtccctggagccccgcagctgtgtacttgtttgcatttgtttcccattgagacttgtgtttgtgtcctgctttgagctgtaccctgtcccgtccattgtgaaattatcccagcagctgtaatgtacagttcccttctcaagcaagcaacagcagcacaatcttgtgttttataaaaacaacagtggcttttatttctaaagtgcagtctgttttttttttcctaccacaaaataaatggttggtattaattacatctctcataggttttagggtggaataatagattgtca

SEQ ID NO: 29216 - DNA, 1151 bp, Mus musculus
agccactggcacaaggcagtttaaattgagacattgtggattcctagaggctgtgtcagaagaacgtaggtgtgggaatgagagcaaggtgatgatggagagaaaactgctaagagtttagagacccagagagagggattgttctacactttattttattatttctaggctagctcagatcgtttgctctttttccttttgtttttgctcgaccgactgggaattagaggttgtggaaggttcaggatagacctgagaacaggtgcttccccctcagaaggtctctgtgggtgttggtgaactgagggccaacagtgtcaccctaggttgtgagaagtgtgggttttaagctacactgtagactacaaatcagaagatgactttaatcagacctgccggttgataggaatgttgaggcttttggcatactgccgaggagtagacaatagaaagcagcataatacatgggacagtgcctcgattttgaagggcttgcaaaagcctgacatgatactctcagcttccacatgccacgcctgtcttctgcagggaggtggtggaatacatggtccagcatttcaaaccgcagatctttggggatcgcaagcctgtgtatgatggaaagaagaatatttacacggtcacagcactgcccattggcaatgagagggtaaggccagggatggcgctaggtctgtgagcccagggaagcccacctggagtctgtgagtccagcgagccttcttttcttttgtgtggaaaagtatattttggggcatgatgagtcagggtagatgcttactgtgtgcctatccctaaacagtgagattagattagacgtaaaaataaaataaaataaaatagaaagacccaaagaatttccttctagattaaggaggccagaagcactggggcatcatctgtggagattgggtgtgggtttttattctgggttttttttcttttttaatttaagatttatttattattattcataagtacactgtagctgtcttcaggcgcatcagaagagggtgtcagatctcattacgggtggttgtgagccaccatgtggttgctgggatttgaacttaggaccttcggaagagcagtcagtgctcttagctgctgagccatctcaccagccctat

SEQ ID NO: 29217 - DNA, 1186 bp, Mus musculus
tttttttttctttatttggttggttgttttttgttttgagccagggtcttgagtatcccatgctggtctcagactctgtgtattccaggatgacgttgaacttctttgtttttgtttttttgttttttgtttttttttttttgttttttgtttttttgagacagggtttctctgtgtagccctggctgtcctggaactcactctgtagaccaggctggcctcgaactcagaaacctgcctgcctctgcctcccaagtgctgggattaaaggcgtgcgccaccactgcctggcaacgttgaacttctgatcctcctatcttcttgagtggtgggattttagacatgtgtcaccatgctcaatttatgctgtgctgggattcaaacccagggtttgtgcatagtaggcagagcactctttttttttttttttttttttttaaagatttatttatttattatatgtaagtacactgtagctgtcttcagacacttcagaagaggcccggctacagctggagcaggaggaggcagagctcctcacctacactcgggaggacgcctatactatggagtatgtctatgaagatgctgatggacaaacagaagtcatgccgctctggacaccacccacccctcctcaggatgacaatgatatctacattgactcagttatgtgtctcatgtatgagaccacacccatcccagaagctaagctgcctcctgtttatgtgaggaaggagcgcaagcggcacaaaacagacccctcagctgcaggccggaagaagaagcagcggcatggtgaggcagttgtcccgccccggtccttgtttgaccgggcaacacctggtatgttgaaaatccggcgtgaaggcaaagagcagaagaagaacctgctgctgaagcagcagacaccttttgccaagcctctgcccacctatgtcaagtcctcaggggaacctgcccaggacagtcctgactggctcattggcgaggactgggccttgctacaggctgtaaagcagttgcttgagctgcccttgaacctcacgattgtgtcacctgcccatacaacatgaagaaattacattgagtgaacatcgtctcctgaaaacttccaagtctgagtgtggataagtcttggagggagctcagcaatgtcctctcggggatcttctgtgcatccctc

SEQ ID NO: 29218 - DNA, 1457 bp, Mus musculus
ctctctaggtcagaagaaggggactgtcgtcaatgatgtcaccgtctcctaagcggctaaagacaaacggaagcagtccagggccaaagcgaagcatcttcagatacttggaaagctaacgccatccaggatgccagtgtctgtggaaagtactcagagtaggtctggcggggagggtgggactgctgtttccgccgatgacctccccttccctcagaatcaactcgtaatgagccgagcttcccttctccccacacagctctcagcagcactcttctctcctagtgttatttttcagtttggccaccaatctcagcacaacagagtgcccagcatcgacttacagaataattgaagtctcacttcttccgttaagcacttgacattttttcctagcagtttcctgggttgacaccactttcaagtcaaggtgttcagaggaagaagaaagtgtggcattatagaaaattgcagaaagcactgaaagccagcctgggatgaggctcccacagccacacggcccttaacacagtaccaggccgagaagcacgcacccagctgttgcatcgtcctgttccttctgtgtcatgtaaacttctagtcttgatctctgattaaccttcatcgcctttgacataaggactcaagctggtacctagttgagaaagaggttatccctccctttctgcaccttccccaggactagagtttcaacttaaagcatttgttccagagcctccctcccttctgcagaaacctgaccactatttattgctgctttggggccgagtttcttgccctgaccatcagaggacattttaatatttcatcactaatattgagagcagaccagtagaatttaataaaaacgttgaagagaactgctattagtcgctttctttggctttcagaaacataggccagttctcttctatcagagcagaattcagtgctgctttgcaaaaaccatggcaggtgaacgttggcttcagtgtcgaaagctgagcgtgagaagttggatgaggttgtgtccgtcctttattgagagacataaagcagcctgttcgactgatgagattaagatgtaggttttctgttaggtgctggggcttttggtttgggtttttctaatactcaggatgctgacttggacagaacatacatttgtatatttgtaatcttgtaatgggagaaatgtgtacaaagctgttttaatatgtatgtaggttttcaataaatctcattgccttgtgggcaggatttgctgtccagctctagtggtcatttcttcggtcagtgcctaaggtgagagagggtttcattttcaggatgctccctcccgggaactctgcgaccagcgtagagggtgctgcagctgcccctcactggcttctccatccccaggaagtgatcagacaacccactcagtggtctgaactcagagctgctcatgtgga

SEQ ID NO: 29219 - DNA, 1190 bp, Mus musculus
aggattcatcagtggtcttaggggcctcggtcgtggcggaggccatggccgtggtcgaggccgcggggctcgtggaggtaaagctgaagacaaggagtggatccccgtcaccaagctgggccgcctggttaagtacatgaagatcaagtccttggagaagatctacctgttctccctgcctattaaggagtctgagatcactgacttcttcctggatgcgtccctaaaggatgaggttctgaaaatcatgccagtgcagaagcagactcgggctggccagcggaccaggttcaaggctttcgtcgctattggggactacaatggtcacgttggtcttggtgttaagttctccaaggaggttgccactgccatccgaggggccatcatcttagccaagctttccatcgtccccgtgtggagaggctactgggggaacaagattggcaagccccacactgttccatgcaaggtgacaggccgctgtggctctgtgctggtgcgtctcatccctgcccccagaggcactggaattgtctctgctcctgtgcccaagaagctcctgatgatggccggtatagatgactgctacacttcagccagaggctgcactgccactctgggcaactttgctaaggccacctttgatgccatctccaagacttagagctacctgacccccgacctctggaaagaaactgtcttcaccaaatctccttatcaggaattcactgatgatcttgtgaaaacccacaccagagtctctgttcagaggacccaggctccagctgtggctaccacataaggattttgtacaagaaaaataaaagaattaagtctgctaaaaaaacaaacaaaccaaccaaccaaccaacattcttgggccaggcagtggtggcgcacgcctttaatcccagcacttgggaggcagaggcaggcacatttctgagttcgaggccagcctggtctacagagtgagttccaggacagccagggctacacagagaaaccgtgtttcaaaaaaaaaaatcaacaaaacaaaacaaaacaaaagaaccaacattcttgagagcacaacactagaggagcaggcagcttatgaaggggacaaaggcaagggtttggggtatagctccatgatagaatatttgcctagcatgtctcaggccctaagtttgatctctagcactgaa

SEQ ID NO: 29220 - DNA, 2768 bp, Mus musculus
ttccctcccttcctttcttcctttctttcgaggcagggtttcatgtttcccaggctgggtctcaaacttgacttgtagccaagaatgaccttgaactccccagccctcatccccaccttccaaggattagaactacaggtgtctgccccacacccggctgggctttctttatctatcacggtctaccactttcagctcggttctgggccgccctgggaggaacatgcatgttatgcctgtggttctggtgttactgacaacgtgagacgggatgggaagaagttcagaactgttacctaagaaaggatgctgtgtatttcccgtgttcccatctcaactttgttttctctcttttgcttgtttcctcctgtggatagttctgaaagtgtgaagcagaggagtgatgtgttctaccttcagccggagcgctcctgtgttcctaacagtcccatgtggtactccacattccccatagaccctggaaccctggacaccatgttgacgcgcattctcatggtgagggaggtacatgaagaacttgccaaagccaaatctgaagactctgatgctgaattatcagattaacatgaaggaaagctcccgttttcatgcacactggtatgcaccaagctgtgatgcactcagctgttggaaagatgttgaaatgcaagtcctcttgacttgcttgtttggtgggaaaaacggtggctctgagccgtagtggactgcaaatgtaacctgaggggagaagggtgagtggattgggagggagaggagtggtcatagacatcttcgaaagactaaccagtttctgagtggtgcataatcttattttctttgggaataagaaattgtggaatatttttaaggaaaactgttgtataaaattctaccatagtaaccttagttagaaggggtagctttgcagtgagaccctggctgcagtaggctacttgagcaagctgtccatgaaagtcaggagaggtcactgcacagctgagagtggcatcagatgaggacagggagactcagcctggaagatccaataaaaatactcaagtttttataaaaaagatagtggtctggattgattttcactgccaacctacttatgtgaaggatagaagcctttagtcttttaactgaaggcccctcacatcagaggacacgcccttcattactgttagtgagccccttttcatttagggtcttgccttctcagctgtgggtgatttaaggtaaaaaggatgatatttcagaaaataactatgtacacagaaaatctgtggagctcattagaccctggtgtcttgaagtatttatagaaagcccactaaaatgcccgcttctctgggtgctgctgtctcctggcctcagctggctgcacagaagtggggcctccctttgtgtccagttttccccatggcatcctttcttccctgtcttactttcctgtcccaaatgatgctgcttgttctttgtcccagcttctagaggcccttgtcatttcaaaaagaataatctgtctccacaattctgacaaatgtgtgggcgatcccacaaagacacagtattatgtagctgtccgagttacggtagggaagattgcagtaggttcctgtgtaaaagcatttggaagttgaccttattgccccagggaacttgcaagttaggaattgtggggctggagtctgaggtgactgacctcacacatccatgcgacctttctgctgctgtattccagactctagctcgcacaggtctatgggaagcgcaaggcacaggtgtgtgtgacattaccaggtgtctccctcatctccattctcagtttctttcctacaaattttgaatcaagcttttaataatgttggataattactgagcttctttaattgacgttaacttgagcttacagcagacctgagagaagtcataagcttctccagactgtcacctaagacttcagtgtgtcccatgttataggtgggagtagcaagttggttgttttgttttaaacaaataaaggtcacttaaatacatcagaactttaaaatgggcctttgacgttgtgtacttagtggttctgtccctctgcttgtaacaaatatcctttttgttactaagaattatgtgaaagaagtaattctgccccagtctgtatgattaactccatctgtgctgtcatttctgacggggaaacttcttccttccagaccttgattgatcggagggaaagcagttggcctgtctgataagtcaccaataaaccatccaaaacaccaggtgtcatcctgctgtatcagttctgatttgtgtgaacactaacatttcccatctagagttgtatgaaaaacaaatactgttagcttagtatataaattgatataaaataccaaaaagaaaaaaatgtatcttttaagagaacaaccactatccagataaacgactgtatcgggcttcagctgcatgttagtgcaggggcttcagaccctaaactaatgttaaaaactggttgatcatcaatcattcctcctgagtgtagctgtttgctgtgtcaaatcatttgttttttttattttgttaaaattgtgtaaaaccatacttactccttcctccctctagggggagtgaggaacaaacccaacaactagcacctgagctcggcctgtcccgtccttggtctctgtctctggattttctctttgcaggcaccacagaactattcccttagaataaaatagtatatttgtatttgatgggtgagttct

SEQ ID NO: 29221 - DNA, 1099 bp, Mus musculus
tttatttatttacatcctaatcccatctccctcctctcctccctttcacttccccatcttcgtatttttaaatggttagaaacttgaaagaaaaatattttgtgatatgaaaattgcatgaattcaaatatctataaataagccttattgttgagagaaagtggccttcttgggaaagataaaagagtacagggtagagctgggccgtcccgttggagtgctgttcttcctggtgctgcttctgtttgctgcatagagaagaggtgggagagcagtcagcgccttactgtgctccgcttgtacaagtggagattacatggctctctttgttcttctccgccctgtctaggttacatgttctcccgcattgaagaagagcatctgtgggagtgcaaacagctgggcgcttactcgcccattgtcctgttaaacaccctcctttttttcaataccaaatacttccaactaaggaatgttactgagcacttgaagctgtcctttgcccacgtgatgcgccggaccaggactctgaagtacagcaccaagatgacgtacctgaggttcttcccgcctttacagaagccggagtcagagccaggtgtgctgttggtagatgaggtttctgtttgaagtgcaaagatggttatcactgaaggtcatggagggcacactgaaacttctttaacgttttaatatttttctgtttctgagtatgttacaagctctcaaaataggagactttttggttcattttaattttattaacttaagttagaaatgctgacttaattgtatagtgccgggatggcgagatggttcagaggttcagagcactgtctgctcttccagaggtcctgagttcaaatcccaacaaccacatggtagctcacaaccatctgtaatgagatctggtaccctcttatggtgtgtaggcatacgtgcagacagaacattgtatatataataaataaataaaaatttttaaaaatattgtgtagtgtttccccctccccaccccccgatttagttgggtagattcccaaataatctacatttaaaacttaccagagtatttaaatctgtaaccatggtgataagc

SEQ ID NO: 29222 - DNA, 1226 bp, Mus musculus
cattttagagggttagagtccatgagcatcccagcagacaatatggaggcaggcaggcatgagtatttagaaagcctgtccccagttacataccttgtccaacaaggctgcaccctctaatgcttcccaactagtaccaccaaatagggaccaagcattcaaatacataacttgtaaggaccattctcattcaaactaccatattccacttcctgacctctataggcttgtagccatatcataatgcaaaatgcattcagtccaacttgaaaagtcttcatggtctttcagtctcaacattgtttgaaagtctcttgtgagactcaagacaatatatcagttgtaacctgtaaaatcaaagcaaatatgtacttctaatgtacattgatacagaatatttattaatgtttgaaaggaaggaataggggcatactgaggaaatactggaccaaagcaagaccaaaacccagcacagcaaactttaaatcctatagttctatgtctgatgtcaaatggtttagatggctccacccttccagttttgttgactacgacacacttctctctcctgggctgacttcatttcctatctgtagctctctaatggctccggcatcttgaacatctggggacctgtccagtgcaatcttgactttcctttcatagctttacaaaatggcctctctggtcctccagtaagggactccccctgcctcacacctgacctaagtgtctctccttagcagcagaggaagattgatgtcacaaccttcactactgtattctttatgactccaaagccagggccacatgaacaacactgccaagtcctgctgtttgcttgggattcggcttgacccccttgaatcaaatttgcataagctttcatttgttgctgtttgtttatattttttggtttgggcttgagatttccaactatatattttctcttacaagtgggtgattatcaggttttgacttttattgctagtagtctgtttgctggccttggagttcaccagttctgatcagagcaggcggttggtactctgttctgtgatgactcacagtctctaaatcaagtgttaacctttgttctccacagggtctgtaaatgctttcctattgggaagtcgtgcctgtaaccatttccctgttgtgtagctttcttcattgagagaacaaagagagccaggtgcaatatatctgtaattcctgtattttca

SEQ ID NO: 29223 - DNA, 1224 bp, Mus musculus
atttatgatttgggaagatttttcttgacagtcttccagtattggctttaagtctgtttcttgtgtgaatgatttatggaggcctgttttatagcttggaatataacctattcaagtgaactgataacagaacacatgacaatgattatatctcagtttcttaaatgttggtaggaactgtagcaatttcttttcatataaattagattaaatgctttcttggagttctgagaaagggtcctctatcatctggactttgtgtggaactaagaatgaccttgtacttcctcaccgtcctacctccacttcccaaacactgggacaggtgtgcagcgctacacctaaaaaaccatttcagccctgaattctgaatctttatgatatgaaagtaaattttatttttactcaataggattattttcttttcatctctgagaacttagacttttaaaattgcaaagtaagtttaataggttgaattttttggaattctcacaggggaggaagaagtctgtggtacctgtggaacccagaagtcttattcaaggagccttgcaagggtgctcagtgtctggaatgacactgaagtatatgtatggggtaaatgcctggaagaactgggttcagtggaaaaatgccaaggatgaacaaggagatctgaagtgcgggggtaagtagacattgtattttgatgtgtggatctaagaattagaaataaagtcataaatatattcaaagatgattagagcttggttttatacagtcccacttgattactgttatttacctgtctcgttaggaggtgaacttgcctctgctagtccgtgttctgactccttaggaagtgctcaagaccatgccctctctcaagaatcctcagagcaaggctgtaaaggtaaaagttgctaatatctctctgctgtaagttacgtatagtattggagtttaaatttttaatgtgtgtgaatattttgcctatatgtgtatatgtggaatatgtgcatgcctggtgcatgcagaagccagaagagggcattggatcccctagaaatggagctacaggcagttataaaccgtcatgtgggtgctgagacgaaaacctgggtcctctggcagagcaatcagtgctcttaaccactgagccatctctccagcccctagtaatattgttgatttaagtttgtaaactgaccagatgtggctaggtttgctagtcttggcact

SEQ ID NO: 29224 - DNA, 1190 bp, Mus musculus
agcagtatcaactccacacagctgggaagaagagctgaatcattacgcattaaagtcgaatgctgtgcaagatgctgattcagaactgaaaccgttttcaaaaggggaaacagagcaggatctggaggcagacttcccatcaggtttgtacctcatagacggctgaaggtcgtcatagacggctgaagtcagaagattgggagagctccaagtttgcagggttaaacggtgtgaagtgttcgggagtcttctgcctttataaatgtgaatatctgttgcaaggttcttgtaagtggttaattttattgtttgcaatttttaatgaccttttcaacagtaactatttacggatggtttccttgctaactgccgtttcattcatgtgttaaaatccgttgtgcatcttaactatataagcggaggtctttatcacggagactggactgatgattactgatactagtcttatgagctctcttaagtctgtgtgttacatacctcacactgggctttctgctgcttttttcagaatcttttgacccacttaataaaggacaggggatccaggcacgttctcgaacaagacgaagacacagagatggattcccccagcccagacggcgagtaagcggaagcttaagtttacagtttgtgttcttttgtttagcagtatttattagttttctgattaaaagctttgtaggagcccaaattaagtattttcattctttttttttttttttgttttttcgggacagggttttctctgtatagccctggctgtcctggaactcactctgtagaccaggctggcctcgaactcagaaatcctcctgcctctgcctcccaagtgctgggattaaaggcgtgcgccaccacgcccggctcattcattattttttaagtgttttagtttttaaggttttttgcttttgtttcttagtgtgcaaaaaagaaaaccaacaataccatttattacatatttatttctaatcaggacgtttcctttggtatttaaacttacagactttgacttactactttaacaatctttttatagccctgagagagatcagggttaaagagtacttgttgctcttacagaaaaccaaggtttgataaccagcacctacatgacagacagacagctcacaactgcctgctgctccagttcccagagcttctgggtg

SEQ ID NO: 29225 - DNA, 2448 bp, Mus musculus
aaccgtctttttgccacaaagccagagcttcttgactacaaggtaagtgtgggctcctagctgctgtgcaagtgcatgcacacaggattgtgagtttcagattaatgtggctacttagtcagaacttctttttataaaatacagaagaaataaaacagcaaagtataggtccatgataagagtttgaatataaactcaaatacactctgtaaatgtattttttgactttctgtctcaaaattgcaccatttgggtttttcatttttgagataggggcttactgtgtaaatctggctggcctggaacttagtctatagacaggttggttttgaacttaaagaggtcttgtctcttgtctgctttctgagcgctaagattaggacatgccatgtgctcaactgcttaccatgtatttttgaattaagagggatgaaaatttctataatataacccaaatatctaattactaaatgtttctttacagggtaaaatgtttcagttctgtggcaagaattgttgtgatgaatataagaaaatcaataatgtaatggcaatgtgtgaatactgtaaaattgagaaaattataaaggagactgtgaggttctcaggtgctgacaagtcattttgtagtgaaggtaattgacaaatagtaatcttactgagcgtggcggtggtttctaatgtagttgttgactaaagggattactatgccagtctattttatcctttgtacagaccctcaacatcttttttatttattgacagataatttgctattttgtctagttctttaattttatgtagatattaaaatgaagtcaaagatcttctaaagtacagtacataatatggcacacaggatacatttaaccccattagcttgatggacagctcaaagacctttaggtcctgtcctcatttctagatggaaggttttaagttctagtagcaccctgagtttgtgtttctgaataagtatatcaaagtgaagctaattttctcttttttagataatatacatgtttaggaacgttttacttgactctaacatggtactgttatccttcttgaccagtgtctttcaattatttaactattatacaaattaattacatttcacattacatcctactataaacctaggatatgttcacactttaaatgaaacaaaaactttatgcaatgaaacttacaatatataacatatagttcagtctgcacacacacagctgtctagttttgatatataactgacttcttgacctgtcagttggttaagtcccatgtgtgaaaacattattattattcagtccatattaatttttatcttttctgatttcttaggttgcaaattgctttataaacatgacttgggaaaacgctggggaagtcattgtaaaatgtgcagttattgtttacagacatctcccaaactgatacagaataatttgggtggaaaggtggaagacttctgttgtgaagaatgcatgtctaagtatacagttttgttttatcaggtaaaaaaaaatcattcatattatgtacaaagaataataatttgatgattaaatttcctttaatgttaaatgttttgtttcttagcaattagtgcaacatttgggggatttaaatttactccttttgtttttaacttcttgcagaagatatagttgacttatggtattaaaatattttaattattattcacttatttaaatacatgaatctgtcttctgaattctgaaaaaaattgtttacatttttaaaaacatctttgtttttatttttgttaaatttatttattttatgtgtacagtagcacatacatgtcggtgtaggtgcatgcatgccgtggctcttgtgtgggaaagagttcagatgagaacttgtgtgggtattgattctctttccactgtgtgggtcagaaaatcgacctcaggttatcaggcttggccgttcttacaggcccagaactttgtttttcaattgctacttttttttttttaaagatttatgtatgtgagtacactgtatctgtacagacggttataagccttcatgtggttgttgggaattgaatttttgaacctctgctcgctctgatcaaccccactcgctctgatcatccctgctcgctccagtcaactctgcttgctcagttcctgcttgctccggcccaaagatttatttgttgttatacataagtacactgtagctgacttcagatgtacctaccagaagagatcgttggagctcattacaggtggttgtgagccaccatatggttgctgggatttgaactcaggacctttggaagagcagtcggtgctcttacccgctgagccatctcgccagccccaattgctacttattagggtattctacatatatgaattggtttttaaaaaaagatttttttttaatgatgtcattggtaggattggtgtg

SEQ ID NO: 29226 - DNA, 1185 bp, Mus musculus
attaaatatgttgtattctatgtacttgttaaacttatagaaaaatacttgtgaaaaccaggaatagtcaagtagcacagatatttagcattaaaaagtggctttattgaaatctctaaggtgagcatcagttagtatcatttcctaatgtgattttaacacaattaagttgtgttagtgttatctttaaaaaatcttttatcactaactgtctttgggaaatgcttgccagctgttgtggcttttggaattctagcacttggaaggctgaaacaaagaagagtaaatgaatttcaggagtagcctctgctttatttctgcctgctgttttaaagctctaggatttactcagacttggctctatttctgtcttaggccctatacattcaacaggatacatcactgtaacacaattgacttttgattttaagatcagtgcgaatttttctgtaggagtagaaggggatcccaaaaataagattgaaatattgagagtaatgttattttttcccctccctctctctttttcagtttgaacagaaaagtgatgcagtttttgatgaaattgtagaaaactgtaagtactatttgagaaaaaaagttgtcttcagataggttaagtctggatttagcacttactaatcattagggtgtttagttagtattgaattgtgtgatggtctggtttgatttagctttagtgtcattaagttgaggtgtttagattcttttttttttaagtaaatattctttcagtttttattatattacagtatagcagtattttgtattagtatgaatgctatagattgtacttaacatcttttacaggtttttttttgttttttttttttagttttccatctttttagatgctgtatgatagattataaaagtaatacattcaattatagtacagagtgaattaagtagaaagtaaatatttttattataattttcaaaagatttaatgagctttaagagcttaatatatctttccagactttttctataaatgtatacatacatatagtatatgagatttatgttcaggaaccacatgaatattattcctgttctttttaagtcacctatgtagacatctttttgcatcagtaaaaaaagatctagtgtatgtcttttttttattgctattgggtattttattacagggctatactgtaa

SEQ ID NO: 29227 - DNA, 1220 bp, Mus musculus
taggctccatgtctagacatagataggtttatacatttaacagtttctgggtccttagtgtaatataactgaagcctcaaatttttctttttagctttttttgtagaaactatacaccttaagactttcaaaagaatacaattgaaagtctgttcaagtagttttgtagtgtttttgtttttcaaaagatgaattgtaggaacagttaaaaccttgttcagtctttatttttattttgattagtaattagtaactgggctattttgagtagaattttaagtggagtgcttgtgtgtagggttctgctgttaggatatgtgggttttattttactttgtgttttaaagtcaaaatacataaaactagatggataatgaagtcattcactgctttactgcagtcaccctagcttgatgataggctgttttgggagataacctaaaacatggattcataacaaagtgacagtgcactttccaaaactaaaaaaaagctggactctgaagtaggtgggctgtatattgtgcttgtaacaatgcagaaacatactgtgcatgtatctctagttagtagtgatggctctgaagtgtggaatgctgtgagactgtggcaaaataagtttttgatgaagttactgtgccggttaagtggaaaaaactatttttttgtgctttttcttttttgtagtcttggtagcattttattaacttcattccaaccttttaagatttctgcaactttgcagatgtgtcttaagatcttgaaaagcacaaggtttcttatgcagcacatgccactacctggtgagtaggcctttgtccttcattgagcgagttgcttttgtctgactggactttgtaggcttggagatgactttgtgttcatacctggacaatcgtgtcagtggattaatctgatgtgaattttgtagaactcatttttggaatgggttttcacatctgcactaatttttgaatttttttagcactacagggaagatctattctttgaaacaggtgtatgagaatggctcaagtgggaacataccacaaggcatgtattaccgtaaactaattttcaaattacccttttttcctttctatgttcccggtacctgtggatcgactcattggtgattgtatcgacgaacgttgactacggaaccttctaaaatatttacttaacacacatggacatcaactacatttaatgaactgtta

SEQ ID NO: 29228 - DNA, 1745 bp, Mus musculus
gcgctttgggcagggaggtgcgggtcctgtgggtggacagggtcctagaggaatggggcctggaactccagcaggatatggtagagggagagaagagtatgaagggccaaataaaaaaccccgattttagatatttaggctttcattctagtttggttttgtcttttcttgtttagataccacttaaattcttggcattttagtaagcaagctacctttttatggatgttagcagtttattgacctgatatttgtaaatggcctgtttgggcaggtaaaattatgtaacgcagtgttcaaaacaggagaaaaaattttttcatttacttttttttttaactgtataatgtttctcaagttaatggcagtgtaccttgtgccaccgaatttccaaagtgtaccattttttttttactgtgcttcaaataaatagaaaaaatagttataatactgatcttcaactttgctattcatgcttctatgcacattaggctaggtatttcacttggaaagcatgagcgtgtgtaggcctttgagtggcataagccatttctgggaaatgtaacaggaggctaagtactgctttctacaaatggtgcccccccttgttaaaaagaaatgcatactgaagtaattaggatttgtttggcattataggaagcaggctggtgctcagcatttttaaatggttatgttagaaaagttgaacttgcaagtcttaattcaggaacatgtattaagattatggatgggtgaaaactattggtagtgagagaaagagtttgttattttggttaaatggatcccttatggccctatctatgattctttccttgaaagcttttgaaaatggaaagatcatcttgttgcgtttctccctgttgttttttaaaagaatcccaagccctacaaatggcttgtactgaacttttgcatttgaattaaagattgttaaacatgaagccttttcatgtattacttcaagtgatttaaaagatgggacttagtcgggaattttaacttgaagagttaagggttagccaactataaggactagccttatgtactctaacatacaccttcctgtgttacttctatggagcaaagtctgtagtctgaaaatactggttctcttggagaactagtggtgactgttaccaagtaggactgtcaagtagtctcactatggagttgaactgtttttatatatcagtcttacagtgtagcattaaacctggagatagttgcttaggctacatagtaaaaatatgctttcctcccaccataagcttggggatgttttgatgatgtcagttcattgttaacttcattgaatttcctttcgttagagcaagagactttctgacttgatgataataaagtagattggttactgttgggagcttgatttcttcccagtgtaaagatgttaagaggaaaattaacagtacagaaagtaattgaatagcttggctctgttcttagttacatttccattcaagtctatacattctagaactttcacttagaatgtcttcatccttttcacctctatccttggtgctaattggcaaaagaaattctaaatcacttgctgaggttgaatattgtgcttgagtacaaaaggagacctattgtggaaacgtacttcatgcatacataggaaagttgtactatttaaagtaaaacactactggattataaaaagcatgtcatcaaatggttgtatgactgacaggtttaca

SEQ ID NO: 29229 - DNA, 1691 bp, Mus musculus
tgttaggaagaattcagtgttgtagttctcaaaaaaacgtgaatccttgtgtcttgactcagttttgtggttttctttagttacattgtaactgaagataaaagggaacacagctggttggtgggtgagggaaccaaaccatacttgacctggggtgcacagagcaccttggttaagaatgtagtatgtgatactctccttagtagcaaacttgacctctcattggtcagcaatgtctaattcattatgcaatcttgatagcactgcaagttgaataaattaagactaaatgacatagagtggtgggtttttttcctgggttttgtttctttttgtaatgtgatcaacattttctaggtttgggcttcatggaaagagttgttactaacttgggtttagatggggatcttacaaaaagttcaagttatgtggcttgtctgaatgtttatactccaaacttgggggaaactagtgtgaaagtgacttatatttgaaaacatgttgggaatcattccccaccataagacttcgtcgtattctgtagagtgagtacatttgttcagtgtagctctttgaacttccctagctttagggatgtgattgattatagtctaaactgttttagaatacctaagtcttcaaagcaccttccttgttgcttaggacttgaactttctatcaactgttgttccagacctcaattcaggttacccttggtgtttaactagcatgcatgagaaaacagctacacttgtaatgctttctgctctataactggaaagtttggttcattttgcatacgtgccgctgaaagcttcaggactgtgagaatttcctttctgtgcatcaagaaaaaatgacttgctctttgtcaggcaagtcagatggtggggtagttactccaagcaagcaacttgtgattgctgatagatgaaatcagtatggtgacttaactttttatacaatacagatcaaacagtgtgacatgagaatcactaacctgcctgaaaccctcctgggggaattgaagtgtcatagtctgtataaatcggtagcaggtgcctgttaccgtggctcagcgattttgaatgtaaacgaaagctcagacttgcttctgaacagaaacagattggagagattatatttgaacatagacttgggatggggtgattcccccccccccctccttggtctgctttaagattattaggcctttgtacatgagatctagaaactattgacttaaggtagagtactgctagttaatttgaatgaaagtgtaagttgtgaattttaatagtatattgggtttttaaaacattcaaaaaaaaaggctgggaaataaatgggttccagtaatactatatgctaaggtgcttgcattgtatttcataaatcttgttgcaaccaaaattatttttttaatgaaaactaagttcagaggtgtgatgccagaatgtattatctactatcgtactgttaggcccttggagcagttcccggtgcttcctgaaagatgaaatgggcactcagacaaggctgcctgcagcctcccagcaatgcatactctgactctccctaatgaagagatgcgtgtgattagttttggtctttaaccttattgggggtgcatgtctcctattgttaatcattgtcagctgcagtgacatgatccacagtcctgcatttcc

SEQ ID NO: 29230 - DNA, 1638 bp, Mus musculus
atcatctgagtaataaaaatatttctctgctgttatatacctagagctcctttaaacactgaatgctgaatttagatggcaaataattatgttagtgctgcttatagagaatcctatactataacttgttcattttactgtgttattgcaatggatatgttttgatatttttattatttgaaaactgcttaaacaagtattattttaccatttgtcctaagaactcagccagtgagtccagcagtggtgttggtaatagtgcggaccagccaggcctcctcccaccttgctcggtgctctgtgaggacacagctgctcccggtgagggagtagagaacaacagtgagaaatccatggaaggaaatgataggctgtgtctctcaaagtccacattaacagaacagaacattaagacagagcctccgggagagccctggagcccagctctccagcatctgcatcccagccctgcagacaatatcgcattctgctattcttgctacttgttcttccagaaaaaatttagctgtcggagagaagcttttgcaacccaaggaactgctgactgggagaaaatgctgggaaatttcagaaagcatgaagaaagtgacgtgcacttaaagtcactgcaattttggaggcaataccagtttctcgatgctattccgtgtgacaattcatctgtttattcaaaacagattgaaggaaataaaaagtacctaaggctcatcattgagaacattttatttcttggaaaacagtgcttgctgttaaaaggaaatgaccagtctgtttcacccatgaataaaggcagttttttggaattgctagaacttagagcaagagatagaggagaggtatttcagctcatgagttcccacgtggacttctatagcagcacgcttgtccaggaggagattattgaaatgataaaggatgaaatgttgcaagacatcgtgagtgagatcaacgcctcctcagccttttcaataatctgcgaggagatagctggtagtgccgctgagagacagctttccgtgtgtgtgaggtacccacaaaagacgccaagtgctgtcttggttaaggaaaggttcctggggtttgtgactgccgaggaggtgactggggtccacgtgcatgggcggatcaaagcttacctgcagcaggttggagttgattttaataaaatatgtggccaagcctatgatagtgccacaaattttacggtaaaattgaatgaagttgtagcagaattcaagaaggaagagccaagagctctctatgtgcattgtcacgcccattttttggagttagcggtgattagcttctgtaaggaggtgaaggagctccgcgaggcactacacactctctgctctttgttcaacacagttcatgtgtctgaagaaatgttggcaagtttgcaaaccatgtgtaagctaagtctaaataaaacttgtaagaaacacacgtcacagtcgtgttggccagcccacgaccatttgctgctggccgtgacggactgccttccggaggtcgttgaggtgctggcgtcagtgtcacgccggtgcgcaggcacagctgtggctgccgagctggaggacctgttggccatggttaccaagtttgaatttatatttt

SEQ ID NO: 29231 - DNA, 1178 bp, Mus musculus
tgctcttaaccactgggccaactctacagccctccagttttttttttccacagccctgtctctttaagaagtcaatcatatcggaagtgagaatgctgggacggctaggtctagggcatgatgggaatagagggcgggaatgaaggccgggaacgtccaattacctcaggtctagcgcataaataggagtgcgcacgcgcagttgtcaaggcgttgcgttgccattcctcaggcgattccagtaaagtaatttgtcatggtccccacctgagaccttgaatgcttttgtgcattctccgactggcgtctcattggaggcgggtgtcctaccgggctagagaaagccgctcaggcctgtgggcttgtgagggggcaacgtaccacgtgcccaaacggggcgtggccctccacgtgactaggcgccgcaggaagttctgggtaacctcacgtgacaggaccgtccccttctggcgggggcggagtggcagctcatcacgtgaccggcggcgggctgcgccgcggtggtgccgtagcatcctcaggctcgctgcagttggcggctcgcgcgctccgttggagactgagttcctcctctggcctttgggggacaggctggggaattctggttgcgaacgggaacgccggagagcttgcgacattcagaggagggatacgcgcctgtagagtgttacaactgtggcaagtggtggaaagttctcgacccggcttcgcaacagggttttaaaaaacctgttgtttctatggctggctggaattgatgacaggccttttgcgagggtttcctttatagcttggcttacatttgtactaccgtttgggaatctgaagagagcccagacaggggtttctagcagccattctcaaccctcacagggtcgcatatcaaatatttacattacaattcgcaattagcaaaattacagttatgacggagccacgaaataattttatagttgggggtcgccacattaaccgagtttatgaatgttgagaatcactggtttataggaagacgttagggggagttgcctccagaatgaccagttggcccacctctaaatgggaacctagcgttctagttgtgatgacgtctgaggctctgaagtggctttaggatgagaaatcggttcttattgttagtgcaggctgaggtagag

SEQ ID NO: 29232 - DNA, 1197 bp, Mus musculus
tttctagtaactttctgaaggccattgtgcaacttccatacagctgcagacccagagacactcagggagttgggtggtgtcagattcctctagcacgggtgggtttgaaggccagatcgcgtggacacacacccgatactccgcaccctccacaatgagtacagcctgtaaggaaaggcctcagtgggcgggtcttagcggaggtggccatcagtgggcggggctgaaagttgggcgtaaccgggtgggcgggccggaccgactgtagtcttccggtagggaggaagagtcgtccaggaaggcgggcgctgctatgtcgttcagggtaggcgtgttgcgggttctgcttggcgtcttcttcgcgctcaccggggctgccaagctctttcaggtctcggcccccgtgtcacaacagatggtgagcggcacccggggaaggacagtgtgtgctcggttcccgggggcttcatgccttcgggctcgaggccgcctgggcctttcctcctattttctacaccttctccaggtgggagggcacgggacttaactgctggctgagcatgttgtccccaggccgatttagagttggagaagtgatgggactcaggaggtccaggaagacaaagtgaaaaagtgacctagcacccctctccaccccacatccaccaacccattgttccaggttggggaggcagaattttactttatttggtttttgtttgtttgtttgagctggtcttctgaatgtgtccctctggctggctggcccggagctcactcagtgtagtggctggcctcgaacttgcagagatccacctaccccaacctccagactactgggattaacggcttacctaccttagaaatcttttttaagcttgaaactagtcatgatggtaaaatgtaatttaccaaaacattacacagctattcaagcaaggctcaaagtagaccaatctaactagactcctcagtgtcccacgcagcctgggacagaagcatagaagtcactgactgtagttccttatcccgagagggtctaccagcagtttccagaccctcagagaagccaggctctgtggaagacccctgttgccacctcccaagcctgggtactactacgattttcttctccttttcctcctcctcctctcctcccttcctccttttttcttcttcctttcctctttcttcttc

SEQ ID NO: 29233 - DNA, 1170 bp, Mus musculus
gctttgctgaccaacagcatatggacgtgggcccagctgccagggccccgtacctgctgggctccagggaggccttctccaccgagccccgcttctgtgctccgagagctggcctgggacacctttctccagaaggacccctgagcctgagtgagggtccatcatcagtaggccctgagggaggcccagggggggtgggggctgggggaggcagcagtaccttccccaggatgtaccccggccagggccccttcgacacctgtgaagactgtgtgggccacccacagggcaagggtgccacccgactgcctcccacactcctggaccagtttgaaaagcaattgccagtccaacaagatggcttccacacactcccataccagcgaggtccagcagggcctggtcctggacctggatctggcgctgcccccgaggctcgcagcgagagtcctagccgcatccggcacctggttcactcagtgcagaagctctttgccaagtcccactctctggaggcacccgggaagcgagactataacgggcccaaggccgacggaagaggtagctctgggggagacagctactctggtccaggctctggaggcacccccacctcccaccaccaccatcaccaccaccatcaccaccaccaccagtcccggcatggcaaacggagcaagagcaaggaccgcaagggggatgggcgacaccagaccaaggccacaggctggtggagctctgatgacaatttggacagtgacagtggctttctgggtgggagacctcctggagagcctggtggccccttctgcctggatgctccagatgggtcctacagggacttgagcttcaaggggcgttcgggcgggtcggaaggccgctgccttgcctgcactggcatgtccatgtccctggatggacagtcagtcaagcgaagtgcctggcataccatgatggtcagccagggccgggatggatacccaggggccgggccaggcaaggggctcctgggtccagagaccaaggccaaagccaggacttatcactatttgcaggtgaggcttggtgggatagggagacctgttttgagtcctccagtctggtcagctgggggaacgatggagatggttgggtggtgtctcagtgttggaggtcttggaggaaggaggc

SEQ ID NO: 29234 - DNA, 1148 bp, Mus musculus
tctgccaaatcccatgctggtttgacagttacacactccattttattctttatggttactcctgtaattttaatgtgcatccttgacttcatctgaaggagacaaggcttcctactcttgctctgaataatgcacagtccttagggtactttaattttgatgacctctttgttccctttttaagccatagaaacttatttgggggtgggggagggaggttctagctcagtgacagaatactttcctggcgtgagcaaggcccaggttttccccccagtgtccacacaaaacccactgtttccagaaactctaggtactggaaatgaagtattagcataccagctatggtgctgtcctctgctgagggacttgtgttctcatagtgtttgaaaaaaaaagacattttactgttgttattagtattacagttatttatttattactcatttatttatgcacttttgcctgtgttattgtgtgctttggcacacacgtggaagacaacttggaaaactcagatctgaggacatcagtcctggcggtggcaatcacctttacgttctttgtcatctcacagtgacaatgctcactgtctgtccttcagtgccagggccttgcacatctgtggtaatactgtactactgcgttatagccccagaattcttttgtctgtgtgtcctacagtgtacatgtagagatcagaagacaacttgtgggggggtcttgttctttctctcatgtgggtttcagagatcaaactcaagacaccaggcaccacgacaagctcctccactcgctgagccatcacctgcccttagaatccttttaacttttttatttaaagaaaatgatttttgttgttgccactgttgtgcttttgagacggggtttatccatgtagccctggctgtcctggaattcactctgtagaccaggctggacttagactcagagatccacctgcatctgcctcccaagtgctgaggctaagaatgtgtgtcaccaccttccggtctctttttcaagctagtcttgaaattactatcttcctgtctcaacctcttgagaggctggataacaaccctgtaccgtcaggcccaataaatcacatgaaatttaatggaggtctcttagggttttactgctgt

SEQ ID NO: 29235 - DNA, 1508 bp, Mus musculus
accagggggcgctcgagcccgttattctttggagaccggtacaggggttttgaccagctttgacctcgtgcgcctgcaagcctccagtcccagcgatgtggccaattctagacgctgtcccattgggagactcacgaaatccatcccatggggaacttgcacgggggggagggcgggggacggggcgcaagtagggatgctgcggtgctccccgcggctcggctcagctctgcgctctcccgacaggaggagaagaaggtccctccgccgataccaaagaagccctcgcgggggcggggcgtgccggtgaaggagcgctccctggactcggtggaccggcagcggcaggaagcgcgcaagcggctcctggcggccaagcgcgccgcctcgttccgccacagttcggctaccgagagcgcggacagcatcgagatctacatccccgaggcccagaccaggctgtgacccgcccgggccgcccagtccgacccgggcccgcggttttctacccgtactgtacacccagcgtcgaggtcactgtgaacgcgggcagctccgtgcgcccgccctgccggcaccgcacgccccggcttctgcccgccgcgctttcgtgggttttttaccttcctgatcccacgcaaaggcgcccgggctaggctgggggtcgtgcctctccgccctgcgcccctcacttggaactcccatcttcctggtccgacgctttgaccccctcacctttttccccccatgggcaccatctctgccattattttacccctccacgggccaggccgggccgggtcccccatctgggctctgcgtcccccccacaccccgcggggctgggcttcgtggggatcaagcttcgtggctttttatgaagaatcccgaaccccgcctaggagcccgccccaccttcccagggctccaccctcagccctctgcccacagggcccagggaccacagtggctggaccaatccaggaccagggcgcctgggcctctcccctttcccacatctggggaggggagacaggggctttccctcaccacacctgtggctgttcccacatccctttgagtatcccaggaaaaataaaaccgcagaactgcaccggagccaaatctctccagaagaggccacctgggggagccggggtgtctaataagatgggggtgtgggaaaggaagacaaagggccaggagcttgagcattcttggttcgggacctcaggggttgtctaagccctttgggagaagagttagctgagagaaaggggatcccggtcatcccaataaggacttgtgccttctgagaggggtcctgctggtgtgtaaaggagagggaagggacccattcgcccctcattcaaaccaggtccctttgcctcccagccttgtcccacgttcagtgctcggcccacggcacgtgtacaaatgagcatagatggggtgggagggtgggtggggccctggttattgttagaaatcaccgaatgcgcattcgc

SEQ ID NO: 29236 - DNA, 1666 bp, Mus musculus
cacccgggcaagaagcatggcggcctgtggtggacctacttgtttagcctcatcttcaagctcatcatcgaattggtcttcctgtacgttctccacacgctctggcatggcttcaccatgccgcgtctggtacagtgcgccagcatagtaccctgccccaacaccgtggattgctacatcgctcggcccacggagaagaaggtctttacctacttcatggtaggcgcttctgccgtctgcattattctcaccatctgtgagatctgctacctcatcttccacaggatcatgcgaggcataagcaagggcaagtccacaaagagcatcagctccccgaagtcctccagccgggcctccacctgtcgctgtcaccacaagctgctggagagtggcgatccggaagcagacccagccagtgaaaagctgcaggcttcagcgcccagcctgacccccatttgaaccaggtgctagagaaggggtgaagccgggaggtgctgcaggtgaaggggtcctgggggcgccaagtgctcccactttgaattcactaagctagccaattgtgtttgaagcaggtatttgtgggtgctgggctctgtgctggctacctggtttaggtagcataacagacccagcttccgagagacatttagattagcaaatttactacaagcatgcaagggtctactagcgctgggatggtacacagggcttctacctactgcaggggactgcccggctgggcaccctctcagaaaaagcacagtgaaagaaaggagatggggctctccatcagacatagcaacagcaaaaagaactgggggatctcagaggagaggtgctggctttggactggggacagccagccagagggaggctttactactcaaccatgagaaggtttggcacaaccttctggaggccaaagagcaagtgtggctagcaggtctactgctgcttgagacacacccacgggtccctctcaatccccctttgccaacctctaccttctccctcccaccagggtgctgagccctctgcaccctgtagccaggaccttggaggcatgcgtatcctgtcatatccccggcgtatatccttgacatatccaagtccgtttccttaaaagcaataaagttgtgttttatacaattcggttcttccctccattctccttaaactttcacaactccctgaagtcaaaggaggcagcactgggggaaggaaagagccctgaagcttgggggtgaagctagggtggatagtgagtatgacctaggctgaagcctgctttgggaaagggtggagttgctgatggctgctagcggcaagggaagaggaggcagtggaggaggcggggatagacacacgtgttggaattctgatttggccaccagagggcgctgcagccttcctaaatcagccttgatttgagcacacacacactccctcgctcagcccatgtccccaccctgcatccacacactctctgctactcatgctctcacttatgtacactcatagtagagtaagcatgtagccactctagagactgctcacatcccagcctcgcccagctcaactctgtcaatttcccccaaacttattcacaccagctggaagagagtcttggcctgcccacgtggaacctaaactcaaggtgctagct

SEQ ID NO: 29237 - DNA, 1195 bp, Mus musculus
agagggagagtttgccaagtgctggagaatgggactttggatagagaaggacaacatttataaatcaacagagggcaaatctgatagctgaaagaaagccagggtggttgagtcagctgaggggctagtgtttggattgaggctgaaatgaaccaggaaagatcgtgtaatgtattctttgcagatccctgttaatgatcttggacctcatcctaaaaacaagagcaagtccttggaaagatttatcacgagagttgacgcccgtggttgcagcgtggattgactgaggcagggctgcctgtttgcagtgtgagggaagggcctgagaaagcacaatggccctaaccgggcagggtgtgctcagtgggcatggagagaggaagctgggctttacaaatcgagactcacagaaagatctgctgatttggttgagtgtggggaccaagcacggggaagaatcaaagtgacactcaggtctctagctctgaatgtcagtgtgagtcagtgagtccagagttgccgtggatgtgcagatctgaggaagccaagatgacttccatttcaaacatgctaagtttgagatacaaataagatacctggtcactccccatcctttctggggccattgtgatccctagcccccttgccttgctctctaccagagcattcgttatgattcttgacatcttcgtagctaacatatcgggcttttcagttccttgacctccttactcccaagctttttccctacccacgaaaccttacctatccttacctcccacactttgtctgcacatctgtacaacagcatcatctcctgtcttaccagatcactcaatctggttctcacgagagcgattcctcttccccatcttgctcactgcttgtcacctctcttcacaacccccccccacacctcaccccattctctcctagcttagagtccccaggcccctatagtcactaactgctagatactccccagcccttgcttttgcatatgtccctccagtgctttgcctgctgagaccttctccaagaggcatctgttgctgggcctttgaagaatcacacaactggaccaactgatcttgatttaaacgtctgacaatgacgctcaagttgagtccctggcatttctaagccatcctatacttccctaaaacttttacccaactttccaagagaactagag

SEQ ID NO: 29238 - DNA, 1100 bp, Mus musculus
gggagcctcttgtaaaaagagcaccgtgtctccctactttaatctaagtccatctaattactagtgtctcaccttcaggtaagcggcacctaattgcctggacattaacagcaaagaacagaaagtaggttcccttggagggggaggtcggagggggaatagcccaaggctcgaggactccggatgactggttcctggcatcaacacccaccctcttttatgagcagggttgctcgaacttaactacctgtgcctccatgccagctctgcctttaatagtcaagtaacctttatatacacctctaaccctcagtttctctgagctataaaatgggggtataatactgcctagtcctgtgatgacacatctctgtgaagttctcaagctgagcaccccctaacgtgggaaatgacattctcgttcccctgcaggagcagccagcccttgagtccaccatgaactggagtgtttttgagggactcctgagcggagtcaacaagtactccacagcctttggtcgcatctggctgtctctggtcttcgtcttccgtgtgctggtgtacctggtgacagctgagcgcgtgtggggagacgaccagaaggattttgactgcaacaccaggcaaccgggctgtaccaatgtctgctacgatgagttcttccccgtgtctcacgtgcgcctctgggctctgcagctcatcctggtcacctgcccctctttgcttgtggtcatgcatgtggcctatcgaaaggctcgagagaagaagtaccaggaaaagattggtgaaggttacctttacccgaatcccggcaagaagcggggtggactctggtggacatacgtcttcagcctctcgttcaaggccaccatagacattatcttcctctacctcttccacgcattctatcccagatataccctcccttctatggtcaagtgccatgcggagccgtgtcccaacacagtggactgcttcattgccaagccctccgagaaaaacatcttcattgtcttcatggtggtcacggccgtcatctgcatcctgcttaaccttgtggagctgatctacctagtgattaagcggtgttctgagtgtgc

SEQ ID NO: 29239 - DNA, 1176 bp, Mus musculus
ctgttcttatggggtagttccagatagtcataggaggaagccatctgtcccctcctgcagccccaggagaaaacaagaatgtctcaagccaaaacaaaagccctagccccagagcagaaaacctcagagtgacaggggtaacctgcagaagtttccaacacccgcttcctgcctccgctgcaccctacagaaaagaagccacagtgccctttctccagcatggcttcctgcctgcttccttcccagttcccccgaaaccccaccatcctgtggggcagcagccaccacccacccctcatgtgactcagttctaaaaggtggcctctgtgagcaaccaaccagcctcagaatgccagagccaggcatcagaggagcagggcacgagtggggtggggtgggggtggggggtgtctgtggacaaagctcagctgcgaatgggccccggtttctgaggccccctgactcagcctcaggagacctatagcatcccatgttcccccaacctcatcgatggagggctggacttggactacctgtcctccttttttatttttttggtttttcgagacagggtttctctgtgtagctctgactgttctggaactcagtctgtagaccaagctggcctcgaactcagaaatctgcctgcctctgcctcccaaatgctgggattaaaggtgtgcgccaccactgcctggcgaccctgtcctccttgaaccccacagatctttccccaaggaaagaagatgggaagcagaatccacccccacccccacagactgtcccctctgaagatgtcactgtccccactgatgggcaggtatgctccggggaccccacttcacctctgtctacccagtctatcctcacactaatcctattggataagaaccccccttgttgcagatgaaggaacagaggctcagaaaggttaaaacaattgcaaggatagaataggctgatgtgatcactcggcaggcaaaacacccttgccccaaaacctgagggctcagtcccaggaacctacataggtgagaggagagaattaactctacagagtcatcctctttcttacacacacacacacacacacacacacacacacacacacacacatgccatggtacacatatatgaacacacagagtaataataataattattaataatttgttt

SEQ ID NO: 29240 - DNA, 1122 bp, Mus musculus
ctcactctctctcctcttctctagcccctaaatcccacaaatgtccgaaccctttccattcaacataaaaagtgcacaacgaatgctaaattaaaaaagcaaaacagattcaagtaaccttcaagtcaaaaaaagggggaaaaacaaacccttaactgtcaccctgagctgccatgtgcagaactcaccctccactcctctccgctccccccaccccctgttaagctgcagtggccattgcagggagctaggcatttgcagtcgctctttcctgcacagacgttgcttcccctaactctgatctgtgattccctttgcatacgctctcagatgccaagcacgtgaggcatgatggtaaggggagggtcaaagtcagacagatcataaaacaagcaggggacagtcacagaaagaagggctgagtttcttgaaattcactcggcagctgccttcagtgaaatgcttctctctcccatacttatcagttcacttggattccaggaccaatcttgtcacttcgggcagctttaatggctttcttttctgccagctcaacactgtgacttctacacccctggttcaccaacaggcacccccccccccgccggccccctccccagggccttccacaccctcacagaactgacacatttccatggtccagaaaacttatcccgtgggaggccccctcgctcctgagtcagcattccgaggacggaatgggattatttttgagggacgggcttaaaaatctgctccaaagcttcaaggataaagaggggtagagaaatgccctcagcacaggaaatggcctaaggctggagtccatttgccccgttccagatttgacttacccaacatgacaggattatcctgtgacatagagcttaaggaatcattacttagagctacacgcatgacaattggggtgatcactaaaagtggtttcccttgactccaaggtttgtcagggcttccttacttttggattttacaatcatgggatgctcgtggcagcaccagggactgtgctgagatctctgtccctcatctgggagacctagggagtcggtgtgattagccccacttacaacgtggaaaccaccacacgtggatgtgaag

SEQ ID NO: 29241 - DNA, 1448 bp, Mus musculus
ttggcgggaaggggctctccctaggggtgcagctgggaggaggtccgagtacctcttcagtggctctcaggggccatttctgtggaaggggtagaggtaggtggcacagaagatggggctttgcgcttgtaaatactgatagcactggcttcctccaaagtcccaacgttctagcacccccctcttctcctttctctgtcccccattttccagggggtttatggtcagggctccccaacctgagttgggctacttccaagggcagccagcaggcctggacagaggtcttgaaagcccttgtcttctcttcccccccaccccactaggcctggttaaccttccgtttccagcttctcccacttcagcctgttcccacggcaccggggtttctactcctgtaccctctgcaggtggagagagagaagctgggcccagtttggccatgcctgctggcacagacgccttaactgtgtggatgactgtgtgactgggagcctggaccggctgacaggccatgagctacccactggcatctccaggttttttgtagcaaacagccacttagtgctttgtcctggactccgctcagcctgaggctggggaatagaaagggcagaccccaagagttggagattagaggtcccctccagatagcaagaggtttctagggaagtcacctcacagcaggcttgcagtatgtccagctggttggcaaacacgaggaagctgcagggctggaccatgtggccaagcctgcgcctcctgtggcttacctgcctgcccacccttcgcacatacacccgtggcagggagtgtggaactgaagactggctggaggcactgcagaagcagcccttggctttctactcccacacttgcttgtgaaacgtgtaccagctacctaaggagggccaaggcaggaagggccagggcctcctctgtccttaccaactctgggaagtcagctctgccggcccgagaggggcgggcactttttcagcttgctataaccccttccccatacctccaggcagggttggaaatgaaggacttttttaaccttttcttttgtttttaaaaaataaatctgtaaaatttgcctcttctgtggctttctcccagtgatgacgtacctaaggtgaggaaaaggatgagccctgggctggggaaggatgctgtgttagctgaccagcgtttttattacacctgcctagggctggatcattgagttgtccataccccagatcaacatccctcaaaggaaaaacccagctctgagcctcctcacctgccattcccaccaaggccacctggagaggccgcatctcagactcctgcctccaggaggtgtgtctggacagagctactccatctcagactcctgcctccaggaggtgtgtctggacagagctactccatctcagactcctgcctccaggaggtgtgtc

SEQ ID NO: 29242 - DNA, 1149 bp, Mus musculus
caccctggacttgacatctggctcccttaggatcctgaggcacaaacaatagccgccttagttgacttcatcagacaagaatttgcagtcagctccctggtgacttgcaagatcactgaaagggatggaagaggacagcctttgccagagtttccaggaacagctcccaccatctagagggtttgtgtcttgtgaccagaatggtgcttccatttgcagctgccccacaagctgctggctgccaccatccacgccagaaagttattgtccgtgtctgtcccaccacaccacaccccccaactcgggtcccagttctacatctttcagagggattctttttgtggaaacttgagtccagaacctagactttgactgcaaagcactctgagaaatgtagtttttcctcttccagcctcagccacaaagttatcatggaggtggaatagatccatccacaatttccttgccaatgaatccaactgtgaagaactcaggagaatccatgaatccacctgaaggccttggctttgaaacagaactgctaaaaatgtcctgctccgtgactctgtccctgcctgtccctgcctgtccctgcctgtccctgcccagaggcaacaacttagggaatcagtagcatcagaaatagagacaaaatgacttcccagcctgggccttcctttgttgccccaggtcctcaattctgtacttgggattcagtgagcatgtccatctccggtgagccagaatatgaacttgaggggttctcactcacaactgccatgtgctagccccccctgagcaagaagaatcctgagtcctgctcttcctctcaactcccagacaccaggccacgcctggcagtatttttatttaaaacatggccccttttgtgcattctgatcagtttgtattaaattaaagttacagggcacaggtgtacgttccattcattccgacgaacgcaaagcgatgttccaccctcaggaaggggacagtcattggcacggccagtccagttccccaaggcagccctgctggatacagatcaggagcacagtgaagtccagagagaggatgtgacggctgagaagcccacagcccacactggacagtgagatctgagttctcggccagcaccctcatcaatca

SEQ ID NO: 29243 - DNA, 1160 bp, Mus musculus
atcttgtaattacaaaacaaaacaaaacaaaacaaaaccactcctatgtggctggggttttttccctttgtaagcttaacatgtggccgtgtttttcagactaatctgctcagagttttgctgttgctgccaaaggccgtcttcctaatttgatttcggcttttaattccctcctggtggctttccgttggctctgtttatgtgtagtctgtagtcctgagctacggtggggtggtggctgactgggtggggcttgcagcgtggcactgagcaagaaagagcctgctcattcattgagtttcatccattctgcttttgctgggttaagagccttctcgcttatgtctgtctcattcattcactcagcaaaatgctctcccagctgggaatttagctgtaagtaagcgatacaaagcccccttttcatggtgctttctagaaaactcaacaatgagcatgtgtgctgttgtaggtgggaagtagtgaagttgggtgaggaagtttgttttgaagcagcgtcggtccctgccgactgtaggctagtctagaactcgctgtttcccacagcctggcttggcgctctcagttctgtctcctcctctctaaatgctgggattccaggaggagtcacatcaccacacgcggctggactgcacttttagatagccatccgaggaagtctcctctgagattttgaattcacatttgactgaggtaggagactgagccaggtggaggatgagtggaagaactttccaggcagaggtcagggccagtgcggagcgccgaggaggaaataagcctgctgggcatgccttgtgatgtcagcaccgtcatgttctcggtgactacgaatggctgttctgaggagatcagcatcgtgatgggctgatgtaaacagagtccttgaaagaattcttggaggagaaaggacagctaggctggccaagcctacggggctagagtgaatccacgtatgggaggcgagcaggcaggttaaccttgacttgaaggttaactgttgttcactcattgtggttccggagtctcctcttggtcttttttgctggccttgttctgcatatgtctaccatgaagcccagtgaggcagaaggttttgctttgcctgtggccttccatggcgctgcaagttccttaca

SEQ ID NO: 29244 - DNA, 1779 bp, Mus musculus
acaggcatttgccacctgtccatatacatatgtgtgtgtatatatgtgtatatacacatatatacacacacatattacacacacacatgtgtgcacatataccaaatggcatgtgacatttgggcttcaggtaagagctggaaaacctgctcgctggtggtggtcaggattgtgtttttgctttaactgcagagttgtagcctcagcaggcctgagagctttcagaaagctggcagagaatgtccaggatttgatgcgtctggttgcatgccagtcttccctgatgtttgtttgtttgtttgttttttaaaaaacccattttgttctttgttgtttcctctctatttcagcctagtaacagaaggccaggcgagaccgcacccctgctcatctccccgccgtgggatccctgctcttaggtgctgggcagagggaagagggtggtcatgggaaggaaggatggatggatggtgagggaggtggggaggggctcctcgagagaagattggaacagtggcagtgttataattagtaaggttttttttttttacacatagatgagaatttttaaagtataagcaagggaaaagattaatttaaaaaaaaaaaaaaactgtgattggagtgcattggtgcagataaggagacatggtattatttttaagcagtcagcctctgcttttctctggaccacaaagctaatgctctctaagagacctcagcttctacataagaacctcatggatccccaggcccagagcacagcagtcaggctgggcctgtgcatcccgtgcagaggagggggctgctgactgccgggggctccccactccataaagcgagaagactgacctgcgcggatggaagagacggggtgtgaggttatgggtgccgctcagcagaccatctctcctggaattgtggggagcaaggggaaacagatcccacacttaagacttcagagttgcttgctctagtgacaaagccttcagccactcagcactccctagtcttaaaaccttgccttcattcatccacgggacccttttagataactgaacaaggcctaggagtgtagctcagtggcgtgtgtgtgcctggctctgtaaagccccggcttcagtcctctacagggaagggttgggggaaaagctaaaatgtcttaagctaagtcatccaaggattgtccccctcacctcctgggactgggattgcccgacaacactgtgatgtatttctcaatgaggtgcctttcataactgaccaaatgctgccatgtttggcccctgagtcaataaaatatgttgaaaatttgtatccctgttgtggagttttttgaggaattctggattgactacaaaaccaaaaaaaaaaaaagatgttgaactctggccccgactttaaagctggttctcatggttagctcgctgtcctgggaagtacacgtgtgcacgcctaagcacccttgcagctgtcggcctctgtggtggatgacaaaccccagtggttagtcagtcacatacttcgttcccgtctcatctgaaaaagagccttggtgttgctgtcttatggccttaaagtctgtaaaaaaaaaaaaaaaaaacaaaaaaacccagcccctggctcagtgcctaccacagcaggcatcagataaacgtcgggtcagaacatacagacagctatctgcttcctgctgggctggataattaggaacggacagcagtctgcagcctggcaagcctgtgtgtgcttctatgagtaagtcacatcgctggccac

SEQ ID NO: 29245 - DNA, 1184 bp, Mus musculus
acctttctgctggagtctccctgcccaaatgtgacttgagtgctatgtaagatgctagttattggaattggcagcctaatatgagacgaggtccattttacacaagttcttgcatctgggtgtgcagctcaggtgttagaatacccacttaggatggatctccagcaccacccagtcagccatggggctgtgcctgcaatccccatgcttgggagctaaatgcagagggatcctaaattcaggagcatcctcagcagtttcaagccatcctgagataaatgagaccctgtccccaaaacaaacaaacaaacaaacacagcaagagttgttaatatagtcagccttccagtaaagtattacacactttgggatcgtcaggcaaaatctcctgactgccttgttctcatttcttacatacactcttaggaataataaagtcagactgaatttaacaaggggtgttttatctttccttccctacctagcagatgacatcaagccatgcccacgatgcagtgcttacattatcaagatgaatgatgggagctgtaaccacatgacctgtgcagtgtgtggctgtgaattctgctggctttgcatgaaagagatctctgacttgcattacctcaggtaggtgggacacatatccattgccttgtccttctctgcccttgctcagttaggaaaagggctaccaaagagccatggttgatgtcatttacaggaggaggaaattgtaagacgctcctttaaagcacgcctggtgctttctccagcagtctcggtgactgacttccattaccttcctttctcacctgctgcgtggcttttaaggctttccatggctggttttagtcgacctttctaatcactgctgttccagacagtctgagctggcttgtttacagtgtctcttgcctccagatttgttcacgttacctcattgttctcagtgacctctgaccacttcagcctcctttcgtacccctttatctccccttatttcagttcttggtaggcttgtttgggtttacttactctctcttttttttttttaagatttatttatttattttatgtatatgagtacactatcactgtctttagacacaccagaagagggcatcagatcccgttacagatggttgtgagccaccatgtggttgctgggaattgaactcagg

SEQ ID NO: 29246 - DNA, 1182 bp, Mus musculus
gataagggcagatgtcagcaatactaagggcttcctcctgggagggaatgaggttccactcattgtctcgtgacttccatccctgctgaacggggctgcaaggccaaggctccttaagggaggtccttacctccaatccagttagagcaataaccactttttaaatgtaaaataaagacaaatgaaaaggcacatccttgtcttttggtaaatgcccaaacgttgccctctttttctggcaattggcagcaagtcaggatgtgtggaggagggaatcagtcctcttccattttggcctgcagcttcttagggacatgccagccagccaagctggagttggaagggaattctcgaacagatgggggtgcacgtgtaggagaagaaaatagctgctccaccatcgtctttctgaggctcctctctaagcccagcttgggctgcctcaccacataggtatgcaagcatctgctcagtttcttaaaacaaagggttttcctctcaggagagggctgggcgcttattcctgccagagggctgaggttctcatctggggtgggggtatggagtgaagaactgcagaagcagctttctgcagaaatcattcggtattcgctctgcgttcttctgggctgttaaaggaacatcattaagattccaacagcaggttgaaaggcaggcagaggaatgacaccattagccaatgagcagaccagtaaatagggcaccttaaacactcccgtccagagccaggcgagaggatgtcagatgtgcagggtctgaaagcagagggagaggaagtcctcagaagtccctgaacagacagaatgccaaaccagaccccagagaggctccctctgcccgtctgctttcaactaagacgcggagaggccctgggtagaggtaggtagtggtgtctggagatcctgctatttgagcaaggtttccagtttctccatgcccgtggtacaccgtaatggatccgaagggaataactatccttctagcttagaggtttgtcctttctcctgtagtaaggatctcactcttcctgaatcaactgttacttgccatcaaatactacagctattatttaagaagtggtccctctgttcctttcaggtgactccaatgatttttgcaatttgggaaaggtccaggcagctctgagaccaagaccacagc

SEQ ID NO: 29247 - DNA, 2754 bp, Mus musculus
ttaaatgaaggtaattctcttttgaaggcctgcattaagtcagaacagtcaggctttgagtaaaataccagctgtaagggcaggcagactcaccttccagtctactgtaaggaagaggctgttttgcaagctaagagccggtattattattgttgacttgtgaatagatagaagtcacttttaacgacccctctttttaaatttgagtttcttgaatacttgtcagtattttaatgttgccaattcagtacatttgaaataggagaaggagaaaagtcctgttgaagggctagattaaaagtgtaaatcctctcctttctgtacctattagctgcctttttaaaaaattattagtggcttttttcactctctattagatatatttcgttcataatgtttgaaatcttacacatcttaactgacagaagacagctgaataacccttgttcaatactctgtggtcttgtgactggttggtttctctgccccattgttttcttttccttttcccactcccagtgaccggttagtcctgaagctttgcagtaagtgttcttatgtcctgttagactgagacatggctctcaggtgccctctgtctgctgaagaaatcctgtcagaatcctgactgtcgttaggccggcacagaatcctgactgttgttaggccagcacaattgggatgtctaggaatcttcagttctgtcttcggaacccgagtttatgtgttgctgctgttcaaggaaccttcgtcctatgaaatccttgggagagtcactggcctctcccgttggttacaggtacccttataccctggatgttagcgttgtagttgtagcattgggtccattgtttcacattagtgtttgagcatcttgggaaagtacgattgagcccgtgcaccgcaccaccaccatgcaccgcgtaaggtgtggtgttccaaccaaagcgctaggctctgtgtactgtcttaatggatgtcctaaaagatctgtatttcttacaggcagctctagagatcattctgagagggtttacaatatgacactcctgctgctgcagtcactgtgggagtgattcatagttgcctagcctctgtctcattttatatgtggctaacccaccctgaatagtctactctgcctcagaaaaatgatctttttgttctgttttgtttttgcttttcaagacagggtttctttgtatactcctggctgtcctggaactcgctcttagactgggctggccttaactcacagagctctgcctaccttgccttctcactgctgggagtaaaaggatgaatcaccattgttggactgaaaaagtgactgtgattaggaaaatcttgattttgtttgttttgttttgttttgttttcaagcctttaataggtttggataaatgttcccaagtgtgtgttagttttatctagtgaaagttttttcttctttccttccttttttgcggcagggtctcctataaagcctaggctagccatcaacacactatttaacccaagatggtcttgcacttctgatttttctctccctccagcccctcacccctcagacaggttttttttttatgtagccctcctgtctgggtagaccaggctggcctcaggactcacagagattcacctgcctctgccttcttagtgctgggattaaaggtgtgcaccaccactccctgcttttgacatccccccccccgccccacccgccacccccagaaagacttttctatttcttagttatttggtttagattctgggaccagactttgaaaggcagtagtccagtcacctctcttgatgggcacgcttgttgttgacctcagttgacttgtccaagatgctgtgagttagcctgttagactgagatatgccaaacaacccacctatgggaccaaaacaaagtgcagattagctaccgctggagtagctagcattggggctgaatggttcccacggggagcccagggagtggagggacagcaaagctcctgctctcctgctaccaggaggaattaagactgaatgtataatgggagtgctgcctctgtcagagcagatgagtgacaggttaactagaaaatgtgacaatcacatttcctctagcgcagataattctgtttttccaaagtgttagcagctaattaaatctggtggactgggggaggagagagctgttctgtactggttaacatggtattctttaaggagaaaaaagccaaagaaaactcatccggcatgttagccttaaagatggtactggccagaagccggggcttaatctcttcagagctgcatatctcttatgtttgggtttggcctctaagtcttgtagattaaattaattcttgctgtatttttaaatttgagtaagggttatgtgcatttaactgtgttcctgtcttttatcatccctggggacgttcttaccataggggtcttgacaaagcaaagctaaaatgtgttgttgataaatagttcctgtgtaggtcaggagccgaaataacaatagctctgcagctcatcgggctctgatttactcgagttgttgtcggggtcgattatgaaactgaagtttggtgcctccttttttatcatgtttttccccttgtagcagttgtgtttaatgtcattaaaaagaaataaaagttctcgtcagtggcatatgtactgtggccgtctgttccgggctttggaggagcactctctgccttcctctgcgtaggtcgctctgcttgg

SEQ ID NO: 29248 - DNA, 1698 bp, Mus musculus
catttctcttagaggtggacatttaggttgcctctaatatttaactgtttcgaataatactgatttaaacatccctgtgtttctgtgtgcatttgaggtaggtaattcagtctgataaacttgcagaagtgaggattagtaaatcagatgatgttgccaagttactctccacaaaatcacttgaacttatgctttactgggagtaagtgcttgtctctacagcctcaccaacccaaatcagaaatatcttatttaaacatttattttcataatgctagtaagattaaatatcttaattatttctcaagttacaagtgactgtgcaagcaacagcatttgagatcctaggatgcctcctgtatacacatagtagattggagttggtttaagatatttcttgttcttcagcacaaacttcctcatatttttccagatatgacgtgttcactcttgccctctgaacagtcttctggtgcctcttttctgcctaaaagcaatgcctcatttccttggggttccttggatgaagatgagttggatgactccttgttggagttttctgatggagaagaagatgatggccatttcagtttcacagaggaagagattgagatgctcttgaaggacgatgatggtgggcataatgagtatagaccaagaaagagtcaaattctacctgatattcctcaagaaaattctttgtacagcttgggaccagcagctgaaacccctggcttcctaaaactacctcaactaagtacatcagttggtcatggacctactcctagtaaatcattaaacagacactttgtacttgaaaagaatcttataaaagtaactgttgtcgcaccatttaatccaacagtttgtgatcctgtgcttgataaagacaagatcgattcctccaaagaaacggaaaatcctgcctcccttcgggaacagacgagagaagatgaccctcaacctaatgagagtaaacgttgcactgagcctgaaggggtcagtcccaatacctctgcttgggatgggcccctgctttcttctccttcaaacaataacatcgaacaaactgcctctgataaaaatatacctgaaagtaagaaacctacccctgtgttctctcagatctccaaccattcagaggtccccaacaggaaaaacagtggctcacataaatcaggttgtgaagtgagaattccagttgtgtccagttcatcaaacagagtaagtacattttttcaagacatagtagaaaggaagttattttcattcagaaagaattcctatgtacttaacttccatatataaaatgcataaaactggttggagagatggctcagtggttaagagcactgactgctcttccagaggtcctgaattcaattcccagcaaccccatggcggcttacaaccatctgtaatgggatccagtgtgtctaaacacagctacagtgtactcatatacataaaataaataaataaatctcttttaaaaagtaaacatataaaaaccccctgtggccatcatatattccacaatgataattttgtttgcggttagcagaatttgtgttcaaatgaattagggtttgaatcctgattgacaccattactttcgtttttcaacctttgatgcttcttcaaacttctttttcttttatcttttgatttgtggtttgtttttttttttctttcttt

SEQ ID NO: 29249 - DNA, 1171 bp, Mus musculus
ctggggctgggaacctcattccacccatcctattccatgccgggagcactgctaggctctagggagtcagggccatgtctttccaggactctggcggagagaaccggaaatttaaaaggacctataacccaaataaaacacgtactgaaagttcctatgactgaagttctgaaaagaaataaggggcgagctggccgaagagatggctctgaaatggaaagaaagtactgctcttacagaagacccgttttcagttcccagcacccatgtcaggttattcggtacggcctgtatcaggggatctgacgtcctcttctggcgtgtgtgtgtgtgtgtgtgtgtgtgtgtgtgttgtgtacacgcgggcgctgagaactgcatttcagacagggaagacccaaggggaagcaagaatattgtagaacagggagaaggctaggctcagctccgtggtaaagcatgagtaaggccctggactcagccttcagtgccctcacacaccctttgtccaaggacactgatttaaatggaataaagcaagcacagtactgctcggccaccacaactccctgccaacagaaccgtttccatccctgcctgcccgtgcctctgatgttcctccacagaacctattgctgtcctttgacatgttctctaaggagagacaggtaggagccaagtcatgaggggcttgtaaactttgttttacaagccagataaagactggactagaattacgctaagggcggttgcaccaccaagctatttttttttttaaatttacctatcctgggtgtggtggtacatgctacctgtaatcttaatacctgagagtcagagacaggggggtggctgcaatttggaggccagccttgtttacataatgagttcctggctaggtagagctctatacagagaccctgtcactaagaacattcattcacctcttcgaagggtacattttagtcagttcttgtatacccacaaggttaaagttctagaatatttttattcccaactcccccgacccctagaaaaatgtgaaccaacctgagcacacgctgtaatcccagcatgtaggaagtggaagcaagaagatccagaatttaaggacactttcggtgacatagctgaagttaaggtcatcatgggcttcataagaccctcagtg

SEQ ID NO: 29250 - DNA, 1146 bp, Mus musculus
catcccggctggatatccgtgtgggcaaaatcctcagcgtggagaaggtagtcactcctcaccacatcccagagaggcagagaagggttaggtttgtatgtttccatctgtaggaaacctagctggagatgggaagtagtgtccctggggtctaattgcaggtggcctctgaacctagtacacagccaggaacagagggaacttggccatcatgatgcccagctaggatggaccagcttgcctggaccagctttaggtcttaccttaggttggcctcttacagtggggttgtggatctgtggggaggagggggcttcccttttgcagacaggtcatgtctcccagtcattcaccagcatttaatccactccactgtgggcatcccccgtttatctatttgtacattgggggttgggaggactattctggggatctaactcagtggtcaggcttggtagcaagcacctgtacccacggagccctctctggccctctgacaagaatctcttgctggcagcacccagatgcagatagcctttatgtggagaagattgatgtgggggaagctgaacccaggactgtggtgagcggcctcgtacagtttgtgcccaaagaagaactgcaggacaggctggtggtggtgctgtgcaatctgaaaccccagaagatgagaggcgtggactcgcagggcatgctactgtgtgcttctgtgtgagtgaggatttggtgggccaggcccaggggagggcgagagaccgaggattggtctgtaggatgtcttcctgtatgccgcgtgcaagccctgagaaaacagctcccttcctgatgatgctaaaagatgaggcataaaggggctgctatacaagttctgtgagtaagacatctgtgtccagatagactgttaaagtaaaattacatgggtagtcaggtgagggggcacatgcctttagtcccagcacttgggaggcacaggcagaggcaggtctggtctacatagtgagttccagagttacataggaagaaaaaaaaaaaaaaagaagccgggcggtggtgggcacacctttagtcccagcacttgggaggcagaggcaggtggatttctgagtttgaggccagcctggtctacagtgagttccaggacagcca

SEQ ID NO: 29251 - DNA, 1796 bp, Mus musculus
ttaaacagcggcagggatcatgctcatggtgcgatgtattcaccgttagcctgctgcaggcagcctgggggacgctcagcagcaggaccctcagcataggtatgaagcaaggctgtaggtttgatctgtagcatttcagtgcacaccctggtactgcgctgggtatcagtgatccagaggtctttgtcctccttactcatggatataaatgtgcttatcagaaggtaagaacacagaagcctttgggaactgtgctgagaagccgggcccagctgtgatggtgcacacctttaacccagcatgggcgggcagagctctgagtttcgagaccagtgtggtctacatagcgagttccaggacaaatggaaaagttgggccagcttattctaataatgtaagaatgttgtatcccgccatcatgcctttattttaattatttttttgtctgtcttattcaggccgactttaaaatttctgaggagtgcatcgcacagtggaagcaaaccaacttcatgaccaagctgggattcgtctcctgtaaatcactaaaagggggtaacatcagctagccagctctgtgccctcccaccatcccgtctgccggctcgacttgttgcatctctcacccgctcccaccaggtctgaactgctgacaaggtgcaggacttggaaagggacagctcaccttcctactgtgtgggatcacccagcctggctgaaaggaaacggagtgcctgggctaaggagatgctgcccagcggcagactggccctaccttcttcccttggcagctgacttgagaaatctggtttcaatagaacccacagaaaaagtttattccatggtccctgtaattggaaaaacactggttcccaagtttccatggggttttccctgcagctgtactagctgagatcgagtgcctggtctgagctaattacagcttctccccgtcaggaaattgtgggatttgaaaagaagggaaagagagcctagaggtctcccaagctctccagggctggcagcattctccaggcttccaaacctgaggcttggcaccagaggcaggacttgccctggctctcttggggttcccttgatctggctagattggacactccctaaacaagccagctgtgttagcagcaggatggagatggactgaaactgtggagctttcttcagaatgtgagatactccataaagcatctcaagcaaatccctaaccgccactgtcaagttcaaataaagtgtctgaaaaggctttctgcacggagtctcgtgagctgcatcatctcaggagacagtgtgagtgcagggcagctgctacgcttacctaacctgggatcactgactttagccacacattgggatgagacaggcagggacaagtaacggacatcccgagtgtccccttggcttgtgtcagtaggcaggacaccatctcacgtgggccagagcactggcctgcctaccacagccaggtccttctgtggttcattagcattaggttcacgctagcatgaggtgtgcattcctcaaaccttgttaccacgtattaccagtatcacctgctgccgatgtctggaaaacagcagtcacagccaagtttcaatcatttaattaataccttttaatgaaacacagctttgtcatgtgtctcactcaagcttcagaggaggaggcatagggaaaggattgtttatagagacatatcaaagactcaaagtaaggaaatatagatatatatttctctcttctaatatttttatgcaaattaaaaatcagaggctttt

SEQ ID NO: 29252 - DNA, 1645 bp, Mus musculus
gccagtccagtccactcctttccttagttctcggagatgggcaagtctctcatgcccacaggctccccaggctgctggcaggagtggggctgtggaattccaaagcacaaaaggtgcagtcgaggctagccttcctgtgcctcaactcaccaccaaccactctcctgccttccagttctgtcaggtgctccttctaggggactcatggtgaggagagagaagccagaggaggcctgtgggcactacactaagaaaccaaaaaccagactagggagccatctgggatgttggcatgttgggtacctgtcctgtgacacttgattgtgcttgggtggatgggcacagcctcagagccaggagctcatgggatgtgtccatttcggcttggcaggaaatcctgccaaggtgtggggagggtctggcagggacttcctgggcagtgggcccaggcctattcctcagaatctttctctgacctgtctccactctccggtgcatgtcctttctgcagctgcctttctgccaggtggagggagctgagggtttgtggccaggatggggagccaaaggcttatgttactaccccaggctcttctctagaagaggggataagctgtgatctttccagcaggccggtggctatccccagagagcagcctctgctttctcttcctagaatctcatgacttgtaccacctcgaggtgagccggagttcctgtaggctccatggctgtgcctccttcagggccaccctttgagtcttttcaacgggggctccagcctggcaagagagcctgccagtagcttctccactaccaagacgggagcagcacgctaccccattactgaccttgctgtcaagagctggggagatggggtggagtccaggccccctaagccctcctgttcgggctgcttgtgttctctgtctttccctggtccgtgtgtgatggggagctgctgctgggagggaggacaatcaaagtaagcactgttctgccccacgatgcaggatgcagggtcgccagggtcgctggagctcttgccctggcttgggttcttctctgtgtttccccaccgggtgggccacagtacaaagaaggaaggagagtctacaagagacatctctgtcctctggggtaaatgagcttgaccttgtgcaaatggagagaccaaaagcctctgatttttaatttgcataaaaatattagaagagagaaatatatatctatatttccttactttgagtctttgatatgtctctataaacaatcctttccctatgcctcctcctctgaagcttgagtgagacacatgacaaagctgtgtttcattaaaaggtattaattaaatgattgaaacttggctgtgactgctgttttccagacatcggcagcaggtgatactggtaatacgtggtaacaaggtttgaggaatgcacacctcatgctagcgtgaacctaatgctaatgaaccacagaaggacctggctgtggtaggcaggccagtgctctggcccacgtgagatggtgtcctgcctactgacacaagccaaggggacactcgggatgtccgttacttgtccctgcctgtctcatcccaatgtgtggctaaagtcagtgatcccaggttaggtaagcgtag

SEQ ID NO: 29253 - DNA, 1178 bp, Mus musculus
aggaacaggacctgtcgatggctgacttcccccctcctgaggaggtcttcttcaatgcaggccctgagcttggccctctggagtcctgcagctctgaggctgccgtccccccagctgctagcttgtcccagactcctccgccagctccacctcctagttctggatcagaacctctggccaggctcccacagaaggactcagtgggcaagcacagcggggctcccagggaggattcgggcacgcctctggtcacaccctcgctcctgcagatggtccggcttcgctctgtgggtgcttccacagggattccgaacccttctccgggttcatcggcccctcagaagcctctgcgaagagccctgtctgggcgcgccagcccagtgactgctccctcctctgggctccatgctgccgtccgactcaaggcctctagcctggctgccagtgagagtcctgcgagtgctctgcccactggaatacccgaggcagagccacggtcgccacagtctcctgcctccaaggccagcttcatcttctccaagggcaccaaaaaactgcagctggagaggcccgtgtcccccgaggcccaggctgacctccagcggaatctggtggctgaacttcggagcatttcagagcatcggccacctccccaggcccagaagaagccttccaaggctcccccaccagtggcccgcaaaccctcagtgggagtccctcctccgtcccccagtcttcccaggacggagtctcttactgctccatccaccaatgggctccctcacgctgaggacaggactaacggggagctggcggagaatggaggtgtgcagctggctgctacagagaagatgggctcccctggttcaggtactgtaggcactggtgcaaaatccgttctcagagggcccaccataggtgggcatgctcttggatctacaaaaactgatagcagtctgagcctggagggatagtcgggtcatgtgctctggcagccgcccggaataaatttcagttttgtcacattatctcctatctcacttaggtttaaaatggggcggagacacccacgataccggctgtctataagtgtctagcctagtgtcagtgaagggacgggatataggaaggttgggtgaggagcgttttgggggttttgtcagaccccagctggaagg

SEQ ID NO: 29254 - DNA, 1155 bp, Mus musculus
ccatgactcatttcccaaatctgggaagtcaggaaggcgacggagggagcgaaggagcacggtgctggggctgcctcagcacgtgcagaaggagctcggtgagccttggtcggtgagcagtggtggtggatgcccgggagcctggccaagcccctccgctgaccccatgtctgtttcaggcctgcggaacaaccgtgaggcaccgggcactccacagcctcctggttcacgggacgctgtccgcatccccacggtggatggtcgccccggtctggccttagggacaggggtccgagtgtccctgcaggctctggaagcagaaacagaggccggcacagatgcagaggctgtcatccagcgccacatcgaccgtgtttaccacgatgacacgcttgttggccgatccacgggagcccggccaccgccactgacgaggccaatgtctctcgcagtgcctggactgacaggaggagcaggatctccagagccactgagcccagccatgtcaatctcaccccaggccacctacttgtcgaagctgatcccgcacgccgtgctgccgcccaccgtggatgtggtggccctgggccgcagcagcctgcgcactctgagccgttgcagcctgctctctgccagcccagcttcggttcgctccctgggccgcttctcctcggcttccagtccacggccccgcagccgcaacgcttcctcgtccagtgacaactggagccactctcagtcctccgagaccattgtgtctgatggttccactctttcctctaaggggggctctgagggccagccagaaggctctgtagctagcaataatgtggcgccccctcctccaggcggtagtgggcggggctcccccagcgggggtagcactgcggagacctcagacacggccagcatccgaagcagtgggcagctgtctggcaggagtgtgtccctgcgtaagatgaaacggcctcccccgcctccccgccggacctactccctccatcagcgcggctccgcagtgcctgatgggcccttagggttgccgcccaaacctgagcgaaagcagcagccacagctgcctcggccgcccactgcgggtggctcttcaggggtgggggcagtatcttgtccacccagctcagcaggcacctgggg

SEQ ID NO: 29255 - DNA, 1101 bp, Mus musculus
caggcccaggaggggctccgctccctccagcaccaaggtaagtcctgccctgttagagtgctgttcccagctcctgggtcaggggcttggccaacagacccttctggtgtcttccagaaagacagaagctgagcaagggcggctgggaccatggagacacccagagcatccaggtgagccctgtcccagctccgccctgctcttcccttctgacttagcctctggcatgcatggctttgggcctttctggactagtttcttctgtatgttgaagaggtagatgaaatgacttctgacagctagtccaggcttgctccatctggtacctgcacagtgctggctgatgctgggggaatccagcgggagcccagagtagctcatccaagctgctcttatccccccaacagtcctcccagacggggccggatgaagataccatctccatctacagccagaagtcatacatgacggagagctccaccgcggaggatgcgctctccgtccgctcggagatgattcagcgcagaggtgtgttgtcatctgctgggctttctaggtagcagggagaggtgacaggcaccatcacatcgctttatgtcctggtatctgtggcttccccttttcctcctaatcccaggctatgtgattcagtgaatttaccagacagtaccctttatcttcttggaggttcatggtggacactgacccaaagcaagatcgtgaagggtttgggaaccctgacttgtggtaacttagctgcagcgtgaccaggagtctaaaccctttacttcttcaagtgtctactgatgttctatagaagctaaagtgattgactttcagtatagcttagctggtatcatgcttgctttcgcaagcaggaaagcctgtgtccagtcccttgcactgtatgcaacagtgcggtggtacacacctggaatcctagcgcttgggaaatagaggtaggaagatcagaaattcaaagtcttcctcagctccatagtgggttagaggctgacctggattgtatgatatccctatttcaaaacaaaagccaaaggattggctagggacagcctcagagggcctagggaaggcatgtct

SEQ ID NO: 29256 - DNA, 2222 bp, Mus musculus
ttattttagcaattagcaataatccatctggttaaagggcttgggaatgatgatcatccatattcatgtaaaagtgcccggtacaggaggctgtggcctctcctgtttttattgacacaccaattgaccgtaccaatttgtgattgatactatttgcatgttgttgctgtttttattcaacagtagttattaagtagttagaaatgtatggccgtccttgaaatgttatcaggcgccttggcataatattttataaaaacttgtcttcatgctaaataccttcttctttctttctttcttatttctttatggcaggcggagaacatttacaatgatgaagatcctgaaggaagtgtggatccagagggacaagggtcctagacgtgtctgcacctgtgatcctagactctccttgttttcctctgaaccccgagatggatttaacattggtttgaggcacagactttgttcagctacccagctacaataggtgccaccaacaatgctacaagcccaaaccaccggtgttttctaaatcttaactgggggtttaagtcagcaaagcctcgttggtggctccaattgtggctgggtagctgaacaaagtctggtttttgttgtgtgtggtttttccttccttcctttctttttctttctttccttttttctttctttctttttttaaacttgggaccaccaagttgtaaagatgtatgtttttacctggcagttgttccactggtgaactgtcaagttgagaaagagtggattgctagtttgtgtttgtttttaagattaaattaatccttgataaaagttgcttttttaggggttagtctttgaccactatagtttgatgccatctccattttggttgacctgtctcaccatcaggcctgttactctccatgactaactgtgtaagtgcttataatggaataaattgcttttctatatagccccatgctggtgggttttatttagtatccatcagacaacagtctatggcttctggaagagtttgttcgatgacagttgttttctgtagttttgactatcaagattgtaataaacataatagaccaataaccatagataaaagagagctttactccagtcagggaaattgaagacattactgaatagagtacacaaactagccttggtaaaattacatattcttgaagtcttctcccgagagctacataggtttccaagaatctcaaaggcagtgtgatagacagcttaaggcagagtttaaatttaaaacacacttgaactgtttacagagagcttgtatctgatgagtgtttttcattggaacccctacttttaaagtatagacttaagagtcagtgcctttattaccacttggtgataactggcgaaaggggaaaaaaaaaaaaaaaaaacaagcaaacctgcttttgcttggactgactagatgactctcacctcagaaccatttatggctttgggaaagtttgggtaatgaagtgtctggtccagatctgaagtgatgcctagaacttgtgattacgctggcatgtagtacaaattatcaagctggatatgggatgtgcacttttaatcctagagcttgtaggtttccgtgagttaggtccaggacaggaggggtggggtgtgtcttgggtcatggctgacagtgcacacacacctggagtctcagcagttgggaggtagaggcaagaccagaagttcaaggtcatcctgacccacagaagttagagaccagcctagacgacttgagacctggtctcaaaaaaaagcatgccattcctttaatcccagcagagttcagggccaacgttgtctaaagagtgagttctaggccacttggggctatatataagtggggtctggtggtggtggtggtagtggtttgtttttttggtgttttttaatttgacactattttaagagtaaaatacgagtgtagacttgaaggggaagatggctttgtgagcagagtcttaaaatctaatacctgtagcacaaagttgtggatccatatagcagaaattggctgccctttgaccccaacattttccctcagacgttcttggtttgggtcagcacaaagcactccataacattcttcacgatagttcagggtatggtgatgcatccatcactcagggttctgctggaagataaaaggctctttttcccttccatagtacactgaaatcagtaccagc

SEQ ID NO: 29257 - DNA, 1877 bp, Mus musculus
acctctggaagagcagtcagtgctcttaaccgctgagccatcactttagccttaaagtaacacttgaatagtggtgttagtgacaggacattttccttttttttttttttttcagacatggtttctctgtgttgtcctggaacttttctctgtggaccaggctggcctctaactcagatccacctgcctctgcctcctaagtgtcaggatttaaagtgtgcattaccacacctgacttgactcatgcagtcataatttcatttagtaatgtagtactcattactaatctgttcttacaaattatgaacgtgtttttttttttttttttcctcgagacagggtttctctgtatagtcctggctgtcctggaactcactttgtagaccaggctggcctcgaactcagaaatccgcctgcctctgcctcccgagtgctgggattaaaggtgtgcgccaccacaatgaacgttctttagttctgtaaatgcctaggttcgggcttttaaatatacgacttggttgcttaagtactttgtgcttttatatatatatacacacagaatttggaggttttggttctgtcagtgggaaaattgaaatagaaatcaagatcaaccatgaaggagaagtgaacagggcccggtacatgcctcagaacccctgcatcattgcaacaaagactccatccagtgatgttcttgtttttgactacacaaagcacccttctaaaccaggtaccttcctcttttttttaatcaatttatttatattgacatgtgcgggtgttatacttttcaagtgaaataatgcttttgtgtagaagaaaatcgtgattgctcagctttagcgttatatatctggtaaagggtctgtggtttgtataatagatgtttgtgacattttgcttaataaacccagaaagacagtagattgtctatttttgatatatgttattttgcagacccttctggagaatgcaaccccgatttgcgtctccgtggacatcagaaggaaggttatgggctttcttggaatccaaatctcagtgggcacttacttagtgcttcagatgaccatgtatgtatccttgcagttctggagcaaatctgggattgttaccaattggtttcttttttgggatatgtggggaagtgagaatcttttatataatggttaattttacatttaagaccatctgcctgtgggacatcagtgcagttccaaaagaaggaaaggtggtggatgcaaagaccatcttcacggggcatacagcagtagtggaggacgtgtcctggcatctgctccacgagtctctatttggctcagttgctgatgaccagaagcttatgatgtgagtgcagcccattgtttattcttaatacttgtattttcatagttttgtgttagtcacagtgtcaaatttcttctgttttttctttttaaattaagttgggacactcgttcaaacaatacttccaagccaagccactcggttgatgctcacacagctgaagtgaattgcttatctttcaatccttatagtgagttcattcttgccacaggatcggctgacaaggtaggtttgcctcctttggattttttttttttttaagatttatttattatatatgagtacagtgcagctgtcttcagacaccccatgtactgactagttttgtgtcaacttgacacagctggagttatcacagagacaggagcttcagttgagaaaatgcctccatgagatccagctgtggggtattttctcaattagtgatcaagggggaaaggccccttgtgggtgggaccctctctgggctggcagtcttgggttttataagagagcaggctgagcaagccagtaaagaacatccctcc

SEQ ID NO: 29258 - DNA, 1110 bp, Mus musculus
ttttgttctaaactgggacaggggtggggtatatcatgtatcagaatcctgggagagctgacctgggaaactaaagagaagaatctcaaagaacaggctgagggctcggcctgaggtccagacataaggaagtagagagggagaagacgagccttggccagcgtggcgagcttgtgttgtttgatctgacacattttatagctaaaacacaaacccttgcccagccaggtcagatggcttccctgaccagctgggccccgagcctctttagcaccgactccagtcccgtgctctccctgcagcattccctgcggctcacgtctccagcacatgctgccgcactgacttgataaccaccagtctcttgtttcataattacagtttgacttcctgccagctcctgctggagatatcctaattccattttcattttccatttaactctaattttagggaacagaagtcaaggcaataacgtactcagcaatgcaagtctataatgaagagaagccagaagtgtttgtgatcatcgacatttaaaataccaaagagggaaaagactcgtgaagagctgatttgttttcttccgtttgagaggatgtgatgactcattttctatagtatctatgctaaatggaaatacggaactgtacatttaaagtgtggctttcagaaatggaaaaccagtgtgtagcagtggtctctagataatgaattcctcggtttttgaggagcagtcttgtacttggtcatttgagcaggagcagcaggtgccttacattgtttgtttgttttttgagttatgccatttttctttcttttttttcaattttttatttggtattttcttcatttacatttcaaatgctatcccgaaagttccctgtgccctccccactgccctgctcccctacccacccactcccacttcttggccctggcgttcccctatactgaggcatataaagtttgcaagaccaaggggcctctcttcccaatgatggccaactaggccatcttcttatacatatgcagctagagacacgaactctgtgggtactggttagttcatattgttgttccacctatagggttgcagatccctttagc

SEQ ID NO: 29259 - DNA, 1140 bp, Mus musculus
ctggagcagaagctgaaagctacgtcctgatttgcagacagacagacagagacagacagactgggcctgatatgggcttttgaaaccttggaacccagccccagacagacagagacagacagactgggcctgatatgggcttttgaaaccttggaacccagccccagtgacaaccttcctccaacaagggcacacttcctaacccttctttttttttttttttttttttttttggttttttggttttttgagacagggtttctctgtatagccctggatgtcctggaactcactttgtagaccaggctggtctcgaactcagaaatccgcctgcctctgcctcccaagtgctgggattaaaggcgtgtgccaccacgcccgacttctatttctttccaaatagtccctcaaatagacagcccatggggccctgcttattcagatcactgcacccctacgtttctgaaagcatgtagaagtagagatcatgacacacccaccccaccccagagtctagcacttgggaggctgcagcagaaggatcccgagtatgaggcccacctgagctctctagattgtgggggggccggggaggggagaggagtgggggaggaggaggaggagaacaaggtcagtgaggagactcatttcaggtacgtggggagcccggggcacttcagaggagcaaggttctctgatggtctgaatcggttccagagctctcgctccaagttcccaggtccttcaccttcattattaatcaatggttgttacagaagaaatttggtcaaggcgtaagatcacttcccttgtaactttgcaagccatctgtacatcgtgatgtctccacctcaggctgtgtgagaaaactcccttagggtaatggttctctggtcagttgggctaagagtctgagtcctggagcctgccctttctcctcttaggcactctgcaccatggtcatagctactgcggtgagcagccttgcctgcagtatggaaatgcagcctcggtgacaccgtctgacacactgctccacagatcacttttgcatcggcactgaggtcataaatctattccactgcaaacagttggcaaatgaacccctgggttctgatgtgcagggtttatttcctgggc

SEQ ID NO: 29260 - DNA, 1245 bp, Mus musculus
cagttttagctgggtggtggtggcatagccctttaatcccaccactccaggaggcagaggaggcagatctctgttagttcaaaaccagcctgatctatacagcaaattccaagacagccagggctacacagagaaaccctgtctcaaacaaaaccagtaggacaacaaccaaaagtagacaatagccttgcagctccggagcccctcacagttcttggcctttgctcagcagggaacaatctctctcctttagggactgactcctccgaaggcatcccatgcagagttgagtgtagttagtggaaatatttcctttggatctgaagccatcaaagcagcaagcctctctctcaggcagcatgcatctgtgttacattccctaaagccaaggattgttgtggggacggcccggtccagtggttacctagctcagtggggacggtgggctctgggcgtgagtgtgtttgtgttctcaaagtctcctcatctttgcagctggaagatgtagagtgggaggactgggaatgagagaagccagagcaagcagctcccccaccctcggcacatcccacctccctcgctcgctagtctcggccggacttggaagacactgagaatgtcccccccaatggcctccgccatccagaacttggtacatattctggtggctccctgctggccctctgctcacaccttgaaagagccttttcaaatacagatccagaagtctgatttgtgccaaccttaggatgacctaaggggaggaccccgtaccccatcaccggagagcctgcatttccctgctattgtagggattcctactgggagacctcgaggggtagctgtctcctgcagagacaagagccgaagcactggtctcattgaagacgacacgtactaccccataagctagtaagccagcaagaaaggccatgccacctgcccttgactacacaggaacagtgaacagcattttcgttcctgacccaatgagaaagaggcactcatctctgacccaatgagaaagagacactcatctctgggaaatgtgcctctctggaatctccatcccaaccatttcctgttcttgggaaggtcctacgggcttcagaatcttaagaccacaccttgactcacctctaacccacgccgggatatccctacaccttcccagggcttttatgtcagatgcacccaagtccttagcccatctgtgccactgcaagagtctgctcttgtatttct

SEQ ID NO: 29261 - DNA, 1274 bp, Mus musculus
taggtcagccccccagggtggccgcacagcacatagactgacagggacgtgggtgggacttgaattctggcctgagggggcgccgaactcagggtatgtgtgtgtgtgtgggtgtgtgtttgtgtccgggcgcgtgagttttggacaaatttctagagtgtaactcagcaccagccgtctgacgagtctggacatgtgagcccttccaagagttcaaggagccagtgtagaaccagggactgggggcctctccactgtgaagtatgagttaggctgaaagtgggctggggatgactgagtgcttcttcatcgacggcctcctcccagtccatctcccggaccgaccgggaacctctctcatttccacactgaaccctacttgcccctggtcgtcccaagtgatgggggaaccagacagcttggcactgcccactgcacgagaggaacccgggcccgaccccgcctccaccccggattgggtgctcatttaaatgtccggccccgccccgagcctcgggcgcgtacatataggcggctcggcgggcggcgggcggcattctggcgcggagcgcagcagcagtgggcgcagctagcgggtcggctgcggagcgggggtgcagtgcgctttgccccccgtacccctccccctcggacgcagccccacccctctgcccgccgggccgtcccagccgaactatcccctgcggcgccagcgcggggcggctccgggcgcccccagcagacccccatcatgggcagccagagctctaaggctccccggggcgacgtgaccgccgaggaggcagcgggcgcttcccccgcgaaggccaacggacaggtgagtgcgctcggagcggcggatcccggcccccagcccgccggcctcgccccctctggggcccagggccggggccgcgcgctttgtccggcccgggacacgcggcgccccctcccccgcccggtccctttgttctcggcgccgcagcccccgcgggcgaacgaggggaggggcgggagggggcgccggccgggctcgtcgccttctttgttcgcgcccggcccgcgggcgctgcccccaggccgccccgaaggccgcgcgggaacaaaggcgctgctaggccgcaccaagggggcgtctagggccgtggggatggtactcggcgcccagggcgccccatctggagccccgatcccggcagcccgcggtggcttttgaagcggtggggagcagagatgcggggagactctggggtgggtgggggctgatcacacaa

SEQ ID NO: 29262 - DNA, 1504 bp, Mus musculus
cccctagccaggaagctgaggccaagggggaggtcgcccccaaggagacccccaagaagaagaagaaattctctttcaagaagcctttcaaattgagtggcctgtccttcaagagaaatcggaaggagggtgggggtgattcctcagcctcctcgccaacagaggaagagcaggagcagggcgagatgagcgcctgcagcgacgagggcactgcccaagaagggaaggccgctgccacccctgagagccaagagccccaggccaagggggcagaggctagtgctgcctccaaggaaggagacacagaagaggaggcagggccccaggctgcagagccatccactccctcgggcccagagagtggccccacacctgccagtgctgagcagaatgagtaggggtggggacaggtgggtgatctctaagctgcaaaaactgtgctgtccttgtgaggtcactgcctggaccttgtgccctggctgccttcctgtgcccagaaaggaaggggcttgttgccccctcccagccacgctcccttttcgccctcctgtggattctcccatcagccatttggtcttactcttaaggccagttgaagatggtcccttacggtttcccaagttaggttagtgatgtgagatgccctgtccctacctctttcccgagccccatccctgcagaaggcaattgctgggtttccaattcttttccaagttcgttttgtttatcctgcttctcaaccccctgagccagaagtgggggcttatactcccaaaccctgagtgtccagcctttcccctgttgaattcttagtctcttgtgctgtgcctagtggcacctgggctggggaggacattgccccatctgggtttttataaatgtcttactcaagttcaaacctccagcttgtgaaatcaaccatgtctctgacttgataagcaagtgttaggcttcaggagggagggaggtctgtaatgtgaaacaacttcttgttgtctttttttttccccctcccattgttgtaaataacttttaatggccaaaccccagatttgtactttttttttttctaactgctaaaaccattcttccacccggatttactgtaacatttggaaaaggaataaatgtcgtccctttagtgatgtttcattgagtggtcttctggggtgtgggtaagaggactgcaccgacctggaggacaaaggcaggtaggtctgcaagtgacgccccacaagagacggggaagaacttaaaccaaccagggccgagggtatagaaatgagctgttttattacaaagagtttcacaaaatgaaaatatctcaaaaaggaagctaggctatcaacctccacctacagaattgggggaagacaggcaatataagtttttttgtttgcccaagatgggtgggaaggtataaacagaaccaatctaaaaatggctgctattacccaagcctgaaaaggggtcctaggagacccagacccctcctaaaaagttt

SEQ ID NO: 29263 - DNA, 1150 bp, Mus musculus
accaaggaggagaagccagaagccaaagggtgaggaaaggggctggtggctctctgtagcactagagcatcatcaccttctgtgtcctacctctgtgagagggaaggaagagcagggacagctgctggtccagcctacagagagaggcctctttaagggtggagtctgtatgtctctgcccagttcccagcagtcacctgggcagccagggtctatggaagtcactatagccatgtttgtgcttcagggccactagcatgagttttctcatgcctgtctgttctctctgcagggtcaaagaagaggtcaagttggcctgagcaaggtctgcagccccatcttctccccaagttcctcacttctcagattttatattttctattcctctgtgtatttatataaaatatattaactataacgtccccagggaccagagcacagggcagtggtgctaggagggctcttcccagagcgaccttgtccatcctgccacccccctccccccatttgcgtggaaagaaaacaaccagaagagaaaaatcctgaactgccaagtgcctgcttaggagctctgctaagatgcccctgttaaactttttaggaggggtctgggtctcctaggaccccttttcaggcttgggtaatagcagccatttttagattggttctgtttataccttcccacccatcttgggcaaacaaaaaaacttatattgcctgtcttcccccaattctgtaggtggaggttgatagcctagcttcctttttgagatattttcattttgtgaaactctttgtaataaaacagctcatttctataccctcggccctggttggtttaagttcttccccgtctcttgtggggcgtcacttgcagacctacctgcctttgtcctccaggtcggtgcagtcctcttacccacaccccagaagaccactcaatgaaacatcactaaagggacgacatttattccttttccaaatgttacagtaaatccgggtggaagaatggttttagcagttagaaaaaaaaaaagtacaaatctggggtttggccattaaaagttatttacaacaatgggagggggaaaaaaaaagacaacaagaagttgtttcacattacagacctccctccctcctgaagcctaac

SEQ ID NO: 29264 - DNA, 1188 bp, Mus musculus
gcctgcctcggcctccctagtgctgggattaaaggcgtgcgccaccacgcccactgccttcaagtcttaagagtgtaagtaagtgtgtaaatacaggatgagcgaggtgctgcatgttgagagttcttttagttcaatcacttggatctataaagtatttggagcctgaactggccctggtagcatgagcccataatcccagcagccagggagccgagacaggagaatgaggttttttgtttttaaaaaagatttatttatgccgggtgtggtggtctccccagaagagagcatcagatctaatcatggatggttgtgagccaccatgtgtttgctgggatttgaactcaggacctttggaagagtagccagtgctcttaacagctgagccatctctccagcccagagaatgagttttaactagcctggactgcatggtgaggccctgtctgaaagaatcttttaaagagcaggtaaaagggcttgccataacctgtgagagttaaaaggacggactcctgaggactgtccctgacctcacatgtgctctacagcactgcctagctcagtcacacacgagcatgatagtgtatttagcccgggtttgaggaactgttcaaactgagtatattttggaccaaggtgaataccatgtgtgtgatgctggtaatctggtttgtctgtattgcagactggcagacattttctgtgaagcgaagggaaggaccaggcagtaatattttgtttagggcatggtttttgttggtttaggttttttttttgttgttgttttttttttttttttttttggtggtggtgaagctgtttgagacagggtttctctgtgtagccttggctgtcctggaactcactttgtagaccaggctggccttgaaatctgcctgcctctgcctcccaagtgctgggattaaagacgtgtgccaccactgcctggcttggtttttgttttttgatatggggtctcactctgtagccctgtgtcacctggaactttctatgtagacaaggctggccttgaactcatgagacactctcaccgtgtgtcccaggctagctctctagccccctgcctcagcctctcaggtgcaaggattacagatgtagattaccatacttggtttattttaggcgtcgttttgccatatagtagattggtctctgcagcaa

SEQ ID NO: 29265 - DNA, 1194 bp, Mus musculus
agaaagaagatagatggatggatggatggatggatggatggatggatggatggatggatggatagatacatagatagatagatagatagatagatagatagatagatagatagatagatagatagatagatagatagatagatagataaaataagtaggaaagaaagagaactggagtcagtttagcatcagccttgcttttgagtttccaaagattaaagtcttgatgtttttttcttccatcaacgttccaggaatgaccaaccctgaagtcattcagaacctggagagaggctaccgcatggtgagacctgacaactgtccggaagagctgtaccacctcatgatgctgtgctggaaggagcgcccagaggaccggcccacgtttgactaccttcggagtgttctggatgacttcttcacagccacagagggccagtaccagccccagccttgataggcctttcggtcccaagatcctcccaaccactgtgccctggctagggcagatggaattcctgtgccatatctgtgtggcctgtgcacacatggactctgactctgtacatgaaacctgtgcgtgtgtcacacataatgcagtttctgtcttgtacacacatctgtagttatgtgggttctacacatgtgtcttatacctgtggagcacgtgagtctaagccttggatacctcctaagatgtctcttcctataccgttccatttcctgaagccatagagaggagaaggtctgcgattgatgcgtgtctctgtctaccactgcctttcagagggtctccaggaaggccctccttgtgggctgccatccaatctcatgtctctgtgtgttctgtcctggtgcctagcacacaccaggagctcaataaaagtctgttgaattaaggttgtacatttttctactgcatactttatttctttatggcaaatagtgtgtgtgggggggggtcagatgatggagactggggttgctgttggatcgtccacactagattctcctgccctgagttgccactatcactacaggacattctacctgtaatctaagtgtatctctccactgaacatggaataagccattatcatgtaaagaatactagatgtccaggtccacaagaaagaaaaaacataattgttgctctcagagtaaactttttataggaaaaaccaggttcaaaag

SEQ ID NO: 29266 - DNA, 1177 bp, Mus musculus
tgagttccgttcctagtacccacatcaggcagttcacagctgcctgtgactctagttccaaggagattcaaggctctcctctcagccttaggcacagattcgtgtatatgcacatgcaggcacacacccatctacagaatattttttaattaaaaagagctggggctatagctcagtgataagagtacttggggttagtcaatcccagaaccaaaaatgagggggaggggatggggtaagagattagattgagggtaaggaaaaaatgggcttgggcttctggggaatggtggcttgggactcgagcaagtggctctaactcctcctcctcctcctcctcctcctcctcctcctcctcctcctcctccagtctggagaggtgttggtgaacgtaaaggaacactctcggcagatcaatgacatccagttgtctagagacatgaccatgtttgtcactgcatctaaggacaacacagctaaggtgagcctcactgccctcctgactcacatccagcctgtctgacctgcccagaaaggtgcccatcacagatcctctccctccctcctctctccagctcttcgactccacgactcttgaacatcagaagactttccgaacagagcgtcctgtcaactcggctgctctctctcccaactatgaccatgtaagaaggccccacccaggcttccagctaaagcttctggaatctggatgtttgcccaacaaacaggctgtaaatgatgggggaaatgatgtcaggtagagagggaactcgtgggattgttacagtgctgactgactgggggcaggaggtccttgacatggctgcttacccctccctgcgggtcttcccactctgtgggtaagatgttacagaagagcagggagagaagcctgtggacaagtcctgaggcgctgagctttcttccctgtaggtggtgctgggaggaggtcaggaagccatggatgtgaccacaacctccaccaggattggcaagtttgaggccaggtaagggaaagaggctctcccacactgaaactacagcaggccgcctttcagagtacacacaggctcctgacccctaaggacaaaggggatgtgacagatgtccagtggagcagatggggtcatgaactcagctgcacatacagctggctaaagagcctgctcgcaca

SEQ ID NO: 29267 - DNA, 1176 bp, Mus musculus
tagcatgtgagtgcctggtgcctgtgaaggccagaagaggatatcaaatctcctggaactgcagatacagattgttgtaagccatcatgtgggtgttgggaatcaaacccaagtcatctggaggagcagccagtgctctttaagctctgagccttctcttcagctctcctagccatttaaaggaagggagctctgtatttaagatcacacagtgagctagtgacaaagcagtggagcccatacatccttactgtcatccggagtcaattgaacaggacccgaaaggttttttttcacactgcaactcaggttggcctttacctcttctgactccagacaaaagcacatgaggatgctattggaggcctggctcttctacagcttatgttaggaaaggaggagaacccaggagctgggcggtcctatcagctcttcactggtaaatgagcagaaggcaaacctggcttggctagagcctgcagagggtttgtagtgcaagctaagctattgattattttgggatgtgaccatcctatcattttactctttccagatcgtcaacgtgtggtactctgtcaatggggagaggctaggcacctacatgggccacactggagctgtgtggtgcgtggatgctgactgtatccttttggccatgggttagccagccttggagatactggctttggcatgttgtggcggtctagagaataacactccctactcccagctacttcatcctgtgggaaactaggacaggttcaagtttgggaattcagaggtcagggcactctgaggtaaaagtgagaaagtctctttgggactgacctgggagatgctctgatggcttccaagaagatatggactaggtggactatgtattcttatttgtatatatgtgcgtggtgaatctgtgtgcacaggagtagggacaaatggaggcatcaggtcttaagttgttcttcaacctttttttttttttttaatcttttttatcatttttcttttccctaaagattaggggttttggttttggtgttttttggtttttgggttttttttttttttttttttttgtttgtttttcaagacagggtttctctttatagccctggctgtcctggactgtcactctgtagaccaggctggtctctgcctcctgagtgctgggattag

SEQ ID NO: 29268 - DNA, 1695 bp, Mus musculus
ctcacgttgccctttgttctaccacagctctcctgcttgcttgtggcccgcagtctcctttccctgagcaatctgggggcaggggctgggatgagaaccaggaccaggggtcaccatcttgtcttcttccttggccccactgaccccaaccccttgacgggttctttatcgcagaagcagtggctggcatggtgctcaccatcacagggatcaccgtgtgcatcacaagctcggtgagcaagacccagggccaaccgtcgcactcctgagtgggccaaccccgaccgtcagctctgctgtgctcggtggatgctgggcccaaggtgtaggcagaatgattggccagctggcctctctcatctctcagatcatgtctatctcaggggccacaataagaaacatactctccatagtgccaaggctacacagaaaccctgcctcaaaaaaacaagcaaagccgggcgtggtggcgcacgcctttaatcccagcacttgggaggcagaggcaggcggatttctgagttccaggccagcctggtctacagagtgagtccaggacagccagggctatacagagaaccctgtctcgaaaaaccaaaaaaaaaaaaaaacccaaaacaaacaaacaagacgaagggcagcactgggaaggttttgtaacctttagtgggttccacggttgagatttagcactggagccaggcatggtggtatactccattaatcactcaggaggcagaggcaggtggatctctgtgagtttgaggtcagcctggtctacaaagcaagttccaggacagccagggctacacagagaaaccctgtcttggaaaaccaaaaagaagaaaagcattaaaaggatttagcactggagactgtacagccaccctcagctgccatctttgtcttcctgctgccacctcaggcagctgttactcagcctccgttacctgctgtagactgtcagcatcctcacacagcgcctccattacatggaaagggctggctgcagtctcaaccaggaatggccagaagcctccacagctccattacagtgctttggctggctgaaggtgggatttggggacagaagttacatcagaatgtcagatggaagaaaaacaagctggccctgggcaaaatgctcaactgtcagccccgcaagtagacagctgtgtgccggacaccacctagctgcagcaaacatctggccagcagcagctttcaataaatctacagcaaacaaagcttagcaaatgttttatttgtgttgagtatgcagtgtctctggcaggatcacatgaggaggtagcctccacagaacctgcctgtgggcctgtgactgaggaggccacacctactgtgagcccaggaggcatggcttctccagaacaggttgctgagggctggggacagaggtggctgggagtggttgtcccccagtttgtatctggagctcccagctcttaagatggaggagcatgggcggaggttggggctacagcttcaggcccaggctggtgttgcgcagacaaggcctcttctgctgtctctgctgccctctggtggatgtgtggagacatacagagctatgtgtgtgcccaatttgcatggactgccagaggtccccaaccaggaaaggcgactactggatatttgaacgcctcacaagggaaacaggaagccaggctttca

SEQ ID NO: 29269 - DNA, 2108 bp, Mus musculus
cctccagtaccccacttggaaccaccctgtcagggtcctttgccatgtgggtgccaaggtatcctgcttgggaagatgagatatttcagagaagggaagaggcttctaatggctttgccacaagcttgcctatgggcttcagcctaggaggcaaccactggttcccatcacttctccatgcagcctttgctggaccgcaggcccacgtgccccttggcgcatggtcgtttcttggctcctgcccctcacctccatctcagaggtgtggtttttgaggactgctcttgtgccatttccttcgaaccctcttggccaaaaagtgagtccttgggatttcacttcttcctgcctaagctggctggtaggtcaagaacagacatcccaggaaccaaaatagctgtgaggagttgtcttcaccgtccctccccaccctcctcagtgttactgtggtctcggggctctgctgaagctctcgtgactgcacacctgccaaggtgttgagtcagtttccacaacagcttttctggagtgaccgtctgggaagctgaggcttctcttccatacactgagactggatggaattttgcttcttgtatttcaactattgcaagtttatctttcataactagcctctaagcccccacacactcaaattaaacattgagctgggtgtgtgatatattcctgtaatcccagagctcagcagagctaggaagcaggaccccttgtcaggaaaccaaaaagtaaacagctggaagaaaacatctcgtgctgatgatcatgtgtttaaatccagaaattacaaattaatgacccctttcccatgtcacaggctctaccatttcaaatacttgctaccctggtatatttattcactcagggtgcccagcagctgtgtgttgaggctttgccatctccagctggaatctgttgtcctgtggaatttctcccaaggtcttatatcttggaaatcatagtattcttccggttccagtgaggcctcagcccacactccaggctgagatctgacctgttaacccatggggctccttaggccacagagatgtaagggtgaggcatcttcctgcctccttgaagacagaaggaccttgtgtggtccactacattggcttgcctcacttcagctacctcttaaagcttgtgcagggtgacagctgctgggtctcagtgtggcaggccagagaaccttggctttccctccatccacttgtaggcacccagggcaatgcagatagtaatctctcccttctaccttctcccctctgaccatatctacagtcactacagctgctctgctttccaaagtcagcccaggagactgggccagcttcagggaggctgcctgtctgtgagagggccagcgccttcctcacttgggcaagtcccctgcacatgacctcattttaggaccaagagctatgttggtttcttagattgttagctttttctctagaggaccacagtgggtatggcttggagtccagggcccttggctatacaaacaatatttaggtccttgtccaggggagaacttcgtgtatgccatgtcagccccactttttgtcgttgttttccatgaggcttttttggaccatggtcggagcttaggcactttctgtaagaatgtttctgtaaagatggttatttaacgcttcctagtccccatcatgttagtcctccagagcgctaacccagaggccagtggaactgcccaggtgtccacagaggggctgcagcctgcagagaactgctccagcccccctccaccttagtagcatgtgtggaccaccaggcatctgactgcccttgaccagcctcgggtaggagggctgcctctgtccccatgactgctttcctttgccacccatacttgtttgaagttgtgctgacagcttttttttttgtaccctttcccgttcccagtttgcgttggaattggcagcagccagggacttgctattgatgaattttacattaaatagtcctgttgccttacctgtatctcagccaatcgaattattggatctttctggatctgcagagtggcagtggccggtcatcgtcccacatcctcctggccacaagtt

SEQ ID NO: 29270 - DNA, 3740 bp, Mus musculus
aaaatttttttcttttattttctttagtggtgacttccttcccaattatctttcttcatccatcccagtcctctgccctgacgtgtgtaactcttgggtacttgagcagatggaatattccagaggtgggaggtgggaggggaggggagaagtcccaaacaaagtgttcttgctctgacccatattaatcttgtatgcttggattatttaattttttcttttgcacatttttcttgtattaaggttgttcttcccaaaaagctggatttagtaacccagccaccagcatcgtctggaaatagaggctaatggggaggcccccatgagacaaagatccctccctccctctaaccctatgcctaagacctctttagtttgggaggatccccctcactctcctggagcaagtataccagtggagtggaagggaggggcacaggcctttagacagggcttctcctgtgtagctactgaccctgtttcctacccacctcctaaatggtgcgacccaacttcatttgtttacttgaaaattcacctcagagttgaatgaacctctgaggtggctgtgttttctcctgagcttgagatggggggctgtggtccttccttctcctgaggagaaagtccttgctctgatgacccctaagttgcagaggaggttggagttagtgtcgtgtatcgggatagtcatgaatccctgcctttggcctttcttcttccttctgccatagctggatcatgtatatttcacttccaaaggagagaatggcaaaaagttctgttgtttttttaatagtctgtattttaagtaggtcagtcttaattggttttaggaggacaaactggatgtgagtgggatactgtgaggaagaccagaaagacgaacaagtttctgctcacagggctgaactcagtccttattttctctgcttgtattctgggccaccacttgggaccaactctcacttctggaacctttatgaagtaaatcagctgggtctgattgttcccagcctgaagggagcaaggcctgatggagtctgctgctctctctgttccttgctcccaagcaaaaagcatcctgccttctctaactcactgttacccacaatgaaccctgttggcatctcccttctaaagatccttgtacctagcttgcatttccctttctccctctttccccctcccacctctctcccccctcctcctctcttccctccctctctctccccctccctctctccctccctccttcttgaataaagacagttcagtacctcagaggctgacctgttttcaggggttacacagtacactaaaaccaagctctgggagctgggtacagtgtcagctgggcagaccacctgtggaggtggcagcacagtgccctgctgtggtgatcccccacacccttagccgctctctagaacagcactgttcctcctgttccagcagatctctctgtgccccacatttgcagatctgaagttgaggttcttgctgctggcctctgcctttccgtctgccgtctctcctttagttttgagttcctgctccagattcctcttcagggcaggcagttaatactgaaaagttcaaccaacattggaccacgctggcgagtgccttccgggaaggcaaggtgctggcccttttgtttttaacctgactgaaactgctcctagttcaaagaaaagtcctctatgaagccatcatcgtccttatctgaagagtagacccctgaacctctcaagtgacagttaggaccctggccctggagccagatcctcagcatgagacacaaatgtcctgctttcctctgcccgttttccattatctctggcttcagagcagatcctgtgccacatggaagaggttggttatctatctagctgctctactctaggtgtccctcacagtcggctcctggccgactgacttcagtttccagccctccccagtgatcatggccctggatgttggttgtagccttttggtattactgtatgagttccagcttgcttggtaccgttgttacctgggtctgtgcacacaagtgcttccgaggagcaggtattggtagcctggtttggaagaccttttggtgtcccctttacccgggaccttgtatctaccacttcccctttctgctgcccctgggagtcatccccagtagcctatgttctgaagctaactgtgggctagagctgcagtgggattttagctgagggagaggaaaagacggtgcttctgcgtggagtttctttctttgaaaccaagccggtacaaagacacacttcccacacagaggaagtgtgtttctgtctgcctgcagagctagcagctcacagttctacacgtcctggaggcctctgcactctttattcagaccccagctcttctcttccaggctcactcattttggtatccatcctcttgggtatttttcaggcttagattctaacttctcaaaggaaaaaaacccaaacttctccaggtccctgcagatccaggacggagacaggatagttagtgacaagcttccctagcaggctggggaagtgtgcaaggctaggtgcactgaactatagattctgagcagtggcagcttcaagccgcacttccctgagaggtggtaagagacaggcttcctggcacattctagaccagttttgtccagtatattttttttttgttttatcttttgtattcttttgttaagccaacaaactgagaatttgcccctgtaaggatccatgtggtagatactagctgctctttggccaaaggccttcatagctgactcaatctcccagtctatcccctagtcccaccccaggatgcacagcaagggaagaagctaaggtcaacgccaacaaatctgagtgaaaacttgttttccttctgagagagcatcttgtctgaagcctgaactatgtgcaggaccaaagctggctgtgagaaaagcagccagaaaccggggcgccctattaccagaggggagtgctcttgtgaccgtgtcttcaagggcttaggcttacctacctgcttgtaggccagcctgacttctgatgctcacactagcacacaaagctgatgatgcccactcaccctgcactcctgtggctctgacgttaaggtttctgtttagagaaaagaactgtgtagcatgtgcagggaactgtgaaggaagactgagaccgcctggaaacctgtcaggggctcacaccacgaactctcagaagttgggcaggggtgctggctttgttagccggcttttttgggaaatgctttttttgacctgttatataaatgaagtgggtatgaggtctcagctacccagcagatggaacatcgcccagggacagcttggggtttccaggtaagaaccctagaaaggtggatttaatcctcacaggttttgttttccaaattcatttgcttttatttttctaagaactgtaaactctattttttcatgttctcagggcccctgggtagacaaacaaagcttgatttcagagcagaaataggccaagaaaccatggcgttgcgtgtgctgagtccagacaaatgatatttatatacacatccaaatttgaagagaaaatgtatttctttaggtttcaaacactgtaatagatacaaagcaaaaataaaaacctgttgcaaagttctaaattgtcttctttggtttggagtgaccctggactgggaagtgcacatgagacctaggc

SEQ ID NO: 29271 - DNA, 1229 bp, Mus musculus
aatgtagggaagcgctctaccaactgaactgtatctctagtcctaaaataaaagatttgactgtgcttaatagattaatatcataattggggaagcagttcgtaagatttttataaaatcaaatttttgaagtaaaaatttgttgattatcctcagcttatttacaaatggataccctattttaaacagagtacatgtgaaagagcaagtcaacaaaagcagaaaaatacagtagttttgtgagctgaagttaaaaaagagtccatagaaggaaattttcttcaagtacccttaatgtatgatttgaatgaatttttaagatctcaagacaacgaagaatgagttagacgtgattctaagactggttggtgtttaagatcttgttatgtatgtcactcccccttatctgaatgtttgttacgttttacctgttttggtttcttagagaatctattctttctgaaggcttcatgtctattccgttctgttactcactttattttacctttgttttttcccccaggtttttcgttggaatatacgttgcacatttatggcgattctgagcgtgagggcagacttctgccaggctcagcacagcctttccgctgacaagtgagcttggggttatacgtgccataattaacattgccttgacgactctggacaccgagactggcctcagaagtagtaggctttttttttttttaaattgcaagcgtattcttttaatgactccagtaaaattaagcatcaagtaaacaaaagtggagaagaacctacacttttaacttgtctcactagtgcctaaatgtagtaaaaaggctgcttaaattttgtatgtagttggatttattttggaagctgaaggtatccatctgcagacattgaggctcaagttgaatttggattcaagtggattcttaatacttctgcctgtgctgaagagagaagcttcctaaggaacaagcaagttgaatagagaaaatagtgatcaataataggcattttagtggtctttttaatgttttctgctgcggaacatttcaagatttattgatttcctcctccccccatttttttcccaccacactcacacacgcacgctcacactttttatttgccataatgaaccgtccagcccctgtggagatctcttatgagaacatgcgttttctgataactcacaaccccaccaatgcgactctcaacaagttcacagaggtaag

SEQ ID NO: 29272 - DNA, 3149 bp, Mus musculus
gctttgtccttgtatgctctagtttccgtttcgttttgttttttaaagcatcctaatacttgtcattctcatctgaagaatctgttaatctaaaaggaaagagtgatctggtgttcaaaactctgctgatttctgttatactacagtaacaggcagagaaagaaacttgggaggcagaggcagaggcaggcagattctgagtttgagctgtttacaccacaaattccagaacaactaaggctacagagagaaacactttcttggaaaaacaaaaggaaaaaaaaaagttgatgtttcagctttgtaaagtaatgtgctatggaaactatgtaggctttcagctagggagagctaactagaagtgttattctagacatagcacacgtcagtaagctctacagctctttgctacatgatagtgtgctgttcttatgttttcagaaaaagaagaggagcattcaattccaaacagctgctttacttggagaagtaccgacctaagatgcggttacgcttcagagataccaatgggcactgctgtgttcagtagaagtagaagcaggctggctggatcgtggcattagagggaactcttggtacctggaaatgtgaatctggattcttacctgtgtcatcagagtagtaatggattcagtactcctcaactcctaatgattgagaagaaggcaaacgataaagaaatccctctattacacgaataaaatgtttaagaaaagaaaaaagaaaggaaaggggattaatttagtgaaagatgattttgctcctagttttgatttctgccaggattgaattatttcaaaatctcctgtgttttttaagctttttcaaaatagatgtctgaggaaaaccagcagaatattaaccagtgtggagccagttgttgggagcacacacttccattatgcttggcacataggtctccttgtggtgggtgggatctgggggaggtagattttcctcatctctcttcctgcctccctcccatctcctgatccacatagatggaatagaaagcagcctttgttgctgtagatgtgcgtgtgtctggcagccttaagcccacctgggcacttttagggaaaaaaaaaaaaaaacaaaaaaaaccaacaaaaaaataaataaaaataaaagcaaagaaaaggcagtggcgcatatattctgtggtccaggctgtttctagtctattgatgatggatgcttatattagtttttttttttaacccccttgtgcccctgatctaccattagggtgtgagaggtagccaggaacctttggttttataaatggtgacgaaatgacatcctaaacagagtctttctcctgtaatttagctgagagaattctttttcccaacagtgaaacaagtgggcctcctagaaactttattgcagagatgactggaggccattggtgtttccaggagagctagcatgtttctacaagtgtaggactggattgtggatctgctatctaacaatgtcatggaaaagtggtatcttaaaattttaggaccgatttcagaaatagtcaaaggagcaacagaacattcattgtattttggtcttgagaaatgcctatagttttccaaattattcttgtacagttttatttgtacagttcagtgtaaccacctatcatcttgttaacactagattcttctgagattcaaaaagaaaaatcactgtcagagctagccttgcctagtgagtctgtgtccacaggctgtaacagggtggaagagcaacagtaggcagcccagggagcagcatgtgctcacggcatcatgtggcagtggtgtggggtctctgctcagtgtgttgatacagaaaagctgtttttccttgtttgcagaagttgaccagacaaagcaaatggaggggcacctctgtgtaccctcttcacctaagtgtttataaccagcagtaccctgctacaagccttgggtgcagccatcactggattttgatcgtcaggccagcaggatggatgacatctcattgatagtacccagatgttggtggctttctgagttgcctgtttactgttgatgcaattgttttgatttttaactaaatgcaaataccttcctgcctcatcccagaaaatgaaaaataatgcttttgacactgtttctagaattttaaagttgaaaaatgatgatataatccagaaattgttacttcggagcatgacaatagatttctttaacaaagactcaagatcaaatttcttacctaaaagtttaggttaactgttgactcctcaagggttttgatcaatatcacccaaaccttttccacttgacatgctagaattttggtgtgtgtgtgtgtgtgtgtgtatttgttcacgagcacaatagctcccatgggggtctgcacatgcaggtgtccaccagcatagcctgcctgagatagtgtcattcctggttctggggagaagggtgtgtgaaggagaataaagcagccctttgtcttaaagaagactaatgttaattgttctcagaactggacgttttttttccccccatcaaaattaaaactctttcttttggatttaatgaagtattgctaactgaagccagtttgacttgtgagagaggttagactgacagaaggtgtgcagcctgatttacaaccaaaccctgaacccttttgaagaacaataaaacatattttacatgctttttgtgaatttcttccccactcctaaacagttcatgtttgctctcctttctctgcttggcattctcaaggtctgatttgtgtcccattattaatggatacgttagagaggtgaagtgagaggtatttagtaagtatgtacttgaccaatctcattctaaggaattcatttttgttataggtttgcataatgtattacaacttagatttaaataaacctttttgggggagtggggtgggttggggaggggagggggctttgcaagacagggtttctctgtgtagctctttctgtcctggaactcactttgtagaccaggctggcctccaactcagagatccatcttgctcagagatccatcttgctcagccttctcctgagtgtgggattaaatacctgtgctaccactgcccagctctttttacacttttttttttttctt

SEQ ID NO: 29273 - DNA, 1122 bp, Mus musculus
cctcatcctcatgtctgtgatgtgtcttcgggtatgtgtttgaaggtcagaggacaattccgtgggctcaagttatcttcttccgccttcacttggtttgtaggttagctttgtaaacttcacacagagtcatatgagaggaggggacctcaactgaggagtggtctccatcacacgggcccgcccgtagacaagtaagtctgtaggacattttcctagtgattgatgtgaaaggggtccagcccccaatgggtggagccacacccagggaggtggtcttgggttgtataagaaagcagactgagacgagttgggttcgtgtgtatgtgtgttgtgtgtgtgtttgtgtagggaggcagacagctccgtcgcagactacggacctctccggggtctcagccgccaaagaccccgtccggtaggaaacactagccgggcatcatgagtggctgtcgagtgttcattgggagactaaatccagcagcgagggtgaaagatgtggaaagattcttcaagggttacggacggatccgagatattgacttgaaaacaggttttggttttgtggaatttgaggacccaagggatgcagatgatgctgtttatgaacttgatgggaaggaactttgcagtgaaagggtgacgattgaacatgctcgggctcgatctcgaggtggaagaggtagaggacgatactccgaccgttttagcagtcgcagacctcgaaatgatagacgaaatgctccacctgtaagaacagaaaatcgacttatagttgagaatttatcctcaagagtcagctggcaggatctcaaagatttcatgagacaagctggggaagtaacctttgcggatgcacatcgacctaaactaaatgaaggggtagttgagtttgcctcttatggtgacttaaagaatgctattgagaaactttctggaaaggaaattaacgggagaaaaatcaaattaattgtaggcagcaaaaggcacaggtcaagaagcaggtcacgatctcggaccaggagttcctctaggtcccgtagccgatcccgttcacgcaggagcaagtcttacagccgatcaaggagcaggagccggagccagagcaagtcccgttctggt

SEQ ID NO: 29274 - DNA, 1151 bp, Mus musculus
cagtatctgtctccccaggcctccacttgctgtcacctcccgggtgatgacagtgactgtgcgtccccccacccagcctccagctgagcccctcattacagtggaactctcgtacatcatcaatgtgagtgagggcccggatggggacccgagctatctgcccacacaggcgtgaggcctatctcagggaggtggtctgtgttggacggtgggtgtggcttgtgtgagagctgctgtggcgggcctgatgatggccgggcatggtatgctgctcacccgagactgcacgcatctctttgttctccagggcaccaccgatccccactgtgccagctgggactactccagagcgtgagttggggcaaccctagaccctctcatcagaaatggtctcccatctagaaggtcaaagggttccttggtgccatcctaggtctgagggggtcaagagcacatcttggggctccttgctgtagctttgggattacagagctgggctctgggttcatgccacctctccctcctccaagagataccaactcgggggactggaacactgagagctgccagaccttggagacccaggcggctcacacccgctgccagtgccagcacctgtccacctttgccgtcctggcccagccacccaaggacctggtgagtgggagagaggcctgggctgctggaggcatccgggtgaccccaaatgcagccctggacagatgtacctgggcctgcacatgggaagggggggcagttgctcgcagtcatgacacttgctccagagcatgtggcagtaggtgagtgtgagctcgtgtgcacatgtgtgcagctggttgtgtctggaagcatgtggatgaatgggtgtaaatacatctgtgcatgtgtgccctcctgcacgtgaggagcatgcctgcttgcgtccgacagggagactgggtgcccgacctttaccctctcccagcaacccgtctcccacagaccctggagctggcaggtgctccctctgtccccctggtgatcggctgtgcagtgtcctgcatggctctgctcaccctgctggccatctatgcagccttctggaggtaagtcggaagctgagcaggatgggaggtggctggctctccagggttaggcaggcagccaatgcc

SEQ ID NO: 29275 - DNA, 1163 bp, Mus musculus
tgttgactgaggccttccgggaaaaggataccgctgtacagggcaacatccggctcagctttgaggactttgtcaccatgacggcttcaaggatgctatgacccagcctccctaaagggagtggagcacaccaggggatgtgggcccctcctttcctcctctcctagcaaagagtgtttcctagcctgagctaggaagggcggagcttgactatcctgggctgtggagtggtcttgccttggagtaggggccctagagtagcaatggagttagtgtctggccagctgtcctggcctctggctttccccctctactccctgatgccagtgctaagtgctcattggctgcctacttgtcatccctcaccgagaccatcgggtcagacgagcccaggttctgcacagtggagtcagactgagctgagagagatttgctgggaccagagcctggggtccctcagctcctcagtccttgtatgttaacattaattttcctgaggctttgcctgcacaagaagcttggacattctgccatctcggccatatctgatgaggctcatgaccaccaaaactcggacccctcactgggctgccacgttccacccagcttctctccccaggaacattgtcacatcctactgccaacattgtaatttgcttgtttgtttgttttttttcccccatttggggccaaaagtccaggaaactgtaagtgtcaataaaagaaagactctgtagtcccatgttttccaccatgacttcttgactgtgtgtccgtgtccatccatccatccttccatccactccctcgctatagaagcatcagctgcttccaagccatacgaaagaagctgtgttagggaccttagtgaccgtcttgtgtgccaagatgaagtcagggccctgacaggttcctctgtgactaggatttgtccaaaaaactgcctgtgtttcttaaagttttagggctgccattctgggctgaaagcagccaccccaagacctctcacagtgtggtccttttattatcttaggcctgagttttatctcccagacaaactccatttatgaagtcataactctccccctacttttattaagcacagacaccagtacctgccagttgcatttctagatcagcatgatacccagtctgcactgtgt

SEQ ID NO: 29276 - DNA, 1202 bp, Mus musculus
ccgagcctctgagcctcttctacaagaagaggacataggaccgttgagatgggtttttgggtaaaggcccttgctgtcaagccttgacaaccccagtttgatacgtgggacccacacggtggaagcagagaagggactcccgcgagttacaacgaacgccccagtctcccaccccttccccataagtacgcctacacgagcatacacaatataagaataaaaccacagcgaattaaaaaacaaggcggcagaaggatcaagcggcgtttctccagcgtggcaccagctcaagggcgagtttcctttcagtatggccgggggatgctctacttgggttgcgggaagcgccccgcagccaggccagggatgggttagatggcaccaacaggaccgcgggcgccgctgacgtaggcgacgggagggctgtgggggatgggccccagccctttgcgggagtgcaagccccggcttcctatttcgggagcgaggggtgtgggccactttcatcatgtgatgcgagggctatttaaagaggctgtccagccgggagctgcggttctcagtgcctgctcgcctcctcactcatcgcaccatggcggacgcctttgtcggtacctggaagctagtggacagcaagaattttgatgactacatgaagtcactcggtgagcgaacgaacggcgcaggatctagggtcaggagggccggcaaggcggtcttggcgctgagctcccagggggagtgcccccatgtgcctcccgcaagctcctagccagtccagacagggaatactgaggtgcggagggtggcctgggctgaagccactccactccaccccaccccaccccggcctcctgggaggggggtgtcgcggtccaagcttggcgagcctcgtagctggaggggaagggtagaggcagctgtggccgcagaggtccgggatgggaggctttctaggaagcagtgtaggtgatccggaggtggaaaggggagggaaagaagggcgggaggctggccgcaggagaaggcaaagaggagcatggtggtccagaaattgaattccgaaagggaatagagcagataggagtgtacagagcctggaggaagactaaagaaaatcagtgaattccatctgggaagaggtgaagatacagccaggcagtcagcaacaagccctacccctccatgttggggtagtgaag

SEQ ID NO: 29277 - DNA, 1406 bp, Mus musculus
tgcctctggagcactggggtttcgggcttgcaccactttgcccgggtttctttttgcaagggcttgtgcagtcctgcctgaccttcaactcttcatgtccttgtccccactttcccaccgctgcaattgcgggcctgcaccacacacagcggtagtcgcctgctgatcacctgctgtggctttcacgttacagagacacacatagatgttgaaactttacatttcccttttaggaaaagaagaaaaagaaacatagagacaggaagtcatctgactgtgatagctctgactctgagagtgacacgggcaagaaggcgaggcattcatcaaaagacagcaaggccaccaagaagaaaaagaagaagaagaagcacaagaagaagcacaaggaatgaggatggaacaggccgcggcagccctgactcctgcaaagactcactagtgagagtgtggcctgcctcctacccagacttgtccccatggtctcagatggcttctccccctgcagcaagcagattggggccccacagggcccctcccaacatgattttcccttgttgctcctgaccctttgcaagcgacccctgcagccattgcattcatgcgctcagtgtcttcatttcagcagaaggttctagtcccaaccggctgccactgcccgagctggagtcctctgcaggagtccatgctggagccccgggtgctgctgtggaggggagcctggccgtgagagagagagcagccccaacctgcctgctgtctgcggtggctgtgggtggactctgcggcctccatcccctcagccagggcctgtactccagtgactgctgaaccagagatttgcagccacggtcattgctctgcttcctgtctgtcacagtgtgagtgactggttccatttcaagcctctgcttaaactcctggcataaatggaaatgtgtttggttttaaactttccaaaaaggctttattcctataatccttcctgggcgacttacagacttaacacattagttcacagaaaacacttactatgttatccaagaccctggaaagaggccaagccgaggcacaaagccaaggccaccagcaggtcacagctttcttgagattactcataaaccttctcttccatagtgatgaccgctttcccttgtatttgtaaccctggggacttgctgggcatgagtgggcgactcttagcagtcacctcccaccacagttgttcacacctggaccttgatgtcctgagcctgtactctagagagagggtgaccacagcacaccatacagcaaatccaggaatgtctgtgcaggatgaatgtgaaatagccacacagtgacagccagctgctctgccatgggcaggccagtgtaagggcttgcatagatgctagaatgacagc

SEQ ID NO: 29278 - DNA, 1193 bp, Mus musculus
accctgagtttagttttcagaatccgtataaagccaggtaaggtggcgtgtgcttgtactctcggctctggagaggtggacaggtagatctggggcccatcagctagacagcctagtctgcttgcaagttcctgactttgaaagatggtacctatcggcctggcgtggtggcgcactcctttaatcccagcactcgagaggcagaggcaggcgaatttctgagttcgaggccagcctggtctacagagtgagttccaggaaagccagggcaacaacggagaaaccctgtctcaaaaacccaaataaacaaaccaacaagaaaaaaaagaaagatggtaccttatggacagcaccgaaagttgtcctgtcttctgttcccgtgcactgattttcttccacacctgtgtgcacgcgcgcacacacacaggctgtagtgtcaggaaaacagatctaattgatgaaccagtgttgtgccatgggtatataatttcgaaaagactttgggtattttccaagtaaggtttttcggctgctgatggcttctcatgtcttcctcacagtgttgtggaacgtctatggagactgtgataactatgcgacgttgaagggacacagtggagcagtgatggagctgcactataacacagatggcaggtgagtgagtggcccgcagctgaagtgacagctgcttcccacagtattgcttagcagcctttacacgtcagccctgagctctgtcgcttgggagacgttctcagaaactggtacgtgttagctggcacagtgttgtaatcctgtaatgtcagactgagaaagctgaggcaggagaagcacagttttgaggcccacaggggcgatgcagtgcatacttaagagcacatcaccattttctcccacccaccagtgctcagggcagcccgttcatgagacataaagcaaatgtaatttgaaatagctctttgggggctggcgagatggctcagtggttaagagcgccaactgctcttccggaggtcccaagttcaaatcccagcaaccacatggtggctcacaaccatccgtaacgagatctgatgccctcttctggagtatctgaagacagctacagtgtacttacatatataataaataaataaatgaataaataaatctttaaaaaaaaaaaaaaaaaaaaaaaagaaatagctctttac

SEQ ID NO: 29279 - DNA, 1197 bp, Mus musculus
gtgctgtggaacagtgcctgcttttaaccgctgcaccctccagccccactattcagatttcttacatcatacatgcattacccaactcctttctgaaaaaaagtaactgccttcatttaggggatgtcggttattttattcatttagaaaaattatatggcagtattaaatgaagttttttgtaataccaatgaccttcacaaaattgctcatcttttttcttgtgacatccaggctatttttgttagtgttaatgtttattttttacatatttgcttaatcgtctattatgtaaatatttttatattttggctttagagttatttttaggaaatgctcaataatatttagagcctgccatgtcccaggcatattacaggcattcttatttataatctttagaatggaagagcacttgcctagtctgcctgagcccctaggttcaatctctagcaccacaaaacatataaaagacagacagacatgtacagaagatgtagatgctgttgaggctgagatgtgattcactggtggtgcacagaaccctggacttgaacctcagctataacaaacagcaaaggacaggcacctaacatattctgtgtctgtctgcagaggaagcccagaagggttctttgcataaatatgctttttcttttcttttctacatgtatgtgtgcatatacacatgtgtatgcaccgcttctatattcatatatgtgacataagatggaaaatcttacacagtgttttccagtttcttgtttacattatataataattttgggcattgtgttcattttgtctcattgtcagttttcctgggtgtccctggttggcctggagctcgccgcagttctgcctgtttcccaggggatgctcctgaatacgccactgtgccagccttgcgcacttttattagtatgaggtttttttaattttgttttaaaacaaaagtgcattatatagttcagagtatctttttttttttttttgatccttctgcctctccccacaagggatgctcttgacttggagtgggggtgaaatggtctcatggccaagttagtctggaactctgtggtgttcaaactgacttcaaagtcctccttcatctgtttcctgagtgctggaatgagacataaatcactaagcctgccatctgattttatgtaggttttttctcatttcttagat

SEQ ID NO: 29280 - DNA, 1205 bp, Mus musculus
cctctgccctgaacctatttcttcctgatcccaccctaattagggggctggtggctctctggactctggaatcagaaatgtggacattttaccccgtgcctgagaagatggaacccgagtttctcagagtcaggttagcttgtacgtcttcttttctttggggagggggccagtttctgtagccccagcccgaaccagagatgtgggttttcaattacacaattaaatgcacaattaggcataattaccagtgctccgagcccgagactgctcataacaggcgtgtaatctactgcagcctctgtttatactacgcagcccgctccctaatgatgctgagatgccttcacactgcaccgttgccatggagatgagcctgccgccaccatgtaaagctgacaaatggtactgtggtcctggacccctggatggtttccacagcctttgcagccaccttggaagtagaagggctagctgggtgggtcaggagggtagggcaacccttcctgtcctccaacactccttcctgtacaagccagcattggatcctctgggagatcctgagtggccctgagccactagggaacttcagatcccctcgtcctccagccataagcagggtgatccagtcttgtggaaatctgttctgacatctctgagtcatggagaggccaaggtatggacactcgtactgtccttggcttttggattatctggctctgtgaacttagacaacccctctctagggcttggtttccccacatatgaagtgaaccacacggtctccatagaagtttaccaggcatctaggacacactgtcagctgtaaatgcactaactgctccagcccatggatctacccatgcatggtggacagctggcatccgaggacgactgcagccacaccaggcggcagcagggcagggatccaagcccaaggcctcgggcttcaccagggccatgtcaagtcgacacagcatctttaccttttcccagttcaggactctaagaatggacagaagcacagagccacgtctgactggtgcccaaagccagaattccacattgtggcttcttttaaaaaacaaaaacgtggatatgagtgttttccctgcatatacctcatgtatgcagtgtctgcagaggccagaagaggatgtcagatccccaggagctggagttacaaacagttgtgagccaccaca

SEQ ID NO: 29281 - DNA, 2024 bp, Mus musculus
gccacactcccagccagccctacccctcagtgacctggtggataacgcagacggcagtctgttgcttgcgcagtggtggtggtgtcggcagtcctaactggcgctgggtgctagagtgagggttatctgcccttctggaaccttctccgaacaccctgtcattcccacttaatagatggagcagctggaggcccagaggcttaagcaccctgtccagggtctcacagcccctgaggggcagagcagacatccagagaccgtgtatctctctccaccaaggtgccacctctggagcatcctgccagctccccagagaacgcagcatttggttggagagtcagttgccttcctggaaaagctcaggcctgttccctcattccttaactgggatgtgaaaaaccggactgactttcttttctttccttatttatttattttggagtgtccataaactccaccttagtgctaagcagaaaacaaaacaaaacaaaactaaagcctagagatgatttgtggtctgcccaagactgccttgtaagttaggggtagcactgaaactgggaactgaagtaactttaggacacttgtctcagccttcctcttaggcccttccagtttgttgtaaggtgagaaagctctgttgagatgaagcatcatgcagcccagcctcaaactcactgtgggtgacgatgaccttgaacttcgatcctccagcctcagcctccagagtgctggggttgctggtacggccaccagtctgttacggggtaagaggagtctgtcagcggtctgtgtgcatgtttgtatacacgccaagctacacaggactgcagactgaagcatttgtggggcagactctggcacggagagatttgtggatcaataaacatccttttttgcttcctccttcttcatttattcatgaactctgaactccctggctcccaagaaaccgcctggaagaaagcaattagaacgtaattagagccactcctatcgccagcggggtggggtggccctgggagttccctgtagccccagctttgcagcctgtgcacactcagcttctgctcccccacagagacagggacatcctcagcagggacaaggaccactctcagaggaacttaagtacttgagtgctgctctggctctggaggagggctctccctccgcattgccatgcatctcctatgaggagtctcccagcggtctaagcgctgagctcttgggctcaccctaccagggatccccagccatacactgctagaaaactaaaaggccccatggctcctgctttccagcaagcccgcttagcacaccagagcggatgaggactgccaggatggcagcatgttataaatcacctggagggagccatttaccagccaaggctccattcactgccaaatgattaatattaataataagccgggtgtgatggtgtaggcctgtaatcccaggtctctggggaccagggcaggaggatggagaggttgaggccagtctaagccatatagtaagaaccttgtctcaaaaagcaacagaggtagcacttgggaggtggaagcaggaagaccacaaggcaaacgccagcctcagcaccatagaaagtgtgagaccatcctgggctgcataagaccccgtctctgaagcaaacaattataaaaaaaaaaagtaataaaagggtcgttggctaatgctttctgagctgtgttttgatgttgttaatcattttgttttgagatagtgtctcactacttatcgatggctggcctggacttgatatatacgaggtggcttcgaactcccagagatctgcctgtctctgcctccccagtgctggaactaaagacattgcacacgatgctcagcttatgagacatttctgagctgagacatttcggcttataggacatttcacctgctcttcaccgacacagtgacccactagcaagaagccaccaggattccacgtgcctactctgtgaggaacaggaggacaaaggcagagctggctggca

SEQ ID NO: 29282 - DNA, 1152 bp, Mus musculus
actctgtagctcaagggggtcttgaactttagattcttctgtctcaggtccagcaagttcttcatttttatgatgttcaactcacctacttttttttttttggctgattgtgatttttggcatcttaacaaaaagagctgtcatctaatccaaggtcgtgtgtcttttgaaatagagtctcactgtataattctggctggctctggaattcactctgtacaccaggctggcctcaaactcacagagctctgcctgcctctgtctcccgagtgctgtgattaaaggtgtgtgctaccataccttgctaggcctatgtttctaagagcttcacacttagcgcctgtgtgtaggttggtccaacctgagttgtcatattgtgtcctggctctccgctgggagggggcagggcaaagtctgtctgaaacagggggtccatggtggtccctggtctcgtctctggagagggggatctgaggtctatgttttccctgggtgccatgcagagaggggagacagagaagaatctggtctgattgggagcggagaactgagggcaggggagaaactggaggagagaagccttcctcgggagtcttaggctaggctctttagaagaccttcccctctgtgatccttaatgaagcagctctctgagacaatcctatttggtggcagatgtaaacaaatacactttattcggggtgaaccagcggttatatgtaggtttatggacctactctgcgtgatcagttctctccttcaccttgaactcagactgtcaggttttcctaatctggtgggaagtgactacctgcggagccatcttgccagccccagttaatggtctttttaaagactaatgtcatttaggctccctgacattcccatatgatttttaagatcagcttatctacttcttttatattttgagacaaggtttccctgtagagctctggctggcctggaactcactttgtgctgcctgtgctcgcgggggttggagatgaggaggtacagagtcaagggcacagactccaggagcaggtgagaatgccggagccagctcatatgaacgctgccacaagcttgtttaataatccacaggggcgccctttatactctccacctgtgtcccattggttccaagcaagc

SEQ ID NO: 29283 - DNA, 2315 bp, Mus musculus
cactcctacgcacagcccgatccccaggtccacgtcctgggcgtggctgttctggccccacccaccccttcccaggagtgggtgttcttcaccttcaaaacccagccttcaggactcaccccttctcttcctcagttgacttcatcggtggctttgactcctatggataccaggcgccgcagaagacgtcgcatttacagctgcagcctctgtacacgtgggtccctggtgggggcggggtgttactggagggacagtcattagtgttggtgggaaaaggggggcacggaaaaggcgtgggaatccgggtctccttgtctgcctactcgcaggcctgcaaatgcacttctaacctgctcttgtttcctgcaggtccggatagcttctgtcccacccgcgtacagttttccctggaccactggagcctgaagcagtgctgtccggaggcgcggatcacgataggcaggcgcgcccctggtggcgcttaggctaactgcagcttgtgcagcctcctggatctgcagcccctggagaaaatgcggactctcaagacttgaacttggacctgaccctagctctagcaggacttcagggttggggcaggacggggcgggggggagggggaatcactgggtttgtattttttttaatctcagccttggtacgtgccggggtcttcctctttcttcagctctactccttacctagtatcttgccctcagtccaaacagcaagacagaccgaactcaccccatctcacctctcattcacctgccctggggaaagatactgtgaactagaagcaggagtcctgggctccagctacggcaccatcactgacatccggtgtgacatcgggccgagtctttgctccctccgggcctcagtttccccacatcaaataattaaaattatcccttagttgatgatgcttctagcactctcgtttggctttcaattccatgggctacgctgcagatacggaaactaaggcccagagatgtgaggtgacttgcttgaagccacacaataaggttttagcagaggcaggttttgaatccggtgtactctagtttgagactccccaatccagtatctggcctctggacttggtttacaagccccaatctagcttgggcattccagaacactcacatatcacagccaccacgcaccagctccacccactcttaaagcaatatatcagttcgttctcttgggagccagacagacagagcctaaagcccgagctcagcctgacccacaggaggcctttgtagactcaacctgttcctctttggcaagcttttaaacctcgtcctccaggaaagtgggacctccactcctctgccaggtccctaagcctgggtccctctcccatgatcccctcccaccgagcaatcccagtaaccctcaattcttccacctacttctccattgtggtctccgaggggaagaagatggtgttcggaagcaagcctggggatatgaaagggcagaatgagagtgggtgactatggtcaggaggaccagaaccccaccattcttgaggacaaagcagagaggagggctcttcttcatcttcttcctccacagatgccctgaggactgtgtcctcagtagtgcttgctgacttatgtacagagagaacaaacatcagtccctccaatctgtgaagcggaaacaataggaaaggcagctaagaagcagaggaacctagcagggagcttgcacagtgggggcagttcacaccacactgtggtgaacacgtcactctccgggcttttctgagttagagcggcaagcccactccacgactccatccagcgtgccacacagaacagccaagctgggaactccactggccatcacagtccctgggtcgtgagcctaatcagaggggaacaagtttcctttaggctaggctacctcttgccactgggccacctcccaccagccacactcacttctccccatcccttcccacagggctctttctactcgagggtttagccacggatgcttcgaagcctttggttttataagctgggttttgcagggggtctgggtttgcttctcaagaccttatgggctgagacctccctggtatccatgcaggttggttgattaaaaaaaaaagtgttttcttcactgtgtatctgtcttgccctcttggttggaaagctctccaaaggaaaaaagcccctgaaaaagggggggggggggcaaaactgggtgttcatacatggagtgtgtttgtttgagacagagtctcactatgtagacctgactgattcaagactcaccatgtagac

SEQ ID NO: 29284 - DNA, 1172 bp, Mus musculus
ataaaatggtgttatggttgaaagtggagggaattaagaaatcagttgctcacttgagatttgtcattcaaaatgagggctgattgtgccttttaggttttaaccatctttctcttctaagaattgagttgataatcattaatttttttattaattttttttattaactttttttgagagacagggtctctcatgtaggtcaatatagatcagactggctttgaatccacaaaggttggccagtagtgggattaaacatttgagctccatgtctgacttccttttttttttttttccccgagacaaggtttctctgtatagcctggctgtcctggaactcactctgtagaccaggctggcctcgaactcagaaatctgtttgcctctgcctcccaagtgctgggattaaaggcctgccccaccacgcctggctttttttttttttttttttttttttttcctatttcaaaaacataagcaagcactaacataagcaagtctaatttttcggttacatgtttcttgaacttgccaggaaggatagtagttattttttgttatgtgtgtgtatgcatgtgtggtgtatttgttttgttctgtgtgtgtgtgtttgtgttcatttgtaggtatgtgcatgcccgagagccagaccttttctaccttttttttttttttatttttgttttttcaagggagggtttctctgtgtaacagcctggctatcctggaactctgtagatcaggctggcctcaaactcacaaagagatcctcttgcctcttcctaaagtgctgggattaaagatttgtgcttaagttttgagaccagattgcttacagagtttagagttgggcgcttggctagattggcctgcactgagtcccaggttcatgtgggttgctttcccaccgggctaggttacagatacatgcctttacacttagctcctatgttagtgctggggatcaaggcttcctggcttcgtggccaatactttacccaatgatccatctgttcagctcctatttcattttatttattttatgtttgtgagtacactagctatcttcagatgcactgtaacagggatcagatcccattaagatggttgtgagacaccatgtgggatttgaactcaggacctctggaagagcagttagtgctcttaaccac

SEQ ID NO: 29285 - DNA, 1105 bp, Mus musculus
gtgaagaaggtttcttgtgttatgtgctatttctttctcccctgtttgatatttgggggcttcctgggactgccttttatagatagatgttgggatactctgtacagtttacagtttgatctcttggagttacccaagactgctggtttaaactagcctccctcatacttgactgcctaaggagacgcagccctgttacagatcagagacttgccactgagcaccattgtgctgatctctgcttattaaagcatgtgaacagtagctagcattcttgtcatgtggtgtatttcatgccttgaaaatgaaggcagtaggtggggtaacacagggatcatttctgaatcttgatggttaaaggtgagtgaacatttaataccttgagttttgttactgtgcttgttgctttcttaaagtaaatatagaaaagacttcatttgtgcataatatgtatgtaatagtcacaatgctgacgtaaagctttcccttctattctgaacactaggtacgctctatggatgaattgaatcatgattttcaagcacttgctctggaagggagagctatgggcgaggtaagtgagctggtgtggttgaaaggggtgtcctagggaagcttggacttgtctttcatcagttgtgtctgaatctagtctctagaaatctgtgcttgcttttccttgttgccatcctcacagtaggaatagaagattggagaactgtgccaaaactctactggtgatttcgtaacctagtccagttacttaaactgcaaggcaccaaatatgaacactaacaataaacatgctaataagttagctgtaatatgagatgtgcaaacatagcttatagtcatcaggtattctcacctttacctcagtgttcagtggctaggtgctttcacagttggagtttagatgtgctgttaatcagagcatctcactgacctgcgtttttacactagttctctttaaagcctccattttgaatgcggctgtttcttaggtttcttacttacagatagagatctgttgggcagagcaaatctagaaacaagaagtttggtttctttttagcatttaaaaattttttctcaatatattgag

SEQ ID NO: 29286 - DNA, 1080 bp, Mus musculus
tagaagtaaaggaggggcttatataggatagtgggaagtcatggattccttgcttccttcctttcttccttccttccttcctccctccctccctccctccctcttttttttttttttttttttttttttaaacaggcttaatactttccctcttaggaatatgctagacagatttgagagtagagaagtaggctgaagaagtatacagtttcaattgggggggaaagtgggtgggtcagaacgggagcacttggtatgataagatgtcttcagttctgtaacatacctgtctgtctgtcttcccccatttggcaaaaaattctgcagtgttccttcctgcctctgtgttgtttgtaaactagactgtaatgtcaggcatgggcactgtcctgtcccagttagcatttagtgtagtctggtgtccacagtgggtatccataattagttgatgatgattagtgaagctgaagctattttttaaacagggcccaagggatgcagacagtgatgaaaacgacaaaggtgaaaagaagaacaagggtacgtttgatggagataagctaggagatttgaaggaggagggagatgtgatggacaagaccaatggtttgccagtgcagaatgggattgatgcagacgtcaaagattttaggtttgtatattttacacttctgattttttggatgtgggctgtgggtttttgtttttattttagtccctcctgtcctgtttcagttttaaaaatctagtatagatgatgccatagaggtgtaaactaactggtaaggtgggatttcccaagagctgtccatgtttatactttgcccaacagaatttgcatttgaatggagctgggcttgcagagtggttccacagaggacattttagtagttctagaacttcagcataggcgctttgggactctctgagctggtcctacatcactatacaccagagccatggacattgagggatgtatgtgtctctctctctctcacattggagggagaattagctgagatattttacgccttctcccatttcctacatgctcagcagctccattctatgtaggtaggc

SEQ ID NO: 29287 - DNA, 1310 bp, Mus musculus
tgttttgctttattttgaaacaaagtcttgtgcggactccagcctgacttggaaacttgttctgagtgctgggatgataggtgtgtgccattatgcctgacccagaaaaccaaccattccagctttgctctgtgtttaaagaggatctgctgttctggtggagtggatttacctgtgtttgtggggaacatttgtttcagttttcatggctgccgcaggcaatactgtttttagttttactctgtgtttattcagtcttgattccatagtaaaggtgtattgtatgttaatagcagatgatgatacacatgcaaacaatggaagaatcattctagaggactacaaccctgtgagccttgtcaaagatctctggttattttgtagaactagctttcaggactgctaatgaactatgtcaaggacttgaactgggggttgctgtagtgtccctcctcgatcaatataaggtttaatgccctttactttctctgtttagccgtacccctggtaattgccagaactctgctaatgaagtggatcttctgggtccaaaccagaatggttctgagggcttagcccagctgaccagcaccaatggtgccaagcctgtggaggatttctccaacatggagtcccagagtgtccccttggaccccatggaacatgtgggcatggagcctctgcagtttgattattcaggcacgcaggtacctgtggactctgcagcagcaactgtgggactttttgactacaattctcaacaacaggtacagtgtgtgtctttgtcatctttccctttctttccagccctcacattatgggggtggggtgggcaaggctcttaccagcttagaaagcctttagccagttgcttttggtccagcaatggaataaattttaaaagctcaccttctcagaaagttggttgctgcagttgctagaaagagagcacctgttctgtatacactctgcttgcttggctcctttctccccaaccctgggggagtgaatgagtattctctcagatgctaagttacatttggaagatttctattgtatgctgttgctggtttgttttgtgttaaaaaataatgaggggctagagagatggctcagtgggtaagagtgcttgcttcgaaagcaagaaaatacaactccaaatctctagtacccttgtaaaagagcagctgtccatgcttgtgaccctaggatcagagataggcacactctggagcttgttagccagcctgatagcctagcagaaacagtgggcttcagatgcagtgttagaccctgtatcaaaaagcaag

SEQ ID NO: 29288 - DNA, 1162 bp, Mus musculus
tcaaagagaagtgcctccctctacctgcctcctgaatgccggcctactggccagggtacttccttatttgcatagctttaatgtaagccatttttaaaattcactagtgtcttatgtgttgttctgaggaagacttgagactgactagttataggattaaaggttacctcagtgtagctttagtttgtcgaggtatacagaaacattcatttggtagaggattgggttttagttttgatctgagatctcagaaattatttaccctgaaaccagtcaaagtcagtctgtctgtctgtctgtctgtctgtctctctggctgtgctagaactcatgtagactaggctggctcaaacttacaatgattctccctagttttttttatctgctaaggaacagtgaaggttttttgttgtttaaatatagcatttgtttatttaatgtatgggtgtttggcatgtatatagactattgactcttgtctgagactacataaacagcagtaaaacttgaaacaaaaagaaaatagtgagatcttttggtctctgaggctgctcccccccccccctttatcctaggaatgcaaagacttttgttctgtagatttgtcttaccctcacattcagctttgcccatagcttttttttggggggggggagagggaggcatggagtatataacaagaaactgttcttttatgataacttagcatcttttcttgtaacttccaaaaacctgcatacttacgtacgtacctgtgtgtgtgtgtgtgtggagaccatacagagttttatccttttgctgtatgggatctgattataacagtaaactattttttgcaaaaaacccactgaatggtactgttgtgttgtgtggtttagagcttttggatccgaaacattgccttttgtaaactcacgtagtgagggacatagaagaatcaaagcattttgtcatagatacccaaacagtatttgttgtgaatcctcatatgactttgaaatatttgctggatcttccctgtcctccctgtgagtgaatcgtaattagcacagtgctcatctgtgctgtcctgccacaggcacttcctagtgctcacagtgttcctttcccagtgttggtcactggctcctttatgaattcatgacagtggtagcagaactca

SEQ ID NO: 29289 - DNA, 1765 bp, Mus musculus
taggcattgtagtccagcactttgaaggctgaggcaggagggttcaaggccaccgtaagctacacagtgaatcccccatttcatagagcccaccaggactggggagaagcttggtaggtaagagtgtttactgggcaagcaagaagatcgagttcaagtgttcagcactcacctgaaggcaagtagatcccagctttggggaatgggaacaagaggatccaaggagcctgctggcctgtgttgtgtagttaaaatggcaagcctcatgtacagcaagacaacttgtctttaaaaataaggtagaaagccttagagctatgggtctcaacctttgggctcttgtatcagatagcgatgaaataattatggttgggagtcaccacaacatgagaattaaaggttcttaggaagtttgagaaccactgccatagaggaaggcacctgctgtcttctctgtcctccttgtgtatacacacagatacatagacatagacacacacagacacacactgacttggataaatgccactatgactttttactgaggttatattatctttgtgaaattcctctttactctcagtctgttctctcttcccttttgtccccttcatctatagcctggaatgctagccagactagagaggtgtgtagtagggctgcagtttggtcgtttgtttttactgacaggtatgtttccagcaggtttagctcccgctgcgtttgtccccaacccatacatcatcagcgctgctcccccagggacggacccctacacagctggattggctgcagcagcgacactcggtgagacacgtgctgcatgagggatttgctcacctgctagaaaagtcctttgaaacgggcatgccttctttctactctgccaaagccatgtctccaacaatgcctcctggttttagtgccagtcccttgttagtcatatttctctgcttagctattgtcctgttctgcctaggaaaataaggtggtcacttattctgtcccacagtagctttcgtccacagaattgcttgttgatagtgcaggggatttgctcagcttttcttttggttccataggagctcactgtttccttaccttctcgttgcttgtggctttccctttctccagtcctctaaattgcatagcttttgagcacaagtcttaacacttctctcttggatttctcttctccctgctctgaaatgtggcgtggttctgttattctcacttagagctcatcagagcctgaggggacgatggttggtccttgggattagcactacaaagctctagtgtcaggattctaagattggctgagctggcatcctctctcgatgacttgtgtgcagagcttaccaatgcactgctcttttattctttaatagtcacattggctctcacagtacaccacagtcagtcctgtctgatttcaggttccttactgtaccagcttgggcctctgcctccagatagtaatcactctttgtgcctggcatgacctgattttattttggatcatttcttgtgtctctgttactgacaacttttatttgcttgtgaatggattcagttgtcttttccttccctgaacttttgaatgtttttttttcccccaaagtcaggtacctttcttttttaaatctgtgtagcacagttgttgtctcagaggggccataaatgttaagtggcttcatttcaatatgagaacaaaggcagcaaacaacctctgaaactgttggggtgtacacctgtgtaagtt

SEQ ID NO: 29290 - DNA, 1114 bp, Mus musculus
cggtgtgtctaaagacagctacagtgtacttacatataataataaataaatcttaaaaaaaaaaataaacattttattcctggcagtggtggcacacacctttaatgccagcacttaggaggcagagagtttgagttctacagggctttgctcccccccccctttaatatttatttatttagctgtcatttaaaagactgactctagtagagcatgtggtgtgtcctctgtaagtcctgtgagatagcatttctgtttattattcccaggttcttcgtggaggagctagccaacgtcctttgaccccaaatcagaaccagcagggacaacaaacagatccccttgtagcagctgcagcagtgaattctgctcttgcctttggacaaggattggctgcaggtatgccaggtaagattagcattgatgttcctaatagtttgtggggcccaaaaggtatgaattgagggagtgtttttggcttcggactggggactggcagggatgatacatacttgccctcacttagaccagaggtcgatgatgagagctttgttctgagccagtcattggtcgtcacggttatctgaacacttgacggatgtgtatgtacacgtgagaaggtgagctttgcttcattggtctctctttgcctcaggacttaaagtggacagagtgctcatcctgctttcacaatagtctttggctttgttctgaatgcctgtgtatttgagccgcttgactgagaaagaatttctgctgttctcttaagtagccaccatttgtatttgtagggtttctaagtgttgtttggttacccactgagttgtaaatgtgtcaccagtgtctgttggtctttttactgccttgttggtgagcattgaacatagattaatgtcatgttcttcattgaaacaggtacttaattttgtgagactttcttgtccgatgtagccatttataaactgagaagcctcaacttgccttgtgtattttgttacttatctgtgggttgtattaggtctcctgtgcatgtgcacacaattcttactaagaggagatgcttggtagcagtgaataattttgtcagttgaacctaacctagctcttctcactg

SEQ ID NO: 29291 - DNA, 1114 bp, Mus musculus; identical to SEQ ID NO: 29290

SEQ ID NO: 29292 - DNA, 1100 bp, Mus musculus
aaagatgacaggcctgcattagaaagttctgtgtagtggtgggcagtaccccacctacacacctttttttttttccttcctgtattccatttttctgctagaacctttcaggtgttgaaaggcatttaggtcatttccttcactttcccgtagctcatgtggccaccagggctttttaacctgcccccatcccattctatctgcgacactaaaggaagggaaatttgccatatttgtgtgatggcttgaatagctgttaacccaagccatgtcctctttatgacgttagctgcccctagaactgctacattaacagttaggctgtctctgctgacacatttgcagtggtaaggagtctggatcaaagtgttaggaacaggccactgggcttgttcttcaaagaacaggcctgtgcttatctgcattgttttaattccattttagttgcaaactccaacactggcagtggctcccgccgtgactccctgactggcagcagtgacctttataagaggacatcgagcagcttggcccccattggacacagtttttatagcagccttagctattcctcctctcctggacccgtgggcatgcctctccctagtcagggaccaggacattcacagacaccacctccttccctctcttcacatggatcctcttcaagcttaaacctgggtaagaaccattactctaacaccaccttgaacgctagaagtctcttgccactgatgacatttcaagtactttgcataagcaaaggacagtccctttatcctagaagtgtcctggtgttctgtgcctttgatagattcctcaagttgctcaggttgtacctgcagcttcctagcagttggggattgcctagcatctggatacaccttgtgtattcactctgtcctcagtgtgaacattttctcttgggcaaacacagtaaagtcattgcagggaggcagaaggacacagaggcagaagaatagttactagtaaagcctcatagttactagagagctctgaatatactgctaaatttcttttaggttctccccccctccctcatataaaagttagtagcttcacaaagcattttattgaaa

SEQ ID NO: 29293 - DNA, 1162 bp, Mus musculus
gaagtgaggatgtagccagtggttgagtttttacctagcaggaatgcccaagcctcagttctcaccacagtgaagaatgtggggggcgggggggctggtgtagagggagtgtgggaggggtgagatggcgatgcctggacaccaaccctttaaatagctatgacacaatataaataaatagaccatgttagcccttaaatgcttcaagatactgtccaaacactgtagaaatggggaagttcagtgagcttgtaaaagcccatgttaattgtctctttcacagaaggctttcagatgcccagcacctgcaggtagactgctaggaactgggtggttaactgctgcttcccaaattcctaatccaagagcgatttggctagtaaatattgaaaatctgtttcctagatggtcttttcagaaaggaccagagaacttaagtgctaagcaaaacttgacagattggtttaatgtatagataaattctgcttggcccatgcagaatacatttgtgaattgccagattaatcacctgagaaagtttttctctttcagagatttgtatatactttattttttcagtaataaaagagccagtatgtcaaaacttaagcataaatgtataaatacataatgtatggcataatattagctatcattccccctaaccctttgaattatatattggtatatttttggccacagtaacaaagtctagttaatgttagcttcaacagcactgcatttattagtgcatataactggaaattcagaggtgtagggcagtgttgagggttagtttgttccaccattgacgtagttgccaagcacctggcttcctttcagcataccttccgcctttttcagtgacccacaggcaaaaatgcctggcttaacttcagaagctgtgtttgtgctggtcttccatggtcatgtttgttacgagcaccacatctgcagtgcctgctgccacaccgaccttgtgaccatttctttgtcctttctccaagaacaaggtttcttactgtcagaaagaacaatcatttggctgctcttttctttttaaacaaatccactgtgttcagaagcaagcactgtggcggtgagagttagcagtaccctgaagagtgaggaaggttgaggtaaccgagtctgaacatgaggc

SEQ ID NO: 29294 - DNA, 1155 bp, Mus musculus
accactgacccacaccctagcccaggcctgcttttgttaagccttttggtcatgacagcatcttactgtgtatggatttataacctagtcaccaatcagagcagcagtacaaagggcatacgaggctgttactgctgtatcacataagctttgtctcgtagaaaatggtaagaattgcctgttgatgaggaccttaaacctaccatctgccttggaattgttccttcacacaaagttttccaggaatttcctgtacataaaagaggatgtgttgatttccttccctctgcttgcagcaccaggacaatcccaagcagtgctgtatccacacccatgtttggctgggagggaatgttgcttggagtggagaagctcagaaggctctgtgtgagccgggcgtggtggtgcatgcctttaatcccagcagaggcaggcggatttctgagttccaggacagcctggtctacagagtgagttccaggatagccagggctacacagagaaaacctgtctcggaacccccccccccccccaaaaaaaaaaaagaaataaaaagcctcagtgtgctcgctttgtattttctgaatccttactgtaggtgctgtgcctcactttatttattaaggaaataccatgtagtgctccattctttttactggttggttttgttttctcctttttaggtagtactgggaattgaacctaggtcctaacacatgctagcaagtgcttccttcatctttgagctgtatctccagccttaaagcactaattttcctagcaatggtttgctagcaatggttaaaacaaaaacaaaacagtcaaataaaaaaagaaaaaaaacaaaataaatatttctttcttaatttctgtgcgaatgtttccttcagattggtgtatgggccttagaaagccacagtagagagaacaattgcccgatgatagctcagtgacataggaggagagagctggtgaggcttgtggaggtgaaggagcagtgcagtggtgcgtcttcctcctagatgagggccctgatcgtggactcaagtctttttgttctataaccaacaggaggactcacaaacggcagtggaagatacatctctgctgctcccggtgccgaagccaagtaccgcagtgcaagcagtgcctcca

SEQ ID NO: 29295 - DNA, 1542 bp, Mus musculus
tgctgtctttattcactttttggacaccattactgaactgagaaaaccattcctgctgacttttaaattgcgagccatcgtgtgactgctctgaaatttgttttctattgctttgtgtctgtccccgtgtcccttgactctaccagaggtaggagccctttgagatgtgataattgacaggtggttttctcgcaaacacaggctgcatcatggcgccccattccttgtgtttgaggcttggtagtccaggtcttttggaacagattttgtaacttgtctgctcccatgcttcctacgtgatctgttaggagggagctatatagcacacccagctcttggatctttctcacctgggtaaaatctagagtcagcactcttattaaaaatagacgcttacatggttgtcatgatataagtgtgctaaattgtataagctttgcaatcctgctcacctcatgacttttttctatttgaagatgactttggtagtttttaggtttttagaagtctcgtgtagctcgggtcggccttgaacttacttatagataaaactggccttgagctcttgatcccattgccgtcccatcagcacttaaagtacaggttgtaccatccaaccccggcatgttttttttttttttttttaaatttatttattatatgtaagtacattgtaactgttttcagacacaccagaagagggcatcagatctcattacagatggttgtgagccaccatgtggttgctgggatttgaactcaggacctttggaagagcagtcagtgcttttaacggctgagccatctctctagcgcccccccccccccccccccccgggcatatttttcaaaataggttttgatagttatagtgtaggctggcctagaagttgctgtgtagcaactccaatcctgcctcagctcctcagacctggagttagaggtgtcttccattacaccctgctggtgtcatgctgttagtgcctcggcaagtttgatgtcccatctgctttctctcacttgctgtgttgctacttggctatagttgactttgattgtcggatctgtgcagtgcttactgcttgttaggaagtggggctatctggatgattgctgcctgtgattctggtggtgccttctcatctttgtctccaatagaacgagatggtgcgggagctagatggccatgtcctgaagtgtgtgaaagaccagaacggcaaccatgtggttcagaagtgcattgagtgtgtacagccccagtctttgcagtttatcatcgatgcattcaaggggcaggtaagtcacttagggtcatgttgtcagtcagaagcagtcatgtgcagtggtttcaacctgaacatgtgaccaggtctcttccctttaccctgtggggggtctgccattggcagcagaactgctaagatgtattcatatctgaaggattattttttccatggctagttattttcccgatttttaaaatcttttgttatataaaaaattaagatagaatctaatagatcatgattgaatgcatgttta

SEQ ID NO: 29296 - DNA, 1101 bp, Mus musculus
aatggtggttgattcttctttggcatttgcctcttctactaataaatacagtaatgaagaacctttgcactttctattagaggaaaacatttctctactcctcaaataatccttcccaattctaaaataattatagatctacttttttgtagttagtcatttgtgaaaagcccaggtagaaagtaggtccataaatatataaagaaaaatagtctgctgtcatgtcacagtgtgttcttgttttgtaataagagagaattgttactaccgatctatttacaaattgcttgcaggtcccttcccattcagatgcacttcagagctgttatgtcattaccccatcctctgcctcacgagagataaacagtgattagatggagaactaggaatccacagaactgtttttttatgtatttttttctttgtttttgtttttttcctgttttttttgcttctcaaataggatcagtatggaaattatgtaatccaacatgtactggagcatggtcgtcctgaggataaaagcaaaattgtagcagagatccgaggcaatgtacttgtattgagtcagcacaagtttgcaaggtgtgtgctctggggagcaaggattgggcagctctccagctgtagagtcgttccctaagttcttacattcgtgtatgtgtgtgtgtgtgtgtgtgtgtatgtgtgtgtgtgtgtgtgtgtgtgtgtgtgtgtgcgtgtgcgcgcacacgtgtgcaccgcaccaggtctatgtatggaagctagaggacaatctgggggagtgggttctctttttctatcttacaagtaaaaagcaagcaatatgttaagtgctctttctactcctttgcagttgccaagggaatctaagggctgtctccagcatgccgtcctgtggcgtttgtttcctcccttgggtgggcattgcgaggtgttcccactcacctccctcttgacctgaacgggcctttgtcagccctgcccaggcctccgcttctcagcttccgagtggcaggcttgggaaatcatagcctcccatgcctctggtcttctgagcagattcgttatttctcactgctcatagaacacaatactgct

SEQ ID NO: 29297 - DNA, 1585 bp, Mus musculus
cctttgtaaatttcattttattacacataacatgtactaattattttttttaattgactaattgccctgctgtttactggtgtataggaacttgtacataggtaatcagtgtacatgggaggccacatgctttgttcaatgttgtatctatattccacatgtggacactttcagggtggttggtttaacaaaaaaagttaaaaaaaaagacaaaaaaaggtttttaactcatttgccttgtggcaagttttgcaaatagctcttccccacctcctcattttattattaaaaaaaaaaaacctgagaaatttgaattttagttaaatgatctcaaactggcatttaacactgtttataaaatatatatatatatacatatatacatatatgaaatgggaacgtttcagagttgctagagcatcagcctgtgatatggagtttatgacgctctttttttggagatgacctcgtgctgagggaggtggtagctgcagatccaggaggagcggggaccccagaggcccaaggccagtgggcatggccacttgctgcctgtggttgcctgtgtgaacactgggaagcaggatctgactgtttagcatgagagaatacccagctcggccctggtctggcttctatagatacatagtgtatacttgtgtagactttgcatatatacggatttgtagtattttcctgttttgatgtctaatctgtatctataatgtaccctagtagtcggacatacttttgattgtacaattgtacatttgtatacctgtaatgtaaatgtggaggagtttgatcaacacgaacacgtttttggtaagaagagaatcagccagcccgtgcactctgtatatcccaccttttatggtcgtagcagatagtgttgtatattgtaaattgtaatttcaaccagaagtaaatttttttcttttgaaggaataaatgttctttatacagcctagttaatgtttaaaaaggaaaaaaaaatagcttggtttatttgtcagctagtcaagacggtagtgagagcctttctaaatgttacttcagatgcttcagttcacactagtgtcccccccccccctttttttttaatcctaaaaaaggtaatgtttcgcttattttgtgacagtcaaaaaggatgtgcagaagtttcgcctgccccctccctgctcagcgccaccccttgtaaagtgactcgccctccgttttgtacagatgagctgtattttgcattttgtctacttgtaagtgaatgtaacatactgtcaaccctcgtttgaatatagactgtaacactacacggtgtacatttccagagccttgtgtatatttccaatgaactttttgcaagcacacttgtaaccatatgtgtataattaacaaacctgtgtatgcttatgcctgggcaactattttttgtaactcttgtgtagattgtctctaaacaatgtgtgatctttattttgaaaaaaatacagaactttggaatctgaatttgtactgctctcacttctcaaacctgctcaggcaagccctgctctagcctgcctctgcctctgcctctgctccagcc

SEQ ID NO: 29298 - DNA, 1189 bp, Mus musculus
gtctccctgcccatctctgatatctagcaccaacccaggagcctttaaggtcacttgaatgagtcttgccactgtatggagatcaagacctcaaggaggaggggggcagagcagctttctgatagggagaagactagggaagccttcagagcccaggactcttgtccctgtgtctgcatgtgcagtatggacctgtgtccagccccgtggctcctgcctcgtggtttctgccccgtggctcctgccccgaggctcctgctccatggctcctgccccgtggctccttccctgtggctcctgccccgtggctcctgccccgtggcttgttgaataaacataagccactcagtgttcccagctcggcacccattacgtttgaaaggccgtgggatgtcctcatcagggatgccctttttggtcccatctggagcaggtgaccctttgggtccatcaatagtggggaagctgaggttgaggtagggctacaatgggcttcaggggcctgggattgggttgctggctctgtctttagtcgactgtgggccaggcagggtgacagtagatgtagcaactccagcagggccttgtgaccaggcagctgaatgacttctgacccccttgccactcccatattcctatctactgaggagttaaccttcctcccaaaggctctgggaggtgggcacaggcagtcagtgtggtcatgaagctgctaactgagggagcgcgctgagatggacccagcctggggatggatgtgtgaccactgttccaggctcctgctccttcctgagccgcctgacttagctctgccgctagtctccctccaactctgctttaagcctctccctcaggaaactggtgccctcctctaaaatgtcactgttctcaggaggcagaggcagaggcaggcggatttctgagttcaaggccagcctggtcgacaaagtgagttccaggacagccagggctacacagagaaaccttgtcttgaaaaaacaaacaaacaaaaacccccaaaacaaacaaaaaccaaccaaccaaacaaaaatgtcactgtttccttctctcgaccctccctggccatggcctctcctcacatctcctaactccctcatctcgtcccctccaagcccctcatcttaccccttcttgagttgtgcccgtggcctgggaagggctctgcaag

SEQ ID NO: 29299 - DNA, 3128 bp, Mus musculus
gggcctgggatggagcctggccctgcttctttctgctcaggctgctagcgtaacacagactgtcctaaggagcagaggtgctgccatctgccccagactgtgtccttatgaccccttctttggtcccattccctccagcccggggcttcaggaccttgtgtcccatggacaagaggaaggaagccctgggttgctggttgaaacaggggcaggggcagggttaagatggcccacagtgcttgctgatgtcctcttcttgctccagaggccaccatgctggcttctagaaccaataatacatggtacatctagccctccaattcaaaatcacccagatgctgtggcctcgagctgctgtcccaaggcctctctcttgacaggagggtgccctttgtcaccagcctgagctcatgatggggtcaccgccccctccccctgccaaatgcacaggtccccaggctgcacctcttcctgcattgcctcccagggaaagggcttccttcagtgtacagggcagccagtggtaagtgaggccagtctagcatccctcctgagaggggatgccacatagcctccgtcaaccactactagaatcctaaaatgcattcacacaggagacaaaaacatacccagtcctgaccacccagccagcgagacatcacacagatgcaccaccttcacgcagtgctcagccatcctgatgcttctgctacatcgtaggccactgtcattgtcaccagtggcgaccacaccaccttcctcccaatctattctctttacacacattggtcctgcatctggctcctctaaccatccaggtcactgaggaaggcaggaccgagttgtaggcatcagcccatattgggtcccccagagtcactctattccacttggtccccaccatgacacctataccagccacactgatgctgatcccagctgacgtcagtcacaagcccacacagttaatgcaggctctccctcccccactgtggctcatagagaagtttggggctagcctccaccagccaagtttgaagcaagaagggagctagggcctcccaggaccaaggcgctgtgtgggttgtccctggtctccatgtatctcctttctgctctgagccaggagctgtctctgcctcccaggacacgtgtctccaaagtgcctgtgagggtgggctccgcccaggccctctgtgtcccctgccctgccctggcctggtgaggccaacctcaggcctacctaccctgggtcctttctgtggacacaactgaccaggcaacttggcagttctggctatatccagatgaacccatagcccaccaggctcatcccaatgctataggctctgagaatcattgatggggacaagggtgtcacaggcctcaagtctaccatcctgtctctgttatccttagaagtggggctatttcagaggtatttaaaatgtggggggtcaccattctctttgtgaaagggccatgccgaaggagctctcagcaccaaagggacacagcttgggtagtgactggccggcacccctccaccatctctcacatgtcccaggttcagtcaggtgaccacatggtttctttctgtttcattttaaagaatccctgacagcagagttgggcagactgaagaaccacatctgggtaatggacaggatctaggcagttggcacagcttgtctttctggggtgggggtggagggggtgtccccctgtcaggctctgttctgtcttccagacctccatgactcccttgatgggactttagagttttgtaagccagtcggcctggtctttaagtgggggggaaggaatgagaggcgtcctaaacccatgagatgtggaggagggagcttggccaagatcttccctgcagcaggggctgggtagggcgtagaggagagccagtgtcccagaccctcccactcctccctggtaagctgcagtcttggggactagagctttggaaagagaggctcagcagctgggcgaggcaacctccaggtactcagcccaaggggacaccacgaccagggcaggaggccccagcttctgtgttgggctagggttcacttctcacatctcagggtggctctggccctggggctatgggtttggcatcctgataccagcatccttaatgtgtcagcatctgagagaagaggcagtgggtcttaagtatggggtccgggctccaaggccaacgcctaggcttcatggccatggcgtttgacctgaaggttaatggtgtgagcagcccagataaactgggctagcctggtgaggccaggacgatttaagagaactcagttccaagggtgaactgaattcttcctagtgcaatgtgggtgcggggttcccaccctgccccagaaacagtgcggtacatacagagcctgtccaaaggagtccagagacacctcagtgctcctgggaaggtattcaggacaccggcttgcctggagacacaatgcattctgaatcagaggtggtgatgtgtcctggacttctctgggccctggtttccctagagagtaagacatgctggggccagagcactgaagagctaagcttcatctctcttgggggccagactagggactctatgtgtaaggttgattctccttgattgccagaggcatgtgggtgacagccaggactggctgagcagatctgcagcaagagcttaggatgctggggccagaccccctgggcttggcttagctactcatcaggcctcctggctggggctcgagcttcagagagcagagccaacgctgctctcagggcagttgtggctccctgggctgtcctggctttctcctgggatgtgcctcccagccttggtgtctgtaaatagaagcccacactgtacagatctacagagaggcccaaactgggctctggtgtcaccatctgaggggctgatggcctggcttcccccaggtgccctgtgggtgcttgggtatgcctggccccggcgtggtgaatgcatgtaaatacttcgtagacagtgtggctccagagagccccctgagacagtgtcccccccaccttactggttcatcctctctcctgtacagagccctcccagcccctgggccaccaggatcagg

SEQ ID NO: 29300 - DNA, 2336 bp, Mus musculus
gggcatgggcatcccctgtggggaatggaaagtgaaaccaggtcacacaggcatggacatcattttcatggatgtggggggggggaggctccttgtacctcaggttagaccaatgggttcttgatggtgctcagcaatcctttctgtctctcccaggtggctctgccgtcctacgaggaagccttgtctctgccccctaagactccagagggggaccctgcaccacccccatactcagaagtgtgatccccaccaggcctttagcccttgggctgggagaggcagaacttcctcctcctgcttcttcactttggtggttgctgtggcctgcctgctacaggacaatctgcttgtgccccccctcactgtcctctcctctcggggacccctcactcacaactgagtcaccctgggctcagtgaccctttgcggctcaggatactcagcctagcagcccgtctcgtctccatcagcagtgacacttgttcagagcgcagccataggaagttagggtgcgtttggttaacagctaccggcttgatctgtttggccaggcagcagcaggaagagaatctggccaagcaatagttcctggtgtcagtttatactcagctgtcagacgacaggatgggtcatgattgtggtgcccgtttgccacctccagtaccccaaaagtgtacaaacaaaacaattccttcaaatagcttgcttaaatagcgattcagccaactgctgtcattaggaattatgataaaatctagtaagaaactgaggagaaaaagaaatagaaacggagcccctcccaccactcactgcagtgctcaccatggagcccctcccaccactcattgcagtgctcaccatggagcccctcccaccactcactgcagtgctcaccatggagcccctcccaccactcactgcagtgctcaccatggagcccctcccaccactcactgcagtgctcaccatggagcccctcccaccactcactgcagtgctcaccatggagcccctcccaccactcactgcagtgctcaccatggagcccctcccaccactcactgcagtgctcaccatggagcccctcccaccactcactgcagtgctcaccatggagcccctcccaccactcactgcagtgctcatcatggagcccctcccaccactcactgcagtgctcaccatggagcccctcccaccactcactgcagtgctcaccacggagcccagcctctgcttgagtttctccagcacctggaggctgggaagtccaacagtctcgccgctggcctgaacatcctgttcagcgtgggaaaaaaaatgttgcttctgttttaaataatcccttcccatgagccactgctctgatggcaagctgtccttatcttcagtcaagtgttccctagggccacacagtggtgaggtccctgcaagagtccctttagcctggcagatttagggtctggtgatcacacatcccagcggccaggttgcttcagcttgcttgccctgggctacgctcaggggatggcaggtttggagttggccgccctgggggtggctgtctgtcactatggctgcccagttggggcaggctagcctatggggtgtgaagagttggccagagtcatgtgttctatggtggcagcaaggagggtcagttcatatgcctctgctggcttttctatcgctaggggttgctaggggttgctagggatctacaccctgcctgtggtgtagatggggctgcagggctgaaaagttcccactgtacctgtgtcattgcttgtgtatgacttggaagaagggccaataaagcaactgcaagctttgctctgtctcatgtggttcttgaagggtgatatagggacagaggacctgcctctgtcctccagtattcattactccagcacacatgtgcacatcacgtctgccccaccccccagggcctggccagcttgccagtgtcacctcctgaagctatgtgagcatccccacatctcccagttgacaaggggaaagatggcctccagccagggcctgctctggatcctggggatacacaggctggggctgggagacaggtccataccctgtggacatcagccagtgctgcggggagagtctgtgacctcagggttccgagggtgaaatgtcttagtggggcatctcaccaagaggagcgaaggacaggtcgtgctaagtaacagctggtccagaatacagttgtagaatgtacaggaccaccatggtggggaaggggatgggctcagtgttctgtcagctgagaccagtggaggcaggcaggggcccctgcacagcaggactctgct

SEQ ID NO: 29301 - DNA, 1167 bp, Mus musculus
ttcctgttagagtgccagggaagctgggaacagcccagtctgtctacagatgcctccaggaaaaaagccagcagcttttgtcttctatgtagacttctagttatttccccaagttcagagcattctcttcagcctggattcacagctcagtctgtcacctgtgctacatttggaaactacttctgggctctgcctctaaagtgctcagtgggtctatctcggcctagggtggccatttatttacgcttttcaggcctcccggtgactgatgcctagccattgttgaggagcaatgcctacagatagatggccaggcagtagggattgtccctggtctggcctgaccttcccttctgactcagattcagacaactttgcatgtgggctgaggccagtgaccgatcgagattccctttgtagtcctgtgtaaggtttacagtgcccacagccaccaaagaatcaaatgttcctttcccatcttaatgtctgggcatcactgggcctggtgaccagaagatcatgaaactatccaaaatccaaacagtagttcccagacaggtgtgttgtgtactgtgggccagtgctctgggaggtggggggaaagtatgaaatcaggctgcagagtcttacaggattctggacatttcagaggtggccagagccactgttctctgtgcagacttctagattctgtaccacagaggtctggaaatccagatgtccttttctttcctcctccctagaccctcctgcccctcccccatcctacaatgtgttccctcagaatgctgctctctttagtgatagtatggaaataactctcatttattgtatacctaccaagtagcaagcattgaactaagttctctccagtttcttgggatgctgaagcaggagacttgtttgagcccaggagttaaagattaggctggacaacatactaagaccctcaaaaaagaaggggggccaaggggccgcaggaattcagacccatccctgtattcctgtatgtccttgttcgacggaccaaaatatgagtcccaagaagatgggcaggatcaccaggaaagccagaagaggcccagcaaggctggtgagtgacaaagagctctggtccctaagagtccaagactcggttagctctccaccagcttaggccacttacac

SEQ ID NO: 29302 - DNA, 1164 bp, Mus musculus
tcaagttgacacacaactagccagtacacaatctaagtatagcctgcactcttgacaattgggaaaccctcagaagtgggcggggatggtgactagaagattgtgtatgttgagacacaccgtcagacatgcttgtgatgtaacaaataagaggcatgacacaaaatgacatgcccagtgtttacaaatgcagaacagaactccacaaaatgaacctagaccacaaatgtctattcagtgtgtgttactaccactgcggcgttaggtcgccatctttatccagatccatccctcaccttagctgcacttcccacgtctgctccgctctgcactttgactcagccacactaactagatgagcacacagcctgcagccatgggggaaaggacatggtgggtttgccacttgtgtcacagcttcgcttgcctgctgcattttaacctgtgtttttttctttaggattacatgcgtcaggcaggagaagtgacgtatgcagatgctcacaagggacgcaaaaacgaaggagtgattgaatttgtgtcttactctgatatgaaaagagctttggaaaagctggacggaactgaagtcaacggcagaaaaatcagattagttgaagacaagccaggttctaggcggcgccggtcttactccagaagccggagtcactcaaggtactgttgacatagcatgagttgggcactcacagtaccgcactgctcagcatggacggcccactggtgttctcttgttggcttttatagcatgagttcatgtgcttcagtggctcagaactttgaactgaacagcttgtgaaactcatgaacctcttaagtcacatacacaaacagaagcaaagtcctttgctgagacaggactcagtgaccgctcacctttctctggggagctgagtcataaactaagctagaagcacataaggccagggcacctattcttttttttttaaagatttatttattattatatataagtacactgtagctatcttcaggcacaccagaagagggagtcaggtcttgttacggatggttgtgagccaccatgtggttgctgggatttgaactctggaccttcggaagagcagtcgggtgctcttacctgctgagccatctcaccagccccctagggcacctattcttata

SEQ ID NO: 29303 - DNA, 1152 bp, Mus musculus
caaaatcggcttcaaaaacacgctctcggtccaagtctccatccaggtctgcttccaggtcgccctcccggtctagatccaggtcccactcaaggtcctaactggctctgccacgctggaactgccgagaagtgttttgtacatgttggtagccgtagcacaagagtgaagtagaacacccgtcactgctgtacattaactccctaaaggtgtgtctcagttgttcaatctcagtgcttcctcggtcagcctccaggcgccaggccttcccgctctactgaaagcagctcctcagacctccccttactcacagtaggacacccagacgcctgcctttcaggcctggccacggctatagggagctcggcacccagacggctggcttctcaggctggagtgatggcgtaggtaggtgtgctgagctcagccgtctgcccttgaatcgatgccctttgatgtgtgccacgtagtgaaagtgcaagtcttcagtctcccaccacttcggtttcctgtttctggacttaccaacgttgtgaatagcacagtggagagaaacggatccctgcgtagcccctaggaagtaacactgtaggagctccacattctggtattgtgattatattgttttatattaaaaggaaagattttttttaattttatttttccccgtcttgcaaagtatagtgacccctgtttccattaaatttgaataaagactatttttgcttgacaaaatttcaccgcgcttgaatctaaatggcatttcctggtgtgtcatctgtcctgctgttttccctgtggtgagaagcaatatttcccaaaggaatattcacccagcagaatgaaggcaagtccccaagagtctggggttctggggttctcttgagaagctgtggtcaagctgaggagaagtgaggccatttggaagccgtgtcgcctgtgagttcttcatgagcagagggggttctggtgcctgtcggtcttgtcatgatcctcttgtcaccgtaaaatctgcaccggaaaccaggggtatgccactggaataccatgccccagtcattctcgcactaattgtcatagctcaggaggtgcctgagatggtgctgaggggtggcacgtgtggcaaggtggatcctggcctccttagtgcat

SEQ ID NO: 29304 - DNA, 2237 bp, Mus musculus
gtgcgaatggaacatttttagttgtagtctggggaagaaaagttaatgaggttttaaaaatcaggtcttgtcgtgtggggagcttgctcccccaggggagaggcccctttacctcagtggatcctgttaaggagtgcttccagcctcagcctgggcccctcccacctggcatggtaagggggtaagggacgctcagggaagaggtgcattctccgacctctgcctcaggcctgaggacgcccactgggagctggggcatttccatctcctggtggccatccctggtcagggtgtgagtgagctctgctactccccacccagtgcctgaggagcctgtcaggttttgagagcttgattttatggtgggttttggatttagtttcctttttccttttttaaatattggttttaaaaagggagcctgatgcccccaattggtagtgagaatttggggacctccccaacccccgaccccacaaacagggcctctgtaatcctccagctaacttcctacaaacatctgcctggaagattagtagaatcctaattctaggctggaatgagcttcatgaggcttgacagaggctcactgtcagccgtggctgggggctgaaggggagtaagcaagagcaaagtgggaagccacggcagcctccggcctcccctgctgaatgctctatacaaattcagcacctttgactggttttgagtgtgcattttcttttagtgatactgttaccagtggcagtttgctttacagagggggagcccaggtgggagagaaatgggcttgggttccattctcagaagtgaattgcagactggaactgagccagagaaggctgggctgtaggggttggattagcatgggctcaagctacaccagctctgaagaggaggagcaggaggagcctgcccactgggcatcgtgccatccccatcaggacctcagacctggggtacctgaactctgtccctctgctgccgcctctgtctggaaattggaccagaattctgatgtccctccagcctcctccccctcctctgctggctctggcaacagatcctgggatatggtaattgtttggattttctttctttctgcagttgtgtgtgaagaacaggctctgtccaggtagaaagattgaggggcagggggaggggagtcccatctccagggtcagagacttggcaggactttccccaaagtgactcaggcacaccacagtaacagtcccaactgcagttttatttttacttcagaagtagatttccttcaaaccacatgagatctctgccacccacccacaatcaagccctatattcccaaggaggctgactccgggggcccttccccccaggccagcaatgtattccggggatgtattctggggtctgagggccctggcccattctgagaaatggagctgtagctatggcctagccagcacccccagtgctcgctcatgggaaatatcagccctaggctggttgtttttacaaatctctctcagatatattattttcatgacaaaaatgaaggagctttgtaaattttttaaaaattatgaatcgtatcaagtagttgtttacatttgacaaaataggaactatgccggcagagtccaaccgaaaaccccctaggtgagataggcagtaactgggcctgctgtctgcgcctttcgtagtgacagatgtggctgtagtgtttaggtgtttggtcttgcttcttgtatggcatttttcaataaactttaaaaaaaaaaaaaaaagcctgactgtgaggattgatccacttttaaagttctcttctaacaaaagcatgggaaaattaatttaatacctgggaagggaagctgccgccgccgccgagtgcagtgagctacccacactgggctagggtgcagtgggaaggaagtgctgagaactggagggtgcctctgccagctgggggaggctttgcacacaggtcagaccgacctgtctccaggggagcagtccgatcccagggtcagggctttggcagtagttagccctgccgggacagagccacttgactgaaggaagaacagacctgaggtggtggcagttagagttgcggtcactgccccagacagctgcagagggtctcattccacctcatcgcccaccttcccccggtggtcccatttccaccaggactaccaacttagacggagcctgtcccagcctgggacatcccaacctaccactgttgt

SEQ ID NO: 29305 - DNA, 1114 bp, Mus musculus
tagctcactgcactcggcggcggcggcagcttcccttcccaggtattaaattaattttcccatgcttttgttagaagagaactttaaaagtggatcaatcctcacagtcaggcttttttttttttttttaaagtttattgaaaaatgccatacaagaagcaagaccaaacacctaaacactacagccacatctgtcactacgaaaggcgcagacagcaggcccagttactgcctatctcacctagggggttttcggttggactctgccggcatagttcctattttgtcaaatgtaaacaactacttgatacgattcataatttttaaaaaatttacaaagctccttcatttttgtcatgaaaataatatatctgagagagatttgtaaaaacaaccagcctagggctgatatttcccatgagcgagcactgggggtgctggctaggccatagctacagctccatttctcagaatgggccagggccctcagaccccagaatacatccccggaatacattgctggcctggggggaagggcccccggagtcagcctccttgggaatatagggcttgattgtgggtgggtggcagagatctcatgtggtttgaaggaaatctacttctgaagtaaaaataaaactgcagttgggactgttactgtggtgtgcctgagtcactttggggaaagtcctgccaagtctctgaccctggagatgggactcccctccccctgcccctcaatctttctacctggacagagcctgttcttcacacacaactgcagaaagaaagaaaatccaaacaattaccatatcccaggatctgttgccagagccagcagaggagggggaggaggctggagggacatcagaattctggtccaatttccagacagaggcggcagcagagggacagagttcaggtaccccaggtctgaggtcctgatggggatggcacgatgcccagtgggcaggctcctcctgctcctcctcttcagagctggtgtagcttgagcccatgctaatccaacccctacagcccagccttctctggctcagttccagtctgcaattcacttctgagaatggaacccaagcccatttctctcccacct

SEQ ID NO: 29306 - DNA, 1208 bp, Mus musculus
tcagtccccaggacaggaaaaaaaaagatatataaattttgaagtatttttgtataaatttctcagaagacattaacatgtttctggtttgtttgtttttcagtaaactggtattaaaattcttattttacagctgagcaagctattgttaattgaaatgacacagttgattagctggtaaatagaggagccagcttgttttaactttaattcacagcctgtaaattagagcattcattcttccttataggcaagcctctaagtgcccgactttagaagtggtttgaatttgtgaagaaaatgattcgtaacactattgaataaatagctactgtaaccgccagtgtctataagagattgtatggagtccaggtataggtcatgctctttgatacttattgtgaaaatgatttccacagccacagttgtctctgttgacaggttgagccagtaatttagttgatgaatgctgtggtaaatattatttgggggtttctaccccaccttagatcatttagctctcaaataaaagacacaaagcctttatatttataataatccttaaagcaccagagctgggcagatatcaaccctctgtgccatttggtctacttccctgtccatagctttgagatatcgctggtcatgttccacctgagcctctcctactccaactgactggccctcatggccataagctcaagacacctacacctccggtgacttcctcctctcctctctccctctttctttattagccagtcacagataacttagagggcaagatttatgccataaaagctgatagatgtgaggatctccttgtcttgaggcaattataccttgggatacagaatttagcattataatgcagagcaacagaacaaacctcaatagatcatggtaactggttgtgacccatagcataactcattaaacaccacacaaaaaattatgagagtgagtggggacagaatagaatgtgactgagagagtctgagtaaatgagtgtgcttagttgggtgtggctgtgcatatctgtagtcttagcacttaagtttcgcacactggaggatcacatagtgagacgttgagggtgtgtgtgatgccttggatagagatggagaaagaagggaggtgggattttacttaacattgacgctgtttccaaaatgctgtaatgtgttgcatttataaactgatatatc

SEQ ID NO: 29307 - DNA, 1159 bp, Mus musculus
tgagtacactgtagctatcttcagacacaccagaagagggcatcatactccattgcagatggttgtgagccaccatgtggttgctgggaattgaactcaggacctctggaagaacagctgagccatctttccagccctagatattgttttaagctagtctctcaatatgcatatctttcatgacttaaggcactaataatttattcaggatgggtaggtaaattttttgtgctttaatgtaagatcttctgtttaatggattggaattctgttggtgattaaatccaaatatattagctttttgaggtttaggggtttgcctggagcattgttttgcttataatagttcccttttcttcttccttttaataggaacatcatgacaacagagaagagtttagcggctgaagctgagaattctcagcaccagcaacagaaggaagaaggagagggagccacaaactcaggccaacaagaaactcagctggaggaggcctcccaagcggccgcagctgagggcagcgatcagggtgagcagaagctgaaagcatccaatggggacactccaacacatgaagacttgaccaagaacaaggaacggacatcagaaagcagaggcctgtcacgactgctctcctcattcctcaaaaggcccaagtcgcaggtctctgaagaagaaggcagagaagtagaatcagagaaagagaaaggtgaagggggtcagaaggagatagaacttggaaacagccttgatgaagacatcattttaaaggcccccattgcagctcctgaacctgagctcaaaacagacccatctttggatcttcattcattaagcagtatagagacacaggtaaggcatgtgactaggggagatgataatgaagatgcattatatgctgtgtttttcatagaagaatatttggttctgtttcttatgagccagttgacttaggcattgataaagataaatagcatgaagagtttcttctctaaagaaattaatgttatcagttgaaacctgactttaaaaaatacactttataagtcaaggaaatacaagaaaactatcaaatgactttattcaatccgtatgtcatcttgccacaacagtggaacaaatttgagttttattgagagagcaagagagaagtgaggt

SEQ ID NO: 29308 - DNA, 1178 bp, Mus musculus
agagcctttggaactagagttgtgagcagatggtggtgagccactatatatgtatgctaggaattgaacctgggttccgacaagaacaacaggcattcttaaccactgagccatctctccagtgcctcagtttttctttttcggttttttgagacagggtttctttgtgtagccttgactgtcctggaactagctctgtagaccaggttggcctcaagttcacaaagatctacttgcctctgcctccccagtactggggattaaaggcatgtgccaccaccacccagcaagttggtgggttttaaaggagctatatcaaacacagtgtacataggacagatgaaaaagtagttttaaggattgaagtaaagaactctaatgaaagaaggttttgcgggtcagtgaaatatgttagttttaggtatttaatattttgcttttctttgacttagaaaacagtctatatgttgagtaatgtcttaatcagggtttctattcctgcacaaacatcatgacccagaagcaagttggggaagaaaggatttatttagcttacacttccacattgttgttcatcaccaaaggaagtcaggacaggaactcacacagggcagaaacctggaggcaggagctgatgcaggggccacggagggatgttactttactggtttgcttcctctggcttactcagcttgctttcttatagaactcaggactgccagcccagagatggcaccacccacaatgggcctgggccttcttctcccttaatcactaattgagaaaatgccttacagctggatctcatggaggcatttcctcaagagaggctcctttctctgtgataactccagcttgtgtcaagttgacacacaaaaccagccagtatgcgggacagtggtggcacaagcctttaatcccagcacttgggaggaggcagaggcaggtggatttctgagttcgaggccagcctggtctacagagtgagttccaggacagccagggctacacagagaaaccctgcctcggaaaaccaaaaaaaccaaaacaaagaaacaaacaaaaacccagtacaaataatgttagaatatatgttgatagcttaatattttccaggctaattgttttgtaggctccttcactagatttagcatcaaaactagaagataagtttcctt

SEQ ID NO: 29309 - DNA, 1188 bp, Mus musculus
atttgtttctgccaagtttttttttttttaaaggtttatttatgcatatgagcacgctctcttcatgcacaccagaagagagcatcagatcccattacagatagctagctgtgagccaccttgtggtttcggggaattgaactcagaatctctggaagagcagtcagtgctcctgaccgctgagccactctccagccacctctgccaaactttttattataaaatatatcttcaatattggagttctcagtgtttttgttagttggaatatacaaattttttacatttaattaaaaaaaatgtatgtgcatcggtgtttggcctgcatgtatatttgtggaacttgagttatgagcttggcagttatgagctgccatgtgggttctgggaattgaacgctggtcctttggaagaaagccaatgcattcatccacagagccatctctccaggtttaacaggattctcacaggtcacttggtttagtaatttgcctttaagtggaaaaatatccagagaaaagcaggtttacctgtgttttttcatactttatttaggttggacatgagattattgaaaaaaaaaattttttattttttttcaatttaaaatgttagcaccatagtgacttaagctgtttcttcccggtctccagatcacacagcaattgtctcatggctttgggaacagaccaataggagcaggagccgtaacctctggaatcttgagaggttcaagattgccggatgttggaagcattaagaatcttggatttggtctgttagaaaaaattacaaaaactctgttggcttttttttttttttttttttttttttaaatgttagactcaggatggagatgtagcccaattggtacagcactagtctagtgtgcacagaaccctgcacttgatccctaacaccacataaaacagcatggcagcaacacctgtacacccaggactggggcagtgagagtaggaagttggtcttggttctgtagtgagttgggccagcctgggccacgtgagaccctggggagcaggtgatggtgcttcctgtcgggtgacagtagtctaaaagctagttcagggctgacctcaggcagcagcaaaatcctttctcctgctgactagtgtcacggcgagtgtcataactgcattgcagtgcttactttccggtgttgaaatg

SEQ ID NO: 29310 - DNA, 1639 bp, Mus musculus
ctgcatagactgcagcaacggttgcatctccttatcctaagaggacacgatgacctgcaagaaaattaggactttttttcttaatttcattgacttcagagacaattgcaaacttgcagtttatgtattggaatttcacaaaagacataggacttaactggaaaatggaaaaaaaaaaggaaaaaaagaaaaagaaaaaacctaaacaaaaattccctctaggtagtttaggtaaaaaaatgtcccttttattttggctttggttgtgattcagagcataatgctttggtttttttttttgtttttttttttttttttgtctttttactctatttttcggatttttaagtccgtaagtgcatacaattttctcttaatttttaaaccctttcctcccccattttgacatttgcacttggagaacacttgagttgcgcagattttgggtgtccaccccagaaagtgggaatttgatttttcccttccgaactggaagaaaatttttatgaagaatttttgtctaggaaagtttaataacagtgttacccaaggttgtgtctgtaagggtggctcattttctctgaccctttgttactcaaagtaaagtactaggagtcctaagaaatgttctgttcttgtgtattatactgattaagtcaggattaatttgatttcaaagctaagaacagtgataaaaacttgttttcagaaatgcattttggaagagaaaacattgtaaaacatgtagtgaatgtttcttcagtttcttgttcagccaatgaggaaagggcattgcctttctttttcccattaatcacttctcaataaacgtgagagcctgtcgagcatcactccagtaccacttagtattatttgagtctctgtgtttggggagagattttggagtctaaggagttttgagaggtgacctagtgactcactttagacagtttgtgttaatggccctgcatggtgttgcatgcctgtaatccttgcatttaggagacgggagcaggatggatgaggtcagaggttatcctcaggccagttgggctacatgagaccctgtcaacaaaaaggttgtattggaaggacattgctttgtacccaaggactagaaacctgctgtgacgatattcataatgcctgtttctggttctttatatagagaaaacacagcactgctaaaccattcagcagtatttgtgtgtatggtgccaggtactgtgctaattccataggaacctcaccctgtaaaaagaggtggcacccactatcccagtatgtaagtgtctgatccagtatatggctgatttagacagtatgccccagagatgtaggtcccaaaaatgaaattctagtggaactcacagaggaatttgtttctttccctaaggcttaattaaaaggcttttctgctttagagagtctttactcttaagatgtcctaattctagagggttaaatgttcaaaaactctatactaagagattctggaaataaagcttaatactgtggacagtgttacactggaatgcagggccgtgctcacacagccagactgctaagaaaggcagctcagggatgctgggatatcgctcagtcagccggtgtgccctgcgccatcaaggaaaagcag

SEQ ID NO: 29311 - DNA, 1168 bp, Mus musculus
gaaatcacatcttgaaaaaaaaaaataaatgaagttgtggtttgctttggtcaatcctgaggacaggataaactcggtgagagaaagtcccaatgcaacctccagacgatttcctccagacgatttcctccagacgatttcctccagactatttcctccagacgatttcctccaagcagtcgatcacttagaggcgaggcatattccttccacctagaataatttttccctgggaaatcctagtgtagaggcagcggtgtgattcaaaagcccttgcctagcaggtgcaaggccccagataagaattctagtataatctatagtgtgctaataaacaaccaaggttgccagatgtggtgcatcctacctgtaactcctcctgtacagaccagaggtcagaagagcttgaacttgaggtcagtgtgggttctaaagtgaaatcctgtttcaggtaaacacccagagcccagtttgtccaagggaccccaggggactctttcctcttcaaagcctgttctctgtccctctgttcaggactgaggaggacatcagaaagaactcagaatccgcactctttctgccatcttccctcgccgccaccatggtgcgaatgaatgttctggcggatgctctcaggagcatcaacaacgctgagaagagaggcaaacgccaggtcctcatcaggccatgttctaaagtcatcgttcggttcttaaccgtgatggtgaagcacgggtacattggtgaattcgagatcattgatgatcacagagctgggaagattgttgtgaacctcacaggaaggttgaacaagtgtggcgttataagccctagatttgatgttcaactcaaagacctagagaaatggcagaacaacctgctcccttcacggcagtttggcttcattgtgctgacaacctaggctggcatcatgaaccatgaagaggcaagacgaaaacatacaggagggaaaatcctgggattcctttttaaaatgtaaagcataaataaaaagccttcgtggactgtgaaaaaaaaaaaaaaaagaactcagaatccttgatctacactcctcttctgcatcatcttttcagctcctaaaaagccatagtttgattctcatgctctgccacattagtaacttcctgtcccatctttgtttatttat

SEQ ID NO: 29312 - DNA, 1168 bp, Mus musculus; identical to SEQ ID NO: 29311

SEQ ID NO: 29313 - DNA, 3361 bp, Mus musculus
cccagtggctaccctcagccagggctccagtcctgtgactgtccacacactgccttctggccctcagctcttccgctatgccacggtggtttcctctgccaagagcaactcaccagacacagtgaccatccacccttcctcaagtttggcactgctaagctccacctctatgcaggatgggagttccctgggcaacatggccaccatggtgagccccatggagctggtggccatggagtccggcctgacgtcagcaatccaggctgttgaaagcacctctgaggatgggcagaccatcattgaaatcgaccctgccccagactccgaggctgacgacactgagggcaaagcagtcatcttggagacagggctgaggactgaggagaaagtggtagccgaaatggaagaacaccagcatcaggtccacaatgtggagattgtggtcttggaggactgattggggacagggccaagagctgtgttttggtttggaattttaattatgtttatttttatcattgtcccgctcatttccacatagaactttttttaaaaaaaaaacaaaaacaaacaaaaaaaaaccaaactacaaaatctcgttgtaactgcaaatgttgggttcctcctacttcctcattgacaactggacagaacaagctgcctttccagaagttagaaacagggcacccagggtctgaaccatctttccccaaggaaggtaattgcttttaggggaagtgtcaaaatatccaggaatcctttccagaatagtctgtctgtgtatacacgcatggtctcactcttgtaaagacgcattgaccagaccctggaacacagatctgactccagaagatgaccagctctgctgtggatacagaagcacgcttgcctctgtgtcctggatatgatggcctcagatgctggtgtgcaaaactgaaagaacaggaggttggctctgcttagggtggaaagtagtgtgatcagcagctcatagggggagccctttgacagggaggggccgaggaatggtcttccagaggtgcatctgatgccccttgcgctctctgagggttgggtaccattttcaatttcagaagaggacagagattatagaaagacacaaagcaatcaaaagattgtcacagctgtgcttttgggatagctcaccttgcccccagccttgtcaaagccctcaccctcctcgcccaggactatcagtccattcctttgcagactgtgatgtggtataaattgttctaattcttggactgtggctgtcatggaggtggggctccaaggccatcatttttcgtttcttgactccaggaatggcagagtccctcgtgcagaccagctgctatttttggtggagccctgcacgtaagcatgcaagtgtgtgtgtgtgtgtgtgtatgtgtgtgtgtgtgtgtgtgtgtgtgtgtgtgtacatgtttcgggtttggaaccaaaagcagtcatttccctggtgcttccttttcttttccttccgtctgctggaccccatgctcagtagctttttggcagacagcagtgacaggtgcctgcctgccttcattctctttgccattctcctcttctgataccacagatgtttctgtgagataccgaactcataaaatggcttaggcttggcagggacaactggtaacacctttcctgaggtgtggactagatggctcctgagtgagctgcactttctgggaaagggacattgtatttgacattgtaagaagtatgacaggagtgtcagtaacgtccaggcgtggggcttcttcctaaatgctgtttgtacattcggtactactaggtcactctttctgctgtgatcccatgtcgttgattctcttcagcgtttgggggagagtaagcagtttctggtttctttaattatattgtttactatgttagggaaaatatagagactctcgaggtgactttataggtcaaaaaagcatacagcttaggagctggaggatttattattattattaaaagtaaaattttggcttttgtttaaaaaaaaaaaatagagaaggatgcctgtctaaatctgtcttcctgcctgcaggttttgaaaaccctgtaagcaaccaaaagttgcaccttccatctcttagacggccatgtgtcaccagggaagcaagccctcagggatcactctgaagaccctgaagagtgcggcttctgaactctattcagatttgtttcagctttaaaactggacttttcttttcagactctttagttaggctggggacagaactgaattggtaaagtggtcacctagcgttcatgaaaccctgggctcagtctccagccagaagtaaactgggcatggggccacatatctgatcctaacacttgggaaatagagacgggagacttagaaattcaaggtcatacataccaagttcaagaccaacctgggatatatgaaatagtgtctcaaaaaatttttgtttaggacaagcttttggtgaaagaaggaatttattcctgccttccttacactttgttaatacataggaatttttattacatttatttatctgtgtgtgtgtgtgtgtgtgtgtgtgtgtgtgtgtgtgtgatggtgagcttgctacggtatgtatgtgaagatcagagaacaacctgcaggagtctgttctcgccttccaccatgtgggtcctgggaattgaactcaggttgccaggcttggtggtaagcaccctcatccattgagccatcttgcctgctctaaaagtttcggtcttcagaccaaaactgttacttgaacctagaaagccacatcgcatccctgttgtgtcctttaggtcatttctcttttccagagatgggcagaccaattcaggacacgggaggcaccctagagaatagaggcaggctccttcaggtcctgcctttttgctcttcacagctgttgtgtcattaaaggttgtgtgagcagcatgcttccaaagtcagatttccttcttgagacagagcctgtttacttaaaacagattacatgagctttgctgttttcctggtcttccaattgctgtcattgctagctgcagtggtacttggagagatgagatctctcacagacctggtctagattattttaggtggggtgatacacatgcaagcttctgatgtgtgaataggcagttgcaatgaaattactcctcaggctgacttgatggtagctatcttttctctagccattcattaaataaacatttgtaagtactgtctatgtataagtactaaacgccaactgattgcgtcacctaagccccagtaagtaccatgaagatgcaggttttgtgctagacactgatcttgcagaca

SEQ ID NO: 29314 - DNA, 1290 bp, Mus musculus
tatgaacacagagcgcgtgtcagctttttttaatccctccccatcacctagaatctaggtctttgatgataaatttactccgttctttgcttttacagaccgtctcctgtgtgtccctgtcagagacctgaattcggttcctagcacccatatgttagaacataacgtccaagttggaggctacaagtggcactaaattacacattatcagttttgacaggttggggcaccgtgtaaccctagtaacttagcgaaaggctcctcgaacccaacatcccacctctagctgggagcagctgttttgcaccagcgccgcctacctctccctccgcgtcggccagagcattcccagcaagcactgctctgatttgcatattgactcacggactttcctttactgctatacaaaaaacgacacaacagttctctttgtgaagagctttccctcagcccgagaagaatcgatagtttgccttttagcttcgacaatatacagttgaaagttggttagactttattttcacctttaccgtaagatgggtggaccgacaatgccactgtgcttccgaacgcgctcgagcaaaaagggcttctgtcgtgagtggcacacgcagggcaactcgattgctgtgcgtgcggaatcgacatcaagagatttcggaagcataattttttggtaattgggcagctggtgatcgttggtcccggcgcccttgaatttgttaaattacaggaggaagcttttttagttcattttacaaatactttcttgttaggtagataataccttctaaggttattatctggatcttctaagtctttttatcgctagcaagtctaagtttctggactttggaattagaagttaatgtcgtaggcgggcatggtggtccacgcctttaatcccagagtttgggaggcagacgcaggtggttttctgagttcgaggccatcctgctcttcaatgttagttccaggacagccagggttatacaaagaaaccctgtctcgagaaacaaaacaaacaaaaaaagagtagctgagtgctctgagttgtctctccagccccttagctatttattttcatttaaattatttttgttttattcgcttgtgtgcctgagtttgaatttcccgggattaacagttgaagactagggctggtgagatggctcagcggttaagattgccgactgctcttccaaaggtcctgagttcaaattccagcaaccacatggtggctcacaaccatctgtaacgaaatctgattctctcttctggagtgtctga

SEQ ID NO: 29315 - DNA, 1875 bp, Mus musculus
tgggattgggagggtaggggagggtaggtggggggaggcacacacttagtcccagtactcaggaggcagagttgggcacatctctgtgagtttgaagccagccttgtctagatagtgagttctgggccagccagggctacataatgagacctgacaaaaacaaaaacaaacaaacaaaaaaaaacataccagagggtggcataacaaacccaagagcgtcctgagcagagtaaaggtggtgggtttcaagaacagagattcaggacgtagccccctgggtgctgggtgctgtgcctggggtaagagaatgcaaaggaggggggcataagctccctggttctccagtctcccttgaactcttgggctgggaccttgccagactgctattagtcaaggccaaagttcaccaccatgtcccaggcatctcctggtgtggaaacgcagggctgcagaccccaaagatagctgcttctatttctgtcccttgcaggtcgtgtttttgcctggggcatgggcaccaactaccagctgggcaccgggcaggatgaagatgcctggagtcctgtggaaatgactggcaaacagctggagaaccgtgtggtgttaactgtgtccagtgggggccagcacacggtcttactagttaaggaccaggcacagagctgatgaagtctttgtgggcctggcttctggccccagctcagcttctcaggacaggaaaagagccagctacagattccaaccctgaacagatagcatctcctgtcttttcccatcaccacagcagaatcctttttcttctgtttcgtccgtcctctttctagaacatactggtacttgtaggatgtgtggggatgggaggaggacctcagaaggatctttgcttactttattagacctccccccctcccctttgataccctccttcctgtggtcctagctggcactggctcattacctacaaaacccaaaacggtagcttaagactacgtgcaacatcctgccccggggttttgctgcccagactctgaaaagttgggactctgtgaagccctgcttaccacgagcctctttctgttcctaacagtagtttacaaggacacagatggtttgtattgtcatcggatccagttgtcatggacccatgcctggggagatctggacaaaggcttttcaaggctctgagtgatctaagccaaatatttgactctaaacaggtgtccatgggcaaaaacactgacccacttgaaaaaaaccaactgtcctcccaaagcacaaggcatcccagtatcccttgggtgtcacctgtcccttccccatcagcctttctgccatagaggactggatagccatgctgggctcggctgggcagtcaaggcaaggcagggtattgggaaaggggtgggagttgttttataacggtgctgagggaggagtggaggggcggaggctggtcctaaggaaagtaacagtggctgagaaaatagttttgaattttttttaattgtataatattttggaggggagattaaaatcttgtaacactttaataaacttagagttttgtaaatgggctttgtttttatgcgtgtccatggagttgctttgttgtctttaaaggaacacctgcttatgagcctgcctttgttagggttatggctgatacatccaatccaaagtctggagaaggcaagaggtgtttgagatagttgtgcagtagaagccactgcagttgcttcatggttatgagacggggtagcttgttaagtaggctctcagcatagcccactgacaacctggtcttcctgcctcagcctcgtgagtgctgaaatcaaggcctggctttggagtagaatttttaaatcctaaaccaga

SEQ ID NO: 29316 - DNA, 1189 bp, Mus musculus
tccttgtcagcatcacacttattaaagagttagaatatagggcaaacaaaaaaagctaaagtgaccttaaaactagtactttcttctctatgaaggaaaaagtgcttttgtttgttttttctcttcctgccatgtagtttctgtctatggaacaaagactccttcccactccgtccccatctcctcaaaccttgatattgcttgagtaaaggaagagaaaacaacagttctgtcaagtctgtgagttgtctagatacaaggttgccagagctgctaacctttgcgattacatcctgaccaaggctcagttctcacaagcaaggccggtgctccgcccctgctccgcccctgctccgccctgctccaccctgctccgccccgtttctccttctctgtcccaggtttagagagtactttgcatatgcctgtgctgtctggggtgtggtaaccttttttttagacagggtcttatgtagcctcactatgtagccaaggatcccctgcctccacctcccgagtacagggctcacagatgcacccaccatacctgccggccagcaacggcttctctcagctgttctccctcacgtgccaatcctgagctcccgtctgcttgtgtgtgccatcaagggctctgactctgttcatctcatctgtcttctgaagcaggatatgttagggctgcatctaggcagtggttttgtttttatgtatataaaagttgattatgtgtcttctttctgtaagtggaagcttacagtcctaatgtaaaggacttaaagcctcgctgtcgcatgttaagatgcttccctactgtacagaatcctgtaaaatacataattacgttgtatatcagccttcctaccaatcttaattattaaagtattttagaatatcaaaaaaactgaatttgtgttactttttacttttttagtgctgggcattgagctcaggcctcatgcatgttagacagtcaccctaagccatatccctcacctctggtcttttgttttattcaagaagattaaaacaacttaaaagtgacacccaaaatactgctaacgacttcaaataaaaagaagataaatgataatgttaaatgtagccagaagtgaaactatcatgtttgtttgtttctctgaacaaacaaaaatcacagggctgggatatagcccagtagagcacttgc

SEQ ID NO: 29317 - DNA, 1195 bp, Mus musculus
ttctctgtgtagccctggctgtcctggaatttactctgtagaccaggctggcctcgaactcagggatctgcctgtctctgcctccggagtgtgggatcaaaagcatgcaccaccactgccaggtttattcattgattttgagccagcatctctcactgaatcagagctcactgctcagctagactggctggccaataagctacagtgatctactctactccacccccaagcagggcccttgtgtaagtgtggggatctgaactcagtcctcaggctgtatttgtggcaggcatttctctcgtgtgcccttggtaacatggctcttgtatgaagagttgctacccccactgaggctctcttactctccctaagcatgttaaaagctgctggaaagtgatgtgtaaactgtaagttcattagtgaagttggttgtaagtgtgttcccatttctcggctctctttaaatcctgtctctcattgcataggctcaactggaagccagcctaactctgaagccgagcctggtcctgagcatgcacctaagcagcctctgctgccccccaagagacccttgtcctcttcttgtgaagcaaaggaggttccggctggcagtacagcaaggtccgtctcctccacctctggctctaccaccgtgacatctgctgccaccactgctgccacagacatgacaaagactgttaagtcctttgtgggccccacccccgctcctgcccccgcccccaggactctgcctgctgctcctgccagtgctaacactgctgccaccactacagcccctgccaagcaaccccccatcccaccccctaaaccagctcagagaaacagcaaccccatcattggtaagtcttcacggttgtgctcagggtttggtttggttatggacagttattttattgaatgatttgttctgtgaatgagttttctttttctttttcttttttttttttttttgttttgttttgttttgttttttcaagacaggttttctctgtatagccctggctgtcctggaacgcactctgtacaccaggctggcctcgaactcagaaatccgcctgcctctgtctcccgagtgctgggattaaaggcgtgcgccaccacgcccagctgtgaaagacttttctaactcatctcttggaatattttcaatatagaaaaaagttttagagccagg

SEQ ID NO: 29318 - DNA, 1179 bp, Mus musculus
gagacaagaaccgccacgccctggtgcgcaactgtgtggacatcgccacgtctgagaacctcacggacttcctgatggagatgggcttccgcatggaccatgagtttgtcgccaaaggacacctgtttcggaagggcatcatgaaggttgtggtgtacaagattttccgaatcctggtcccagggaacacggacagcaccgaggccctgtccctctcctatcttgtggaattaagtgttgtcgccccggctgggcaggacatggtctctgatgacatgaggaactttgcagagcagctcaaacctctggttcacctggaaaaaatagaccccaaaaggctgatgtgatgaagaaagtttgtcggccttttaggcctgtccccacctgggaggtgagagacttcgaaagtagcccaggtactgctgccagccgggcccacttccttccagaagatgatggcgagacctggttcctttcaactgtttccttcacttggtaatgtctcttttttcttgcaacagggttttaccatggaattcactacataaactagctaccctggaactcaggaccctgtacttcccgcctaagtgcctgcaaggtccttattaaacctgactgttcatcttcttgataggcttttccaatgaaagacccaggataatatggagatttgttcaagtcctccctccactcaaaaagagggaactggaataaattagcttttcagaggaaaggtcaaaaaacaactcataatattttgctttttttttcttttttctcttcttttcttttcttttttgttttttttttttgttttttgtttgtttgtttgtttgtttgtttgttttgtttttcaatacaagacagggtttctctgtgttgctttggctgccctggaactcactttgtagaccaggctggcctcaaactcagaaatccacctgcctctgcctcccgagtactggaattaaaggcgtgcgataacacgcaagcccggctgtttgtttttttttttttgttttttttttgttttttttagagaaacattttttattcctttatttatttgttgttttcttcatatgttttaaattgtgttgttttgccattgatatacaaggtttacaatggtggtgtgagccagcattgtgtggtaataaagactgaaaagactca

SEQ ID NO: 29319 - DNA, 1132 bp, Mus musculus
ctctttcactgccagccccgccacctccgcctcccttctttttcaatgtgactctccttcctcgctccccccagtggctgagttcaaaatttaaatatggtatccaatcggctttatgagatctgatcaaaacatccaggtcgtcgaagctgaaaaaaaaaaaaaaaaaaaaaaaaacgtatcctagagctgtcctatgacagtcaccttccacggtaccactctagactaggaccccaaagcaacagcagccccgaaccttgcgcgtgcgctcttgcacaccggtgccagaaggcgggcgcgttccttgccctctcggcacccttacttttcggggcggtagcggagaagtttcctgtccctcagcttcctaccggaagtgctgaagggagagtttggcggtttctctggctctgcgctggcggcatttgggggtgcggattgcgggtgtgcacgcgtggatttaattccagctttacaaggatctgtagcgcggacggagacgtgttgctagtgtaagtgcacacgtgtcccggctgcccgcgtgggaggaccgggacagtcactctaacttcatatttcccgcctggctcatttgcagaggcgttctcataaaggcagaaccagttctagttacatcgctcgtgtgccctggggcctttccctgagtctgcatggcctccgcatagagtgaagggtggacaaggtccttaggtctccctcggatcttttcttttgttttttctttgagacagtctcactgtgatgccctaattggccgggatttgctatatagaccagtctagcccgaagctgcagccgtccttctaactctgtccccaagtattgagattacagatgttccccccaacacagccggtttttatttctttatgtttggaaacgaggcctctcagtgtagcccagtgtagttaccatttttgaatatgaatgtcggtttctttcgagccaggtagtgggtgggggagacgagggctgtggggttaaacacccttggtcttattttaaacgagacagtaggtttcggaacaagaggttacatagctgcctcgagattacatagaaaaacgtttataaggttcagaacttgatactagatggctattccgta

SEQ ID NO: 29320 - DNA, 1234 bp, Mus musculus
ctttctgtctcatgtctatccaccacatgctggggatgggcatgtctgtggccccaggcagccatcagggcaagccacattttccttttcctcactggactgaacaggaccgtcgcactgactttggggtctgagctctgtacctggagctggaagaagattcggaaaggccaagggccacatccccttttcttcccctgctcctaaaagcagaggaaggctacagagctaaggctgggccccaggcaccacaaaagctgccttcctggactgggaagcccctggctgcctgtgtgggagaggagtaaggacctccagggactagcactccaggaagtttgccttcccgccttccctccttcctcattctccagtttcatcagccccccaacctgcctcccacccatcaatgtgaaagttggactcacagctggtctgtgtgcccagttcccctagagcctgttctgctgggcagcctgttctttggttacctgagtaggggttcagttcttctgtctcctttgccctcatacccttttctcccatgcctggtggtgtggggcctgggagaggggccaaacatatccaaagaacacactgtctctggagagttggagcccgtggtggtctccctgctgtctgaagagtaaggagtggctgttggtgaactctgtatttgggtcttgaggacctcactgtggagccagagtcaatctgtccctctagatggtattgccacacggaggctggcatcctgacctccttatcccttgggttctgccaagaatgcttgccaaaaacaaacaaacaaaaacaaaaaaacctgagcctttcttaggtgacaccaggctccacccagtaagatgcatataccaaggttctctttccctgggccgcatggctccactccttggacctcacattggagactggggggattggcttacatttcttaagatttgacgctttcctctgggctctctggccaaaccatcagcagcagactgatttttctcgcaagaccttgaaggcccctggggacccttattccacagtcagcctttcctggctgccttccaagggacaccacccccatcccagtgtcccatctgtcccctctcccggatttaaatggatgacttggcagaagcagccaccaccgacaagcactttgcagagcaaacaactgtgaattctgatgtcccttccccttccaccagcagcagtagatggg

SEQ ID NO: 29321 - DNA, 2375 bp, Mus musculus
tctgtgtgtgtgttgcctgcatatatgtatgtatgtatatcccatgagtacctggtacctgtggaggctagtaccctggaaccgcagttacatgtgcttgtgagctgctgtgtgggttctagaaatggagcctgagttctctaggagagaaagtttccagagccaattttccctcccaactcaggaaacttcaatctggaacttatccaaggacagcagttgaagcccctagaactgcagttatagatggttgtaggccatcatgtggatgctgggaactgaaccctgactcccacaagctgcaccccccacctcccaccccaccctgtgcacatatacaagtaaatgtgattaaagtaaagtaaagatctccttgagatgaaagattggattaaatccctcagccactgtttctttatagagagaagactaaagaacagctggctgccctgaggaaacaccatgaagatgagattgaccaccattcgaaggagatagagcgtctgcagaagcaaattgaacgccataagaagaagatccaacaactaaagaataatcattgaatgcgcgcagtcggtccctcacagagtggcccgtatcactccccacgtctgtagacacatggctttgaatgattactatttggtctgtgtgctactaacagataataaacgatcaccaggaaacttgcctgatgccttctactgtctagagcagcagttctcaacctttggcttgagaccccgtttgtgggtagaacgaccctttcacgggagccgcctaaggacatctgaaccatcaaatattgacattctgatcggaaaaacagcagggaaattacagttatgaagtagcaaccaaacctttaaggggttgaagcattaggaaggttgagaaccactaagggacagaaacttctcatccattagaatgaattgagggtttctactaaatagagtacgggggagggtgtgaccctgacctcagtctaatcagaatgtgcagagacagcttgaaacgtaaaccccagtccaatgcctaagcctagctgcggtctggaggaaagagtaaacagagtggtttctaaggctaggaccagaaacaatagcactgtcttactagaaggctggctctttcatatgaactagctattgctctaagcgtgagacaactacaattagaaatcattcccaaagccaggcgtggtggcgcacgcctgtattcccagcactcgggaggcagaggcaggcggatttctgagttcgaggccagcctggtctacagagtgagtttcaggacagccaggactatacgaagaaaccctgtctcaggaaaaaaaaagttggtttttttttttttttcactttccaacaaattcttttttaaaaagatacatagagccaggcagtggtggcacacacctttgatcctagcattcagaaagcagaggcaggcagatttctgttagttcctggctagcctggtcagttagttctaggaaaaaacaaaacaaaacaaaacaaaaaacagtctggccttctgagaccaacagttgacctaactccatagtaaagccattgcttagacatgcatgagggcctggtataatcccagcactaggtatggaaaacgttgccaggaataacacagtaaaacttatgaccctcagtgcagagatctcagggcagacctttcttcccccttgcattggaattgaggaagtcttcccggttgtgtgagtattcaatgtctagatgactcagcgttctactgctgtggactctgtgtgtgtgtgtgtgtgtgtgtgtgtgtgtgtgtgtgtgtgtgtgtgtgtgtgttttacacagttattttaggtatggggaaggtttggagtggtgagtgagtatgtttctgccgcagagatccgaggacaacttaggagaggactccattccctaccatgtgggttctgggggtcaaatccagatcattgccaggcttggtggcaaacacctttaaccattgagccatcctaccagcccttttttggtttctttttccttttttcttttctttcttttctttttgttttctgtttgttttgatttttttgtttcgtttggttttgagacagggtttctttgtgtagccctggctgtcctgtagaccaggctggcctcaaactcagaaatccaccagcttctgcctcacaagtgctgggattaaaggagtatgccaccactgcccggcccttttttttatgatatatatgtttgtttattacatgtaagtacacgtcttcagacacttcagaagagagcttcaggtctcattatggatggttgggagccacaagtggttgctgggatttgaactcaggattttcagaagag

SEQ ID NO: 29322 - DNA, 1223 bp, Mus musculus
gagcagccagaaactaatcttgcttccgtttctcctttggtctgcgtcctaagcccataggggttgttgctcatttatggaataagaacttaaacagagacctggatttcaagtctcagtacccaaaaaaaacaaaacaaaaaaaaacaattatcagggggctggtgagatggctcagcgggtaagggcactgactgctcttccaaaggtcctgagttcaaatcccagcaaccacatggtggcttttaaccacccatagtgagatctgatgctctcttctggtgtgtctgaagtcagctacagtgtacttatgtataataaataaatcttaaaaacaaaacaattatcaggatggcaattctcctgcctcagcctttcaagtgttggaattttaagctatgccaccactcctggcttgggacctatgtcctttaccttatgtattattgttttgttggattgtgtttgagttttctttcctttaattctgtgacggtgttgggatatgtgcacaagtacaggtgcccattgggagttagagattaggtgcccttggaattagaaatacacgtagttctaaactcttgaaatgggtgcttgggggctggagagatggctcagcggttaagagcaccaactgctgttccagaggtcctgagttcaattcccagcaaccacctggtgcctcacaaccatctgtaatggaatccaccagcaacagtgtactcatatacgtaaaataaaatttaaaaaaagaaaagaaaagaaacgggtactgggaaccaacctgaggtcctatgctggagagatggctcagggcctaatagcaatgactgctcttccagaggaaccaggttctattgctagtgctctcacagtgtctaacagctgtccatagctccagttctacggcatctcaaactcccttctggcctacatgggcaatacatgcatgtatcctgtgcctttaatcccagtgttctagagacagaggcagaagaagcaggcagagctcttgagtctgagaccagactggtctacatattgagttccatgaaagccatacataaaaagatgcagccaaaacatacatgtaaaatgtaaaaaatgtaaaaaaaaaaaaaaaaaaaaaaaaaagctgatcacggtgttgcacacctttatttaaacatgcctgtatgtgcatgtgcacttttgtgtgtgtgtatgcatgcttgggccaa

SEQ ID NO: 29323 - DNA, 1342 bp, Mus musculus
gtgttgtcttcacccatctcatcctcttccaagatgctttgagaggatgctgggaaacttccctgggtccttagagaagggagaaggctcggctcggctctctctgctcttggactgtcccagagggctcatcaggattggtatgggaggacgttggtggcaggacaggctcggtccctttgctcattaatgaccttaccttgatccttaatgactcttaatgacctttctttcaggaaagtcgggatggtcgagtggacagttggcgaaatttccaggcaaatacaaaggggaagaaggagaagaagaatcggaccttcctgcggccaccgaaagtcaagatggagcagcgggagtgagcagcaggaccagagcctccccgctgctcctcctgcttcacggactcattctctctccacctccaccccaccagagagtagcgattgctttttagtctattttgttgtcaatacaatttaatatcaatcagagtaatcctttgtacattgagaggaggggcttggtttcaccatccccgtcctttccccacggatccaccaggattgaaggagcttcggacccatgccgccttcttttcccacgcctctaacttaatgttttatatttgaattgtgtggctcaagggtcatgtatagtttgtggaatttttccaattaaatgtcttgcttacagtggtgttgccccgactccagatcagcctgggccaccttgggaagccatccttgaggcccttgctccaataggagaggtattgtggattcacacggcagtcacttgttgccctcatgccctgtggtgtttggcacgaggctcccagccacttaaacctgttcactttccaaagaattcatcttccagccagtcccgttgtgtccttgcttgtctgcatttattagtggtaatattcttttacgtataataaatttttatacccaagcctttgatggtctcctcctcgggtgtgactccaaggacaggcaagtgtcttgcagctggacgcacatagctccctacactaatttgttaaaccttagcttgtctacctacaaaatgggaacacagggccggggacatactctgatggaatgcttgctagcatgtgtgaagttctaggttcagtactcacaaagcaaagtacaggaatatcaagtatggcagaggccgaaggctgtgtaggagcccccgggttccatcctaacagcattatcaacaatttggaaacattgatttcactgtaggaaatcaccacagatctaatgcggccaccaacgccatgggtgttgtcaatgtcttatctgttaagtaagaggctgcacactga

SEQ ID NO: 29324 - DNA, 1198 bp, Mus musculus
attttttttttttagaacttactttcaaagatgagagcggtggctgggcatggaggcacaagccctaggctgaaggaggagggtccccagttcgagatcagcctgatctgactttgttttggggagggcgggagtacttttcacgaaggcggcggcaatttagcagcaccagcatcctcggaaagtcatctcgtgcgtaagatccagggagtcaatcacgcaactgggtctgcgaggtgggcgggacctaagccttgccccgccccgagacgattgactggtcctctgggttctgtcggaacggggtgtggattgttaggcggtcccgcatctacttccggtggctagggatgcgcatccgggtcacgctaacgccgcggtttccgccactctgttggttccagagtgggtccgtaatcgtcccatgtcgtgctgggcagtgtctgcagccgtctggtgagtccccgccgccgccagggtgtgagcgcggtggctcgggtgcagcgttcggggtcccggctgaagaggtcctccttggtcgtgctgggtagggggtcccgtcaccgtccccctcgtccctgcctgccggtctgccctcgagcttttcccgggcgtcgctctggcctcgccccttctcgcctaggcgccgggtctctgcctcccccttctctcagcacttcttcccgatccactgtttttccacccggagcgttggggttcggctctgtcccccagccctcctcgcctgtgacccttcccccctccagggactggtagatgacaagagtgttgcgcctgccctttcagagcgagagggcttcctccgagtccagatcctggccgactgctccagcttggaggcgcgaggttagacttgaggtcgcttccccagttagagaacaacaaaggcgtccccaggtcctcgcactgcctcagtttgctgggctctctgggcagcagcgaacaggtggcggactcgctggcgggcttgtgagatctcctgaattgacaggtcttcgtcctgtctgttttgagtcctctgtcccacgagaatggatgtgcacagctgaggcaaaagtgcggatgttcttcactctgcatggatttaaagttagaggactccgggtttctaaacttttaaacgactgtgatgtggtgtggtgttgctgttttctgccaagattcaccaatgtaatat

SEQ ID NO: 29325 - DNA, 1141 bp, Mus musculus
tagacggttaccaagagcctcaaggtgtctggtggaggggtgtaagctgcgctgactatccttgcttcttttccagcacaacatgcccttctggaggatcacaaaccacggagatctggtgtccctgcaccaggctttagagcttgacttcctctgagaactggaatgtggacccttccttccttgtgagcttctctttacctccaacaggagccagaagccagaaccctctgagccccttctctcctgtctgtctctcgggtctcagtgccccctcccccttctcttctgctctttctccctccatgaaatgctggcgagaacacaatcagaaccaacaactgcagttattctgagtgagctgcagcccatgtcccctgtacagcaagaggtggctggatagagctgcagaccggctgccgctaccgtgctttaatttttctgtttcaattgaaaaaggaagaacaagaaaagccgatgcttggggcacagttgtactcttgctgcatgacggactgaccgggagctgctcctgatgtggatggaaactgtccccttgagatcgtcttctggtctcttagctatagaatgtctctcccagtgaatgggtatgttatttttataggtgagggtctggtctctacagcagcctcccccacttttctatgaagaaagccgtgtgtaaagtttccgtgacagtagtaatggaaatatctaaaatacctccgtgactggacaggacagaggctccagtgctctgctccctggggaggctccttgccatctacaaggccctggtcacttactttagactgtggcatctcccatcttgtaagcctcggtctccttggcagtcctccttcatctgtaactaaatggcacaaccctggaaactccttcccatagacaataaatctaagcctttagcttgtacttcagaagttctgtcccaggaggctcagcctccagactggagagaagggctcagatttcttaggactttcacctcgtgctcctgcagagcagtacctgttcccagcagatgcttcctctgtggtcggctcagtcgtcagatgctggcctcacgtcctgtcctcacagctacctgtctctgtgcagctctggccagcccctacccact

SEQ ID NO: 29326 - DNA, 1113 bp, Mus musculus
agggtagacagaggagtgcattggtctctccagggactgctgcctttgtgctgactccctccctccctccctccctccctccctcccacccacccacagaggcttgggaaggaaaatgagcaggcagcatcaagagctgctagtaagagaaagacagcttggtggtaatagcacccgcagcttgtgcagaggtccaaggtttgagcacccacaaggctattcacaacctctagctgcagctccagggggttcgttgccctcttctggcctcttcaggcaccaagcacttatatacgtgtaagaaacactcataaaatagaaattccttttaatattaaaagctgttggaagttagaaggcagtccttactgaaggaacaccttgaagaaattagctggtgaatcttttccctgctggatcctgtgttctggaagattagtcaggacatctcatggtgacagctagttctaggagtgtgtggggtggcaggaatgtcctgggatacaaggtggcttgactttcgaatgtaaaagtgactgtgccttagcatcaccctgtccagtgcccctggggcagccggtgatgtccgcgagagtggatacctgctccacattttaggtgcctacttgggcttttgatttgggggtgttctcttctctgctagtcgggtgacagctagtgtcccaagagacttggcacagcttgtccgtgttcacccaagctcaaccttcacagctccaagtagaatctgactggcaagctgcagcagcaagctcatggcgcttccatagacactgctttgaatgggagtcacacaactgacaggagcaccaggcagagctcggtgctgtcctggaagagtgcaggctagccgccaagtgccaagcttgggcctcattcctcactctccccaggtagctgaggcccttgagtaagcgtgtgctcccggctgctcactggtcaagcagctagaactacccagacacacccattgtagatgccaggttggcgttctgagcttcccaaacatctaaaccacgagggggagaaccccgcttgtgtcccagcctcatctgcgggccgcttgccctccctctaccctgagtcaattct

SEQ ID NO: 29327 - DNA, 1464 bp, Mus musculus
attctggggcctgaatccagggaagggagctgtaagacccctgtgcacatctcatgtgcgagctgactgtagcttcaggatcttacgtcaacttagattggcatctaagtgaagccttgttttattttggaatttgagtccgggatccaaggcagccctggtagctctggtctgcatggataacctcaacccttgggttgtatcgacatttctctacgagagacttccatgaacaaagtgactgaggaattcacagctaagagaagtacacaaacaagtgatgtttgctcatttagctatgttcaaaaggcgctggttttaatgtggggatccccccccctttttttttcctttcaggcaagcagtggattttctgtgcaacgagggccacatttactctactgtggacgacgatcactttaagtctacagatgcagagtgactggagtttcctgggtgcctggaatctgtccagctgggcctgtgttcctctgtcggccccagctctgcgggctttggccagaggcttctaggacagaactttgctgtagaaggtctcactcagctgaagtccttttggaacttagtgctctctgttttgttgcttgttgtttagaggttcagagggagatagacagttgagaaggaagtaaaccaggactggatttcttgtaagaaattccaataagctagtcaggactccaggatgggtggtcggaattgaaagaggaacactgccaagatgtcagggcagggcttcagcttgcttgagagcgactgttctccaaggcttcgtgttgaggacaagcactgctagggccaagggccaaagaagaacctaccaccctctgccagtttgcgctgccctctgggtctgcggggttactttcggaattgcactttccttcccttgtcttgcccgccgtgggaaggaggtttaagtgagcctgaggttctgacctggaggcctcgtgcggctgagagaaagaaatgttattgcgtggtctgtaatataagtgttcatatgtttgataaaacagttcgattgtaatagcttctgaaatgttggttttatttttagcgcttacttactgtgtgagtgtggaagtcagaggacagcttggtggagtctgctttctctttgtacagtgtacagagtcaccttctatcgtgtattccaggggttcaactctggtcatcaggcttattggggggttgtgggtgtgcatagcatgtgccatggccaccgcagattgtgactagaccttgagctggggctacagctcacagtagtaaagcacttgcctgccatccacaaaactgtcgcccctggccgtgctgatttgtgcctttaatgttggtgctgactgtgatcttgagctgtctgcggtgagacttcacaacagctgtccttgaaggagaagaaaaatgctcacagatgtcaaaggtcttgaatggaaacta

SEQ ID NO: 29328 - DNA, 1326 bp, Mus musculus
gactcctgttgtgccatcagcagtggccataaatcccacaccaaaccctgcagtctataaccctgaggctgtgaatgaacccaagaagaagaaatacgcgaaggaggcttggccgggcaagaagcccacaccttccttactgatttgatattttggttatggagagggtggggaggggggtggagggatgacaaggggagctactgaactagggagaaaactttccatgtgtgcagtatcgtctttcagaaagtctcctgaggtcccaaccatgtaatactgagaccaggggtggggctaaagtaccagtaaggactgagtcaggcagcttgaagtgtagagagaggcttcccagtcccttctgagccgactgtcctggcgatgtccctgtgccacctattaggactgttttatgtgaagtcgctcatgggaggcatctggagcaatgagagggtagagcctcattagttaatattcccttccctcgggagacccaagtaacagagcggttgcatggataccaggttggttgacactgttcatttaaaccacagtaaacgagtgtcctcttgtgcctgtggttttgagatctaataggccattctgtgtcatgtctggtggcatgaggccattttgagttcccctcatctgtagccagtgtcacaggacaggctaatgggtttgtacagtattgttggactttacctatgtttcttgtccacactgaaaactcatttagttcgagtgcagcctcctccctgtggcctcactgttggtgtgtgccctgaggcagttcctggtgaacaggaagactatactgcaaggaccaggtgtgtgttaggagaacacctcagttttggtttggaggctcctctcccctgacccccccctcaccccccatgagagttcttcagatctccagaatagacctggctaacaggagacaaggtaggaaccattgtacgagctttgtacagatttgtacatttgtgtaataggccttttctgctttaagtgtagctttttacctgtaacctttattacattgtaaattaaatgtaacttttgtcaattgggtatggtcttgagtcttactgccggaggacacttgtcagacccaggacagttgtcctgagaattggtgccctgcccctgttaattaccacaaataaaatcagcccctaaagaatacaaaaattatcattagcgattctaatccccgtcctgagaccccaaggttagtgtttgaggaggttgccccttctgaggtgtgcgagacattaaggctggtgtgtcctggagtctgattcactgtgcagagacaca

SEQ ID NO: 29329 - DNA, 2595 bp, Mus musculus
aaaaatctcgcaagaagatgtgtatcctcgtgcttgtcctgtcagtgattgttacagtcttggtagttgttatctgggttgcttctaaatgaagtgcttgcctcagagcctcctcctgctgagttgttttcaagggcaagtgcttgagagagtcttgccagaacagactgaccacagaagagagtgtaccagagtgtcctgtgataatttagctagaatctaactactaactagtccttggaattagtgaccatggagacagtatttatcagtttatgcatacattctattcatttgtcaaataacgaattaccttattcctttgtattttcctttctcttgtattttgattgcccttattgcaagtgtttattgacagttccatcgtggatattctttttgacaggtgacactacatcataaatttgtctttttgtatatacgcaaactttacctttttatgagtatctgagataaatttccatctggagccagcctattagagtctgagaaactgtacaatatgccagcaatttttattatttaacattttgattttgtttctgaggggtctgttttctgttttgtaagattttggcactatatataactggggattaagaacattgcacccgtgacttcagacaaaatgagaagaacctggcagagccggcccactgccaggttgtgtgggacagtctgggtctgaggtgaattgcctttattgtctgctggtgtttacagagtccatcctcgaacactaagccatcccactcctgtttagagaggatcggttcattaccatgcttacaatcagtcgggtctctcccacctgtctgcatagaacggaagaattaggcacagcccgattttggatagtaaatgtggatcgtttggcatgattccatctcgttcacctgtggctttcattctggtgaatgataaatgttgctgtcaaaggctaatcctgacccttgtaagtaagggttgcctggctttgatggcaagattttgaaatttagactgaagtggggtttaaaactcagtctgtgaacctattgatatagcaaaacaaaggttcattttgtaaataatactggtttagtgatgttagacttagcctaatttatgaacaagagatcaaactctgtgtagttttagatgaaaacagttttaataaaatgtttctgtcttgtatataaatgttgtctactgccctttttcacaggcctagaacagtcaagagagtgtgtaattggtttaggctctcagataaatgtgaattgaggccagaaatgtcagctcatctttctctgagttagaggatctggctactgtggctgtatttatgtttgtttcttctcttcctcataatgttacttaatcttgttctacactaatgtgaccagcagagaaacaagggcccacatgcataagtttctctgcgcttttgcaccatcccacctacttaataccaataaacatttaaaagcttttgtagttatttttatgagttaacatcctaatgacataggtattaggtactgttctgccatggaaaacacagagctgcaaaaacctggagagcaggtaaggtttggcttgggagtagaaaaggctttgatgccttcctttgaaaagcaggacagagagcagctatggtttgcacacttctaatcctagtacctgagaagacaagacaggcaggttgtgagttcaaggccagactgggatgcatgagagctttgagatcagactctgtttttaagacaaaggtggaaaggaagaaaatctgtctgcacgacacagtggcccacgtggtaacttcagagagaaacccttgttctcagatcatagttggacttggatatgtcatttgtgtcaacaatccaagaaataaaaaacgtgatctgttgtgacaagctattgggacaacaaagtggctgtgattgtataatgacaatgtggtggctgtcacgatggctgtgggaagaggtaggaacttggcctggagttgtagtggtttttgggaagctctaataaacctattcctagaacctgtgttgcacttgattgtctttggaggcactgtggtctgggtcagtggctcttgccttcattttagaaggtttttttttttttttttaagtgctgaagccctggtctccctgctcagagattcaactttttttagtctggtgtatttcctgcataagaattgctccgcatgcatgctgtgtgcagccccagctgagagctttgtttgtaagtcagaaactagactggaatataaaaggactgaggagccctagcccaccagtgacctgccgaggggatttggacaagttgcttagctcataaaccccatgttttctctattgcttgcttccatcctatctatctatctatctatctatcaactatttatctattattataaaatttttaacagatgtctaatctgaacatacaaattgtaaatatgtttctgtattcctatccactttgcatctcctgtttagcttcctgtattgacattgaaaagttctaggagtgctgggtactttttaagaagagaaaaaagggggctggata

SEQ ID NO: 29330 - DNA, 1556 bp, Mus musculus
tgaaaggaactcctggtctgtgccctgttatggctgcatgctgagcggttagggtcccagacctcctcctttcctcctcccactccccgcccccgtggcccccccctctctgttttagtactctgttttccatagtggtcactgctcagtgtcacgtgcagagtgtctgtccaccatcacacctgccatccccgtgagcaagcagtctgtcgtcagctgtacatcactgccgctcccaacctcgaaaactgccacctggagactctgtgcagtgagggaggctttttctcaccaataaaccttttgcttcagggtatactcttgggttttttccaggtatattatgtatgacctttgtacaatgtatagacagagttttatttattttttaaaaaggaaaccttttcttgataaaggaatgatggtagcctagctagttcttgtaaaagtgatgcctctttgaaaaaagaaaaaaaaacaaaaaacaaacccagtcccgtttgctagcttttagtagaagaacgcaaccttttctttctcattgccttagagtcttgatgctgaggtaatgttggaggcgtacgtgtggagctaagtgccttttggaggaccccatggaagagcgtgtgaggagaggcttaaggacggttgctgagtatggccagtctgtctttaagtagggcagaaagatgcttgtccaggttgtactggacacttcctcctctacccacccctcctcctccttctacataattttaaattcccacactgccacttcttttttaaaagtattcctgtttcttgctacatcagctgtcgtaccacgttgttatcacaacctggatctttggttttgttttttaacttgagcagattcaagcgggataagacgtgaactactgagcatttccgagggttggcatgggttgcttgggtgtgggctgcacggtggggaggacctcactgttccttcctttctctccctcatcccgcgtgctccctgttcttaatggaaagtcagaaagcacgcgcttctgggagccgaagggtgtgcccttatccctgtctgactcagtagttgtgggaaggagctgcgcccctccatctttgggaaaggaactagagatggggagtatgtgctgggacacagagcaaaccctgcagtgagtgccagcggtgctggagctagagcggatcctgaaggcagtgacattgggacagtcagggtcactgttcacctgctctgtagtctgggattacgttctccaaagagtcacatgcacacaggtgagcagcggtccgcactcgagtggctcttcccgacaggagattcgaaggactgtgtttttgtaacactggtcgggagtgcaattttcccttctaagcagggaaagctgctgtgctaaatcattttgtaactttccgaatgagagacttcggtaaagataaactcgttcagtatttttcaaatgcatttgcattggctgtggggaaaagatggtaggaaaagaataacagtcatggtttcgtcaatgaaaagtaagactgagaaattg

SEQ ID NO: 29331 - DNA, 1180 bp, Mus musculus
attctttgttgttatttttgttttttgtttttccaagacagggtttctctgtatagccctggctgtcctgaaactcactttgtagaccaggcaggcctcgaactcagaaaatcctgaactcggcctcctgagtgctgggattaaaggcatgtgccaccacctcccggctcttttttttttttttttttttttttaaaggaagttcaataaacaagacagctttaatcttttgccttcgtatcacaagtgatccttctcattatcccacaacagcagacggaccagctggactcttacctagagagctaacgaccaatctagagcttattcatgatatatttgttttaaaatctatgagtagttcatacagattcctactcccacatcaacagcagggaagtgatatgcatatagaggagaaggtccagagagttacatgactcacccaggcctcttgctagcaacagttagtacccagtctgcagctttttactgaattcagactttctgctcctctggtccttttcagactgtctcctttcatttcaggaatgccggattgctcaccctgttgtgaagtgtacctactgtaggaccgagtaccagcaggagaggtacagttctccttgacctcgaaagatgttttttgtttttcttgttcttttgtttatagttgttttgttttgtttttgagatggtagtccaggctagctttctttttttgtttgtttgttttcttttttggtttttgatacagggtttctctgtatagccctggttgtcctggaactcactttgtagaccaggctggcctcgaactcagaaatccccctgcctctgcctctggagtgctaggtttaaaggcagactggctttcattttgagaacagtctttatcttcaacctccctagggctgggattaaaaatgtgaaccaccacatctgcatagagaaatgtaaacagctctgggcgtggtgagtcacttctttaataccagcagttccattggctctgagtgcttaagtgaactgttcttccagaggaccagagttcaatcgaggcactcttaggagattccttgtaagtttacttccaggggaatctgactgctctggtctctgtgggcacctgaagagacaggtacaggacacacgttttaaaaaatagtaaaattaaaaa

SEQ ID NO: 29332 - DNA, 1623 bp, Mus musculus
cagttttgtgtctagtgttatgtggagtggtcatcttgccctgctaccaggtctccctcgccaagatatggggatcttgtcatctctaaccccatagcctatagaagtgggtcagttgcccctgggtgctgaggcccatgaggagttcagtatgtacacatgacagaagaccagaaaggttcaagggcccctaaggatgtgaatgctaggtgaagaactcttgcctctctttccttggcaggttctggtcccggcttctcgcaccctcatgtcagccctggccccgcccggcggcccgaggaggacaaggtcaggatgcgtgtgaagccccagggcctggtggtgacttccagtgccgtgtgcagctctcctgactacctccgagagcccaagtactaccccggcggccccccaaccccccggcccttgcttcccacccggccccctgccagcccacctgacaaggccttttccacccataccttctctgagaacccacgcccaccccctcggcgggaccccagctcccgccgtccaccagtccttgccaagggagacgacctgctacctcctcgggcagcccggcctgtctcccaggcccattgtccctcaccggctccagacaacagctccctccgccactgggacaacgggcgtgtgaacctgcgtccagtagtgcagctgattgacatcatgaaggacttgacaaggctgtcgcaggacctgcagcacagcggtgtgcatctggactgtggagggcttcggctgagccgcccacccgctccgccacccggcgacttgcagtacagcttcttctcttcgcccagcctggccaacagcatccgcagccccgaggagcgtgctaaccctcacaccaagtcagagcggcccagccaccctctctatgaacctgagcccgagcccagggatagtccccagcctggccaaggccatggtcctggagccgcggccacagccactggtctgccccccgagcccgagccagatgggcctgattactctgagctggcagatgccgacatcctcagtgaactggcctccctcacttgccctgaggcccagctcctggaggctcaagcccttgagccgccttcaccacagcctgagccgcagcttctggacccccagccccgcttcctagatccacaggcactagagcctctaggagaaggtttggagctaccacccctgcagccccttgctgatcccctggggctgccgagcctgaccctgcaggccctagataccctacctgattccttggaatcccagctccttgaccctcaggccctggaccccctgcccaagttgctggatgtccccggtcgacgtctagagccccagcaatccttgggccactgccaactggctgagcccttacgcctggacttgtgctcacctcatggtccccctgggcctgagggccaccccaagtacgccttgaggcgcactgataggccaaagatcctgtgtcgcaggcggaaagccggaaggggccggaaggcggactcaggacctgagggtcgcctgcttcctcttcccatgcctacagggctggcagctgccctggccgagcccccaccgctgccaccgccaccacct

SEQ ID NO: 29333 - DNA, 1584 bp, Mus musculus
acgcaaaaggggccgaggggaggtagatgctgtaactgggaaacccaagcgcaagaggcggtcccgaaagaatgggactctgttcccagagcaggtgcccagtggcccaggctttggggaggcaggtgctgagtgggtcggagacaagggtggtggctgggcccctcaccatgggcacccaggagggcaagctggcagaaactgtggtttccaggggaccgaggccagggcttttgcctccactgggctggagagtggggcttcaggccgtggcagctactatgctggtgcgccctcaggccagacggagctcagccaggagcgccagaacctcttcactggctattttcggtccctgcttgattcagatgactcctctgacctcttggactttgccctgtcggcctctcgcccagagtcccggaaggcatcaggaacctatgcagggcctccctccagtgcactgcctgctcagcggggccttgccactttcccaagccggggagccaaggctagcccggtggcagtgggcagcagtggagctggggcagacccctcctttcagcctgtcctgccttcccgtcagacctttccaccagggcgggcaacaagctatgggataaccccagccacttcagactgccgggcagctgagaccttcccaaagctggctcccccaccttcagccgtggcccgctcacctacaacccatccgcccgccaacacctacccacctcagtatggtggctatggggccgggcaaagcgtgtttgcctcggcaaagcccttttcaggccaggactgtgcaaacagcaaggactgcagcttcgcctatggcagcggcaatagcctccctgcctcacccagcagtgcccacagtgctggctacgccccgccacctactgggggtccctgcctaccgcccagcaaggcttccttcttcaacagctctgaggggggccccttctctgggtcagctcccacacccttgcgctgtgacagtcgagccagtaccgtctcacccggtggctacatggtgcccaagggcaccacggcttctgcggcctctgtggcctcctcctcttcctcttcctttcagccctcacctgagaactgtcggcagtttgtgggggcttctcagtggcctttccggcaggggtatggaggcctggactgggcctcagaggcctttagtcagctctacaatcccaattttgactgccatggcagcgaacccaatgtgatcttggacatctcgaactacacgccgcagaaggtaaagcagcagacagccgtgtccgagaccttctccgagtcatcctctgacagcacccagttcagtcagccagtcggtggtggtggcttcaggcgtgccaacagcgaggcctcaagcagtgagggccagtctagcctgtcgagcctggagaagctcatgatggactggaacgaagcttcgtctgctcccggctacaactggaaccagagtgtcctctttcagagtagctcaaagcccggccgtggacgacggaagaaggtggacctgtttgaggcctcccatctgggcttttcaacatccacctcggc

SEQ ID NO: 29334 - DNA, 2031 bp, Mus musculus
gcaccgcaggcagtgggaactgaggtcaagagcaagctccgtcccagggagagctgggaatgtgtgtcctgcctctgctgagtactgtagctgacaggacagttggaaataggtgaaaaggggtgaaaaggagtggaggggaccttcagctcatacaggcatattcttaggtcccctaaatgaaaagcagacccagacagactagctccatactggggcccttaaaccaaataccaactgcagcagaccccaggagtagagatgagatggtggaaagggaccagatacattcaggaatctctaatccttctctcctccctattagctcttggctgtagaagggaggccaagagaaatgtcacaggtcctcccaggttacaccagctggggctggaccggaacaggaggcagtttccaagaccaccagccagccagggtcagcaggcatgcccaggcctggctgttctgggctttgtctctctgagttttgaatccttaagaggtcacttgatcttgcctctggctctgagcaagaggcctcatgtcaggcctcagccggtcttgccctgcttcctccaggcaccaggttttctcctccttctgaggtcaccctccagttctactgtctgctttccctggagccatatttaggctaggccttcttgtttcaggcccccgcttcttggaaataccatctctctatgaacataccttctgctgctgctcctctctctgcaccccacattcctggtaaaagcagacctctaaaactggcaggcagtggctaggagtacgtgtctgtggctacacacaggccgctctgtgcacttggttccagcccttagcaactaggtgatctggtgactcacataacctggtgattcacagcatctctatctcttgtaagaatgaaggggattgacatgtaaagcccttagccctggcctggcccacaagcaagcacctcggcagtggctggtagatgggtggatgaataccttcccacggtctggattctgggtccctaattcaagcagtgtgagtcacacatctccaacccttgtccctgacctttgcttgaccaaagatagccctcctgcatctgttgcctgctgccctatgacaagagccttgtgttctggtatgggcctcaagcatttggaaaccttgaaattcttcttgggcctggagatataggtgattgttggagtgtttgcctattgtgtacacacaaggccctggattccacccccagacctggggatatggatggtagacagggtaatcgcagtgcttttatgttagccactagatcaagtcctcctgggaagaggtaggggtgtagagagaaggtcggccccactcctaggcaccttcagtagttactgggtcagctagatccccgtctatacagtttgcacagtcttctccccaaaatccaagcctctgagaacgttccttataactttatagtatgttatggttttccctggatagctctgtctggttcgtcactgtctgtccatctttggttccacgatgcctgtgctggagaagtagatgcagtctgtgtccagtccacgtgaactagcagcccactctgcactggccagtaaaccatgcccaagacaccatggaccacgaacctaatgcgcttgtttcaaccctacatgaggaccctgtctaggggaggctgggttctccagcaagaaggcggatcctccacaccagcccttgtgagctacatgaggagggagggtagacagcaggaacttccttgaggctggaaatggagcctaacaaatgagagatttcagcagtgagagccctactcagccacctgggtctctggcccacccccaccccagtccattctgcccgtggtggccgccaaagtgcttgctgttcagcatttttagatgcacagtgtctggagcccctaaaatatttattggatgaattgattaaagcacatctgttcttgcagctccatgcttcacaccttttgattgcatccttcctctccagcct

SEQ ID NO: 29335 - DNA, 1123 bp, Mus musculus
agcctggtcctgcggggctacctgcctgggcgggccggcgcagatgccgagcgggctttgcaacaggaagcacgggtcagccttggaaagaaggcggacacccttaggtgggtctgagcaaaagagagacccaggctctgcaatcttgtctttcaacgcgatctcgtcaaaggtcaacacagtggcaccctacccctgcttccagctcctctccaagcctcgtgtgacattggggttggggtacttcgttaccaccacggctagatagaccttctatctttcaggacctgctcctcggccctccagttcagccctaatagggtgaggtgggaactgaagaacactgagccctgagtagtgagcacactagaaagagtcacacctcctgctggatttcagtcccaaagctgccctgactctctacccaaactatattaactgccttgggggtgagagaaggccccgtagagctggggtgccagcagaggctttgcaggtagaggcagtgagaggggagcctgatgggggggggggcagacggttgcctagcaaccccacagctgtctgttgacctagaagaagctgcgctgtcttgacacagctggtgtttacatgtaaccgaggctctggcttagtgcttgcttggagcaaagctgaggcagggccctcgtggcagcctggtcccaaccctgcctgtcgtggatgccgcgtctgcctgccctgtttacacctctcccatctcaaggccacaggagaaagagaagtagaaagcagacctgaggctttgggaagggcaaaggcacacgctcaaacacaaccctaaggccttcatcacagaatagggagagacttaagaaaagcaaaccgcaggcttgaagcgcggctcagcaatgaagagctcttgatgctcttccagtggacaccagaggtacggttcccagcaccacccgcgtggcagctcacaaatgcctgtaatttcagcaccagatttaatgccctattctggccttgatgggcatgtctacatatgacagagagagaaatgcatgtgtagatgcacgtggtataggtatgcacatggtgcacatacgcacaagcaggcaacacacacaatttcaaaata

SEQ ID NO: 29336 - DNA, 1118 bp, Mus musculus
cagagagactgatatacgtctacttggaagcgacataagcctaggtggtgtaaagaaacctttttccctttaccacacagcacactgccatccccccagtccccttgttctcacgtttcctttccctcagtggtattttgctaccataaaagtacttggaagactcatttcacccatggagaggcctgcaagatctggccacatagtaaacctttgtgttgcttcatctgttcagtcatgaaatggctgggctgctgacagcctcgtggggcttccccagagggggaagggaaaaaaaacctggctgccaagaaaggcagcagctgaggcgtctccgacggtgtgactcagtgtttgctcaaatagcctgccgtccattttctaacgccttccatcttccttctctcagtgtcactacaaggaatcaacactcggaaggccttcagaagttctaccacccaagaccagaagctctttgacaggaactctctcccggtgcccgtcttagagacctataacagctgtgacgctcctccccctcttaacaatctcagtccttacaggtaaccgtgcgctcgctctctctctctctctctctctctctctctctctctctctctctgtgtgtgtgattaaaaactgcattgtctaaaatctctaaagataatatctgtatcagagagagaatactgttgaactccctgcccaccccagcagagaccgttagctcattcttgtctggtctctgacggacatgccgcgtctcctatgtactgaaagtttgctgtaccattgatgctgcaaagtttaacttgggaaaagtaagtccatctggattccatccaaggaatttagttattacagaagcaagaggacttgttagcaggcagtcctgcacacggattcccaggggccacattctaaccggctttccactttctcagaaaactctaaattaccagatgtttgggcaagttaatgggaccagcctcatactggctgctggggagggggggatcacagtgtggggagtattggtgtccttccacgtgagtgccggtcccttcattttgaacaccctttggatggtttcttctgtaaggaccagccctggtgta

SEQ ID NO: 29337 - DNA, 2551 bp, Mus musculus
aactgatacacgggtgttattattcaggaaaaaaactgagcagctctggccagcagcaaggtttcttctctactgccccaactattgtgtggcctcttgtgctgaaatctctggcttcagagcctgaaacaaagagaaacaggatctgtctctacccagcacagcaaatggttgtagtaattgccaaagccctcataaacccctccggcttgaggagagtgcaatcatggctctgctgcctgcacttgctgggttcctcccctctgcctcctttcttgaactcagaggtagggactaagcaccaggtgccagcaggccctcctgctgtggccactccagagtgctccgtgtctccatgtgtccgtggcctgccccccccccaaccccccaaatccagtgtctggcaccgggtttggcagtcaactccatgctgtgcatgtttcccaccccgtgccttagaagctgaaggtgctttttcatcagaaccttaacatggctgttgatggtaccctggctgcagcccagcgggggctggagaggcaggggagggcagtggtccttccaaatagaagtcctggggcctggccaggccagggtttgggcctaatggtttttactaaattactcccctcctgctctccgagaaaggggagccagagccgctcactgtggttctgttccgaccttgaaggggcggtattggcctggcttctggaatggacagagtccaccaggaaagactgggggcgggaggagctggggaggggccctgtctgcggaaggtaggattagatcattagctcagtgacctcctagggtttcgatgtgctgtgttctcatcctacagctggtttggtaatgatctgcaagtcccggagagcaacagcacagctccgcctgacgctctcattaaaatccatgcagccaagctctgcgctttgtagcagccggccttgcagagcctcctcagcttggggggctggggacccagtcagctgagaggtcctctaggctctacttaggcatatgtgtacccaaaaaaaaaatttttttttaagcatgcttcttttaaacccagagccctttaaaataataaagaacccagtgcaggtgggtgtgtttgtggaatcccgtaagcgtagaataccaagtttagtgactatttaaactgggctgaggctggtaagactataaagcagtggcccataaggactcttaagcgtgaggccaaggagccacgtcccttcccagtctgcctggcccaggggggctgcccccattcctggagcccaggggcccagcttgcaattgctagtgtcaggagtgacttgtagctttgccttggttgtgaaatgatttcattccaggggagggggcgggggatcccttggaggctcagagcagctggcccaagctgcagctcgtctccagtggaggcttgaatgccctcagaaacgaccctggccaatgtcaccgcagagccgaggcggtgttgtcagggctaatgtgaaatctcttcccgtggcgccgatcctctgactctatagcgccagcttggacagattgaggtctctgtggctttggtgaccctgcttaagcattcccaccgtgtccctgttctgcgctagcactgcctcctgctgcagcccctgacttgacctcagggcctggggagggaagcaccataccagggccaggagctccaactccgacgtgtcagcctctgggggaggggggattaagccttgagcttggctggtgcccattggacctgggaccaggtgttacccagagaggtgcctctgctgtgcttcctgcctccatcactttcctagggcctccgtgagggctgagaacagctctgctctgctcctgtattattaacttgcttcagttaactgacttgagaaactaaccaatttttaccttctgcctagaatgatgtacacataggagagaaagctatcatgttcccgaagtgccttgttttctctgatagaaatatatttataaggacctattccaataggctcttggtgtttcccatatcaagatttctgctagctaatgcatagagggaatactgtctaaaaatagaccctttcttcccaaaggttgggaggtgggacctgagcagtggagtgaagccacaccccacaattttttatttatttttttatttttagatagggtttcaggtagatctgcaggccttgaccttactatatagttgaagatggccttgacctcctgacccctgcctcagccatgcctggctaggacagccaaattgttgttgtttcaagtctggtttcatttgcttccctgccgggtttattgtgtgtaccccatttgtactcccaataacctgaagattccatgtaactcttatgtacgcgcatgaatactttaaatgccaaccttttcaatcatttgataaagtctttgtagtcactcagtcacctttggtgtctgtgtgtgtgtgtgtgtgtgtgtgtgtgtgtgtgtgtttcgtgggagaaggtaagcaactctgcaggccacaggtggg

SEQ ID NO: 29338 - DNA, 1208 bp, Mus musculus
caggaggccctaggaacctaaattctgtcagcgttggggaaggaggagttctgggccataaccctgctcacttgaccctgtgttcttctcccctgtcagtgttggagcctttgtgaagacctggctgccctttgtccttctcctcggcattatcctgaccgtcagtctcgtcttcaatctgcggtgatagctttcagatggtctaagcctcaaggaggctcctgacactcaccccttttggtcccaattcttttattccccacccctcaggcagtgttgcctcctgggttgaagtagggtcaggacttgggacagaagtgccgatactgagcacctgatgaggtcacttagagcctccttgtcctttctccctgggcctgagacctcacccttgtggcattcccagtgccatcctgggaaggccttccttcccttagagcatttcctgccaccatcactgggctactcttcccatgcccagggcacagtgaggacaagaacccacgggcaaagcagtgttcagagctggatttgaagctgtttgctggctggtggttgtgtcccaaagtagggcatgtgttatgagaagtgctgcacgccaagagacttggaaccttctctgctggcctcgaatggaccgggagggctggctatgttctttctgccacaccagcacagtgtgtgcctcatcaccgctaatgtgggccctggctagcaagggctgagggcacttacgtgcagagtgggtcctctgtaaattaggtaacgtgaatcccacttgtttccagcccaggaggcctcgtgctggggatagaaccctttaggtccaaaatgtgaataacttgtcagagcagctggtacccctgatcggctgggtctgcttccggttgctacaatgggccctatgcagcctccccctggtctgcaggctcctttataaggggctccctggcaggaaataaagttttaagtctaagtggtgtctgtcattttcttctgtgtgccctgattccttaagctcatatatccctggggactcggagcaaagagatctggctgctgacaccatgcctgagtctttccagctggagcttatgggtacatcaacagtacttgtaaattctgccactgcacgggctgtgggaagtccctgccactcctggtctatgttccaaactcccttccagaaggactctcatcttccctac

SEQ ID NO: 29339 - DNA, 2831 bp, Mus musculus
ggggtgcgtagactttggagttgattgctttgcaatcttgggcacagagcacttaggccagtgtggcctcctctgctctcaatgccaatgggcaggtaagccttccagagacagctagcagactgaagtccacatggtgggtctcaataaatccaggaccggtttgctgtaacttttataaagaggacccctttccctgggggagaaagtgtaaagggatgttagaggtgggggacagcccagcccaggtgaggcaccccctggcttgtattcctgcagccacgcttctccccatgtgcctaaccttagataccccagtgtgctcttcttacatggcctcatatattatatcccagtgtgtgcctccctccttagcccctatgcatatgccacagcacttgtgcctccctcatgcctgtccctccaccctggtccctccaccctgagctcactagacctgccttttcttgacagagtgaagacctcacaggccgagttgtggaagatatggagggtgcatctcaggccaaccagcggcgcatgaatgccaaccccctggaggcgatgctgctggacatgggctatcggatcacaggcctgagcagcgggggcgccggggcctctgatgacgaggacagcgcagagggccaggtgcagtgccggcccagctagaccctcctggccccagtacccagccctgtgcaggagatcagagggctgggctctgttttggtttgtctttcccacccccatttttcattctccccccccccctgttttgtttgttagtttgactttgtgggtggggattgctgcaacttgctggctttctgactctcgggctgattgtcccttgactgtccccagccccagcagaaaagtaggaggggaagcccctccgtatgcccttacctcctgcttcggtgtctctggaaggctctggcccttctcaaaatccttcagcctccagtggagaggcaagagctgaagctgtctttacggactgcccagcccctccgcgggcaacagaaagggagtggaactccctgctggccgaggcttgcctggcctgttgttgccactctcctgactcccgggctagctcccctgtggtctttccggaaggtccctccacagccaccagtgttcgggtggaagcataggaaacaggatcccgcagtggcaaggtcaggccacctgcctgggggcagtggagcttcctcccccgctcctggcctgtcctaggctgtctcgctgtctctgagggccttgcctttcctacagtgtgacggggtggggtccctccctccccacccacctgcccattcgagtccttacgcgccatggccgctctcctggggcgcttctcggcctcactgtgacctttctgccagagctccccgccaggcctaccctgctgaggtggctcttcctaaggaccctttgcaccctctccgccctccttcccacccacatgctgagccgccacaaagaccaaagaagtgatggcttttctctgtcccctgctgctctggggggaggggttgggaaagtccttagctcagccatcccccctcagcagccccgagctttacactggacacagcggccactccaccaccaagcctccctctccctctggccccttggttcctgctctggagccgggagttggttcatgccagcctcccccagccctgtgtgcttcctctgggcggcagccctccagctgcagcctctggggagaagcagcctcccttccctccctccctccatccctccctctctctcctgtcctctctccctccctcacccctgtctctgccaggtgcctcctctcagtctagcttctgagcagccctggagactggagggccatgttaaaagctttttcacagttttaaggagacgaggggggtgaggctagtggtggggggtctggcaccatctcattgctttaatctcagcgacacaggtggcagcttctcccccttcctgcccaccccaggtcctcttcccaccctctctcctagcttggtaatgaagtgtatttattggtgaaggaaacagctgctctgctgcttctcctgctgctgggacttgctcccctgtctcttcctcatgacctttctcaagccagggaggggtagcgagagtgttgagctgggccctggggcacaagaactagccagggtccctttgctttcctgtgttcaagccacctgccatcccccctgtccatcctcctgtctcccgcccgcctgcctagcctggaccctgcagtgtggagagacacataagccttactgtcctctggggcaggagccgagccttttgttgctctgctcccaggagagtgagggtgacacaattgattaaaaccattttgttctagctgtgactggtggcatttgttggggccctccccaccatggctctgtgacatggagcaaccacacctctgctgagcagagtgagacctgccttgcatgggtcgttcaacccagcaggcctggtacaaagcccacggccggccgatagctgtgattggacatcatcagcttttactctcgggctttctccccttggaaatgaaggatttcaaatcttggtagttttcagattctttaaactggaacccaaggcaggtgcacatcccgtcctatgatccacggtgtgcacggttcttatgtattacaagaagcgaatgttttgcacagtcgtgttcacccttccctgcaggtacctttctactgtactacagacaaaagtatgtctgtagcctactacctgggggttagttttagttttagttttgctttgggctttgt

SEQ ID NO: 29340 - DNA, 1192 bp, Mus musculus
agccctccgctgggcctcctctgagtgctttaccataagcttatatggtgctgagggcagaacctagggcttcatggatgccagcactttactgcctacagttgacagtcttttcatccctgtgcacagaggttaggtcttgatcccagagagcaaacccagccgtggctgttaggccttagaattacatgtgggtctggagaggaaagagcccctaatgcgtggggtcattgaagaaagttgtttttatttgcttttttaaggcagggtttcactctgtagaccaggctgctctcaaactcatagacatccacctgcctctgcctcctgaatgctaggattaaaggcatgtgccaccatgtctggcctgaacagcctctggagaagtgtcagagggagggggtctctggggggtgtcaggcagggagtttgaaccacgaagaggtgagaacctggttcccattgaccatcaacctggatggagatttgggaagtctgatgccaggggctttagccctcagatttaaccatagtttaatctggaaaaaaagtttcctggtataatacaatccctggtgtacatggacattgtaattacattgaaactcgacttggggtacatgccatttcttccaagaggatgggttggttctcggctacctacactagcttaagggcctaagcagtgctctgacctggtcttagtcatacaaatagcatagggcttttttaggctattagccacctctggtcctggttgcggggccttggggaggccctggctgtgagggtcatttagactactagccacctcttgtcctgattgtagtagcttaacatgacctggcccaacagataacacaagatgaaagaacaggttttacatctttgcttggaaggacaatcctgcatgcttatcattcgttgtttctttggagatctgtgggtgcagagccttggtgccccactcccagaagcagggtttttgcactgaggtgacctgtcgctgggcacattggatctgaagtgacctgtgaggaaagggcttgtcagccctgccgttgtatatttatttatatctgtgggcccacgagtgtgcggctgtctccttaagagcagtgactctacctgaaaccagagccacctcagggagctctgagcctcatcaccctgagttctgcctcactccctc

SEQ ID NO: 29341 - DNA, 1211 bp, Mus musculus
atatttttaaattaaaaaaatttattaaggctggtgagatggctcagtaggtagagcaagcctagtcacctgggttggagtcctgagacccgaataaaggcaggaggagaaaagggacgaccaatcccacagagaagtctctgtctccatagagacaataggagtagtaataatacttcaaaactctttgctggtttattatgaaggatttttcaaaggacacaatatgaatactcccttgttgagtctttgtctgtagtgctgatgtggctgtggcagagtctagctgaggcctcagtgctaaaatgacttgacggttcagatggtttgccacaggtctgtggaggaatcgtgactccttcaagtgcttgctcggtgctccccatagttgtatgtcacagtgttccccatctttccccattcaggggttcttcagtgcagcggagcagggccaaccccccatgctagaagtcgccgagtgggctggtgggctgccttttgaaggcacctggtccatttctcgaggcttgatggatgttttgtttccctcctaggtaattaaatgcttgtcttgtggacctgggcttggctggaatgtgcaagggtcttgaggatccttgcgtagcttccctgtgttgaactattaagagaagatggcaaaagtcaacataactagagacctcattcgtaggcaagtcaaggtaaggggccttccttcctcccgccactccattgcttttctcctgttaggaatcatcatggaagtgtccctgttttcctatggtcttgggtgacccctgcggaagggttgttccccccacagagggatcatgaccacagagtgagaacagcagccctacaagattcacttaaagatgaaaaaaggccaaaaacttgtaacagcctgccagctgtagagttggtgacttacctcgtcttagagcttgctggtagcatactgggaatgagttcaaggtcatctgcccctccgacttcatggaggctcccgtctctactagtgcctccatcgctaagattactgtaggctggtgagccatcggtgtagagaaggagtcaatgcgaggggagcacacaggagcataggtgatagcctcttcacggcctcagctggagagtccagcatgggagccgcagaggctgagagtttaaagcaaggcatgtgtgcctccggtaagaacctcacgctagac

SEQ ID NO: 29342 - DNA, 1186 bp, Mus musculus
tagactagaaaccaggttgcccagagaggaggggaagggaagttcccagctcctaggtggcaggctagctgttaatggaaagtgacactcatgcatggtgtcggcatctgagtgccactgtgggcacagccttctttgctctgcaagggcatctgcgctgggctgggtggggtgtatctgggaggatctgcgtctgtctggtctgccctctgtgtgtgagtaaaagtgagataccataacttccacagggagctgctgagagctcttaattgaattaggctttttctgagaagattcctcaagccataaactgcactgtgactgaattaatgagaccagtggccataaccacataaaacagcatcttgttagtttatagtcatacctgaacaggcttagttatggcttctctttgtgcatgtggactgggtgtggactgggacccgactcttccttctgtgccagatttatttttacataaataaataaaataagaccagcatagtaaaattcagcaacagtctaggagggagttaaagtaaacaatgaaagtctcctagctctctggccactggcattcagttccccagatgttcctgatgtcggctgtactatgcatcttttctggaaactctccatgctgtgtggacttacgtgcgatggagggcagatttagttttcatgaagtcattttgtggctctaggctgtgaactgggacttgagccctagaaccagctttgtctctttcctacctaagtcatttgctctcttgggcctttagttctctttcattttaatgtgaaaagctctgttgggcccctgctccgctgaggccttgggggactcaaacacttggagggtaaagtctacaaggtccatcctctgggggtgggtcagggctcccgtagttctcaggctgaagagcacagagttctcatgtatgggctctgcgattaaaccatcggttcctagaactaagacagtgtataagggaggaggcacagcagggcactgtgtggtgttggttgatgctcgaacctaaggggagatgaaaaaaagtggtctggagaggtggtgcaggtctgagaggagatggtctggagaagtggtgcagggcacacactctcaaactatgggttgagcaactggatatggtcatgaaacttgatacatttggtaacagta

SEQ ID NO: 29343 - DNA, 1146 bp, Mus musculus
ttaagtccacacccacagtgacacacctactccaaccaggtcacacctactccaacaaggccacatctccaaatggtgccactccctggcccaagaatctacaacccagcacactagggggctctctgacccaggcagcttttcagcacaagaagtgacttttgtagtaggaacacgtacaaggttgctttgagatttcttcctaccctaagacccatgtttttccctaatatgtttttagtgtctctgggagcttggcgtcatgggcacgtagtgctatcctagcgttgcctaggtcagtacctgaacagaggaggggctttgccataggaagaaatgtccttccttccacaggtctaggggtaatgatggcaaagatctggccaggcaggtcctgaagctcacgagatgtgtcccttccctttgtgtccagccagcaggcgtgtgctaagctcctcaggtagcctcagccctgggcatatactatagggttcgccagctcagaacttgcttggcagggagaggagagagcatcggtcttgagcaaaggcctcgctaccttttgaccaagttggctttggggactgagtacccagcatgcatttgggtgctcaggtcttcacccaccttcctactccaaaagcaaaccaaagagctcatagggaatgtggggttctgaccaaaggctaggtatcctcagaagcctgggtctggagccttagcatgggccacaacagaggatggccaacactacgtggggttgacagatgtcacagtggatgtggagggaggcaaggagaactaaactttcagaactatggagtttgctgggagctgggcttcagacctaggctccctcctggtcctgctgttgatttgctctgactttgggcaaatcccttcacctttcacttgcccaaagtgactgatggcctttgacttcttgggatcttctggagcagccgcctggtgtgcctcagttgcgtacagctgcctgctgcttgcgtgtctagggctggaggtcgctgaatgtgctctgcaggtgtgcaggcccgggcctgttgtccccaaattctcctggcactgacgctccttgattctcctgtctctctcacatccccgctttaacaccacccagtgtcagcc

SEQ ID NO: 29344 - DNA, 1635 bp, Mus musculus
tcccagagaatacaacgctgcctcagtgacccaggcccccaccctgagcctggggagggagagcctttcatccccaaaggacagtagagccaggctagtgggtgtcccacagactctcccacgagagtgggggctgggcgctcctcttgtctcctgacctggattggctctgcccccttcctccgcatggcagctgggcccacagcccccactgcagcacggcttgcccctgcctcctgggaagggtcctctcctacagaactgccttcccaatccatccatttggcggacggctgggctgctgaggcaggccccgccccatctctagatccaggctctcccatagtggaaccagggctcctcaaggccctccttccctccagcccctcctcatccagaccaactctccatccttgatcatcatttctaaccaaagagccactggctccactgtggtcccagcaggaaaggagggagctgagccttccgtggccgtgactgggcccctgtatcagaggacagcaggcctgtggctgggaaacagacccgtgacccatagcagagctgcccacggcagcgccacggttctcccgctagcctcggtgctctggccaccacccgagctgtccttactcagagctgcgggctgagggcgtctctgagcttctctgctgggcgctggggcacattcgacagtgacatgattggggtgatgaggaccactgggccttagtggggcttacacgggagggactgtccgaggcgctggaaagtgtcctctacttacacttggcttatttgcacctcactgtaagtatgattctgtttgcacagaggcactcttgttttcagaccctttgagtcccccatgccagtcagagctctgccctttccccctcgtccttcctcgtgtctaacaccgtcccttaaatggaacctctgctgctgggggcccttgcccacagcaccgattctgatgtggcccaacctgtcatgactcaagctcaccagcagggggcctcctggtacctcctttgctcttgggcctgcttttacttctgttggccagttctaccaccaccccttatctggaccactctctttcctgcattctgtagagtagaaagtactggaccccctagaggcctttgctcacaggcacacactccctaccgccaccatggctggggccaagcccatgggtatctgcccaacccctgggcactccctccccaggatcgtgcaataatagtcagagggtccctcccaggggatggggccatgggtgcatggcccagctgtctcctctccatgcaagtgctgttttgggcaggagttgccaggcagggtgacatcgacaaccatgtacaaagccaccgcagctgctgccgctctgccgcctgtacaaaggaaactgaacctttttcatattctaataaatcaatgtgagtttttgataagagtccagggctgcttcctgggcctgggggacttcaggaaggagggcgtcagaggaactcaactcaaagactgaaacagaaacattgttaccaccagctgctgtgtggtccagtgtgcagatgctggagttacactgtgatatgtctctccatgtgctggggccgcagcttggtg

SEQ ID NO: 29345 - DNA, 2319 bp, Mus musculus
tgagccatctcaccagcccctgggaaggtcttaacctcctgaatggagagcagctttcctttgcccagtttttctagggctgcatctttcctgggaggacacacagacaacactacctggcccttagcctggagctttgataggttttaatatgctatccttatgttttggaagcctgattgaccggcgaggattcgtgcagtctgataccgcgttgccctcgcccatcagaagtgatgacccggcctgtggagccaagccagacgccagcatggtaggaggccacccctgaatgtgcttgccacctgccgtcctccacacctgcggggaccctccccatgccatctgagggaagcagagccgccagagctgccagtcttttcctatttatttcccaccctgcgtggttttctttgaactgtcccatagctgtgccctctgctccccaaacctaggttcccacagtttaggccttaggccccctagctggtcagtggcaggagaggagagtcacagcctctggaggccactaaggagaccatgccaagtcactgcctgtgggagggagacccagcctgagtgagggcatgaactgaatggtggcctcctagctggaggcgtgcttggaccttggtgagccagggcctgctgagtagctggctctgaaccacaggcgacaagtggggaccctctctgggactgctgtggtttggggctcctacattccatctgtgataaccactgggatggttttttgggaggggttatatggagctagccagtagagctggggtccagtagagagagcaagcaggggtgggaagcagcctgtgtcaggggaagccaaacaagccatccaggcccgcagaacctcagctcctgtagagtcctgggcagcacagtagggatggggacgtggctttccccctgcccacagagactctctaaaggatcctttcctgtgccccccagcccctcttccaggtcagggctagaggtgggtgggttagctcatgctggtaatacttgaaacgggtttattaatgctgggtattttgcacaattttatagtcttcttttttacatagccttttaaaaataggagttaatgtgttactatccgtgtagtgccaagtcaagggttttcagaaggttaggtagtttaatacatttattacagcagatgtagccgtgaggggttgtgtgtatgcgcacatgtgtgtccatgcatgcggtgtacagatacagctgactcccatgtcctcccctggactgttccctttccccattgccctgggttcagaagcagcctgaggtatgggggactgggtgggaggctgtgttagtcacaggagagagaccacccgctccggccctttagacgccaccacccagcccccaggttaggctcccagctgtgacctgccccgacaggctgaggttaggtgtggtgggtggggtggtggctcagggagcggctgccagtctgcaagccacaccccctcccaggtgttctgctttgagtgtaggcctcagtgctagggacgaggacaccgagtttctgctaatcaggaccggaggcaggggcagagtggacccggaggcccgtgtgggttgtccagaaccttatagtgcagcctcctgctgctgggagctgtagtttctaatcaaaatagtctcgttctcctcggcccttcaggtgggctgaagtccttggatcataacatagaaagtcactactgagtcctctccttgttccagagcccagtgggtcccagacaaagctgggaagtggtgggtgccaggggccactgggagatggcttcagagccccaggccaccccgagtggccctgggaggtagataggaaggggctggagggctccctgacccgcctttcgttcgagccagtatctttgttcccgtttgtaataaagcttctgttttaagagctgatttgctttgctttagtttttgtttgcttttattttgccgaaaccctggcttgcagcttagccttcttcggttctttcagacagtctcgggtcttttcctgggagttagagagcaggcaggcaggcgggcagcccagtgattggtgggaactctgaggagtcgagggggctgtggctacaccacctgtctgccttcatcttgtctcccttttgtgcctccaggacttggtgcctcctgagttctttcctgctaactttccaccctgatccccagtggttgattgctcagcatgtttgagacagtaggtcccagtgggagctccttgttcctagtcccccactcaacctcctaggcagccaggac

SEQ ID NO: 29346 - DNA, 1136 bp, Mus musculus
gggtggaggaaggctaaccagtgagctcggccctagcgtagggccgtgctcacccccacccccaccccctgagctgtgtccctttcttcttcctagtttctcaaggaagcaacttcctctccgctctgaaaaagacaccagcaagatatcctttgcgggctggtcaccctgggtggggaattgaggcctcttcatgggacaggtctccagagtgggtagggctctatctattctctagaatgcactctacccgctagtttgtcaagacccaggctggagctgaccctaaagggatcgtcacggagaggggcagagcaagcaggctcaggaaaatgcctgtctacagaggcttggcagagagtggattttgtaattaaatttttgtttaccctgcagcggggaacatgcatgtgccatgtcacacgaatagggatggggacaacttgaagttcaaactcagcttgtcaggcttggtgacaggctcctttatccattgagtcacgtcaccagctgcgagttccttaggatgccaggcttcctgctccatgccaggatcctgtggttggaattccctctgccatccctagcccagagcccgccttgttccccaggcgctccctcccccttctgctgagaaatgactggatcacagaaaggtccccaaacctgtcactttccagggacatagctccagggaagggtgagctcaggggtcaggggttccaccctctcttgcacgcgtccttgacagggcccactgtgctggagttggtcatctgcttcttctcaatctggtccatcctgggcctctcagggttccacacgtacctcgtggcctccaacctgacaactaacgaagatgtgagtaaagttggacaggcccggggagcctggggtggccaagtgctgcccgctgggggggtccaaggtggaagcctaatgtcagacccaatgtcacacagacctgggggtcctgctgtgacagaattaggatgcatattgcccatggcatgaccaagagatgtggcctagggtcataatgctggaggggtccaatccaagattaatggcagaaatcacgaccaagccttcacatccaccactccactccgcaccctcatgatggcttataacgc

SEQ ID NO: 29347 - DNA, 1101 bp, Mus musculus
ttttcctgcttggattaaaggcatgcttcaccacagcccagctgtttctttcctcctcctcctcctcctcctcctctccctcctcctcctcctcctctctctctctgtctctctctctgtctctctctctgtctctctctctctctcttgtttgtttgtttttccataccagacctcacctgacagtggttcacatttttaaaaattaattaattaactaatttttttttgagacagggtttctgtatagctctggctggcctcgaactcagaaatctgcctgcctctgcctcccaagtgattaaaggcatgcgtcaccactgcccagctaaagatttatttattattatatgtaagtacactgtagctgtcttcagacacaccagaagagggcgacagatctcattaaggatggttgtgagtagcgcacgcctttgatcccagcactcaggaggcagaggcaggtggatttctgagtttgaggctacagagtgagttccaggacagccagggctacacagagaaaccctgtctcaaaaaaccaaaaaaaaaaaaaaaaaaaggatggctgtgagccactgtgtggttgctgggatttgaactcaggacctctggaagagcagccatgctcttaaccactgagccatctctccagcccggttcacacttttaatcccagcaaaggcaagcagatctctgtgagttcaaggccctgtctcaaaacaataatgaaaaaaaaaatgccttctagttatgtgtaaaagacctgtatgaaacagaaaaagatttcatgtgtgcctcggacaccactgtctagacatggcattatgtatatgcagatattccaaaatctgaaaaatgcccaaatttaaaacatttctaggccatagtatttcaggtaagggataccagcctcccctgagctcttgcaaaataaacgctagacattgtgttaaacccacttggtaacttcttagctaatcctcccaaccacactattttattttattttattttattttattttattttattttattttattttattttattgttttttcatgacagctgtcttggaactcactctgtagatgaggct

SEQ ID NO: 29348 - DNA, 1181 bp, Mus musculus
tgtatttgggaagtagaggcagaaaaatcaagagttcaaggccagcctgagctacttagagggtttcaggtcagtttgggctctctggtaaattctggaggcaggaagggatgaaggaagaggggcctgcctgccagggtagagtgacggagaatatctgtagatctcaactgccattggaaaaagtccgggattgactagtaatgtctgccctgggcacttattgggagcggctgcactcacctccagcgggcactttagggagaggctcttttcttttcttttttttttttttaaatgtttatttatttattatatgtaagtaagtacactgtagctgtcttcagacactccagaagagggcgtcagatctcgttacggatggttgtgagccaccatgtggttgctgggatttgaactcaggaccttcggaagagcagtcggcgctcttaaccgctgagccatctcatcagcccccgagaggctcttttctagaaggtactctgtggggcagtagcggggagcctggagtaacctgaactctcttctttcctagctgtccctacctggcccgcacactgaccctggccattcctatcatcgctgccatcctcttcttcttcgtcatgagctgtctcctgcagaccagtttcacggaccctggcatcctgccccgggccaccatctgtgaggccgctgccctggagaagcagatcggtgaggctcttactcctagtcctgcccgcagcgtcccgcagcctggctttctcctgtgccgctctgctaggaattacggatgtagcagtgagcgaagcaggctgtgactgacactgtgacagggggagacagacagtgagcaagcaggcaaatatgtaagcaagaaatactggcagccagcactgagctgagtgcttctggggtgcctagcatgctttaagccgcctgtatgcctgactacttaatctccataagccagcgaggtcaatactggtactctcttcctattcattcatgaaatgagacacagagaggttaagtacatggttcaagatcacacagctgaggccgggcagtggtggtacacgacttttatcccagctccgagggggcaggaggcaagtggatctctgtgagttggaggccagcctagtctacagagcaggttgcaggacagtcagcgc

SEQ ID NO: 29349 - DNA, 1141 bp, Mus musculus
atctgcctctgcctcttgagtactaggcccaccactgagtgtgagccacccctgcctggcctggtggataaatttaaatgtttgatcaaagcacaggccaacagcctgccccactcaggatggtggagtcagtgcagtgtagtgacagaaggaagaggggacagacagcctgctctaagtgagaggtttctgaaggtggttgttttctttttttttttttttaaagatgtattatattatatatgagtacactagctgtcttcagacacaccagaagagggcatcagatcccattgcagatggttgtgagccaccatgtggctgctgggaattgaactcaggacctctggaagagcagccagtgctcttaaccactgagccatctctccagctccctgaagttttctttatgatactggtgtgtgtgtgtctgtgtctatcctacagactgtgaaaatctaaatactccttttgcaatgaattacctttttctggaggaggggtagtcaggggagctaagacaaggtccctctgtgtaactctgactgtcctagaacttgcttgctatgtagatctggctggttttgaactcagagatcctcctacctctgccgaactagtttctataaattatagagggttgaggctagaactccgtagtaaagcacacgaggccctaatttcagtaataaacaccacttggatcagagcacagggtctgaatcttggctcccattcctcactttccagctgtatgatctaaagccaccttcagagcttttgccttctctgaaattaaggaggagacttcttccctggggtgtgatttaggccttaaatcttgaggctaccttaaacaaaagataaatggaggctcacaagtggtctaatgggaaagtcctcctttgatcaattggaaacagcctcccccccacctctgggaacaactcggaatagaagctgtcgtggagagtaatgacacctggtggaaaagggtaacccagggtgactggttttccattctcaaagatcacacttgcatgagtcagaggcacctaccccacagccttgatgggggaaccttgtagctaagtcagtccaaggttgtctactgtagcatctgccctgcttcctggctccc

SEQ ID NO: 29350 - DNA, 1154 bp, Mus musculus
ttagtcaacagctgttagagcagacagatgtgatcaggtacaactgtaatcccatgctgggcacacagtggtggtgcacatagtgaaaccatctcaccgcctggcttaaaatgggttttagagagtgaaaaacaaaccaacttcccatataggacgcttgcaggagtggagggatggctaaattaatgaagtgcttatagcacaaacagactttgcattctcaacttaacacccacatacaaagccaggtatggtagaagaccactgatgtgctgggcagccaatttagcaatatgtccaggttcagtgaaaaacttgcctcaaaagatgggttcagccgggcgtggtgtcgcacgcctttaatcccagcacttgggaggcagaggcaggtggatttctgagttccaggacagcctggtctacaaagtgagttccaggacagccagggctgcacagagaaaccctgtctcgaaaaaccaaaaaaaaaaaaaaaaagatgggttcaataccatcctcgtacacatagtttgaggtcactacactacataaaattctgtctccacaacaaaaactggggaaggagtgggcatgacaaaggcaaaggtctgaaggctaccagaaagaggccttagtcaggggaaatggagggatgaaagcggctcttgtttgcttttcaccagggacaagggactgagatgcaaagttacaagccaaagcagaccaggcgtcctggttctcccagcatccctcagtccttacctggcataccttgccttccccagaggctcctccctatatacaaatccagaccttatggtgtgtctgtctgtctgtctgtcctctcttcctccacatttctctgcacacaccctttctctcttcctcactccctccccagcccctcttttcccatggcagctttcctggccttggtccttggggccagtggactcacctgagtgcagctgcccaataaacctgcctttagtataatctgatctggcttaaattggctcatttcaccttgggtggagaaataagctctcagttctcttggggagctctccctggtacactgactgcccatattggccttttatggtgtcttgagcacaggcagtagatatcttgtccagggtttgggggtggtggtg

SEQ ID NO: 29351 - DNA, 1468 bp, Mus musculus
tcactctgtatgagtcacggctgttggacatctccgtgtcaccactgatgaactcattggtttcacaagtcatttgtgatgtactgtttttgattggccagtcatgacagccgtgggacacctcccctccccgtgtgtgtgtgagtgtgtggagaacttagaaactgactgttgccctttatttatgcaaaaccacctcagaatccagtttaccctgtgctgtccagcttctcccttgggaaagcctctcctgttctctctcctccccaccctcactccctcacacctttctgttccccatcctcacctgcttccctcaggaccccaccctatttgaaaagacaaagctctgcctacatagaagacttttttattttaaccaaagttactgttgtttacagtgagtttggggaaaaaaatggctttcccagtccttgcatcaacgggatgccacatttcataactgtttttaatggttaaaaaaaaaaaaaaaaaaaggaaaaaaaatacaaaaaaaccctgaaggacaaaggtgactgctgagctgtgtggtttgtcgctgtccattcacaatctcgcaggagccgagaagttcgcagttgtgagcagaccctgttcactggagaggcctgtgcagtagagtgtagatcctttcatgtactgtactgtacacctgatactgtaaacatactgtaataataatgtctcacatggaaacgagagaagacgctgggtcagcagcaagctgtagtttttaaaaatgtttttagttaaatgttgaggagaaaaaaaatggctttccccccaaagtatcctgtgtgaacctacaacgccctgacctctttctctcctccttgattgtatgaatagccctgagatcacctcttagacctggttttaacctttagctgcagcggctgcgctgccacgtgtgtatatatatgatgttgtacattgcacatacccttgaatctccacagtttggtccccttcccagctacccctttatagtatggcgagttaacaagttggtgacctgcacaaagcgagacacagctatttaatctcttgccagacattgcccctcttggtgcagtgctctacaggtctctgtaaaaagcccttgctgtctcagcagccaatcaacttacagtttatttttttctgggtttttgttttgttttgtttcatttctaatcgaggtgtgaaaaagttctaggttcagttgaagttcctgatgaagaaacacaattgagattttttcagtgataaaatctgcatatttgtatttcaacaatgtagctaaaaacttgatgtaaattcctccttttttttccttttttggcttaatgaatatcatttattcagtatgaaatctttatactatatgttccacgtgttaagaataaatgtacattaaatcttggtaagactttgtgaagctttttttattttcaaattatttaaa

SEQ ID NO: 29352 - DNA, 1623 bp, Mus musculus
tgggtcaaagaaaaattcttgcccttctttacgaaggaaatggttagagaactgtaaagagcggtgtggtggggaagcctttagcatgggacagctctgcctgggagagaaaggagggggaggagaggggggaggggagagagagaataaatatgaattggataagatcttgggaactcctgtcaagaattcttcccttcctttttttctctctttcagctcccaggcttgctagagctccttgtggaatatttccgtagatgcctaattgaaatctttggcattttaaaggagtatgaggtaggggacccaggacagagaacattactagaccctgggagattcaccaaggtgtatagtccagcccatacagaggaagaagaggaagaacaccttgatcctaaactggaggaggaagaggaagaaggggttggaaatgatgaggagatggcctttttgggcaaggacaagccatcttcagagaataatgaggagaagctagtcagtaagtttgacaagcttccggtaaagatcgtgcagaggaatgacccatttgtggtggactgctcagataagcttgggcgcgtgcaggagtttgacagtggcctgctacactggcggattggtggtggggataccactgagcatatccagacccactttgagagcaagatagagctgctgccttcccggccttatgtgccctgcccaacgccccctcggaaacacctcacaacagtagagggcacaccagggacaacggagcaggagggccccccgcccgatggccttccagagaaaaggatcacagccaccatggatgacatgttgtctacccggtctagcacattgactgatgagggggcaaagagtgcagaggccaccaaggaaagcagcaagtttccatttggcattagcccagcacagagccaccggaacatcaaaattttagaggatgaaccccatagtaaggatgagaccccactgtgtacccttctggactggcaggattcccttgctaagcgctgtgtctgtgtctccaataccatccggagcctgtcgtttgtgccaggcaacgactttgagatgtccaaacacccagggctgctgcttatcctgggcaagctgatcctgctgcaccacaagcacccagagcggaagcaggcaccactaacttatgagaaggaggaggaacaggaccaaggggtgagctgtgacaaagtggagtggtggtgggactgcttggagatgctccgagaaaacacgctggtcaccctcgccaacatctcggggcaattggacctatccccatatcctgagagcatctgcctgcctgtcctggacggactcctacactgggcagtttgcccttcagctgaagcccaggaccccttctcaaccctaggccccaatgccgtcctctccccccagagattggtcttggaaaccctcagcaaactcagcatccaggacaacaatgtggacctgatcctggccactcccccttttagccgcctggagaagttgtatagtaccatggtgcgcttcctcagtgaccgaaagaacccagtgtgccgggagatggccgtggtactgctggcaaatctggcccagggggacagc

SEQ ID NO: 29353 - DNA, 1144 bp, Mus musculus
gaaccaatttccattccagtttggccgagaccgagtctctgcacctcctggttccagtgcccagcagaacatgccaccacaaatgatgggtggccccatacaggcatcagctgaggttgctcagcagggcaccatgtggcaggggcgaaatgacatgacctacaattatgccaacaggcagaacacaggctctgccacccagggccctgcgtatcatggtgtgaaccgaacagatgaaatgctccacacagatcagagggccaaccatgaaggcccatggccttcccatggcacacgccagcctccgtatggtccttcagcccctgttccccccatgacaaggccccctccatctaactaccagcccccaccaagcatgccgaatcacattcctcaggtatccagccccgctcccctcccccggcccatggagaaccgtacttctcctagcaagtctccattcctgcactctgggatgaaaatgcaaaaggcgggtccaccggtgcctgcttcgcacatagcgcctacccctgtgcagccgcctatgattcggcgggatatcaccttcccacctggctctgtagaggccactcagcctgtgttgaagcagagaaggcggctcacaatgaaagacattggtaaggatacctccctgattgggtggctcaatctacccctttccatctttcacatggttccctccatcccaatattctggatgtggttaaatctggcacagtatttactaaaagaaagccaaagaatttggaggatggaagaaataagctgatttcaggtttttcttcaaggctctgtctgccatatgctggtgccctagacagcttagaagcaatgaagtcagactagcctgactaatggaccagccttgggggtgcctctagccagctggggcttggtggatggacaacacagaggtttatttcaggaaccccggaggcatggcgggtaatgatgtccctcaagtccgggctcctggcagagagcacgtgggcgttagacaccattaacattctactgtatgatgacaacagcattatgaccttcaacctcagccaggtgagtacaggtgtctgggcaaggtgagggggtactgttgatgtagataacactatggcacagcagg

SEQ ID NO: 29354 - DNA, 1144 bp, Mus musculus
atttttgctaaagtagcagaattgaaataggtttcaatttgtttgtttgcctaggtggaaggtagctgactgactggtttatgggtattttgttttgtttttgagatagggtcttggaaatcacctacatagaccagactaccccctggtctcataaataatatacttgaattgattataaagaataaacttgacttggttctgtctctcaaatatttgggtgccagctcagcctgactccgtgtatgtttgtgtgtgtgttttgtcttgtgacacatttcttactgtgtggtcccggctcgccttaaactcaatcttactgctcagcctcttaagtgctagtttgcaaatgtgtacctccttgctcagcagtatggtaaagtccagaaggcccatgaattgaactcaaaagtgtattcagtatttcagtgtgttccttcatggcgtttgctgtatgtgaccaattgtaaatatgattattttgcttcctttcactaatatccttgcgtgtgtgtttcaggatctgtctggttcaatcgatgatctccccatggggacagaaggagctctgagtcctggcgtgagcacatcagggatttccagcagccaaggagagcagagcaatccagctcagtctcccttttctcctcacacctcccctcacctgcctggcatccgaggcccgtccccgtcccctgttggctctcctgccagtgtcgcgcagtctcgctcaggaccactctcgcctgctgcagtgccaggtaccctcagtactggtttttgggaagaggaaaagctggctgggctttgactcgtgcctgcatggtttttcccttagcatttgaagaagggaggtgggaagcccttagatgaatactggtgtagatatagcataagaagtgttgagcaatttccaggtccaaattcactccttatttaagattctcaggctgagccatggttttttgtttttttttttttgtttgtttgtttgtttttcttttgtctggagcaggcaaccagatgccacctcggccacccagtggccagtcagacagcatcatgcacccttccatgaaccaatcaagcattgcccaagatcgaggtgagagcttgggtttcgacagaggactagcaggagcac

SEQ ID NO: 29355 - DNA, 1230 bp, Mus musculus
ctcccccatgtagaggagatgggccatgtgctgcccccactgccttcctgcatttgggtggccttatggctttgttgcttctatattcccaagtctgcagtgttagatattagttttctttttcccttggcattggccgattcatgattttctgtggctcgtcaccagcagccaagatttttaaatgctttttactcttaaacttgttagttttcaccttgcttgtttaatctctgttggaaggacccccttgcccacccccaagatacatcaccagtatgatggcgggatggggtggcagtgtgaagggttggtgtgatagtcatttaaatggttatttttaaaaaaccatttgctgggtgccttgttttgttttgcctcctgtttttctttccttgcttacagcctgcttactgcgcctgcctgttacctttcaactgactgaagactggtgtactttgactttaaaaacagaatgaatttggctatgtggtagaggactagtgactgtgttgttttagtccagagccttgaaactccttatcatccagttcagataacttgtgtttttggtttccaagttcaacctgtttaggaatctaggctgtcaaaactaaacacccccccgcccccaacacaacaaaacaaaacaaaaaaaaaaacagaacaaacctatttcataatggacttagggaacaatttctccaaaacattactcagggacaggcatctttactgagaccttgaccttgaagtagcatcctagtgaaggtgtatatttgtgacagctccccacctgcactgtggcactggtttgtgccgagcaagcattatgtttgaatcttgtatgaatttcctcatttactcttcaaaatacggagagaggagtattccgttcttcctcttggcttccagtcatgaatgtagaattataaaacatcctttagggtagttgttagtttaaggtcaagttgggagtgaataaagttttgttagagctataggtattttattcatgtaaggtctaaggaattaaatctaggctttcttgatgccaggcaagaactctttttttttttgtttgtttttttcaagacagggtttctttgtgtagccctggctatcttggaactcactctgtagaccaggctggcctcaaactcagaaatccgcctgcctttgcctcccgagtgctgggattaaaggcgtgcgccaccacacccggccagg

SEQ ID NO: 29356 - DNA, 1220 bp, Mus musculus
tccattttatattaatatttctcgattcgatccttcagtgataactttcttttttctttctttctttaaagatctagtatgctatagctgtcttcagatgcactagcagagggcgtcagatctcattacagatggttgtgagccaccatgtggttgctgggatttgaactcaggacctttgagtcagtgctcttactcgctgagctatctcaccagccggataacttcctttttatggagaaggaagaacctgatttggtagccttgtaaaataaccagaataatcttgtcactgtcttttttgtttgttttttcaagacagggtttctctgtatagccctggctgtcctggagctcactttgtagagcaggctggcctctgcctcccgagtgctgggattaaaggcgtgcgccaccacacccggctgtcactgtcttttaagggacactgtcactgtcttttccagggagctggctgtggtgccccacatctataattccagatttggaaggcagaggcaggtggatctctgcctttaaggccagccagggctacacagtgaggccctcttttactactaccaccactcacgcccctgcccccaaaataaggaactaaatccactgactgtcagctacaacacaaaaaggtgtttctgttggtttttagtttagttttgttttaaaggcagtgttctgtgagagactatttgatttagtttatataatggcaggaactatgaatgtaattatgtccgtgatagtcatttttaggttcagctctgttaaagaggctatcagcttttaaagcaaaagtaagaaaaaagagacttgggatgccattgactttgattgcccaggattgttaaggtctttcccattacaaagggtaaagttattagatcttcaggcttgttgctgtgagcatcatttccagattataagatctggagattccagtgggggtgaggactgactaggtactagaaaaggatttagatttaaaaggtagtagacaaactgggaggcagaggcaggtggatttctgagttcaaggccagcctggtctacaaagtgagttccaggacagccagggctacacagagaaaccctgtctcgaaaaaccaaaaagggaaaaaaaggcagaagccaggtgtgaaggtaaggtgtatatgcctgtaatctcagaagttgggggttgggatttggaaggcttgaga

SEQ ID NO: 29357 - DNA, 1522 bp, Mus musculus
gacctgcagctcgtgaaggtcggcatgaacacctggggctgccaagtgtctggggtcgttgtgtgggattggtctcagaccggtgggttatggccaggacttgaagttctaggtctgcctagaaccaggggttgtggcaaaagacaaagccctgcccctaaggggtgagtcccagacttagcatgatgcattcttgtgccccagggagaaaccctgctcataagcaataagtacccaggctagaagcacggggctgggtggactggggaagcttgggaggggtgggccagaccctggggtacctgtgttttgatgcccaccaccaaccctccttcgtggtctgattctcctacctcttctcttagggagccatggcggctacatactctgctctcaatagctccaaacccacccctcagctcaagccaattgagtcgtctatcctggcccagcggcgggtgaggaagctgccatccaccaccctgtgagccgcagacgaactcctcagaggcagagtccttcccagagacagcaagcctgggtcacaggaccaagtggaatggagttctaaaggaagtaaccagcccagatcacccgtgagggtgtgacgtgccttcctccccgggacgggctcttctgggctcaggctccaccgtgtgaaagccactcactgtacaaactattttttaaggaaaaaaaaatggcgtcatctcccatgaattttttacaagatccatttgccttcttggccatcgcagtcccagcagtcccaggaggaacgacgagtcacatgtgtggccgagactcccttggtagctttggggccctctccgctgttggccgtggggccatctgcacatgacttcgagcaggtccagcgtcgcctctcagagctgtctcctggctcctcagcagaacttggtccccagccatctctttttccgttctgttctggggttctagaaccactttctgctagagcaagggaccccaccctgtcagctcttggctccaggcaccagcatccacaacgcccatcctcggtgggtccctgcggtgggatcggacaaccccatggagaggaagcagaaagcacttttggggaaacctgctgtctgccgctagacagagttcacaggagaccagggaggcggtccccgggcgatgagggctttttcatttcctcctcagctggtaactcagggttcatctgtccaaggcctttctaataaacttacaatccagttaaagcgcccgctcttccttctgctctttatcctccttgaagacttcaacggtgacaggaaacaggctagggacaggttagcccacttgcttgaagcacacgtcattgagaacccctctggttctgtgcatatatgtgctcctatgagaggattctctcacagtatggatgaacactaacgacattagcaaccagcaatggtcgctggcccttagtgataaatatgcaacccaagaccttaaacaccccagacaggtggtctgccaccgtcctccc

SEQ ID NO: 29358 - DNA, 1207 bp, Mus musculus
ccccaaccagacattcattaagtcctgtcattgaaacgcatggtgtgaggtagaggcagaaggatcagaagttcaaggccagtgttggctacaccctgactttgaatcaagcctggccaacttgagagcttgtctcaaatgatcctccccagcagcaaagcaaaaggaaaaggaaactgggaaagcccatgaagaaagcctgcgtaggcccagaatcacattttagtattgaaattagggataaacagggacttgatagtgtgcgctgaaggggtgcagagtcaaaggctggggacctcggaaaataagtcaccctggggcacacggtgctccatggctacagagggcctggtggtaggtgaggctagacaactgggcgagacacaaggactatgcctggatgtctccaggagaccaaaagctgcctgaggacccagaatattctagggaagaaagaaccagctgactgtcccaagggtgagagcatcctgagagtgcttgaaaggccgagtgagaaacctcacccagaggcgggcttttcgggtgggttttagtgacttcttttctcctctggccagtgcgtgaccgtgttcggaccaagatggagagagacatcctcgctgacgtgaaccacccgttcgtggtgaagctacattatggtgaggccaccgaccccgcccaagtgccacttgtcccctcagtgtccacccttgcctgctgccttcctccatcccttgtcccacctctcaggcctggctgacacaagctggcactgatccagctgattccacggtggctttctcctctcttagccttccagaccgagggcaagctctatcttattctggacttcctgcgtggtggagacctgttcacacggctctcaaaggaggtaagctagcatcccactgctgggatatggcagagtcccgtcctgaggccgatgaagagcaatgtggtgcaggcctgtaacttcccggctctgttgaacaatcaagaaacgtcacctgcctcggagagtttctctcaggatgtgctgaggatgactgggcctaaatgtggccctgctgtaacttctggttgctaagggatccctcaaatacctgagagagagtggcgaggggggtgggggtgctggccaaggggaagaaggccaaactcacccaggacgctacaaaaagatacaaaggacccagtagaaagggat

SEQ ID NO: 29359 - DNA, 1213 bp, Mus musculus
ctcaggacagagactgctgctttcagctttcctacctcaaaggtgagggagctttcactcctgggctccaaggtgtggtccaggaagggccaggagcaggctcaggacccaggagttctggctgtgacccccacacaccacagcacttcctgggtttgttatgtcctctcagtttgtgcctacggaatgattggtgagttctgtgtgtcgtgctgagctccttggtgggagcgggtgccacaggggcttggtagcatttggctctatgaattggagtggtaggaccgggaacctggtggcttttctagcctgaccgtgcccagtgcctctcagatggcttcttgagactcccagctcccagaacaaggtgtagccatttatcccagctgtctctgcttccccgggcggcttccctctagcctgccagtcctttaccccttcctagtttttatttaaaaaaaaaaaattagtactttttttgtttttgttttttttggttttttgagacagggtttctctgtgtagccctggctgtcctggaactcactctgtagaccaggttggcctcaaactcagaaatccacctgcctctgcctctcgagtgttgggattaaagtcgtgcgccaccaccgcctggcctgttgttcttttttttaattaattttttttagacagggtcttggcgtgtaactctggctggcctcaaactcagagatccatttgccttgcgtggcttcccaagtgctagagttaaaggtgtataccaccatgtccagcccaaaaccagtactatactttgatttaataattttgtgtatgcttttgtgtgtatgtgtgctcgcgtgcatgtccctaggcatgtgtggaggtcagaggacaacttgctgaggtcggttctttccttctgtcaggcacatgccagggatcaaaggcagtttgtcaggcttaccagtcactgcctttatccactgagctatctcacctgtccaccttgctgttatacattgccaaaagctcctatgcgaccttcgttgggtaccttgtcctctctgagccctgcctttctcatctctgtagtaggaagaaccacgcctaagtcacacacacagattgagagagagagagagagagagagagagagagagagagagagagagagagcgagagcgctgttaggtcacagagataatgccattgagaggctttgaaagcc

SEQ ID NO: 29360 - DNA, 1226 bp, Mus musculus
atgacaccgggtcttcctacttcagattatgctgaagagtggggaaagtccttagatcttgtgaagactgtctctgtagaagagactctgcctccgtcttcctctctccctccttcctttcctgtagaaaaaggctgagcccttgggcagtatggcttctgccacctagcctttcccagaagcaactcctgtcttttttgagggctttgtggtccaaccctgagcatgcaggaggccacttctgtgctgtcctgtcaccctgggatcaaggtcaagttttgaaccagcaactttaaaactttccctgctctcctgctgcgaaggaggcaggtgaaactctgccttccttcactggagctgttttggggtacaggaggctggggtacaggagacctcacttgatcccagaacctagatgctttttctcctggcttgaacccctttacctatgcttggtacctcaggtcagtcactgtgagccctgtctctcaggaccacgggcagagagaggatccacagtgagatccccaagtctccaggcactcagggcatgctgcccctttaaagggatgggctacactggctattggagggtgggcgcggctggattaggtaaccaacctgaaggcgcaatttggagtaaattgttctgggatccttgccacgggggttttacaggccctacacaggcgctcagaggctgtctggctgactcaccctcctaggtgaggagcactgctctctgcagcccctggtgctccccccacactccccaggactggggcacaaggccccagggaaggctcagaggtgtactccttggcttgggcacgcccctgccacctgggcctccagaggaagggaggcctgacctcggtatggctagggagggactcagcctagggactcacagctttaccctagcgcggagagtagagttctaggagtgctggcctcctccagggcagcacttcctgcttccctttgggaaatcctgaggccagaggcagcctcatgggggccaggttaaaccggaaacatcttagtttgaatactgttgcacctgaattcaggcgaggggagactgtcacatttcctgggatgggggagaggagttttttcattgagtttcacttcagaaatgttgtgtggccctaagtccatcttcaagctgtctgggcctctccttccagcaccacagatgagtttctagctctacttcctgg

SEQ ID NO: 29361 - DNA, 1059 bp, Mus musculus
atgaggtcattgtttattaggaaagtcattagcaaccaaacgtaaatagattgtatccttaccaggataagtttttgctttgaggcagggttttaactctgtcctcctgcaggcatggacctcacagagacacatttgcctctgcctcccatgtttcactacacccaactaaaacaaagactcttatgtgtggtgtagaaactgaacccagaactttttttttaattggctattttatttatttacatggcaaatgtccccttcctggttttccctctgcaaccccccccccatcccatcccctctcccctgcctctaggagtgtgctcctccactcactcacccactcctgcctcactgctctagcatcctctcaagctggaccatcaagccttcacaggaccaagggcctccccttccactgatgcccgacaaggccatcctctgctacatatgcagttggagccatgggtccttccatgtatactctttgcttggtggtttagtccctgggagctctgaggggtccgattagttgatagtgttcttcctatggggttacaacccccttcagctccttcagtccttgtcctagctcttccattggggtccctaggctcaggccactggttggctgtatctgcatatgtattggtcaggtgctggtagaacctcacaggggacagccataccaggctcttcttagcaagcacttcttggcatcagcaatagtgtcgggtttggtgtctgtacatgggatggatccctaggtgaggcagtttttggatggccttcagtctctgctccactttttgtccctgtatttcctttagacagagttaaaatttttgatttggttgggtggccccattcctgaactgggggccatgcctatctactggaggtggtctctacaggttctatctcccctttgttgggtatttaagctaatatccccattgagtcctgggagcctctcgattccctggcatctgggacattctagtggctacccccagttccccacttcccactactacatatttttattcaacttcc

SEQ ID NO: 29362 - DNA, 1139 bp, Mus musculus
aaaaaccctgaaatcctgcctctgcatattggtatatttgaagagtcagacaatgtccataaataacagtatttagatgtccttccctaagagctgggactgagcggtggtagtgtggcaagccttttatcccagcactctggaagcagaagcaggcagagacagtctgaggacagctgagtctcctgagggaattctaggtcagccatggctgtgcaaagaaatggtgtctggggataggtggggcgcagggagggagctgagactggttacagcaggtcctgagttggtaagagttcactattaagaatttttgtctacatgtctgtgcaccacatgtgcgcctggtacacagacagtcagaactagagttaaaaataccaggggttagccggtcatgtgtgagctagcaacttctgtaagtcactaagtcaccactgagccatgcatcaatgccccagaagggtctgtttttggtgctgaaatggttttgatgtggccaaatttggtcttggacctgcatagtttaggatgaacttgaactttggccttgactaagcctcccaagtgtagtggggctacagtataatagtataaaagtacagcaggtggcacatggctgtgtctgctttagtagatccaacaaagcagatgctaaaccggccaatctatgggaatagagatcaaagttgaagctcaacacacttatcccattatttggcaacagtgacctgcaactgggaaaactacctgccatgacacatggcggcaatgtctacttggtaactggcccagagactgccacagctcatggaagaactgcatgcagtccatggttaaacgatatttacaatctgaagaatggtactgaacccaattatagcttcaagttttgctcaagcaccaacctgctaaccataaccacaggctcccctctctggaactgtccccaaagtcagagtgaatgtccccaaggtacaggtccaacattcttttcttaagattcaatatatgagtacactgttcccaccgtctcagacagaaaacccatcccaaagctttaagaagttaactgttagcttgaccttgatacaagaacactgccccaagaaaggccaacagcactctagtcggtctag

SEQ ID NO: 29363 - DNA, 1185 bp, Mus musculus
atctcttcttcagaatacaggtctccatctgtgcaggcaaatcctgtgagagatttccactgcatccagactcaggcttactgttgcctttttgctctgctattccagcttaggtcatccctgaaagatcacatccagttagtactgtttgtctaaagatctcttgttttcagccaggcagtggtggtgcacacctttaatcccagcacttaggaggaggcagaggcaggtggatagctcttgagttcaagggcagcctggtatactgaaaaaattccaggacacctaggactacaccaagaaacccagtctcaaaaaaaaaaaaaaaaaaaaaaaggaagaaagaagaaggagaggttgagggagactcagcttggaaacatctcatgtatcaaggtccagaaaattttaatgaataaatgttacaattgaggactgggatgctggtacttggtaagggctggtacatacacatgacagcctgtgtttggaccctggtacccacataaaaagcctgctgtgatgggggggcacacttagaatctcaatgcttggagagcaaagacagaaggatccctagagctctggctggccagctttgcctgatctgtaagccccagtctcagagagcgagcctatcttctgaggagcagcacccaagggtgacctctgacctctacaagcactcagagacatagacaagtgaactggcagctagctactgcaaatgctttgacttaatgtttggggatcctgatggaaatttagtgtatagctaatgttttctgctgctcagatcacacttaaaagtttgcactgagcacagttaggaaatgacagtggtggtgggctagattccttacagagtgtgcacaaagccctgatttggtccctggcactttgcaaggaggacaaaaagggaggcagaaagaagatggagaaaaggaaggagttagaaatgggaaagaaagataaagacaaaatatactggtgaagtagagaatttaccaaatgggtcactcagcagatacagggatcccatgtctctaacatgagacttagcatctggatgtggtggcacacacctttaatgccagcacttgggaggcagaggcagttgatctgtaagttcaaggacagcctgttctacaagaaggctcggggaaagtcattgcagccttagga

SEQ ID NO: 29364 - DNA, 3514 bp, Mus musculus
aattttgtcccctaccaggtgctacaactgcggtgggctagaccatcatgccaaggaatgcaagctgccaccccagcccaagaagtgccacttttgccaaagcatcaaccatatggtggcctcgtgtccactgaaggcccagcagggccccagttctcagggaaagcctgcctacttccgggaggaagaggaagagatccacagccctgccctgctcccagaagcccagaattgaggcccaggagtcagggttattctttggctaatggggagtttaaggaaagaggcatcaatctgcagagtggagaaagtgggggtaagggtgggttgcgtgggtagcttgcactgccgtgtctcaggccggggttcccagtgtcaccctgtctttccttggagggaaggaaaggatgagacaaaggaactcctaccacactctatctgaaagcaagtgaaggcttttgtggggaggaaccaccctagaacccgaggctttgccaagtggctgggctagggaagttcttttgtagaaggctgtgtgatatttcccttgccagacgggaagcgaaacaagtgtcaaaccaagattactgaacctacccctccagctactatgttctggggaagggactcccaggagcagggcgaggttattttcacaccgtgcttattcataaccctgtcctttggtgctgtgctgggaatggtctctagcaacgggttgtgatgacaggcaaagagggtggttggggagacaactgctgacctgctgcccacacctcactcccagccctttctgggccaatgggattttaatttatttgctcccttaggtaactgcaccttgggtcccactttctccaggatgccaactgcactatctacgtgcgaatgacgtatcttgtgcgttttttttttttttaatttttaaaattttttttcatcttcttaatataaataatgggtttgtatttttgtatattttaatcttaaggccctcattcctgcactgtgttctcaggtacatgagcaatctcagggataataagtccgtagcagctccaggtctgctcagcaggaatactttgttttgttttgttttgatcaccatggagaccaaccatttggagtgcacagcctgttgaactacctcatttttgccgattacagctggcttttctgccatagcgtccttgaaaaatgtgtctcacgggtttcgattgagctgccccaagacttgatctggatttggcaaaacataggacatcactctaaacaggaaagggtggtacagagacattaaaaggctgggccaggtgaaaggcacaagaggaactttccataccagatccatccttttgccagattagtggaagcctgccatgcacagcagggtgtgagagagagagtgtgtatgtatgtgtgtgtggattttttttaatgcaaatttatgaagacgaggtgggttttgtttatttgattgctttttgtgctggggatggaatcttgggcttcatttgtgctaggaagtacactgccactgagttatcccagtaagaatgcaacttaagaccagtacccttattcccacactgtgctgtccaggcatgggaacatgaggcagggactcaactccttagcctttcacaatcttggctttctgagagactcatgagtatgggcctcagtggcaagtgtcctgccctgctgtagcgtgatggttgatagctaaaggaaagagggggtggggagtttcgtttacatgctttgagatcgccacaaacctacctcactgtgttgaaacgggacaaatgcaatagaacacattgggtggtgtgtgtgtgtgtctgatcttggtttcttgtctccctctccccccaaatgctgccctcacccctagttaattgtattcgtctggcctttgtaggacttttactgtctctgagttggtgattgctaggtggcctagttgtgtaaatataaatgtgttggtcttcatgttcttttggggttttattgtttacaaaacttttgttgtattgagagaaaaatagccaaagcatctttgacagaaagctctgcaccagacaacaccatctgaaacttaaatgtgcggtcctcttctcaaagtgaacctctgggaccatggcttatccttacctgttcctcctgtgtctcccattctggaccacagtgaccttcagacagcccctcttctccctcgtaagaaaacttaggctcatttacttctttgagcatctctgtaactcttgaaggacccatgtgaaaattctgaagaagccaggaacctcattctttccttgtccctaactcagtgaagagttttggttggtggttttgagacagggcctcactctgtagctggagatagagagcctcgggttcctggctctcctcctgccttctgcacagagtcccctgtgcagggattgcaggtgccgcttctccctggcaagaccatttatttcatggtgtgattcgcctttggatggatcaaaccaatgtaatctgtcacccttaggtcgagagaagcaattgtggggccttccatgtagaaagttggaatctggacaccagaaaagggactatgaatgtacagtgagtcactcaggaacttaatgccggtgcaagaaacttatgtcaaagaggccacaagattgttactaggagacggacgaatgtatctccatgtttactgctagaaaccaaagctttgtgagaaatcttgaatttatggggagggtgggaaagggtgtacttgtctgtcctttccccatctctttcctgaactgcaggagactaaggccccccaccccccggggcttggatgacccccacccctgcctggggtgttttatttcctagttgatttttactgtacccgggcccttgtattcctatcgtataatcatcctgtgacacatgctgacttttccttcccttctcttccctgggaaaataaagacttattggtactccagagttggtactggtctctctgatgcttaggacgctttcctggcgcataatccccacctcggagcggattgggaagtcacaggaccattatggttttcccactttgttagggacgaatcttgaaagttcagcccttgtagcacctcattactctggatttttgtttctagttaaggcctcttgtcccttccttggaagctgccacattcacaggggattagaggcctggcatgcagaagaatggggctgcctatgcctctgctgggatgaaaggctggggccagggcttagggcaggagaccctaataatactttgtcctttactcctcaaagccctttacaaatcctaattaaccctttgcaacacccccaaaaggaaagtcccatacagaaccggagaaattgaggcccaagcagagtctcccactataaaccaatattttgtgatacagtttgctaactttctagtgagtgcttacaggacgattttttttccaaagggaggggttgggggggg

SEQ ID NO: 29365 - DNA, 1209 bp, Mus musculus
atagaagctgttgctcacacccgaaggaattcctcccacaaatccttcagcttgcctgccaaccctgtcaatcctccgcccctagatcaagtcccagcagagtgaggtgacccgcatcctagatgggaagaggatccaataccagctagtggacatctcccaggacaacgcccttcgagatgagatgcgaaccttggctggcaaccccaaagctaccccacctcagattgtcaacgggaaccactactgtggggtatggggtttgggttctgggaggtgttggaggactgcagccagggtcagacctgggcaaacaactggggtgccctgcacctcgactcaggtgactgcctcccttcctcaggactatgaactcttcgtggaggccgtggagcaggacacactgcaggagttcctgaagctggcctgagtcaggatggccaccgatcctatccagctagctcttcaccaggccttgtaaccaactccttgtcgtcctaatctgcaaacccagacccagaccctttccgcagccgcctcctcttcctccagaggcaacattccttattcaccaactagtctcaaaagattgtcttaagccctgacgatggctgtccccagccacaccttggggcatcctctctgcctggccctgtctgatgagcatttctgttgcttccatcagccagagctctgccaaaggccccgcatccccatcctaggagtgccctagagacaattaaatgtccattcctctggtgctgactgcttgtggtgtccgggtccctgcctggcagaggcagatagttctggtggtgtttggactgtcccagggctgccgctgcgtgtgcgtgtgcatgtgtgtatgtgtgtggaacacatggctggctggcagcacatgaccatgatggctgagtcaccctgtttcccatgtaggttctgctgtctgcctgcctgcctgcctgagggtggctgcccccgggctgcctcccgtgttggagctgactgattcagtgtaggggggtgatgggggcgtgtacagctgcagcagtattagattgggtccatgggggtagttgtggcactggttttgtgcacactctggagaaagtatccatgtgagcttgtggatctacatgcatctggttgtcttcagaggcctcgcccccattgaggctcccctgacccagctgagacagagaatgtcag

SEQ ID NO: 29366 - DNA, 1154 bp, Mus musculus
acaagttgttcccagctctaacctggcatgagaagcaaacaggctgctggcctcccctccatcctccaggacggatccatgttcattcctatccataccttggtcctactgatgctcttttaagagaggcctaaagggtaaagtaggagtagcaaccttttaagaattctcaggccccttgtatcagtcttctgagaactcagctggctttctgggttttctcaggtacctgtttcctcagggctgttgttcccacagaggcctcagggttatccacctctcagcagagcccctactatgatcactgacttggggaccatggcagggctcctcggcctgcctgctgggccatcttttacaggaaactcttcctagctacccattgtctgtccctagaaccttgggcatgtgggcatgtgcttgggtccgctatgtcgtctaggagtacagactcctctgtggttgcctcgtggttcccgggttggacatgagtttcccccgtaagagcacagggtggctgtggctgctcagtccttcctaaggctgggcgctgtcgctgtcctctgaactgtgcctctcatttggggttaggagggttcccttttcctgctctaaccttgacagttcggagcacctaagataaaaaaaaagtgttgagtgttttctggtgttttgtgtttctctaaggcctttgagccttagctttctggtttttcttgcctcccaatttagggatcgtctcagttgtatctggttatttggccagccctcaacctcctctagtttggatccaagggccctgtatgtatgaggagtaaagtagttgtgggggtgcagacaggacttctgctaagccttggggctgttaacagcaccatggacctccagggcctgaggggccgctttgccagtgttttaacaagtttatgttttcttatggagtggcttacctttcagagtaatcacacccagctgaccatcccctcagcctccgggctgctgcctccttaaaacagagcttcctggttggtttccaccctgttatcgggagcccagcctccatgctcacgggtatttttcttcgtaaagtttataaagttatttatatgactctttgttaagtcgactggtttgtattgcctattttgattaca

SEQ ID NO: 29367 - DNA, 1110 bp, Mus musculus
gtgcgcgcgtgcgcgcgctcaagtgtgcaggtgtaggtgccatggaggtcagatagcaactctcaagggttgttttcctcccaccttgtgggatctgggcatcaaactcatgttgccaaggttgtgcctaagtgcttctacccctgagcctttctgttggccagcttgcttctcacagtaggcctcatgataagcatctgcatgacttccagatgccttcagtagttattgaatatttgccatatgccctgcactatcttataggtaaattataattttaatattaatgcaagatagcaattcctaacaaagtttcctgccttttttgttgtctccagtagcatgtttttcagatttacagcaacacaagcacatacacaaaaggggggttttgttggtttggttttagttttgttggcttgccagggtgatgaggtcctgaggtcctggctgaccaggaattcactgtatagaccagtctgatcttacacttgaggcaatcactctatgccaccccacctagttatacagatgctgctggtgactttaagcttaagactgtataccccaggcaggtctgaaacttcatttgtagccaaagatgaccttgaaatcctgatcctcctgtcttcaccttccaagtgctgggttataagtgtgaggcaccacacctaggtacgaaactatagtataagtaactcaaatacgtcagataaactgggcttggtggtacaattttaatcccagcactctggagcagaggcagatgaatctctgagttcaaggccagcctggtctacagagcacattccaggccagccaaggatacacagagaaaccttgcctataaaactatatataagggctggtgagatggctcagcgggtaagagcacagactgctcttctgaaggtcctgagttcaaatcccagcaaccacatggtggctcacaaccacctgtaatgagatctgtcctcttctggcaagtctgaagacagctacagtgtacttatgtattataataaataaatctttaaaaaaaaacaacaactatatataaataaataatttgcgtgtatatagagcaggtatattttttcaaattgaata

SEQ ID NO: 29368 - DNA, 1231 bp, Mus musculus
tcctgcagctttggatcagcaggactggccctttcatgtatttcaaccatttgcagatgatacagatttggggatgggccaactcagtgccctggatctgggcctggctggtaagctgagctggtcagccccctgctctcccttatcagcaccaccagggtgagttctacagcactgctctggctaggccacccagtgccaccatcagtaggaggcagggacagctctccctctcatgacctgggccagttttccccaactgctacagatggtgaggggtaatggggagagggcatcacccccacccccataccacctcaccacagatgaatcatggagccatctctctctctctctctctctctctctctctctctctctctctctcgtgtgtgtgtgtgtgtgtgtgtgtgtgtgtgtgtgtgtccgtctttgaagatggctcatctgctgcttctcagtcggcccagtactactgtgctgcccaggtgaggcacagggcccactgtcctgagtgctgctactgttgatgtacagaactagctctctggctctcgtgacctctgcccagctgcctctgtggactgaggaggcaaggggacagagagcatcccctcctcccacccagcctgcctcatagcagaggggtgcctgggccagctctcttgcacttttggggctggctcacctgtgtcccctacaccagggctatctttatttactgtgctgcccagataaggtgcagggcttgctctcctgagtactgaagctgtcaaggggcagggccagctcaccagctctcatcactccagagccagttctcctgactgctgcaggaggtaaggtgggtggtaagggcatcaaccacaccacctcacactagactagtggtgggactggctcatctgcttcccccatcagggccagcactactgtgctgcttaagcaagataaaggacccgctctcctgagtgtggcaggcagcaaggggcagagccagcttactcactctaatgaccctgagatcagctccttactgccaccggaagtaaggggcaaggaggggaaggcatcacccctgcatctattgtcacctcatggcagatgtggggcagggccagctcttgctcaccttcagggtcagcctgatgtgctgtttaggcaaggtacagggcctgtcctcctgagttcatgatcctcttacatatgactgacagaagtgtggtggcag

SEQ ID NO: 29369 - DNA, 2543 bp, Mus musculus
gtctgtccacatagccattggtgagtagaggtaaaggaagaagcgcaaggcctggggctgtccaggagggtttgccaagctctgaccacatgctgagcgtttaaatgctctttgatcctccccactgcatttatagggagagagaactaaggccctgcttggggtggtcaggtccttgtacttgctgttgggtgggggagacagattccagctctcaggcttgctggatgcgggacaccccctagtgtctcttgtcccctagtctgtgccccaggggtagacatgagcccaagcatcccgtgtttctctcgtcccagcccagaatgctgatgcccaggctgtgctgaaggtggctagggaccgcctccaggggaagttcaatttccacaccatgaccatccagattgagaagtactctgaggacatgaagaactgccaggcgtgccagggccccttggaatgactccccagccagacaccgtctcctcggaaacacggtcaggacctgtgggtagaactgtccggtgtgcagccgggattccagcaaggcacagcctggaccactccacggtggggctctccttagcctctctgagctcacaggatggggacacggcagatgaggccccacttctcttccaggatggtgtttgggcagggtcctgaactgatgtcatcctaacaccaccgctggagagacactgaggcacagaaagggatttgggggtgtcctgtatgatccagggtctctgtgtctgaaccaaaaattgaacaagatccatgtaacacgtgaccgggttgtccgggggggggggggggttcccttggcagggtcggtctcattgataaaagaacctggagctggactcaggaggaagatctgaggctattttattagaatttgggagaaggaaaacaaacaaaacaaaaacccacagtccaggcaagccatgaatctcggcagctactgaaggaaagtgagcgagaagagagaaagaaaatcagggcttttgaattacggtcagcgatggagttctgtaaacagctgaatgactataatgggggagggggggttaaaggaacagtgagaaagccacgcatgcgcacacacacaatttcaagatgagagaaaaaggggggaaggagaaatcgggcttctgagttagagtttgggaagacaagctaacttagcagttcaggtctataaacaagtgtctgtaaagtgggaccccagagagccttcagtgtcctaatcaaggagataattgttccttagcatgtctctgggtgactgacaggcccaactgaatgaactctaaaaaaactgcagagaggtcaaaccataacttggtggagttttttctctccatcttcaggtagtcaggtctgagccactttcgagggaggcgtgggggctatgggaggtaatgtcctactctttgggacacatcttcatcaggggtcatcagggatagaacctagtttctatccttttgcccaggaggaatttgcttctgagggagatgggtctcaaggacccctccctggtttgctttacacagttgggagcagagcccttgcctctgctatataacatggcttaccaaggccatggggacagcatttatacactccctctgagatgtgggaccaaagggcacccaaggcttctctctgccttgctcactttggctgtgggccccatgtgacttcctagaagaggaggagaaagaggcctctttatagggaaaaacctgtctggtttcttccttcctggtaccccagcccaggaagccaagtcagtgtatctatggccttgaccaaagtggcagtgatagattccagttagatcttgctctcacagcctcagggccaggccacttcccttgacctatctcacgagataatagatgctgctgtttcgagggtgaccatgacctagttagggtgaagatgtgtccagaggctgacaggaggggtgtcccgggagtctgtgtgaagaatcctttgagctggtttgaggttacagatgcaagaggtaagagctgtctccagtcttatagagttcataggaagtcccttcttaggaagttccaggccaatgtttatatctgtcattgcaggccaactgaaggttgtcacttctcagtgcctgtgactcatacagagaccaggaacatcatgacatctcccccacaggagtgtgcagacagccgagcctgctaagcactgggtagttgtgtattagtttctttgatcagtgtcctggaaaaggctcttgtgaagggccagacgggcttcctaaagttcctgcaatggctctgtcctggcacagtaaggagaaaggctagggttggcctccaccaccagcaccaccaccccaatttaaaaaaaataaatggcatttgttttatgtgtatgagtgttttgccttgcagatatatatgtgccatgtatatacttggtaccattggatacaggaagatggcatcagatcccttagaaggcaaaaatggttgtgagccaccttgtgggtgctggga

SEQ ID NO: 29370 - DNA, 1103 bp, Mus musculus
gctgtggtccctaaatccagtatgcattctgatccactctatagatcacccccaccttttttttttagtactgggaagcaaacccaggggatcatacaagctaggccagagctctgcactgaactgcatgccattagccgtccgctccaccgatgctcgccccagcagctatatcagacactcttggcgcccagggagcatggctctcctgcagcatgcccgctggtcttgttctccgtaccccctcccaagatcgtagcccaggagttccccgtggccttggcttttcacagatcttcccagggttcttcagtgctgcccctttgggtctttttttttcccctggtgattctggagatgggaggaccacatatgcacacccctgtctgtactcagactgcctgtgagattccttatgggcagccagagagtctacagtctgtgtctctgccaggatcttgtcgcttgcctgttagctggaacggcccctttaaggcaaaggagtctggataccctttgatcatcttgtcccatggtctaggagggttcaggtaagagctttgtccctggacctatcctatcccttgcactgtgacagtgtcttaacgtagtctcaaagggccaaataacagacgttgatctgcctgctgtctttctccctatgcccctcgccagggcactgggccctccttccctagaataaggcttcataaggcttctcacgtgtgactagcttttgcctgacatttttttcatgactgcccactaagtgtataaaataggaatacgggtcaaatgtccattggtgagaagtcacagcgagatagattttaggacaatgatttggaatgcatatcatcttactactcattaaaaccaaaggaaatttgcatactagccagctgggtgtgttatttttgtatggaggattcactttaagctgcacatttgataacgtaaggcgtggagtatttttccacaatagattaatttttggtttttgcaatcatcaatgcagagagttctgcttcgcatagacacatcacacaaaacggcaggagtatgtttagggccaattcagaaactggaaattctgtcttaaa

SEQ ID NO: 29371 - DNA, 1156 bp, Mus musculus
tacctgcagggctcacagcagaatggtcgggtgagtgaagcagtggatggtggccagaattaaacaggtcttctgaccctacagctcagcatccctgtgcttccccaggactagcaccggcagtgctcacacacacacacacacacacacacacacacacacacacacacactaacggttctctccatccctgccctgccgcacagatacctctatcttctgttctctgaagataacgtgctgtcactggaagactgggtgttcaacaccgaggctcatccgctgcccgtcaaccgctcggacagctttagcatagctggccaccctcactgaccactgtcgccacgcctgtgtctcagggacgcctctactttcttgggatccgggaccgttctcagaggcactggggacggaaggcccgctgtgggcagaccctggacggatgtgtcggacaggcgacttcttttcctctgtgaggagacaggagctggtgatgtaccagcgtgggcccctgggctatggtccctggcgcctacacgttcctttctatgggggaatttctgtgtccccacacttgctgtccctgggccaaaggactggaagtttgcgttcccatcttgtgtatttggttcggtttcctttttggtttagggagttcggttttgcttgaccttccttgttttttttctttctccccacttgagttttatgacaattataattttcagaatcatgtaccttctaaagtggcgccacctaactcaaggagacctttagtgtttgtacacacacacacacacacacacacacacacacacacacaccacacacaccacacacactcttgacccgtctgcttttaatgcctatcacccgacattgattctgtcccacttcttgtcatctaccctgtcatcggaggagacagtcccctttgctttggtcccaaatgttacaaatcactaataatgctattttcattactgtaatggagaaatatgtgaagtagaataaaggatttcattgaataagaaatcagattggactcattggccaccagaggctcctgggagaaaaatcctccaacagtgtcacccgaagccgtcaccagctggcagaggagctgaggtgtgatatactaaaggcagtgggtgca

SEQ ID NO: 29372 - DNA, 1100 bp, Mus musculus
ctcattcaccagtcaacgggcctttggtttatttccactttctggctgtttaaaatagggttgccatgagcgcttgtgcccacgttcctatgtggatgtctgtgttccagatttcactctgttgctatgatagtctcagcaacttgggaaggaaagagtttctttggctcacgcttccaagttccaggctgtcagtggcagaactcagggcaggtattgaagcagaagccacagaagactgctgctcactggcccaccccttgatgtcatgctcagctccctttatcatacagcccaccagcctaggggtggtgctgcccacaggggactgggctctctcgcctcagtgaaggtcattctcacagatgtggctgtgaccccatctgatctggacagtccatcagttgagactcccttggtctttagccgtgtcaacctgataactgacgctaactaggacattatgttttgattctagctgtgtgccaggggtcctccagaggatccctagattcaatggttcagtcggaggtcttgctgtcaggcccagtacatggtcttgatcacagctaatgtttatgaaagcagcggacacacagccaagttaacccaggagccgatgcggggcagcagtctgcagggtaccaggtgcagctttcaagtgtgacctcccagggaagccacacaggatgtacctgcagcatgagattgtgactgtgtaaggggctcttaccatgtgtgctcctagagactggtcacgtcagcactctctgcctaacatgtcctgaagtcccaggccacaggcagaaaagcagatgcctccgtgtaagtgtgtttgtattgtcttagtttggtggatctccttatcagtcagccaggcatggaatgctcaagaaattcatctgcccagaggctggcaagcaggcctttctgaagatggacctcctgggcctcctaagctgatgcattttttttttcacagccattttacccatgatcatcttacccagaaggactgggttaaatgctaactcccctgtcgtggtttttattggcagcataaccaggaatcacctaggaacagagtgtttcagtggtag

SEQ ID NO: 29373 - DNA, 1177 bp, Mus musculus
tctccggctccgggatgaatgagtccgggacccagtcgctttatgacatttgtaaggctgagccgtgctgtttgctgttgctgcagagccccctcctagtgcgagcagatagccttctctgtcggtttggcaagcttttctagccgagatctgcaagctatgctggagtccgtgctgatgggggtctggggtgcacaaggggatttcttaggctgcagatgcagaaacaagcttatcctttttagtgttcactaggggcgcagtccagctgttactgtagaaccattcacagccaccccacccccatttgctgaggggcgctgggttttctttcatagtgtttaaccccagttgaatttctcgtgttcattgttgtctgtttgatcatacgaggatgtgtgagctacgagtcacacagagtgctatgcagtcggtcctcagggagtgttatctgagtggatgaggtggaagcagggacaggaagaggcaaagattgcagtcaggctgggtccaaaccttcttctactattggctgtgtgtctttggttcctgtcccttgtctgtgatggctatgtgtctcaggttcctgtctgtcccttgtctgtgatggctatgtgtcttaggtttctgtcccctgtctgtgaatgctgtgactctcaggttcttgtttgtcccttgtttgtgatggctgtgtgtcctgggttcttgtctcctgtctgtgagctaggttttatacctgcttcctggagtggccatgggctaggaggttgtcgtgtccgctctcgaccagcaagaacgacacgaccaccagttcttctaacagcaaacttcagtcttcatctctctcgcttcatctttttcctcatctttctcccccgaacccagggcctctcactcttatatactctcagtccccatccactcacagcaggccacatcacctcaccaggcatgcagcttcagccaatcagggcggcaggggcgtgtcaccaccaaatatggacttgtttaaactgccagcatcatggtgcacctgtgcagctctcacgatggtcgaggcttattttcaggtgtatgaggaagtcaggtgcaagtcataagacttagctgcagtccctggcgccttcttgggactgctgccacacccgctcctcacaggaggtgtgtgacctcactt

SEQ ID NO: 29374 - DNA, 1197 bp, Mus musculus
tctattgtcccgcttcatctctgggatatctgagggacaggaaagatcagcaaggtgaccgacctcaggcttacattcaggaagaggtaagtctggaaattgaaccccggggtatctcaatccaaagcttatttctgcctctgcaccagtagtggggagtttagaacgtcgtgggagctgattccacagttagcactggcaggtgcccactgcgcagatccattggctgaagctatgctgcgcctacccagctggctgcccaccttgggctgctgccctggacatgcccaccatgggactctgcagggccatgtgcccattgcaccaggccctgtcttttccttttccctgccagcttgaggatggttttatcagaggagggacagtgggtgccagtgcaagaggactggaagggaacatttgcagtgtcacatagtgagtttgagttgacctaatggctgccaagtcatatctgcctttgtggggatcgtagaggttaattaccacaggcctcaaactcaggtcccatgtgttcagtgtcctgaggtggccctccccctgcaggtcactaagaacacccagagaacatgacattgctcacggggagctcctggggccccctaatgccagcataacactgctgggcagcttggagcttccggcccagacagaagtgggctgggacacgaggccatgctgctaggcaaccatcagcgcatttctgctgatcaccagcttggccctgtctgtggatgacaagaggcctctgctcttgacccttaataatagtccaggggcgggggcatggttccccagaagtcactggtcctgcatgcttgcctacgccagtgggaaacagggttgaggggtattgcacgggatgcctggtgggtctgctaagtgcggaatggtccaggtggacctcacgagaagaagtagaaagttgaagatgctcttgatggctcggtagctctgcttttgggggccctgtgtgagccactccatgaccaggtgcccaggcacttcctgactccgtatggtaatgactgaatcaaggcagaagtagaaggcttctgggagccttctgaagaggtcaggagccgcaggtcacaggcagcacaggaatttgcaggtcatcaaggccctggttccacacttcccagcaggcacaagttgtagtgtgctgggtcttcctta

SEQ ID NO: 29375 - DNA, 1087 bp, Mus musculus
agggcctggcctcctggagccagtgccccctcctgctgtgggcgtcaggacaatgaccaaagccgttgatgttccttttctctgggcatcctcactcctgaagcagtaagagcctgccgttctttgtgtactggatgggacgtggctttcaggaaagttggggctcctcaagctctgcttcctcggggccgagtaactgaggctctcagagaggcagcccctgaccaaagacacatttaactctgcactttaactctcccgtagtggccatggttcgaggtccatgatggtgctttgggagtagagcttgcctcctgccctccctccacaagggggccccagtccctgacgtggcccatacagtgctaggacctagtgtaccagctgcccatgactcccagagtcactgcaaccatggtgatcacctctgtggctcctgggagtgccccccacccccaccgccaacagacaaagctgggcctgcttttctgttttgtctgtttgtccttgtgtgtgctccattttctgcttccccacaattcctgggatgataccaaagcctagcactaggctgtggcaggcgattcttgcatccattttacagataaagaaactgaggcgacacacgtgttgaggggtggagttgagaacagaacccagatctgataccaaagctgccgtctgtgctgccacctcccagcccacgcctctttctctgtggctttgttgtcctcccaggaaccaaaactccccagctattttctgaccaaaatgtgtttcataacaaaccatctggtgccttttcacacagcgctggcgcaggccgccatgccctgctagctgctatgccgctgacttctgggcagatgtgttttgaagtctgttaattccatgggtgaaacggtatctcactctagaaacatcttgctgtccttttctgacctgcagccgtagtggtccctcgaccctagctggtggtcggggcggtccagtggtgagcttctcttaatctcttttctcccttcgctggtcccgtgggctctggcatcctgaatctcagccaaactaacaacatctttccatcgct

SEQ ID NO: 29376 - DNA, 1828 bp, Mus musculus
caaccaggaggcttcgaaaagcagcgtctctggcagtcaagataaaaaagttgatattgtgttttgtgggactgtatatgttgtcatttttaaaggggggaaataacatccaagtctgattagaaccgcccatcagttgttcttggaagtttttagaagacctcacggactttgcagtttatttttcttggccaacacattaaaaccattcttggatttcaagtagccaattttgcctttttatgtatttttacatagtttcctcttcaagaaaaaaaaagcagagtttttttgcttttcaactctattttgttcttaaataagcaagaaaattgcacgttgtattcactgacgacaacaaaagcttagtttctagcatgagaggctaaacagccccacacagctctgattccatagctgcattaaagatgattatttatattacagagaaaagagggatcggccctccaaggaccagacagattgagagagagtcacttaagctgagagagacttaagggtgagactggcgtgcaggcgtgtgacggtgtgtttggagtattgccattcccatcgctgttagctctagagcacatccagagcatacgtttacagaggaaacttgatcatttccaaccatcttcccctaccccaccctctcgcccctggcacctgtcttctatttgtcgagttcactgttgatcctgttgtaggtggttgggctgctggtcaccatgccaccacttgggttttttccatgggaagcagcctgctgggtgtgcaaggccgagtgatggctgatcaatcaaagccgtggtctaggaccagctcccacgtgccatttactgctttcttcaccctcctcatctggagtttgatggtttacagatgtctgacagttcctcagctcttgtgccaaggaggagtggttgttgttgttttgttttgaagacttaaactctgcacaaagatcctggttcagctgtgtactataggttggtaggaagtgtcgtgtcagcacagacctgggagagggtgttaagaatcagggagcgggagggcaggggagagagaggacgggcaaagcagagatctggtttgaaagctggggaaattgagaagccagatcgatttgactttgcttccatgctgtgtgttctgaaaggacatggctctaaaatttcctgttgattggcatgtgtatctcatttaaagcaaaattaggtagaacaaaccagtcagtaagattagaagtattacagagaatcatccttttaatcacagatcttattttggagtaaaacaaacttctagctttagccaggtgtgcatgttgtcgccatttgcattttgagtcatcttgtgtaaatgtcaccatgaaagtgttactcagaattgtcatagtttttttccccccatctttgtgctaaaacatggaaaattgtcactgtgttgatgaggtttcccccattctgctgcctttgggacactgttttcgttaaacttggtcttggctgcattcttttttttccctcgtggggttcaaaagaataaacattttcttactgataaaactagtttcctgcctttttaacatccctggtggacacagcgaggtagattcttcctctggggctgcagtggcggccagtttgttttcagctcatctcagccccaggtcggatggctgcactcatggcaccgggcagggaccaggcacagggttagagcagtgcacatccaggagctccggctgtttggcgtccatcctcatccacctccccacacccattctctggcatcgaagccagagcatcttctctcctgc

SEQ ID NO: 29377 - DNA, 1182 bp, Mus musculus
tctagacttgctccttggagctgatgtaatatatattgtacttaccaccgcttccaagtttctactgtgatcagtgtagtgaatttctagccgagtttttaaaaagctaaatattccagtatgggtttttgtttgtttgttggtttgtttttggtactgtagcagccaagggattgccggacatggattcctcgatccttatacaccacaacggaggcatcccagccaacaaaaaactgtccacaacgttgccagagatagaatatcgagaaaaagggaaagagaaggacaaggatgccaagaaacacaaccttggaataaataacaacaacattctacaacctgtagactctaagatacaagagattgagtatatggaaaaccatatcaatagtaaaagattaaacaatgatcttgtgggaagtacagaaaatctcttaaaagaggactcatgcactgcttcctcaaaaaattacaaaaatgccagtggagttgtgaactcctcgcctcgaagtcacagcgctacaaatggaagcattccttcctcgtctagtaaaaacgagaagaagcagaagtgcaccagcaagggcccgagtgcacacaaggacttaatggagaactgtattcctaacaaccagctgagcaaaccagacgcgctggtaaggtaagtgtgtgtacactcccttcctcttgaggtgactccaaaaggaacacttcggtggcctgcaggagttgttcctgatcaacgctgagactggcagcaggcaggtggtttgctttacacgggtttgtaggcacctgtgtaggcatagcaaagacttgatttaacctttcctgtattctaaattagaggggacagatgtacatgctgcctgattggtggtcctaaaagacgctgtgtgttcatcctgcctctttatgtttgcctatcgaaggttctttttgacaaaaagacaacaagaagagtttgtgccttgttgatgcaaatttctctatgatcaaactgacagatggggagaagagtaagaaatttgtccttttaccctgagcttgttttattggttagtttctttctgtaattagaatttaaattactgccgggcagtgatggtgcatgcctttaatcacagcacttgggggacagaggcaggaggatttctgaatttgaggccatcctggtct

SEQ ID NO: 29378 - DNA, 1209 bp, Mus musculus
caaacaaattcagaaactgacagcagggcatagagctttgtgcttagaccctcagcactgtacggtagaggcagacggattgctgtaagttcaagggtaacctggtttagatcgtaggtgccttgccagcccaggctactcattaagacccctatctcataaaaacaaaaagagctgaattcattcaaggagaatgagcttgtggcttggacctccttggtgtttggagtgtgacaggtgatcggatgccagcaggtcgaggagggacactatgtcttacttgtctgtctgggtcttgcacgccaggacagcccataaggagcgtggatggggcggagtcgcagctcagtgctagcgtgcctacccccaggccttgagttccgccccccactgacctgcaggtctggggacggtgacagggaatagcagtggaacattatgaacgattcgtgtctctaggacagttggcgtgtgtggctctcgggtgctttctctgcaagtcacaggcttcccatcgttctagaagtttcccaagccaggcagtcatgtttgcttctcgttctgtctgcagagggctggttttcaagtttggccgtacggaggacttgtggcagtgaagacgtcgcttctgcaacacagccgccgtgcatgggcttctttttgcaccctgctcacccacccagtcttttgtaatactgttttctaaacttatttctgagtataatctcagcttgaaattgtataatgctagaatcatgagagctcctatgtgtactgcagcagcccagtgtggcgtgagccccatcagcttttaccacaggaaaggaaaccgctgacgtgagtcgcttctgccagcttctatcatggtctaaagagttggtgatgcaggccaggcgtggtggcacatacctttaatcccagcactcgggaggcggaggcaggcggatttctgagttcgaggccagcctggtctacaaagtgagttccaggacagccagggctgcagagaaaccctgtctcgaaaaaccaaaaaaaaaaaaacaaaaaaacaaaagagttgttgatggagaaatggtggagtctttggggtgaggattcgctctggggtccaaagtgtttattaacgcggcctcttctatgtccggtgttgaataatgtgtaaacattttcttgttattaaaaactatttagtggtcagagttctttctc

SEQ ID NO: 29379 - DNA, 1129 bp, Mus musculus
ggactactttcgtgtcgacacttggacacttggtttgctctttacactacagtaaaaacagtacattgttggtaatactttctctccctctagtctctagagactggagtgttgtcagtagttttcatgtacaccattatgttcccaagtctgtgctcagcatacagtatagtttatctgctttatttctgtcttatagaaatcatgaatgtggtctccagacagtgatgaagaaaatctgttggtaattgatgatgggttcaagtgtcagagtttatgtttacagactaaagcttagccattgttgaagggagttggtgtgcatgctagagttttgggctagggactgtttgtgtaaggcagtgacagctcagcagcctagaggcactgtcatggtgggcatctgtgatctagacgtccttcacatgatatatgcaatatattccagatgttttgagagattacagaagaagaggcctgcttcccttgcagataagtttattacgattctccagaactacagagggtgtgcattggcacactgcagtatataagttaaacctggatcttaaggttaataatttgggctgggatgtaactcagttgtagagaactttgtcagggtgcatagtacctggggttagctcccagcactgtgtagactgggtttagtaccccgctcctatgatcccagcacttgggaggctgtccttggacagctaggggatagatacaagagacttggtctcagaaactgctttatagaaacataaggtaaaaaataactataatgaaggtggtttgtctgtccattgctgagacctcaggggctgcctggtctttgctcaggcaaagaggggctccttgatgagtggattgcaaaagcctcacttctttagatgaagcattttttattgtacttactcaaaatgaggtatatctacaacaggagtcgggtattcgtggggaactgcgcctcccaagtcattctggctaattggaaaacaggctttttttgttgattagctctttaactgtgacaatagatggaatttggtttgtgtatctacagctacatttgtgtacgttgggctttttttttttaaatacaatattttaaaagttaagg

SEQ ID NO: 29380 - DNA, 1163 bp, Mus musculus
ggcctggggaagggggttcggaacctcataattcccttccttcccctagaattgaaaagcgagacaaatacagccgaagacgcccgtacaatgatgatgccgacatcgactacatcaatgagaggaacgccaagttcaacaagaaagcagagaggttctacgggaagtacacggccgagatcaagcagaacctggagagaggcacagctgtgtgagcttaaacctcgggagcagcgcagaagctgggaacggtcggtcggaggcttctgctggcaaattcaacctccctcgtgggaccagtcgattactgtcccacttcccctgcctccccactgggcttctgaaataaatgtcttttctcacctcctctgccacatgcatatgttcacatttttgtgcttggatagacgatgtatttcttgtagtaattgatgttttgtaaaaatctaatttgtataaatcctaattattatttttctatgtattttaaatgtgcataaccatataacctttgaattattggggcttagatgtacacgggtgcagtcactgctgcttttgagtgttgttaggaggaagacggaagctccagccgggctttgggactggccaggaggggactgagaagcagaggctgttgagacagatgctcctggagttctggcactgtgcccggactggagtcagaggtcatggccgtcagccgtgcacactccctttttaaagaacaataaaatgctttggaatagagtctcgaacagtgtctgtaacttaaacattgtgggtacttacacgagtgtgggagcatatgtgacacatcagtgtaaggctgagtgttgacttttgccaacctttgcagatctgtgctcagcctggggtctgagaacctgaaagaacgggtggtctacagtctcatgcgtagacagccttacttctgcttcaatgtactctatacacaaacgagagaaagcagtgatccagggaaggctgttgctgatcggagagacatggtcagaagagtgcacgcaaatgccagtcagcacatgctaaatatagcagagcagcttttccccacaactttgtcaggacagaccaatttaaaaacagttgcctggcacgcattgcagattgtgtctgggaaagagtgaatgcgagacagaagc

SEQ ID NO: 29381 - DNA, 1242 bp, Mus musculus
gcaccagggttgtctagttaccttacaacttgatacaggttttagcctcttgtcattagctaccagggtccctgaattgagtcacaaccctgagaccatgtgggcaccatagggcagtgggaggtagggggacagtttgcttaaaccaaggactgcaaaagtctttctctccaaggatcacaaaagtgtactcaggagaataacggtgctcatcagctttgaaatttataacaaaataatggttcaaatgctgagtcccgcatttgggaccttaagtaagtcactccctcctcatgtcttacacaaagccaggcacaaagccagggtgacctggtgaactacttcctggtcagagatggtacagagagacagtcagtgatgcttggaaactgttcactccgccatccatctatccttaactgcctgtgtgtgacctgatgccagacttctttctctggcattcataaccttggtgggtcttcacatttcatgccttggatgagggttctcatctcatgataagctaagagccaaggtcaaacccaaagatgagcctcagctgtaaggatgccgtccagggactcagcccggctctacagccttagcttggctctttctgagcctcagttgcatatcagaacccctgcaggctgtgtggactgtgtcctgaggacccaccctgtcctgtggggtgccatttctgacactgtgagcctcaggttgatgggcttgtagctctggtcaccccagaagccaccagggggagtcatctaggaagtcaaatggagaagtccttttgttgccagtctttgtttgcccttaatctctcacaggagcaccttggggtctttcattcaccccacatacttacctctcacctctaagctgtcacctttcaaagagagccttcctgatagccagcacccaggaacaagcaacctcccccactcccattcccctcaaccccagacacaagttcagtgctaaccgcggtcactccactgtgtgtgtgtgtgtgtgtgtgtgtgtgtgtgtgtgtgtgttctgtctgggaactccacaatggcagtgtctgggtctaagacatttctgtgtctggcccgagcctggcacacattggcagattaaaacaatctgctggaagcccagggagctggctcagcaggtcaggggcttgctggacaggtgtgggcgctgcccttgtaaacgccaggttcattgtccccacctgtaaatcccagc

SEQ ID NO: 29382 - DNA, 3086 bp, Mus musculus
aatccgctttcctaacagactgctccgcctcctaaagtagaagtgtattttgcatgaacacacagttactcaagactaggagtaaggctagacagagtaggcctctccagtacacactcctgagcagtattattctaaactcctctacccagcccacctaccctaccctgccctgcccatctgctgccctccagtttggaggcacttcgccacaagcgtgtcacccaagaggcagtttgctgtcactctggagccccgaccatcacgtcccttcactgtgtagatggcagaacttgaggtgctatgttccaccattagaaaagtcgcctgcgacatcagtggaccccatgttgctgtgtgcatggtataggaacatttatgtactgggggagttgtaatattgtgtaaggagtctggaaggattactactgtgtcagacgtgctgtttcagagtagtctgttctggagtgtctgagtgagaaggccacttctgtagagacactggtttctaggtagacatttaattttgactaaaatgtgtcatttgtataaattgtaacatccgatagatactacatagaaaatgaaggactgaggggttaggaaggcattttcaaaatgacaagagaaggttgggtggggtctctgtctatcttgcctgctgtgagggtatcacccaggcccacttatccatctacagcgagtagtatggcggccttccttgtaacaggctttttcttttctctcttcgtggtgcttgggatggaacccagggctttgtttaggcctgacaaggctctgcccctgagctgtgccaagcccacctccctctgtgtacaaagctcctttcttgggtgaccaacatcttcctgtctttgagcaaccaaggccagcatgcgagccacccagaagttaattaaaccaggttcatcgggagtttgctgaaatgttaagcatactctgttctagagagggagtgaagaaggggccatcttaaactcccgtgaggcccaggcctcgtgctcctgccccacctccatgtgcatcagactgggtgagaggtccttcacttgtcttgggataaattgtagttgtcttagtgagtgtgtatttccacagttttgcctcatgtcagtccccacgcggaaggatagccttctgtgttcttcttgcctttgttttgagacaggatgttactctgaaaccctggttggcctggaacctgataggtgaccaagccagcctcaaactcgtggcagccctcttgcatttgcctcctgaattggagctaggattcagcctgcaccaccacggctggcttgttttctcatctctaaaaacaaagtctaagctaaaagttgtttgcagtctaacaaaggggaatgagctttgtaaaaccagaggcccctcccgcccagacaaaatggcctttctcagtagtactccagagcctgctgtgactttgtgtactgtgctacatttttttttagtgatctttttaaaaacatgttcaagaaatgctctttcttaaagtcgtctcactccacagttcgctgctttaaagtggccatgctttcccctacgctgtgctgacacttaaaataaatgccagctttatggaaccattctgactcatggcagctccctttgaaaacttaccaatacttcacctagcacgggggtcagggagagcttgacagtggtccccgtggctcagggagatgccgtggccacagctttcaccccattgctaatcagggtgtgagcaccctttatatgcaaactgggtggtggtctgtctggttccagtgggaggtaccatctcttctcctttgagaaatgcccctgcagtgtctccgtgggtggggtggggttgagctttgacgattccagagaagaggtctctgttcttctgtgaggggccaagcgagggctcctgggtcagagctgtactcacagcagagggtgtgcagacaggccttagtgggtgtgaggtgcccacgattgggtgtttattctctttggcttcctaaattgcctcttggttgctcttgccgtctctggatatccaaggaaagtctgtctaggttttggcaagggtagaattgttttcctttatagagagacacagttttgtcaaggaagtgaaaacggattcgagattggcagatggacagaagctttaaaaaggaagagcccacagcaagcactctgaccctgagccgagatcatggcttacagtcttgaaatgtgaactgtgatgtctccatgcggctgatgcaggccatgggccgacatctacagagtggctcctccctcgctcttgcttagcctccgatctgtataagccctccaccttggagccgggattttgagtggagtctgcctattttccagtggatactaagaaactattaaacagtgggaagcctggctgttttaagtaccgtcgcttcctttttgatatagatacagactttgaatacaatgcagtttcctcagtaacattagctttcgtagcagtttataccataagatgttctgactggtttgtacactaggtgggtcagctagtagaatttaggcatttatacttttcctgagttatactcccagaacctcctcagagttgcatgtagatagcatttatttctgcatatttaaaaaaaaaaaaacccatttaggaaatatctacaaagaagaaatgaaaaatagtaattattttttcatgaagattttggtccacacctcattgagttgtaatggattctccagtttcttgagttggcaataatcaacatttggtttggagagcgagcatgagagagcgtttgttagtgaaactcacagacttctaaaagttcattgctacagttatcaaagtgggggaaactaaaattaccttatcaaggaaaaaatattaagtcacaagccatatacatttagctcccaagccataatgccgaacagctttggagtatcgtacagaaagctcattacaaaatgcttgcgttttcttttctctggaacatcaacaccagtgtattgctggcagctattgtattaaaaaaataaatatattttca

SEQ ID NO: 29383 - DNA, 1519 bp, Mus musculus
cgggccccactgtgtctcaagacttaatatgtgcctgggttgggtttgtttttcaggagactgagagtgaagctgaagatgacaaccttgatgacctagagaggcacctgcgggagaaggccctgcggtccatgcggaaggctcaagtgtccccacagtcctaagcggacatgtttgttatgttgtaaattttatttggtttgtactcaattcaatttcaaaattgctaaaatgtgtttgagctttagactataacatttgttgtaataattgctaggttgaagttcaccatgtttaaaaaaaatggggggcatggatttacattacaaaggcgtccacggtgtattagtgacattcttccattgacatttagagtgaaatattttatgccaaaaaaaaaatctcttttttaaaaaagggggtttgactattgttggcattcttgtggttcctttaaatgcccttacctctcccaagaggttgttttgttttgttttcctcccttttctcttgaattttagcatccacataaattatgcttccaaccttgtataggtttgtaagcttgcccagaagtgagaccactgttgaagtaccacaaaagtttgaatgaacgagtgagtgttcactcttttgtctgtggagtctgctgtgtggcaggatcccagccctagagctgcagggctgccctgtgggacagcgcagcctaagctgatttggatctgggtttctcctccaggtagggttgttttgtttccttcgcccttttcttctctgtgtaaaggcgattccctagacccaggatggacccttcagttatagaaatttgtttatggaacccggtggctcccgtcatgtttctccttactcatccaattggtacccacaactgaagagctcgtgtatttggcgggctggaagggcctggacagtgtcttggtttcactgttttattttattttattttttaactaaagctatataaagcttgtggattaaacagaataaatttctaaatttaagaacattgccactcacatttattcgcctgcaggggaggacggagttcagggaaaatagaaagtgatgtcgcaggctctccccttcttactgaaataactaactgcagagatgtcagcaagggagaggggggtgtgttcttggaacatggaaagctggtgaggagagaggcagtttacagcagggcatggtgtcagtgtgaaggacctcccaggtggcacttggacctgaagcttgtgacaccagaagtctgagcctagtctttggaggcacagataaatttgattgtgacttctaatagatgaaactagaatacaaaatgcccacatctgaatttcaggaaagcctaagggtgttttgttttttgactgagacagggtttctctgtatagccctggccgtcctggaactcactctgtagaccaggctggcctcgaactcagaaatccacttgtctctgtctcccaagtgctgggattaaaggtgtgcgccaccactg

SEQ ID NO: 29384 - DNA, 3687 bp, Mus musculus
gggctatgttagtggcacaggcctgcaatcccagcagtgccaagccagagggtctgtgagctgggggccatcctggtctattccaggtcagccagtgctgcacagagaggtcactgtgtgtaagagctggcaagggggcaaatgtgactaaaataaataaaatggacagttcttttaatcaacagtatggtgatttaggctgccacttgggaaactgagacaggaagattgtttgagagctagcctgggctaatggatgaaactaagttttttgttgtgattttatttttcttagaaaaggctggcaaaatggctcaatgggaaaaggcacctgctgccaaacctgatgggctgaatcccatccctgggcctcacgtgctggaaggagagcactcactctccagagttgtcctctgaccccttcagatgtgcattggtttttaactgaagcagaagtttcatcttgtattcttaggccatgtgtttgcttcctgcagggaacaagtgcggagcaggataatcggttcagcaacaaacagaagaaactcctcaagcagctgaaatttgcagaatgcttagaaaaaaaggtattctgggtgggactcttgcagttgctgcattttaagggttgagagatgaactgttacatttgtgcagaaaaaaaaagtttacaatttgccaccctttagccaccacatatacagtacaaccaaagaatgagcatgttagataaactttagttaaacttttttaaatgtgcataagctaaaggaatcatttagacaacctaactcaagctcttactgcagtgaacttgtacttactggtttgcatgtttcaccaggtggacatgagcaaagtaaatttggaggttataaagccttggataaccaaaagagtaactgagatccttggattcgaagatgatgttgtcattgagtttatattcaaccagctggaagtgaaggtatgacatgcagatggctcttacttctgagtatgtgacatgatttgtgaatctgtggaaactcaggttttctgtggaatacaaatgtagaagggttactgtacaatgtttgttgtgagaagaattcactttgtaaaacagctgttaaggctggaggtctagtgaaggtgcatagttttgaaagctacacaggtgaaaaaatcaaacttactgtttgtaattttgctgttacatgttaagttactttgacagcaattttctaatgataatgtgatttatgatttaaaaggcctgaaccaaaatggaagttattccttgcgtctgaagtatagcaccatcaccttattaggtcacagcagagtgagtgtcccaatgtcgctctgacccaactcccttgatgacgcagtgtgtgtttggaggtgagttgtgtaaagtggccgaacatcaacaacaacaacaacacaaacaagagcaattggtaaagctgtgtactgctctttaaagtagcattttgaggtggacatttatttgaagcatgaggggcgatctgatttgactggatgttgcttttaaaagaactgaagactttagttgtagttacaagtcagttgcttaccagttagaattaaggcacaggattttatttacattgtagttagaagttcaggcagatggattggcagtcctataaaagccagttaacataattgtttctatcttccaatatgaaataatacaagatgatataactgtttacaattatttctgttgtaacatagtttgctattttgtcatggtacccaaaggacagtaaagccgtaccataaaaccttttggtaactgtactgacgtgagtttacttttacattactcctgttcccaagagttcatgcttgaattttgacagaacagttatcattccaaacgataaggtatttcatttttaaaacaatgtggtaattattttgctttgaatgttttttaagacttaattttaagaaaggaccttatgtttaagtatatttatttatttcctttagagaccagaaacatgggaggatgttttttaaatgcttaatttactattttattagagaaatgctttactgacttgaattttagtgaactttaaaacctaaatacctggtagtattcccctgtagtgagcatgagattaaagtgtagagctttttaaacaatcttttctttttttgtggttgtgtactcattattgcttgttcgtcttttgcaatttagataaatgatataacattaaactcaaggtggttgagttgcagtagggagtcggaagcaagccaagggaacatctttctctacaggggacttggcgattccaaacccccaaggttccaagaagacactgaagacacctggaatctgtacttgctttgtgctattgagctgtgcttgttatacggaccttgttgcttgaccaacagaatctagtgtttaaaaacccaaattacttgtagaaatcttgactcttagttttgtggacagttgagcatctgtggcattgttagtaacaggttgtcatgtgcagtagtcaggcttttagcttagtcttcagatgttacagagtgcatgcttaactcgttagttcttgtaactgagcactagatattagatagtttatagaaagttacctgtagtgtaaagagaagtgtttatgtacgttttcaagttttggttggggcaagttttccagccaagcaaaaactgttagtaaatgcaagaatttatagatgttccatgattgtttttagagttgataaatgcataagcccactaacagccatacagtctaaatacttaggaaatccacaaaggctgctctaatgcttttggttcagtgagggagaattggattatctagaaattacattaccaagatgcaactagggaaaactatttttacagtagtagagcatatatatgtacctaagccccttatggtagacttaaatactaatttaaatgaatttcagataggttggctagtttcgaagtaacctgtttttcttcctgtcatgtctttttgcagaacccagattccaaaatgatgcaaatcaacctgactgggtttttgaatgggaagaatgctagagaattcatgggagagctgtggcccctgctgttgagtgcacaagaaaatatcgccggaatcccttctgctttcctagagttgaagaaggaagagataaagcagagacaagtaatgctttttgtattgacttgagatgtcatacacggtcggatggttaccctgagggctttgtctctttgagctactgtagcctctgatccggctaggctagtttgctggatgtgtctgcccactgagttgtggcttaccacatttgaaattagagtggcgtattcccagaggcagtgacaattggacagagtgctttgtttttgtttttctcagttcttaaagtataagtgcatttaccttaaaagggagtctaaataaagtatctaaaaagtgtgtgcaacttctcgcacaggtagtaattataaagtcccaagagagtgactatataaatgataagtgaaatgatataaatggtataagtttacattaatgataaaggataaatgaaagagtgttgtaagagtgaacttgagaacatggaacaccttgcagccagtcacgcctgtgaaatggcagttggagcacccgtgtcagtacctta

SEQ ID NO: 29385 - DNA, 1196 bp, Mus musculus
tgcgacgcacatccggcgaacacgcgggcttcatacgagctgacgctgcaggctcaaccccgccggcaacctcccaaaacccactcctagctcaactttcacaatgacaacaactggcgtatcgggccgcccctaagcaagcattctcttttatgactacccatgcaccccaggactgaggcttcccccccgccccccatctcccttcaactccccacatcctcccactacggatcaaaggaaggatcaactcaagtcgcgcgaacaccgctgatcatgcgccacaaaaaaaaaaaaaaaaaaaagatcggtagggttgggcgacccaaagattctccctcctctttccattggttccagtcgcccagctcgcctcccctcctagcgaaaggctgccgccctggtgcgcttgcgcatgcgcgtcgttctcgtggcgcactgagcaggcgcagccgcaggcccgccggagcggggcgggtgtagcggcgcgcgcagcctcccggcgctgggctcccttctgccggtcccgccctccgtcgcggcggcgcggtgcacgctgggatagggagcgatctccgagcgaggcggcaagatggacgcgggattcttccgcgtaagtccgagcgcggggatccggggagaggcgagaggcttgtttgtaagacccgagggggaggcgctcaaaatcccggacaggacggcccgcggaggaaggccttagagaccccgagggggttcgtgggcagcgtcccccggcctcggcgttgcggccgagaccggtgcgcccctgcgcagtctcctcctccgggatcgtccccccctacgcggcggtggcggtggccggaaaatggcggcgggaatgggctggagccgaacctcaccggccgcctggcgaggccctgtaggccgggcgccgcgccggccgcccgggctcggggcctagcggagcctcaaggaggaagtctttagggggaggccggtgggaagcccggggcggctgcggggtaccggttgtatggtttggggctccgtcctgagaggtgtttgaggaaaggggccttattattttttttttttagtggcagctttggagaaaatgggtgccccccccccaaaccccgacgtacagcgtccaccctctgggtcttaagctttcccggcggcgcagggtcagagttcgtgagcgctcccgccca

SEQ ID NO: 29386 - DNA, 1147 bp, Mus musculus
ggtgtggtggccctggcctgtaatctcagcctgcaggagactgaggcaggaggattgagagaacggggctagcttgggctacatgagttaaaccgtctcagaataaggtttttcctttttcttggtgtgacagtacagagcaactgggaaaatatttacttctagccaagaagtctgttctggactcattctacacaaacttaagtacacacacagagagagtacgatgtatgaaccttgagcaaccacatgacaaatgactgttggtgtttcaaactcccttcaagagtgtgttctccagaaaagccatccctctcagagtgccactgtttccctcagtcttgagtggagcgcagttcatagtcaggattaccgtgtattcagcacagtgacataggctgtcctctcagcgcttgggaggcagaggtaccagggcttggcaagcttaaggccagcctgggccatgtaccgagaccctgtctaaaaacaaggggattcctgggtgtccaggtatcccagggacagataacagcaactgtgcatcttgtccacggctgggaacgtgccgtattccttccctgtggtttctagtcaaggctagaagtgatcccagatacggtcagcatgcagacaccacctactcactcgggttagtgctttctcttggaaacctgcagttcttgaagtgggtcccgagacccttgcaggtcccacatggcctgacctgaccggatgtgcgtttatgacacaggggggtttcttttctatctatgcagataatttgtggttttctgtaccgttccctgttggcacccctcttcctaagtccaattgaggactaagggaccacaggtctcagtcctgtgccgtgctgtgccctctgctgtcagcctctgagtatctattcacgtcatgtgtgtctttgacgtgtgagaacgcattcacagctgttgcacattgatccccacaactgaacctgcagctggattaagtcccgaatccagcatgtctgtaatcccctggtctgtgcactgtagtatgctcgctgcacgtgtggaaactggtcagtgagcctcatccgtgtgtcctgtgatttcagtatcgttgatctgatgggccacagttcattatcagcttcaactgtcct

SEQ ID NO: 29387 - DNA, 1828 bp, Mus musculus
gtcctgcctctcttggcagtcagtgacagtggtgtacaggactctgctcccagctcagcccttcccagcctcggctctgctggaggaatctccctttgccagtgggatgtgtcaccgggaagcttggctgaggactacagagttggagtctgtggggcagctcttcagttactctcttgaccctcctaatgccggcctgctactgcttgaggtttcctgtgctgtgcgtgtaatcaaggacgttagtcgtcttaactttagaagataatgataagactttgtgaagaccgctttaaatagggagagccagtttgcttttgttttcttcaaagacagggtttcactttgtagctcctgggcctcaagtcctctgtgatcctcctgcctcagcttcccaagtgctggaattagaggggtgagcaccacacatttcaaagttttccattcaagtatttcagctgttcagaaagaaaaatcacctgtcctttcccccatggattagggaaagtaatcattcttttgggggtggttgggtttgtttgtttggttggttggttggttggttggttgattttgagataaggtttcacgctgtagctcatgctagcctgtcactcattatgtagcccaagctggccttgaggcccagaccactctctttcctcaggctctgtttgtttggattgtaggcatgggcttgttgtagtctatgcttcctcctttaacaatcatttccacctttgcttgcagttggccctcaggtagaattgcttcttacacttgaagatgtgttgttggggcctccataggtcactcagcatcactggtcccttgcagactttcctgcctttgagtgctgggctacaggtacatcagctgctccactcatcaagtattcagagctggctggcctaggtgaaggggctgggcatagaacagagaggaacatagctgcaactgcaaagaaaagaacgtagagaaatgaagccatgagagccgtgtactttgcgtgacatgttagggctgagtccttttgtggtaggattgatttcatgagcgtgcatgcatgagctcacacacaaacacacgcacacaggtgcattgtctgtcattaaaaccgggtcccatgtagtccaggttgacctcaaacttgctgtgtcccaaggatgaccctgaactgctcctcctgcctctgtctcataagtgctaggactgagggtgtgtgccaccatacctgacaagaacaggagagtgtcccttgccttcaggtcctgtggaatgctgaattctgcgtttgccattgggagccctccgtgcagattcagttgcagattacgattccacccgcattggtttttagatccaagtcatctgtcagataaagtgagtttggttttgaggtgacagctcagtgtggcccaggttggtctcaaacgccaggcctcagtgggtcttcccagttgactggatgcaggcacacagctgctgtaatcctgagactttggaggcgaatgcagtagatcaagagttcatccttggcttacagtgctttgcagtgctgagctcggcagtgtacttcatttgattgtaaggtagaccctagctgccagcaagtgtgttctcacagttggggagtttgtgtgttccccgttatacagtacacgttctctctaattttctatgtgatcataaccctgttttaaaatttgtcttggctttcattttctacccctcaatgaaagaacattctttttttttttaagtcaagaagttcaaatctgcatacttgatgctaccttggccactggcagttgtgttgccaccttat

SEQ ID NO: 29388 - DNA, 1140 bp, Mus musculus
cttctccaccccttaccctgaagccaggcattcagtctgtagcccaggctgatcttgaaatctcagtcctcttgcctccacctctggagtgccgggattgcaggtgtgtactactgtgtccagctcccatcggaactcccctggccacattaaatgccacagggcctctctcccagccacaaaggcactccaacaggggcatcaaccatgggatggaacttcatttgttcccttgtcttcctccccaaaccccgatccgaatctctgttctgcgggttgggttccagattagacattagaacagatgtgattgcacactgctgctttcagaggtggggtcctgactccacgctgtggcctgatggttctcacactctcagcactaaggtttggggttcatcatggacctgagtactgggggtcggggggaggttgcctttccagtggacctagccagcttgagggtattgtgggaatagacgcaggtggccatcagagaaggactgggccctgctcaccctgcaggcttgcagatttcaaatgtgacccaactctaactgacaccgaaaccaccctgtaaatgaagtcactctagaacatagtctctgtagatgcttatattttgttaaatgtcaaaactaacacagcatgtgttattttgcagaagtgtgtatactgtgtgcagataacattgtaaagcggtatttaattaaaaatccaagcagttcttgcagagttcgggtcctgtgttgcactaatacttcagcagctgtctagtagaatggtccatgtcatttctgtcttgtcatccccacgtgactgctggccactctaaatatggctagtgtgcccaagaaactaattttatactttgcatgtgcacacatgtgaatacatgcatgccccatgagtggagttcagaggactttggggttcagttctctcctttccccatgtggggtccaggcatcaaactggggtcattaggcttggcagcaagtgcccttacctgctaagccatctcattagccccaaaatgtgtcaccactaagccacacccctgcatagttcctccctgttactgcgctaacataccatggtcaaagcaatgcatgcaagtccgtttattctggcttatgg

SEQ ID NO: 29389 - DNA, 2098 bp, Mus musculus
gacagcatttctgagctctacaccccggccacactgcccgtcatgcaggaggagcacagctccaggagcacccctggggttccctaccgcgtcctggagcacaccaagaaggaatgaccggcctccctttggggtgtcactgcccggaggtcacccatggttccgttcttcattgcccaaactgcctttcaagtatcctggtttcaaacggagaactctgtgcaagatggccttgcaaggcccctgtctctcgggcagagaagccattcgatgaccttggctttggaaatttcaaatagtagggggagaatcccaggtgggctatgtggccggttatgctagtgggagttgaaaccattttacctccttggacagtcagtgagcgtcaggtaacggtcacaggttccacacatttccttggagtaaaagcaagacagagtgagtctgccccctctttgcaaatccagcaaaaggctggcgacctccaccgttggtcttcctctacccagcacgcatgtctcagctctacctagttcactcaccattctgtaactctgaggacactgctgtcccttttgtcaaccctgtgtggaaaaagctgtcgtttgcaccttcctggcggacatggaccttcccatcgcctgggtccatctgtgaagaccgggcggtgtctactgggtctgctctgaaaactggcttcgttccagtccttagagattattccattgcttcctctctccaaagaagccgagagaacagaggcagagggggacaggagcgggggtgggggtggggtgtgtgtgggggtgggccgctttcagcccactctgtttccggctaattagaaaggttggaagagtcggagcctcctgaagatccacttcagcctcctccccgtcctccccttagtctcccgctagctaagcctcagctgcaatttcacagcctggttcaggcagaacaggcattttcacacacaggtctgcagctttcttcctgtttattccgtgagtggcctccccctcgccctccccccctccccaaccaatgcacacacttgagagtagctggcaaaggcttgcaggctttgacaggcattagaattccagaggagtttgtttaaaatgtaagttccttgcgccaactggagtgacctgggtcagtgggcttgggatgggacccaacggcctgcatcagctcggagatctgagccccagagagcagagagcagaccccctcagaagccttctcacggaccactaattcccaagggaccacgcggcccagaaggtttaaacctccagtttcttaccctctcagggctttataggcaatctatatgggctcttcggacctgtggcagtccctacccagtgaacaccactggagagtggcagtgttaataggtcagtgtttgatatgccgtcctcggcatgtctcttcacgcccaaacagtgctctgacttcagaactctgccatctgctacagagcctacaaccacttctgtatttcttcttgaccatgtctgtattgtggctcgcatgcctgaggttgaaatgggaacagagaaagggctcttcaactcagcccaacagcagtaggccccgggtgcttttctgaggtcctgggggctgttttaccatatatctctcacccacaaagctccaagcattatacatagttctgcccaccaggactgcagggggacggacacaccaggaaccttgggcagggcaggctgtgtggcagagaggcatagcctcacggaggtttgccataaggctaagccctgaactcaatagttgttccgattggaaacgatttccatgcaatcatggtggaaatatagctaagattagagaagtgggtgatcacatgctccccctgaaaggaaatgggctgctctggaaaatcaggggtgggaaccagggttgccaaagagcccagggatgtgataaaagatgaaggtcaaaagacaagcagtcttttgaagcacagtggctcacacccgtcacttggaagacattattctttccttcaggagaatagccgcaaattctaggctaacctggactaccaagtgagaccctgtctcaa

SEQ ID NO: 29390 - DNA, 1194 bp, Mus musculus
atgtttaaaacacagagaggcagagacacatctgaaatgcagagttataagggaggacccgtccagttaggagacatgagctttgttttattttatgtgtgtgtctttctgtgccccgttcccaagggcatcagaaggtgtttcttctggatctggagttacagatggttgtgagccagcatgtgggtgttgggaatcgaacccaggacctctgtaagggcagtgcgtaccctgaaccactgagccatctctccagtttaggtttgggttttagctgaagagcctctctgttcatgtctccgtctgccatgtcttttgtttttgttttaatatttaagatttggcggcatgttttttcggaaggttttggaccttggttgtttctgatctccgtcctggtgggctactcccccatggcgctgacagtggattgctgcccccaaagcacttctagaatggccacctgcccaggcacttgttgacttgctctgcaggaatttgcatggcagattccctgttgtctggttgctttgagtgtgggatgaactgtgaacgtgactgagtaccaggtctggtactcatctctgaatatttcctcggatgagttttagattgttctctatgaataggtaaaaggttttactatcaaactttggtgttcctaatgaagcatatagagactggaacccgttttaaaacttgtttgttttcttgaattagttaacttcttagtttcatttccattccctatgataggggagaaattcctatttccaggttacaacccattctagcagggaaataacagtgtcaagagagggaactgctcatgtggccttcgtaatcagggtcagaaaacgaagaatggttgagggttagtgctcagcttgctttctctgcttctctaggacccagatctaagggatggtgccgcccacagtgggcggctcttcctgcatcaattaacataacgcagtcttcacagacaagcctgcaggccaatcagatctcgacaatccttcattgagactcttcccaggttgtgccgagctgacagtgaaaaagaaccatcacaggggctggaaagatggctcagtggttaagagtacctactgctcttacagaggactcaagttccattcttggtacccaagggatccagctcctctcctgaccttctcaggcaccgcatcc

SEQ ID NO: 29391 - DNA, 1206 bp, Mus musculus
tgaccactggaattcctcatcttacagcctggtcttgagggtcacagaaagctacagaagtggcctgtagcattgctatcaagcttgttgctcagagggtcatgacagctggcctggacgcatagtaaccatgtctccctcctctctcttccagcatcctggttaacatggacaacaacatcatccaacactacagcaaccacgtggccttcctgctggacatgggtgagctggacggcaagatccagatcatcctgaaggagctatgagggcccggcctcaagcgtcccacacccggggcccggctcaagccacgtacaacctcttctgtgtcagctgttacttgaaatgcctttctttgggaaagaggtctcgcaagcaaccaactcggtgatgtccaagccagggagagaccaagaaggttccaggatctaaatgtcccacccaggctcgaactcactccagagcttcctgaaagcacccagcccaccggagagtctgagcaacacagacccaactgcctgctttctcttctaagtcccgctgcagaggcccttacaggggacgggggtcacaccaccttctctgcagggctacacccgctgtctcgatcggttctgacgttcactgtttcctttctaccaacttcagaccagagagttctcacactttggccaaataacttgaaaactcgtgactttcacagcagatgcctttgtgaggcccttggagaggaaactttcttattgacttcctcggcacaagatgtaagtcaccatcatcgagctgacaggaacaaatacccttgccacctactgttgtacacatttcttatttacagttttcattatgtgattatatatatatatatgtaagtatatattatgtacatatatgcaacattttgtatgtccatgttacatttttatcatttcaaaaatatgtatttcatatttcttgaactatttttttagctgttattcgattatgcattttgtatatcatagggtttagtaataaaagcctacccatgcacacttccccggttttcatgcgcttcttccttctgtgagactccagtgagtctcaaagacccagaagagaggctccggttggagaggcccttcctctttctcccttcactgtggcttgtcccaagggcttcatgtcctgtacatgaaggctgacaatgggcatggcatattt

SEQ ID NO: 29392 - DNA, 1183 bp, Mus musculus
tgtctagctgtggagaagagaattacctccccactaatggagcctagcagcattgagaagattgtagagatcgatgctcatataggttgtgccatgagtaggctaattgctgatgctaaaactttaattgataaagccagagtggaggcacagaaccactggttcacctataatgagacaatgacagtcaagagtgtgacccaggctgtgtccaatctggctctgcagtttggagaagaagatgcagatccaggtgctatgtctcgtccctttggagtagcattgttgtttggaggagttgatgagaaaggaccccaactgtttcacatggacccatctgggacctttgtacagtgtgatgctcgagcaattggctctgcttctgagggtgctcagagctccttgcaagaagtttaccataagtctatgactctaaaggaggccatcaagtcctcgctcatcatcctcaagcaagtcatggaggagaagctgaatgcaaccaacatcgagctagccacggtgcagcctggtcagaatttccacatgttcacaaaggaagaactggaggaggtgatcaaggacatttaagaaggagccgtccttgaacttctgtgggacactttcagttctaattgcccttagactttatttccagctcttatgtcatggaaaatatccagtatatgtgtgtgtgtgtttttatgaagtctgtacataacagcaattctcaaataaaaaaattaaaaaaaaaaaaagagttgctgtggtcatggtgcctcctcacagcaataaaacccaaactaagacacacagctatagaaagaaagaaagaaagaaagaaagaaagaaaggaaggattacaaagtaaaccccacaattaataacttatatctgacccgacatgtttcaagcagagattactggcattggtatggcatgacggcatccatggtgccaggtgccaaggcaacaacacacgcaacatagctggacacgcctcagatccaatacacattgcatggcagaactctactgttgccaatgcttttgcaattctcttcattcagtgatgcgactcccccttatggggtcataaccacagtgtaagacgctgaaatttagaaagggggatgcttggtttaaggttcagagatgggaatgtggggtcacagagccctacagg

SEQ ID NO: 29393 - DNA, 1473 bp, Mus musculus
ttcatatccatatttggtagaactgttaacctagaaatgtagcttgctaataagatagaatgatacagaagtgaagtggtagccacattacaacactgactgctcagacacatttaggttcagggtggacctttatgtcttgtcaagatgtctaagcccatgatgattatttatgatgcaatgtggaatagttcttttgttaaatccaccatctggggattgatgccaactgggttaaatagcgttttcagggagagtgcccttttcactgaaacatggagccttcactgctttccccacctcaatccctgctggtttctaagatatggaacattaaagcataagggaaaaccctcccccttaagttgtgagtgagtcagtgatcacagaaaccattgtaaggggaaaagactgttcttagcatagttgctctaaatttaactattgttgatcattgttatttaggggttttgttttgttgtttgttttttctgttagaaacaagtgaactgtttgaaaatacatttttgtttgtttatatgcatagtgtaaaacaaactgaattttgatgctcacagcacttaccatgtgcgtttgtatcaaaatctgcctgttcttcataggggaggcttgctcttcacacctcagtttattcatgtgagacaggctgagaagataacactcctaggtgattttgtggtgccgtggatttttggggaaagttgagttttaagcaaaagccacatcacttagtttttggtaatgtaggacatgactaaaaaataacgaaatgatacccttaaatatttataatttctagtatttcaagattgttttggaggcaataaaatgacttgaaatgtccggtgtcatttcagaatacaaagctagtgtctctaagatcttagattcgttgcttacagatgtgagtgaagatactgtgggggacgatcctcctggaggattaccttatttttttcctttcgattttgtttttagaaatttagtccttgcttgtagacaacaaaagatggttttaagaactgtttgtggaatgtgtttggagggttaattctagaacctttgtatatttaatagtatttctaacttttatttctttactgtttgcagttaatgttcttgttctgctatgcaatcatttatatgcacgtttctttaatttttttagattttcctggatgtatagtttaaacaaagtctatttaaaactgtagcggtagtttgcagttctagcaaagaggaaagttgtggggttaaactttgtattttctttcttatagaagcttctaaaaaggtatttttatatgttctttttaacaaatattgtgtacaacctttaaaacatcaatgtttggatcaaaacaagacccagcttattttctgcttgctgtaaattaagcaaagatgctataataaaaacaaaatgaaggaaataatgattaactggaatta

SEQ ID NO: 29394 - DNA, 1212 bp, Mus musculus
atttatgggttaacacacaacttctgaagaagtcagacagtgcatttagcatatacaaggttgcacagttcagtttcatggtctagggtcatccaaactatcttgggcatttttcaaaagatagcggcgcagcacatgtcccagtggtcatttcttaaatgcagtggataagtacccagagatgtaccaagtctattctaaaaacagacagtgctgactagcaccccacaaagctgctaaagtgatcctggcctcacctatatacaaagcctgtttgaagtagggagttgtgtttgtgacatttaaagtcatgtaaatacatgtaataagcttgtaacatatgtaatgttttcttagcctttattctacaaaaataagactatttttagtgtgaatttgatgaatgtaagaccatgaactgttttttttttaaaaatcttatggcctaattttgaaggtctccaatttttaaaggttgcccttgtgcttaagtgccagagtgaatcaatgtaactgatgtgtgaaatctgttgtattaagtttttataattgaaaagatttaagctacatttcctgtttttttttaaagagatataaagatgtaggacaaaacttcctccccaaccatcttaaacccaaagactcattttggctttatcaaccctaagtcacccctgcctgattatgtgcaacccctcattttcattggcaaagggaaaaagtctcttgtgttattaaacccagtaacaattacttctcaatctttatgagcagaagagctaaattgtgttttctcaattaagttcagagcaagagttcaagtcaaacattgagtatcctaaaggacaagttcacaaaactataatctgactgaaaaataaaattcataaataaacctttcctccctagtacattctttttatgtaagtgatttatgattgtctacttgggatgactgtgatgctactatgctgtttgacacaggtctctctagcttgaacgctgagattgacagtgtgcacagccctgcccagctgaactatgcttcctctgtgctgatggggaatttaaacattttatttatgactattcaaactaccgaaaatccttgtatgtaggcagatatgagttacagaacagcaagtgctttacctggtctcaaaaccaaaagtgtaattagcttttgcttatttgcttaaacaatcccacctg

SEQ ID NO: 29395 - DNA, 1122 bp, Mus musculus
tctaggccagcatgacctacaatagtgagttccaggaagaggcggccatggaagaaagccacgtcaaacaaagtacaggtcctactcaagtgttaagggaactgggtgagagggaggagatccttgctaccatttgctggggcacaggttctgggtaggagccactctgtgcgtgttgagctggctggagaagttctggagaggcctagctcgggcttcctggaacgggaaatggatgggatcaccacgtcgttctccgttctccattgcaggcttaggagacacacaccttccctctgccgtcccctgcttacacgcttacacgcgtcacggtgaaccctccacgcaggcaagctcgccctggatttctgtccgtgcgcacgcacgtctgcactggtcggtgctagcagaggagcctgctcaggctcttcatcctctctgctgagctctggtaccctgtcctccggccccatttgtcagtccagccagaatcctccttccccctggtgtttctttcatggttcagctttctcccacggcctcctcttcctggaactcactattgtaggtcatgctggcctagaacacaaagatcggcctagctccatctcctgatcagattaaagttatgccccacccagtccatccctccggacgtttccctctccctccccctccccctccctctctgtgttgtggaggtcaggggacagctctttggaggtgtttctagaaatgggctcactgcttttcctgtcttggcaatcttttcctgatgccatacattccctgccctccctttcttggagtgagagatgctctttggcctatacagtctctgtgctttattttattttatttatttattttatgaatgtgaatactctatctgcatgtacacctgcatgccagaagagggcatcagatcccattacagatggttgtgagccaccatgtggttgctgggaattgaactcagggccttcagaagagcagccagtgatcttaactgctgagccacctctccagccctcagtctctgtcctttggtctgtggcttcccttgaatagtcttacaaactttacaattagtatgtcacaaataattttaccattcaattt

SEQ ID NO: 29396 - DNA, 2338 bp, Mus musculus
tttgtttttttctttttgtcctctatatttagccttttactttccaggtcctttattaaagttagatgagcctagcaaaagccattcttgtcctgggtcagctcttctgagtagacactggtcaaagggcaccttcagagccagtgtgttgctccaagcccatatacagggccaggagtgagagtgccagaatgcctgtcctccagcgagcctccctgttaaaccctcagagttccttgatgggcgcttttctttcttcagtagtgtttgctaaagaaggctgtttgcaaagtctatagtcctttgtgcatcatcttcaaatcacactcctcttccctgttttcaggcttgctggaggacagacccttaagatatgaatttatgtaggacctcagcagttttataatcctagtttctggttcagtattttacatacacacctgcccttattttgcctttccctgcactgtggggaaacagacatagcagggcttttgtagctctgagtgtgattttggggggttgaaatgccagcactttattctcttgttctctatgaattcctaccaggagtgaatgatttaaagcactgtagtgctgtggaacttgcttttgtttgaaaggaaaggtgctgatgtgcccagaggaacggtattgtgctgtggccagcagagaactctgtgcagcctccgccttctgagtgttggccttgggaagggtggatggtcaccctggtcccagccaaccagttcaggaggaagattccctatttctaggtcgcataagggcaaggttagagctaggaggatagtgccagcttcttccttcctgtcagaaaacgtggaagaggactcaattggctatgagccaggtgaaagacactatgaacttgaggggacagacagcactggcactgtgcctatcctgttttagcaccctcaagacctcaggctagtgaagactcccaaggcagtccaggaaacctgcacagataaagctaggcccaccttactgtgcattgctatgctgggtccctgttgccatgggacacaggtattgctaagtaaaacattgtttctcttggttgcttgtttcaccataccacctctcagcctgacctcaaactctaacatcaggtctcttagctgacgttaaagggacatttgtactaggagccaggcccctgctgtctagaacagcctcctttctaggtgttgaccacctcagatttatgccttagctgtgtttcaagacttccctttgccattttttcctattgcaggttcgattgtgtatgatttaattccctttaggaatttgtaggcctagggaaagaaaggacatgcatttgcccgtcccaatgtcagcatctggtttggcacacaaagatttctgaggcacccagtttacctagagccagattttctagcccttcaagagtgtctgtgtcagggataggactgctgagaacagtgagggcccagtgagcagctgtctccacagtccctcaccccatgcacaatggccacaaagcagacacagtcatgttcaacttttggtcacatttgtgaagactcgtgcaatgttttctgtgctacactacatacaggtcacacatgatggactagccctttacatacagatgacacatacagaatagccctttgcgatccttggcgttccaagggctctcaggggctcactttctctgttttggaggcaggaggagcaggagtgagcaccaccctgctctgcatttgtattttggtcccaaaatgtaaatacaattttctatgttacttttttgtggtaactacaagatgaatattttaattagataagttatacaaaaaggaaaatcccatgtctaaataaaaagcaaaaaaattctacctgctgagcctttcctcattttgtaagggaagagaggccaatcaccagatgcctgcttcactaaccactgatggagctgcaagctcagcccagtgtggaggcggggttcagccgatctccgtaggagagattttaagggagcaaacatcttcagggggacaaagggagctaaggtggacattttctgtgtatggtcaacattcatgcagggaccaaaggaagattgccatctctcagcctcccctgggaaggctttaccactctgttggcgttggcattctggaccttgtctccctcacgtcagacaatacacattcactcaggcatttacttgcttctttatgttttgttttgttttttggagaaagggtttccctggctgtcctggaactcactctgtagaccaagctggtctcgaactcagaaatctgtctctgcctcccaa

SEQ ID NO: 29397 - DNA, 1200 bp, Mus musculus
tggctgggtaaattagagatggaaagctctgttttctgtgttgtggacgatgttgactgacacgctagatgccgtgcaatggaaataagacattacctgcctcttgtgtccccgtcctgcagctagatacactgtcaggtcctttggcatccggagaaatgagaagattgctgttcactgcacagtccgcggagccaaggcagaggaaattctggagaaaggcctgaaggtgaggctggtggggtggaggctgctgcattgtcagagatgggctatatatacacacatacagtgccttggcgtttcagagatgactgttcctggatttctgtccttgggattttctctgctctttggaagtggggatcgtttgatggcatttgtagctggggcatgacttggttaggggagggatacctgtgctcctagctaggactcacagagttttggttttgctctgggcctactgggtgttgatctgagctcatgttgggctacttgaacatgatggatagcatggtcacttctgtgtccattcaggtgcgggagtatgagttgcggaaaaataacttctcggatactggaaactttggttttggaattcaagaacacattgacctgggcatcaaatacgacccaagcattgggatctacggcctggacttctatgtggtatgtggacttctcagtcccaagctgcctgtggggagaggtggctcctctgtcgacgtccacacatgctgtcctgctgttgggatggggagctgggttgaagtctcgtgtcttgtctgcctgtgtgtccccctcagaaaagggccttgtagcaagtgtagaggttccggggtttattccctgccgttgcaaagctctctgggtcatcctgggctgcatttgcccttcgaatttgcttccctgtctccactcatctccttagcctggggcacaggagttctgtgaggaagtcatggaaatgtggggggtgcagactgctcaaatggggattgtcatgtgggaatggccgttatcatagtggaaagcgctttgggggggtatgctgcttttggcgacttaaatttttccacattgcacatgtaagtttttgttttgaggcagggtctttgatttacagcctaagctggccttgaactccctgcatgtatatctgcaccatgtgtgtgcctggtgcctgtggaggccaga

SEQ ID NO: 29398 - DNA, 1149 bp, Mus musculus
acactcacacacacacacacacacacatgcacagcagtgtccacagctgataagaagcagggctgaggtttgcagccacattcttgttccccttgctgtaatcccagcaatgtgatgtgattgtaatatgttggggatggaaccggggacctgtgtatactaggcaggtgttctactgttgatgtggtgtgtgtgtgtgtgtgtgtgtgtgtgtgtgtacatataactatgcacacacattcatgcctgtgcagaggccagagcaggacgtcaggtgtctccctctatcaccctctgagttgttcccttaagatggagtcattagatctgaaattactattatttgtccagactggctggcctgtgacctctcgggatcaacctgtgactctcttccagttctaggggttataggcactcacagccacgctagcttttatgtgggcactggggattcgaactcaggtctgcctacttgcagtgcagtcagtcttaaccactaagctatcttcccagcctttgctttgcttcaatgtcttgtttcgtagtctcaaccgcatggtacttctgcctctgcctgccaagcgccagcatgagaggtctaagccaccatactcggcatgaaagtttgctctagcttttcctgtaggaatttaatagattgagatcttgcgtttggtctttcgtctactttgaactaattttaagaaatggtttaaaggtccagcttcactcctctgcacgtggacacctcactctccggggaacatttgttgaaagggcggccccttggggggtggggtgggagggccaatgctttaaaaaaaaaagatttattttatcttctgttgcttatttgtgtgtgggtatgtgcatatgaacacaagtactcacagaggcccaggaaggcatcggatctctgggatcaggagctaccgattgcaaggtgtaggcgctgtgaacccagctcgggtcctctgcacaaaccacaaactgcccccacttcttcagctcaggagattgctgtttaaagctaggcattatcagggtgtcgtgggctgatgtaatgatgtaaggagagttggggaagctggaaatgtaggaaccagaaaatggtttccgtagcagtcctgtagggtagcaaggtgg

SEQ ID NO: 29399 - DNA, 1485 bp, Mus musculus
cacagatacagagatacatgccaagccacagacagaaacacacacacacatacacacacacacacacacacacacacacacacacacacacacacacacacacacacacacacaccacacacaccacacacgaacaactttgctttggcttggcagcaactgtaagttgcagtaactgaattgtccacgaggtggcgcccaagaacagcaagcagagcccccatgtgcctctggcaggcaccagaaaagatttctaagagctggcactggggctggggctggggctgaggctggggtggcggctgacaaatctgggagcagagggaaggcacagataaaatgcacctaatcccgagcctcactaacaatgccttttctggagtttggcagtccctgatggtatgtatgagtgtgactggataaaacacagttacaaaatccaggcagccaggcagccagctcctagccaggcagccagctcccagccaggctgggaggcacaaagccagggtctagaggtgaaagagctccaatcagctgctgcttgcatgggtcagaggactctggaaaactctcaacacagtgaaatgtatcaggagaactggaaagacagacagccgtttccatctgactcaaccgcttggaagttggatggatgactttagacagctcagttctgctcactgagactcgccgtattgatctgtagggtggaaatgattttgacttcccaaggtcattgtgaggatcagatggtgaaatgaaaagcccgggcattgctctcaatcacaggctgcaaaggtggcatgtgtgatagtactgctcgtgtgcggggataagtgacctggtgctttttgctgggatttcgttaggttcttttagttgttccaactgacccataaaacgattgctactgttagtcctatgtgagacatcagaggctaaagaaccgacccaaggtcacagtggtgcaccaggctttggaatttgtctctgaagcctagatttgtcggagagcacactcactacgagagcacgtgtgcacgtatgcgtgtgcgtgcatgatggcacatacatggaggttagaggaaaactttggggagttgcttttctcttccctctatgtgggttccctgaaccttatgtatgccgggccacacataacagggactcctttccgctgaggaatgggaacgtgagccctcttggtgttttttgctttttgtttgtttttaaagatttattatatatatactgtccctgtcttcacacacaccagaagagtgtgtcagatcctattacagatggttgtgagccaccatgtggtttctgggatttgaactcaggacctctggaagagcagtcaatgcttttaaccactgagccatctctctagcccgagctctcttataaacccaggaaataggaatactgcctttcagaaaggatgagactccctccagttgagctctatctgtactccct

SEQ ID NO: 29400 - DNA, 1107 bp, Mus musculus
gtcagcagctctgaaggcagaaggtgggggctggggctggggctggggctggggctggggctggggctggggctggggctggggctggggctggggcttgggctggggctggggctgaggctggggctgggactggggaagaggaagcagccagtgagacaccattggtttgcttgcttgcttgcttgttgaggcagagtctccagtaggggtgcatcccactgccaagaagcgtccctagcaaagttgcgcaggactaatgtctgtgccccgacctctttcagacaatttcaaggactatggagtcaactgtgacaagctggcctcagaaatagaagaccatatcctcacatagcttatggcaggggatgcctaaactgtctagttggcgggtgtgggcggcagctctgggaaaggctccctgctctgcccttgaaccagagctcctgagcgcagctgacattgctcttgggtccggcccggcccatcaatggtttccctgggctcatctgattgtaggtgaagcactggaagctcagggaggcgctgtcacctgccaaagctcctgcagtaagccctgccctggtctgtctgcatgaacagaggggtagcctgctccacaggctatgtttccctccctccctctgataggcacagctcctgagtgtactctgcgatgcaattaggcaggcactgcgctgggcagctgacacttagtgaactgtcttaatgcccccagccacccctctgaagcttgttggtgttctcatcagggaaactaaggctggggatggcaaggtatcagagctggacgaaaagtcttgatatatggttctatgtatataaaaaaagtatatttaaaaaataaaatctcactatgtagttgtggcttgccagaactctatgtagactaggctagcctcaaacttacagagatcctctgccgcagggtgctggtattaaaggcacatgccagcatgcctgtcgctctatatatttatgttttctatgttctttacctactattttacctcctgattcttttcacatttggggataggcttggcctttcctcttcctcctcatcttcttctttctcctcctctt

SEQ ID NO: 29401 - DNA, 1300 bp, Mus musculus
gcccctttctaagccttgcttcctcatctacttgtgggagaagtaactggtcagccattgccagagtggatccccgggatgaagggctgtgcctaagaaggagggagatgatctgagcagactccttgggagaggtggtgatgtcgcttggttggtaggatgcgtgcctattctagctctcaggaagtgaatgtgagagaatcagaagttcaaggccatccttagttacacagagaattcttggttaccctgggctacgagagaaaccggagctggtggggaggacaggacttcccactggattttgtaatttagttcgtttcgctttctggttttctgaggcaaggccttggtagccttggctgttctccggaactgtagctctgtagaccaggctggcctcgtacttacagagatccatctgcctgcctctgcctcctgaatgctgagatccaagggcgtgtgccactcccaaagccaatggtttgcttttgcacttctcagaacctgaagcccgtggctcttgaccgctgcctttgacagttggtctccaattctggggtccttccaaactagaggtttcctgtatcatttttctcatcttagaagtcttgaatgtggaacacttgacaggttccatatcccatactggttccgggtgtgtgatgacacacttatgccttctaacaatcccagtttattttgttgttgttgttgttgttgatgatgatggtggtgttggtgctttaaagaaggggactgaagcacagaagcaggtgactcacctgaactgcagcgggagactgcgacagaccagcacgcctatcctgagcccctgatacctcagtgcctgctgtgcagtctggcctcttcttggaggccgttcctgtctctgatacttggctgaccccagggctcaaagcagatgcccactgagcagaggccacagagatgtctcctgacccccatagcaggctcctactccccatgctcctccagggatggtaaggtggcccttgacccagacacatatctatcaagaactcaagagcacagacatgaagtaccggaaccgtgtgcgcagccgcatcagcaacctgaaggaccccaggaacccaggcctgaggcggaatgtgctcagtggggccatttccccagagctcattgccaagatgacagcggaggtgaggaggctctgagggcattgggtctgggcgggaggggagggtggggggtgggcctgggcagtgcagtgctggggggggggtcatggggtggggagctgagggagggctgggac

SEQ ID NO: 29402 - DNA, 1154 bp, Mus musculus
ttagcattagaatttttcttcttataaacacacatacaagatgactaaatgaaaaatggaattatctgtatatttcttgttcttagggtagattccttgtttgtttgtttttaagatttatttatttaatgtatatgagcatcctgttgctgacacaccagaagaggtgtgtatccaattacaaatggttatgagccccaccatatggttgctgggaattgaactcatgacctttggaagagcagacagagctcttaaccactgagccgtttcttcagccccatattttttgtttataaggtatcctgaaacacctccaagagggcaatgtagtttaaaagcagctatgtatgctgtttttacgatgaggccagaggttgatattaggtgtcttcctcaattgcttcccactacatattttaaaaataagactgattgatttaatttgtatgtgagagcagtagcatgagttccctggaactggaggtgcaaggtgctgtgagcttgtattgtgggggctgaaaactgaacctgggttctttgcaagagcaccaagttcttgaaactgctgaaccgttggtccaggtcctattttttaaatgttatcttatgtgtgtatatgtggtggtgggagcaagcatacatgaatgatatggtttgcatttcatagtgttcatgtcagggtcggaagataactctatggagttgggtctcactttttacttttatgtggattccagagattgtcaggctggtgctgcaagcattttttacctgctgaatatctagctttccatgtttttgaaacaggtctctcagagggtaaagtgcttgaggcccggagttataatccccagcatcagtgtaaaagctgggcttggtagcatgtttgtaatcagtacaaggttgggagcagagaccaataagtttctgtagtccaggttggccttaaactcacagagctccgtttgccaccttgtgctaggattcaaggcatgcccagcacctgtgttctctttgtgtatgtacattacttgtgtagagttgtgtgcagaggccctaagtacctggagttgcaggcagttggttctaggaattgactttgggttgtctaaccacttagctttcatccttcagcagaaacacccatcatt

SEQ ID NO: 29403 - DNA, 1199 bp, Mus musculus
tttcttctttgcagtgtgacagctatgagattcgccctggtaaacacctgggagtgtgcatttctgtggcaaacaacagactttttgttggatccattccaaagaataaaactaaagagaacattctggaagagttcagtaaagtcacaggtaaaaaaaatgcatttcgaagttggtttgtggggatctgttgcattatttataaatataaatgctctcccaaaaggagatagctataataaacttagagttcaagtttcctatgtatcagttgcttctttctgctttaatagtagttggactaaataaatgtctaagtagtattgatttcatggaatttccttttcactttgtcttaatcgcatcttgttttttgtcagagcctttgctctctagctctcaagtggaagctttttcctccaataactttttaggattcgggagaagacagttctcatttctggttagcctgactacataactttatttaaagattctaattgaatccatgcagttgattgagaagtatattttataccacaggtccacatacttaaatatataactgggatgcatgcttgtattcttagcacttggaggttaggagtttaaaaaaagcttaactcaagaacagtctgggatacatgagattctatttcaaaaagcaaagcagaagactatatgtataatgtgaaagaactgaataagattataccttgcctatacctactttccattcattttcactttttatgtgggtgttgaggcgttgaacttagattctcttgctttcacagcaagcactctttccactgagccatttccctacagcgttcaaaggcctgaagtttgcagcgtagaccaggctggccttgaatttacagagatttagctgtctccacctccagagtgctggaattaaaggagtgtgccaccacgcctggcctgctcattttattttatttattatttttttaagatagtttttgtttgttttgttttgtttttagtaaagcttaagatcttgactcttactttggtacaaacccaaaataggaacaatttttagacattggagttcattgttataaggctgtacttcaatgtccctcacatcaccaaaggattttacctccatagtagctaagagttgacgagtctgcggtgtcaaaggatgaattgtaggcacagttatagga

SEQ ID NO: 29404 - DNA, 1412 bp, Mus musculus
agagaggccgtggttctcgtggagctcggggcaatcgagggggcaatgtaggaggcaagagaaaggcagatgggtacaaccaacctgattccaaacgtcgtcagaccaacaaccaacagaactggggttcccaacccatcgctcagcagccgcttcagcaaggtggtgactattctggtaactatggttacaataatgacaaccaagaattttatcaggatacttatgggcaacagtggaaatagacaagtgagggcttgaaaacgattctgtcaagatccaattggctctagatctacattcttcaaacaaaattggcgtaactgtttcatctttaagtagcagtttgctgccatttgtattcagctgaagaagtcactattgtgtatatactcaaggcttcttatttttcttcttttctaaatgctcttggacattattgggcttgcagagttcccttattctggggctacaatgcttttatcgttccaagcttcatcttagcttcagaacaaactgttaaatcatgattttgcagaacctttggtttggacagttctgttcttttggatttggaatagattacataggagtatgaagtatgctgtaaataaaagtacaagccagtgctttgtcttagtagttttaagaaattaaagcaaacagacttaagtttccttgtattgaagataacctatgactgtatgttttgcattcctagaagcaggttaactgtgtttttaaattgttataaccacacctttttgaaatctgccctacaaaatttgtttggcttaaacgtcaaagccgtgacaatttgttctttgatgtgattgtatttccaatttcttgttcatgtaagatttcaataaaactcaaaaatctattcaaaacatcacctatttcaaattcaattgtgtctaaaacattactttattcgtaatccttgaaggaatactgttttcaaagtagaactgcctatgtgagtgatcaaattcatgaaaaatttctcgtctattccatcatgtattgtggatattagatttgaggattattctaaattcacatattccaaataccatttcattgattggtgttctttcataatctcttctaattttgaaattttatccttaaaagaaaacaaacagactccaatgtttttgaacaggtattggatcatttttattaaagcaaaatggagctggggaagcgcactgcagtttgttttgacccacattctttcaaatcaaggacaatttgtgactgaagaccttatttgctggataaaaaattacacatacagagaaaacttagtattgtgatgtcatttgcactgtgaactaaagtcatttttagtgttcatgatgagcacccctattttactggtttaggactgtgattcccatcgc

SEQ ID NO: 29405 - DNA, 1104 bp, Mus musculus
tcttatgctgtggagagcaatgtagttatgttcattcattgtaacaatttctatttgacttctctaaatgaaaaaaaaaaaaagtccgaatgagaccatttttttgtaaatgttaaaatgaaggctctgctatccccaggttcttggaagccagctcgtacagtacataaagacaatttcctaaagtccttggaagggatgctggggattgatgagatgtttgcagttgttccggtcacagttatcacttaactccacacgctgacatggatagaagccctcagagatgttcagattccctcttgtctctgagttcatttcccaggctaatgctggtcttgtagttgattctcttgtgtcgatctgactgattgatcagcaccaagcttctaggtgatgccaaggtcatgattttttcacatttctggggctcaacaaaagaagaaaaccttagtagaaagctaagtagaaaagctaaaagcttttttgttactggttggttggtttgttctttaagctgcttcctgcctgtcctgtaattctctgaactcagagattagcctgcctctgcctccagagtgctgggacaaaaggtgtatactaccacacgaagtagcagccgccgctgctgctgctgctgctgcttctccttctcctccttctcctcctcctccttctccttctactactactactacttcttctactactactaatttcttcttctttctttcttctctgctgctgctgctactccttttccttctcctctttctcctcctcttcttcttcctcctcctccttccttatcatcattattgaaatggtctcactgtgtagtcttgggtgccctgaactcgtgtgcacatgtggcttcagactgacttgtgagtgctgggattaatggcatttaccaccacacctggcaataacaaatcttacactgatttgcctagatctagttttgagattttaaactatggtaaaggttgaggacttggttgcacaggccctggtttgccacctagcaacagaaaacactggtaaaagactgcaaatgtcattagtgcttggagtcccaaggaaatggtaagaaaatgaagt

SEQ ID NO: 29406 - DNA, 1124 bp, Mus musculus
agttgtgttcttccttggagaagactatttctctggatctcagcattccttagttgcccatagttctttgtgaggattgaggcttcctatgtttctctgttgatttagtgtgtctaatgttgtctttgttcagttcttgtttaaggcagtcatgttggtgagactttatgggtgtgtagcttttgatattgctaggaaacaaaatttcatagcaaattctcttatcctctcgcatttacaatctttttgcttcctcttccacacaaataccttgatagtggcaagtagcagctctccaatagtacttaaaacccattcaatcaaaaagaaatcatacctggtaccagaaatctagatgactacccgggactaatgaagtcatgtgtcttggagggagaacttacaacttccactttactaaaccagcataatctcatttagattttgatggttgtagagattcataaatgtctatatgggagagtgacagtagctattggtaagatacttaaaaattaagttagactcacaaactactgttagtagatcgttacctgtatctgactgtaatggtgtcttgtaggtttaagtaaggaatgctatgttttaaaatctttaatttttttattttttggaatactggtgattaaacctagggctttatacatgctaggcaagtcttttgtaccatggggttgttgtttttgtttggtgtgtgtgtttacatgtatgtacataccaggtacatgatacatatagagatcagaggactttggatgttgatcttccaccttgtttgagacagaatctcttattcactgctatgcacaccaggtggctggcctgcgagcctctgggaattcttcagtctcaaccatctatttccccttaagggtgcatgagggttacagaagcacgtgagacaacatctggctttatgaaggttctggggttccgaactcaggttgtaaggctcgaatgacaagtgcttagatccactgagccatctcctcagatcttcactgttccttctcttctctcctccttccctttctgtgattacacaggtgggtgccaccaggccttgtaggaatacttaattcttgtgctttgtgccacagttg

SEQ ID NO: 29407 - DNA, 1248 bp, Mus musculus
cttaaattagcccacaaaggaatcaaacaaatcagtaacagaagatgactggaaatagacatattttgaaagaaaaatacaactttctaaaatctgtaagataaacttggaacaacgcaaaagagaagatggaaagatttttaagagccagaagactgtgagttggtgtcttctatggatgacagggagctgcacccacaaaatcttaacagtgaggttgccaaaacaatctgaacaactgatgcatcccaacaggggctggagggatgtgtcacaaagcccaacccccagaagaacaactacaggcaactggtagctgctaattccaagtggtcaaccctaaatacacatttactcagtagggagggagggagggagggagggagggagggagggagggagggagggagggagggagtgtgtgtgtgtgtgtgtgtgtgtgtgtgtgtgtgtgtgtgtgtgtaacaataataattaaagaggccatgaatctgaaggagaagggggtagcatataggctagaggaggagagagtgggtgtaaatgatggaaattcagtatttatgtatgatatcctctaaagaattgtaggagcattcgtagatgacctgcttctgggtcggggttttgtgcgtagcagagcagctcccacgcttcgatctattgaaagtcagccctcgacacaagggtttgaaaattttagatttaaaaaaaaaaaaagaattgtaggaggaagtcacactgtggctaagagatatttatggcacttagtgcacacagttgatgaagtttaacaataatctcaaaggtaagaaacaaaccgacaaacaggcaaagtaaaccggatatgatggcagtcccacagccaagcaaagtaaaacaggatgattgcttaaacaaaggaggttagcctcgagaccactcactacgagctaacataaataatgttaaatcattaaacagtaaaaaaagagtggaaatcaagttgaaacaagaaaacaagtgtgtgtgtgtgtttggggatgttaaccaaagacaaagctgtctctagaaagataataaaaacatgacagagatgacactatagatctcagagacattaaagagtaatttatgaacaattctgtagccaaaatttgataatccagatgaaacagaccaattacctgaaagccacaatttatccaaatagtagacactgttgaataggcctattctgttcaccaataactttgtaaaatatatatt

SEQ ID NO: 29408 - DNA, 1680 bp, Mus musculus
gtgataagacttctgacctctcctctgaggcacactgtgggaagagaggacaggtgcctggccatgcaagtcagggaacacaggctgtagagtctagctgctctaaggccatcggagctctctcctcatctcaaaaagcctcctcagaaggactttctaagggtaaaaagactgccaatggcctagcggctgatgccaatttttcaaattctaaagctccaattttatcaaaatatccttatagttcaagaagccaagaaaatatacttcagggcttttcattgccaaataaagaaggagttgatcagcctgtagcagttgtgatggaagacagcagtcagcatgaagccctgaggtgccgtgtcatcaaatccagtggcagagagaagccagactcagatgatgacctggacatagagtcttttgttactgccaagttggtgaacacaactatcactccagagccagagcccaaaccacagccaaactcaagagaaaaggttaagtccagagggggaactagaactgccctatttgaaaatgataaaaatgctgcaatagaaaatgactctgtgaaacctaccaggccttcctccaatgctatagaattcccagatgccaactgtgctggggtgaaaaatcaaaggcccttcagccctagagaggccctgcggtctagagcaattataaaacccgttatcattgataaggatgtgaaaaaaatcatgggtggatctggaactgaggttgtattggagaagcagaaatccacctctaaatctgtgacaagcaaagtgacaagcagcattaccatctacccctctgacagcagtgggcctagagccgtcccgagcgaggccccaagggagaggcatacatccaccagcaacatccaggtggggcccccagagctcacagcaattagcaaccatgtcagctcccctcttgagctctctattcataaacatgacatcaccttgcagctcacagaagctgaaagagtgggagatgggtctccaaagaatagagcagagatggtggtctctaggagtagcattctaatcaagccatcagagtctgtggagaagaatagtcatgtgcccccagccgagacaatcaggtggaaaagccatagtgcctcttcagacagcagacacatcacagtgcggaatgcctggaagagtaagagagacttgaaatgttcagaagaccccccgactggaataggtaggaacatggaagctactaacgcctatacgcagaggccctgcacagacttcttagaacttgagcagcccaggtcacagccatctgaacagggcgctcgaagagtaggaaattcaggggatgctcctgagctctccccgaggaggacccaaagtagcctcaccgcatcagaggtgctcacccgcagggaccggatgggaggtgccatcactgctgcctcctgcaaccactcatcaagcatggtgagtctcactttccttcctttggccttgatctgtttgactgaggacttagggaatccagaaggttgagagatgctgtgtctcaggtagacttgggagaaagcagcacgacttccagaacctctctctcatagctttgtcttctccattttgctctcacacagaggggaggcaaacaaagtggcatttattccctggtttgcctgagatc

SEQ ID NO: 29409 - DNA, 1099 bp, Mus musculus
catcaagtggctttcacacatgccacttgggggtctgctctcatacttctgttctaagctctggactataggcagtcttctgttcagttatgagtctctgtctctctcttttttaaagatttatttatttatataagtacactgtagctgtccttcagacgcaccagaagagggcctcggatcccattacagatggttgtgagccaccatgtggttgctgggaattgaactcaggacctctagaagaatagccaatgctcttaactgctgagccatctctccagccccagttatgagtctcttggtctcctcagttgttctctatttccaaggggcttcatactgactcctgctccccacccccactccccaagaatatctctgcagttactgtgtagtgcggtgtcttatgccaggtgggagaacttcccagggtggaaggtgagggtctcattcctccctgtactctttgcagctcactttttacttgttactcattggcacaggaggaaggggaggacagcacatttgttaccagcaggcgaatacacaacccgctggagcattctgaactgcctggaaagcagggactgccagagcctgagccagtttggactgaggagcggctgcacccagcaaagccttatgctgaggaagactgagccagctaggtgaagtctgctgcttcttctctcctcctgcttctcagctcctccccaatcctggcctgtgaaggacccaaggccagttaaccaggctagacacaaaggccttggctgggagactgtagagagccaggctatggctcaggtaatttttgtcagttgtccagataggatcagagactacaaaccagtcactcaggcccagctttccctgatgcatgagtagtcctctctcctatctctgtccccaaggtagcatggaccattctttgactcccaaatgggaagctacagaaacccactaccatatagaggtagccaaagccctctcctctgctccatggtaagcagtttgtatatcaaagcccagtcccttttgctgtgtttgataccctgatttgtctcctcactatatccagttggctctttgtttg

SEQ ID NO: 29410 - DNA, 2440 bp, Mus musculus
tcctggctttgtcattccttgctctgtgatctttggcaagtcttcttgaagcctcagttttccctatctttaaaatgagttctttgttggttgcgtgcatgtgtacccatgtgtcacctgcagatgcatgctggggattgagcataggacctggtgtgcaaggcaggtgttctgccactgctgcttcccagctcagaatgagttctatagagtggatgacctcttaaggccttaactttgtgttctacacttgtttcacccatcagtgtgagctgactcttggttttggaaggtgatgtccacatgagtctggggaacatctttctgccttcagttgtttctgggtcttttttctcttttcctcatgtgtctgtcatggggatgagtctgtaaggcctgttttcaatgaggtaaagggattggattgggtggtctcaggtttatgtggctcttgcccagtgccacatttcctggctttcaagctaggtgctttttataacgtaagtctgtttgattcctgttcccgtgcctttcctgtgaatttcctggccacagggaagacacaggacatcctcaggaggactgagtagtctcccttcacccttcttagcacacacacactggcacttatctgcccttgtctgcatcagactcagccatcctgccagggtgtggggagatctaccatgttttgtttgtttgcttcccccagcccccaagggacaggaataactagcacttctgttttaatggagttttgctaacctgagggcattgccatgtgtcttgcctccacatcccaacttgatagacaactaagatagtgttttcaagatctgttcctgctgctgcttttaggttactggccagaaactccttaattcaaggctgcaacctctcacttgcagtgccccctgccactctcctgtaccaattggcagccctgagagttaaaaggaaacagacccctgtggtggtccactgaagagtataggaaattaagtctgtggctcttctctgctgataaaaacagaggggcaccaagccctgcctcaaaatatctcgtcaataatttttgtctttgggtgttgagccctggattcttctggtgctgtagctcctggtgccaaagtctggatctttccacattttagcagcaccaacacctgctgctatttgaaatgttctgtggaaaagggacagctgtgggatgccattttgaaaatctgagtgcaatagcatttgattgtaacaattatttcaggatattttgtttctttagtctgcacactttgtagtcctgccataaagtagattttatttttaaataccttcagcattgcaaatgtttataccaagcaaatggaggctagagggttcaagtccccttgggcctcatatggatggctagactgactctgatttcaaggtcgaaagacatatcacttctgaaaacaccaagatgtaacctttgggcccaagccagaagctgcaggaagcctccacatagaagggagactggtattcaaaccattgtctaatcaagccaaatattccccactaaaagacccactttcctgacagtgcttctctaaagtttgggtaggtggctaaattgagccagcaggtcaggagtctatgagagttctgagtacaggaacctggtcctggatatgcttggttggaggatgaagagctggctacatgccaggaactgctatcttccacttgctgctgttaccagctactctggtattgaaacaatcagaaaaggctgcagggtggcaggccaggaagctaagacaactctgaggcagtgagacagttcaaatgagttgaagagatctgtgtgggaccaaggctacaggcaagcttgcacaccagccatccctctcaagtggcaggggccggtgcctagagcaatagtggatttcttgtcctgggctgtgttagttgtttagatttaatgggtcagtaaaggaacagggactcagaggctggcccatggccacctttgttggcatgggtttctattctgacaaagaatgctttgtaagagctgctttttagggattatcttttaaacaccctgaatggggaacagggttctcctctaccacctcaaccagagtcataggaaagaggtcctattttcctgctgcttcacagctcagaacatgtattgaatggaatgtatttttaagagaataaagtctatttttttgtattttaaagattgagagggctagaaaggtagatagcccttaaataaacttacgcatgataggtcctttgctggggcctcagctgttggtctacacctgcccaggcaggtggctctggcttcacctctgccccttggagtctaggtgcagcagcttctacattcctgctccaagcacgggaccagagaggccagaacctgcctctggaaagcagg

SEQ ID NO: 29411 - DNA, 2273 bp, Mus musculus
tttgaggattaggaaaacagctaagcatttaagagtggctgctagtcttccagaagacctgagttcagcccccagtacctatattggatggtttaccacgtcttggaatgatagcttcagggtatctgacattctcttctatctccctaggcatacaaactttttgaagccttatttttaattgtacctaattttctggcagcttgtaaggttgcaaaggtccaagttactagggcgttgtaggtcctgctctttatatagactatggtatatatatattgttacagtatttctcaatatcataaccccaaggcttggtatctgctccgaactagaaagtcaagtacattcctatccctaagaaggctctcccccttgtggttcagaggttaggatgccttgccaatcttagccagcaggtattacatgaaataaaactagaatattgtgcatcaataaactgatcaagagacactttggtaaactgacaaactagtgatggtagcagataggtcttcaaaagtcaacaggaatttagcgatttgaacacaataaagttatgtttgcaacttggtgattcccctacctctatccccactagccaatcccaagactcttctttgctggagaacacacaatccggaactacccagctacagtccatggtgctctgttgagtgggcttcgagaagcaggaaggattgccgaccagtttttgggagccatgtacactttgcctcgtcaggccacaccaggtgtccctgcacagcagtccccaagtatgtgagacagatggttctgaacagagagatccaacggcatgtcatctgccacgtaagcaagctcttctagcaatactagatcctactgagaaactccatgtcatcagctactgggactcctagtttgacagcagaggctggctcctttggctgacagcaacttacccattgatttggaagtacagctccataaagactgctcgagaagcaagtggtgtgagataacctcttagtctatggtgtttgtttgtttttgtttttttttaatatattttgagaataaaactttaaaataattttatatgaaaatttatttttaattgtgtgtgtgtgtgtctatgttggaatgcacatttaaagtgggtgcctgtggaggccaaaggcgctggtgctggtcacaggtggttctaaaccatccaaaccaccatagttgttgggaaccaaactcaggtcctctgcaagaagagtgtggttttatttaaccattgaaccatctctctaacttttggatcttttggattaaagttgtatatacacagtacacaagtgctgctcccttggaaatgcaaaatcctacctctggcaatagctcatctgttctctccctgtctgtgaggagggtccgagggctctcctacacatgcagcaccttttttaaagcttcttttttaaagctttttgtgtatcagtgtttgcctatgtgggtttggtgcccatgagccttcatttgggtgctaggaaccaaacgtgttctctccaagagctgcaactgctcttaaccatggagctctctctccagccccactatagttcttaatggcagtctattaaatgaaaggttacatgggaatgtttctttgcacttctcatgtgctggtgatcatgtgttggcatagagcaccttgtaattgaactgtctcctctatagctgctataatagtacctataccccaaatataatctccccatctctaaatatagtatctgtaaagtcttcactgctatagtggtgtgtgtggggtgtgtgtgtgtgtgtgtgtgcgcgtgcatactcagatcttgtgccttgaactcaagatctttttgcctccatgtactgggattattggtctgcatcactatacctagctctaaatgaagctgagttaaggaacattattctgggtttggttagacgatgaaaatggagtgggggcttttctcctaatctccccgtgtgacagcaatagaaaaatgatgttagagatggaagggtgatttctggcacagtaaatggcagatgcttttaagacaaggtctcactgtgtagacctggctatcctaaaactgttgggattaaaggcatataatttcagagaaattctctttgacaacagacaaggctaaaaagaaaatagagcaaagagttagctgctagttttaactctgtattttgcctaaatttgtgaaatgctataccagcagtaccaattcagagataacagctgtttc

SEQ ID NO: 29412 - DNA, 1192 bp, Mus musculus
taagggatggtgatagataattgcaatgtaagttggttagaattagaagaaaataaatggttagagaaaacaaagaatgtcagatccacagagccagtcagtcctgccaacgacaacttgagttcacagcttaaagttttgtttttttactgttgtttttgtttttatatacacatactcattattagtaaaaactttttcttggtaaacttacatcaaaacattctgaagttaaaaggatcaggccttttaatttaattttgtaattttagttacagggctttctaatcaaaggagcggtataaggagagactgtggggtgggggtgttcagtcaagagttggtgcagctcacaaggacccaagttccttctctaacaccgagtaaaagctgagtgtggtggcaggagtgtggagtctcagtgctaggaggcggagacatgattaatgattgctgctgaggtctgatggctagacaacctagctgaatctgccagctccaggttcagtgagactgctcaaaagataagagtgatcaaagaagatagccactgttgaactctggcatctatatgtgtgcttgctcgattctacccccaacccccccccaatctctttctctatctctcctctgtctctgtctttcttatgtgcatttgcacaaactcacacacaaaaagaaaaggatacagacatgaagagaatctgatctcacataaacttccttataccatgaaaagattattggatttatatttgtgtcagaacttcatatagctttttttttttttttttttttttttggtttttcgagacagggtttctctatatagctctggctgtcctggaactcactctcactctgtagaccaggctggccttaaactcaggaatccccttgcctctgcctcacaagtgctgggattaaaggcgtgcgccaccactgcccggtcttcatatagcttttaaagaactcattaaatagcctggctgtggtggtacacacatttaatcccagcactcaggaggcaggggctgggggatctctgagtttgaggacagagctatgcagagaaaccgtgtctcaaaaaaaaaaaaaaaaaatcctagctttttgtggctatcctcagttgttttgttttggaaaaacagtgtaaaacatgagtcttaattagttttttgtgttttttgct

SEQ ID NO: 29413 - DNA, 1198 bp, Mus musculus
aaccacatgtgcctgggggcttggggctgcccctgccagatgtgccaagctttctggacatatccggcttccccttgggtgcacggtgattattatttaacactcaacattccggcagacagtgcctcccaacattaagcagcagcagtctgtagaggcttatcacccggagagtctccacctgggggtgacggggacagccaacccttccttttcctcagaaggatgtattgtggcattaactcagtgataggagagagagggcttaacccaggcacagatcagcatgtgcaaaggccctgaggctagagacatgctatgggactttatttagtccattgaggaagagaggaagagagggttagttattgatttttactgcaactaaggtgggacctttggaagttcctaaacagagcctcctgagttgcttccttgtctttgggctatctactcctccacacacatccctatttctccacacagcctcacccctacctccacagccccacccctacaaccacccacagcctcacccctacctccacagccccactcctacaaccacccacagccttacccctctctctacagcctcacccctacaaccacccacagcctcacccctacaaccacccacagcctcacccctacctccacagccccacccctacaaccacccacagcctcacccctacctccacagccccacccctacaaccacccacagcctcacccctacctccacagcctcacccctacaaccacccacacagactcactcctaccccccagcctcacccctactcccacctatagccccatccctacccctgaagcccacccctataaccacccatagccttacccttacaaccacctatagtcccatctctactcccatccacagccccacctcccccccccccacacacacacacactacggagatccaccagcagctcctaaaagtagaccggaaggaggatgagggcaaatgccagtcacattgtcaggaggcacagttctgagtcctttctcttctgtctctctttctccacagtgacttactaggtggccttgcttaggtaagttactggccctgcctgggtggtggagtctacaatcataaaacatgctagatacttagacagcagatcctaaaaggctctgtaaatttgatctccccagacctcct

SEQ ID NO: 29414 - DNA, 1138 bp, Mus musculus
ggatatgtatacataaatgcaggttcttaaagaggccagaggagttggttccccctggggcagatgttacagatgtgtctgccatgggtgctgagaactgaaattgggtcttttggaagtgtgtgctcttgactacagctcgccagcccccatcacaattctctccaatcccaggcaagttccgctctgtttacagacaagccacacccaccttcttgtctgatccttataaaccttagacacaggctctgcttctgtttcccaggaaagagaacccaggctcagggaggttccataacttaccagagacctcaaggctcctaatttgtggaactggaactcaaaccctggaattttttttttttgtcttcacggttgctgcccactggaatggggtgtttggggccattagaagacaaacataaggtgaaggaggcacttggggtgaggagaagaatggaagggagaatgaactggaggtgacagaacacagtgggaacagaagtcgcatcccaagccagagaagcgccagggacctgtgccacacaggaagtaatgtctgcacagggtgtgagtggaggcagaagatcggaaggtaccaggaagggccactgggggtaggatggtgatggtattatgaaaccccggatggcataggtacacccacagcctccccatgagtttccagactgtgctgtcccacccaccaggcatgtggccaccaccctgggtggctcctttatgtggctcaggtgtctcagctgacagtggaggctttggggagcaaggctggagcttttgcctgggccccagcaggatttcttcccggttagcagtgcggacagggtcctggtgtgtaggctggttcagcctcacaagggtgtaaatacagcgcgtgctaactgggggccatggtttaagtctggtggtatgcggtgtggtaccaaggcagtggtgatagccctgtagcggcctctggaccacgagcgtcatcaatagcaaggcctgtggctgagccagggtgcttgctaagttagatgttatacacattcaacctctggtgttcccagcttacgatggagcgttaccccttacaagccaaggaacatctctgttgtctgccatcccctggtctgca

SEQ ID NO: 29415 - DNA, 1191 bp, Mus musculus
aggggtttcctcaaaggctttgccctagtttaaccttccccctcaccaactcccaatttcctcaaagcccttgccccatttgacacccctcagaactcccattctccatggtcacaccccgcttttggcccagtgcctgcctggtttccatttcctgccacgaaaggtgccgatggctgtgattgtctgcagaccttgctgagcctgtctgtatgtcctacaggttcacagtggccatgtggccacatccatttgacagatgggggaaagaaaacccagaaactgacagtcctggggacacccagggaatggcaaggtcggggccaactgggtgtgagtggcactgggtcagggggaacttgtcctctccaattgcttctggagcagggttttgcgctctcaggcaggcttggctctggctagggtctctgaggcagctgtccagcctccaactctgtcagcatcctgagataatatagaggagagtgttctggaactcacaaacctgccataaaaatgcaatctctgtcataatggtcggaataatgttgttgtaagttagacaaatcgggtgttaacgctgtgtattgtgggggcgaagggggagtgcctctgccgagatcggagactatgaagttgtcatgagagggcttctgagaaaactggaggatcatgagttctgtgtgcgccatggtcaccctccaagggggcaggagctaatgagtccacttcagagatggggaaaccgaggcatgaggggaaaaaaatgtacctgtccaaggtcagtggcttgctgtaactgaatcctctccacagatcccagaagtctccatttccattgactgtttagccaacgtttagaaggatagtgtgctatagaaaaattcctgattctggcttctctgaaagtcagtctggctacccaggctcacgtcgtcacatggctgattctcaggtacctcctcagattccccgagtactgggtgactagccaccaccttatagcatatattggtattgccctcccgactctgcagaatcgagtggacccttgagtctggcccagactctgtgcggacctaaaaacagaaactaaaggtctcctggggcgtgattgcctattctatgacatgggtcaggatgctgcagtggccaggtactggacaccggtcccggagaacaccaccgaag

SEQ ID NO: 29416 - DNA, 1177 bp, Mus musculus
caggcagatgcagaaaggctggggtggaaggttaagatgttgagggaagtggagagggaggcattgaaggttcttgacttgtttattgagggacctagccagatttgtgtttgggaagatggatgacttcagtgatgggggatgctgagaatatccagacttggtcctgcagaggaaggctggtctggactctgagttccctgaaggcgcagactccctggaccttttgaacgtccagagttatggaacataaaactgctcaaacactatactttccaagaagcctttggatactttgtatcttaccagcttcttttgactttgtaacaaccatattggtttccttgtttcatggtgcctggccctctggaccatgaacctcaggaggcagtgactcaagctgctgccttggccgtagcatcccagtgtgcagagctgcttgctatgatactcaagggcaagtgcgtggtcagctaccgcacagtcgatggatagagtgctcagtgagtgggcctgggacaagcatgggagggaaagaactggggaaaccaagggagccttcctggagagggaaaatctggggatggctcaaacggggctggaaggaagtgttttgagtatgtgggacagaacagtttagccaaaaggccatatggaccctttctgataagggctgggagcttgacctgctccgagccttggtgaatatggggtaaatttgcagttgtttcctgggtgcgattgtttttgctctttctcacttcagaggaggtagcttttgtgtatgccttagtcaaggaaagcaaaacctcactttaaaccccagcatctgagagttcttatcagatggccccttctctcatccacccctccatgcgtctatctgtccatctctctatcctctgtctatctaccttcatcattgccctccctacatccatccaccactcactcgttcactcacccatccatctgtccatccatctccaggggcaggcggtgcgtggggaatagagcctggctgtgggagagaacagggcctgctgacttcgtagaaatacaagtgcaaagagtcttccggaggcacggatctgggttcaaatgggagcacagcaagctgtgtggtgtggagcaagatgctcccactctctggacttcatctcctatggtttgcttg

SEQ ID NO: 29417 - DNA, 1176 bp, Mus musculus
gcttatactgatggacaaagaatgccgtggaaaaataataaaagaatgaggtgtcagggcctccctcagaatagtgagctcacacaaggccattgtggtgtcctgtagccaaggaacaaaagattagacatataaacaaattctacgaagatataatacaaatattgtattataccagaaattaaataataactgtagcagctttggcctgaggatttttcttgagcctaatgacagttggcactctgactactaagagttaataatacacactctggacatggcaatctgcctaggctggcttggagattttctttctgtctagtgcccttgaaactacaagagctgtcagcctgagaacgggctgtcatttaccatatatatttgctttggcaaaatatgcctctagattcttagaagttgggttatggggttgatgagggaaaatgatttgtaaaagataactctgttctaccacagtttatcgatgatgactaaacttaggaccccagacatacaagaggaagttagacatgtgcctggggacaaaaatgatctgatctatatcccttggagcaatgtgaatctatccctgcctactgtgttctgtataaacaaagaaacaacctgactaccagtcagtcacggctgcaagagtctcctgtgcctgattcagttcttcttccatcactccttcccttcttccctcctctctggaaccaggtcgactgctagggcagccatggttacaccacccccccccccccccacacacacacacacacaccggcaagagactgacttgggagggtttggaggtgggcatcctataccactctctagctggcttttccggctgtgtgtcagattcattgtgaattgcagtaactggtgtctgcttgattgcacgcccctgcaggtgattcagagctgctgtgagggcagaacacccaaggagatgatagagaatttgttgcacagagtgactgaagagaagaccctgcctgccaagagtctggtaaaactcctccaggctgtgaggacagcattcccaaacctggacctcctgctggacaatttgcagaaaggagcgggatcagccggcaccacaggtactagctaattgttcactctctggacaggagttgcctgtacagaaaatcacagcttaaagct

SEQ ID NO: 29418 - DNA, 2115 bp, Mus musculus
aagacaaccgagtgaagcaaaattattaggttgggtttcagggttattaatgtctttggggtttgactgttttaaacatgaactccagttctgttgtgatactgaaaatcagattgcccatttcttctttctaccccttttcagaaaggcctaaagaatgtgtttgatgaagcaatattggctgccctggagcctccagaaccgaagaagagccgcaggtgtgtgctgctatgaacgcatctccagagccctttctgcacagctggtgttgtcgtcatactaaaagcaatgtttaaatcaaactaaagattaaaaattaaaatttgtttctgcaataatgacaaacgccctgcacctacccacatgcactcatgtgagacaaggcccattagtatggcccctccttgcccttccagtaatagttaattttgaataattatgtattgtctgaaaagcaatgagtgctagtttttgttttctttgtttaaaaaaaaaaacaaaaatccccacaaacgtttgttgtttttttgtttaaaagcaagcatgcttgtattgactgtaacagactaattcagattgtcaaagctgctccctggttccattttggagagtaatctggggcatcttcgtgtcttctgttttgttttgttttgtttttcctcaacccttctctccttttggggtgtgtatggggttgtttcttagacttgtattttaaaatttgttaaccataggacagcctgtggggaggaggacagagtatttccacattccactccctaggtctagtttagcaaacgtgtccccacctggtgctcttaggaaggagtatagaaacgcctcgattaacaacgtattccttcttgaaagttgccttttctctccacctctgagtgggtccagtctgtgatggaactcatgaaggtgggtggacgctgtctcgcccctctttctaggatgcactctatatgtgactgtgactttcaagggtatttgtttgccatttcctgatttagggaggggaataatttctaacttctttcattgataaatgaaaagtattgcacctttgaaatacaccaaatggattgagttcctaattaaaaaaagttcttttgcccctgtcagtcattttcttacatgcttagcacagattcacaactcactgtgtagtgttcctagattcagctgaagacctggtacctagggttcctaacgggatggtgttaggaaacacatcatggctgatgattgccatctcctttcaggtgatgaggtcacaggcctgcttccttaagaagctatgagcatggggtggggagcatacttttaaccaacatggggaccagtcagggctatccccttttttcttccatgcctatgaggaacctttgaacaactggctgaagctttcgcaagaaaaatggcgagagcctcatgattctttataagtgttaatagagactttatcagattattttgtttgcaggttccagtttttaaaaaatgtttagataatctccttccccagtcctgatcttgtggattcgttagtgccgaaccaatgctttcttgtgtctcaactctttgtatatgaattcttttcagatgtattaaacaaacaaaacccttcacaagtgagcctgaaggttattttcctccgtcttttacttttcaggtatttagaaatgagaatgtgactcttatatgacatcaacatctaacacattttggtataaaattttaaagcgttatttttgttttctgacagtaagcttgaattgtttacctccatatgtttaggtttatgccttctctcctaaaactgacaagtggctctgaaactcaccttgtatgctgagcaggtcagagtagtaagtgcagaaatgtttgtgacgctctcacctcatggaaggccacattagcatgctcctgtagtacagtgggacgtagactgattgccccagcttgcctgcattaacgtatagcttgtatagtaaaatcttaaaaacagtcgttttcgggacatctaaaatgcaggcaggtttgagaaccactgctcctaggtggttctttctctcatattacaaaatttgttttgttagtgtgcttcat

SEQ ID NO: 29419 - DNA, 1195 bp, Mus musculus
ctaaccttcctgcctctgtctcactagtgctgagattataagcttgtgccaaccatgcctgtttttaatgtggtatagggcttgagtccaaggctgtatgtgtgctaggttatcactctgtatactaaatagctatagccttagcccctgacctgtgattttaatgccgcgaggataccaaatctcagttgccaacctctcttaactctttctttagggcaagaggattatgacagactacgaccgctaagttatccacagacagatgtttttctagtatgtttctcagtggtctctccatcctcatttgaaaatgtgaaagaaaaggtaagtcaggttctgccctttgaaacatgcacagaattcctgttgccctgttacagtttcagtggcttgtggattaacaaaacattttaaaaccttgcttttagtgggtgcctgagataactcaccactgtccaaagactcctttcttgcttgttgggacccaaattgatctcagagatgacccctctactattgagaaacttgccaagaacaaacagaagcctattactccagagactgctgaaaagctggcgcgggatctgaaggctgtcaagtatgtggagtgctctgccctcacacaggtaaggagggctctggaacctatgtctctgtagtcagttgttttgagcattaggatacagaggctctttccttttattctttcttttttcccttaaaaatttgtccgtgaatgtatactgtgtgagtgtagttctgcagagtacataaactgacatgactattccaaggtatagttgagaggaaggttttttattgtagatatgaaggaaagacatcaggaagaatccagagatgagagagaaaatagactgaacatggccagcaaactggacttggccatggtggtggtggggtttgaaggaagaagagagaggaggaccaagagagggctgaaatagaagggaatgagaagctggaggtggagtggggtggggtgggatgggggcttctgagctggagaagttgagggtaaggagtgggtggaggtcagcatgcacttggttatgctaataggcaccctaggtagcaatttgtcccttctgccagtgataaggaaatgacttcctgaggagtgagggctttttgtccatctgtcagaatttggccctgacatttcaaccttttg

SEQ ID NO: 29420 - DNA, 1121 bp, Mus musculus
acagagacttggacctcaccagctgggatattccatcatcttttctgccctttcttgtgttaaaaaaataaaaaatcaaagttcttttagtaaatggctgccagaacttttggtctgtgtgtgataaccgtcgtagctggcacacttgggatggagagcaaagggacttgatctcttgattaacgaggtgctcttatctctcactcatgtacgatttccgttagacttgcccggtgccgccgacaataaccctgggtggagagcactgggttggggccagacacgcactcccatctcctctgtgacttagcagctgcgtagctctgacctcgggcaagcctcgggtcctcctctgacgatggaggtgtggctccgggcatggtggtagctgggagctgtacatgatcgttgagatgtaaaacttagcgaaagagtgttaaagattttgaagtccacagtttctctgctcacttgcttagtgacaagtccccaggaggcagatgtagtcaagtggccccttagctggatggctccggagcaggaccctggcatcctggcaagtgctgggaatgaccatgtgccttcagctaggggctgcctgggttgttaccactacttctctgtcccatcgggtgccacccagtcctcaggggagccatacactgttcctgctgtacggtgtctaccccgatgtcttcactgccttttagtatggcatcatactgataacaaaaatgtgaccacttggcactaacccttgactctccactccattcattggccctggttctgcccgttctgcttgtctccttcaccagctgctggcatcattagcctccaagaatcccattcctggttcccagtggggaagggagatggccttctgctgtgtcctgaactcccagcaggggtgcctgctgcctgggcccctcaacagggtagagatgatgctctgttgtgacaggggcagtgggcatcctgcctgctccaatgcttctggacctgggcgctaagcatgttgtttgtttggccaggctttgtgctggcgcggtgcccacgaaggtcagtctgctctggcatgctgctctggagcatggggagctaggcctgagctgagtcct

SEQ ID NO: 29421 - DNA, 1135 bp, Mus musculus
tttccgggctctggtaaattttactcggtccattgagtacagcccccagctggaggatgcaagtgccaaggagttccgagaggtgtcggaggctgtggtagaaaaggtaggtgagagcgtgtacctggcattgggagctccccgggggtggcagagcaatgccggaataagtaggaggcatctgatggtggtgtgtcccccacagctggagcccgaatacaggaagatccccggagaccagattgtcagtgtggtgttcatcaagtgagatggattcctggggatgggaagggcgggggcaaccagaaggggtggcaagaacaggtcagggagggtcctgaggagtggattatttttgatggggattcagaaagcataggtgggggatccattaccagaagtggccctaccttaggcccaggctgcccaggtagaggggtctgggtgtcgcgcaggaacttgacagaggcgtgcagattccaggccttttccttcccagggaactggatggctgggtctttgttgagctggatgttggctccgaagggaatgcggacggatctcagattcaagaggtgctgcatacagtggtctccagtggctccatcggcccctatgtcacctccccctgggggttcaagttccgacgcctgggcacaggtgagcctgtcctccagacccactcaggtcacttctcccctccagttcctcagactctggcccacttcggtgtctctaccttgggccatcctaacctggacaagcacacccctggagatacggagctcattccatcctgagcctgaccatcagtcttttttatagtctctacttgggtagagccagactgcttcctctaactagcacctcggaagctgtctccttgtagacctctgtattttgacaggagattcatctcctttatacgcactttataaacactttatacagtgtccgaagacaccagcatccagtgttgttggactgggcaatttttaaaaagcttatgctgagccagggggtaggggccacacacttatgatctcagcgttcaggagttcgaggccagcctggtctacagggtgagttccacaacagctagggctacacagagaaaccctgtctcgaaaccacc

SEQ ID NO: 29422 - DNA, 1164 bp, Mus musculus
tttcaaatctaaacttatctgtgagcctcctagtggccaatgagaaaagggaaactggtttcattaagcaccacaatctaatgaccgagatgcctcgcatatatgtatgtgcgctttccatggctctccgggacacccccgtctagactcgggggtagattcaactgctggttccaggcagctcctcccgtgggccatcctgcagctcccatctctgtgtccacagaacaatgtagtggggcgcttgtgcaacgagtgctcggacggctcgttccacctgagcaagcaaaacccggacggctgcctcaagtgcttctgcatgggagttagtcgccagtgcagcagctcctcctggagccgcgcccaggtaccggcaagagggcggcagctggatgggacagccgggacagagggcgggggcaacaccgccaccgccaccaccacccctgcccgatctgaacattctccatctccaggtgctcggggcctcggaacagccctctcagttcagcctgagcaacgccgccggcacccacaccaccagcgagggggtctcgtcccctgcacccggggagctgtcgttctcttccttccacaacctcctgtctgaaccctacttctggagtcttcccgccagcttccgaggggacaaggtgcgcaggacagaggaacaacacaggcaggaagggcattgggaggatagagacagcgtggcccgactgaagtctcccgctcaaagcctgtccacccctgttccaggtgacgtcctacggcggagagctgcgcttcactgtgacgcagaggccccggcccagttctgcgcccctgcacagacagcccctggtggtgttgcagggcaacaacattgtgttggagcatcatgcctcgagggatcccagccctggccagcccagcaacttcatagtgcccttccaagaggtgagcccctcccatcccttcttgttcctcactttgggggcctcagcccccagggtgtcaggaatggatctcatgtcacttcccttacagcaagcgtggcagcggcctgatgggcagccggccacacgggagcacctgctgatggccctggcaggcattgatgccctcctcatccaagcatcttacacgcagcaaccggctgagagcaggtagctggggctgagg

SEQ ID NO: 29423 - DNA, 1112 bp, Mus musculus
ggccacagggcagcccactcttggaccctgatatccagattacggtgagctcattagaatccaccgtggtcaggcagaagagtaagtggaagccacggtcccaatacccagctagccaatgtggtctccttgccactgcatggctggctactcccaagttcttagcctggctgctgtccatgggcacagtgggcagacgcatgagcttgggggtgtggacggacgagagtccaagtggttgggagagcctggggttggtgggtacccctgccctaagtacccttcctaaccttgctggtgtctctgcagggcaataacatcatgttggtggcttcccagccagcactacagggcccagagaggaggagctatgagatcatcttccgagaggtgggtagcacttgcctttgactccccaggcacacaggtctacaagttcaggagatgtggcccagagcttccactgacacttgctgtccccctacacaggagttctggcggcggccagatggacagcctgcgacccgagagcatttgctcatggccctggcagatctggatgaacttctggtgcgggccacattctcctctgtgccacgggcagccagtatcagtgccgtgagcctagaagtggcccagccagggccctccagtggaccccgagccctcgaggtggaagagtgtcgctgccccccaggctatgttggcttgtcctgccaggtgggtgtgtggctggctggcctggctgcatccgctccagtgccatggtgtgtgcaaagtggttggtcagtaaccactgctataggccgtaactgctcgctcagttaggtgacttttgttctcacattgttgtggtcactccctaagagccaagccatccctttaaagacttttttttaaggattttatatatatactgcagctatcagatgtaccagaagtgggcattggatcccattagagatggttgtgagcctctatatggttgctgagaattgaactgaaagcctctagaatagtagtcagtgctcttaacctctgagccagctctccagccccaagccatccctttaactgatagaaacaaactctccaagggataggtgacttac

SEQ ID NO: 29424 - DNA, 1122 bp, Mus musculus
atttatttattattataaataagtacactgtcgttgacttaagactcaccagaagagagtgtcagatctcattacaggtggttggttgtgagccaccatgtggttgctaggatttgaactcgggaccttcggtagagcagtcagtgctcttacccgatgagccatcttgccagcctcccagactcatcatttttttttttttttttttttttggtttttggtttttggtttttcgagacagggtttctctgtatagccctggctgtcctggaactcactttgtagaccatgctggcctcgaactcagaaatcggcctgcctctggctccccagtgctgggtttaaaggcttgcgccaccacgcccggctcagactcatctttaagacatgcctataggtctatggtttctggatcagggtgtttggatgagtttgacttcatggctggtgtctgacccccttgtgccctgcagcgatgtcagcacaacacagccggtgagttctgtgagctgtgtgcaactggttactatggagatgccacggctgggacgcctgaggattgccagccctgtgcctgcccgctgaccaacccagagaacatgtgagtactttgctcagatccaaggatgggctcctgctggaggacaggaggcaagctgggaagggggctcctggggcctgacacctgcctgcctgcctgccccaggttctcccgcacctgtgagagccttggagctggagggtaccgctgcaccgcctgtgaacctggctacactgggcagtactgtgagcagtaagtatggagtgggaagagatggggtgaataggagactcccaggcgagagtcctgcagggtgtggctcggaaaagtctctaccatggtcctcactgttccaaacacttcccacgttaatgccgccttgggatgagcaaatgctatgactccgtgtttcaggcatatgtctgttcttccaccagctgggattgggagaaacttcttgaatcacttggggtgttttgttttgttccgttttgttgttaaggcacggagtctcactgtataacccaggctacactgcttccagtgttgacagtacagatgtgtgcgaccacccctggaaa

SEQ ID NO: 29425 - DNA, 1160 bp, Mus musculus
tcccgtgaagatggacggcccttgcccagcagcgctcaacagcggcatcaaggtactcgtgcaccgacctctgtcccatgagtcagccctgttcctgtcctgcttgcgggggtgggggtggggcttgagctggagctagacctagacaagtctctccccaccccaggctctgagctccacttccctagcgtgcagccctccgacgccggcgtctacatctgtacctgccgaaacctgattcacacgagcaacagcagggctgagctactggtcgctggtgagtccccgcatccctggcctagctagaagctgccaggatgctagagaggatagtggctgctggacaaagatattacctgtggagaaacaggggatgatgcattcacacctgctccccaggcagaatccgcaggactctgccatccatccttagggatgaagggagaagataccgccttgggtctgggcgccgtttactgagatgaggaatgctcagcctgtaaagtgtctttatttgggttccccaaagcagagacactgtaggatcccaaaaagggagggcagcagagaaaagaaggtgtcagacaaggaagacatggtcaagtgaatggctgtcgcaagcagattttcccgagttgtttaatgggacgaggaaacttggaactccagagtcaccatgttctacgtggtctgtgtgtcccagcttgtcttgggcattagctgagttttattcaggacaggcactagataggattgtccaccaagctccaaagccaaactgtcacactcaagaggaagggtggaaaaagccagaagagaagccagcgggattggagcaagtagggaaggggtgtctaggatgcaaactggggcaagggcctccgggaaagctgcttgtccaacactctgtggaaagcacggtataggcagggaaaacatgaaggtcggactgacaagaccagctgaatgaagtgggagcgcgagcggacacttggagcatgtggaaactcctccaaggatcgtggctctgagcagggcgcatggcagctgcctttaaggctcatgcttaggaggctgaggcaggtggatctccagatggaggccagcctggaccacgtatgcaagaccctgtgtaggagcggggggaaagtctcagctct

SEQ ID NO: 29426 - DNA, 1099 bp, Mus musculus
acaggaagacctgtctcatagaaggggtcaggaaagcaggcctaagaggaagtgacacagaaccaaaggtgtggcgctcactggagacttcccactcacagaggctcccagcaagcccatcacagtgacagtggaggagcagcggagccagagtgtgcggcccggagctgacgtcactttcatctgtacggccaagagcaaagtgagcagacagggagtggtgggggaagtcttctcctgggctccctgagcccacacgtaaccctcaccctgctgccggcttgcagtccccagcctacaccctggtatggacccgtctgcacaatgggaagctgccgtcccgtgctatggacttcaacggcatcctgaccattcgcaatgtgcagccaagtgacgcgggcacctacgtgtgtactggctccaacatgttcgctatggaccagggcacagccacactgcatgttcagggtatgccttgttgtgatcggagcctggccccagggttccccctatactgtagctctctctaggctctgaagaactggggtacagaaggacaaactgtacctcagtcctcctgaggcatatgtcctaaccgaggtgaccctagtgagagagcagacacggactcttgtgcatggtgatgaaagccaggggtgggagggattgaagggcgagaagtgagaggaagatggtgagggcctgtaaccccagaggttggaggttgaggcagaagtaccatgaagttagagagtctgggcagcattgtgaagcccctttagaaagaggagggagggcaccatggggaggtcttagatcaaggctcatgatgtttccaaagccctcgccgaccctggctcccaccctcaccccaacctctcagccccccaccctcagctactgcacggcagaatggctatgcagggctggaatagaagcggagactggcaaggggctatagctgagagttggagatagtccccaccgtgactgtatcttatccttgctttcttgttagtctcaggtacctccactgcccctgtggcctccatacaccctccacagctcaccgtgcagccgggacaacaggctgagttcc

SEQ ID NO: 29427 - DNA, 1103 bp, Mus musculus
ggcttaaacacctgtcaggtcaggatatgcttagcttgatgggaaaggtaaagttgtgctaggcatactcttgcctgccctgacagagaaagtccttggctccctaaatcttctcatctagaggtcctaagggcgacaaagtcctgaactggagatgggccagcaaagggcactcactgcttcactcagggggctggaggttcaaggctggcctctaaccaccctctctgtgcccagccaccagcatcaccccacccatccgcattgaatcctcgtcctcccacgtggccgaaggacaaaccctggatctgaactgcgtggtgcctgggcaggcacaggtgacgtggcgcaaacgtggaggcagccttcctgcccggcaccaggtaacaccgtcccagggtcagcctgctagagggaatggatggggacactttaagccctgcctaaaccccaatcctgcccgtttgcagacccatggttccctgctgagactacaccaggtgtcccctgccgactcaggcgagtatgtgtgccatgtcgtcctgggctctgagcacacagaaacctctgtcctggtcaccatcgaacctgccgagtctatccctggtgagtggctcccagtgatacagatagttgcaagaggcagaagacttctggggtgtgacatccctaactgtgactcctactgctagctggggacagtcggccacctgggctctgcctccagggctctacctaagcagattgctttgtctgaatgacccaggtcttccatcaaggtcttctcggccatgtctcctgacttccttctccctggtagccttactacctgcctgtctgtctgtttgtctgtctgtctgtctgtctgcctgtctgtctgtcttcctgcttccttccacgaagaaaacttgggctcttcttgggctccggacctcaagacagggctgtcaaatttctgaaacaggggtctgacctcagattacaaggctgagccagctccaagagggagcttcagctgtgtctcttgggaaatatctgttaccttcccctgtccctacagcccctgggcctgcccctcctgtcagaattgaggcctcatcctc

SEQ ID NO: 29428 - DNA, 1391 bp, Mus musculus
actcacaggagcacacagttacattttatgccaaacatgacagcttggacctgtaaataaaaaaaataaagtccagggggctggagcactgattgctcttccagaggtcctgaattcaattcccagcaaccacatggtggctcacaaccatctgtaatgggatccgatgccctcttctggcgtgtctgaagacagctacagtgtactcataaataaaatgaataaatcttttaaaagcaaataaataaataaataaagtccacataaaaggacatttccatcataacagaatatggaattgggaaggttaaatgaattggtcaaggatgtgggaccttagagcagagcctagctcactgttggtgcttgccaagggagtagctgagactgtcctgggctacaggctttgtgcattgtggaatctaaaccccacttgagaatctgactcaggccaacctgcactcctctgtccttagcccccgccagccctgcacccatcagaatagagtcttcctcttcacgtgtggccgaaggacagaccctggatctgaactgtgtggtccctgggcacgcccatgcccaggtcacatggcacaagcgagggggtagcctgcccactcatcatcaggtatgaaatggaaatgagagacgttgtccgggagcccaggagggaggcctgagagtgctgccggggatgccgcacgtacctgtctgggaagctggaccctggctcccaaccttccgaggctcttgcctgacatcttattcctgctcctctgactctgccccacccctggccagacgcacggctcaaggctgcggctataccaggtgtcctcagccgactcgggcgaatatgtgtgcagcgttctgagcagctctggccctctggaggcttccgtcctggtctcgattacaccagctgccgctaatgtccacatccctggtgaggttccttgtatgggtctggcgaaagagacaagggagagagaacagcagctgagctgggcagaagaaaagctctttgagacctggcaggcagctgatcacagacttctgcctcctgtctctagcccacccttgatattacagaacagacagccaggctgtgtcgtgtgggtcctgtctctctcagggcttgagaacacaagcttgcaagtgtggcatccgtgggcttgggtcccaactggggatgtcacacaaagaacttggcctctccaccttgctgtcctcaagggaaaagaatagtgaggttcctaccctctgctatcttacccaacaggccattcagtgagggcccaaaggcctgagcttgtcctgcagggtattagcagtcatctgaggtgtgtctctcaaggagtgtgtactagctgtgggatagcaacaactgt

SEQ ID NO: 29429 - DNA, 1140 bp, Mus musculus
cacctctaagagaatcaccacagttaagtccttgccctcacacccggagccttaactgttccccatctctgtgccaacagccccgggcctggcccagcctgtctacatagagtcctcctcctcccatttgactgaagggcagactgtagatctgaagtgcgtggtaccagggcaagcccatgcccaggtcacatggcacaaacgagggagcagcctgcctgcccgacaccaggtaactaggtcaggatggggagaaacccagggtaggcaccgtctcctctcgtagactcctctgcgcctaagcctcatgcagactctagtattcatgggatcgtgggaaccaggtatctgtcagggaattgttccccagacggagaggcctgggcttttaccctttagcattgtttggcagcttgcatttgagggagcttcctcttcctctgtaaggagagtgggttgatttcagagattccacacagcgctggaggcctagctcctgactctccagaacccttgatggcttctttctctttctctctggcagactcatggctccctgctgaggctctaccagctctcccctgctgactccggcgagtacgtgtgccaagtggctggtagctcccaccctgagcatgaggcttccttcaagctcacagtaccctccagccaaaactcttccttccgtgagtgcggggtgtgtgtggggggggggatgccaggagtggggaagggagcctggagcctaggcaggacctacctggatagaggcagcctactgagcccggtgtctgaccttgcaggcctcagaagccccgtcatctccattgaaccacccagcagcacggtacagcagggccaagatgccagtttcaagtgccttattcacgagggagcaacgcccatcaaggttgagtggaagattcgggaccaagagctggagggtgagtgtctggctgcctgggctggtggcaaagggaaggaccatcctctgtgatggatcagggttgccatgtaaaagatggagcaggacccaggagactccaaggacccccactttctgccatctttgatcaagtcccacgccctggcacaaaggatcaacagtgggctctccctcccttgccttccgttatagtg

SEQ ID NO: 29430 - DNA, 1239 bp, Mus musculus
atcctctgctcagggaatagctttcttcacagttatgttaactgtcttcccacgccaattaacccactccggataatccctcacaggtctgtctccaagatgattctagatcctattgagagacagttgacactaacctcacccttccccaatgcaaccctacagacaacgtccacatcagccccaacggctccatcattaccatcgtgggcacccggcccagcaaccatggagcctaccgctgcgtggcttccaatgtctatggtatggcccagagtgtcgtcaatctcagcgtgcatggtaagagacaccaacccacctatggcttggcccctctcgccagcccagcttctccacgtttaaagcctgccccaccgctgcacaccctgtacattagcagtcacataaatggtattcagctgtggcctggagtgtaccccaaagctctgcctgtcatttttctctcagggccccctacggtgtctgtgctccccgagggccctgtgcatgtgaagatggggaaggacatcaccctggagtgcatcagttctggagaaccgcgctcttcccctcgttggacccgactcggcatccctgtcaagttggagccgcggatgtttgggctcatgaatagccatgcgatgctgaaggtgagcgtggtttgttccgtgtgtgcatctgaggtcttttctatggcctgactgaggcaggtgcctagaagggggcataagtaggtggacagagaagaggaggaaggtggaagatggaaaaggagaaggaatggcacagaagcccagggaacaggtggttgagtgataggtaggttggaacctaagcagatggacagactccatgggaagttggaaggatgaacagtccagcagcacacagaagagctaggaaggaaggcaccgggggaatgcagctcagttgagaaagggcttgcctactgtgaaccaagccctgcctgtacttgaagcattcaggtgtggaggcaggaggctcaggagatcaccaagtgtagaattcgaggtcagcctgggctacatgagaccactgctcagaaaacaagtaataatcacaaatcaaaggaagggacccatgtccaagttgtctactgtacgccccccaaacccgacttctttcttttagatcgcatccgtgaaaccatcagacgcaggcacctacgtgtgccaagcccagaacgccctaggcacagcacagaagcaagtggagctg

SEQ ID NO: 29431 - DNA, 1170 bp, Mus musculus
gacatatgtctgtcaggcccatgggccttggggacaagcccaggccactgcccagctgatcgttcaaggtaggaggtggcttcaggcctctgcaaagagcagggccagagatgagcaaggaaaggggtgatgcatgaccctgcctctgctcctcaggaagccccgtaagtgagcacgggtcactttccttgcttgcaccttgtatggagtaatggctgtgatcagtgttgcaaggaagggaagggagatgagcgcatgagtgggtgctcagcagagcaataaaggctgaattaccagctacttgggtacgagagtaaacagaggtttaacgagggatgcacgcgtgaccacgttatatcgctcatggaatatgtcatgcgtggcagtgctccgagtcatccttctcccagacttgatctcactctggcctggctcaacccccctgcccctccctaccaccatgcccctcccccagcccagctcaccactctgcccctcccccagccttgccctccgtgctcatcaacgtccgaacctccgtgcactctgtggtagtcggccactctgtggagtttgagtgcttggccctgggtgaccctaagcctcaggtgacatggagcaaagtcgggggacacctacggcctggcatcgtgcaaagcggaagcatcatcaggattgcccacgtggagctggctgatgcaggacagtaccgctgtgcagctaccaacgctgcgggcaccacccagtcccacgtgctgctgctagtacaaggtagagatgttgagggactatggaagggacctggaagggacaggacgctgaagtgctgccagctccatggtgctgtgtcactcactcctatgctttcccggggatctccttgtgttcctgtttaagggacagctttcccagcaaatgaatggatgtgagtgtttgtcccagcaggctctgtgccaagggctatcaagaagagaaagtaggcctgatgtggtggtgcgtgcctttcgtcccagcactctggggaggcagaggcagggggatctctgggctcactgactccagaggcagtggcaggccagtctctgaatttgaggccagccttgtctatacatattgtgttccaggccagctcggggtacatagtgaaatcctgtcttttaaaaaaaagag

SEQ ID NO: 29432 - DNA, 1193 bp, Mus musculus
tctccctctctccctctccccctctctccttctctccctctccttctctccctctccctctccctctcctcatctcctcatcttgctggtctctccactatctttcactgtccaggcctccttctctactcaggtgagttcctgtctctctcctctccttcaggcacaccccaaggatgcatgcccaaaagtcaggtcctatcttggagctcttagcatggctcttctcaggtcaccgagtctctgattgggaggctcctggccacatgccagagtgacgtatcacagaatggaaaggctcaaaacagtggtcctcaacatgtggggtccctttcaccagggttacctacgactatttacataaagatatctatattatgattcacaacagtagcaaaatgaagtagcaagggaaatagttttatagttgtggggtcaccacgacgtgaaactgtgttaagggtggaagcattaggaagttgaagactggcttaagagcttaagtgagagtgacagagggctggtgaccagcaggggtggggccaggggaggctgctcacactgctgtgccctccagggatgctgctgtacaatgggcagaagcggagtcccaccaacctagccaacagacagccagatttcatctcctttggcctcgtgggcggaaggcctgagtttcggtgagatctcttcctccctgtcctcagggagagatgggctggggactgggcacggggtttcagctgggcatatcctgcactaggctgagttacactatcaagaatcgagagagagaggagttgcagctgccagtgttaatgaccacttgatctacgggagtaggcgccatatcccaggcaggcagaggaaagagcctccaaagactactataggctcattaatccatccatctgtctgtccattccttaatttatctatctatctatctatctatctatctatctatctatctatctatctatctatctatctatctatctatctatccattcatccatccatccacccacccacccacccatccacccatccacccacccacccacccacccatccatccatccacccacccacccatccatccatccacccacccatccactcatccatccatccatccatccatccacccatccatcatccacccacccatccacccacccatccatcca

SEQ ID NO: 29433 - DNA, 1792 bp, Mus musculus
aacaccaaggacatcatctacattggtgagtgccgggcagggtgttgagacagacggggaggagatggcagccttcggggctgtagtctggcttccttgcctctcggttccaccgatgacccactgtcacaacgatcctcttcctgccacaggtggtgccccagatgtggccacactgaccaggggcaagttctcttctgggatcacaggctgtatcaagaatctggtgttgcacacggcccggcctggagccccacctccacagcccctggacctgcagcatcgcgcccaggcaggggccaacacacggccctgcccctcataggcacccacctgcctcccacggactcctgggcagcacccagcctgacagtgtcgagtatattattattaatattattatgactttttgtaagagactgaggcaaggccacgcttcgctgctaccaccctgggctggactggagggtgggtgcgccaactcccacgcattcgtgggcagagccccgaggctggtgggcaggacaaggggactggaagaggtttcctcagaaggctcccggaacttggagtcaggcatcgtgactggtagggctcagaactgttcccatccctttccctgcttcagcgtcaggctgggccacccacttcagcaggccgtgcgtgcggacagtcctcattgctgtgagcgcagttaccacctggtgcctcactgtcaaactgaacgagggggtgtggccatggcctgagccactgttctgggagcagaaggcagctcactgcccccccccacacacacaccgaccacataccatcccagcctcctccacacccacctagccagaggtcccatgtccttggcagtgtcccctcccacccagccctcctccacctgcattcccccacccctacccccatatcccccacacacacacacagcccagggctctgccctcaggagctgcaagggagaccaactctttcccagaatcgctaggcagagcccagcaatgaggtcccaccacaccaggccacacccccccactcttctggaggtgaaggcccagggcgtgggggagcagggatcaggagcacctgtggcttggtggaggcagctgagacctcagcttgggaagggaacgagggatgatgataaccctgcccatctgggagcctgaggacctgactaaggggtaagcaggcccagactgtggctcttgggtcctagagggaaccccctgtggtctttctctgattttttttttcttaataaacggtgctatccccgctagatgtctcctgtttcaatgacaagggattcactcagtaccgctgggggaagggcaaggcagggtcgagtctctgagatgtggaagaggagcaatccctgaggttttttttctgatcaaggcagaccccagttcctaccctaggccccctgccctgtccagcacaatgatccacctctaccctcaggatctgttgtcccctctgtcatgagcactctgcctcagaagcagatggacagattgtcttcccacaaatcaagctttattgagtgacaataaatttatataagctacgtcaaatatcattggctgcagctgggcgtggtggcacacgcctttaatcccagcacttgggaggcagaggcagaggcaggcgaatttctgagttcgaggctagcctggtctacagagtgagttccaggacagccaggactaaacagagaaaaaaaaacaaaaaacaaaacaaaacaaaaaatatatcattggctacagcttctctctca

SEQ ID NO: 29434 - DNA, 1136 bp, Mus musculus
atagcattcatttaagacagggtctcactctgtcgtcctggcttgcctggaactcagaaggtggcctgtctctttccgagtgctggattaaaggcatacactaccaccccaggcttcattcatgcattcacttgagttttatactccattgctgtttatacagtttccatcccacatgttgtcctctccaactcctcccatcttcttacctctccctctccatttttttttaaagatttatttattatatgtaagtacactgtagctgtcttcagtacactgtacctgtcttcagacactccagaagagggactcagatctcgttatggatggttgtgagccaccatgtggttgctgggatctgaactctggaccttcggaagagcagtcgggtgctcttacccactgagccatctcaccagcccccctctccactttttgacctctttttttaaaattaagatttatttatttcatgtattgagtgctgtctgtatgtctgtatgtacacctgcacaccaggagagggcatcagaactcataaatggttgtgagccaccatgtggttgatgggaattgaactcaggacctctaggagcgcagcataactgctgagccatctttccagcccccacctttttctttaatcattgttttacacacgtgtggtttccccctcttcattcactctctcacacatacacatccacacacatattagtacagcatacacacacatataaatacagcctgctgaatctacttaatgtggcttatctgtatgtgtgttaagggctgagattcagtgactttgggggcctggtggtccctgggagacagcacattttacttatttatttatttatttatttatttatttatgttttttggttttttgagacagggtttctctgtgtagccctggctgtcccagaactcactttgtagaccaggctggccttgaactcagaaatccgcctgcttctgcctcccaagtgctgggactaaaggcgtgcgccaccatgcccagcgagacagtacatttataggaccttggacgttacttatttcatgagtagattgtatgttcactgtaaagagcataagagaatagagctatcagggtggctaagaag

SEQ ID NO: 29435 - DNA, 1214 bp, Mus musculus
gaactcaggacctctggaagagcagtcagtgctcttaaccatggagccatctgcagctctgtaaactatttctttttgtttgtttgtttgttttgttttgttttttgtttgtttgtttgcttttggagacagggtttctctgtgtagccctggctgtcctggaactcactctgtagatcaggttggcctctaactcagaaatccgcctgcctctgcatcccgaatgctgggattcaaaggcatgtgccactgctgcccggcctgtaaactatttcttttcttttttttcttttttttttttcttttttttttttttttttttggtttttcgagacagggtttctctgtctagccctggctgtcctggagctcgctttgtagaccaggctggcctcgaactcagaaatctgcctgcctctgcctgggattaaaggcatgcgccaccacgcccggcttgtaaactatttcttaaaactgatttgtgagctgggaagcaagatacaactgttttttcttttcattaatttaaactgtaggatgcacaagagttttccaagctctttatgtcgctgttggaagacactttgtctaaacagaagaacccggatgttcggaatgttgtgcagcagcagttctgtggagaatatgcctatgtgactgtgtgagtctactgcagctctcctgccattaattacccttcatctcagtctcaggttatcacagtggtgggttatcactgcacccgaggtatttatagcagtatatttccatgggaacatgttgaagcagctacctggcctattgcagttgagtgctgcgggtattggaaactggctgaagactgtgaggctgtgtagtgtgggctgagatgtgaggttggaactgcctggcagactaaagcatgctggacattgctcggggaggctctagtccaagagagactgatccctagtctggttctatttttattttgcaggtaatttatgtgctacaatttctctaacagaataatgaacattataagcactccctctcctctgtctagagcagtggttctcttttttttcttggttttttcaagatagggtttctctgtgtagccctggctgtcctggaactcactctgtaaaccaggctggcctcgaactcagaaatccacctgcctctgtctcccaagtgctgggattaaaggcgtgggccaccaatgcctggct

SEQ ID NO: 29436 - DNA, 1166 bp, Mus musculus
gaggaagagtttacagaatatgatacgaatagcaataccagagttcatccagaaaccctaagtcttcaaatgatgcatcccgtttgaagtggtacagtaaattctttagaggccagttgtatccagataggagctggagatagatgtacagagaatatgtgtttgtaagcactgttaatttttagctttgtaatgaaaaaccataaggacctgaattgccttgatatttctggatgattgtgtacagataaaattctcctcttcatgggagtgcatctttcatcatataactgaggtagctcttcatgggagtgcatctttcatcgtgtaactgaggtggctctgcacttgggcacgcagtctatgctttggcaatgaatcattaggtgtcagaactttgcagaggggctcagcctttgcctgtgtgtgctaatagacttctggttggaatcaggctgctgtggagcctgtcaaggatctggcagcatgtgcacaggctcccgatggtttgactgtatcttcttcatggcaggcaaactggacacaagaagaagctcaatgcatacatcggcttctcagagagtctagatatggagccttacgtggagcacaaaggtactgttgtgaccaagctgtgactgttagcttgagagggaaccgaggcctgctctctccacgtgcagagtgttccttgaatccctgtttgcagtctctgaacagcagctttttgacaagaagttactttcatttgtaagagttagcacacttaaattttacagatctcaccggaccctgccccgtctccttttaaagttcaaaatggaaatgtggtttgcatactatagaagtgaacatcttcatgaaccacccaaaagggaagacaccatgccagcaacctagtgtccacagggtgcttacagattgtcccttgtctctcccgtccacccagcaccacattttttctttttgccattaagcatctccctgaactgatagtcgggattactctttttgtctcctgggatattgccaggcaaagataacatgtaattaatcctgccattctgctgctctgggttggtgggtggtgcctggagaaagcgacatccctggtgtgtgtctcccagtagaaaggttcaggcagcacacagaggtctaattggaca

SEQ ID NO: 29437 - DNA, 1078 bp, Mus musculus
catcctggccgagaatctaccaaatagcccatactgtcctccaacttgtcctctaatctcctgtttgaattgtcattttgttttgttttaaagacacttatattttgtaaacatcatcctgggtggctctttgcccatttgaatggtttggctgtgccttgcgtttgttggtcctcttacctcagtctttggggtgctgagtggtgggggtgcaaccccctgccaggctcttaggtgtcttgcttgtgtcctgtcaggcacataagcacggcagtgatagttcatgttcaggctacaggcttctcactctctcattctctcccttcccctcccctcccctcccctcctctcctcctctcctctttctctctctctctctgcaggcgggtccttcgtgtacgagctcagtgccgtcctcatccacagaggagtcagcgcctattctggccactacatcgcacacgtgaaagaccctcagtctggagaatggtacaagttcaatgacgaggacatagagaagatggagggcaagaagctacagctagggattgaggaagatctaggtaaaatctttaagttgtgagtgcccttttcaaatataaatttttttgttattttttttttttaagacagggtctcactatgtatccctggctgtcctggagcttgctatatagagaccaggctggccttgaaccctagtactaaattaaaggcatgcaccaccatgcctggattaagtataaatttatttactggtaatcgcaatctttgatagtgtcctagcccgagattaagggttatggaggctctttaacaccactaggcattatttgtaacagttatgcttcaaggataaccaaacatattttgtcacagggatgggtgtgctatgaatgcccataggcaaaggagtcagtttcagttacagggtttattccctggcgggggaagggaaggtggctgaccaggaggatattgtttgctagagggagattgtgtcatcctcttcccagggtacagacataataactgtaggagagaagctgttgtgagccagtctcatggcagctctttc

SEQ ID NO: 29438 - DNA, 1140 bp, Mus musculus
ggattgctttcaggaatgccttagaattctgtactccaggttgattaaagactgtgactgactgttcagtatggtaaatgttactggaaagtaagccctggtcacaaatttaccaattatccagcttttggaatgactgaagcttagcctattctattatcccaccccaaagagaggcagaaagaagcaatttttaataatgttaaaaggaaaaagtaacctagattaaagtttggttttatcttgttcaacctctagaacaaaagaaattggaacaactggcggtcccatttgttagagccatttgctgcttctgggcattctgggtgggtcacctggcttcattgctccttaggtttcacgtcttcgtcctggaggtctagtaaaagatgaactctagtggaggtttccattacagtattcatccatcttggatgacgtatatatcagtgtctttggaaaaggggataaggttgttttttgtgtttgtcttttgaatagcctttcttcaagagctggtagatcgtgataattccaaattcgaggagtggtgtgtagaaatggccgagatgcgcaagcagagtgtggacaaaggcaaagcgaagcacgaggaggtgaaggagctgtaccaaaggttgcctgctggagctggtctgtgagatattccaggacgacactattgccattgaatgcctggggttttgttctgtggtgtttttatctttacctgttgcaaaaatgtatatgaaaaacccatttcctcctctaagaggccagcttattctaaaatcattatgctaagtaggcatagagtatcccatatacttcgaaaaggaccttttcaaagtgggaggctgttagagaatgaaatcctaagtcagcactctgcactcatgacctgtgaagacttttactgtgggctggtgtggcagcttagggaaaaagtgcttgccaccaagcctgccaaccttgcgtctgactttcaggacacatggtggaggagagctgacccctccaggccgctctccgacctttgctggtgtgcttcccctcaccacacacacacacagaacataaggaaaaaggacatttttactgccagatgtggtggtctttaatccccacggaggctggcagatc

SEQ ID NO: 29439 - DNA, 1331 bp, Mus musculus
agttagactccagggtttggagaattaaaaacagtttagtgtttgatgctagctactaaatacattgttttagaatgctgcctttcaaagtgtgcatgacaggtgtagagttctgctcacagattaaataaaggcctttatatctgaacttgctgagaaaaggaacttaatataagcatctccacttcccccgggatttcttttacccttttgaccttcagcccacttacctggtgggaggaggagctccttcagccatcgtttgtaaacttgagtttagtagcattgtccacagaatcatgcagaagaccacatcctctttccatgtccccgttcctgtcagaggataggaatttgatgtttctagcacctgagctcctgagcacatacatacccatgaagctataggattaaaatggtggccctggtctacatagtgagttccaggacagcaagaacaacaatagtcagatgaccaccacccccccttaataaaagtgaatgaataaacaaataatccacagggttagacgataagaaactaaagggcaatgaaagtagttcttgttcctgacccacccacacctcataggccctaggcctgactcctctttctgcttctggtgtgttgaggtgatgaaggactcggcccccgagttgaatgtgagtagttctgagacggaagaagacaaggaggaggctaagccagatggggagaaggatcctgactttaatcaagtacgtttgtattgaagtactccatcattgtgtctttgtccgcaacagccccctgctgtccgtcttccctggctgggtattttctgggtccctccctacttgttctacacttttaactcttagtttttatagcacgctgtagctaatttttcccttcacccctaaaaaaaaaaggtctgcatatcctccgaagttcatttaaggaagaaaaagtaactgtgtgatggctgtggtggcacagcatcgtgccaaagcacttacaggcattgctaagtgggggtctgggtctgaggccagcctggtctacagagaaacaaatgaaaagtgctcacgtctaagaccagtggggaggctgaggcaggagcacctacccgtgccttgaagccatcttggcccaaagtgagactgtctagagacaaagcaagagcggctatggccataggtgtggtgacacaagcacagtcttgctttcctgaactgaggcaggaggattaagagtttgcaggccctactcttacagaagtcctgggtttggttcccagctcccacctcaggcagctgtaacttgagcgagctttgtgggatctgataaa

SEQ ID NO: 29440 - DNA, 2399 bp, Mus musculus
ggagtgaatcatgtttacactgagggagtgaagccctggtcagtccacacagatgccctgctcactagcggatctgtgtcccaggacatgggctagcatcctgctccaaactccaagtgaccgtctagagacaagatctgctaacccagcctttatttaacctatactcatctttcaataaagcatgaacgtgaaggacttgccaacgaggaacgtgtcttcagagcaccacgcctgcagggcagccacagccctgccacctccctgctcactgtctgtcagtgctgagtagtagggtcaagccagtgactgtctcagttttcctccatcatctcagagggataggaaatgttcagtgttcggtggcagcaaagagagtatccctgaacgtttgaaaagccgaaccggagctccgtaggatagcacgggttttcatagacagccctcccgctctccagttctgccttcctcggacctcactgctttttgaaaacccttaagactatacagggtgtgctgcctcaccaactcaggatcactgttgacggtagtttaagcagcatcaggatctgctcgaacagaaaaaggttttaggggagcacggacggggctgggcagcgatttgcattttctctatcaagtggattgttggtatgtttgtggcccagttgctgatacagatttttttttttttttaaaaacctagttggttgaaaaactttaaatgatgtatacatgctgatctcaacattggcagcatcttttggtagctttctgctgctgggtagaactcccaacatggcatttatgtttgcaatgaagaaagagtgttctgagatggtgagaagcgcggggcagagccaggagagctgcacacctaccttcctggaagactgacttctcaaggagctcctgcctttggggacacagggactcacgggaccctggctttcagatctgtcctttaccgagcaccacagaaatgggaccaagcctcactcaccaagagcccactctttcccaaggccaagacatttgaaagtcaccagatatttgacaaatggtctttactgtccttagaaagaaacccagagtttgtggctttgtaacaaagcattggcagggcctcagcacccctgaaaggtggtggggctaggtggcaagaagcagctgttcctccccctttctcttggcattggctgtgcacaagccagaagttagcactgtgaggttggttgcataggcatcctttgtttcctttacgaaatgttagcaaggtaatagccattaactcctgtcaggcaaatacagtggggcagacccagttccagcgagctgaagtgtgctgcttccgcctcacagccggtgcccgccactgcagagccttactggagcttcagctcagacccccgcacccactgaacaaggccactcccgaaaagcttgggatccctgggctgcggcttcctcacagcttgaagcagacatatttcaaagagtctgcatttggacttaccagctgccatgttcctgctcactaatccatgctgtttggttgtcctctgagctggggtggctgtatacagcacaggctagctattctgctgggttctaaagctacattcaggaaccacattaaaccagattatgaatctccaggcttctttatgtttcctttttctttcccaggcagggtttcctgtaacccaggctggccttggactcactatgtaaccaggataaccttaacttctgatcttcctacttcctcctcccaggtgctgggattgcaggcatgtggccactgtgacaggtttcctgtgctgtgccgaggcccgggcccagcgcctcgtgcacactagagaaaattctgcatactgacccacatccccagctctacccgtgtatatttctagtcattctttaaacccaagcaaatgtgtagagtctcctatgctgagatgttttttgccactaccagacatgtaggctatcatttgacgtctttattccctgagagaaaacttcttttctgtatttatgaactttattattgagaatcactgttaacctttctgccaaattaaagacacttgtgtctctgtttccacggacctttatccggagtgagttctttgtcctttcacctattagttgttggtctttggtcccaggccggaccagatcctggtcaccatcactcactgatgcttggcctcaggaaccagagcagagaatcctgtctttcctgttccagactggccaggcagagcaccaagtgtgcaggtgcagacagggagggtacagggcagtgggcccgagtgccactgtgtgaagggtgttgaccttaagtccagacccctaaatgaacaggtatttctctgggggcagttcttcct

SEQ ID NO: 29441 - DNA, 1423 bp, Mus musculus
ggttcagataggcactcaaaagatatttctgacctacagctcacaacaactaccaggcccagtccgctgttcccctgcgccatgagacccacggtggagaagacgtggcggtctttgccaagggcccgatggcacacctgcttcacggcgtccatgagcagaactacattccccatgtgatggcgtatgcctcctgcattggggccaaccttgaccactgtgcctgggccggctctgggagcgcaccctccccaggggccctgctgcttccactggctgtgctctccctacgcaccctgttctgagggtgcaggtcccacaagcccgcaatggacagccagctcccctccttttgtggcccaccaccgggcagcccacactcaagggagaggtccaggcaacttccagcaggaacagaagttcgctatctgccttgcctgtatctggaatcctccatgggccagattcctggctctgcctttattccctagttattgccctttggccagcaggtttctctcttgggcaggcaagacacagactgcacagattcccaaagcaccttatttttctaccaaatatattctccagaccctgcaacctccatggaacattccagatctgaccttctctcctccatcccttcccttccctctggaacactgggccccatagtcacggccagtcctcaagcccaaccctccctggggggaagaccaggtctgctcaggatgagactcccaggaagccacctccggggttggctgtctacccagggttgccaagctgggaagaacactccagccggacaggacacacacacacactccccacccaattgcagagactcgccaacccttcactgaagtggctctcctgtttggaatagcggggtggggtgggggagaagaaagaaagaaagaaaaaaaatttttaatttctctttttggtgttggttaaaagggaacacaagacatttaaataaaacatcccaaatatttctgaggccagagctgagtctttgtggtcagtgggaaagtgaccaaaataggcccattgctgaggaaagaactggactcggggtgagggcatgccaagcagagatgccggggcttttgccaggcaaggggggcttcaccgctcaccagctgtgatgctaggatccactatgtttcagtgccactgcgtatggcaatgggagacgatccacttgtgggtcagtgtgaggagagagagagagggagagagagagagagagtcctttgtctctaaacccacatcagggagggcttcagtgacctggggtaccttcatggcatgacgctcacaaaatacactgcatagcccgggtgccatgtagccactcactcctgccttcatcgacacatgctgagcgtgtgccaggcaccgcataagggctcaa

SEQ ID NO: 29442 - DNA, 1177 bp, Mus musculus
taagacaccccatacccagagttgttgtaaaatcaaacacgatgcttctttatcgtgccaagcacacaatagggacttaggcatgctcccctgcccttccctcccttcccctctgctgaaggcttcagcgaccccttaaaacagctaaggatgctgagccaggagccgaggcttgtgggagagatccaggcttggatcccgtggttctcccttctctgtggctctgctttccccacatgccccgccccctacattctccttgctcaccctctgaaggccacttggccatgagatgcctgaggtagacctggcacagggagtccctggtgaaggtcgctgtcatcccatatcaaggagatgttaatctgatgacagtgtcctggggcctgtgagggcagggctccctcccctgtcgcctcatgggaggcctttgtcttgatgtccctaggaggcaggattgaccacggacatcatgagggtaaggccaagcaggctctgcatgaagcagtggagatggaccaggccattggcaaggcaggcgccatgacatcccagaaagacaccttgactgtggttactgctgatcattcccacgttttcacattcggtggatacaccccccggggcaactccatctttggtgagtagcctgtccctgggatacagcgaagcagcctgtcccatgagaactgatgacagttgagatactggaaggggaggggagaatccaagagagctgaacacctgggcgatgggtgggtgtgcagcaaagagaacatgggggaggggcatggggaggaaggagatcattggaaggatgaaagacctggcatttgtgtgctgtcttcatggaggtagctctgactcctaaggaggatcacaagaaataccaagccacagaccccggggagctgggttagggccaggctgccacttctccattgtgaccttgggccccttccctacgcaggtctggctcccatggtgagcgacacggacaagaagcccttcacggccatcctatatggtaacgggcctggctacaaggtggtggacggtgaacgggaaaatgtctccatggtagattacggtgagactgcagaggccagggctgggaggggaaagggtctttatccctcgaggctgggctgacggggtcctggaggagtccagattt

SEQ ID NO: 29443 - DNA, 1128 bp, Mus musculus
caggctcagtccattcaggagaggaactgggtggatgacagcccttaatgattaagcacctgaaaatccaagtctcttttctctgttacgattttgctccatggctgctgtgcccaagcaggtctcctaagacatagctccaaccctgcctctcctcttacaatcaacaaagattccttccgaatcaataacgatttccttgcttacctgctgtgtactacaggtccagttcataattcagtcacacactcagtcttttaccggagccacaggtaacagtgaacttgtatttcctggtttctcaaaggacaaggttgaacaggtatggggccctgccctgcctgctgctggtctagaatgtctcccactgccacatctgcgtgctaatggtagaccatcctggtcccccaaccctttttaatagggtctcaggtgtcccagtctggccttagactcactatgtagccaaggatggccttgaacttctgctcctcctgcttctgcctcttgagtgccaccacatctgttcttatgcagggcttagatggacctccaggcttcctacaagatagctaaccactctaccactgagctacatcccttcgccctcattactcatttttatctatatgaatgttttgcctacacgtatgtaagtgtaacctgtgcctgagtgcctgctgaccagaaggggacatccaatcccctaaaactgccattacagacagttgtgagctgccatgtggggtctggggatgagatgcaggtcctctgcaagagcagcaagttttcttcactgcccagccatctctccagcccccctccctgtattctttattctttagccatcctctctatctgcgaaggaacgcactctgtctccagatctccccatacctccatgcacgactgcaggggcttgtgtggaataaactctaattactagtctgacagtcagctggaggcggggagcagaagaggttcctgacttactggccagaagtctgacagcgcaacaccctgacaggtgacagacatttccgcattctaatcctgaggaggcacaacagcagcccttagactgggccagtccctctcctcctcctgccctcagcctaccctccctca

SEQ ID NO: 29444 - DNA, 1188 bp, Mus musculus
gctcacagaggagtgttggccaagaggatatatgtgtgtgtgaaagccctggggtggatgacctacgtggtattgttctgtgaaatcagcagcaagggtgagaggaacaggagatggccagggcttggggccctgcaaagtcctccaagccaggtgagagttttggccttaacacccccagagcaatgaacgtggagccacgaggccgtgtgtacattcaagccagactttatttcttccatgccaaaggaagccctgaaaggaagaggcaaaaagtggtagctggcagagtggagtttcctttgaattagagatctctcttgccttctgtcaggcccattctggcccttgggtggagatgggtttgggggagggccatgccggggattggcaaggcagaggagggaaaggcagcagatgtggaggaatggagttgtcagggtattgtgactgatggagatccagcccactgcttttgacaggtgacagtagagagcctagaagggttgtgtgagcggctggtgccacagctggaagcaatagtgcccagatgctgggtggaaggtcctccctccccaaaccctcctacccaaaccctgactgagatccacgttgctggcagctgcttttctggagttctcttccaggcctctggcggctggcccccacccccacccccaccccacccccaccccctgcatccccaacagtgccttcgacttcaaggcagggaatgctgcaataaggaggttctgtctttgaagcatccagtgggggaggggcagcattctgacctccaaattctttccccatgacctctgtgaccctggagagacccagccctttggaacccaggaggtccacaagtgtgtgtgtgtgtgtgtgtgtctactagatccacagtgctcaaaaaaagtccctccctgggggatgggaaggggttctaggggtctgtaaggatgcctctgccacagaaaggagctgcagaaccaaagtctgggtccctgacttatggggtctcctcagaagccgagatagtcccccatgtgaagcatctgagctggaagttcccggcagccactttgtgttcccatttttcttcttggttgcctctctttggcctgtgctatgtcagggcccagttaccagagtgttcacctgagactcgtctctacctccttcctggga

SEQ ID NO: 29445 - DNA, 1735 bp, Mus musculus
gtgtcaagctggtggcttgccagccctgggcctcacactgacaatggcagtgggacatggccccctgcccacatccaatgccagatacaccacaataccactgtgtcaaatgctttaaagatatatttttggggagactattttttaagcattatggaatacactggaaatcttcagggaaaatacatttaaaacactttttttttaaaaaaagaaaagaaaagattagtatatttattatgttctcttttttctaaacaacctgtggacaaaggaaaccccactaatttaccccctgggaaccccaggctgtggagaaggctgccagtttgagcgagcactactttagcccattgctggtgtaattacttctatagtcaccggtgcagtcaggagatgtaggggcccaggcagagggggtgagcagctgaagggcctggttatgggcgtgaccttctcagcttacctgtcctgtcgctggagtccaaccatgggaagcccaacaaggatgggttgatacccaagtgatagttgaggcagcacaaaggcagagtaatgaccttcatatcacgtggcacccgaacactctagactagaacataggagcctgttggagctgagaacccacaccccaccagatgcaccctgttgtccaaagatgtcttttttttttttttttttttggtcccacctcttctggccctgagacccgttgcctctctgtagcaattctgacatcctgaagtggtcagcttcactgatcctctgtgcagagggaaaggggaaaaaaaactcagcccagttctccctccaagctctgtagcctgtagttgccctggcctggctcctgggacccccttctctagtgccttaccccaggctgcagaccctgagccccactaggaggcagcatttggcttgctttcccagtggagcccccaagtgtcctgactagaagccaacaccatagccccattcccagaagccccagggtaccaccccaacctgcctacaggacagccattccagatagacgtccagtgtcaggagctgctgacctctcaggctttcagccacccgtggcacgcacattgaatcaattcagtccttgtagatagagggattcccctcaccccctccccctctctgtttttttggaggtggatgctgtagccagagcaggccaagactggaatgttcccagccccattgggctccagggaatggcagaaagtcatccacccacagcatcacgtagtagatatgtgggctcccactaggtggcgctcaccgcagttctcatgactcctgcagggagcaagctcttgtgatatgtgtgggagaagcctagtagtgcccattacagcccctggcaggccatgctcccacaccacacagcacggcgtgcgctcacacacacacacacacacacacacacacacacacacacacacacacacacacacacacacacctggaagccggagtcctccttgaccaagacgcagagacaatatggtctcggccccgcttgctaggatgggaactacaagcaggcacctggcaaggttcttggtccctgtaaacacattcgaggtctcggctcttcgggggaaaggtaacataagaaggcaggaaggtgctggagccgtgccctgccacacaaagggggaccttctgggtctggatcatctgccctttctatcccgtcgccttgcctctccatagagtggca

SEQ ID NO: 29446 - DNA, 1150 bp, Mus musculus
gagggtgggatgtgatggaaataccctataatagacattaacccctggggggaggggagagggtgggatgtgatggaaatactctataatagacattaacccctggggggaggggagagggtgggatgtgatggaaataccctataatagacgttaacccctagcttgtgccaataaaacatgtcagccttggttattttgaattctttcagaggctcaggcagttcaaggcctacatagtgggttccaggacaaccagagctgcacagtgacaccctgtctcaaaatgaccctcccatcccccccaaaaaaacagtttacaaaaacagatattaggagttaagtcagatgggatttcagagccgccctatgtcagccctgagtgcccagcttccgttgatttcccacccacgtgtcctgtgcacactactgagcacactgggaagggagtcaagcacaggcacccccacacaatgctgcctagggacgttaccccatgtgacacgacagcagccactcttccagaacggctgtgttgtcatcatctttaacgtcgaccttgaacaggatttgaatggaccgcagagtaagaactgctgagattatttcatgactgaatcacagtcttcagttttatgaatggggagaatttaagtattcctcacagagttgtcggttttcttggttttgttttgttttggctggggttaggcactcgggtctgaagctggagcgccgtgtgtggcactcacattggagcctgcctaccacctcgctgctttgtataattgttctggcatgtctctattcttagttgtacatatatttctaggtttattatgtctgtgaggagagggaaggaaagatggtgaatgagagcgagagatcagaggacagcccttctctccttccactgtgggttcaggcagtgaattaaaatctgcaggccttcacaaccactgttccctcaaggccaaatatttggttgcagaaaatgttttctttcttagtttgagaaacatttgagcaataccattgacagtaagtggcactcacattctctgcaggtctgattgagaaagtgcagccttcctggctaccatgtcctttactaggtgttgggaccaaacctggagtgtcctgtgcgagc

SEQ ID NO: 29447 - DNA, 1195 bp, Mus musculus
tacatggaatctgatttctggtgttgcttattaccaaaaatgacagaatattcttgatcaaatgtctagatatatttttaatatttggggcatgagttgtccctgtttgagagttcccattactaatgtagaaatgttaaatggtaaaacataatttgctaaaatgaccagttttcagattcacctgtgcgtgtgccccccactcccatcccaccctgttctttccatagaacttttgatatcaggcaaacggtttcctttttgagatattttaacagagaaggggtgggggagaagcagatgaagctgtactacccagccctcttcttgtttgtatttgtttagggttgtgaggttgtgtaaaatagtactagcttcttacttgagaactacagtttctgcttatcatttattcttccttgtggcacttaatattttaattgtcttaagctttttgatgtatatatcctctggccccttacatgctgccagaggagaaggtgtttgtttgagattcattccacttgaagtgtctcctgggatccccacagctgcgtatggctgggaaatggacttaaggcttgggcttgaattggtggctcctacctgtgaggtcccatcgtgagtcactgggatttgtgttgcatggaaggcagtctttcctgttgtaaatcttccttttttatgtacaaatattttgaaaaatatgaataaacatgaacttttaaaagctgctgaactacagcttagtgaaaagtttccagtacctgtcctgcaatctctcctcctgcaagggataccatggcttcctttttcttttgagttcttactttgatggtcatttattttatatatatgagtacactgtagctgtcttcagacacaccagaagagggagtcagattccaccaaagagtcatcttaggggctggagagatggctcagcattaagagcactgtctgctctaacagaggacctgggttcagttcccagcatccatatggtagctcatatttgcctctaacttcagttccagggtttctgacactctcacacagacatacttgcagacaaagcaccaatgaacataaaataaaagcaaacttgttttttaagagagtcatcttgaggctgtggtggcatacacctttagtcctggcacttaggagtcagaagcaggctgatctctgagtt

SEQ ID NO: 29448 - DNA, 1782 bp, Mus musculus
ttgcaggctggaggggaggcagcctgctcgctcacacttcagtaccgcactaaggacctcaggcccagggaaggcagaggtgctccagctgttgccctgcgaggagtggtcagccatgctcagtgactgcgggcctcctggagtccctgccacgtctggggtgggcattaagggcagtcctgacctggcctctcctctcaggagtatagcatcatcatagaacagctctccaatggcaagtgggtcccctttgatggtgatgacattcagctggagttcgtgcgcatcgaccccttcgtgaggaccttcctgaagaggaaaggtgtgtgtgactcctgccagagaaagccactcagctgtcacctgtgtctgccacaggacacacttccccctgggaaaccctcctggttttgatgttgcttcttccccaggtggcaagtacagtgtccagttcaagctgcctgacgtgtatggtgtattccagtttaaagtggattacaaccggctaggctacacccacctgtactcttccacccaggtaagtgaggggcagtccagtttctggccagtaggtgtcgcccttaggcctcccagccaccagggcctgtcatctgtcccattacaggtgtcagtgaggccactccagcacacgcagtatgagcgcttcatcccctcggcctatccctactatgccagtgccttctccatgatggccgggctcttcatcttcagcatcgtcttcttgcacatgaaggagaaggagaagtctgactgagccagaacctggggtccacacagtacggccgaggccatcacgaatggatcggtcgggttctgttttgttttgtaaaggccatgggaaaatggcacagccttacctcagagggcgaggactatggggtggggggcagggaacatttttttttttctgtaagttttccaagtttgaatcactctgtggcaatttttgtatgtgcagccgcccccatttctaaaataaagagaaccactgccctcacctgtcacctggccccatgacactgatgatggcagggctgctgcctagggacactgtgccagagcctccgtgcctctcatctctcctcatggaggtggggatcacacacccacagtgtagtggaaactagactgacagctggcctaagaattgctgctgaagagacccgagagggactggaaagatgactaggttaagagcactgcagaggacccaggttcaagtcccagcacccacatggcagctcacaaccttctataatggtagtctgaggagatctgatgcccttttgtggcctcccaggagaccaggtatttaagtgatacatcgtatgtacagacaaaacacgatatgcataaaataaagaaaacccctgtgttcctgttcactggctctaggtcctatcagtgttcttttagttcctttgtttttgttttgtttcaagacaaggtttgtgttcctgttcactggctctaggtcctatcagtgttcttttagttcctttgtttttgttttgtttcaagacagggtttctctgtgtggccctggctgtcttagaactcactctgtagaccaggctggccttgaactcttgagagatcttctacatgctggggtcaaaggcatgcacatgagccacagctcagccacatctgttaaactgtatgtgaactgtctctgttagggcatgagactcattcctaatgcaagaccctcagttcagcacactgtgctctgctctatgctgtaaactcacatttaat

SEQ ID NO: 29449 - DNA, 1144 bp, Mus musculus
cacagagagtgaaggtggctgccgtcctggcctctagccttgtagcttctttgcttgcttttgccaaagaaaggtagctggtgggcacccacctcactgtccccagcagccccctctccctcacccatccccgacttgtgagtacaagagaaattagagtctgtcaggtcatccaaacagcacttttcttccttggcctcctgtgtgaggagaagggcttcttcccggcgctgcctgacacaagtgcgtgccgtgtccgggtgagccgcacagattagacagaccgcagcacgtgtgtgcatggtgcttgcttcactaaagtgaagtggctgaggcgtccctgggtaggagttaaagctcccccaccacaggatgaagatggatcttggagacctctgctttcctcttgagtccggttcatggttgtcgaagccccatcctcaccaggcccacagtgggatgtagtgcgccctgaggacttccctggatagctgtcctcgggtgccacctggccttgctgatgtagttgtctgacaaaatgtgtcttgtttggaacactggagaagctgagatggcgtgggtcaagaggatattaatattcggtgctctgtgcccgatattgtccctgtttctatcataagctgggcctggtggcaagccagtcttgtgagtttggggctagcccaggctacatagtgaaaccctatctcagaacagctggggctggagtggtggctcggtggaaaggaccagccctcagcctgggctcccagccatcgagcgagctctagttcctgggcttgccacgccctaccagactgcatgctgtgcagacatgtgcaggtaaaacatgaatgcacacaaaactaaaaacctggaaaagaaaagctctgcatttgccaagggagtcactcagcacagtcagaagcccccccccccccccggcctttctgtaaggcagctgcaggggcccggtggggcttaggtagtgatttgggagcccacctctgccaggatcaggaacaaatctcatcaaaggggataggagaacgggcttatttgtcccacccagtgcactctgcaggtgcctcccaccatgggagacaggagcagaagagtctcccaggcatcagaagtggccgtg

SEQ ID NO: 29450 - DNA, 1167 bp, Mus musculus
tccctcctttttgctcccctccccctcggccgctcgctgcttcacagtccccgagtcgccgccgctgccgccgcccgcatccgcggcaggactggcccgcgcgctccccggggtgcgcccacctcggtcccgcgccctccgggctcgcagggacaccctcctccccgcgcgtcgcggccccgcccggctcggcccccgccccgcgcccgagagcgccgaggatgtgagtcctgcccgccgctgccggagcagcagccactcgcgcgcggagcccgagcgcagcgcagctcagctgcgggcgctcgttgggtcgctcgcgcgggctgcgcgctcctgccccaagcggtgtccctccccggcctctcgccggccccagcgccgcggcagccccgagggccgtccccggccggccatccccggccccagcgccgctgaccctgtcctccgcgggcggggacgcgggcggaggaggtgccgcctcggagcccccggacgcgaccatgtcggaggtgctgccctacggcgacgagaagctgagcccctacggcgacggcggcgacgtgggccagatcttctcgtgccgcctgcaggacaccaacaacttcttcggggctgggcagagcaagcggcctcccaagctgggccagatcggccggagcaagcgcggtgagttccccgccccttaccccctgcggtgctggtgctgcagcctggctggggctcaggggtccccgcggtagtaggaggaccatctgcgagatctagggatccctcctgcggcggaagctggatcaggcctcgggcaagagtccccgcttgtccgggccaccagcggggtcacccgggggcgtggtagcctctacttgctgccgaggcccaaaggttatacccgcgtcctcaaccgcaccaaagtttgcttttaggtttcacacccctccccctttttgcgcagtggagtcgcatctgcactctctctgctcggccaccctggggtaaggggtcctggagcttcttaggggtctgcgtggggcgctgcaggggaaggaccttaactcccgcggggaagggcgaggagcattcaggtcgcactggcttttcactgttacttggcagaggggagaagggtggtctagcctgagatattggagttggagaagccccagggaa

SEQ ID NO: 29451 - DNA, 1099 bp, Mus musculus
gatattaaataaaacccattctcaaggctagaaaaacaccaccccagcacttcctctgacggggctggggtgggattgcccacgcttttccaacccccccccccccccgaggcatctgtatgctctcggggatggaggtcaggaaacaggtgggagccttgacgccttgatgcctttcatggtttgtcttgagttcattttcttcaaccttaggctccttcaagccagacctggggtttatgtttcttctggaggaagatgagacacagccctatgccaccttgagctcctggctagagagggcaacaatcagctcccagccctggcttctggcagctgtatggtcttttaaacctttggatagtccgaatctctctggctctcctcaaaatataaaacaaggctccttccaggagtatactggtgcacaccccaatcccagcacctggaaggtggaggcaagagaatcgggagttcaaggccagcctctgctccctagcagggatagtagcctagactatgtgagactgtgtttcagaaaggaccctggtacagatacaggggagctggggttctgagatgtcactcagtgagaaaaatggtttaaataagattcggggggggggggtagagatatatcaatggcggaatgtctgtctatttttcaccgagttaggggctctgaaaatctcaagtcatctatcgctttataaaagacagaactttctcatagcaacaagacaggaggaagagatgtattcaacagtaaagcagtgtccttccggaggaagggtctaggcttcttcaaatggagctccagaatgtgcacgggacacatccgatctatatttagagacctttagtgttcaaacattttctaaataaagctaattatatgagactaccctgaattcacatgttttggtgtatgctagtgactatatttaaacaatactggagtggggctcacatgctggtttttaactcatgaaaatttcaaaattggggtggggggtggtgtgctggggagatggctctgttggctcacttcaagcaagcataaggacctcgaatggatcaccaggaaaaaaacccaaaa

SEQ ID NO: 29452 - DNA, 1175 bp, Mus musculus
cttcatgagatacaatctattttcatgattaaaaaatgtcataaattagatataagagaagaatgtccctcaaaatcttaaagactacgtccagaaaacccttagccaatgccctgaccatgggaagctgcgccatttctaagacaaggcaaccgtttgccactcataatgaggcagaaaagaaagaagactgaggcacaggaagagggaaaggaaagccttcatcccaagctctggctggtttgactttgctgctggcggaggcaggaaactccacacaccgctgacagtgccagaattgctggcgttttccttaacacacggggtgcgggtgagaatgaaagagaataagcaaacttagtaaaccacgcctacgcgggtctcaggtggcttcaaggcccaacatttggcacttcttgttcctgacaacacccctcataaatccactttacagctttttccggaaaagcaaactctttaacctttcaacttgccacgaatgacattatttgagcagtaggaacagaaagccacgggtttgtatattcagcctctactgagaaaataagtgccttgcctgtccttcgagaagtccacacctagacttgggtctgtctcactgtcccctgggcacctctctgtccataaaatctatgtccaaaatccctttgaatgaactccaactctacgttatcctgaaactcttttccatcgtgtgtgtgtccagggataggattttacttgagtggaagtgaaggcggggagggaataccgccggccgaaggcagccacatggaaccacttgttatggtgatgtatgctttagggtgacagaagataaaaggccttgctctgccagctgcagctggctaagctaagctgctgttcccagaacatagacactagagataagataagcaataatgtgaaacacacacacaccacacacacacacacacacacacacacacacacacacacacagagagagagagagagagagagagagagagagagagagagagagagagagagagagaaagagagagaattaaactattaaggattcagataaccccccttcagggcacagcatcttggttttagtgaattagtttatttttctatgacctcagatatttctaaagcaattaagttatattaattgtaagagt

SEQ ID NO: 29453 - DNA, 1180 bp, Mus musculus
ctctctcaggttggggagtgctcacacagtgctgtcccgagcagaccagacccagaggcaccgtccttgttgttgttgttgttgtttctctgtgtagccctgtctgtcctggaactcgctctgtagaccaggctatcctcaaactcagagatccgcctgcctctgcctcttgtgagcgccaggatcaaaggtgtgcatgggttaccacgcctggccccaagaggcactttgacaggaacgtcccccacgtccttacacgtccgctgttccaccaccatccttgtgtgtgctaaggttctaacagttgactgctgggcccagttggtggtttctgctgaggggaggaagggagggagggagggagagaggcaaccagtgtccctttgttgtaagtgggagcgcaatgtgtgactccctgcactttgaggctgggctcagagagctctgtcccaggtcaagttctgacagttcattcagtctgtttctctctagagtctcagttcagtaagtcagttgaaatggtgactctcctcacagttactggagaaggctggtagccgtgcggaggatgctgtccctgcatacagttgcacacttgcacaatgagtttatggtaagcggggcgtacctgcaggccagggctcctttgctgcgtcccgaacataggaggaacctttgggtctggctctgagcctgcacatgagcatcctgcaggcccctgtttcagcaccagggcagtcactgaagttcttcagccctctgacagagctctgttgaaacctgagccctgctgaggtggggctcttcttgtcttcctgttcttgggggctcattttttccatagcggcctccctaccagcatcccttactagcactaagctcagggaagggagacgagcctgcagtcaggctcagcaccccacaccccgctcccttcctggtcacagggatggatggatggatggatggatggatggatggatggatggatggatggatggatggatggatggatggatggagtgagtgcccatccccccaggaagagggccagtgtgtctgccttctctcttttcctaattgcactatgcttgttctggcttcagtctagaggtgtctgaggtctccatgggatcatgacccttagactcagcaagtctgccttagctctagagcgtag

SEQ ID NO: 29454 - DNA, 1162 bp, Mus musculus
gcagctggctgggttcctccctccagctcttctccatgttagctttctatatagtagcccctaattccccctacctttctgccttaagagttaagtgacagccctccccaatccaaaaacacaaagggaagactgtgtccccaagtctctaggtagaaaatgacaggaacatggaatggacagggacatctctgttgtaccgatctggtcccttagcacccttgggttctgcagaagtgccccaggaaccagcccactcctggagggaatgatttgggaccaggtaaaggaaggcccgctgtttgtcttggtcccagagcggtttgtattcccaccttgtagctcttgcagagggcatccatcggagacacaaagcctgatcttgtcctcccgtccctgcccccacctcagatgagcctgcagaagcctcagagcttgttggcgaggggaagcattctgttctacttgaagtttcactcggaattgaaatcctctggaggccctgctccactgtggaattgagacgctttggcttcatctctcctttgccctcctggagtcaaacacaaggaaattcatgggtttaaggatcagtgatgggcacccagctgggcacaggacgctagagcaaagctgtggcgccccagaagtggcctgcactgccaacatacataaatacatacagcctgaacttgacactgtataatttagcccagaacaatatgtattttgaactcatttagatggatgacttttgtattctgagtggctggggagccttcattggagcacatttactgtctacagaggcaggcctttgttctgagacgtggcttttggagcattttgctgagctgtccctttgagtgaatgtcaccctctccctgctttcaaaagacccaagaatgcagtcccacaaccctgctgtaggaaacagacactgggctaagaagggagatggctcttgtttttgctgttggttctcaaacctctgtttacattttttttttaatgtaaccaacccataattgcattttgcttgtcatggttcaatctgattgcattgttggaaggcctatttttgagcttgtccaaataaactctgcagagcgtttccacgaggatggagtccatggagctgggtctgccttcctcggactga

SEQ ID NO: 29455 - DNA, 1103 bp, Mus musculus
ccttctctctctgcccgggaaccaaatcccattggaggcttgtgtgggatggctatattgtgataactgctgggcacgaaatggccaggtcctgtatacctccctggggactttcttcatagtcttcttcctcccttctcagtagattgtgggagaggtgctgtgtcttcactcagcagaggacaagagttgtccagagtgaggagctgccagtgaccagagttagcagctgctgtctcagctgtgcttggcactcacctgtgacctcctgggttagctctcactgtccatggctgccccttccggtcttctccctcgcaggctggggactctgcttgtgagggagatggaaacagaaagtttgcagtgatgggaccattggtcctggggttgcttgaggctgcagcaggtggagtcagagcatcgctgtctgttctaaccaatgtccttgcttcataggagcagtgacttatgctgagaacatcccagcgggaggaaagagaaaccatgtttattcctcaggaatactgaagtgcccggagtgcgctgacatcctgtgatggtgccatcagcaacgctttcaactccagccactgtttgtgtttgaaaccaagtctgttgcttttgtattatctctttggaaattgtaaggaggtcttaaataaattaaaaacgggaagcccaatgcaagcaatgcctttattcctttatgttgcaggaggcttctatttgaatggcctagctgtggcctctgtgacctcctgaagacacagacatgtccaacgcactcccctaatgcacagttgaccttcccacccccatcccaagactggtggcaccccactgtgtgtgatgatggccacggtgaggtcttcaggagcacactcctgatgggtgcaccagtctgcctcactgatgtctgtcccctgctgcatggagctctgactgacagtgtggagctggtggccagccccagcctggatggaaggacatgctgaggtctgagcacaagtggccactgcagtaccctctgtccttgtgggtttgtgaggcatgacgtagaccgttttccagttacttttgatgtgtgcagcacatgtgag

SEQ ID NO: 29456 - DNA, 1195 bp, Mus musculus
gacttctaagtactggggttaaaatgtgggccattaccaactgactagactacactttaaacatcaacagtaaattaccttagctcatcttatcttggtggtttttagttgtttcttttttggtagaaaacaggtttattgagtatactataagtaaagtcagtgtgacggggagtgacatgaatacagcacacaagctcgccgtgcagctctggctccaactcactgtgtagaccagacgagtctgagctcacagagatcctcctacctctgttggggtttcaggcatggccaccattcctggcaaactttttattcttttgtagttgcatttagcttgaaatataaacattttatggtgtttcttttatattcatattctgtaatcttttctatttttaatttttcttttttacatttaatttttttttttgctaaaatttgcccccaccccacccccactcccacatatacacatgtaatgtcctaggcccgcatttattcctggggtcagaatcattcatagcaccttcttccagctccacgtcacacctcgctggaaggcgagctgcagtaaagcacgcagaactgtcccctcctgccatgacagtcactgcagggcacctggacagcctgcttgaggcgacctcttcagaaccagcctggagctttgttttgttttgttttgctttctgcttttctccccaggtttgttggtggcagggaatgcaccatgaacattcctctctggcaacaaaaccctcttggtgtggggtcctgtttaactttgtacagagctcgtcgagtcttcagaagtatctgctaggcccttcattgggaattctctgggcttttccttctgcgcttgcctttctctggtctctccctccactgctggttcctgtttcaaccccaggaaatttgtggtcctaccacacatgtagtctgtcattgaccacatgttaggtacttgtctgtctatgaaagaaacacatcacggtcatgtatgtgatagactgatggaaaaacctgctgagcaaggtggtacatgtctttaacccagcagaggaagcagaagcagaccatgtctacatagagattccaggcgagtcaggactacttagtgagaccctgtctccactcccctccccacaaaaaaatgctaataatcttcctgggaccggggagatgattc

SEQ ID NO: 29457 - DNA, 1170 bp, Mus musculus
agggaggtcactgatgggtgtctttacacctactaagaagttttggatctcattttaaagacctccctctcataaccctccacccctagaatcttgttgtgtagcctacacacactgctgttctgtccctactaagtttcttttttgttgttgttggtggtggtttttaaagatttctttcctctcccccccccctccttttttttttgaagagagcattccctctggatgttctggaattggctttatagaccaagactggccctgaattcacagagctctacctgcctctgcctcctgagtgctggaattaaaaggctgcaccaccatgcccagcttaaaagatttctttgaattatttttaagccctatgtagtggcacatgtcatgaaaacattgtgtctggacatgggtatgtatgcatgagggcaagtgcccagggagtccagaggcagcaggtggagttataggcagttgtgaacatacaacatggattttaggagtcaaacttgggtctgctacaaaaacagagcagttctgaaccatctaactggcatgagagagcatttgtgcatgcatgcattttcttgtgtctgtagaaactcttgtgatggtttcaagtgaacttgaaatgtagaaatagattttgttatcattctaatactaacttccagaaagcagtctatctttaaagaactgctttgttgctggtcataggtggcacactcttttaatctcagtactagagaggaacaggcagttggatctcttaagttcgaggccttcctggtctacagagtgagtcccagtacagccaaaaagcaaaaacaaacaaacaaaacccccaaacaaaccaacctgctttgttgaggtgtatctcaagcagtattcattctatttaaagtattcacaaaattgtacagtcagcctcagtcttatttcaggatatagctgttcccatttggatccccccagtccagccccagcagctactaatctatgctatttcggacattgtgcataatgaaaatattaaatatataccttgtggcatagggtgtggcatgtgcctgttatctcaacagtcaaatagcacaagttagatgattgcttggagtttgaggccagtctaagccacagtgtaagactctttaaaacaaaacacgctgg

SEQ ID NO: 29458 - DNA, 1225 bp, Mus musculus
ttcaaggagtatctgaagctcaaacagtcaagtgaatggtgtgatgcaggtctgtagcttagccctatgtgagactgtggatgtctcagaatattgacctcaggtataggggcttggctcaggtccgcctgtgagggctgggcatgcaagcctgtaagagtctagtgcacgttcattggctctaggatcagctagtgtaatgctgttttaggcagccacagactaacgtttcagtgtaaggaggtggagatatttatggggttctagccacgtgccatccactctgccagaagctgttgattttcgtcttgcaaaggcttgatgaggaaggttgagccgtggaccacagacaccagggtataagaagctagacttagagctagacatagtggtgcactcctttaaaagtcccagtgcttgggagacagaagcaggcagatctctatgaacccaaggcctttctgctgtacatagcagggctccaggccggctgggatacagagcgagatcctgaatcagaaatcactccccctctctaaaaaaaaagagagagagagagagaaaagtcagattggaatgcagtgtccttatgggtggagtcccctttgagtgatagggcagggaccggcaacagaatgccagattgcttgttccacagaaccttatcccctgtaccgcctggtgctcaggaattgttgcatagccctgaggaagcagcaggtagtgagagctgaggtgcttggctcttccttgctgccttcagagtggggcgtgtctgggtggagtcctgattgcctttctgtgtgacctaagtgagcgcctctccttccttcccctcagttccttgctgtacagcgtgaggagaacatttcatagggacaccaggaaaaggaaatgtttttaaatttatcttctgtgtgtgtggtggacagaggataactttgggaagttggttctcttcttccatcgttggcccagaaatggcatttttaatacacttggcacacagaaagttggggctatagctactctgtgtcatattttgtatacccaactgtatgtaacataaatggaagccacagttcctgtcctctcaccttggagagcaggaaaggtgtgttcatgaagtctcgtaagctgacaggggaaagttgtggggaagagctctggaggccatgtgtgcaagctagtcaggtgttccacctcttcctggaagccctgcaac

SEQ ID NO: 29459 - DNA, 1192 bp, Mus musculus
cctttcttgtatcattttaatggctgtgcccttagtaggaccagtggtcatagtcttgcttattgattgccccgtgtgttgtgcctagagtagtggcagataggaagtaagagtgttcgtttgtttgagtacagtaattcagtttccacacatccatcccagcgaggtgctattattctaatttattgatgagaaaattgagattcagggaggttaagtaatttgcttatcattatgctcctggttaattgtagcgttcagagtccttcctagcttgccagttagtgcaaggcccatcccctgttaagtctgtctatgcaactgcagtggccagttgaaaaacacatctgcaatgcaggctttaaaagtgaagttcaaggcttgcttttgttatgtctgctgaagttggaggcaggcgatggttcttctggtttaggatttagggatgacaggcaggtgtctgtctgcactagccctccctctctaggcatctccctaagcttccattgcagtgccctttgggggcgctgctcagcagaggctgggagagccgggcttctgccagcagctctagggaatagcagtgggtggggagagagaagaggtagaaccggctctgtcagtattctctggttgcctgcctgtcccaaaggcgttcatctactgtgagactgcattgctggctcagagttagaaagttgaccctgccacctctccctactggcaggtgactttgtgcaagggtcttgccctctctgagccgtgaagtttcagttcctccttctagcaggtcccgtggatgccatgccacgccatgccaggacccctgccaggagtggctgcaggagaaagcaagcagtgccttcgggagcacagccttgcagtggggctcacaatggggctaactttcctggtgaggctctgaagagaaagcgaaatgcctggccccactgcgctccgagatgagtagttggttcctgtagaccagcgagacgagacaatagataacacgcagatgcaggcctggaggtacaaatagagatataagggcactgtaggccttccctcggtgggaacaggactcctcctttgctgatgtccacacagccccggctggtgctcaacccagctaacagtccaggaggtgccatttcttccctcaacccttcaccttttgtagagtagaactttt

SEQ ID NO: 29460 - DNA, 1115 bp, Mus musculus
gtcagggatggcttcacagttgcagtttgaaaggctcagaaattggctcagcactttctatgacctctaccaggtctggtctctgggctcactgaccacagcaagctttgatacctgcatggtggagctggccacgggctggctacagaatgtgcccaggccctttggagttgggtttgggaggcccccacacagatctcaagacactgaagagagctgagcagcctggcctgaggttccatttgaaagctcctgccgctgtctagtgctctgtgttttgcagaagcaggcaggactcactggcctctggctccagtggagtgggagtgggaggcaggacccagctggggagaggggaagtaactgaggagggactgagatagcactggccttggagtcatgtggccaggatcctgtctgagctctttcctctttccccactcctttctcggtggccttgtcccatccgggaggcagggtgccgacagggttaggagagcagggttgggagggctctgcagtccagctctgttgtgactctgtggggcccagtcttctgatgtcattccctggcccagaatttaatgcacccaacagaaaggcggggtgtaacttgtgagttcacccagcagcattatttaggtaagacagcccctcctggtccccagtggtcctgagtatctgatctgtcaggcctgacactgggtcctgtggcaccaaatgcaccctctcctgccaggccagactcctccattcccagtaatgaggaaaacacgaggaacatctgagcctgtgtggggtcgggtgtgaacccctaaagaccggggccactgccaactgtggttgtggtgtgcagtcagttccagtgtcgtggtggccttctcctgtctctgcctttgcccacggctgccaggttcttgttcggcattgctgttgctctcttgctgtggcttcaccctctctgaacactctctgtagatctcttgatgctatccccgacaaccacaagtttaagcagttgcagagggaactttctcaagtgctgacccagcgccaggtctacatccagcctgataattgagccgacccaggtatcctgtctgaagggcgtgagg

SEQ ID NO: 29461 - DNA, 1390 bp, Mus musculus
cctctctgctagcaaaggggcaataggtgtgagggcaaaggcccaggctgcgtggtttctgaaagctcccaacagtttgcggcctgcatcgccatccatggacctaaaggccgggtcacccacagcctgggcagagatgacctctgtccatgatggcagcaaggtactgaggtgcaggcctgggctccccttcctgctctccaggacagactgcagcctggcaccccacagtggccccggccacctcgctctcacccttgtgcctgctgatgtcttctctcctcccccgcaggtctgtgcagacgtttgcagacaaatcaaagcaagaagcgcttaagaacgacctggtggaggccttgaagagaaagcagcagtgttgaagacctctgcttcacgctaaccggacacgccatgcactcgttaggttcctttctttagaaaactcgttttctgctccttttccctcttcctttcccgccctgacaggtcacataacagtttgcatcgaccacgcagcgccatctctcccccaaaataaagtccgataaccaccctcctctggctccaaggcctgcttcccacgacgtttccatagagaccgtgtggttttgttcgcctgtcccccttccttcccttgcccatttataggcacagatacactgtctgacaccgctccctccatctttttgttacattggtgtaaaaaatgtaaaacaaaaaattttatgaactaactggtgtgtgagagaagaaactggagatctgatccgtgtgtgtgtgggagttgcttggagtcagggctggggacaggggacagcagtggaggaaggagtgatgtcctcagcactgtcctgcacaggtggacccttgtcccaaggagaccatgctggggtggggtggggctggcgaccggctgctcttcaggccaggtgcttttctgtcaatttttatggaatgcaaaaggagttttttgttttattttggtttttttttgtaaagcttaaacagacaaaaaaatctacatcttctacttgagcctccatacttaaaaaaaaaaaaaaaggaaaaaaaagaacaaaaaaataaataaaaagaaactgggacacaatcggcgctggctgtacgttcttgctcacctgcctctctccagacgtgcatagccttccctggggactgaaggagggcccagtacctgctgaacccttccggcctcattagtcatctcccctgagtgtgatggctgcatgcttgccaccccatgttggtgatgtccccgacttagtcctggtttctcttattgtatgtgaagtacagactccatgggagatggaagagtgagcaggccagatgtcatgactcacaccgcaatagcaacattgaagctgaggca

SEQ ID NO: 29462 - DNA, 1459 bp, Mus musculus
gtagtttagactgttcagagaatcgagggtggagcgaatctcaagaagcaaacgttcactccaggcatctttaagaacatttatgcagtagggacttagaatttacaccaaatgaagactgtaacaagacgtggggataaatggataagattttctcaccattaaccctttaaaaagacagttgaagtcagggcggtggttcttgcttgcaatccctgtactctggaggctgaggcaggaagtttgccagtagttcaaagtcagtggggttatatagcaagcagtagaccagcacggaccaaatagcacatggtgtggtggtctacccctgtgattccggcactccagaaacagaggaggagaattgactaaagttcaaggctgttctgggcaacatagggacaacaggtctgccaagcccatagaacaagactgtttcaaatgtcaaaatagggtttggattatagcttagctgattggatgcttgcctagtcctgggttaaggacccagtgagtaaggtaaatcttttcctgattccattttgtgtttgcttagacatttggtgtatgtgcttggctgaggagccaatgggtcgaagctaccatctgtgggattatgactgaacgcctctaagtcagaatcccgcctcggcggaactatacagcggcgccgaaggagcctcggttggcctctgatagccgggtccctgtccgtccccgcgtcctcccagcggtggcgcagggtctccccccgcctggcgtcgggaccggggtccggtgcggagagccgttcgtcttgggaaacggggtgcggccggaaagggggccgccctctcgccagtcacgttgaacgcacgttcgtgtgtggaacctggggctaaaccattcgtagacgacctgcagtggttctcacccttcctaatgttgtggtgaccccctaccctcaaattatttttattcctactctatacctgtaattttgctactgaaatgaatgtaaatatctgataagcaggatatctgataggtgacccccatgaaagggtctgtcagcatccctaaaggggtggccacccaagagcacctgtagcttagatggttctcaaccttcttccccctcaacagtaatgttgcctggcaacacatttgagctttccatgatgttgtagatggcccacatatattaaccaaaataattattgtatatataaacttaaaattaactcaagaagttacaaataaaaaagatagctgtcacataatgtctgaaataatatgaaaaaaaaagttatgttctgccagaaatgagtgtttcaaggttactctgaccctcatttaacttggaattaaattatggtctttgctttgaaaaaacactgtaagtctgagcttttataagtctgagtcatgaactcattcttggtcactggccaataaaagactcatattctttctttct

SEQ ID NO: 29463 - DNA, 1324 bp, Mus musculus
tgcaggcagcaggcttgctctgttccagttttcgaggatagaattgatcagttttttcctgtcacgagtcagcatttgtttttcttgcagctctttggcatcgagagcagctctggaaccattctgtggaagcagtatctgcccaatgttaagccagactcctcctttaagctgatggtgcagaggactactgcccatttcccccatccaccccagtgcacgctgctggtgaaggacaaggtgaggccagccatgccgactgcagcccagtgtgttgcctttgcgtatttcacagctgagatttctcccatgttttgggcattccatgagaagctcttgggttggaaggcctcatttttgccagtttctggcctgggtggaggagccatccagctgtgacggggaactggctaggaaccagacccaccttcaccagcgcagttagcagttaggctatccctggtagctgatataatcacaaagctattatgatttctgcctctagaatttgaatggatttttgtggatccattttagctgtattgtgaggtagggtttggtagatattcttttgcacccaacaagcattagatggctgacttggttttgagagcacatggtctcaaatagccctgactagtctaaaaccagctatgtagaccaagtggcttcagacttgcagagatgaagatgctaggattaaaggcatgtaccactacagctggcccaggacttgactttgatttgctctttggcatgctcagttcttagctagacttggagctggaagcagtcccatcagcctaggggacctgtcatctgtggccgagatttgacccttcatgaagatgacagaaagcagggattcctcatggcttccttcctgagcatcccgggctcacctggaggacgtgcgctccctctgtgctcttctcttcccattgcaggagacaggaatgagctctctgtttgtcttcaaccccatttttggcaagtggagccaggtagctcccccagtgctgaagcgccccatcttgcagtcactgcttctcccagtcatggatcaagactatgccaaggtgttgctgttggtggatgacgaatacaaggtactgtgccttgtggggaatggagtgttccgtgtggagctggctgtgggatgggggtgtcaggcactggtgctggggccgaggcagcccacataccagacagcccgtttgttgtcaggccaccagcagcaacaggactgcccttgtgagcgcctggcttcataaggtgctcaccaccacgcctggccatggttttttattacttgaattctgtg

SEQ ID NO: 29464 - DNA, 3272 bp, Mus musculus
agcaccgtgccagagtggagcctcgggaagagggacagctaaggagatggccgtggactgttggatccctgaggttgggctgggctcttgtctcacttacgtctgggagaagaaggtgcaccttcatggagaagtgcttcgggaacacggtgacgaacagttcttgtggtcagatacccacctcagcgtggaggagctccgtgcatctgatccactccctgttccctttatgtgctcattcgtggatgctgtgagccttttgtttttgttttctttttgtttttttgttttttttcctttcatgagacctctggtttctttcttctgagactgtttaaattgaccttagttaaccttctgtatttccagtcttactagaaatattctgacaccttattctcttgtctcttgctttcaagcttgatgggccagctctggctttaaggtgtgtgtggctgcctgactgatggggtggatgcaggagccattcttagccaaggtctgaggacttctctctctgaagagaagttgaaggatccatacatggagtgagaactaattttaaccaagctgtcattccatgccaccatttatatggctgggccatttctttcagcctatcaaagccaagcacataacagtaatttggtttttcatccacaacctgtgctttttctcctgagctatagcaaggctaaaatctttaatacttttctttcttttttcttttttttgtttttgtagacagggtttctctgtgtaactctgactgtcctagaactctctttgtagaccaggttggtcttgaactcacagagatcttcctgcctctgcctcccaagtgctgggatctaaggtgtgtgccttagggctaaagccttttaaaactaacagtctgagccttggtgagatcttgaggtccagtacatcaaatctattgtccctataggcccctatagacatcctgtagcacagctggaggaaagcagctttgttaaaacctttttttttttttttggcttttcgagacagagtttctctgtatagccctggctgtcctggaactcactttgtagaccaggctggcctcgaactcagaaatccgcctgcctctgtctcccaagtgctgggattaaaaggcatgcatcaccatgcttagcttttttttttttttttaaagacagagttttgctcagttagcccaggctggcctcaaacttgcaatcctcctgccttagcctcccagtgttgggattgctggtgttggccatcatgcttggtggtgggcaagttttaaatctcattggtataattttctgcgtggcattaggggtagaatccaaggtctctcatgccaggccagttctctgcactgaagctctccataaggtgagccacgagggctgttgtttttcttagttttaaaatcttaataatttttttgaggggctgcaaggaggatgctgtgcctcaaacccagggcctcatgtgtgttaggacacactttactactactgagctagagcctcaacacatctaatctttttacttattttattgagacaggatctcaccatgtaaccatggctgggctagaactagctatgtagtctagggttgggcttctgtgtgtggtgtgtatgcactactgtttgggctccttctgtggtgtgtgtatgcactcctgtataggcttctgtgtggtgtgtgtgcattcctgtctgagtttctgtgtggggtgtgtgtgtgttttcctgtttgggcttctgtgttaggtgtgtgtactcctgtctgggcttctgtatgctgcacagaaagaatcccaagtttgaccttgcttatgaacttggggactgcttgttcttttgagcagggaagtcaaagagttgaccacgctcctggaataaagctgatgatcggtggctcagctttgttttgtgtcttcagagttcacttcaaggctgcttttgatgggggggtggggaagaaaagccacacatggaggcatacccctataatagcagccacttgtggaggcacacccctataatagcagcgcgtgagaggtggagcagggagagtcagaagttgaaggtcatcttcagctacatattcagcctatgctctaagagacagtggttagaagtacctgttgctttttcagctccgtccctagtacccacattgggtgcctcacaagcacctgtatccccacctccaggagatctagcatccttgcctggcctcggggtgtgcacatatgcacacacatagtaacttagaaaacaaacaggaaaaaatggagttatgtagggcaaaataccaacatcttcatcagtaataaccagtttcctctcctgggttagtgagtatctgacacttccagtgtcagtccctgcctggactgctggcttcgtggaaagccacctgggagaaggcattggaacccattacacttttctgctctagtttttgttttgttataagctctcaccttgtgaatctgggagatgtgcttggattaaaggcatatatcactgtaccccacctgctctagtcttgaaatagagcagctggaattttgtgcaagatagataagtaactcttaccacactgccctgtttgtttgtcttggttttggttgctttaagatttatgagtgtctcccctgcatctgcgtgcatgcctggtgcccacggaggccagaagatgctggatcccttggaactagatttagggacaattgtgaccatgtaggtcctgggaactgaactgagccctctggaggaactgaatgatgtgtctcttatagtgcctgctgtgtttctacagtacagttagtctgcaagactgttttttcacttaccggccagaaaaagtggctaatggtcgggaagtgacctaccttttctagaactcccggtatttcacctttaacctttaccatatcaccaaagctgctcagagcagctgactgaaatagccaaggcctgagtgaagtcttaacttgtctcctaagtctttattttcctttattattattattattatttatatattgtctgtctctatagctctgactttcctggaactccctgtatagaccaagctggccttgcattcacaaagctctgcctgcctctgccttctgagccttgagattaaaaaagtgtgggccaccatgcctggcttcatattatttttactatttgtgtatattgtgttttgcctgtgtgtatgtgtatcatatgcatgtctggtgtcaaaaaaat

SEQ ID NO: 29465 - DNA, 1439 bp, Mus musculus
gccgtagacaggctagagtctttcccaagaattgagagttaccatatgtgtaagcaggaagcagagagaaggatgtgtgattgacagggtagcaggcttgaaggaaaagagacccggttttatcattctctgcctatggctggttgttaccatgcagaaatggaggtgtcaagttactgtgttgtgtattattgagactcgtgaggtatccatttgttttaaggctttgtgcttttataaaagttaaccacagcctcaagttgaaaacagaaagaaagtggtccactctgagaataagactgacagcagccggtcaggtctcggtgagcgtcaggttgggatctttgctttggtgcttctcactgaagctttattctcctgacctccaccctcccttctggagccccagggattgaaccctgggccaggtgtatgctagccagttgctcccgccctgtcccacactcccacccagccttttacatggtagttacttgtaggaacccaagtctgaccccattactagttagaatccccaaagtatagaattttctaaaagacatatgtgactctgttttattttcagaaacacttgattctgctgataaaaggcctgtgcactggctgtagccgactagacagaacagagattatcacctttacagcaatgatgaagtccgccaagcttccacagacagtgaagacgctttcagacggtgagcgccctgcacacctggttccatgaccacctctgtgtccactgctgccttctggggtactctcctcatcctcccccctttttctgtttctgaattttatagtggaagatcagaaagagctggcctccccagtaagccccgagctcaggcagaaggaggtacagatgaactttttgaaccagctgacctcagtttttaaccctagaactgtaccatctcctcccatcagtccacaggctctggtgagttcttttgcccaaatatccttatcttcatgtgttaaagtgatagaaccggaaaaaattgtgttttatgttttatttaaaagatacatcataccattttggtcaggggcagaccatatatatgatggtggacctataaaacgttattttctagtgacctgtgaacatcttggttttcgtgagttactcaggtacttatacaatgacagattcattcaatgaggcatttcttagaatatattcccagttaaatgacatttctgtgcatggcttcagtggaaaaaatcatggaaaacaaatcatacaaagtgaagcagatgtgtacccatcttcctttgcatggttggcactgtggcgtgctggtcgttttttcgtgctttgtcagggcaggtacactggagcgtgtggtgtgctgctctccacgaggcaccgctctgtgtttgatgggaaatagacagtttctgtgccatgtctt

SEQ ID NO: 29466 - DNA, 1211 bp, Mus musculus
catggcacagtcgttcaagaaggctctgagagctagggatggaggaagggctccttatgaagcacaaatctctttcctaaaagccaaaggacatgcagacagttggctgtgctcactcctttttgtataaagctccctgacaagttcttgaatattgtagcatctcctttccctctccctttcctcctgggtcccactggcttagaactctgcgcccatgcgtgtgtgtgtgtgtgtgtgtgtgttgttgatcacttgtgtcacatcattgttgtagaggtcagttggttcgttcttgtgatgtgagacccggggttgggacaaggggtggcaggcttggtggcgcgagtcttacccccactgagccatcctcctggcacacatctgacttttggcttctctgcaccagttttgttctttaacttgttctcctcgcagcattaggagttgcggtcttggggcttttctggggtctctccaccagatatgttcccctttctctgctctaggtttttaactaccatgaagcagaatgcactgcagggggtggtgcccagtgagacagaagacctgaacgttgagcacctgcagctgctgctgctcatcttccacagcttctctgagaagggccgcagagccatcttgaccatgcttgtgcagagcatccaggagctgagtgttaacatggaggtgcagatgcgcactgcaccgctgatcctggcccgcctcctcttgatctttgactacctacttcatcagtactccaaagcccccgtgtatctgtttgagcaggtgaagacccacactctctccttgttctcctgccaagagctccattctttgcaggcaataaagttttatctgtggttgtgaaggctttatgggtagagctacccaagcctttggaattggcctttctgtttggtttggagtggtaaccagggtctactcagtgacggctggatgatggctatgttcgtgtttttttctcatctgccctgcatttccagtagcaatagtgtcctcagccttgcctctgcctcattattagtgtctgaggcagggttccgcagtgaatgccttcgttacagtcttctgtgaatacacacaggagggtggttaagaggtgctgtgctcagcaggttttaaactagttcatggagcatcatccccccgatgcactataaaaagtgcttcccaaaggaaattac

SEQ ID NO: 29467 - DNA, 1099 bp, Mus musculus
ctggttctatagcattctatgtagttctcatggttgacattgagagaggctctagcaggcctctcagttcacagtagacacaggttctgcctggaagtctgcctttggaacacttgttaccttagggagatctgagcgtgtcacatgcttccactgctctgttcacctcctcaggaggcctgcgccctgcagtattacttcttgattctctggaggatcttaggaattttgccaccttcaaagacttacatgaaccagctggccatgaattcacctgagatgagtgaatgtgacatcttacacactctgcgatggtcgtctcgcctccggatcagttcctatgtcagctggataaaggtgccaaaggggagctcagcctgctgtgggggagcttcacaggccatgtgctttgtcctctgggggcttctaaagttaatgaaagctttgcactttccaggttgtttttcctaactcactctcttgctatccataggatcaccttatcaaacaaggcatgaagcccgagcatgcgggctctctcatagaactggctgccagcaagtgtagttcagtgaagtacgatgttgagattgtagaggagtactttgcccgacaggtatgctgttattctgctggcagcgacaggactgggctctgccagagcctttcggcacagttaactaattaacatcctggctgttcttaaagatctcgtccttctgctccattgactgcactgccgtcctccagctgcatgagatccccagtctgcagtccatctacaccctggatgccgctgtctcgaaggtccaggtctctctggatgagcacttctctaagatggccgcagagaccgacccccataagtcatctgagatcaccaagaacctccttccagctacgctgcagctcattgacacctatgcctcgttcaccaggtgtggagacccgcactctctgaaagatccctgtgtctgtgtgtatccttttcttgtgtgtgaactttgtgttttccctttggtgcaggatgtgaaagggcgccagagaagtttcagtcagctcatgagtcccaggatgtctcatttttataattttacca

SEQ ID NO: 29468 - DNA, 1106 bp, Mus musculus
tactagatgtcttgtgctgtagtggttcaagtccagttctgaaattgctgtgtttatatgtttaatgcttaatttataacactagttctaattaattaaatttgtacactgccagtttcatgcatgtttttaatacattctgattattctccctcacatgcttttaaaattttttatttatctatctatagacaaggtctctgtgtatatagccctgggtgtcctaaaactcactctgtagaaaaggttggccttgaattcacagggctcttaaagacattttgtttatatttcattttattgtgggagtgggaatgcttgtttgcctgatgtctgtgcaccacttgtgtgctgttgcctgtgggagccagaagagggcgctggggtctgtgggacaagagtgacaggtggttgtgagttgccatgtggtgctgggactcaaacccaggctttctgggatagtattgggtgctctaactgctgagccatttgtccaacattcccacagagtctcttttctccctcctcctacccctacccctgccacacacaagttccttccccatattcaaattaaccacggccctctgtgtgaccatgagttttgagctgaccgtttgtagcctggtgtcttgagcactcttaaaaatgaaagactatacttagaataccttttttttaattagccaagttggagaaggtgtgtgtgctgtgcttctgggcaccctgacccccatggcaacagatatgctggcgaacggtgatgggaccggcttccctgagctcatggttgtgatggccactctagccagtgccgggcaaggagctggccaccttcagcttcacaatgctgcagtggactggctgggcagatggtaagagggactttacctgtactggtgttctgtacttaagaggaagggagggacggagggagggagggagggagggagggagggagggagggacggagggaaggtcgtgtagcttacttccttcataagtcagagttagtataaagtaaacctaatttatttcatcctgcctatctactgacacacacacatgcacgcatgcacacacacacacacacacacacacacaca

SEQ ID NO: 29469 - DNA, 1100 bp, Mus musculus
gcaccatgtgctctgagtactgagtgtctctccagcctctgtccactgggctttgaagagacatacagaaccggctgctctggtttgcaggtctctggcagggtgaatgctgggaaaccctttcaagccactcttgtcttgaggggcctcagtttccatctgtaatccattcttcaaattcactcagacttaacgcagaagagtgagcaaggccacaggagttgtttgtatctctctgagccgctgtgtgcaggccatggaggagctgtggggctgtatgatgtagtcttccctctctgccttgatactgacctctggtctccagtcctgttagaaagtgcttgacacgaaaactaacgcttccttgtctctcttgcagcatgtgatggtcttggagtgcacatgtcatattatgtcttacctggccgatgtcacaaatgccctgagccagagtaatggtcaaggcccaagccatctgtcagtggatggggaagagcgtgccattgaggtggattcagactgggtggaagagttagcggtggaggaggaagactcccaggctgaggactctgtaagtgctctagggaagggaatggctcttcagcctgtccagtgtgctctggtactctgcctcctcggtgggcttgaggacgttgagtcctgctgccttcttcctgctcacaaggctaatgcaagagtctgcggctgtgcttctctagccctgcagagcaggcgcggagccagtctcctgctgaagcaacttttcaataagtacatgtctttcttctctccggagttacttgttctgcttcatcccatacaagtttggggagggatggtgggctcttgaaagtattgaaggtttttgttgtctgtctcccccgttccctttcttgtcgacaaaaccaaaagagggcacttgtaattgtgggaagctttcagatagatggctacttcagatcagggcaggctcccattagacacgggtgtctctccatggagtgttggggcaggggtattcctatgggaccttgtatggagagggacatttatgattaaaaagatccattaatctttgaaggatgaagattctctttgca

SEQ ID NO: 29470 - DNA, 2174 bp, Mus musculus
aaaatactctgtatcattaccatcactttaagtgaaaatgcattttaacgttggagaacagcagcacttcatttactttcatgagactttgaccctgctcttggaaccagactgaagcagtagactttaatcagtggaggatagtggactgcaggctaaagtcacttacttgttttgagctctggctggcctgaactcattatatagaccaggctagcctggtactcggacttcaacctgcctctgcctcccaagtgctgggagtataataggcttttgccaccatgcccttctacttttcctttgttgttagtaattttattatttgagaattatgtgaatgcatataattgattttggtcagattcacaaagccctgcctcccagattgaatactgctgaatgactaagggttgcactgccccccaggtgacagtggatgaacccacctagtcttacttgctttctccaatactttctctgcttctcccttctgccaggttcccaccttaggctcacaggaaggtgcctttgagaatgttcggatgaattacagcggagaccagggccagactatacggcagctgatcagtgcccacgtgctgagacgggtggctatgtgtgtgctttcttccccccatgggcgccgccagcatttggctgttagccatgagaagggcaaggtaggtcccatgattccttcccattcgttttaggatcggtgttcaaattgaccctctgaggggaaacacccacactttgtttctgaggacgagactgatctcattaacccttttggcttggacctgagtattggttatcactagaactgaggtgacttgggaaaggctctggcaagtgattggctggtgttcaggacaacttagttcccatccccgcccatttttggacgtggaaaggtacaagcagagaggcagaagtcttcttaagaagccagtgttccttgtttaataattcctgctccagggatgcagacactccgttggggaatgctaggcatctctttgctgtttttgcctctcatcagggaggctgtcttaccttaactgacagtgtggacagtccttaaagcagatggtccagaaggagcttaatggggcgcttgaggcggtggtgcctagggattggatatgttaggaggagattctgcacagaacagtcgggttcattacttgccattcttgtcctcactgggagaaggggagcatgaccttccatgtctgtcttttggggagaagtagaggctgaacttgatctacaggttttctaagagactaaatccgcaaagccaggcagtgacttacccttctccccagggagcctccttaactgcctaccttagactccacgagggcctggggggccctggctggccagcgcctgggcctctgcagcttgcactccctttgcagatcacagtgctgcagctctcagcgctcctgaagcaagcagattccagtaagaggaagctgacgctaacccgcttggcttctgccccagttcccttcacagtgctgagtcttactggaaacccctgcaaggaggactacctggcagtgtgtgggctgaaggtaaggacccagtgcaggactgactcctggagctgggagctctggccaagtctcctcactgatagatagctgaaggcatgagagctgctggaatgtaaatgtctttctctgagctcactcagtgccttctgattgctctgatctttgtgtgttttggaaacctgagtgtctaggcagtctgaattgggagctgcaggccgggatggtaggaaaagggactcatgggagctcagggagaactagctgactgtcccaggccctgtccaattgctctgttcttgaactcatgtccaggactgccacgtgctcaccttcagcagctcaggctctgtctccgatcacttagtgttacatccccagttggccacagggaacttcatcatcaaagctgtgtggctccctggttcacagactgagctagccatcgtcaccgcagacttcgtcaaggtttgctttcgttctttcttgaatacttgagttaaaaaccagtatctgttatgttgccaggtaggtcggcaaccatgtacctgtaggaattatgtctgtacacacttgtgactacttgttataaatttgcgtatc

SEQ ID NO: 29471 - DNA, 1158 bp, Mus musculus
aggttctgctgctggctaggaaaggactctgaagaataggaagcacactttttagggatggtcctggctaagtgcaatatagtgcaggcctcatcacatttccttaaatttgttctagagcttctgtgttttgagatgaggatgtagcttattgtactgtaaagaaatagatactgttgttataagctgtacagtccatacagatagcaggttatatatctatatctatgtatgtgtgtgtgtgtgtgtatatatatgtatgtatatatgtgtgtgtgtgtgtttgtatgtatatatggttagggatggtatgctggagagttgaccttgagtaatcattgtgatgggcagtgatggagtcccgtttgattagggtagtgtgtcagcaggggcttagtcttgagcctcggagtgggatcagaagtgctgagactacacattaatgctctgtggcaatctggtactgttcccacagcagcccgcacatccagccaggtcaccttccccattgacttttttgaacacaaccagcagctaacagatgtggagtttggcggtaatgacctcttgcaagtctacaatgcacagcagataaagcacaggctgaactccactggcatgtacgtggctaacaccaaggtgagcagcacacggggctggctcactttgtgggtggcactcttgtgagcagcgttgttgaacaagttgtgcccatctcctcagtatgaggcttgaatccagagccttgcacatgcaaggcaaggactcccatcattgaggggtcgggctggcttcacagcttcctttagaatcagacatagaatatgtatttgaaattgctcacttctggtcaaatgatccttgaataaatcaaccttctttcatatgctgaaggtcttgagtcccccaggctgttagaagggttattgagtacagggcaccatttgatagtttgagctccggggaggagcctagcattctccctctcatatctatgacacgattaggatggagttcaaagaagttaggtcttacccaggcagccattgaggggatgtgggaggaaggaccctggagattctctgactgtgtgctctttccccgcagcctggcggcttcaccatcgagatcagtaacaacagcagcaccatggtgatg

SEQ ID NO: 29472 - DNA, 1200 bp, Mus musculus
aacaatgtatctgaaagacttggttgagagtcagtttagaagtagtgtggaaccagccaggaaagtgttttcactcatttccaggctgctgttgccttagtcctctcatgggtcacactcctgacgacccctcagccagagaggagagtagatgccaattggcctgtcaagagaccagctttgtcaacaggtttggggaatacaggggaggtggtattatctgcccacctcaagtttccccgccttgtccatggctgtccacagtgattcctgcttctctggttcaggttctgcaagggcttctaaggacacttagcgaattgaaagacttaatgaaaacactccagctacagctgataggctgcactacagtgtcgtgggtttgctttgctgtgtgtttgcctattgttgtctcgacaccctctaggtggtgctgagatctgtgcttccgtctcaggctctcaagggtctagagttgttttttgtcaacatattttcaggtgatcttttctcccatttaggccttactcatattgaagctacggttaatgcgttggtagacattatccacggttattgtacctgcgagctggactgtatcaacacagcatccaagatctacatgcagatgctgctgtgtcctgtacgtatcaacacagccccagatgcctctggtcagcctgggagtgtgtggaaaatggcctaatgagcactgacctgaaagaatgaaagaaagtagacttaaagtctgaggggctgggctgaagaggtggttcagtggttaacagcactggttgctcttccagaagacttgggttccattcctagcaagcacataggaagtaacaactgctgaaactccagttccagggtttctgacactctgttcttgcctgcttgggccctgtatggggtggtgcacagacctaccatgcaaacaaaacactcacgcacataaagtaaatcttttaaaaatgtgatgggaatcagcaatcgcaaatacatcaacgctgtagagacgaagtctgggaagggaggacttgctccctgttcagtgatttcttcccatttgtagtctggaacctgctgtagagagaatgttgagtaagtctcagttccatgactgtgcgaaggctgtgtagtgtgcctgttctagaagatgagtgttacaaggctgcttatagtgtggagcagagagga

SEQ ID NO: 29473 - DNA, 1191 bp, Mus musculus
tccatccttttctaacagttggggatcttacctgggctttccacagccttcccacagacaaggaatccagtgagatgtgtcacagtggccggcctcaggttttagtcgatggcctcagatttcaatcctggttctggttttggtttttctcatagtgattgtatagttgaaaaatcttacagacgtagctgtttggagaaatgaagtctaggctacagtaacgtggacaccattgacagatactcgtgagttcttctcctgttctggcaaaggtcttctgagaatggagctcacagggtctgtagtattccatttctttgtcttgttgaaatgtaaggttttcatcctttctggactggaagtctcttcctgttgaggggaagctgttgctgctgactgccatctccccagaccctgctggttgtagaaaacgagagaagtaggctgccagcctagcacctacaaatttgtccttgcaagtggggcctgtctttagactcttgctgtgtgacagtcacatgccaaggagtaaaaataatacctttaggttactggggtctctttgtctcaggagacaaggacgacgatgatgacgatgacgcagatgagaaaatgcagtcatcgggcatccccgatggtggtcacatccgccaggaaagccaggaacagagtgaggtggaccatggagattttgagatggtggtgagtctggcagcctgaaaggaaggaagagcctccatcgcccctctagactcagcagccggactgtttgctgtaggacactgatggggctttctctctgcagtctgagtcgatggtcctggaaacagctgaaaatgtcaacaatggcaacccctctcccctggaggccctgctggcaggtgctgaaggctttcctcccatgctggacatcccacctgatgcagacgacgagaccatggttgaactagccattgccctgagcctgcagcaggaccagcaaggtagaaggcaatgtcaggaacacagcaaacttgcacaggagatagggcgtgacagttgctgataccccactgacttagcttgtccccagttgggggagaggttgatctgggtgaaagctgctcagaggtacaggtggagagtgaggaatgactctgacgcttctgaggccaaaagccagtctcatagttactgctggtttggtttttt

SEQ ID NO: 29474 - DNA, 2753 bp, Mus musculus
acctcaggggactggtgttaaggtcacaaaagtgtggcatgcagcgtgagctgcaagttgcaacccttcaggttatagctgtggttaaaggatgtcatggtcatccagctaggtaattgacagaacttggaggcttcaaaagggtcctgtcacccactcagtcagccttctttttccaccctgggtggagcacacgctgtgctctttaatccttagatcagcacagtgtcttctctcacaccactggaattggctcattactcacttgtttttataaagtttttgtaaagccttttagtggtgtcccaaatggctcaggtgagttttacaaccctgggcacttaagctaggacagtcctggagtctggaatgccctcctgcatcgcaggcgagggcagagagtcagaggtcaggatcgcttcccaacacacatgctctgccctgccttcagaagtcggctttctgttcactctgccttctaggtcattctcatgctcactacagatctcgatggagaagatgagaaagacaagggagccctggacaacctgcttgcacagctcatcgccgagttgggcatggacaaaaaggtaaggtggagaggcatgctgctcggagagcagggctcagccgggaaaggtggggtggcagggctcaggttctcctccttacaggagcttcctctgggttctagttttatccctggtcctgggacacaagtagcaccaaggggaaggggtttatcggtcttgtagctgaggttatagccccatcactgcagaaaaacagggatggatgcagctctctgttcacacagtcctgagcacagatcccacttcagcctaggtctccctacatccattaaagcagtcaagtcactccctgaggctcttctcaggtgactcaggttatgtcaggttgacatttatggagtacaaatgacaagtaggataaagtctgtgccattgtcatatattccatggcctctgactgcagaggcgtcccttgcaccagctataacccacagccctactggaggcggggttggtcttgttggagcttagaggaagcataggtgtctgggcttctgcctgcaggatgtctccaagaagaacgagcgcagtgctctgaatgaagtccatttggtcgtgatgagactcctgagtgtcttcatgtctcgtaccaagtctggatccaaatcttccatctgtgaggtatttgtgctttgagcttatgggtttgaggcaaagtaagatagtggagtggttagcacaaggttgaggacagtggtaatagtcctgttagaataagaccattgcaaactacggaagtaccaatttgtctgtcttgaggtgcgaacttctcaattttttggaatccctgccaagcccaggtccttaccaacaaaccctccaatggaagggttaaagaaggggcttggaggttccactgttgaaaagcaagggcctgtactgcaaagcacagagtagctaagaggatctccagtgtctgttgctataaggtatggtaatagagtagagagaaagccagtgtgtggggggaaatgagattagcacaaagcagagacggtggaaatcagggttgaactgcatccaatcttaatgagcttatgagctgtggggtttgctgggatttccaaggctctcctaatggtcttatgtacagtagctttgctccttcctgcttcttatgcatgcagtcacccaccgttggctcccttggagactagttttctggaagagcccctactgggagggtgaggttgtcaagaaggacctatagtggaactttttgtctctctttcaaatgaagttctgttcgctttgctttgcttcaggggaaggagaaagctttgcctccctggcacagaggtgtaggagggtcagcttaagaactagtatttattttctcttagatacagttgttgcaaagagctggggagagtgacctagccagctgagaaactcccatgtctgtcagggctgtgcctaagacagcagtgtggtgtgttgccggtttgactcagtccagtgtttacaactcggccttgcctgctctgtgtgttttctccctcagtcctcttccctcatctccagtgccacggcagcagccctgcttagctcaggggctgtggactattgcctccatgtgctcaagtctctgctggaatactggaagagccagcagagtgatgaggagcctgtggctgccagccaactgctgaaaccacacacgacttcatctccgccagatatgagcccattctttctccgccagtatgtgaaggtgaggcctctctggtcggagacagctcttggctctcctcagagctgtgtgctctgcttttgataagtaaagctaggaagactagcgttaggagccacacaggaatgggttctaatcttattgtggcctaatagatggccactcctcccacatgaaacttcttgggaaactgagagtgtacatgagacaaggtgacagcagcagtagtcacttgtcctccaaacatcttcagaagcttgtgagcatgctgggtagatgagcccagggaaaagaagatctcctgcaatctaacctactagtcagggcacagggcaagatcctaagcagtctcagtaggcctcagctactgtacccagggaattagtgtgaaatcttagctgctccacagggtcatgagcactgccagcttaagatttataacggtattggcacagggcctggcatac

SEQ ID NO: 29475 - DNA, 1556 bp, Mus musculus
gttgtgttatgggtgtccagttggactgggctctcggcagttgggtcagttgtggtttttttgtactggtctctgttgggatgagaagtttctttgatggtggaatgaggactcactgacctggctagaccctggagaagtggctgcctgtctctccccccccccacccctccccccccttttttttttcttttcagaggaacccataagggaagtttcttttctttgaatagtcacttaattgccttaggaaactaggcagggtggcccatctcccaccaccagtccgtcttcaccaagggtcacatgggaggcttttctctttagcttttgttatctctcctaggccagctcgctggcacaaagccaagaaagttcagctgactcccggacagacagaagtcaagattgacctgcctctgcccatcgtggcctctaacctgatgatcgagtttgcagacttctatgagaactaccaggcctccacagagacccttcaatgtcctcgctgcagtgcctctgtccccgccaacccaggcgtctgtggcaactgtggagagaatgtataccagtgtcacaagtgcaggtgactggtcctacaggcctgggcaagcatgttctgtgttctcttctgtagcactctcaggatgggcaagtccctgcctggtgccctgtggttaggggattatggaattgtacagtggtctgtagggaggagaagtggggaggaggaggaggaggaagaggatgcgtgcacgagtttgctctacttactgggctgctcttaccctctcatgtgttggttgttatcccttcagtaattcctgccatttccagagtgggcatagcctctcctccttctcaccctaaccctttattcccactgacctgggcactttggttattcaggtccatcaactatgatgaaaaggaccccttcctctgcaatgcttgtggcttctgtaaatacgcccgctttgacttcatgctttatgccaagccttgctgtgcagtggatcccatcgagaacgaagaagatcggaagaaggtaagcctgcatcaagcccaccattgcttggctctgaactttggaggagagatgtgtggtgaactgagcttcagctcccagttaatgcgcctcagagaaaagcggcaaacatgggtctgtgaccaaagatgtgctaggctcatagcacataggaattagagaagcattgttggtgccaaatgagcaccgtaaggagcagcttagttaggattaagaaggacaggaggagctggtgacatgtactcctttgtcccatggttagcctcagcagagaaaggaggtgcctgttcagggtgacagggagacaggacagaatttttcacagcacttgtgctgttttgtgtctgtgtgatctgccctgagtcgcttgtcagcactaaattgtttgagtccagttcgtatacattgcatatttcttttaagggttgttctgaaggacagtatggagctgtgtgcctggtctgtatggggaccatgtctcataggtgacaggcagttaaagccatgg

SEQ ID NO: 29476 - DNA, 1059 bp, Mus musculus
tgccaggtggcggtggcgcatgcctttaatcccagcacttgggaggcagaggcaggtggatttctgagttcgaggccagcctggtctacagagtgagttccaggacagccagagctacacagagaaaccctgtctcgaaaacaaagtaaataaatgaataaatgtgttaaagtgtttgcggcaagtgaggagtttgcgcttgggattattctgatttctggttctgcccttgttcttgatcaagccagtcattcagagcgccagttccctcctgttaaatgaggataaaagaaataagtggtagggttattgagaagaataaattgtatcatacacacttctcatgtatttatttatttacttatttttaatttgccaatttccttgtttctattcttagaaagtttttgcttcacgcaaagagctgttggaatatgatctacagcaaagagaagcagccaccaagtcatcccggacgtctgtccagcccacgtttactgccagccagtaccgtgctttgtctgtcttaggctgtggccacacctcctccaccaagtgctatggctgtgcctcagctgtcacggagcattgtattacactactgagggccctggccaccaatccagccctgcgacacatcctcgtctcccagggcctcatccgagagctctttgattacaacctccgccgtggcgctgcagccattcgagaggaggtccgccagctcatgtgcctcctcaccaggtcagagcttcttccttgccgctgcagtgggtgtgagcagcggtggtgccggcaccagtggacgcagggttgagccaagtggttggctggcttaccccagagggtgggagggagatgggaggcgggtagctgtgggaagcactgctatcagttcctgtgagtggtctgcttatgagcaggtggtatgccctgagggaacttctgggtcttggtcagggaggagaagagagtgaaagaacccttggactcaacaatatcccagaaaaaaaaaaaaaactcaaaaaaaaggggtgtagggataagtggttagattct

SEQ ID NO: 29477 - DNA, 1145 bp, Mus musculus
cagctcctgtctgacctctccctcacggtcctgctctaggccatgttggagaccgaggtgggagagagccgcctgcttgcagagttcatgtcccaactaaaacttgtagtatagggtctcccatgtctctttgtcctagtaggacacccatgactggagattttagtaggggtcctataatcagagtttaccctggtccctagactcattaagaccccactgattctcctcgtcctgctggctttccaggctagcagccttcagtatgagatgctgctgctgacagattccatctccaaggaggacagctgctgggaactccgcttacgatgtggtgagcttggggcatctgccgggcacttttcaggaacacaaaggtgcaatcccggtacccgggcaagaggtgggagcccctgggcagcctgctgaggcaggtggctcgcatgtactgactgtgactcctgtccatccagcactcagccttttcctcatggctgtgaacatcaaaacgccagtggttgttgagaatatcacactcatgtgtctgcggatcttacagaagctgattaaaccacctgccccaaccagcaagaagaacaaggtgctgtgacattgagggggtggcagggacagtggggctgggtgagcaccagactttactttagtgtagccccagtctgctttagtacggcagaggtaggttgggatttgggggacgtgtgaaataatataaactcaacagcatagaagcctagagcagagtgagggccttgaagctgaaacagacggcctgtgactcccacaggcatcacgcccttccccgcacctgcacaggctctgcacacatgcataagtggacatccagggtgctaacacaggcttgccgtcaaatacggctctctcccctggtaactgaccctgaagacatgggcaagctaattatgttcctccattccctcatctctaagatacaaagcagtgcccacctggagtgatacttaaaacaaatgacagagtaaactccttagatctaaagatgcctgacttagtgtctaggacaggactttgtgtggtctcagtttgcaagttgctcagtgagtcttgactaagggggcagtaaagctccactttcattctcaagtaaa

SEQ ID NO: 29478 - DNA, 1148 bp, Mus musculus
cagatggcctccgtccacctgtaggaggaggagaggctgaacagtagatacaaaggagggagctcctggctctcgggccgtgctctctaagggtgtccatctccgtccgtccactgcagttacctggacgagctcagcgttgcgggggagtgtgctgcagagtacctggctctctaccagaagctcatcgcctcgtgccactggaaggtctacctagctgcacgcggagtcctgccctacgtgggcaacctcatcaccaaggtgccctgcccctccccacttgtcctttctcgcacttgtggggattaataagttccagactttactggaacaggacggctgtggcagtctgttgagggtatctgagctgttttggggtaaatggtctccagcaatacttgagcctctttagcctcttggaaaggcattttttaagtattagaatggatgtgtggcttttgtgcccctctgctgggggctgcatcctgggatggcagcggaggcggccctatcacactgcttgttgttctgtttaggaaatcgcccgcctgctggccttggaggaggccacgctgagcacagacctgcagcagggatatgccctcaagagtctcacaggtagagagccacccagcccctcccctgggtgtctcagggatgtatgaggcctgagcctctgctcttggggccagttgacttctctctctgggacttttctcctactagatgggtctgcacttttgagctcttcactgccagccatttggctcattcggcatctccttactttttgattttcttgtttctttggatagcaccggccttctgtgttctcctgcagatcttacggcggtttttcctgtccccgcaggccttctctcctcctttgtagaggtggaatccattaagaggcattttaagagccgcttagtgggcactgtgctgaatgggtacctgtgcttgcggaagctggtgctgcagaggaccaagctcatcgacgagacccaggacatgctgctggagatgctggaggacatgaccacaggtaaccccatcgggaggcgtggagctggggagatagatgcgcataaatgtcgtttcctagtaccatggcaccagatggtgacagagctcaggtgtgggagagg

SEQ ID NO: 29479 - DNA, 1101 bp, Mus musculus
tactctgtcaggttgaaggcactcactgatggaagccgggcatgacctggctgaacaggcagtgttgtagctcaaccctctaccctacagttggcctgacttgtgagtggtgcagtcaggcctcggggttgaaatcagtctcccctatgtgcatctggatcttcctgcctctcggggttggtgatttggccaggcctatggtcccaggagtctatagccgtctctgttctcctgggggagcagggcattgtattggtgtagtttggctacctgagaaccatcacagtagctccgatactcatcagggggacccaggctgcttattgtccccagcaagcgctaaggaacagttctgtctggtgggggtggcaactttgggggggtcagttcttggctacagccaccatctttattcccacccttttccattgcagggcaacctcctcctcacaggtgacaaggatcaactggtgatgctcttggaccagatcaacagcaccttcgttcgatccaaccctagcgtgctacagggcttgctgcgtatcatcccatacctgtccttcggagaggtggagaagatgcagatcctggtggagcggttcaagccatactgcagcttcgagaagtaggagcctgaagtttgatacaatgagcctcttgggagagcccacagagtcccaagctagacttgtgaggctgaacagggctgcctggggttttgttgagtgtctgtgtccatgatctggcagatgggagctttgtttagctggagaggcagtcaccaaaccctagtgtaatgaagcagtggtaggaagggtatgagaggggaaagggcctgacaaggtgcgcggagctgcgtttgcaaaagcctggagatgcagaacagtgcaagcctagacgcagggcgggcaagaggagacgtctggtctgagtcgagctttacctgtcgagtttagactggatcctgtagacatttgttaaccaagagggtgactgagctctgctgtcatgctgagactttatgctctcctaggtacgatgaagaccatagtggggatgacaaagtcttcctggattgcttctgcaaaattgctgccggta

SEQ ID NO: 29480 - DNA, 1212 bp, Mus musculus
gatgtgtgaacagccatcacatgttgccctcagccaaatcacagccctgttccttagtctcccatgcaaaatacagctgtggtcaggcagaagagacagtgtaggctgggagaactggcacaggtctgacaactgctgatgctcatatgcagaacttggggagctcctatgaatccaaggcttctgcccaggtgtcccatacagccctgctgggtgcttcgggcgctatcttgccttccatccttacagccgccttgacattccccctgttttatacgtgggattcaagagctaactagtcagaggtctctgtgaaaccagtagtacaagacaagcttgtgcacttggactgactgtacaacattgactgggccttggtggcagggcccctccataactggaaaggttgtacacgcttgtgctgtcagaggctttggctgagcctttagtggaaggccgtgtccatgactagataacctacatctctctggttctcttttgataggttctgattggaacggactccatcacgagcctgcataagctggagcaggtgtccagtgatgagggcattgggaccctggctgagaacctgctggaggccctgagagaacacccagatgtgaacaagaagattgacgcagcccgcagggagacccgggcagagaagaagcgcatggccatggccatgaggcagaaggctctgggaactctgggcatgacggtaaagtccccacaatggacaagatgccaccacgggcagactagtgcttcccagcagaactgagcttgacagtgtgttagggtgcatggaggaagacccaggaattagctgtgccaggcactttcaggtacagctactgctgtgccacttgagggcggggggaggcacttggggtaaagtgaccttgcaggtttgtgcaaacggtaaaaatagagatggcgaccattgtgtgtccaggatatggtgcatgccacacactgcaagacctcacatgttagctgtgcttgacatcactgtacccatttccagatagagaaagtgaagcacacttgccatagcatggagctactaagtgctgaacaggactgtgcacagggtctgctcaacacaaagggctctgctgtcctactttggaggaaatgtcagcagtttgacacttgctggggacagtaaatgatgagagcacagcagcccttggcagccgagac

SEQ ID NO: 29481 - DNA, 1407 bp, Mus musculus
aaagaccatgttcacacacacgcacatcaccactctggggtaggggagtgtggctcagctggaagagtgcttgcttgcttgggatgcatggaacactgagttctgtccctccagcaccatatataccaggcatagtagcacagaagttcaaaggaggttgtcagctacatagtgagtttgaggccagtctgggatcaggaacaagacaagaaagaaaaacttgggagttgcagtattttatagccccttgagtgacccctggacaggtggaaatcctccactccagggaatttaaaatggtatctgccacactgtcctagcagcacccacttctcaagcagagtattagtcacacagtggtcacctcccctccattgctggaatcccatcagagcatgctggcacagtatatcctattcgtgaaccaggcttctgtgactcggtggggctgggggccctgtgctactcccactcacactgtctttgctttccaggtcttctatcagaaatcaccgatccagagagcttcctaaaggacctgttgaactcagtcccctgaccatccccatggaaatgagattgaagctagcttgcattctcccctcattcatctctccgtgtgcactcatttcccccacggatgctgcattagcaccccctcctccctcagttttctcggagtggtttggggtctgtaggcttcctgttctatcacgtgtgtgtgtgtgctgcgcaggctatgaagttgtctgtagctcaagccattgaaggacctatacgtacctaggagctgtgagctgtcccggccagcttgagtgtgtacatcttgaaataaatgaatgacttagtacacattggaaaggggtctagctgctgcttgcccagtgctttccagtgaactcacagccttgcagtgacacaccaggaagactgctggagttgaattgtgttctctggggtctgatggtttttttgtccctagccaaaagagggctcagcagagcaggccctggtcagcatctacttcaaaggccttgaaagcatttgacagtctcctgctggctgccaggcagagaggagagacttcagggaagggtgagaatagtgagaatagctgtgtccactgctagggctcttctgcccaccgccctaggaagagcctgtgcattgttctgcaccccaagtcgcctgctgagacctcagttgacaggtgaggcgcctctgaacttagtatctggacctctgagacctgcccccacctcctggctcctgagagcctttctcagacttcagcaaaaggctgacccagtcacagcctgtcgggaggaagagctggctaactcccatcaaccaaaggctttggtgacatcagcccctctgaatgtctggttcacaaggttgctccct

SEQ ID NO: 29482 - DNA, 1114 bp, Mus musculus
tgatgacggaggcccgacgctcctggtggtcttggtgatggggtccagcctcctctccccactgagccgtgtgggctccactcctcgacacagacttctgtcctcccttctccggaggcccagcgggaccgctgcttccttccttcctccaccaccgacccatggaatggtgctgtcgatttttctattgtccccacacacaccacaaacgcagacttttgtgcgtcgatgcagtgcaactgtgccttctcccttaagctgagccactttgagctccaaagaattcttcctagcaggtgtttttttaaatataaaactctaaggtgagggtggggcctggaggcgtggtagcttttggttttctccctcccacctgctcctctgattggacatgagctttgctccctccctctgtcccaagatgacttgcggtggtctgctttctcaaggaagtagactgtgttacctccagagctgggcgaggaggagtcgtcaatactttctcacccagggatagagtggtggacggaagtggagggagggaagaccaatttttttcttcttcttttggatctagtggcgatgtatcggggaaaggcactgtgggggaaggaagaacctcactgtgtttaaactatgcaaaaaacaaaaacaaaaaacaaacaaacaaaaaaacctaaaagcagcttgccttatatcattggggaaggcaggccctctctcagacttctgggaactgggagagaggccaaggttggcatgagtccctcatagcctctgaggttcagaggtggctttgggggtggtcccagtcagattgctggtaaggcctgcctgcattctgcaagccggcccactggactgatggttttcttggggacctctgtggggtggggtggggtgggtggtggtcttttattttcctgatgacttgatgttcattcccgcctctccaatcacctgccaggttccatggttgtaatttctctgtgagaaagtatgaacaggccaggcctgctacctactctgtcctccacagtaccgtcttggtcctccgttgtccctctggctggggggaaaaagccttgttgggggggggggagtggcatggctg

SEQ ID NO: 29483 - DNA, 1162 bp, Mus musculus
ccagcccagtggtagccagggagagctcctgcttgggtcctggataatcaaatgtttctagtggcttgaaagcacacatgactttttaaggacatttgcctggggtccacatggaactggtatagctgtcaccaagggctacgctgaagggtggggtaccagtaccagggccagctctgccttctgcttcctttcagggtccatgttgcttcccagggagcaggactcggctacaaatgtcccagttgtgcagttgtacactgtgagggggtggggctactgccacccgagaaaaaaaatgccagatatctactcaaagtggccatggagggaggggaggggcagactggcttctcattcctaatctaatgaactgccagagtcttgtcacgtggttctgtgtggtgtcgtgggagggaggagtaactccggagcccaatggctaggtttagaaatggctttctgtcccacccccacccccccaaatggtcaaaaaaatcatgtaatttctccaaccttccatgtctaaaatggtgacgattccgtcatatgcacggaggatcaatgagctaattcctgtggatttcagacaaatgatcagaaatgtcacccgttcgtttgttctcctaccagtatgtgctgtggtggctgatcttatgtgtcacctttgcctggccatggttcccagagacctggtcagccactgtggaagtttttatgatggtgcagtaaatatgtgggcaaaatacttatattttgatcgtgtgtgtcctttgcatgtccgcgcatgtgtgtacaggtgcccacagcagccaggacgggtggatcgaaatagttggggctggtgttacaggcctttgtgagtttacctctaaattctagttgcccgagaaagcagtgagcgccctatctgactgtccatctttctagctccaatatgcttctttggagacatgctcttgctaggtagcccaggttagccttgaatctggttcctcagccatctgagtgctgggttttctagcctgtgtctccaggcctgacttcaagaagcacagcagacgttttgtactgtgagcgttcaaatagaaccgaggatgagttcgcccaggaggagaatgtcccccggagatggttctggcctgccccatccattctccca

SEQ ID NO: 29484 - DNA, 1202 bp, Mus musculus
gctgtccctcgcttcaaagggtcacaagtctttgggatttcccttcaaagcagagccggatacagggagtttgaccagggccggtgtctttgggaaacagctgcaggaggagactggcgacctggcggtgggccagggacactttggagcacaaagtcctgcatggtcccacagctggcagcttcctcttcgttgacaacacgtgtagggggtacccagtgtgatggctaagcttctccagatggggagactgaggcatggagaggaagccccagtctttgaacaaggcagggttcaggctgccaaccatggagtactaattgtgtgtcctctgtatgctgcctggtggcctgaatcctgacagtggcctctatgggactgagtgaaggagcctttgcccccaccctggctcggtctgtattttcttgaatctcacagatggttgcagtagtagatgcttttattccattcaataaagacaatttgtagcatatgcaacctcagcacgtgacatttaaaccgctataaaatgctttgtgtgagtaaattcactgtcccttcccttacacgaatgcatgaggaaggaacatggtgaggcagggaacagaacaaggggtgcaggctgactcacaatctttgcggtgggggccgcgcctgggacagccccatgacagtcagggactctcaacctctccacagctggaaggttgcaggacttcttgggtgatgtctcctacctgctcatctcccagatggctcacggcctctgggatatcccatcctctttctggcaccctggcatcctcaaggtctttaccccaacacacaagagccacccagctgggtgtggctgtgggcaggtcctgtggcatgctggtaactgctggtctgatttctgttgttgtaacaaaataccagaggctgtgtcattaataacatggaagtttatttgacttttagttctggaagctgggaatctggagcccatgctggcaccccattaaacaacttggggtgcaaccggggattcagcccaaccctgtgctaaaatctggtcctgttgtatgccaggatgtgactcaggacaaactgaccagctgctctgggcctgtgtccttcccagtgagatgggctggctaagttaactgtgccttcttctgtctgtgccgagacactgtggcttttcttgtgcctccactcca

SEQ ID NO: 29485 - DNA, 1133 bp, Mus musculus
tttaccgtagcacttgctgcttggttgcctttggccctgaaactaatgtgtttccttgtggctgggagccatgcagggtgtgtgtggacaggaaagagagagttcctctccatcactatccctgagagctgtgtgttgtgtgtgtgtgtatgtgtatctttgtgtaggtgtgttgtgcgtgtatccctcagaactgtgtgttgtgtttgtgtgtttgtgtgtctatgtgtctgtgtgtctgtttcgatgtgtgtatgtatatgtgtgtctgtgtatatgtgtatgtgtttgtttatgtatctgtgtatgtatgggtatctgtttgtgtgtgtatctctgtgtctgtttgtatctgtgtgtatcgatgtgtgtgtgtatctctgtgtctgtgtatgtgtgtgtgtctctgtgtgcatctctatgtgtgtgtgtatgtgtatatgtgtgtttgtgcatatctgtctttgtgtttgtgtatatctgtttatatgtctgtgtgcatatttcctctgtgtgtgtatgtgtatatgtatatatatgtgtgtctgtctgtctgtctgtgtgtgtatatgtgtgtgtgtgtgtatatctccatgtctgtgtatctctgtgtgtgtgtgtatctgtctatctccgtgtctgtgtgtgtgtctgtatctgtgtatctccgtgtctctgtgtgtgtgtgtgtctctctctctgtgtgtgtgtgtgtctgtgtatatgagtctgtgtggcagcctgacagctactccgggcctctgcttctaggttggcggtggtcaggagggtgctggtggccaggtggagatcttctccctgaaccggccttcaccgcgcacggtcaagtccttcccagtggcggcccctgtgctctgcatagagtatattccagatccggaggaggaggctgagggtgcagaggagagccgggcagccaccgatccctcggtcacagtgcatcccactgtctgccttggactgcaggatggcaggtgagggtgagcggagacagctagatggctgcaggaagtccagctctgtgggctgctaacctaagcagccttccccagctctgtgtcaccagaaggatggggactggagacagccaacgtgtcaggagtggcttatgt

SEQ ID NO: 29486 - DNA, 1180 bp, Mus musculus
tgcttcccaggccgttggctcacccccagagtcctcagcctcacaggagtgcgcagtctcagtaacacttaccccttttgtctcttctccaggccctccaaccacaggtaggtagcttgtggcttggggactcaggcatgtgactctgattctaggcctggctccccggtgttaatgccttggtgtgggttttctgcactgcctggcctggctgggtttgggcctaaggtcttagcttgtgctgcctggtgcctggctaagcgaaggtgctgggtgctggagctttgctgcctctgggctgggctgcagcaggctctccagcgctcttcttctatcccacaggggccagctagagatcagcagcctggtacctctggggcccaagtacgtggtgaagtggaacacagctctgcctcaggtgcaggtggtagaggtgggtcaggatggtggcacctacgacaaagacaatctgctcatccagcatgctggagccaagaaggccactgctgcagggcaggcccagagtgagtaccactggctgctgcctgtcacctgtgagttgtagaaccggggccagggaccacaggttggtggggcctgggccgagagagtcttgctgttgtagctcagtgcagagctgcgacttcccttgcacatgtgcgtccccgtggtctcatggctgtcgcacaccctgcacacattccctaccctgaattagacgccctcacaggaacacaggccaagtgtgacttggctattaactgcctcctgtgggctcttggacaggtgccttctgtctgtacctagtgtgcttcctggtacagcgaggaacttaccccatgacccacaggggtggtagggaactcaggtctgtctatctgtctgtctgtctgtctgtctcttcccgggtccctgtcttctcatcctgacccaatctcttagactctgcttgaagacaggagcaccgtgcctggtagcatctccctgtctgtcttctacttgcaaaatggtctccactcctgtgcacatggaccagtgcagtagcttctggctgctctcctccctctctttgtccctctagtcccctccacctgccccagaactgtccctttcacgtgtggcctgtgtatgttgtaggatgccatcacaacctgagtggtctgatgctcttgggatacag

SEQ ID NO: 29487 - DNA, 1173 bp, Mus musculus
atcctcatggcaggcaggtgctggagcagcagctgagaaccagatcctgattcataggcagcagcagataaagaaactgggcctggcatggtcttctgaaccctcaaagcctgtctccagtgacatacctttttcaacaaggtcaaacttcctaactctttcctgacactcattagttggggactaagcatgcaaacacatgaacctatcttttaaggccattctcattcaaaccaccacagcaagttgggtagggtaggccctgtgggcccgaggtgtgtgtgaagatttaaatgcaagcctcagctttaaaaatgttcttaaagccgggcggtggtggcacacacctttcatcccagcacttgggaggcagaggcaggcagatttctgagtttgaggccagcctggtctacagagtgagttccaggacagccagggctacacagagaaagcctacaaaacaaaacaaaaacaaaataaaatgttcttaaaatgttatttatttatttatttatttatttatttatttatttatttatttatttattttgtgtgtgtgtatacatgtgcatgtgtgtgtgtgtgtgagtttggtgtgtatgtgtgtgtgtatgtgtgcatgtgtgtgtgtctgaaggataacataaggttggatctttccttctgttatgaaacataatgcggcggcagcggcaggtaaggaggtacctggtgggtccatgcccaggtgtccccctgagaaagcacaccatgcaacagacctgacataaggaaagtttattgtggaggaagggaggggagcagtagtgtggaaagggggaagaggcagagaaaggagagagagagagagagagagagagagggagagagagagagagagagagagagagagagagaaggagggagggggtagcgagcaacggtgcagggagtaatggtggcaggtgatgatgagatgatgtaactgttgctaggtcactgttgggaggagtctagagaattgtctgtaagccaacaccttccactccgtgggtcctgggaatcaaactcaggcccttagacttggcagcaagtgtctttacctactgagccatctcgcctgcctcccacctctgcttctgaatagtgggagaacactgtcctcacagcagacaggctggtgtcccgctgtcc

SEQ ID NO: 29488 - DNA, 1068 bp, Mus musculus
agaggaggcagtcccctgtagtttgtgcttgttctgtgtgtacagctaacttcccatatctgtgtagaaccggagcttaaaaagggctttgtgtccatccccttaaagctagggggactatcactgtagaaccgacccctcagtggtcagttagggggtggttggataagtgaacccaggggcctctggggacttaactttctcgctgttacacctgggaagtgtgtgcttccagcttctgcccctgttagggtcaggttgagtttggttcaaggtcaagaacacagccttgcagcctaggctggcagactgcccagtgtctctggcctaagggctgtggtctccctctgctaggcagacacaggactgtctctgcagtcggccactatcctggatatttcagaaagctacttaactcggcagagaccagcctctcccctgagggaggctcctctgccagtgtctgggcctcctgccttcacttttcccttaccttgaacttgaagttgtcttgggcttgggaagatgagccatgtgttctgttgagttgtcctgctagagttaggtgggttaggaaaatcaaacagtagtccttaagagtcgatgtgtggaaaacgagccttcagtcttgtcctatgatattcaaggacctgaggctcaggcgcaggcatccagctctgtgtgttaaatcggggttgctagggtttcacggaccctgcaacatagtgttggttcttagtgcagtgggaggagggttggtagggatggttgttgccagcctcttgctccctggttctcctagtccctgagcatcagtctcctaaatggatgtgtttaaaggtggactctcggcctcactcagggagtgtatgtacttgggtggtaagtcagaaactgcggtggccaggaagcccccgtttgctgattggagacacttggtgcattttctgccttggccactcatctgcattcaggtcacattcaggtgacctgtcctggagaggtagctaggtgaggttgagttcacccgacctggactgttggttggggtacaagtgtaggctgtca

SEQ ID NO: 29489 - DNA, 1656 bp, Mus musculus
tctcctggatcccccaggttcaatgcttgctgctttgtctgggcctcagcctggccttgcccagattctgcctttggtctctgactctgctgtgggaccaacctgtcacccgcccgctgtctttgttcttccttatttgagccgtttcagatctggctcctcactgacagctttggtctgggggcggcatgaaagcctcaagttggggctgatagcagtgtgagcaccagaagtgacctttggggtcactgagttttctctgttcatgcctgtggttgagtcaccggatgatggagggttaacagggttaaggtctcagcctctgctgtcctggcagcatgggggtcgccagcaattaagagcccttgtagtctaggctttgcgatccgtagccgctcaagtggcagcctttgaactgttgtgggcggctgttgtttgatgccaggcagaatgaggaagagactggtgaagctgaagttggctgtcttctcttttcagataatgtacaacgggcagccaatcaccaagatggcctgcggggccgagttcagcatgctgatggactgtaaaggaaacctctactcctttgggtgccctgagtatggccagctgggtatggaggtctctttctaaaagctctgtagtctagctgtaaatgtggggttgcacgcacatggtacaagtgtaattgatccagatagcagtggctagccggtaagtgcgtctcgtgctcagcagaacagcttgccggtaaccagccgggtacaggggtcagtgcagactcgaggactgagtctggtgtggaaatccatttgtgtcaagagtctcaggcagaaggacaaaagctgagtccctttcatccggtttcgcgtatataaatgagcctttattggaagtgagagttccataagagggaggttgttctggagatcctggctagactggcagctggtgtgtctccagctcacccctcaccacactgggctccgtcctgtacagagcagaagaggtcagcaagcctgttagagctgaccgtgcaagatctccattttcctttccccgcagactcgcagccagttagttcttcctagtcccttctgcagtcctgagcacgaggtgaggtgtgggcgccacctactggtgtctgaacagcctgcagcagtccaggatctgggttgctgggtctcggcgtcattagaagtgcgcagatgggagcatataaatagaagcagagcattgcactggccacagactgcagggaacagtgactctgtggaactaaatatacctcgcgtcagagtgaatgggaaggaccggccccttacgcacacacgtccctgctggttgccagggagttctcaggctgttggataaacggtttccatggccacgggcgggcctcctgccatccccaggcccagcacaggaagtgcgcttctgtcctctctgctgtgtgtgcggcttctctgccacccttagacaagcatcttgctgcagccagcctgtttgccgttgggaacttgatcttggcggtaggatggtatccatggagtggctttggagggacagttaagtacagcgtgcactgtctgctactgaattcttgttgacatctactaaggaacctgcttcacctgcttctacagacgctctcat

SEQ ID NO: 29490 - DNA, 1099 bp, Mus musculus
ctatgccggctacacctgctccttcgctgtcagtgaagtgggtcagtgcctcttcccctgtctcgtttcttaggtccccgcagttggagccaggtgcaggggcttcctcctggggacatctgctcccacaggcccacagccatgtctgtccctccctggcttgttctgttctctgcagtgtccttttaagcagttgtccctcaacttggttttcttttttttttttttttaaagatttatttatttattatatgtaagtacactgtagctgtcttcagacactccagaagagggagtcagatcttgttacggatggttgtgagccaccatgtggttgctgggatttgaactctggaccttcggaagagcagtcgggtgctctaacccactgagccatctcaccagccctcaacttggttttctaagatgcttattctaacacttctttggtttgcaaccttccaggtggcctgtttttctggggggccaccaatacctcccgagagtctaccatgtacccgaaggcagtgcaggacctctgcggctggcggatccggagccttgcctgcgggtaagtggctgtatccagggcatgtggtgtgtgcctgctctgtgtgcctgtttcctgaggatggcactgtgcctgctgaatctgagtcttcctggctggacataggcgacaccaaacccccacagatgtgggagagggggagagttaaggcttggtaggtgctaggacaggcagctccttccttcacagaaagtaattttgaaagtttttgtttggggagaaaaaagcagagggtggcagttttcgctcagcttggagactgtaggcttttaatttgtcaacacgctggagagaggacttactgaagagctcctgagccacccagtacttacaggtgacgaatgagggtgtgtaggagttagcttagttactgcttcctggtccttgtgtccctgtctgtcccccatcccaaaggctccctctgagagccccaggacccagctgggcagtgaggccctggccttggtattgatctgcaaacaaatgtggcccctccctgtctgggaagaaagagccactaacactgta

SEQ ID NO: 29491 - DNA, 2340 bp, Mus musculus
ggctccgtttccaagcgattcaacgttaactacctttttctgtatgctttccaaagtgtttccctcaatgtttgattaaaacatttgctcatagccagcctgcctttctacgagataggcaggacctctgagcgatgtaggtttttttatttttaagttgtatttcttttctccctgctcttgagtgtccttgtcctgccctcccattccagccgtgatgagcattgtgatccgagtgggtgccacgtgagagagggactgtcactttcccagacagaaacggccttttcaggaaccagcagccgctaggccaatccctggtggtcggtctccatcccgattcctgcctgcccgctttgagagacccggtcacttgcttgtgggccctcccacttgcctctgccacctcccctcatagctattcctggcttgctgtctgcaaggcccatgtgggccttttggctgaagcatttgtagaagcagccatcttccccctggtggggctttggggtctatgttagccatttgtatctactttagctctcaagtccagatgagaatagggaccgtggggtatggggtgggcagttagaggttggtcatccagcagtcagatgtgtcctcggtcctctgtggccctccgttgccgcctgtgtgctttgcccgtgtgctcctgctgtccctctgcctgggatggccgccctgctctgagacttggccactcttgtcctggccaagtgttctgcttgcatttgcttggctctggtaccaaatagttgggattcttgatgaaatcccctgccccgcgtgcgtgtcagtgcagatcctgcgcaccacgccccctcccccaagtgccctctgccgagcccgtcctggtattgactttgtggctgagttccgaggtgcctttcccggatcctcctcgctgggcccgagtgtggcagcagctcgggtcggggccttggtttccagagggtccgggctggtttgactgctttaactaggattagttcagtggtgcttgggggaggggctgaggatggaagtgtgaggggggtggatgggaaagtcaaagtctggtcttgagggtcatgggtttgcttttgctgttgtgacgcctgttcccgtctctatgttaaaatgccaaaaatgacccagtctgtcgctttcctccgccccagcgcttcacagccgcttctggctttgcaaggtgtctgtctcggccagtgccgtggcctgctgggaagggtcagagtcctcactgtcccccgtctgtccagcaatagtctgtccagagacaagcttctgtagcggcagggcttccgcaaaactaacctgctttgtccaggtcaccccagacaccgcccctcacttcatgtactggacgggagccgtccgtccatctgtccctgctggtctctgtctagagagtgctgttcgggatctgctccttctgtcccaggaggtctactggagttagttgtgtggtcaccaagaggactgaggacacagtagccctgagccaagttgggctcatcttccagggagcaaacctaaagctggcagtcagccgccctggctagaggcctgcagtggatgagcgcaaagtgcccggccacagccccctccctttaggctaaaattctcacccaagctttcccacgggaagctctaggacaggaggaaggcgggaagccctgggcaggaaccactctggctgtccaggggctcctgaaatcttctggtcatctacaaagggtaacaggaagggagttaacgaggatggtgggattcggttgaaggtgcctggtttagtgctgttaattgtcttatttttttttttatatctatatttctgggagtaaacattttaaataaacggcgtcattgtttactctgcgttggctttcatgattcctcttcagtagcgtggagtgtgtccccagccctgtgcacgtgccccggaagagtgaccaaagagagcttcctgctgggctggaagggtgcagagagccacgggcccgtggggtagtggccaagggcttcccaactagggctggacacagtcctgaaacacacatggtcctagctggtttttgtgggtgggacaaagtctcgtagcccaggctggccaccttcccagtgccctgcatatatatgtgaggtattcagccctaggttaagtgggctaagtgtggctggctggtgacattttgcatctcagtacctgggcagttaaatgaatcctaacctgtagtgctaatctggttatgccccagcagtttaataagctctctacttctgaagtttcttccctcgctgtcttctctgaccctctgc

SEQ ID NO: 29492 - DNA, 1250 bp, Mus musculus
gtgagccaccatgtggttgctgggaattgaacttaggacctctgggcgagcagtcaatgctcttaaccactgagccatctctccagccccagacctacattcttaggggaacaagatttttaccttggattatttcctcagctatgcaatcaacgggttgtatgctactgagcagtgggcacagacttagactccgataacataagctaaccgtagactcgcttgtcccctgcagacaaagcgcacatctacgtggccgcacttgcccttgctgtggtaggctctttgggaacactacccagtatatccaataagcatacgctcaacagtcactgccttcgagagttagggtcgtgtcttcttctccatccagttgggccaacagccatgccaggtcgggcctcagagcctccaaagctgccatcatctgtctctggagacagtggtccctgctcttgagggcaaagccccaaatcctgtctcctgctccagagtagaaaacacgggcacctctctgagggagctgatgtggagaggtgggggcttgtggtgttcggttaaagtgactttactgcttttatttttatctggggtgggaggaagtgagcacctcccatatggcagccgcgtggctttgtagactgctacaatactccctggtggcattggttgtctcagaaatttctggaactccaggactcagacactgcctgtcccatctcacttactcacccagtgtgactcccccccaagtgtggatgcccccttgcctcccctgggtggactccttgctcttccccacccccactgtgttttgttttgttttgtttttaacttaggcccagatgcttctgggctacaccagttcctgtttcgatgtgagttttgaaatgctccgtgaagggctgagggacggcaggaagatggcgggagccaggcagtaccaacttcctggcgaagaagccaagatggagactgagaagtgtttggggaagagccaaaataaagagcaataaaataagccgtccacgggaagctacgcggctctgggtgacattctttgcggcttctgagacatagacacaagtcagtcagatcacatgtggcccttgtggtcatgaagctcctattgttctgaacataaagtcttgatccttatcaaactcatctcgaggacccagcaccaccccatcttgccccccacacacacacacatacacacacatacactctcaggactgtgtgtcaca

SEQ ID NO: 29493 - DNA, 1184 bp, Mus musculus
cagtgctctcgccctcacgtcagcctccccatcctagcagcctcactcctgcctttcctcctgcctactaacactctgctcatcgggctccagttaaaccctaggcagggcagccatgaccccagctcacctcctcaggatccctccatgcactttgtcacgcaggtcccacctcactgtaggtcaccacagataagttctgtggagcgaaggttctgtctgtgtcagaaatgaagctcggtgtggtgtcactacagtgcagtgtcactgcccctggacccatagctgccatatcatgggggattaacatctgttgggtgttgatgaccgtgccttccaaggaagctggataccagcgtgtttgtgcccagaagtgccatcatcatgcttgataagtgggggagtgccttgcagtttttaatcaatcaatctctctctccctccctccctttttgtggctttttcaagtttcaggcctgtcgaggggcacagacagctgctgctgcagctcccagaatcaaaaaatttgccatttaccgatgggacccagacaagactggagataaacctcgaatgcagacgtacgaggtggatctgaataagtaagtgtctgggccagccaggcgctggcgaaggagagcttgggagggtttgctgggctctcagttaggtctggtttctgccattatttgcggtgctagggattgtggtgcctgtggggtcatgcctttcaggtcttgagagatgtaaaatccgattcccttaatgattgagataatcacatgttttctgtctttagagtcagttagatgtctctcaataactagcttgcgtgagcgcgctcgcacgtgcgctcgcgctctcgctctctctctctctctctctctctctctctctctctccagtcttttgtagtccaggcttatcttgaactcactatgtagctgaggaagaccttgcatttctaatcttcctctctatgcctccccaattctggggttactggcatggctcgtgtgagctgccatacctggtgtatgaggtgctgaggttgagcctgtagcttcgtgcaccttgtatgagtactagctagctgttttattaaggaaaaaattaaaaatattgccagataattagatgacaaaaattttgcaactcaaactcagtaagatgggcagtggtgg

SEQ ID NO: 29494 - DNA, 1195 bp, Mus musculus
gctgccgcgtggggggttggggggcgggctgaggggtggcagctagaatggagaagggacccagagtagagtgtgcatttgtgtgtgattgtgtgtggttgtgtgcgcatgtgtgcgtgcatgcatgcgtcccagggcgcagcgccattgctgacagactcccccacccccagtgcccttcctggtggccctggcgctcttgggctctgtcctggtgggcctcatcctggtccccggcctcctgcaggggcccctaggactgaggaacattgtggacagctccttcaagctactgctgctgggtctggtcgccttcaacttcgtcggcgcctttatgctggaggtaggcagggaccacagggatagaagcagtgggagggacgtggaggacccaggccctgcagtccctccacactgctccactgcactctgcagagcgtgctggaccagtgtctcccagcctgcctgcggtggctgcggcctaaacgggcctccaagaagcaattcaagcggctgcaacaggagcttgcagaacatccatggcccactctgcccgttggctccgtgaggtagtgcaggccttggagggcatgctggacactggatctccctgcccctgagccacgactggaactctctcaagagacagtaccagtcacctcccacagccctgaagctggctgctgtcacactgctgtccggacacactctcctggggaagtgctgactgctgtctcactttagaccatcctgtgtagagatagcagctaccaactccatccagagctgctggcactataacaaataaagtgctggctttcctgatgtgtcggcactggtcttgtcttgcgcgcgctcgactggccaggaagaacgatgctgcaacaggatccttctgcacatgtttattgggagagcttgattgtagaggcgaaaagacttcgagcccagaactggtactgcttttataggcctaggaggggcgtgtctcacacccggattggttatgcactaagcctcatttgcatgttcctcatctgattggttactctctctcagtaccttacagaacctcattatcatacctcatttgcatgtctcacatctgattggttatactctcaataccttacagaacctcattatcatgcctgggccaggcagtgtctttgcaaaaaactttactgcatatgta

SEQ ID NO: 29495 - DNA, 1487 bp, Mus musculus
tgacccacggaaggtggcagagtgctccctgcctggcccctggcccctggccccttgcctggctggcttgacagcctgagcacaagaagcagtaagttggcaccttgccacactgttggttgggcccaggtgctgctcagccaggaaacgagagcaaacactccagggcctttgcaagcccatcgccctcctcactggagacacccagacctgccttcctccaccaagagatccttattaaacacagcccccaaagcacagaatggattcaatttgtggcctgggttcagctctgcctctgcagttggcaggtgtcccagatttgctgttggacagggaccttctgcactccatccataatagcctttggtaccttccagaggagtccttcccgagagctggcaagtctttgagctgtagcttgaatgggctgtcgggggacactggaagggagtaagcagctttttgaaaatgttaatacattactctgctaatatgctgacctgcactaatgcacccctgtgagggaccccccatggcgagggcctctgcctctgacacacccttctcgctgccctgagccccggaggcagccatgggaggcagcctgcatacctggaagccagctgcacagtgctgtggggaaacagaagcgttacagaccgggccaggctgcctggctgctgctccctctgggctcatagctggcccacttgacggtccctggtggcttctggagggaagctgtacctctagatacatttttcttttccttcagagaccgtgacagagggagctctgtcagccggaagttcaggccaccagacgtagtgatttgtaagaaattactgtctcctcagtgaacctcctagtttctttatagacttaaccttcccttcagttaaagggtttctttttcagagggcctagactgtgctgaccttgtgtgaccagagatttaaagatgaaaaaaacaataaatgtgtttacttctgcaccacatctcagatggatatgtttttggcagcgtggtcctcagctcctgggtgcctgggcatcctgtcatccagaggagacgatttcactctaagactagcatggctcttaccgtgtctaaggagtcactggtgggcacccattgtggcacagccgtggagaaccttgtcctgcagacccatcacacaagcccaagtgtgaaaggtgcacagaggccaggcagaaagaggttttaaacaatgctaatacctgaaggtcctaggcaagaggcagctttatggccacagggtctggccaccagtcaccagcatagggcagaaaggaccggggctgcaggatgctcctgccctctgacagcacacgaggcctgggcgattgccctctctctgcatggagagtgaaaagtggagatgtacagacctacctccctataggatgcccataactacaagtctgccagggtggtagtgcccatcttaggtccagcattc

SEQ ID NO: 29496 - DNA, 1227 bp, Mus musculus
gaaggtttaggggctggagagatggctcagtggttaagagaactagctgttccagaggatctgggttcaattcccagcacccactgggcagctcagaactatatatcctaaaactcaggttggcctggaactcacagagagccacctgcctctgcctcctgagtgctgggatcaaaggtgtgtgccaccacgcccaggtactgtttatggggtcatttctgttcatttgtagctagatctaagctggctcaaggcatccttgaaaatgaaccaccaccttcttcttcgggaaaacaccatatgtcagatgacgccagtgcagcgggaggcgggaggaggtgggcggcaggattaggagaatttagcagcggtcttaggggccatcagggctcatggaggtaaagctgaagacagggagtggattcccatcaccaaggtgggcctcccggttagggacatgaagatcaagtccttggaggagatctacctgttctccctgcccgttaaggactctgagatcattgacttcttcctgggtacatccctaaaggatgaggttctgaaaatcatgccagtgcagaagcagactcgagctggccagcggaccaggttcaaggctttcgtcgctattggggactacaatggtcaccttgatcttggtgttaagtgctccaagaaagttgccactgccatctgagggggcatcatcttggccaaactttccatggtccctgtgcagagaggctcctgggggaacaagattggcaagccccacactgttccatgcaaggtgacagacaggccgctgtggctctgtactggtgcttctcatccctgtccccctagagatactggcattgtctctgctcctgtgcccaagaagctcctgatgatggccagtatagataagtgctacacttcagccagaggctgcactgccaccctaggcaactttgccaaggccacctttggtgtcatctcccagacctacagctgcctgacccccccgacctctgggaaaagactgtgttcaccaagtctccttatcatcttgtgaaaacccacaccagagtctctgttcagaggacccaggtccagctgtggctaccacataagggattttatacaagaaaatgaattaagtctgttaaaaaagaaaatgaaccaccagattttctttctttctctctttaaaaaaaaaaagatttatttatatgagtacactgt

SEQ ID NO: 29497 - DNA, 2699 bp, Mus musculus
gcctgcagtgatgcctggtgagctccgggttcagggaaagcccctgtcttgaggaagtggagaatagagaatgtacctgacggtctccggccacacacatgcacctacgcccacgtgtcccacactaaagaatctgggcagcttttctatcctcaaggcctgccttctctcttcctccaggccaaccaggatctcccaacccgaagacagcaggcagcccagcaatgtgatcagacagccgttgggtcctgacgggtcacaaggcttcaaacagcgcagataaatgcaggcaagaaaggacgccgctgctgccaccaccgcctcctggatggtctgccatgggtcgcactgctgtggcagacggctggacttgagcagagggaataacctgacttacttgcactgtgatcccccttgctccgcccactgtgaccttgaaccccatgcactgtgacctctgcctcccccccttcccactgtgattggcatgttgacaagggctgtcccaagtcaatagaaagggaaagggtggggactaggggaggattaggggagcctaccaaggactcagagtagaaggtcagacagtgccacttggccacttggggtaaagccagtgccagcaataacagtttatcatgctcattaatttgggatttcaaaccacaaatgagaacttccccacccaccccaagtgcatgtcgccatcacttaaaagttccattgaaaatagcctttcttttttttttttttcttcctatttttgtttgtttatacaaatacctgatttgcaagaaaaagtgcatggaagaggtttcagcagtttaatgaatttttaattgagaaagggtagtttagtattcacttaaaagatgtttctaggaaatttgctaggaacattaaccaataggagttcgatgagcttagcttctgtattcctactgccgcccagaagagaggccgggctcggaagtccccagagatgagcatctgtgcctaaatcgccttcctccagctaagtcccagctaagttgcctagagatagctcagagagcctgggggaggggctgaccccatgttagtattgtgagagatggggaaagtgacaggcttccccttcccacacccctcagggtgggctggctccctaccagccaggttcgctgcttctaaaggagggcacagagtgactctgggctcagaaaggcagtgaggacacttgtccagtgtttgctgtcggcacaagcccaagagagagtctggctccagaactccaggcctttgcctggagtggtcagagtagagaggcctgtcccttccagcaagactggatggaacacttaaggatctgaggccctggttcagagactgtactggaacgttgcctggtgaaatgagtgggactggagcagccggggaaagacagagtgtgcattgcaaaggcagatggccaaaaggttcctcggaggcctcggctgccccttctctccctgagcagaacaaggctggcatgaaggccatctctgtccccgagcctggaggtttgctttggctctcggtgggagaggcttgagagggcggctgtgtcccactaggtgctctctggctttgtgatctcttccaatgcacttggccttacccctcggccagcctgacagccgaccagcactctcctgaccagcactcgggtgtgggagtgggagtgggcggggtggggtgggattagggcagccagggatcacaccgccttcggttcctctggcttgtgcgctatagcagtggcccgtatcatcttccccttaggaagaggctcttccccagcacagccctagatctgcctgaaaccaggggccatctgtgagtgagcctcacagagcctcagcaggagggccggccacccccagggtagggaggaacttggctgctagctcagagtctagggcccacccacagaggctagtggttttggttggaggacagactgccctttctttggagaagggtgcagaaaccctgcttgcctggtcccctctagtggaagccaagggcgggcggcatctgcacgtcgagagctcacaagagtggctctcccatctcagtctggccaaagaaggccccgcccacagtgcacctgcctccccactcccaccagcagtcatgcctttggcctcctaggtgagaggtggccggcaccactgaagaaggaaaggaagaaaggaaaacagactggtgttgggggagggggtgtgggaaacggtttggattttgtgtgtgtgtttgtggggtttatttttgtgtgtgtgtgtttccatttttttgtagttgtctataaatccataagtgctttttttttttttccttttttcttctttctgtctttaagtaagttgcaggctttggcttggtaattcccagggggatgaagggcaggaacctgaggctgctgcccctttgtctgccttcatggtactgccccttcccccagctcttcctggaccccacgagccaggcctcggcccttccagctaaccgcttcccatgagccactactctgatgtcagcctataaccaaaggagctgggggtccgggtctggtgaccagcccttctcagtcccctcaatcagggtgctccccacctgcaggcaggaggcaacaccctatctgctgccatcagccccttccagagcccacctgtccc

SEQ ID NO: 29498 - DNA, 1118 bp, Mus musculus
cccccccaaatcaaaactctagaagcttataattagtcagatttatatatcaatagattctcagttcacaagatgcccacacaataatctcagagccaattgaaaatgatgcaagctgcccacctaggttagacaagttatcccaattattctatcctcttataatattcatatttactggtggctatttaaagccacatggaatctggattggcttcctctccttccaccttcctttcctcctcttctctggcgctgcaactcttagctcctcctcctttttctctgtccaatcacaggctttttgttgtgttaatatttaaagtgattggacagggaaaattctgcaaaggaagggaatttggtccttgttggaggcaggaacctccaagcttcttgatccctgtgtgacccaacagtgcaggctgtgtctggaggagacctgcttgttcttctgggagaacactgtgggagagatgtaactgcactctggttctcaggatgagcctgggagcaaataggttggagagctgcatccagagcaagtggactgactggtactcggtgcagggccctccctctccagcggcttgcagagtggtctcccttctcactaacctggacagtctgcagacagtcagctccactctaccagagcagttcagcttcgtgtctcattctgtgacctgacaggagacaccgccacctccaccacccccacttggctgcccaacaggatggctgatgtggcagttttagttcttgcagtgccagtgatgtggcttggagaggaatgggatcaaatctaaaggccttcccagtagctcatgtctgggtataactttcaggaaacagtaatacacggctgttgggagttgattcaggcggttcctcagacacacttgaaggcgtctttccttgcaggcccatgtgcgggaactgggcagatgattttcctgtagccctagagaagaaggaagctcagaatcaatccacctgggtatctgagcagtttgcctgtctgtgtcctttgacctttgcagcattaggaaagtaagagtcacccggttaaggtttttctcctgtaaaaatcatgtatttcgaatttttaaaaattg

SEQ ID NO: 29499 - DNA, 1218 bp, Mus musculus
gcctctgcctcctttgtgctagaattaaagaattagaggtctgtgtccacttggtggcatttttgttttttatatttaatgtgttttagtgtttacctactacacatgtgcagttcccatagaggccagaagatggtggtaggtcccctggaaatggagttcaggctattgtgagctactggtgctgggaaccaagcctgggctctttagaagagcagtgctcttaactgctgagccttctacccacccaccccccccaagtcttcctgttcgaaggttatactgggacttgtgtgccattctagggggagggaggatgtggcgggcttggcattggcactctacctatgagattaatatggatccgactggttacggggaagtgctggagcagcttcatgctgtgggaaggaaggaggctgtgagcagctcgggtgctcagtgctcctgtgcttctgagagctgtgcactgatgtttacttcttacactagagcttcgagtgtgtcatggccagctcctcggacagtgaagatgacagtgtcatggccgtggaccaagaagaaactgcactggaagggacaatggagcaagatgaggacccccacccagtgttggaggttgaggaaacaagacataataggtccatgtctgagctgccggaagaggttttggagtatattctgtccttcctttcaccataccaggaacacaagactgcagctctggtctgcaaacagtggtatcgacttatcaaaggtacacttgttttaaagaggtgtgtgtgtgtgtgtgtgtccatccatctgtccatctgtccgtctgtctccatgtatgtgtatgttgcatgtatgcaggtgcctgtggaggccaggtgaaggcgtcagattcactgggtcttgagttacagggtctgggagccacctgtgtgggagctgggcttgaactcagtcttctggaagaacagcaagagtacttagccacagagacctggctatgtccattgtggttttgtgtgtgtgtgtgtgtttttttttttttaagatttatttactattatatctaagtacactgtagctatcttcagatgcaccagaagagggcgtcagatctcattgcaggtggttgtgagccaccatgtggttgctgggatttgaactcaggaccttcggaagagtagccagtgctcttacccgctgagccatctcaccagcccgacc

SEQ ID NO: 29500 - DNA, 1139 bp, Mus musculus
cagcccaaaatgcagttctttcaatttgacattccttgattctgtttcctttctttgaacaaaaatgagaaatttggacttcctccaaaatatacaagtgagaaagcagttaaaagatacaattttgccaggtggtggtggcccacgcctttagtcccagcacttgggaggcagaggcaggtggatttctgagttcgaggccagcctagtttacccagtgagttccaggacagccagggctgcacagagaaaccctgtctcgaaaaaccaaaaaaaaaaaaaaaaaaaaaaaaaagatacatttgtaatgattttccctctgatgttagtatctaagctgagggctttggtttttctcacctttaggtgtggcccaccagtgttaccatggcttcatgaaggctgtccaggaaggaaacattcagtgggagagccggacttacccttatccgggaacccctatcactcagcgcttctcccacagtgagtatccacactgcctgtgctgtgtctctagaactttcttggagacatggcgtttcgtctggcttctgaatgaagagactgtaaaatgagggtttctaacagaattaggaagaagtgaatgtagacacgtggtgaggactgaagtataacagtggtagagtgcttgcccaggaaggcccaggctcagaccctgacagataaggtgctagggcttgatcatgttagattgtgcttttttatttgactcgactcctgcttcagactcctgaaggtgatggttttgggcatgtgccaccataccagctagagttgggctttggtcggaaggcgcatgcattggttacccatgccatcagaacgcgacctcaaaacttagcagcttaaacagtatttcttacctgttcttgaaggtgtgggatttggagatggccgtgatttctggtttagaaatgtctcctagagttgctatctctgtcatccagaggcctacgttttgtattcatggacttggtagacccagtcacactgtcagctgcttgctgtagagctgagagggtgtctgatggaagccagagcagtcttcataatctccgaagtgagtgcatctcttccttcctgttctcttggtcacagagatcagcaggacttgtaaa

SEQ ID NO: 29501 - DNA, 3176 bp, Mus musculus
gctgtgctggcctttgtactctgctgctgactagaccgggaagtaaggggagagaccgcagtaacttcccacaggaagctgaagaagcgcccctgtgagctttctgtggccttctcagagtcagaaatgatggtctaggcactgaggaagaggctctagatgccgctgcaggatcagagtcacagaagacagctcttccccgcctcctgtcagccacagaggacccatgatggctctgtagaagcgccctgtgcctggtcccttctgtcctctgtgatccagagaagtcacccaacaggaaaccctgttccccacgtgctggagtcatgctgaaacaatgtttatagagccgccgtccatccgtctgtctgcctccttcctgtccgttggtctttttgagttctccctacatgtcttagcaaaacattcaaatgtctgattagggaattttccgacaatcgtgtttggttgcaagttgccaaaaaccatagttgttttccttttagaactgggtcctcagaggcctctcctgtctgccggctgctgcctgtccttcggtgctttgctttgggaggttttcttatactttttggtttttttggttcatctttgtaaagcatccgaacttccgaacttcttcctctctgacaaagctccagtgtccacagaattcagagctgttagagcctcccggcatcctcatggcccgtcgggacccaccacagtgtgctggtgcacgcctgtgtcctagcactcagggcagacagaggcaggatgacttcaggtttgggcttagcctgagttatatgatgagactctgtctcaacaaaacagaggacatctgtaaagcatcgaaagacaccttttccagttttctctttttctgaggcagtgcctcactatgtacctcacagcgatcctcctgcctctgcctgtcacttgcggcacagccctctgtgctgtgcagtgctgtgtcgtctttttcttgtgtcccccaaagcagagctttccttgctgccttcacttcatttcctagaagaggtgcagccaaccaggagaggggttggttggttggttggttggtttgtttgttcatagagaaagctataaattattggtctctaagccacagcctagacataggagaaatcaaaaaaggttatttcaaatggccatgcaactatggtttggtggtttctcatcagtggataaagcatttttattttacctttaaaactgaaattgaaaggacagcagcgtgtttcccagcggcagtctcccattcccctgtccccgcatctcccaggcacgagcctgctgcggctcgtctggctcatggccagcactcaccttccgacaagcgtgtctcctgctccatgctcagtctttccttagcctttagctttgctctgctggtcttggcaagagagccctcctgttttgaaacttggaaaaggccaactctagaggaggggtattcgatctggagccgctcccgagggagcacccctgtgcctacttcctgtgtgtcccactgctccagctgcctgctctgttgctactaccagtcctttggccaagactgatcctgtgggatcttgactcaagagataaggccagcagataagcagcctagcattgctgaaccctctctgtggtgtttgcgtgtggatggcgcctctggatttggtctctactgaaacatcaagcattcggacacctgaaagttaagaatctctactttgtagtctttctctttcccctgtggccttcctaagctggctgtcaactgttgattcttcgacttctcccaagtagacaggcaacagaaatcttaacctcttagaaagctatgggttcctctgcctgagatctctgcagtccctccagagaaaacagaatgagcctcgactgcaaccagccatttgggacttgatggtccctgagtgctgtagatgttgctgtgggaagtgaatcagcagtggagactgtggtctcctcagcctcatgaggctgtgtgcgtcctacaacttgcagtacgctagcagagctcagtgtccacagaacactgtcagttcagatttaaccaccaccccttttttgacacgataccaattttgtcttaaaattcaccaagagacatgagacaaaatattttgtttgaaccctcaggagcacctaaagaaaatatttatcagtatttaagtatttaaaatacatcttgtttctacttgaagctttaaccctttccattcctgcaagtgtgcctttgagagccctcggtcatattaacttcagtcatttggttggcctgtgagagttctgggcgctgctctgctcctgcacagagcttcctggtcatgcatgccacatagtgtgcggcagagagcattcgtttctcactcctgttgctgcctttcttccttgtttgggacgagggctccacaaccccacctgccccgtgttttgggagcaccagtaaggtagaaggaaactggagttttgttgaaggcaatgctgggcttgccctgccagccttctcattttaatgtctgagctctggcgagaactgaaagcatgaactgtggaggaacggtctcggaactcccctaacttaagaagaggagagaaggcaggattgcaggaggctcagcctggaaagacagacagccgccgcagtgggacgagggggcgctccctttactttgtctttataagttccttctgcctcgcctttcccttcctcttcagtctgtccatctgtctgtccttgtcctcatggtgactctggcatggtgacgtactctatttgcattatctgtggtcaccagcaaaaatgacagcggggaggatctgaaggagtccagggtaaggaagcctggcctggtgactgccttaaggcctgctctgctgtcatctgcaggtggcctctcagcagccccatccttgggaatgaaagccaacctctggctccactgtgctcgctctgccccctcctaccaaccagggctcacgtcggtgcacgcccaccgtgccctgacaaagctggtgctgtgagtgatgtttcccatacaactcaggggtgccaggcggctccccccatagtcattttaggcacatcacagtgtgggaatgaaaatggattccatggatatttaaatctgtccatttcattt

SEQ ID NO: 29502 - DNA, 1203 bp, Mus musculus
ctggaggtgagcggtggctctccagtgctatgcttcaaggtgtgacattttctgcaaaaggcagctggcatccgatgtgccggggtttggggaagttggggccacttgagacagggtgtctaggagacactggccatgggtgtgatgttctatcagcaagaacacagctggggactggcatacagaattaacctcctgtctctccttgtgcctctcagcctgttctccaggattcttcaagtctgaggcatctgagagcccttgcctggagtgtccagagcataccctgccatccacagagggtgccacctcctgccagtgtgaagaaggctatttcagggcacctgaggacccactgtccatgtcttgcacacgtgagtcttacagagatccagagagaggtgtgactgaggcgggggtgggggtggggggtggggtgagatgggtgggtggggagggagggagggaggggcagctccactgacctccactctctggacaggtccaccctctgcccccaactacctcacggccattggcatgggtgccaaagtagaactgcgttggacagctcccaaggacactggtggccgccaggacattgtctacagtgtcacttgcgaacagtgctggccagagtctggcgagtgtgggccctgtgaggcgagcgtgcgctattcagaacctcctcacgccctgacccgcacgagtgtgacagtcagtgacctggagccccacatgaactataccttcgctgtcgaagcacgcaatggtgtctcaggcctggtgactagccgaagcttccggactgccagcgtcagtattaaccaaacaggtgagccaggggtagtgaggactctccaggggcacctgcctgggtgagacttgaggacgggtacccaggactcagctgtgtgcagagaggaaacaggaagtggctaagaattccatccttcctggtctatgtagtgagcaccaagctagccagagataaatagttaagactcctgctgagtgtgatagcgcatgcctataatcacaacactcatgttctgaaggtggaggcagggagatcgggagttcaaggacatccttagctacataatgagttcgaggccattgggaggcacaggaaaaacgggacatggctcaggtgttacagtgctttctacataggcttggctgaatttggatccctaagac

SEQ ID NO: 29503 - DNA, 1199 bp, Mus musculus
gcacgagcttggggcctgggtttgactccttagcactgtggtaccaggcagacaccagcgtgtggttgcaatttgagcacagggcttgtggagacaggcaggtccctgaagctgatcagggagcctgactggatgagagaactccaggctcagtgagtctctgtctcaagaagataaagtagagtatgactgggaagacgcctgatgtcgacttccgtctttatcacgcatgcttgcataccaacatgcacttgtgtgtgtgcccatacaaatgcattcatacatgcaaatacagaaacacaatatacaatataaggcttttcaaaccttgcctgatctccagaaaaactcggtggcaatcagctagtgacttagttattattatttatatgttagtgaatgtccccagaggacatctgatgggctagcttctgctgtcagggcagcatccataacaggacatccaagaaccccatgcaggatctgagggccatggtactctgtcgctatccttcacccctgcatggcttctcacacctctcccctccctcttctgcccagagccccccaaagtgaggctggaggaccgaagcaccacctccctgagtgtcacctggagcatcccggtgtcacagcagagccgtgtgtggaagtacgaagtcacctaccgcaagaaggtaaactcgatgggggttggcacaggccatggagatattcagtgcacagcgatctggaagggttcccttctgcgtctggggaagctgagacctggggtttcctagaagcttataggggtgactattttgggttctcagagccagttagaatgagctcttggaattaagctagtcctggggatgtatagtccccctctggcctctggtgaatctgtactcctgtacctcagtttcccaagagcgtctgcctggttggacaatacaggaagccatttttctgggtaggatcttggctcttaacttctctccccaccaccacccacagggggatgccaacagctataatgtgcgccgcacggaaggcttctccgtgaccctggatgaccttgctccggataccacgtacctggtgcaggtgcaggcgctgacgcaggagggccagggagccggcagcaaagtgcacgagttccagacactgtgtgagtcaggggaccctgaaccacgtcggacattgttggggag

SEQ ID NO: 29504 - DNA, 1715 bp, Mus musculus
ggaacctggtgctaaggaaagacaggtcaaccctcagagcttgccaccgagaaaataaagtgggggggggggttcctaagttaagattgtgctttggcttcgccctgcgtgtacacacgtgtgtacagccatacacatatgaacacaggcacacacacacacagagcacctatcccaggccccaccccccaccccacccccatgaagatttgattgagtgtatcacatcctcgactctgggtggcagaccatgctagaatatgaactctttagcctgcataaatggatgttcctcaccacaggtccgcaaaggcccctctatgtccggctttcctctctgcctcccagtcttgtctctgaccctccctctcttcctcttcatccacagagacatcaaaaggatcggagtgcgtcttcctggccaccagaagcgtattgcctacagcctgctgggactcaaggaccaggtcaacacagtggggattcctatctgagtccattggggccgtgcccaacaatacttgaagagccacagtggtctccctgccgacctggtgctggcccactggaactttatttatttctgtttcctcgtctatgcctccctgaggactctgcagggggcttttgaatgacaccctggcctgagcctgggaaacttggatgctggtcagggctctctttcccctgcaaaggacccagctaagcacttagcagtttgccatggccttcccagcatcccctgaggctaaagttccaccaagaccgtcgatatcgacgagggacatttccaaacggacctccccatcttcatttggcctcctgagaagccacctcaggagctgaggctaagcactaagcccaggaccatatgactagggcactgtacgccccgcccctagttagagggtaggttttggacttggctgggtgtggtcacagcaatctcccagtgccttttacagacccagggctctgccctccgccctcgagggccagcttcttgctttcctagggccctctcaggatgcttggctgtgctgaggtttttattaaatatatattttatacttgtggaaagaatgagtgtgtggcagggaccttgccagggctggagacagaggatcccctgcaacagacattcccgggctgggggctggcggacctgcaggagactttccgccagccacccagtctccagcccctttggacaaatgtcgctgtcagtgttacagatttcttttattgggttgtttttttgttgtattttttgaaccttaacttattattttttttatatttattgttagaaaatgacttatttctgctctggaataaagttgcagatggttcaaactgattttggctttcattcctggatgctcagtggggttctgccgacaaccttaggggtagagggggtcccccagaatccaagtgtttaaatagaactgcctctacaacaagggagggtgttgtttcacccttagagaaatgtgggagtgtacacacacacacacacacacacacacacacacacacacacacacccctggcctccacaccagcaggcctgatcacctttgatctctaggtttttgcagggctgggaggcagagagcagctgtcagcctccctcccaccctacgagtgtgtgaccattggaggggaggggagggggcctggcttcaaagcctatcacaagttttgtcatg

SEQ ID NO: 29505 - DNA, 1573 bp, Mus musculus
cctgcctacgtgcttcagatcttcccaccctgtgagttctccgagagtcacctctcccggctggcccctgacctccttgccagcatctccaacatctctcctcacctcatgattgtcattgcctcggtgtgaggctctgaacggtcgccacctcagggcattttcctgaggctctgctgcaaaaaaaaaaaaaaaaatgaacaccgtggacaacccagccaggcagagaggcaggctgccaggcgccaccagctgccccgcccttcggctgcccagctccgtggatagacctcctctgggggtggtgctgcttgtatgtttacatgaaattctcccaggacagaccaccaaccatggacacagagaccttaggggctgggcttctctccgcacatggagaacaggagccgggccctgggatccttctgttctgttaaacagaacagaacagcctttgcactaaattagtgactcgcgcagtgaacacaggctgcgatgctctggacatgtgtgcatgagcacgccgtggactctcgtgcaggacttgggactcgtgctgaagccttggggtcaaggaacatttcagtgggtttttgccccatctcctcctcccgtcccctgctcatgggacatgttatctttcttaattctcctgccgccgccgccaccaccaccaccaccaccaccaccaccaccttcagctcatcggatgtacagtttacagttgagtaacagtgaacggaaggattttctttcttggtcggatgtgcagaacttgggatgtgtatatataaatatataatatatataaatatatataatactgacttaaatcaaatttccctgacatacattttttttaatctgtgccaaaaatgtgttttcaaagaaaatcttattttcatactcaagactttgtaccgtcactcatttgtataagtgcgcttcgtcactgcacgggccctgctcctgcaacatggaactgtcgcgtagcacctgtacaagagacccggccactccactccctcctgtgacctggacctctccctgacttcctaacacttattaatttatgaaactgtttttctcagcgcagttttgttctgtgtgtccattggattacaaactttattaaaaaatacaaaacacctcaggtgtgaaggtggttgtcactcagtgggcgcctcggtttcttgacttgcacagcagaccccaccccacatccgggaacaaggagcctttcccctgtgctcagcctaggccactgggacggcaggcacctcagactctggtacatactgagaccctttctttctccgcccccttgctggctcctgctggtgccatcactccttgtagtggccaggagcccactattcctggggctaattctgtacctaccctcaagaagaagccgaggcaccaatgttttctggggaatgcagttgggactatagagcaggcctgcccaggtccctggggcccctgctcccttcctgtccccttgccatcctggtagcacactgcatgcagcagtgagtactgccacagcacggcgctgctgtggcctagg

SEQ ID NO: 29506 - DNA, 1231 bp, Mus musculus
gccccgccctgccagccctcccaactcagccagcctgcccagccaccgagtggcaagattcctcaggtctcccaagaagcaaaggggacgcagacaggaggggtggagcagactcgcctcccagccatccccacaaacaggccatctgagccacacgctcagcttcagagggcgccggtggaaacagcccagccagcccacccctcccctgtgtccgtctccatgaagccagacctcccaagccctctttcctctcaggctgccccaaagcagccattgtttgtccctgcaaactcaggcccaagcaccccacctggactggctctgcctcacgctgaagtccagccagctcccaaacaagagtcttctccacacgggacaccacaacggcctgtggatatggtccagctgctgaaggtaagatgcagaggctgctctaagtgttaacacaggctgctgtgggccatgctgggcatgccatgaccctgtctctgctctgtttatcctgctaagcagaagtaccccatcgtgtggcagggcctgctggccctcaagaacgacacggctgctgtgcagctccacttcgtctctggcaacaatgtcctggctcatcggtccctgcctctctctgaaggtggtcccccactgcggatcgcccagaggatgcgactagaggcctcacagctggaaggggtcgccaggagaatgacagtaagactcgagggctgggtaaatgcccatgcagttcaaaggaggcgggtgacgggggggacaagacgacacagcagtgatactctatagacgggcaagaagcaaaactctgcttggctagagagatacctctagacctcgtgtgcgtgcgctcacacatgcacacacatgctcgcaggtgcacatgtgtgttgtgacacaggcaccttagggcacttagttaggacccacactgtttagtcagaaggcccctaaccgttcccctctgctccaggtggaaaccgactactgcctgctgctggctctgccctgtggccgtgaccaggaggatgtggtgagccagaccgagtccctcaaggctgccttcatcacttacctgcaggccaagcaagcagcagggattatcaatgtccccaaccctggctccaatcaggttggtcattgtcccatccctaccacacaggtaggaccagtttagggctgggcaggagggctggtcttccggtggcatggatatttc

SEQ ID NO: 29507 - DNA, 1024 bp, Mus musculus
gaactcgcagaagatcacgttggcaaagccagctcctcagaccctgactggcctggtgagtgccctgactggtctggtgaatgtctctctggtcccggtgaatgccttaaagggccctgtgaagggctcagtagccaccctgaaaggtttggtgagcacccctgctgggcccgtgaatctcctaaaggggcccgtgaatgtcctcacggggcctgtcaatgtcctgactactcctgtgagtgccacagtgggcacggtgaacgctgcccccggccccgtgactgctgcctgtggcgtgacggccacaacaggcacagcagccgtgacgggtgcagtgactgccccagcagccaagggcaagcagcgggccagtagcaatgagaacagccgcttccaccctgggtccatgtcagtgattgatgaccgaccagcagacacgggctctggcgcggggctgcgggtgaatacatcagaaggggtcgtgctgctgagctactcgggacagaagacggaaggcccccagcggatcagtgctaagatcagccagatccctccagccagcgcaatggacatcgagtttcagcagtcagtatccaagtcccaagtgaaagcagactccatcaccccgacccagtctgcacccaaaggccctcagaccccttcagcctttgccaacgtggccgcccattctaccctggtactgactgcccagacatacaatgcctctcccgtgatctcctccgtgaagacggaccggccatccttggagaagcccgagcccattcacctctcggtgtccacccctgtgacccagggtggcacagtgaaggttctcacccagggcatcaacacccccccagtgctcgtccacaaccaacttgtcctcaccccgagcatcgtcaccaccaacaagaagcttgctgaccctgtcactctgaaaatcgagaccaaggtccttcagccagctaacctggggcccaccctcactccccaccacccccctgccctgcccagcaaactgcct

SEQ ID NO: 29508 - DNA, 2790 bp, Mus musculus
ggaagagaaacttggcattgacattgatcacacgcagagctaccggaaacagatggagcagagccgccggaagcagcggatggagatggagatcgccaaggctgagaagtttggcagtccgaagaaagatgtagatgactacgaaaggcgcagccttgtccacgaggtgggcaagccccctcaggatgtcactgatgactccccgcccagcaagaagcgaaggacggatcacgtggatttcgatatctgtaccaaaagagagagaaactaccgaagttcacgccagatcagcgaggactcagaaagaaccagctgctctccgagtgtccgccacggctccttccatgacgatgatgaccccaggggctcccctaggctagtgtcagtaaaagggtcccctaaaggggatgagaaaggcctcccctatcctaacgcagcagtgagagacgatccattaaaatgcaatccttacgattctggcaagagagaacagacagcagacacggccaaaatcaaactgtctgtcttgaattctgaaggggaaccaagccggtgggaccctccgatgaaacaggaccccagccggtttgatgtcagtttcccaaacagtgtaattaagagagacagtctacgaaagaggtctgtgcgcgatctggaacctggtgaggtgccctctgattctgatgaggacgccgagcacaggtcccagtcccccagagcttccagcttctatgacagccctcggctgtcttttttattgagggacagagaccaaaaactacgtgagcgagatgaaagactcgctagctctttagaaaggaataaattttactcttttgcactggataagacaatcacaccagacactaaagctttgcttgaaagagccaaatccctctcatcatcccgtgaagaaaattggtctttccttgactgggactcgcggtttgctaattttcgaaacaacaaagataaagaaaaggttgactcggcccccaggcctattccgtcctggtacatgaagaagaagaaaatcaggacggactcggaggggaaactggctgataaaaaggacgagcgcagggaggaggagcaggagaggcaggagttgttcgcctctcggttcttacacagctccatctttgagcaagactccaagaggctgcagcaccttgagaggaagagcgaggagcccgacctcccccccggggggctgtacggcaggcaggcgtctgagggtgcaaacagcacgagtgattcggtgcaggagccagtggtcctgttccacagcagattcatggagctgacgcggatgcagcagaaggagaaggagaaggaccagaagcccaaagaggctgagaagcaggaagagccggagactcatcccaagactccagagcctgctgcagagactaaagagccggagccgaaagcccctgtttcagctgggcttcctgccgtcaccgtcaccgtcgtgacaccagagccagcatcctccgcccctgagaaggctgaggaggcagcggaggctccttcaccagcaggagagaagcctgcagagcccgctcctgtctcggaagaaacaaagcttgtgtctgagcctgcgtctgtacccgtggagcagcccaggcagtcagatgtaccccccggagaggacagccgggatagccaggacagcgctgccttggcaccttcagctcctcaagaaagcgcagctactgacgccgtcccttgtgtgaatgctgaacctctgactcccggaaccacagtttcccaggtagaaagcagtgtagaccccaaacctagcagtccccagcccctttcaaaactgactcagaggtccgaggaagccgaagaggggaaagtggagaagccagacacaactccaagcactgagcctgacgccactcagaacgctggggttgcatcagaagctcagccccccgcttctgaagatgtagaagccaatcctccagtcgctgcaaaagacaggaagactaacaagagcaagcgttccaagacgtccgtccaggcggctgccgccagcgtcgtggagaagcctgtcaccaggaagagcgagaggatagaccgggaaaagctgaagaggtccagctctcctcgtggagaagcacagaagctgctggaactaaagatggaggcagagaagattacaaggactgcgtcgaaaagctctgggggagacacggagcaccctgagcctagcttgcctctcagcaggagcaggcgccggaacgtgaggagtgtttatgccaccatgaccgaccacgagagccggtccccggccaaggagcctgtggagcagcccagagtgaccaggaagagactggagcgggagctgcaggaggcggtggtacctcccaccacccctcggaggggaaggccccccaagacccgccggcgtgccgaggaagacggtgagcatgagaggaaagagcctgcagagacacccaggcccgctgagggctggcggtcaccgaggtctcagaagtcggcagctgctgctggaccccaagggaaaagggggaggaatgagcagaaggttgaggctgccgctgaggccggtgcccaggcgagcacgagggaaggtaaccctaagtccagaggcgagagagaggcagcaagtgagcccaaacgggacaggagagaccccagcacagacaagaacggacccgacaccttcccagttgaggtcctggagagaaaacctcctgagaaaacctacaaatcaaagaggggccgtgctcggagcacgaggtcagcgatggacag

SEQ ID NO: 29509 - DNA, 1231 bp, Mus musculus
agcaccccagaggcagaagcagggcatctctgtaacttggaagccagcctggcctacagagtgagttgcaggcccagagcttaatgaaaacctggcattttacacttgaatcttattaacggccagctttgaaatccttggtgcttcatttggcttaggagccactgctaaacacctgcgcgtggccaagtgactacgtaagcactagagggggccagagctgcctgtgtaagagaatttcactgtgcactgcgggctggcctggaacttgtacagttgagccaggtcccacgtgcggtcctcctgcctctgtcccttgagtcctggggttgcgggggtgggagtgcaagtgagaagacagaggagctaacataatctttctgatgtttggcagagaggaacgaagagggtcctatgagtacagtcaagaacggacatactatgaaaatgttcgcactccaggcacctaccctgaggactccaggagggactatccggctcgggggagagagttttactcggagtgggagacgtaccaaggagagtattatgactcccggtactatgatgagcctcgcgaatacagagaatataggagtgatccctatgagcaggatattcgggagtacagctataggcagcgagaacgagagcgagaacgggagagattcgaatctgaccgggaccacgagaggagacccatagagcgaagccagagtcccgtgcacttgcgtcgtccacagagccctggggtgtctcctgcgcattcggagagattgccaagtgactctgagaggaggctgtaccgccggtcctcggagcgcagcggcagctgcagctcagtgtcccccccacggtacgataagctggagaaggctcggctggagcgctacacaaaaaacgaaaaggcggacaaagagcgcactttcgatcccgagcgggtcgagagggagagacgaatagttcgcaaggagaagggagaaaaggacaaagctgagaggcagaagcggaaaggaaaggctcactcccctagttctcagccttcggaaaccgagcaggaaaatgaccgagagcagagccccgagaaaccgcggggctccaccaaactcagcagagacagggccgacaaggaagggccagccaagaaccgcctggagctcgtgccttgcgtggttctgacccgagtaaaggaaaaggagggcaaggtcatcgagcacccacccccagaaaa

SEQ ID NO: 29510 - DNA, 1159 bp, Mus musculus
atactctaaatacagtactttttcttagtcgcatccttgtgacttaggtttttgttgggactgacacacagaccagcagatgaagctcctgattggttgttgtgttgttttttccaggtggtgtttgaccgcttgaaaggcatggctctggttctctacagcgagatcgaggatgcacaggcggctgtcaaggagaccaagggcaggaaaattggtgggaataagattaaggtgtgcacagtgactaacaaaggccagaggctgcatgcacctatgcctttactgtgaaggtccacatagcatgacatgcaacagaagcaacaaacaaaatctattcagatctctgtccatatttaccttcgtaggtgaccagcatggagtgctttataaaacatgcttttatttgccctcagagtttaggagaactattagaattttcatgcttgctatttgtggacaaaatataagcccttctcgaaggctttctccttccctgagtgacagatgttcttacctgtactcttggtcagggaccccccttccccttcccgttacactgtgtgtctgtgtgcctgtggctcatttagtcagtcagcttccaaaaggaagctacctgtggctgtgtgtgtttgtttgtatgtgtgtgtgtgtgtgtgtgtgtgtgtggtattgtttagttataaaagctttctattcactggttgtttggcataattatgtattaagaactgatgattagactaaaatatagttatattttggcactaggacataaaagtgatgcttggcagcctgtaactggagctgtgttgtcctctgtgtcctgctataatggttattctgtctgcaaatttacctgcacggcaccttgcccgttgatagactgcctgtctgattgtcccaagcattcgccaactcagatctctctctctctctctctctctctctctctctctctctctctctctcattttttggttgtttgcattgcagggggagaaagtgtgtgtctcggccatgcgggagggaagggctgcactgtgtggctagccccaagcttctgatcgctaccatcctgtctcagcctctccttggtttggggattgcatcaaatccagccctctcattcctgattgggctctgggaccttaaaatgtat

SEQ ID NO: 29511 - DNA, 1173 bp, Mus musculus
tgctgctgtactttgttttctttctctttctggtcttcgttttgttttgtatttttcgagacagggtttttctgtgtagccctggctgtcctggaactcactctgtagaccaggctgcctcgaacgcacagagatctacctgcctctgcctcccgagtgctgggataaaaggtgagtaccaccatgcccagctcaggtattgtattaaagggtttggctctactaaagcttttttgaccataccaaagggaattacctctaagtagttcactaagtaggtaaccttttctttgttaagaatttctttttgtccggatttgaaatttgatttttttttttttttttttttttgagttgcacatagttgcttttctccaggagccttccgtgggcttgcctccattaaatgtggtctttgcacctgtagtttacagtgtgtgtgcgtacatgatcctctaagcagttactgagaatcgacttgtagtctttctccttggcttcttgttgccctgttgctgagtggtaccactgatgggctctttcaggacattgacattaagaaggtgaacggggtgcctcagtacgcgttcctgcagtactgtgatatcgctagtgtgtgtaaggccatcaagaagatggacggagagtaccttggaaataaccgcctcaaggtgagcagcttgcgtgaatcggaggttgttgctgtttgatttgctttaggcctgtagggccttactattttcgggctgcagaaggacagttacacttacacattgatttgaacacttgagggtgtggctcactggcaggtgacacatgctaacacgtgtgagctccttggttcagtagcccagttacagcacgcacgcacgtacccacacacagctgactcagcatttctatagaagtcgagctcttttggaaactttgtaattggatagtaattatgatctgtggtgatagaattttcccttttaatttcagctgggttttggaaagagcatgcctaccaactgtgtgtggttagatgggctttcttcaaatgtgtccgatcagtatttaactcggcatttctgccgatacggacctgtggtaaaggtaggtgcttgcgtttgactttgttttcttaatattttgtccttcggtttctctctctgctgttgatgtttcctt

SEQ ID NO: 29512 - DNA, 1254 bp, Mus musculus
ttacatagtaagaccctgtctaaaaataaacctcagctaaacagatagaacaagggactttcacattaaaatcagggtgcgagccaggcattgtgcgttgtgcattgtgcacttgcctgcaatcctgatgcttaagaccggaagtttaaggttatccttagctggatagggagttggaggttagcttaagctataggagacttttaaaaaggcaaacaacaaaaacagaagaaaggttgatgttaccacacacacacacacacacacacacacacgcaatcacacaatacacaccttttgatacaagttggaaaacccccaataaagggattaccacccagaaaggcccattatatagagaaagtaagtgtgcacgttcgtgccgtctggagtcaggtgagacgcctggcatgtgagtgtttgcttacaccgaggtttgtgctgctcagaaagaggcgaggcgtaaaggcagctctgacgtgaatgtttgcatgacttgcattcagttttgcgtgctcctttctgattaaatattttcccctcctaaatgcagggcttcagataacagggagcgtgcttatgaacatagtgcctatggacaccatgaacgggggacaggagcatttgatcggacaagacattacgatcaggattactatagagaccctcgagagcggactttacaacacgggctctattacacttctcggagtcgaagtccaaaccgctttgatgctcatgacccccgatacgaacctagggcccgggagcagtttacactgcccagtgtggtacacagggatatctacagggacgacattacccgggaggtacgaggcagaaggccagagcgcagttaccaacacagcaggagtcgctcaccacattcgtcccagtctagaaaccagtccccgcagaggctggctagccaagcgtccagacccaccaggtcccccagcggcagcggctccaggagtcgatcctccagtagtgactccatcagcagcagcagcagcagcagcagcaacactgacaggtaagttctcagctgctcatcggcgcgggtgagtgagctgtccacgtgttctcactcagtggtcggtggtaatggccataatacttcatgtttatgtaataataacttcatgtttaaataaatactaacttcatgtttaaagaaagtaatcttggatttttgtgtttaatgagtgacatgcagttaaccagagtctaagtgatggtctgtcagagctg

SEQ ID NO: 29513 - DNA, 2221 bp, Mus musculus
gacagggtaaggatagtttcaggaaatacaaacgagattaataaaataatgattgtttccaagtatataaaacatggaagagcaaaggagccttaacaatctgtgaggtagtgtgtgtgtgtgttttaaataggagttatttaaatagccattttggggaccagggaggtaacttagttttgtaaaatgcttaccgttcaaacatgaagacgtccctgagtgtgttcagtcccctgtaatctcattgctggatcacatctctccagatcaagtccagtgagatcccctagctcaggtacaaggaggtagaacaagaaacttgacttggctctctgcctctccacacagtaagcacatataagcagatacctccaacaaaaagctttgtaggttgtgttctatacatatataatataaattatcttaaaagaaaacattttgtaaaattattaattactctttggaaaattatcgatataaataactgcttctttttccctcccagatatggccgcgtggaaagtgtcaagattctccccaagcgggggtctgaaggaggagtggctgcctttgtggattttgtggacatcaaaagtgcacagaaagctcacaactccgtcaacaaaatgggagaccgagacctccgcacggattataatgagccaggaactattccgagtgctgcccggggactggacgagacagtttccatagcgtctcgtagtagagaggtttctgggttcagaggaagtgctggagggcctgcttatggtcccccaccatcacttcatgcacgagaaggacgctatgagcggagactcgatgggtaagttccaaggtttcggtaggcaggtattttgtatttgatgtggtgagaaacagaaactcgtatttaggggccccagatggatttaaagttttgggcattctcaatgtttcctgttttgggttggagacggaagttatttctatcccagtggctggtacctcactgaatcgtagaggatatttcctgcagcagcttggatatctaccgggagatcacatggcggaagagctcctgtagagcttcagttttggggttacctggcttctagaaggacgtgtcctccctttggatattatcaaggccttccttggatatatccttactaccagatggagctatttggctgctggttttgtcttcgggctatttggaatatatccggagtatcagagcctacaaagcttgtagaagctgatgagcacctctcggttttcagtgtgtgaagtctacaaacagattggattgtcacagagtatcttgcagatcactgattccctcacttggatgctacaaacaatacgccagcgtggagtggaaatgtgtgcgtgggtgaggaggaacgcaggctacccttgattcccattttggatctactcactttccgtggaattacacttgatggaattggggaaactgaggcgatggacatttctaaatgctggatatagccgttcctaactgctgggatgtatgggatgctatgagctcaagactccagtagccgagggaagaggattactgtcgcttccgccccgctgagggaactttagcttcggacggtccgatcagttgtggatacagcagtcagattgtctgggctggatgtctataaagtgaacagttaccagcaactttgttcctcactggttggaattatagagaaattttccttgtttccatctgcctggctcctctttagggatgcagattttttatgaatgtggatcaatttataattgtctactatctcaagaaagaagtctgggggtttaagagttacagtttgtttgggactccttgcttcctgtggaattctttgtctggtcactaagatttttttccttgtggttcatctaaatatcacttgacacccttgcccaccgaggaggtggattacccccgtaagaggggccaatgggggaagttatggtcacaattctctccctagatttaattgggattataggtcgtgtttccacagttggaaaaggttggtatgtcctgacctgtgtatattagcccctcttctaacccaagtcatactttctcttccccactaactctagatgcatttagtactaatagatgaatccgagactagcagttagatttcagctctgctcctctcgggcctgcctctgtgcttccctaatggataagaactgcacatac

SEQ ID NO: 29514 - DNA, 2341 bp, Mus musculus
cctggtctacagagtgagttccaggacagccagggctacacagagaaaccctgtctcgaaaaacaaaacaaaacaaaacaaaaagatcctatctttaaatgaagaaggtggggggagctgaggtcccctggggaagctccgtgctggcgggatccaggcttggagacacccacacttgcttctgtatccccaggactgcagcgtgctcctgtctgtggaacctaccgaccaaggctgctacccactgaatgaccacctcttctgcaagccctgtcacctgaagcggagtgctgctggttgctgctgaagagtcccgatagctggcccttccctgacttggtttcccctcctgacttttcttgagtactttctttttgaacctcactgggcaccagcacactgctcagcccatagtgtctaaatgcacagacaggcttgagacactgggctttggcctcctagtacacagcaccccccacccccagactttctactcctctcccttcattgaccaggaggcctctcaccaccagactgcaaccctggtccatctctagtgctgccctgacatgtttatggggacaggtctcaggatgatacctgtgtctctgaccatgatgcttagctgcctagcagaaggcgctgagacctcagcttagattgtagagctaagttgtttgaagtgcgccttctcagccactccaaaaagtattttttgagaatataagtgtgtagtagacatgatagcacacacctttaatcccagcacttgggaggcagaggcaggtggatttctatgttcaatctagtctgatctactaaaagattcaaaacaatattctttggatttgggggagagaaatctttgaatttttctctttttctttttttggtggggtaaaatcagtaaacatcttcccttggttcaggggctgcgaagatggctcggtgatgaagagcgagctcttgctcctcttgcggaggaccagagttcatttcccagcatccctcatggaggctcataactacctgtcctgcaactccagtttccggagagctggcgccctctgctggcctccttggaaccttaatgcatgtggtgtacacgcttacactcaggcacacacacatacattaaaaaaaaaaaaacaatttagccatgtctaatggcaaacacctttaatctcagtacttgggaggcagagacacatggatctctgcatttgaaggcagccacagctacaatcttaaaatgcacaaactactggggtttggtggtgcaaatctgtgatcccagtgctgggggaaattgccagaagcttgcgacctgcttagacttcatagaattcccaatcagttttggccacattcagagatttgtctcagaaaataataataaatcataagtgcatagaacgtgaggtagcggcgacccagccttccttcctgtagaatccgtgctgagctgggctcaggatgggagggaggatggtcacgtgcctctgcttgcttccacaccctgtgagctcctgtgaggggctcccagacctggattaagagcctttgatttgctaaggaacaagttcgaggctgagcctccttcctccagactttactggggctctggcctctacaagtgcgcgcacgcgcgcacacacacacacacacacacacaccaaagaggctagggaaagaagtcacatctctttggtctcccatgtgtgccacccagcctccacttcagctttgctgctaggctgcccgtaaccactgtctctgtgaagccacacctagaacattctccctcttaaggaaattcactttaaggcaggcaagatgattcagctggtagaggtgctggcttccaagtctgatggccggagtcctgtctctgggacccacagtgaaggagagagccaattctataagttgtcctctggtttacacctgcataccaagatacacgtttgtgcacacacatctaatagagataaaatgtaaagtagaaaaaaaatcatttttgtgctttgtaacttctaagttgcacacagaaaaaaataaacatatgttctttccttgtgtcttgtttttgtctggggtggggggagttggttgtttttatttgggggttttgtttcagtgagatagtgtcctgagtatcccaggctgaccttgaactaactatatcgtcctggattgccttgacttcatatcccttgtctccaactcctatattctggaattctaggaatcgaacccagagcctcatgaggcttcgttttaaatatatgggtaactgggggtggggggtgtcgcagtgatttgaatacacttagcatgt

SEQ ID NO: 29515 - DNA, 1175 bp, Mus musculus
tccacccccgccacaggtaaactttgagtgtccccaggcctcctcagcccgaggggtggggggagcttcccagaattaccaaggtggaggtgctttggttccttctgcttgaaggccatcagtctccaaagcccttccgagttccaaagctggtagaaactgggatttgtacaaagtaagttcaaggccggcctaagcaactgcatgagaccccctatctggaactaaaagaaagaaaagagattggggatagaggtagttcaaagatagagtccttgactagcaagcatgggaagagtcactttggtggagagagccccaggcacagagaagggatggttctggctcttgctgctcagcattcctgttgagctatagaagctgggtatttgctcctccagcctcagtttcctcatctgtacaatgggactaatcgtacttggagcccccctcagaaaaatagtcaagctgggaggatctggtgaggtccccaccagccgacttctcttctatctcctcatgtgtatctccctcccacccccaggctccatcaaagggatcgtctgtccaccctccgcctggtcacgccataccctcggaagaggagcttcctcctcctccagaagagcctgtcacacttccagagagagaagtgtccacgggtatggctgtgtgcttactctctgggtcttcaggggtcagaatgggcttcgcatgtgaagtgtgggagagcagggtcccgcccctgctcacatgacagcagggactgtctatacagtgtgtaactgctgaatctccatcgcagccatgtgcttgcttctggtttgctgataatgatgatgcttttgagatagggtctcatgtagtccaggctagccttgaatttgagatgtagccaaggctggccttctctttctccacctgcctcaggtagctgtcttcagacacaccagaagagggcatcagataccattacagatggttgtgagccaccatgtggttgctgggaattgaactcagaacctccagaggagcagtcagtgctcttaactactgagccttctctcctttctttctttctgagacagagtttctccctgtagtcctggctggacatccttaacccatgtttgtttgctttgagatctcactgtagccaaatctggacttcaact

SEQ ID NO: 29516 - DNA, 1282 bp, Mus musculus
accctccagagcagaactcagccaaggcctctgcagtgtgtgaaggagaatccagagcagaagtgattggtgttggggtgggcaaacaggattgctttacagaagtctaccagctccacaagacattattcaatcctccatttaagatagctggtatatgcattcctgaagcatagaaggaaagtagggtcttagtgatttctgagctgtactaggaatatgcttaaaagttgatcagtaattagactcgggggtccggggcttgtggaatgggggaggagggctgctaagttttaggttaccaagaaaaaaatggctcaacatgggagtttgtttacctgcaaagtttgaaccccagatcataaggcatagaacatgagtgcatcttacatagctctgtctgagaaagcaactaaagaaggttttgattggctaacttgggaaaggggtgcttccccttccatccttcctgtcaggtgatgggcagtgattgtacttaagagtttggttgccccaaacctgccaactaaaatgagtgtgtctgtgacctgcagaatagacctgtgttcctacaggagccaaccagatatgtgttcacaggctccttgagcagcccttacaacctggaagacatgtggcctcacactcttaacacgggaagactgaggctgtgctcctccctgcatcccctgggcgtcccttccttctggcgagacattagagggaatctgttgtgttgagtgactctcccttacatgcaccttgcatgggaaaccaatagtgcatttgtatccagatctcttcatggcaagcagggcccgatggcttcaatgccccccccccccaaaagcttcagcccccagtaaaggctccctggctctctaccgcagcggcagattgaaactagggagcctctttggcttcttgcagttgcctgagtgtcatgaggtttttctggcttggacactacttcatcttttgagatctggtctggttagcaaaacctgcttgccagtggccctcccagccacggtcagatgctttgagagtctgggagactgagaactgcgaagatgctctcaggaatcccgacgtcagttgctgtttgtgctggttagaactgtctgcagccgaacgcgctagatgcctttttgcatttgagtttgttttggtttggtttttgtcatactttgaaatgtaagtcagccctgatgatccaaacacttttattttatttttcttctttaataggaactttctgaagaaaacgtgatgtgtaaaa

SEQ ID NO: 29517 - DNA, 1282 bp, Mus musculus; identical to SEQ ID NO: 29516

SEQ ID NO: 29518 - DNA, 1196 bp, Mus musculus
aaaatctgcaagcaaaatgttgagccagattttttttttgccggccaaagtaatttatgatcttttgtctgaatttgtctattctacttgttaacatttgggccttttaaatgtattggcagtgtgtgcatacaaagctttttattctcatgacgatgatgtattctggaataaagcagatggttttgtgtatagcataccattttagaatgagtgagtgctttgaaagcaggagtcatgaggaacctgccatctacggagctaggacagatcagctgcccgccgtggctctggctgtgctgtgtgcaggggatggcttttaacaggaagctggagaagataataacttctagagttgtatgttttgagaaggagaagataataacttctagagttgtatgttttgatttgtgtgctcagggttgacatttaagtagggcgagcgggagggcttacaccttgggctaccttgtttgtacatcataggttgctgcatggactgattgccaaataccttcatgaccatgggaagggtgtggggaaattcacattagcgtgaaacctggtgctacttgtattttaaaagggaaaggaaaaaatcgcgatcataattccatttgtaaatgtcaaggactgagctaaagataatggcttagacagacactggcgtgtactagagacagggtcgaggcgtctcactgacaccccagccctcccagtgatcagggctgaccgccaggagcctgctggctgtgcagactctgttaggaagacttctgctaggaagttcttctcatgctcagtcggagctgagtgagacagcgagcaagtgctgggagagccttttgtccctggcccctctctcggtacttgtttgtgagcgcccctcatggcggtggaaatacaatggaagttctgacaacagtggccttggtgcagtcttcatccctttctttcctcaggagtttcctttctaagcaggatccatgtttgtgttcatcaagttgagctagagtggggcagaatgtgtagctgtgtttgttgtggcctttttagtgtaagccctcgccttgcaagtctctgtccgtgggccccactgtgcaataatcactctggataggtttgaaagaatcctttcctggaatataaactgttgtcttaggtgtctggcaggaatctgtaatcttacttttctt

SEQ ID NO: 29519 - DNA, 1196 bp, Mus musculus; identical to SEQ ID NO: 29518

SEQ ID NO: 29520 - DNA, 1668 bp, Mus musculus
tggaggctacgaaggcttcagctgaattccagacaaactctaagaaaacagaccctcctcctctgcaggttcttcctgaccttgcttcctcagcagagcagagtctagccatgcctttccataagtcatcaaaagaagccgttgttgcaggtaatctggagaaatctgttgagaaaggaacccagggcctcagagtgtatctccacacaagacaggacgctagtttaactctcacaactactgggatgcgggagccacagatatttgcggaggaaaagagttggcatccagaaaatcagaccccaagtcccgtgaacggccttcagcagcacagagaaacagggagtgtacagcgagaggctggacagcagagtgttccacaggaccagggctgtctttgtgacgcagaagaccttgagcttcatgaagaagttgtcagtttggaagctctgaggaaaggtgagctacaaagacacgctcatcttcccagtgcagagaagggtcttccagcttcaggactctgtagctgtccatgctcagaagccctgatggaagtagatacagctgaacagtctctggttgctatgtgcagctcaacaggcaggcaggatgccgtcatcaagagccctagtgtagcacatctcgcttcagataatcccactatggaagtggagacattacagtctaacccgtcctgtgagcctgtggaacattccatcttgactcgggaattgcagctcccagaagataatgttgacatgtctacaatggataacaaagatgacaattcctcttcccttctaagtggccacggtcagccctctgtggaatcagcagaagaattttgttcatctgtcacagtggccttgaaagaactccatgagcttttggtcattagctgtaagccagcttcagaagagtcacctgagcatgttacctgtcagtcagagataggagctgagagccaaccaagtgtttcagacctttcaggaagaagggtccaaagtgtgcatttgacccctagtgaccagtactcacaaggctcctgtcaccaggccacctctgaatcaggaaagacagaaatcgtaggaactgccccttgtgctgcggtagaagatgaagcatccactagctttgaaggtctgggtgatggcttgtcacctgaccgagaagatgtccgcagatcaacagagtcagccaggaagagctgttctgtcgccataacctcagctaaactgtctgagcagttgccctgcacctcaggggtagaaatagcacctgaacttgcagcaagtgagggtgcccacagtcagccttcagagcatgtgcataatccaggcccagacaggccggagaccagcagtgtctgccctggagctgggttgccccgtagtggattggaccaacctcccacacagtccttgtccaccccctccgttcttccaccgttcatctttcctgctgcagatgttgacaggattcttggtgccggcttcactctgcaggaagcgctcggggctctgcatcgagttggtgggaatgcagaccttgcccttcttgttttgttagcaaagaacattgtagtcccaacataattgtgggaagtgggctaggccacacgtcattccttttgaaaaagcccttttcacacaaatatactacacacac

SEQ ID NO: 29521 - DNA, 1668 bp, Mus musculus; identical to SEQ ID NO: 29520

SEQ ID NO: 29522 - DNA, 1229 bp, Mus musculus
tgtccgtgttaggttaggtaagtggtctaccactgggctatactgtcccaacactgacacacctgtaattccaggaggctgaaggagggtcacatgatcacatgattaagactatacagggagtgagaccctgactcggcaagcaagaaaatgagatgttggcgtataaggcgctgctgcataacctaacatttccatcttcactggggcagcgttgccccacacaagcttattttctgttggtggagtttttaagtagcctttagttactctataaacaacatactcttttctctcagtcatacttctgtactttggtagactctggtgtgaatttcaatatcaggggtgtcagtgcacatctgaaatccctgaacatgagggtggatccaggaggaacagcaagggctttacaaaataaacaaagaaaaagctaggcaggatgatgttacgtggcttatgttttacagtctgatatttctctctcccttcaggagcccagatgactattatgagccaggcctgtgcagaaaggtgtaacataatgagactggtagatcgtcggtgggctggcattgccaaaggagtaggcacacagaagattattggaagggtgcatctaggtgagtgaaggtgggcagtttgctgctttttaaaatagggattttgtagtgtagtgagttttaaagttctttcacagtacctctgactggtatggcatgtccttgagagcaagtgggtgtgtccttgtgtacgggtgcccctctgcaggtcagagggcagcactggggattggtgctcacccttccacaagtccctgttcttgatttcaggttgccaggcttttgtggcaagcaagttacttgttaagacaccttgctgactctgggtgtggcttctttccctctagcttgacttggtcaaaggtcaagctgcgttttggtcaaaggcactgcattttgatctcccggttgtcatcatagctgtggagatgcttagtgttcttgggctatgtggccctctctcctctcagctccctggagggtgtttccatgtgcctgagtatggttcttcttcatttcttgtactcaagtgttggtggattttttagtctggaataccagttccatgatggaagccggtgccttagcacatgctaagcgcactctaccaccaggctgtcctccagccctccttggtgcattcccgtgtgattcactcaaaatatt

SEQ ID NO: 29523 - DNA, 1170 bp, Mus musculus
tttactacctgggagaatgcagatttgcggttgaaagtgaggggaaaaagtttgagactcactctgccattgacgtctctggaaatgcatacatttttggttaatttattatatatgtatacacacacacacatatatatatgtcatatattaattaaagtaatggttaggttaactcagtctgtctgcttctctcaggccaaagccctcctcctttctgggcccagtttagttgggtcagttcaaagctcagtgctttcgaaggatattagcttgaaaatggcctactgtctgaagacccccgagggattcggcggccaggagttcagccttctcatgttttaacaagaaaatatattctcaaaatgctttggtgtccttagtagacttcatcaaacaataggtggactattttgtaacctttgcactaaatcccttaagattctaaccaaagtggcccccgctgggtgtagtctaaacaccagaaaattatagacagctcccaaggccccagaatgtaaatcttgatttccttctgcaattatgaaatagttccaaaaactgttgcccaacgactgcctgttctgtcctgacttacggtaaactctgcgtgtcaatattgtgttcagaagtaccattccttcacacaatgtgaactttagaaccttggcatgcagctctttctggaaggatctattttagggaaggaggtgtcactcacatacgcggtctggcaaaagttgggaataaacagttcccccaatttccacagaaaaattaacccacaaaaacctaggaccccattcctgttggtcagcctcctcatacaggtagcaggggcaagctaggaccagggagtttggggggctgggggagatttgactttttagaggattgattaattgctggttgttgtttgttttgtttttaaggcaggtctcactatataaaacactggctcccatctacactcagagatccctgttgactttgcctcccaaatgtttggagttaaggcctgagccatcacaaccagctgcttttggtttttgtttgtttgctttggttttttttgttgttgttgttgggttttttgttgttgttgttgtttttgagacaaggtctcaactgtggggtcaaggctagtctcagacagcagccctcctgctt

SEQ ID NO: 29524 - DNA, 1328 bp, Mus musculus
ggcttgaccctgagccgtgcctggaccaacctcaggatcttcatgagcctgtctcatggggtgggtcactcacctctcccccagcccctgcagcaggctcctgctggcccctgcttggcctctgccaaggtgtgtgctctcaacacgggaagccaccacggcttctaggtcctccgtcttcaaaagaggcctagtgtgcaagcagttttctatgtggttgtgcttctgggagcaagcagtgagaagtatattttgggggtatcccccacaacagtcggccaagcatggttttgagaagaaaggggtgagcagggggtgaaggtgcagcattcacatttagtctcccgaccgagagggagggtgagcactggctggaggcgcagagccctgtgaccctgcgtgcacttccctgcccgtccccttccctcaccgcactctgtcagcaccagcacagccagggtgtctgccttgccagcactggagtggctgagctgctgacctgtccccagaggcctttttgcttctgggttttagagtttgatactaggagccatatcctgtgatcttgttctctgaacatagataagctgctatagagccagtagatttaagatggcagcacttagtcctacccaccaagagctaggtgcaggagcccttcctgcctcgctctccagtaaaacgccaggtgtgtcttcataccaaggaacctgacctctctgacaattgcattttgaacattgttgtccccaaagagctgaatcttcaggtcgtctcttgtgactgtgagcggagacttgtccggactcctgtcagtaggcagctagctagcatcctccttctggcgtccctgcttcactgtttcctccttcccttattgctgcttcccgctgccagatcacacccatcagctccagttcgcctggctccacgcaccttgagctcagggccggatcatgctcgcccgctcaagggcatacccttgtttttagagccaacccatgaggggagtttggacaactgtcacacatgatgtgttctactgtcaagcaagtgcccttttgtaaagggaagggcacaaatcagggaccggacattcactcagtgagtattctccagttgtaattgctttgaaccaagcacctcggatcctgactactttaaacactgagctccagtggtaagtgagaaattatttgaacccaggaactctgtagttttcaaagagtctttagctttattaaaaagtaaagaaaacactgccaggcttcattcttccatctgcccctctagcagtacatgccgattctccatggttctcgtgtgcc

SEQ ID NO: 29525 - DNA, 2695 bp, Mus musculus
agtccaattagaactgtggatttatgtatcagaaaacttgaccaggtggtggtggtacactcctttaatcccagcactttggagtcagaagcaggaagagctccgagtctgaggccagcctggtctacagagcgacttccaggtcagccagggctacacagagaaaccctgtctcaaaatcaaacaaccaagcccaaaaccaaaccaaaccttgaattttcccttcttttacagtagctaatgggtttattctgtaatccacctcaggatgttgtaggtggcattgccttcagatggccccttcagtggccctctccttgggagccctcctcagccattgtgtcagctaaggacactgcacccacagatacccccgttcttctgttttgcaggttgccaatgctgtttctgcgaaagggacttacaagcagattcctggctgttttaacttcctccggaaaaagctgttttttaaaacttcatgaggctcggggctgctctctgcctcattattctctccgaagctctcatggcttggagctggccaaggccataactgtcctgctaagataggattttgaactggggcaggctgctctttccctttggcgatgcaaacatgctcctagcagctttcaggttgtagggcaatgtggagcagtggtcggaagaagaccggagtgcaatggatgctgcctggccccttcatctgtggttagggattgtgccctgggactcccaggcctctcaagaacagggcttctctgccactgtactactgacatgtgcggttgtataatcctgtcatgggactgcctcgtgtattgtagagggttttaagctgtctctgtcctctacctgccagctgccaggagcacccctcctgagatctgccaaccaaaaatgtcttcagacattgtcacatgtgccctgggggacattatagcactcctctctgctcccccacccgggggggggtcatcaaccacaggggtctatgcatctctcctttccagactcaaagtccagctggcccagtgtgcatacctggatctgggctgcatctcttccaagttaccagaagggctaattcttccttgagaacattatttattcttcaacaataaatcttcggcaataggactgtatttagcctgtattgtccctaccccaactctgtccttcttacaaaggagacatgatttttcctgcgtttttctctgtgtcttccaaggtccctgcccgagcccagcaggtgaccgagataggagtcaggagtccccacagatcaagtctcctgtctgaaggatcttggttaccctagtggggacaccaggacagagctctgctgtttggggtctcccaatctcccattgtcttccttgctaagtgagcctggtccccaggtggcagtgaccaggcagtactgaagtgctgggacttccttgaaaatgtgccctcccctgtctttaaagcgattctgcctttcacttatttttctttctttctggtttcctctactctttgctttgtgaaagtccacttgagtttagatggtagatgtgccaagccttgtttgtttatttttgagctagggtcttactttgtagcccaggctgaccacaaaatctccataccactgcctcctgggtaccaggattatagcttgtcccactgccccaatctcctcctgaaagagcattgctttcagggccccgaggttagggtatcggggtaagaagacagactcattcaaggatgtgattcttaaattactttattactatttcttttctatggcatttccagggggacagtggcagtaatgtcttcagttagttccttgccatcacctgcaggacacacaggagagagaggaggttagctggaacactgggcattgagttcagtgactctcagggccaagaggggtcaagaagggtcttagcccggaatcctgcttgggtatcaggccaggaaggcccggaatcaccaatcattacatgccaaatgcaccgatgggtatgttttggttttttttttttcatgttgtctgtttctttgttgttgttgttgttgttgttttccctgagactgggtctctctgtgtagccctggctgtcccagaactcaccatgaagacaagactggccttgaactcagagatccgcctgcccttgcctctgagtagtggtcttaaaagtgtggaccagtgcacaggcccctcacagttcagaatggcaggtgccagctgagttcattaaacaaggaaaatgtgttgatggcttatggtgagcagaccatctacacatgcagttgtgggcgtttctttgttgtttgttttgaggctgggactcactatgtagcctaggctggccttattaccaccatacttggcttcatttggttggttggttttgtttgagacactgtctcatgtagcccaggctgcccttaaaacaatcctcctgcctcttattcccaagttctggccattatgcatctttaccaccatctctgccaatacaggatcctttgttttgttttgttttgttttgttttgcagttttggcgtctatgcacacaaggcccaggtgagcacagagcatacaattgacagcgattgcctctgtggattgggcgcaaaggttaaagccaggggaatcttcatttcttacgtgatacactcttgtgt

SEQ ID NO: 29526 - DNA, 1188 bp, Mus musculus
cctgccatggtccagcagagagtgagaccctccccaggacgcttcctttcagatcaggccccatctctgatggaagtggagagactcttctattagtgaggagatccggggactcctacattagtgaggagatccaggccctagcactctaagctgatttcaatggggcccagccaggcagggtgaaggccactgtgcgaatctacctcacaggctacactctgccaggcatgccttggggatgtgagtgatagggttccgaggggaggggcagaaatgtcaccctctgacagcctacccccgcagcaagctgagggtcccaaggggctgtggagagaggggtggggtccctaagggattggccttttcagggtggacctcagcactctgccttgactccccaaggagtgcctgacgtgtttatgttcactggcagtaggactcggggccggcacccctttcacactctccttccttgggtttgtcacccgtgatggcaccagcctgtcgtgcccacccgtagactcgcatggggactccccaggccacagtgaaacccgtgccgttcctctatagctccatgtgcttgctcacgtgtgtgtatgtgcgtgtccgttgctgtgttgtgaaactgtgacgtcacccagtctaagtgaatggccaccggggccaccgttatgcaatgttcagcgtgtcactgcttgtgaagctcgataactctttattttactacaatgtccccagagtccctgggacccctgtgggacttgcaaaggttttattttttcggtcttagaacctatgagaatcggaggggccgagccaagcccagcccagcccagctgccgtggccttggcttgcgtttgcctcagcggatatgtttatacagatgaatataaattctctttacttttggctgtttgcattttatttttggttccccctctcagtacctcccaaaaaaagaaaaaaagaaaaaaactacttcttcattcggtggtacgattattttttttaactaaaatgagataaaattctatattcttatgtgtgtgtggtttttgatgactaactagaaacaaaggtggacaggatcaggatgaggtcgctggatctgggccgtcacatcaggagcctggggaggaaggcactcctgctggagagctctgtcccttagcatctacaaa

SEQ ID NO: 29527 - DNA, 1145 bp, Mus musculus
tgaacgtgccacttaagtcttaaaaaaaagtgtgtcttaaaaggcacacgcctttaatcccagcacttgggaggcagaggcaggtggatttctgagttcaaggccagcctggtctacaaggtaagtttcagatagccagggctacacagagaaaccctgtctcaaaaaaaaaaaaaaaaaaggtaacttataaagccttttttcctattccccattctagactgaaagtataattctctgtgacattacaggactatacctctggtccctctctcctatctgcatctgtccctagcttgcctgtaacagaactttacaaagctgtgataacctggaatttatgaacattctataaaagacacagcaaagataacggccaacggtgcctacaaagtcacagacactctgggaatttgtagattgctcaacagcatcctcgaagccaacggaggacagggagcaaaataaaacaaccagaatacaattttggaagcagaaatcatggcgtggcttttctgggttataaatcttctcaggaagacgaaaggaagaaaacttcagataagacggtgtggcgcccggagataagcctcagcgctgcggagaattcagaaacggtgtgcagcttcaaaagcaggcaaatgtcctcagtagctgtccttgggctgtcatagctgaacataccttcgacgacagtgcccagcccaaaacagtcaccagcgtctgtgaggaaaatgcagagcatctgtgaggccactgcagagacctaaaacttacttattgaggaaaatccaataagccgtgtggctagtgtttgcatgggaacgaggggggatttgatgtaagctagtacttaaatgtagccatgacatcgaattttctgcttccttcaaaaattaaatgatagagatcgagagctgaaatctcttgttcctgataaatttcttgtttgtttaaaaaaatcgaatcccaaggactagaccacaagttattttgttgttgttagtttggggtttctgtttgttttaggtacaagcacgccatgcaagcctttgtggagagtaaattcagttttgtgtcagagtctgcataaaggcagccgagaaagacgggtcttacaggagaggccacagaaggaagacaac

SEQ ID NO: 29528 - DNA, 1180 bp, Mus musculus
gacagcctgtcattaatctgacaaacctctcttgtgatgtccctgtcagctgagacaggtaagctcacccatgagctaacggaggtgcaaatcctacaaaacaaggtcaccccggttgtcagagtagggcctttctagccgctgtcctgatctgccagtgtttttgctgtgtggcttcccctcaatggcctcacctctctgtgcctcagtgtcttacctgtcatacttccggttcctcccagaggagctgtgaggattaacattcactaacatttgtcccgagctttgaacctctcaggaaacagctggaagggatggggcaggggaggaaggagcctaacttccatccacaacattggcagacaccgggcgagttcaccccatttttggatagggagataagcaagaggggcttgcagaaagtttaatatcgagagtttccaaaagccatcggtgaggtctgggagagccaccagcacagcctgcgggcctactgggtgcagggtccaagctgactgagcagagcctgcctattgatgatagggaggatttcggtgtagctgtgctcagtcagtaccagctctcctcagattcccacagctgacggcagtcggtgggggtgggggtggggcactgcctctgagtcaccaaagccagtcttctgcattgtttctgagagcttccctttgcgggaagaccacaggaagcctgagaacttggaggaggattccctgagtcccccaggtccagtctccttcccaacctgagtccagggccctcggggactgggaggaacctctctgtctgagtgtcagcctccgaaggacacacggcggacaccaggacttgcagggtcaacctctggggtagaatccagcttggctcaggctccacatccctgagtgtttataacacgcattcccctgcccctggaatcctgaagctacaaatcccttagcccagcaaagagaggggaagaaggtcctcttctaattgaagccagctgtcactttcacaccaagtccccaaagggtgacaaagcttctggagccaggaggatactgagagccttcctggaaatgtcgctggcgatgtgggctcctttcaagggccaaggtctaggtagggagagactcacactttcttcccacgggctcggaggcccacggcatctgaaggc

SEQ ID NO: 29529 - DNA, 1693 bp, Mus musculus
agccgctactcttactgcagcccatgtcgccaagaacgtggtctgtttttcatgttcccctcctcccgacccttcttcggtgtgaacgtgtgggaccagaccctgttctcggggtgtgcccgagtcactttaaccacaaaaacaccccgccatcgtcgtcagggtaaggtcactctgcagagactctcgtgagcacatccaagacttcttggctgggctgcagtgtttataagggggtcatatgggctctttttaatggcctgcctgtttttaaattgtgttgctgtttctttctttatggaacaaaaagagagaaagaaaactgttgcatttaatttatttgcacaaatgcagaaaacgtattctatctaaattattacataaatattggaatgtatatttttccacggggtgggcgggaggcgggcatttctgcggacttgtctgttctgtgttcatgccgctgcagacactgtgcaaggtagaattcaggtggctagagctggggacctcagacgaccagcttgcttatttcttttttttttctcttttttctgtctctcccggctgctgtccctgcatgagagaactcccaccttctgctctggcctttctctctacatgtatcctctctttatatatatatatttatttatctgacatgcagatcgtgacttaagtgagcagagcgccaacagtcacgttcccccctctcttggacctgtctttggagtcatgtggattgagtgcagggaaggatagcctgagatagcctggggcacatccgtggaggtctaaccagacatctgggcttgagtcagtgggtaagaggcccccggtggtgcacacaatgcctctccatccttagtttattccagacgtaggccaggccggtgtcaatagagaagatgcccacctcctgggaagggctgttggggacagtatctagcaggcaagccctctgccctcttttgtcctgttggcttctttggccacgcgtggactttcccatgatccccagagccctgtcctctgattatatcagcagctcgagcagactaagcccaagagggctggcaggtgcctgtacctgtgcctgtttgtggggcatcactgtccccacggggctgcactggggcctggagaacccacaagtttccagtcagtgcttactgccctactccccggaactcagtttcctctttctttccctccccgtcccctctaactgatcctaaaccactaacaactcatccctcatcccttgtggccactgcagtgctccccctaacggaaacattctccactcttgaaaagtgagttttcagtgcttgatggaacatctggaatgtataggatcttgtgtccaaagtctctaaaaaacaagccaaaaagcccccaccaggtcacctcttccctcccaacctggccccagaggcagagagagagagcaagcagggacacctaatgccaccctgtgtgtacaaaccgttcagctcagctgattaacccagcctggtgttaagggagagaggccagagctggtcttagaaaacactacccccaccccctgaattttttgggttttattttattttgttttttatggttccgccctcccttccttttacttacaagaagataagattgcaacctctcctggtaatgacttagtcattctttttcatttcag

SEQ ID NO: 29530 - DNA, 1159 bp, Mus musculus
tgctccaagaggcaggtgcatctctgagttcaaggtcatcctggtttacaatagtgagtttcaggccagggctatgtagagagactctgtctcaaaaattattagttattacttttattaattattattagttgtgtgtgtttattattgttaagtgtgtgtgtgtgtgtgtgtgtgtgtgtgtacatatgatgtagtgcatgtgtggcacacagaggacagcttttgtggagtctgttctctcattcaaccttgacatgggttatagggttcatgtcaccaggattgcacaacaaatgttctagccactgaactatcttcaagccaagatagtttgctctgaagcccaggtactgtcataacaatacaagctacccctgatttgcctggggtttcttagttcatttgcaaactctgtgaggccatttgctagatgccatggtttgcaggtctgtcattctttcaagcaccagtttctgcaagttgtctgcagacctctacaaacatctcccaacatgcaagtaaatagatacagataggaatttttaagtggatagtttagctgacaactgaaacacctaactatttcccatcaaccttttcccctcagttttcctatcccacctctgtatgcagcaaagaaccatttgattataagacatatatgagggggttcaaagttattgatcaattttactgcttcagtaagcacacccttttttattttattttattttattttattttattttatttgtgaatttattgaaccagggactggtgtatgcttgcctatagatcctacagctgagttatgatcacattgttatcaaaggcactcttaagttctctctctcccccctaacccccctccctgtgcgtgtatgtgtgtgtggggggtggggtggggggatgtttgtgcatgtgtacactcccagaagcccacatgcaaaggccagagactggtgtttgttgtctttcttagtggctctccactttgtttcttgaggcagagtctcgtactgagcctgaaacttgatgttttctctgactggctccctgtctctaccctgtgagcgactatgtctgtcttttttatgtgcatgctgtgggatttgaactcaggttccccgtgcttgcatagcaagcgtttttaact

SEQ ID NO: 29531 - DNA, 1118 bp, Mus musculus
tctgcagagttcacacttgagatctgggcagtccagttataaaacgtaaagaattgcaaacaaacaaataaacaaacaaaaagcccatgttttaagtcagtttatggtttgcgtgctgtacctgaggactggaggttgaacgtagagtctatcgtacgttcctgggacaggaacaaaagctagacaggtagaaaagctttgtccctgaagccagaactggcctgatacttagaccaccacgacacacagagcaggaaaggtttctcaggtgtgggaggggggagcgtttgagcctcctggtccacgagacactatgcaaggggccacagtggaggatggaaggttgtccttgccaggagcctggtcacatatcgcgacagggtgaggagtctggaagatgaacttccttgctctcccaggtgcagctctcacagcgtgaagggaaggggattttgctggctgatgagccgcctgggtcacagcagcgttccctgaccctagctttggtatgcatggctcactaagcagatgaccatatgatatttcattgacatgcccaggatgcacaaggagtctctgggaggatagcgtgtgtgactctgaaggccacttccttggcaggaatcttattttgtcagtgtctttgttaggatttctatggctgtgaagagacaccatgaccatggcaactcttataaagaaaaaaaaaatgtgtctggctgactgttcagaggttttagtccattatcatcatggtagggagtatggttgactgcaggcacacatgctgttggagaagtagctgagggttttacatcccgatcagcaggcagcaggaagagagaaggaccattgaacctggcttgggtttctgaaactccagtgttatacttcctactccaacaaggccacacctcctaagagtgccgctctctatgagcctctgggggccattttcattctgaccactgcactcaggttattgtgaccctgactactggtggtggtggatattgtggcccagctggtacaaggtagttggatgcttgggaagccacttctcatccagaggtccatctgacctaggtcacctccttttgaaacctcaaagcccactc

SEQ ID NO: 29532 - DNA, 1217 bp, Mus musculus
cgagcagacacgtttttgccccagcagataagccaagacatcattaaagctggccaaagcagtcaccaaggagccctgtgttggatttgagtcactaagggcttaaaccctccagagaggggaggcaggctggggaggtgtgcacgagtgtgtgcatgtgcgcgtgtgtcgttattttaatggagttactctcagtaaaggcgttggatgtcatgtgtatcagatgagtaccttccagggaggggggacgtcgggatcaccaccaattcccaaggaccacttcccctgcagtccctgtgcgagccttcgcggtggtagagacttcaggctttctctcgtctgctgcttggatgctttcaaaagaggccagatggaggaggactctgctcagggtgattcctctcagctcctgcccaatatccacggccctgcagacgctgtagaaacccctgatctggaaggaattcccagccaggtgggaactgcaggtatgtgagacctgatgtctcagccctggcctggagacactgaatcctggctgtggagagggagcagggagggcagtgtggtatccgtccctagggtgcatgctggatttgcgggactatgccagggaacacccaccacctggcacctggcggcagatctgcaggtgcctggattaggaaggtggcacaggctagtttgggccgtaactttatctcaggcattgaatgcgtttcatgccttttagttgtgtagaagctccaaaaggctatccctggagaatgacaaagaaggcgcaaacaacagcccagtctcctgggagctctgttcccacacctacctacacagccctggcaccgggctcctaactttgaaaccctgtgcagccaggcggggaggaatgtgccctttcctcaggacaaggaagaatgtgttctctccttagggcagggcttgctaatgccaagctcattctctgggggccagccgagattcaagtttttgctctgatacatgcgctagggtctgttgattcccatggcattctccccatcttacagatgaaaccattgaggcctaaagaagttattatatactaaatatctgttccagattgccttcgtctgcaaggcagaattcttggtagtttggcccacagcagaagttgagatcctggaaacaatgggcttttctttctgtctttctgggtttttttgtttgtttggttggtt

SEQ ID NO: 29533 - DNA, 1218 bp, Mus musculus
catttagtagaagcagtgtctagggacgctggggtggagatgtgactctcctgtgcccttctttgtctcccatggtgggacccactacaccattagcatctgacccttgcaagttagctgcaaagtgaagcaaaggaaaaaaaataataaaaagggaaataaaaagtatatggatgggttcaaacaaacaaaaaccaggaggatttgaacgggtgattttcagatgccataaaaccgcttgccaggggagggcagggctgacctctgacctctgctgtggtggacagttggagcccggcagaaacacggaccttgctcactgaggtccttgggttttgtgcctttggggcggaggatgcctgagacgattttggtaatgtttcctcagctccgatctggtccctacctgtcaaagtgggaggacagaacttgggagagttgtcacacaagagaggggctgtctttttcagggctactatggttgatattgcaactctgtagatatgtatgtagacacttttaaaagcacgtatttatggaccctgctgtaaatgccccatttttaaagttttataacatgtgttatttaattaatcagttgactggctgcagtaaggggactgactggtccaggaaaaagggtccctggagaccctcacatgggcaggaaaacatccatcaacgtccagtgtcacagttttccgatttacccacccagccagactctggcgtgcccctcttttatttcttcaactggaattttctccttctacgcaccctgcagttagtcctcgaaagcatggactcatggctgtcgccaaccccactgacacagtctgtcctacagctggtcgcgtgcactgtatcccagccacgccctgcagccgggaaaaaccgcacgaacccaaagccttagcaaactgctttcagtcaaacttggaaaatgttgctgggctcgtgggggattctctctctctctctctctctctctctctctctctctctctctctctctctctctctctctctctccctccctccctccctccctccctccctctctttgcatgtgcaaactgtgctgggtcacccttcaacacttcccagattgtcaggaaaacaaagagaaagttttgtcagacgaggtgtttcctggtcagtggcggtcttcccaagctagcggatttccgtcccagtgaagaagattcagtattctgc

SEQ ID NO: 29534 - DNA, 2160 bp, Mus musculus
tgcagattttcaaggacatagctgtagccagaacagcattgagcacaggctccacaggttgccggttggtcacttcctgaagcaccagctggtttaccattccaggataaagagccatcagaaaagccggtgagcctctccctgagtctgtcccagtctgcctggaccttcctgctattgcctttggcttggttcctttctagagagaagagcagactcttccatgttcttccctgtaatccaaagagagctgttctatccaagcaacgtttccatttttcatgatgcccactacccctgtgtccagaagttagagaagaagcaagtccaagacaggttcttcactgccaccaccaggtgcccctacccccactgcatactgtgcgtgggaaactgccctgtgtcttgggagcaggagtggagtttctaactattagagttgtttatgtgtttctgtcttggtgacatttgtcgtacagtctcctcacctttttctttaattggtcagttcatacaaggttgtgtatgttgtcatttatcttcagttttcttattttctaggaacttcctgtagaaaagtcccccccacaaaacaaaccttaactgactaaaagatattgcatgctcaacttaggataagcactacggcaaaggatacgaaatctacccagcttgcaagaccagttgaagctgactcaaaagctgtaacatacagctgcttaccgacaggcttcttgccctggttagtgtcaggcatccgtctctttggtggagctcacgtgtgtgctgggctctcaggggattgaaatccaaagagaagggtgccataagatgggctagatggactggctcttcctcatcaccggactggcagctcagctctgagtgtggcccttgagtctggcagagagcagctaagagagcaattgaactgaaccttgcaaagcaagtgcccttgttttatgagtggtcctagtttcagggatgacagatcgggtgtgcccacctcaaaacgcttgcgttacaccagccctcgatgccttctttcatgtgaattatacagagaggcatttagttgatccctatccctctcccctttaaaaaaaaaaaatcataagcagattgccagcgtaatgcagaggatcccagattggataggactccttctcatgcctctgttagtgtttgtgtgtccaactggacgttaccctctcactgtctggcactaatttatagctgttatattacgagatgctgtgtagcagtgtatcagtgcacggaaagcatccaggcctgtatagctgtttgttatctgcacaccaggccttactcttgtctcagtagattcaaagcaacagatcagcctcttccttttgtagcgggtcagcaccacttctccatgagtgctgatgcttcccccagagtaatgaccgaggtggtggaaaacggctacattttattcatactgtgttttgtactcaaccttaaaagtaatctacctcttacactttgtagttgaatacttgtgtgatgaatttgtgccactttaacctttcactaccattcccattttgttacctttctgttcaggagactttatgttggaatactgtataaagcatttgtagcagtttaaaaataaaatatttaaaattatttaaattgttttgggtgcttcaattgtattctgtgatttagagcttacatttgtgtttgcattgttaatccggaaggtgtctgctgtactgaagtttgctgttagttattttattgcttcttgtcgcaaagtgctataaagattattctaatgaaaacattaaaatttataatttgacatacaaaagggattgttcattgtttttaaccaatgtagccttgacagagtttttattacagacacacaagagtgatgtttgctactttgccctgttagcatggacacatcctctgtttgtcagatgtctaagaaagctcttttttcatgttatttaaaatacctgataactaggggagacttggatgatacaatctatatcattgtaacgaataaacactttgtaaacacttgtgaaaggactgcattttgtccataaaggggaaacaggccacttggaccttgtttggtatgtagacgggtagtcagccgttgacctgggacct

SEQ ID NO: 29535 - DNA, 1130 bp, Mus musculus
ccgatttctgcttcatggagtcggaaatatctttgtgtgttctgtatgtaagaaagaatttgccttcttatgcaatttacagcagcatcagcgtgatctccacccagatgagttatgcacacaccacgagtttgaaagtgggaccctgaggccccagaacttcacagaccccagcaaggcccatgtggagcatatgccgagtttgccagaagagcctgcggaagcttctagagaggaggagttaaatgactcctctgaagagctttacacgaccatcaaaataatggcttccggaataaagacgaaagagccagatgttcgacttggtctcaaccagcattacccgagctttaagccacctccatttcagtaccaccatcgaaaccctatggggattggggtaacagccacaaacttcaccacccacaatatcccacagactttcactactgccatccgctgcacaaagtgtggcaagagtgttgataacatgcctgagctgcataagcacatcttggcgtgtgcatctgcaagtgacaagaagaggtacactcctaagaaaaacccagtgccgctgagacagacggtgcagcccaaaaatggagtgctggttttagacaactctgggaaaaatgccttcagacggatggggcagcctaagagactgagcttcaatgttgaactcagcaaaatgtctccaaataagctcaagctaaatgcattgaagaaaaaaaatcagctggtacagaaagcgatccttcagaagaacagatctgcgaagcagaaggcagacctgagggacacttccgaggcgtcctcacatatctgcccttactgtgacagggagttcacgtacatcggcagcctgaataagcatgctgctttcagctgtcctaaaaaacccctttctccttccaaaagaaaagtttctcattcatctaagaaaggtggccacacatcatctgccagcagtgacagaaacagtagtagcaatccccggaggcgcaccgcagatacggagatcaagatgcagagcatgcaggcacccttgggcaagacccgagctcggagtacaggccctgcccaagcctcgctgccctcctcatccttcagatccagacagaatgtca

SEQ ID NO: 29536 - DNA, 1229 bp, Mus musculus
acctaaattactatattgatggtaagattcagaccaacaacagcactagtgattgtgatgtgattgagatggagtctaactctgcacacttgtatggcatagactgtctgctcactccagtaactgtagagattactcaaaacataaagagcactcagggctctgtgacagatgatcttcttaaagagtctcccagtagcacaaattgcgagtctaagaaacggaggactgccagtccacctgtactccctaaaattaaagcagagacagattctgattccacggcaccctcgtgttccttaagtctgcctctgagcatatcaacaacagaggtggtgtctttccataaagagaagggtgtctatttgtcttcaaagctcaagcagcttcttcagacccaggacaaactgactcctcctgcagggatttcaacagctgagattcctaagttaggtcccgtgtgtgtatctgctcctgcatccatgttagctgtgacttctagtaggtttaagagacgcaccagctctccccccagttctccacagcacagccctgcccttcgagactttgggaaacagagtgatgggaaagcagcatggacagacacagctctgacttccaagaaaccgaagttagaaagtcgtagtgactcaccagcgtggagtttgtctgggagagatgagagagaaactggaagccctccttgttttgatgaatacaaaatatcaaaagaatgggcagccagttctactttcagcagcgtgtgcaaccaacagccgttggatttatccagcggtgtcaaacagaagtcagagggcacaggcaagactccagtcccatgggaatctgtattggatctcagtgtgcataaaaagccttgtgattctgaaggcaaggaattcaaagagaaccatttggcacagccggctgcaaagaagaaaaaaccaaccacctgcatgctacaaaaggttcttctcaatgaatataatggtgttagcttacctacagaaagcacaccagaggcgaccaggagcccaagtccttgtaaatcaccagacacacagccagatcctgaacttgctactgactcgagttgctcagcccccactgctgagtctccacctgaggttgttggcccttcatcaccccctctccaggcagcctccctgtcctctggtcagctgcctcctctcttgatccccacagagccttcttcccctccgccctgc

SEQ ID NO: 29537 - DNA, 1130 bp, Mus musculus
tcttagcagcttctagcaatcgagtcataggagttgattacagagcaagcgctgtgtcttcatctctgtgcttctgctccttaggtccaaaagaagaggatgagaggcctttggcttctgcacctgagcagccagcccttctgccagaggtggtaagccaggatgcagttccacaggtggccatccctcttcctgcctgcgagtcacagccaggggcagatgggaaacaagaagtcacagactgtgaggtcaacaatatgaaggaagaggaggaggaggaggaggaggagctggaagaggaagaagaggaggaggagttgggagaagatggggaggaagaagcagacatgccgaatgaaagctctgtgaaagaaccagaaatacggtgtgaagaaaagccagaagatttactggaagagccacggagtgtgccaactgaaacttctgaaggctccccaggcgccacccctcctccccacgctcccagggctagagaggaggccaacggcgaggggcttgaaacattcatgtttccatgtcagcattgtgaaaggaaatttgcaacgaagcaggggctagaacgtcacatgcacatccacatttctacaatcaaccacgctttcaagtgcaagtactgtgggaaaccatttggcacacagatcaacaggaggcggcatgaaaggcgccacgaaacagggttgaagagaagacccagcatggcattacaatcctcagaggacccagacgatggcaagggggaaaatgttacttctaaagatgagtcgagtccacctcaacttgggcaagactgtttgatattgaactcagagaaaacctcacaggaaatactgaattcatcttttgtggaagagaatggtgaagttaaagaacttcacccatgcaaatactgcaaaaaggtatttggaactcacaccaatatgagacgacatcagcgtagagttcacgaacgccacctgattcccaaaggtgtccggcgaaaaggaggcctcctagaagagccgcagccacctgcagagcaggccccgccctcccagaatgtctatgtaccaagcacagagcccgaggaggacggggacgcagatgatgtgtatatcatggacatttctagc

SEQ ID NO: 29538 - DNA, 1198 bp, Mus musculus
tttgttcttttgtttttttctgcatcctagaactttgcaaagatgtttgctgaaccttagttctaacacatatgctggatggagtaggtgttaagggacagtgaagtttagaaaacagttatcacctacatgattgattcacgtgtgtccattttctgacatctctgtaaatcatgccagaaagagaccactgaactgtgtcctcagcagtacagacctggattggaccaatagagtatcttagaaggcatgttgttaagtcacacttgagagaatgtagtggttacttatttccatgcccagggaacatttgtagatcaagcaagtggccttcagtccctcatatggtggcgggaggtgggaggggaaaccaagcctaaagaaagactaagatttgacagcttctgttttctgcttgtatttttctatattgcttctatgaagtgctttttagagtgcttttatatagtgagaaaagctgtttggaaagttgaagatgaaactgtttttaggcattcctatcttaatacacgcttgttcttctccatccctaggtgtactacccaaatttggggtggatgtgcattgatgccactgatccggagaagggcaactggctccgctatgtgaactgggcttgctcaggagaagaacagaatttatttccactggaaatcaacagagccatttactataaaaccttaaaggtaacagtgttagtgttagtctactcctagctactttgcatgcattctctaaatgcagtctaattgtaactgaaaagaacaacttcccagacctagaatggattgtgtttgaagtggttcatccacacacctaaaactctatgttaaacacatggttcatgaggccttgcatatattggagaactagagcaagaagactgtgttgagtaattatagactgcatctttcttcatactattgattatctgtggcatctgctcccctcctcttcctctgacacagatgcactgggaactgactggcaggtttagcccactgtgcgtcgctgttacgtggtaccatggtagtgcctgtaacagaaagcgcactcgcagtgtttagagtgcgtgaagccttggattagcttttcctttcctttgattatattcaggatagaatttgggatttagttcttcctgtcaaaatatttcttgggaaaattgattgcagag

SEQ ID NO: 29539 - DNA, 1900 bp, Mus musculus
ccaacagaaatctcttgtgatgtgcatcagctctgatgtaaacagagcttcaggcagtaaggtcagaagttgctaccagacaaggacatctcatcaaacacagggaacagccaacttcgggtgactgatcatagctggtgtggtgtccctgtgtgcttgctggatggaatcctcgtaccagctagtggcagaagtaatggggatgtcatttgccaggataggaaggggggtggggggcactcggcataggaggatcttagaactgtttcccaacttcttttcaggcatggaatttttgcccacatgtttaaataatcacatacctttgtttaaaacatggagggttggtgaggtggctcagtgggtaaaggtgcttgctgcctgtggtggtttgaatatgcttggcccagggactggcaccattaagacttgaggcctccttggagttggtgtggccttggaatgggtgtggccttgttggagtgcctttggtagagtgttctctggggtggtgtccacaggcctgaaggtctggatcctgggccccaactacacgcctgggaagaaagaggacctgtacctgaagcctatccagagaaccattctgatgatgggccgctatgtggagctgattgagtatgtgccctgtggaaacattgtggggctggtcggagtggaccagttccttgtgaagaccgggaccatcaccacctttgagcacgctcacaatatgcgcgtgatgaagttcagcgtcagtcctgtcgtccgggtggcagtggaggccaagaacccagctgacctgtccaagctggtggaggggctgaagcggctggctaagtctgatcctatggtgcagtgcatcattgaggagtctggagagcatatcattgctggcgccggtgagctgcacctggagatctgccttaaggacctggaggaggaccatgcctgcatccccatcaagaaatctgaccctgttgtgtcataccgggagacagtcagtgaggaatccaacgtgctgtgtctgtccaagtcccccaataagcacaagcggctgtacatgaaggccacgcccttccctgatggcctggcagaggacatcgataagggtgaggtgtctgcccgccaggagctcaaggcatgtgctcactacctggtcgaaaagtatgagtgggacgttgctgaagcccgcaagatctggtgctttggccctgatggcactggccccaacattctcaccgacatcaccaagggcgtgcagtacctgaatgagatcaaggacagtgtggtggctggctaccagtgggctactaaggagggcgctctctgtgaggagaacatgcgtggtgtgcggtttgatgttcatgttgtgaccctgcatgctgatgccattcaccagggaggtggccagatcatccccacagcacgccgctgcctctatgccagtgtgctgaccgcacagccctgcctcatggagcctatctatctggaggagatccagtgtcctgagcaagtggtgggtggcatctacggtgtcctgaacaggaagcgtggccatgtgtttgaggagtcccaggtggctggtacccacatgtttgtggtcaaggcatacctgcctgtcaatgagtcttttggcttcaccgctgatctgtgatccaacactggcggccaggccttcccccagtgcgtgtttgaccactggcagatcctgcttggggatccttttgacaacagcagccgccccagccaagcggtagctgagacccgcaagcgcaagggcctgaaagaggacatcccagcgctggacaacttcctggacaaactgtaggcagcctcacactgccacacgctgcacagtgcccacccatcagaagacaccttgagactgtcccacagtgct

SEQ ID NO: 29540 - DNA, 1520 bp, Mus musculus
caggccctaaagagctaaacagaacaggttgttctcccaacacatctgaaaataagagagcttccaacttgccctgttccccatcctcttcctgtggaggaagatgacccatggcgtgcccacccaccccacccacagccatggtgacccctccgcttggccagcagtaccaaaggaaagatacaggacaagccacagcccctcaaagcatctgcctttggaaaactaaatttttaacataaatgttatgatcgatgattcaaaagacaacatgcttagaaaatggagcaaagccaagacagtatcgccagctttagcaactgtaaccatgggttcaccctggccagtccctattactgttaagaggcatagagtctggaaatgttacatcacagaggcatgggtccttttgcagttgccaacttgtaactgcacttgatacatacacattccagcccagtcctaagcatccactgtgccttcagttccgggaagacactgcttttttttttttttttttttttacaagtctccaaaccatctctaagcctccgatgagttgaggagccacgtcctcatctccctaggactcaagccctcagatcagctgcatctttctggataatagagacctcatcctggatgctgagaacactgttggatgtcacaagatgctaaaaggctcagccgctgtagaaccaagaacatttcagtagaagtgactcatgttggctttagtataggaagtcagaccgaccagtttctaacacctgccttctgcttctcaggacagacagggaaagcaaaaataatcttgtataatcttaactgcttttatggggtggatgtaaaggtttgcggttaatagaagatatttccagtcttcgtgacacggggactcagtgttgctgggacagagctgtagtgtcttggtcgtctgtgttggtacccaatacagtgtagacatcttttcaaataaaacctgattgtgtccaagaatgaggccaacatttgacacttccattgactttagatgtcatttctgctgagattagaatttttcttttcttttctttttttttggggggaggggagttcagttttttgagacaaggttatccctggctgccttgaaacttgttttgtagactaggctagcctcaaactctgtcagcatctacctccttagtagtgggactaaaggtgtatgccaccatgcctgcctggctaagatcttttttttttttttttaatttatttttattttttcaagacagggtttctctgtatagccctggctggcctcgaactcagaaatccgcctgcctctgcctcccgactgctgtgattaaaggcgtgcgccaccacacacggctagattatatcttttatacctagcttgcctgttgacttaatggagagagaagcatccagggtcacaggaagttcaaccccaggggggaaaaatggaccacagcttttaccaccgtctactaaaacagagaacccaaggccaagga

SEQ ID NO: 29541 - DNA, 1347 bp, Mus musculus
gtttaagcgcagtgcggggccttggccgggggcggcggtagtgaagccagagccgcgctccagcccccttttccctccatggtttctctccgctcctgcgagtaacttggctccgggggctccgctcgcccgcacgccgcccggggaccatgccgccgcctcctccagccgcctccctccgacggccctcgccgcgcaggccgggtcgcctctcccccctccgcccccgccgcggaaagttaagtttggagaggggggacgaggggaacatggatatgaagaggaggatccacctggagctgaggaaccggaccccggcagccgttcgagaacttgtcttggacaattgcaaagcaatggatggaaaaatggaggggttaacagatgaatttgtgaacttagagttcctcagtttaataagtgtaggcttgttttcagtttcagacctcccgaagctacctaaattgaagaagcttgagctcagtgaaaatagaatcttcggaggtctggacagactagcagaagaacttccaagcctcacacatctgaacccaagtggaaataacctgaaagatatcagcaccttggagccgttgaaaaggttggattgtctgaaaagcctggatctgtttggctgtgaggtcactaaccagagtgattaccgagaaactgtcttcaggctcctgccccagctgtcctatctggatggctatgaccgagaggaccaggaagcccccgactcagatgtggaggtggatggtgtggacaaagaggaagaggatgaagaaggagaagatgaagagaaagaggaagatgaggatggtgaggaagaagaagatgaagatgaagaggatgaagatgaggatgtagaaggagaagatgatgaagatgaagtcagtggggaggaggaagaatttggacacgatggggaagttgatgaagatgaagaagatgaggatgaagaggaggaagaaagtgggaagggtgaaaagagagagaaacagatgacgaaggagacgatgattaagacccgaaacaacctgcaagaaacagaactgttgagtattggttggactgctcatggatttggtagctgttttaaaaaggtagctgtgatacaagccccaggacacccccacccaaagagccaaagaatagttcccgcgacattccgccttcctccgttagccccttggtaatccaccaccaagcctggggacttcgccccaacaaaattgtaaacgttgttaggttttcgtgtaagactcttgctgtatcgtgacagctgtgattggtgagttgaccatcctggttgccagttacactgtgattgtaacaacgttttta

SEQ ID NO: 29542 - DNA, 1146 bp, Mus musculus
gaatgttgccagcgctgtgtctatggcctggagacaaaactttgtcgttgtcggcagtaaataggggcaggttgttttttgatactgagaaatgaaagtctaggaacaggtcttgcatcaagagaacccaaagcacatggccacacactgctcattatctgggaacccaaatggtgtgctggagggttagaccacaaagactgagcttctagagaacaatgggacccaggacagatgtttgtggaatcaaaagacaatccttcatttcttttcttttgttcattcttcattgtttttttgttttcttttaagatttatttattttatatctgggtggtttacctgcatatatgtatccttggtgcctatagagttcagatgtgggcattggatcccctggaactggagttttggatggctgtgacccatcatatgagtcttctgcaagaacaagtgctcttgcctgctgaaccatctctccagccccagttgagcactttctaaataaatgagttctgtcaggtcatgataatgaatgactttctccttctcacatggtagtaaaatggccagattttagaacctggatgttctggtgtccttctcaccagatttttggagcttggtttcagtgttgttcttttcctgtggcttggctggaaagatcctgtgctgtctgacctctctagacatctgtaatggcaaacctggttgtcagcctgcccacttctgtaacaactagaacccacttgatgaaacagcacatgccctaaatggtgaccatgcattctcttggcagcattggtaaagagagagaagaaggaagctgtgctgccgagtttgtcctacttctttgggcagtattcattttcttcaggattttaacatagcctgaaagccagcagctctctaggagcctaggattgcagcaccagattggactgcagagacttccagctttacgaatgaactcccagatccttggccttttcattgtgagccagccattgtcagactgcgcagaccacagccggtaagccagtctagtaaacctcatatgttcctgatacacacggaactgtcagttctgctcctttagcctttagagaaccctgaccactacagcatcaaggtcaagtgaaagcc

SEQ ID NO: 29543 - DNA, 1102 bp, Mus musculus
gtcttccctcctttacctttgcctgggcatctgttatgtctcacttgtgtgctcattgctttagtatacaaaatgtcaatgtaaaatgagcaatgcattctcctctgaggggtttgggggaatggtagaggaatccaatctagtacacttagactaggaggtattatggacatatcaaagatggctgaagtgaagtcaaagataacaaagagcaaagaaaatggaggctaagccactttgctttatcactctttatttttttctctctctttcatggtcacatattgcccaggctggccttgaaatctcctgcctccaccttctaaatgctaagattactgaagtatggcaccttggctagtttgtagtccacatgtatgtaagactctatttttcagggcttctagcctccggctgtccctttgaaaacaaaggtctccagtagatgtccctgtcccctaaaggattgacaggccttaagaactgcattataggtgtccaggagtaaacttttattttgttaataagtatctaagcctagccattgcgatcctctgtataatctggttgcaataaagaattttggttcataacctctgtttcacttcctttgtatatgtgttaaaaatacaggggaggactggagagatggcttagttaagagcatggtgtgttcttgcagaggcctgggttccattctcaatacccacagctgtctaactgctgttcaagaggattagtaaataatgaggaggagataaagaacagaagagacttcggaaagtgccttctggttcatatgtgggtcaagacaagtgctgtgtcatgcacacacatacaccctcaacactaaatattaatagatacagcctgatggtctgcatttagtagattggcctggagctcagagattgtttctcttctgcctctggagagctaggattaaaggcataggcttccacatctcctactgaaacagttttacctggcgtgccttggtcatatattgtctggaggaaggtggagtgcggtaggcaacatgaggactgggagctactaatgggtagagcaagtgggattccagaggtctttcaggcttcag

SEQ ID NO: 29544 - DNA, 1152 bp, Mus musculus
cagccttggctctgtctggacaggtccagacgactgacaccattaacactttgtcagcctcagtgactacagtcatagatgaacaggcctcagctaatgtcaaaatacagagaggtctcatgctggttaatcaactcatagatcttgtccagaaacaactagatgtattatgacaaataactcagctgggatgtgaacaaaagtttccgggattgtgtgttatttccattcagtatgttaaatttactagggcagctaaattgtcaaaaagtctttttcagtatatgttacagaattggatggctgaatttgaacagatccttcgagaattgagacttcaggtcaactccacgcgcttggacctgtcgctgaccaaaggattacccaattggatctcctcagcattttctttctttaaaaaatgggtgggattaatattatttggagatacactttgctgtggattagtgttgcttctttgattggtctgtaagcttaaggcctaaactaggagagacaaggtggttattgcccaggcgcttgcaggactagaacatggaactccccctgatatatggttatctatgcttaggcaataggtcgctggccactcagctcttatatcccatgaggctagactcattgcacgggatagagtgagtgtgcttcagcagcccgagagagttgcaaggctaagcactgcaatggaaaggctctgcggcatatatgagcctattctagggagacatgtcatctttcatgaaggttcagtgtcctagttcccttcccccaggcaaaacgacacgggagcaggtcagggttgctctgggtaaaagcctgtaagcctaagagctaatcctgtacatggctcctttacctacacactggggatttgacctctatctccactctcattaatatgggtggcctatttgctcttattaaaagaaaaagggggagatgttgggagccgcccccacattcgccgttacaagatggcgctgacatcctgtgttctaagtggtaaacaaataatctgcgcatgtgccaagggtatcttatgactacttgtgctctgctttccccgtgacgtcaactcggccgatgggctgcagccaatcagggagtgacacgtcctaagtgaaggataac

SEQ ID NO: 29545 - DNA, 1563 bp, Mus musculus
ttaagcttggagatgtattctaccccttgggagatttatggtgcccagggtgcttcctaccataagaggctagaacagcttagagaggagctgagcaaggcgatgcagcatctagaacacaacagaacggtctggttcagcgtcgcgccctgtcttccttgaggcaaccaggccatacgagtcagagcccaagcttcatcaggcagggctgttcccctaactgagtacttatatggcaagtgattccttctagctcttgggaacagaatcctctggtgtagatgaatcctttagaaaatatcagggtggggggtagggtggggatgggggattggttgagcagccgaggcaacctcccaaatgttgacctaaagagttgatgtcccttgggacatgtgtatttagcagtgagagatgaagtttctagatggagaaacccttgagggtgtttacttcatgggtggagggaaagaagttgccagtgtgttcttccccacttcgggctatagggtaaatggaataaaccatgttacagcttggcaggcccaagtagccactggcagtcaccaccttaatctccagctctgagccctagagactttgctcaccagcagtcccatctatccaagaaggctacagttctgctcagagggccgtgtcagtgtagattctaaacaatctcactgagaggaatgcaaagagagatggtgctgttaggtgctgaggaccaccacaaacagtgagaagggataggcttaaactcataagtagccaacaactaaccatacatcatgcttgaaaatcagtaaagctgacacatagtaaagggatgtatttgttagtcctaaggtacctaagttacagctgaccaccaagaacagatgtatctatcacctgacctttgtttggtctacagatgattggccctattgcactgtgggtgggcggctttattagtaatacgctactggggattaaatgtaggactttgtgcacgctaggcaaatgttctaccactatgaatctttaaatcattacactgctgtgtatgtaggggaattttcagtgttcaaataaacatgtggcaagtccttttgttgttggttttgcttttgttgttcttgtttgtttgggttttggggatggagtctctacatagaccaggctttcaaactcaatgtgtgtgaatcaggcggacctcaaactcccagagatcctcctgcctctgcctcccaagacctgggattaaaagctgcaccaccatgactggcaagaagtcttaatatatgtagtccataccgaactcctgataattctcctgccttatccccccctaccatcaccacatgtgtttgattataagagtgatccacacatctggcttggaatggtatggtttcaacaactctttcccactcttgacagctttcctgggcatttgtggccactcttttgagttcatacacacaagatgaggtaccttggtcgggcaatgaagatctactctccagaataaagtttttttttaagatttatttatttattttatgtatatgggtacac

SEQ ID NO: 29546 - DNA, 1147 bp, Mus musculus
ctgggctgaccaagcgtgtgaagaaaagcaaacagccacttcaggtgaccaaggatctgggccgatggaagcctgcagatgacctcctcctcatcaatgctgtgctgcagactaacgacctgacatctgtccacctgggtgtgaagttcagctgctgcttcacccttcgggaagttcaggagcgctggtacgccctgctctacgaccctgtcatctccaagctggcttgccaggccatgaggcagttacacccagaagccattgcagccattcagagcaaggccctgttcagcaaggctgaggagcagctgctgagcaaagtcggatcaagcagccagcgcaccttggagaccttccaggacttgctgcatacacaccctgatgccttctacctggctcgtactgccaaggctctgcaggcccactggcagctcatgaaacagtattacctactcgaggatcagacagtgcagccactgcctaagggggaccaagtgctcaacttctcagatgcagaggacctgattgacgacagtaagctcaaggacatgcgagatgaagtcctggaacatgagctgacagtggctgaccggcgccagaaacgagagatccggcagctggaacaggaactgcataagtggcaggtgctagtggacagcatcacaggcatgggctctccagactttgacaaccagaccctggccgtgctgcggggccgcatggtgcggtacctaatgcgctctcgtgagataaccctgggcagagcaaccaaggacaaccagattgacgtggacctgtctctggagggtccggcttggaagatctcccgaaagcaaggtgtcatcaagctgaaaaacaatggtgacttcttcattgccaacgagggccggcggcctatctatatcgatgggcgaccagtgctgtgcggctccaagtggcgccttagcaacaactctgtggtagagatcgccagcctgcgattcgtcttcctcatcaaccaggacctcattgccctcatccgggctgaggctgccaagatcaccccacagtgaggcggtagcagaaaccagggtattctccagcctcagtttccctgtcattccagctcccttgagctgggaactcaggctcctggaaaacccttgta

SEQ ID NO: 29547 - DNA, 1179 bp, Mus musculus
aaggtagctcttacatggaatacttcagcctagacctagttacgatttttggatttcccaacctcaggactatttacctatgagattttctgagggaggagatgtaagtttagatgtgaaattcacccaggttcatactgggattcatacacacctcacacacagtctggcgcaccagcatctgatttgcaatcctccacatggggcagggcatggaattttccactgtggtgctgtgtcagtacccaaaaagattcagatgttagaatatcttgcatgtaaaggtttttttggatttgggttgttcagcctaaattgtacaacagatgtgtaatgctttgagagggttcttctagtgcctcttgtttccctgtgtctgctacccagggttttaagagacaggctgctggggcagatagtatgtaactcagaagttaacctttctgtgtaatcacaatttacttactcttagctaagaccaagggaaggtatttatttaatagcaaaaatgttgaagctttaaaactcctctttgtgttttattttgttctagtttgcagggacactatcagatggcctggggaagacgatggacaatcggcaccagtcagagcgagagtacatcagataccatgctgccaccagtggagagcaccttgtggctggcattcatggattggctcatggtaaggcacttgcaattaggttaaggaagaatgcccctcttgccatggcctctcataagtacctttatatacacatctcagtgcaaggggtaggagggggatgaaagctgccagcagcagatactggtgaggtgtcttggtgagtctgatagcctttcttttcactccttccctgaagtccttgtcccttttcgggatgctgagcgcactgcacttccttccagttctctagcttccatggctaagggcatcagatacaatccatcaatctcctcttagaatctggacctgttgctttaaaactatctttagagggctcagaaaatggccaagttggtaaagcactggcaaggcaagcacaaggcccgagtttaatcccagcaccacatcaaaagccagatgtggatccctggggcttgccattcagacagccaagtgaaagacactctaacagcagcagcagcaacaacaacaacaagaggtagatgactcc

SEQ ID NO: 29548 - DNA, 1201 bp, Mus musculus
ttaggttaggcattgttagtcccagtgtatcagtggagctcccaggtaaggaaggaccccagtgagcaggtgcctacagaagctttctctttcttggatcactctttcgttttgaaagttccatacattgctacagtgtattttgatcacatccatccactacttcctcttcccaactccccctagttgcccctattttgtctccctcccaacttccagtccccctcttcgttctttttctggttctgcataaaccccgagtccaattagtactgattatatatttgcatgggtgtggggtcatccacggtagcatggacaagttatcagcagacatgtcccccaaagaaggttgagtctccctcagccgttggctggcaggaaggagctcctttaccagacctgcctcactgacttaaactttacacatgatccttaactctaaggttatggcagacatttccctgaatattgaaaaacaaaacaatagattaaagagtaaacaaaagaaaatatcatagccaggagtggtaacacatcctcaaagcctagcactcaggaggctgaggcaggagaatcttgagtttgagacaagcaaactcaagagaggctactgagtgagatgctgactgagcaaacaagccaaacagaggccctgcctgctgctcttggtgtgaactgtcaagggttttagcaactctgtagatcaataggggcaggtagagaatgaggctggccttgaatgacttccacagaatccagctaggacctcagatgatgtgttctgtttctttgctccctattttgggcagcagtgtgccattgagccatttcccctgtgctggccctttgtcccaggaaaccagatctaggacatggcagtggtcagaggacccggactttcctatttcagagcttctctgacaggtcctgttccagtgcctgccttatctgtggccttgcagcagacagggcaggcagcccaactgcctttgtttaggaactagtatttgtttgtgtttgtgttgcaggcactatatttataggactcagatgagactaacacactgtttgttcaaggagaaagttagatcttcgcacaaaagaatgttctgtgtggattctgaaggggaacggcaatttatgacttgtgtctgtttttgtcattatgtgtgactgttccattttattgtcgagctga

SEQ ID NO: 29549 - DNA, 1195 bp, Mus musculus
agttcagtctcaggtgcttggatgccatgctcaccgattccactggatatgaacttggcagaggagcctagttgttgccatggagacttaaagagctcagcactctggaatcaagatactggacacttggggccgacttgttaaggctctgcagcatcagactgtagaggggaaggaacacgtctgccccctggtggcccgtcctgggatgacctcgggcctcctaggcaacaaaagaatgaattggaaaggactgttcctgggtgtggcctcagctcctgtgcttgtgtggatccctaaagggtgtgctaaggagcaattgcactgtgtgctggacagaattcctgcttataaatgctttttgttgttgttttgtacactgagccctggctgagccaccccaccccacctcccatcccacctttacagccactcttgcagagaacctggctgtctcccacttgtagcctgtggatgctgaggaaacacccagccaagtagactccaggcttgcccctatctcctgctctgagtctggcctcctcattgtgttgtgggaaggagacgggttctgtcatctcggaagcccacaccgtggatgtgaacaatggctgtactagcttagaccagcttagggctctgcaatcagaggagggggagcagggaacaatttgagtgctgacctataacacattcctaaaggatgggcagtccagaatctccctccttcagtgtgtgtgtgtgtgtgtgtgtgtgtgtgtgtgtgtgtgtgtccatgtttgcatgtatgtgtgtgccagtgtgtggaggccagaggttggctttgggtgtgtttgatcactctcagttactgaggcagggctctcatctgtacccagagcttgcacattttctagtctaacttgcttcagggatctctgtctgcctatggagtgctcaggttacaggcaggctgccatacctgcccgacatttacatgaatactagagatctgaattctggtcctcacacttgtatacctgcattttatccactaagacatctctccaagggctcccccttcctatttaataagttagttttgaactggcaagatggctcagtgggtaaggcagtttgcggacaaacctgatgacctgagttggatccctgaccataaggtagaagagacctgattcctgcaagttgtcctctg

SEQ ID NO: 29550 - DNA, 1170 bp, Mus musculus
ccggtcaacagcagggagcgttgggctgggcagctgggaagtgagcacacaggcatgtaagggtgatgcatctgccatcgtagtagaggtgagctagggtctttagcctcttggcccttggcctattgctctaacctgcccctgggacaagaggcaaactgcaaagacaccctgtctccaagatccccagactcaccctcccatcctgtgcttcacagattcttcccacggaagccacgggacccacgtcaacgtcacctgcatcgtgaacgtctgtagcagctctgaccacagttctcagtgctcttcccaagccagcgccacagtgggagacccagatgccaagccctcagcgtccccaaaggatgagcaggtccccttctctcaggaggagtgtccgtctcagtccccgtgtgagactacagagacactgcagagccatgagaagcccttgccccttggtgtgccggatatgggcatgaagcccagccaagctggctggtttgatcagattgcagtcaaagtggcctgacccctgacaggggtaacaccctgcaaagggacccccgagaccctgaacccatggaacttcatgacttttgctggatccatttcccttagtggcttccagagccccagttgcaggtcaagtgagggctgagacagctagagtggtcaaaaactgccatggtgttttatgggggcagtcccaggaagttgttgctcttccatgacccctctggatctcctgggctcttgcctgattcttgcttctgagaggccccagtattttttccttctaaggagctaacatcctcttccatgaatagcacagctcttcagcctgaatgctgacactgcagggcggttccagcaagtaggagcaagtggtggcctggtagggcacagaggcccttcaggttagtgctaaactcttaggaagtaccctctccaagcccaccgaaattcttttgatgcaagaatcagaggccccatcaggcagagttgctctgttataggatggtagggctgtaactcagtggtccagtgtgcttttagcatgccctgggtttgatcctcagcaacacatgcaaaacgtaagtagacagcagacagcagacagcacagccagccccctgtgtggtttgcagcctctgcctttgactttta

SEQ ID NO: 29551 - DNA, 1138 bp, Mus musculus
gagaagagggagctaggtggacaagagaaagatgaagctaagacaaaaattctgatcaaagctcaattttactaattcgtgcaccaagttatgaaggaggggaagggggccgattcccgccaaatcatcttacaggtgaacacgtgatagctccagaacagcttcttggcaggcagcagcagtgggagtggcaggacgatagggctgcaattcttctgttgagggacatctgggttctttccagcttctggctattataaataatgctgctatgaacatagtggagcatgtgttcttattaccagttagaacacattctggatatatgcccaggagaggtattgctggatcctctaatagtactatgtacaattttctgagaaaccgccagaatgatttccagagtggttgtataagcttgtaatcccaccaacaatggaggagtgttcctctttctctgcatcctctccagcatctgctgtcccctgaattttttattttagccattctgagtagtgtgaggtggattctcagggttgttgtgatttgcatttccctgatgattaacgatgttgaacagtcttctaggtgcttctcagccattccatattcctcagttgagaattctttgtttagatctgagccccatttttaaatttttttttttattttctggagtccatcttcttgagttctttatatatattggataatcctcccctaacatcattttaattcatcatcttctttgactgaggcatccatctcctctaccttttctttaagtctgataatctgtctcccacaggttctctatgtattatttttatttgccttactgcattttgttttcagggtcttttggggaggacatttctaagcacctattgaactcaatttaaatattttatattgtcgacatttccttcaggaatctggtattattttcttgttcatcattcattttcttcctctctgagtggattttcatggtttacaaactttaatctccttgatcatgactgtggcttttcaattctttatcttggatatcatgtaaattgtgctccttatagggtacatatatggtttgaagtttgagacaaggacattttatcgtagtttctgtttgttttgg

SEQ ID NO: 29552 - DNA, 1122 bp, Mus musculus
cttgttgacagttgaaatggtgtctggttttgggggttgtttatgggatggatccctgggtagggcagtctctggatggcccttcctttagtctcagctccaaactttgtctctgtaactccttccatggctgtgtaccctatttttttttgtttttaatatttatttattatatgtaagtgtactgtcgctgtcttcagacactcaagaagatggcatcagatttcgttacagattgttgtgagccaccatgtggttgctgagatttgaactcaggacctttagaagagcagtcagtgctcttaaccgctgagccatctcactagcccccatgtaccctatttttaatagggttatttggttctctagagtctaacttcttgagttctttctatatagtggacattagccctctgtcagacagaggaatggttaagatcttttaccattttgtgggttgctgttttgtcctattgacagtgtcctttgccttacagaggctttttaattttatgagatcccatttgtccatagttgaccttcgaacttgagccatttctgttttgttcaggaaattttaccctttgcagatgtgttgaaggcttttcccccctttctcttctagtagattcagtgtatctggttttatgtggaggttcttgatccacgttgacttgagcattgtacaaggcggtaggagtgaatcaattggcattcttctacatgtggactgacacttgaaccagaaccatttattgaatatggtgtctgtttttcactggaaggctttggccatatatttgcttctgtttatctgtttggggtgtagatgtacaccaactttgtgtgatgtctttctagcatttctcttctttgccttttacataatattatccttttggcaatagtataaggtttgcctaaggaaagaagaattccatgctaatctgtgcagtcctcagatactgtcagaggaaactcttcctatttcagtctgacccgttcttgatgtgtgtcctacttctgtaatgtagaagggtgatatttttttcactttttttctaggactcatcacatcttcttcaattgtgatggatttgtgtatacctctctatagtactg

SEQ ID NO: 29553 - DNA, 1126 bp, Mus musculus
atgcctttaatcccagcacttgggaggcagaggcagaggcagatagatttctgagttcacggccagcctggtctacagagtgagttccaggacagccaaggctacacagagaaactctgtcttgaaaaaccaaaaaataaaaaaatatatatattcctgcatctagacctcaaatgtatacattaaaatatctaaatgtatgctgtgagaccattatgtcatgtacttttactgagagaagagaacacaatatagactatgatgattttagatgatatcatttcttaaaatggcctcatagttcccatgacctaacatacatcctgttcttgattaggtttccgaatatgacatgaattctctctctgaaagggaaccttaaatccaatcagaatatgttttactgtatttggtctgtatttttgtctattgctttcatgttcaaggaaactaattgaagaaaaagactactttgggtattttgttcctctctgtcacctatgacttcctcaactgagccagctccttcagtttcattgacaggctgatttttttgattgaatgctgtatcttcatatattggccctctactgagttaccattaggcttacagggttcatttcgtgtttcatttcagattgagcattccttagagttttatacctctggatacaatgttcacatcctgcattatcataattattcctttagccactcacaggagttatctggtctttcattaagtttgtttctgccttctttgaattcctgtgattggtcctctttatgtcatttgaccacattgaatggtgttcagagtctattttgacttctgtctcttgagtttgtttcataattcattttgtcatgagtattgctattatattagtgatttgggtagggaaattttattaacattatgaaattgctttagctacagcctctcaattttcttttcttgtgtgtcatttaggtcaggtgacagggatttccatatgaggtgttttgaataaactttgagaatctaggttggtgggcaggaactaggttacaggtacactctaaatatatcattacttgctttcgtggctgtacaaatgttttctagattcctggtatcattttg

SEQ ID NO: 29554 - DNA, 1174 bp, Mus musculus
tctttgtccctctttttctttaagagaggagcaattttgggtcattatatttgaggtgggtatgatgtcaaatttgaaaataaaagttggcaggcttttatcatttccagtcatttgatataaatcatatttgaggttcttctgaggatacatgtaatgattcaaaaaaaaggaaaaaaaacctcttttgagagtacaaatccatgagatcactgattattgaatcccttactccttatataagtaaatcatgtcacctctaattgccccccacccgttttttttttttcaggaaatcattgcatatatggaatgtatgggaaggtcatggatcaagacagccagtacattgttcttgaacacatgaatattcaagagaagtcttctaaatgtaacaagcctagcaatgtgtttctagaatccccccattatacacctcacaaatgtactgaatgtgacaaatgcttttcccaaaaatctcatcttaatattcatcagaaaattcatgcaggagagaaaccttacaaatgcagtggatgtgacaaatgctttactgaaaaaggcagtctgagaaggcatcagagaattcatacaggagagaaaccttacaaatgcagtgaatgtgacaaatgctttactagaaaaggcactctgagaattcatcagagaattcatacaggagagaaaccttacaaatgcagtgaatgtgacaaatgctttacccaaaaatttaatttgagatctcatcagagaattcatacaggagagaaaccttacaaatgcagtgaatgtgacaattgctttactgaaaaaggcaatctgagaaggcatcagagaattcatacaggagagaaaccttacaaatgtagtgaatgtgacaaattctttacccgaaaatcccatcttagtattcatcagaaatttcatacaggagagaaaccttacaaatgcagtgaatgtgagaaatactaacaaagacaatctgagaattcatcagagaattaataatggatagaaaccttacaaatgtagtcaatgtgacaaatgctttacccgaaaaatccaatcttagtattcatcagaaagttcatacaggagaaaaatcttacaaatatagtcagtgtgacaaatgctttacctaccaagccaagcttagtattcatcagaaaattca

SEQ ID NO: 29555 - DNA, 2384 bp, Mus musculus
gttgggtagtctgcccaccaaagaataatttgaattctatgtcagtgtttagcattaaaaaattagaaacactgtattagatatgttgatttgtgttaactaaaatagggaagattcaattcagtgttccaggctagtattactaggttaagataaaaaggctcaaaaaaggaaatatgtagacactttcagagcatcagcaataagtctgctctctcttgaattcaagaagtatgagagaaaaagatagaaaaatacatgaaagtatggcttcatagatttcagggatagctatctagactttgctgtgtctcttcatggttctgaagtcattaatacccatgtattgaacaaaagtcctataagtctcaaaaatgctgcccatttagatatattacaaaacattgtggtgactggtcctgttgtgccttaatactacactctaccgtaaggaatgaattggatttccattcttttcttcacttaatcttagccaaaatgctgaggagcagaatttaggaatttatcttaaattcaggaagtttcagtaaattaggatctaagaaaaaaattgaatggtacaatgaacaaatccatatcactccatatattttccttgagtttcaaaaaaaaaaacaaggaaattgttcaacttgtgtgaaattaatgaatgataacatttcactggtctcaatattggaatttgatgaaacaggacctcctcattggtagaatctaagtaggagtggaagcaatattggcccttgatttcaaatgatcataggtattttctgcagattgcttcaacagggatgttgaaactcacacaccaggcaaatgaaaattaggtggcttgagtagctcttaccagtctggaaattgcaatcagctggacagtccctcttgattctcattgcacatgttcagtagatttaggactcagtgcttaatgacttagaggtcattacccaaatctgaagtgacttccaggttcatggaaaaatttctagaagtacacaatgaagacacatcttaccttgtacccctcacacaatgattgtcttcattctataactatttatacacacacttcttgtctatggtacaacaagcatatggtgatggttgacaaaatatgtccaggtaaaatcactgtttgagttatgtggaagacagcatgtgtatattgataaagatgcaagtccttggctcaggataattaaccataccatgtttgaagaacatggagactgaagctcactggatttggaacattaactgtttgtggaagagcatcgtaagataaataataagagccacactataggagcctgatgggcatttctagaagaacttcaagtggctagattttaaggaacccactaggtctatgtcagtaccttgcagggaaaggacaattctcagctgcagggcaactgatgggacagcgtggggattggatacacatggagtaggtggaaagtgttattccttggttgtaattggttttgttacaggagaactctgaagaggaactgagggcctgaaggaagagagtgggatcaacagcccatccttgccagtaggagtctggagctgcatggtttggaactaggactagagaacactgcctggggactcacagtattgtccccaagttaagccttgtggaaattttcagtcaccagagcagtggcaggaactgcaaacaagaagacttggaaactccaaggtcacagtaactacaaggctagtggatggacaggcagtggaccatgattgaaaccccttactctgctgctcataagaacactgatcttcaaattctattgtgcatttcataactgtgtaattaaattgctgactatgtaaatgtgacttatcctgatttttttaattcatcttattgttgccagaatacttacataataatttttgagagaatgggattgtttgttggaaacatggttatatttctctggtggcaggttcaaagctcatacaattcgcattcatccatgttttttaacgctgctatttaatcactgtgctagtcaagatctttgccattggagattatgcatccactgggaggtttaaaaattagtcccataaggatcactggagttttcattgaattttaagcaatatttatcaatttaaaaaaattttagctgtctttagattagtaaaaatttagtaaaatttttttggctcacatatatatactatcatatcatatgaaaataggtaaatcactatttttttctttccaaatggtattcccttagattctcttagttgccttattgcttgagctagaacttctaatactatatcaaagagacatggggacaattgacagactttttttgtgttagaga

SEQ ID NO: 29556 - DNA, 1272 bp, Mus musculus
tattctaagtttctgggctaatatccacttatcagtgagtacataccatgtcacttcttttggagcaattctgggttattatatttgaggtagattgatgtctaatttgaaagtgaaatttagcagggtatcatcatttccagtcatgtgatatagatcatatttgaggttcttctgaggatacatgtaatgattcaaaagagagagagagagagagagagagagagagagagagagagagagaaacctttcttgagagtacgaatccataagctcactgattattgagtcctttactccttatataagtaattcatgtcacctctaattgcccccccttttttttccagaaaatcattgcatacgtggaaagaatgggaaggtattggatcaagacagccagtacattgtccatgaacacatgaatattcaagagaagtcttctaaatgggacaagcttagcaatgtgattcttgaatccctccagtgtacaccttacaaaactaatcacagctctgactctcttcaatactcgaaccaaaaaagacttaaacccaggaacactaaagaagtttgcaaatacaatgactctgtaaacagtttaagtttgttttctaccattagtgtcaatcaaggaatttacatgcagaagaaaaaacacaaccgaaatgcagaattagagaaggtttttgtttctaaacataaagtcatggtgaaacgaaacaatattggagggaacccttacaaatgtagtgaatttcacaaatatcttacccagagagaaaaactacaaagtcagcagagaatttatcatggaaagaaaccttacgaaagtagtaaaagtgacaaatgccttacccatcagatccatcttagtattcatcagggaattcatacagaagagataatttacaaatgtagtgaatgtgacaaatgttttaaacacaaattcaatcttactatgcatcagagaattcataaaggagagacacctcacaaatgtagtcaatgtgacaaatgctttacccacaactttaatttgagaatccatcagagaattcatacaggagagaaatcttacaaatgtagtgaatgtgacaaatgctttacccgaaaattccatcttggtattcatcagagaattcatacaggagagaaaccgtacaaatgtagtgaatgtgacaaatcctttacccacaaatcccatcttaataatcatcagagaattcatacaggagagaaaccttacaaatgcagtgaatgtgacaaatg

SEQ ID NO: 29557 - DNA, 1286 bp, Mus musculus
tgagaattcatcagagaattcacacaggagagaaaccttacaaatgcagtgaatgtgacaaatgctttactaaaaaaggcaatctgataattcatcagagaattcatataagagagaaacctcacaaatgtagtgaatgtgacaaatgctttacccaaaaatcctatcttaatattcatcagaaaattcatacaggagagaaactttacaaatgtagtgaatgtgacaaatgctttacccgaaaatcccatcttggtattcatcagaaaattcatacaggagagaaaccttacaaatagattgtatgtgacaaatacaatactcacaatgtctgtcttagaaatcaaaagtaatttcatacagtagagaatctttataaatgatgtgaatgagacaatccttttccaagatgtatcatcttgaaattcattagagaatacttagagaagacaaacttttcaaatatattgggggtatgaatcctttacttttggcctatttcctaaaatgtaacagtgaatacttacaggctagaaacttaactcatgcattgtatgaagaaatatctttgacttcatttcaggtcagagagaacatctaagaatttttaggggcaagtatttctgttggggaaaatattgtattcttgacaacacttgaggctccacactagagaattagtgtgattatgaaaatgttgtcaaaacattcatgcaatgttcaaatcttaggtaatatcaactatttatgttgggagaaactctgaaaatgtgaaaatgtagaaagcttttcatgacacctttttacttgttcaccctcaaacgttaccagatgaagacaagttgggaagtcagaagatagtattgtgtaacactttcattgagacagaaataatccatttcaaaaggaaactatttaaggtctttaatacaaccctcaaaatagcaaataaaactgttggcattttgtatatttaatttaaataaaccaattcagaaaaaatatccttaaaagagtatctggcaaactgagccacccagacagcatattctttatcctgtaaatatgcttacagatgtgaagtgtgcttcgagtatccagtaataataataattctcaaatacttgtttcacattataggataacaagtgagtctgagtctcttgtgatctgctcaacaactcctttcttattgtcctgtaactaactccaataaagctgaaagattcaacaaatttgctttgattgtttccaattttcactttggatactcagatgaatatatg

SEQ ID NO: 29558 - DNA, 2590 bp, Mus musculus
gttaaaaaaaaaataacaaggaaattgttcagcttgtgtcaaactactgaatgataacatttcattggtctcaatattggaatttgatgaaacaggaactcattagtagaatctaagtatgagaagaagcaatagtggcccttcatttcaaatgatcctaggtattttctgccaatagcttcatcagggatgttgaaactcacataccaggcaaatgaaaaataggtggcttgagtagctcttaccagtctggaaattgcaaccagttggacagtctctcttgattctcattgcacatgttcagtggatttaggactcactgcttaatgactgagatcattagccaaatctgaagtgactttcaggttcatggaaaaatttctagaagtacacaatgaaaacacatcttaccttgtacccctcacacaatatttattctataaccatttatacacacacttgttgtctatggtaccgcaagcatatggtgatgattgacaaaataggtccaggtagactcactgtttgagttatgtggaagacagcatgtgtagattgataaagatgcaagtctttggctcagaataattaaccatatcatgtttgaagaacacggagactgaagctcactggatttggaacattaactatttgtggaagagcattgtaaaatgtttaacaagagccacactataggagcctgatgggcatttctagaagaacttccagtggctagattttaaggaacccactaggtctatgtcagtaccttcctgggaaaggaaacttctcttcagcttcaggacaactgatgggacagcctgaggatgggaaacacatggagtaggtgttaagagttattccttggttgaaagtaattttgttacaggagaactcagaagagggactgagggcctgaaggaagagagtgggatcagcagcccatccttctcagtaggagtctggagttgcatggtgtggaactaggactagagaatacttccttgggtctcacagccttgtaaaaattcccttcctctgcagttgtcccgaagttaagtcttgtggaaattttcagtcacctgagcagtggcaggaactgcaaacaagaagatttagacactccaaggtcaaagaagcagctaggctagtggacagacaggcactggagcatgattgaaatcccttactctgctgctcataagaacactgatcctcaaactctattgtgcatttcataactgtgttgttaaattgctgaccatgtaagtgtgacttttcctgtttttttttttttaattcatcttattgttgcctggatacttacataataatttctgagacgatgggcttgttggttgcaaacatggttatatttctcttggagcaggttcaaaactggtacaattcatatccatccatggtttttaatgctgctattttacaactgtgctagtcaagatttttgccattggagattatgcatccactgggacgtttaaatattagtcccataaggaccactggatatgtcattgaaccttaagcaatatttagcatttttttaagttttagctgtctttagatttatcatactttaaacatttatttttttatatttttttatttttccaattttttagtaggtatgttcttcattaacatttctgatgctatcctgaaagtcccctataccctacccccctgctatcctaccctcccaactcacacttcttggccatggtattcccctgcactgggtcatataaagtttgcaagaccaaggggcctctcatcccaatgatggactactaagtcatcttctgctacagatgcagctagagacatgagctctgggggtactggttagttcatattgttgttccacgtatagggttgcagaccccttcacatccttgggtacttttactagctcctccattggccctgtgttccatccaattgctgactgtgagcatccacttctgtgtttgccaaccactggcatagtctcaaaagagacagctatatcagggtcctttcagcaaaatcttgctggtgtatgcaatggtgtctgtgtttggttgctgattatgggatggatccccaggttcagcagtctctggatggtccatccttttgtcttagctccaaactttgtctctataactccttccatgggtgttttttcccaattcgaagaaggggcgaagtgtctaccctttggtctttgttcttcttgtgtttcatgtgttttgcaaattgtatcttgggtattctaagtttctgagctaatatccacttagcagtgactacacatcatgtgagttcttttgtgattgggttacctcactctggatgattccctccagatccatccatttgcctaggaatttcataaattcatcgtttctaattgctgagtagtacttcattgtgtaaatgtaccaaattttctgtattcattcctctgttgagggacatctgggttctttccagcttctggctattaaaaataaggctgctatgaagatagtggaaaatgtgttcttattaccagttagaacatcttctggatatatgcccagga

SEQ ID NO: 29559 - DNA, 3121 bp, Mus musculus
tttgcatttctctgatgattatggatgttgaacatttttctaggtgcttctcaggcattcaatattcctcaattgagaattctttgtttagctctgtgccccattttttaatggggttatttgactttctggagtcctccttcttgattcctttatatatattggatattagtcccctatctgatttaggaatggtaaacatcctttcccagtctgttggtggcctttttgtcttatttacagtgtcttttgccttacagaagcttttcaattttatgaggtcccatttgtccattcgtgatcttacagcacaagcagttatagttggtggtcatgagacactgtgtgtacctatgaacaaactttcatcccctgaagaacacctagtgctcttaaccaccaagccatctctccagctcctagttcctctctttaaaatgtggctggctaaaagcatccttgcttcaagtggtggagtgttaaatacaaatttatatttataaagcatttggaaaagtgcctggcatcttttcttgatgctcaggagcaaatgcatcattagctgtgaggtgggttctgagcgccacagactgcacacagctggcactttgtaaattaaggctgggggcagtgaccccagaatcctggccctcagtcattttttgcctccttgtgtttcaagagagggtctcatgtagctcagtctggtcttcctcaaactgactctgtcacagaggatgagcctgactgtttcatccctctgcttccacctcacaaatgctgaggggactaaaagcgtgtacctcctcaacgtgtgacatgggtctgagctctgaatgcaaggtttgtggtgccaggctagcacattctcagcctgagtcactactctccttttagacgtttattcttcatttattcaaaacattttatttttatgtataagggtattttcgcttacatgtgtgtttgtgccctaccgcatgcatgcctggtgcccacagaggttagaagaggacattgtacttcctggaactagagtttcagttctgatccaccatgtgagtcctgggaattcaatctggtcctccacaatggcagcagagtgtttttaattactgagctgcctccccaagcctctaaatcacttcttaaaatgcaggaatgtatataaacccactggcaacatatcctcagcaacctcagtaaaactgtgatatagctctaaatgtcacacaggaggagcaatgaaaagtacttacaaaaaataaaaaagactggagcgggacacttagagctagcttcaaagcacaagaccctctcctggcctctgcaggtacctgtacttgtgtgtgtgtgtgtgtgtgtgtgtgtttgtggcatgtgcacgtttgtatgcatgtacatatgtgtgtgctatgtttgtgtgcatttacatgtgtatgtgcagtgtgtacagtgtatgtttgcatgtgtattagcagtgtggtgtgcaagagtgcatgtatgtttctgtgtgtaggtatattatgtgcagcatgtgtgtgtgtatgcgtacatgcgtgtatctgtcactgtgtatataacaaaggtaaccaaaaaatcttttttaaaaattagttaggctggagatatggctcagtgggtgggagcactgacagttctgcaagaagttctgagttcaagtcccagtaaccgcatggtggctcacaaccatttgtattgggatctgatatcctcttatggtgtatctgaagagagtgacagtgcacacagatacataaaataaataaatctttgtgtgtgtgatctgagtgtttactctcactctgggactgagaaagcacagtcctccagcagtcagggcagatctgattggcaaacaccactaaatgtcagcaatgtaggaaaatcaccacatgatcaaaatctatgacactctcctaaagggatttttctctgcaaagacatagggtgcaattttataaaataactcatgtcaaacatttaataactttattaagaaggctgaggcaagaggatgacaagtttgatgccagctaccattaacatagcaaaaactttctcttaaaaaacaagggtctgagaatattactcagtggttagagcactggctgatttaccagaggacctgggtttggttcctagcacccacaaggtcatgcacagttccacggaatctggcgccctcttctggtctctgtgagtatggcatgcacatggtgcagaggcacatgcaggcaaaacacccatacacacaaaaaggaaaataaaaagtaaattcattaaattgggcatggtgatacatgcctgtaaaaataaatttagattgacaatgtgttcagcatgcaatgtatacttcttaaataacacaacaccatacatgattttaaaccacagaatgagagactggagagacagctcaatgtttaagaacatttgctgctttgcaaaggaccttggttcaacttccagtatccacaaagctccgactccaagagatgtgacgctcttctgacctctgtggacaccagacattcacatggtgcacatatgcaaaataaaactataaaaaaatatttagctaagtaaaatttaaagattgggggaaaaaagtaaatctaggcaaaaagttattacctcacaaagactgctcaatgtttcttaagcctgttcaggggaatggaaggaactaagagttgccggagtgatgtgaaacagacatttgaataaacggacataagtgaacatgcagagcctcggttcccaagcctaccacaccactctgtcctgagcagtgttcatgtagtctatgtgtgctcagtctgtgctgcatgtgtctagacagtatctgcctatccacacaaggcagagcacataattatgcaattagctaaagcatttctccctttgaccagcaacatggcttactgtcagctacctcaactactacaagaagaacatgtggtgtctggagccacaacagctctaggctaccagaacacttcctgagaggtcctgtcatccagccagacttaagttgctccctctccaggccaggcttgtgtacagtgcacagcttggccttcgtacctgcaaacca

SEQ ID NO: 29560 - DNA, 1151 bp, Mus musculus
tcacaccatgaacatcatcattaatatttcatgtgtaggcattagtacttgtatctcacaaattctattctcaaatttctggtcttttctgcatttttctgtgaaacattttgctggctgctgataaagtatattctctatgggtcattataaatgaaaaacatcaaaaagctaaaatttcaaaggggaagaaattttgtgctcaaaactgagtttattagtcagaatgaaagactatgattgatgtttactggttaagtgatacaagcatggcggtctctgcaaaccctaggtctggtagaataacaatccatgagaccaaaagaaatctagttcaataccactctataagtatttcagcactgtttgtggatgtgttgtgggttattgccgatgaaattcttgcagcactcagggaaaatctatcccagtgaatatacgaacagctctgaagtaaaaggtcttctggcagtcagaagtcatgatataccacaatgccccatggaacatttaaccacacacagagatttaatgggataacactggagggagactgcctctgctcaggtgagaagcagaagagaaatgagtgggaggcaggcttttcaaagggttttattttggggggggaatggggaggaaaggattttcaggattggaaatatatctggttgaatattgctagggttttatgttctgagtttgagtaaaataaggagtttctgaattattaaaactgggatgtaaactataagttttccctgtagactcagtggccaatgctgactgaagcttcaagattctgatctcaggatggtttattttaggaacaagtaagcacagtataatttcgaaatgaaatttcttggtaataattgtctcaatcatctgtgcacagtgaagatgaaggtgtggctacctcaaaagtcttttgcaaagtacaggtgtttctttcttaaagttggattctaaaaataagggcctagaggaggaataaggcatacagtgtagaggacaccaagctgtaaggtacatgtcctatgtcccccaatgatggtttgtactcatggagaaacaatgacctaggatgattatctgggataatttaatagtctgggactttcaggtgtggtctggcactacatctacca

SEQ ID NO: 29561 - DNA, 1132 bp, Mus musculus
actggtaacattctgtatatttaattcacatgaactaattcagaaaaattatacttaaaagagtatctggcaaactgagccacccagacagcatattctttatcctataagtatgcttacagatgttaagtgtgcttcgagtatccagaaatcataattcttctcaattgcttgtttcacattataggataacaactgagtatgagtctcttgtgatctggtcaaccattcctttcctattgtcctgtaactaactccaataaagctgaaagtttcaacaagtttgctttggttgttttcaatttgcacttgggatactcagatgaatatatgttgcatcttcccagaaaatgcctcacataaaaaatacgtggaagtcataaatatttttgcaaggctgtatcataaagttaatagttattttcaagtgatagataaccatccctttggggtgtaaagactctttcacagtggttgcttaaaagcataggaaaacacatatttccaattgtcttataactgagaaatcattcattgaactgcagggtagtctgctcacctaagaataatttgaattctatatcagtgtttagcattacaaaagttagaaacactgttcagttcaatgttccaggcaagtattactaggttaagataaaaaggctcaagaaagcaaatatgtagaagctttcagagcctcagcagtaagtctgctctctcttgaattcaaggaagcatgagagaaaaatttacaaaaataaatgaaaacatggcttcatagatttcaaggatagctagccagacttttctgtgtctctgcatggttctgaagtcattaatacccatttattaaacaaaagtcttaaactctcagaaaaatgctgcccattgacacatattacaaaacattttggtgtctggtcctgttgttacttaatattccactctaccgtaagtaatgaaatagatttccattcttttttaaatcatctacagaatgttaatattttgtacatctcagaatatacattctgaacaaaacctcaaaaactcactattagggtattcaacttaatttcatgtatgagttcattcatataaatatcatgaatctgtaaatcttagagaaaaa

SEQ ID NO: 29562 - DNA, 1267 bp, Mus musculus
gaatcctccgaaagtacaccttataacactaatcacagagatgccactctccaatcctcaaacctaaaaagacataaaactgggaccactaaagaagtttgcacatataaagactgtgtaaactgtttaaaggggtcttctatcattagtctcaatcaaggaacccacatagagaagaaagaacacaacagaaataaaaatcttgatgaggttttggtttctagacaaaacaatagtgaaatgagcacttacacttgtggtgaatttgacaaatgctttactcagagtgacaatcttcaaagtcagcagagaatttatccaggaaagaaatcttacatatatagtgaaagtgacaaatgctttacccaactttcccatcttagtattcatcatacaattcattcaggagagaaaccttacaaatgtagtgaatgcgacaaatgctttactgacaaattcactctgagaaagcatcagagaattcatacaggagagaaaccttacaaatgtaatgagtgtgacaaatgctttactgacaaaggcagtctgagagttcatcagagaattcatacaggagagaaaccttacaaatgcagtgagtgtgacaaatgctttacccaaccatcccatcttagtattcatcgtagaattcattcaggagagaaaccttacaaatgtagtgaatgcgacaaatgctttactgacaaaagcagtctgagagttcatcagagaattcatacaggagagaaaccgtaccaatgcagtgagtgtgacaaatgctttactgacaaaggcagtcttagagttcatcatagaattcatgcaggagagaaaccgtaccaatgcagtgagtgtgacaaatgctttactgacaaaggcagtcttagagttcatcatagaattcatgcaggagagaaaccttacaaatgtagtgaatgtgacaaatgctttactcacaaagactctctgagagttcatcatagaattcatgcaggagagaaaccttacaaatgtagtgaatgtgacaaatgttttactgagaaaaacggtctgagaaggcatcagagaattcatacaggagagaaaccttataaatgcagtgaatgtgacaaatgctttactgacaaaagcagtctgagagttcatcagagaattcatacaggagagaaaccgtaccaatgcagtgagtgtgacaaatgctttactgacaaaggcagtcttagagttcatcatagaattcatgcaggagagaaaccttacaaatgta

SEQ ID NO: 29563 - DNA, 1208 bp, Mus musculus
atattccacataggaatccaggtaattgtggacgcccactcgccagcaagtaagatgccacaacaggatccttctgcaacatgtttattgggagagcatggactgcgtaggtgaaagaccccgagccccagaaatggtgctacttatataggcctagggagtgacatgtccataactgattggttatgctaccagtacctcattaatatgcctcgagccaggcagtgactcggcaaaaaactctggcacatgcgcacattggttgtttacccatattcatgggcattggcttactgaaaccggtgccatcttgtaatggcgtttgcggcttcccacatctccccctttttattgtaataaaatgatgctggattaggcctatgcaattatgtccatccgctacggctcctgttttaggtcgttcctctgtgtcacagccttacccgtcatagggtaaccctatcgccaccaggccccgtgtcttaggttgctctgtgcatgaggaaagttgcccatctttggataatgcaatgctgtgtgacagtaattgctaaatgacttattttgttcgtcctgaaatgtcatgatattcccgataggaagccaggtgatgttaattcttttaactgttatcatcccaagggctgcaatggcttttcttaatgaagaaaaataagtttcattattttttgtcccaattccatgaaccaaattaataggaggatgattagtataatccaaaatattccaatcacacagggtggtattagagcaaaggcatgaaattgtaatatatgtccatcagaatactctcctaaatatttggtttgattgacataaacagtaatatctacagtctcatcccaagtgacaggatgaattataggtggatttggaacatatgcccaataaacttatgcagagctgcctcgatgtaacatccagataatgctaatcaatagggcaatcagctgtattcgatcctgtgctgtcatagacgttatcattcgaggttcctggcggtggcgttgaaaagaaagacgaaacatctgtctttaatattcccatcttggttttcagcatggcgtacacactgggttggcaaccacctaggggaaggtgtgtctgttgggaaaacataaacatacccacggccccataaaagtacaggatctgggctgtgtaatgagccgtccatcggatctttc

SEQ ID NO: 29564 - DNA, 2203 bp, Mus musculus
agttcatcagagaattcatactggagagaaaccttacaaatgcagtgagtgtgacaaatgctttacccaaccatcccatcttagttttcatcgtagaattcattcaggagagaaaccttacaaatgtagtgaatgcgacaaatgctttactgacaaattcattctgggaaagcatcagagaattcatacaggaaagaaaccttacaaatgcagtgagtgtgacaaatgctttactgacaaaggctatctgagagttcatcagagaattcatacaggagagaaaccttacaaatgcagtgaatgtgacaaatgctttacccaacaatgccatcttagtattcatcagaaaattcattcaggagagaaaccttataaatgtaatgaatgtgacaaatgctttacctgaaaatcccatcttagtattcatcagagaattcatacaggagagaaaccttacaaatgcagtgaatgtgggaaatgctttactgacaaactcactctgagaaggcatcagagaattcatacaggagagaaaccttataaatgtagtgaatgtaacaaatgctttactgagaaagttattctgagaaggcatcagagaactcatacaggggagaattcttacaaatgtattgaatgtgacaaatgttttgcccagaaatcctatcttgttcataatcacagaaatcatacattaaagaagccttacaaatgcagtcaatgtgacaaatgattttcccacaaacttagtctgagaatgcaccagagaattcatacagtagagaaaacttacaaaaatgcagtgaatgtgataaatgctttactaataaaggcagactgagaattaatcagataatttatacatttaaaaaaaccttacaagtattttgtatgtgataaatgcagtacccacaacatcagtctgacaaatcaacagatatttcaaacagtagagcaacattataaatgaaatgaatgagataatcctttaacaagaaatatcatcttaaaattcactggagaattcttccaaaagggaaacttttcaaatacattgacggtttgaatcctttattttggccaatctcttagaatgtaacagataatttatacaggcaagaatcttaacaaatataatatatgctgaaatatctttgacttcatttcagtgcagaaaaaatatgtaaaaaaattttttatgggaaaaatagttctcctggggaaatgtggcatatgttttacacgggtaatattcttttcaacagtcagtgctctaaactagagaattattatgaatctgaaaacttttgaaaaccttcatgcaatcttcaaatctaatgtcaactattatgctggcagtaactctgaatatatgataatgaagaaacattttcattaaacttttacttgttcaccctcaaatattatatgatgaagtcaggtgtgaaagccagaagaatatgatgttgtgcaacaattcatggagatagaaatgatccattccagaaggaaacttaaagagtgtactatcgccttcaaaatgtctaataaaactggcagcattttgtatatttaattcaaatgaagaaattgacacaaattatacttgatagagtatttgacaaactgagccaccaagaatgcatgttcttaatcctataatacacctacagatgtgaagtgtgctttgagtatccagtattcattattcttatcacgtcaatgtgacaaatgatttattggtttcacgtttcaggatagtgactgactatgagtcccttatgctctgtcaacatctccttcctcattgccctgtaaataaagctgaatattttaacaaggttgacttggctgttttcagtttgcactgataattagatgaataaatgttgcatcatcgctggaactatttctcataaagtatttgctgaagtcatgaatattttctgtaaacctgtaacttaaacttaatatttgtgattttcagctggtcaataacaaccttgacccacatacaaataatatgaattgtatataagtgtttagcattagaaaatttagcaacagtgtattagagatgatgatttgtgttaactaaaacagggaagattctatacaatattccaggcttactgctcgatcagtactaggtttattaaaaacaaacaaacaaataaagacaacaacaaaaaacaaaacaaaa

SEQ ID NO: 29565 - DNA, 1185 bp, Mus musculus
tatctggttggttgatattgttgttctttctatgaggttgtaaacaccttcagctccttcagtccttcacataactttactttggggtcactctgctccatctgatggttggctgcaagcatctgcatttattttggtcaggttctggcagagcctctcaggagtcagctatatcacgtttcagtcaagaagcattttacagcatcagccataatatcagtgtttgatgtctatagatgggattgatccccaggtgggttagtctctggatggccttttccttcagtctctgctccagtctttacccctgcatttcctttagataggagcaattctgtgttaaccttttttatatgggttgctgttacaattttaaagtaacacttagaagactattatcaattcttgacatttgatgtagataagatttgaggtacatctgaggatccatgcagtgataaaaaaaggaaaaacctctcttgagagtatgaatacattagaacactgattattgaatcatacttactcctcatataagtaatccctattatccctaattcccacttttttcagaaaatcaatgcatctgtggaaaaaatgagtcgttcttggatcaagacatacagcacattgtcaatgagcatgggcatatccgaaagaagtcttctaaatgtaatgagcttagtaatgtgattcatgaatcctccgaaagtacaccttataacactaaccaaagagatgccacattccaattctcaaacctaaaaagacataaaactgggaccactaaagaagtttgcacatataaagactgtgtaaactgtttaaaggggtcttctatcattagtctcaatcaaggaacccacatagagaagaaagaacacaacagaaataaaaatcttgatgaggttttggtttctaaacataaacccattgtgagacaaaacaatagtgaaatgaacacttacacttgtggtgaatttgacaaatgctttactcagagtgacagtcttcaaagtcagcagagaaagccaggaaagaaatcttacaaatatagtgaaagtgacaaatgctttacccaaccttcccatcttagtattcatcatacaattcattcaggagagaaaccttacaaatgtagtgaatgcgacaaatgctttactgacaaatgcactctgagaaagc

SEQ ID NO: 29566 - DNA, 1170 bp, Mus musculus
gtttagtctatatatgtttttcctgaggagccggcctcagcttgaacaggaaagccttttgttacccacagatagccttgccactatgatactggaggccatgccttgcctggcagattgaaattgtagcacacaggatacaaatctgggtatggccattgataactctgcctcctgccccagtttgcatagcagtttctggactctgaatgctaccaccagagagtccatccacaatatttgttgacagagtggatggtctgatctgagttgttcttctccagaagatgctcttgctttctgaatcacgtcttcggtccagtctacacgagtttaagtccttgaattgtgttcacactgatgcagtttgttgaatttggccttattatattgtggataccaacaagagcttgctgaccggaggctgatatagctgtctcctgagaggctctattagtgcctgacaaatgtagaagtgggtgctcacagtcatcctttggactgtgcacagggtccccaatgaaagagctagagaaagtacccaaatacctgatggggtttacagccccatagtaggaacaacaataggaactaaccagtatccctagagctacctgaaactaaaccaccaaccaaaaaacaaaacaaaacaaaaccaaaaaaccaaaacccaaaaaaaaccaaaacatattgtgggtctcatggctctagctgcatctgtaggtgatgatggcctagtaggtcatcaatgggaggagagcccttggacctgtgaaagttctatgccagaatataggggaacactagggccagtaagcaggagaggatgggttctttaaaatggggaggggggagaggatagaggaattttggagaggatactaggaaagggattaacatttgaaatgtaaataaagaaaatatctaatacaaaatggaaaaaaaaggatggaataatgacttttctaccttttctggacggtttggtttagtttcaagtctatttccatttgttttctgaggtgtgtttcttctcttcttacattctagaaagcttttatagtgagtggtattagattttccacagaaccttaaaagtaacttgtattttcctattataattgttgtctgggaggcttactgcctctgtctacttaccttggcctagtc

SEQ ID NO: 29567 - DNA, 1184 bp, Mus musculus
atgctcacaaccctaatttgagaggctgaagtatgctcatgtcattgtggacactttcagaacaattccccttatgtacattgatgcaaaatactcaataaaatactcaaatactgaatccaaaagacatcactaagaatctatccaaaatgacgaagattgttttctcatccaatatatcttgaagagtttccattccctctattcttctcagttcctgtccactttttctcccttctggatctaacccctttctgtatctcagtaggaaaacaaacaagcaaataaacaaacaaacaaaatccatagactcactaattgacaaatctgcccccaaaaagctaaggtaaaagttataatatatttcaaaacaactggtccaagcattagtatttgtacatcaccctatctagtctcaaatttctgatctatgtttgtgcaatttttgtgtgaaatattttgctgattgctgataaagtatattttcctattggtcattatgagtgaagatatcaaaaagctaaaatttcaaaggggaagaaattttttggctcaactctgagttcattacttagaatgaaagatgatgattgatgtttactggataggtgatataaatgtgggagtctctgcaaacactagttctggtagcgtaacaatccatgagacaaaaaagaaatctagttcaatacctctctgtaattatttcagcactggttgtgggtgtgttgtgggttatagccaatgaaattcctacagcactcagagaaaatctttcccagtgcctgtgttaacatctgaagtaaaaagtctcctggtactcagaagtcaagataaactgcaaagccccatgggacaattaaccacacacaagataatgactgggaagaacactggatggagcctgtccctgctcaggtgataagcagaagagaaatgagtgggaggcaggctttgtatagggtttagttataggtgatggattttcaggattggaaatatctgcggttggagattgctggtattttatgttctgagcttgagcaaactcagggatttctgagtagttaaaacctgtaagtatgctaaccattctccctgtagacaatgttgagtgtaactttagattctgaccccagggtggtttattttagatataattaagcacagtataattttggaaa

SEQ ID NO: 29568 - DNA, 1202 bp, Mus musculus
actttgcactaaggacacagaagcaattgctgtaaccataatagaaactatcaggacagccattcctgctaaaatcatgcctatggcccttttagatcgcaacaacaattctgtggttgcatgctcaagaattcctcggcctttatcatcataccaatccttagttaaattaactggtaaataaacataatcaggttgcttaacaatcaaaaaattacttaaggtataattaacacagttagttatttgacaattagtacagttaacagtattattatctatcaataaattcccactcaaagaagcctatggctctggaacacacaaacatacaaaaacttcagtcttattgtgtttgtcctgaaatgccatgatattccacataggaatccaggtaattgtggactcccactcgccagcaagtaagatgccacaacaggatccttctgcaacatgtttattgggagagcatggactgagtaggcgaaagaccccgagccccagaaatggtgctacttatataggcctagggagtgacgtgtccataactgattggttatgctaccagtacctcattaatatgcctcgagccaggcagtgactcggcaaaaaactctggcacatgcgcacattggttgtttacccatattcatgggcattggcttactgaaaccagtgccatcttgtaatggcgtttgcggcttcccacatctccccctttttattgtaataaaatgatgctggattaggcctatgcaattatgtccatccactacggctcctgttttaggtcgttcctctgtgtcacagccttacctgtcatagggtaaccctatcgccaccaggccccgtgtcttaggttgctctgtgcatgaggaaagttgcccatctttggataacgcaatgctgtgtgacagtaattgctaaatgacttattttgttcgtcctgaaatgccatgatattcccgataggaagccaggtgatgttaattcttttaactgttatcatcccaagggctgcaatggcttttcttaatgaagaaaaataagtttcattattttttgtcccaattccatgaaccaaattaataggacgatgattagtataatccaaaatattccaatcacacagggtggtattagagcaaaggcatgaaattgtaatatatgtccatcagaatactctcctaaatatttggttt

SEQ ID NO: 29569 - DNA, 1209 bp, Mus musculus
atgtagtaaatttgacaaatatcttacccagagagacaaacttcaaagtcagcagagaatttatcatgaaaagaaacatttcagaagtagtaaaagtgacaaatgctttacccatcagatcgatcttagtatccatcagggaattcatgcagaagagaaaatttataaatgcagtgaatgtgacaaatgctttacccacaaatttcatcttaatattcatcagagaattcatacaggagagaaaccttacaaatgtagtgaatgtgacaaatgctttacccaaaaatctcatcttaatattcatcagagaattcatacaggagagaaaccttacaaatgcattgtatgtgagaaatgctttactgaaaaaggcaatctgagaattcatcagaggattcatacaggagataaaccttacaaatgcagtgaatgtgacaaatgctttacccaaaaatcccatcttaatattcatcagagaattcatacaggagagaaaccttacaaatgtagtaaatgtgacaaatcctttactgaaaatggccatctgagaattcatcagagaaatcatacaggtgagaaaccttacaaatgtagtcaatgtgacaaatcctttactgaaaatggccatctgagaattcatcagagaattcatacaggagagaaaccttacaaatgcagtgaatgtgacaaatgctttactaaaaaattcagtttgaggattcatcagagaattcatagaggagagaaaccttacaaatgcagtgaatgtgacaaatgctttactttcaaaggcagtctgaggattcatcagagaattcatacaggagagaaaccctacaaatgtagtgaatgtgacaaatcctttactgaaaatggctgtttgagaattcatcagagaattcatacaggagagaaaccttacaaatgcactgaatgtgacaaatgctttactttcaaaggcagtctgaggattcatcagagaattcatacaggagagaaaccttacaaatgcactgaatgtgacaaatcctttactgaaaagggcaaactgagaattcatcagagaattcatacaggagagaaaccttacaaatgtagtgaatgtgacaaatgctttactgaaaaaggccatcagagaattcatacaggagagataccttacaaatagtttgtatgtgacaaatacaatacaatgtcagtctgagaaat

SEQ ID NO: 29570 - DNA, 1181 bp, Mus musculus
aaagatgtgtcccatgatacctggacctaacgttttcctccttagaacttgatctgttccaggctgttcttggactttgaaaactgcccgcattttcaaactcaaaccagaaacttaactgggtgaaattttgcctgagatcatcactctctcactttctgttactcctttattcctcacaccatgagccttgttcttttaaaccatccctttccctttactgactcattagtgtagctacctctgtaattttaggtacttggagccccttatacaaatcatattgcatgcttatagtttgcgtagttgagaaattttgggcaatgggtgcggggaattaaaggggattcccacatcccaccagagctccagtgctctgggcaagtggacagcaatctccatgaggctcaggtgggcatctggctgtgggaagctatggatctccagtccgcaggggtagagagggagcagtttgtggtttctgggtctcacagaggccacagaccacaggtcctcagtcatggatatcccagatgtcattgtatgttgtggaagagctgagaacaaagtaagggctctgggggcaactcggtcagccccagagctgaagggagaatggagcagggggataaggcactctgtggctcccaggatgtgagggtctttggtctgatctggtgactagaaatgctgagaggctttgctgctggaggtgacatgtggctctttagggtcaggcctattccatcattgaagaacagagggctttgatgagtggagagatggttcctggttttaaggtgtttattgtagaaagtcagagagagggagaggcgtagggaagtagaagccagccatggccatgtggagagagggaggaaaggatagggaggaggagagctagagatgagaataagagatttaagagcttaagagagagaggaggggccaaacagccctccccccccccttttcttttgtaaaacagaactgttagagtggcatttttatttttaaatcattaagactggtcaagaaataaaacagaaacatagtaaaatgtttaaaaaattaaagaatattcttccaagtataaattttataaatacaaaacaaattcacaaatgactttgaatgctaaataaacatctagttaataaattcagtcggcactggctacg

SEQ ID NO: 29571 - DNA, 1142 bp, Mus musculus
atctgaagtgacttccaggttcatggaaaaatttctagaagttcacaatgaagaaacatcttaccttgtacccctcacacaatgattgtcttcattctataactatttatacacacacttcttgtctatggtacaacaagcatatggtgatggttgacaaaatatgtctaggtaaagtcactgtttgagttatgtggaagacagcatgtgtatattgataaagatgcaagtccttggctcaggataattaaccataccatgtttgaagaacatggagactgaagctcactggatttggaacattaactatttgtggaagagcatcgtaagataaataataacagccacactataggagcctgatgggcatttctagaagaacttcaagtggctagattttaaggaacccactaggtctatgtcagtacctttcagggaaaggacacttctcaggtgcagggcaactgatgggacagcatggggattggatacacatggagtaggtggaaagtgttattccttggttgtaattggttttgttacaggagaactctgaagagggactgagggcctgaaggaagagagtgggatcaacagcccatccttgccagtaggagtctggagctgcatggtgtggaactaggactagagaacactgcctggggactcacagtattgtccccaagttaagccttgtggaaattttcagtcaccagagcagtggcaggaactgcaaacaagaagacttggaaactccaaggtcacagtaactacgatgctagtggatggacagacaatggaccatgattgaaactccttactctgctgctcataagaacactgatcttcagattctactgtgcatttcataactgtgtaattaaattgctgactatgtaaatgtgacttatcctgatttttttattcatcttattgttgccagaatacttacataataatttctgagagaatgggattgtttgttggaaacatggttatatttctctggtggcaggttcaaagctcatacaattcacattcatccatgttttttaacgctgctatttaatcactgtgctagtcaagatctttgccgttggagattatgcatccactgggaggtttaaaaattagtcccataa

SEQ ID NO: 29572 - DNA, 1103 bp, Mus musculus
agttagttatagaagggaaacaatttaagggaattttagatacaggagcagacaaaagtattatttcttctcactagtggcccaaaacctggcccgtaactcagtcagcacactctttacaagagctaggttatcagtcctgctccactattagatcccgttcttgagctggcaaatggatgtcacgcatatttcctcctttgggaaaaatcaatatttacatgtttgctaatctgtctaggcagatttctatgtatcttgcaggaaattggtctgaaagattcgatgagacccttgaggccctgagagtggctgttctcaggatcaactcaacaggagtggacctgtcattgacagagggtctctcctcctggatttcatctgctttttcttattttaaggaatgggtgggggtggttttatttgctgctgccatctgctgtggacttgtgcttatgctctggttggtttgtaagctcagaacacaacaaaaccgtgacaaggtcgttatcgctcaaacacttgcagccattgaacaaggggccccccctgaaatttggctgtccatgcttcagacctaaatggcatctgaattctctgctattgcatcccacggatttgtggatacattgcactgggatgtaagagactcaacgctcattgatcagcacttacacctcgctgaggtttactaatttgttttttggctggcctcttttatagagttcgccctaggtaatttagcagttactgtcacacagtactgcagtatctagagacgggcaactttcctcatgcacagaccaacctaagacacgggacccagtggtgatagggttaccctatgacaggaaaggctgtgacattggaggaatgacctaagacaggagccacagcagatggacatgactgcagaggcctagaccagcctcaaattttaataaaataaaaagggggagatgtggagagccatgctgcaagcaatcaagtgcgtgccgtgagcaatcgccattataagatggcgctggcttccactgagcctaactagtaaataagccttatgcgcaagtgcaagagtaaactcacgcctagtcactgcccat

SEQ ID NO: 29573 - DNA, 1145 bp, Mus musculus
gtgaaaggcagcctgcgacagagttggaggagtggttcctgctggggagggtgggcttcatgcatgattagataagtttaagaaaaagacaaaataaaaacaaagaatcaaccaaccaatcaatgaattaagtaagcaagcaattaaaaatccaaaacaataaaaattgctgtgaagaactgggaagctaattaattaaaaggtcctgaagtaggtgggcttagaagaattgcaggaagctgctgaatattgggcgggttcagaaggaggggctttgaggagccaggtagaagtgacaggaagttctgccttttcagcattctccctgtatcttggctgcctcgtggtcaggaagtcctggagggagactagtgcctagtatttgcagaacctgaaaacttccttaagctgcagttgctttgctggcctcctaggacattcagcagctggtcctgtcgccttccaggtcagaggagctgttgggctgggaaatgggcaggagcagggcaggcttgtggagcaggggtgcattttctgttgccactcttaaaattctgttgtggatatcttaacattgtcaggaagtttgagatcctgtgaattgggttcatggtgatgttttaatcaattttctggttgccagaatatttttctaaagtatcctcatagaaccttggctgcatctggagtttgcataccaagaggtttgtctttgcaaaagcatttataaagctcctgtaattcaaattccttcatgctttcttaactcccctgttcctccatttgccatttcatttccctttctccagggaactgagtaggcatcctgagagagctttgtagatatttgtcatatggggaattggtgaagatttgattgaattagaaaattatgttataaagcactatcatatggctgtaaatattaacattaagctaacaacgttatagtctccgttagtttcacactgaggtatatgtagtctttgatgtaaatacagcattcagagatgcgtcttcatagtcttagttattaatgttacaccttagctttcattgaagcatgaagacaggattgcagcaatgtacaactgaggagaagatatatagtaggttctgttaaccctgagtgtcgtcagagaaaa

SEQ ID NO: 29574 - DNA, 1958 bp, Mus musculus
ctcctcgtgttttaagagagggtctcatgtagctcaggctggttttcctcaaactgactatgttacagaggatgagcctgacggtttcatccttctgcttccacctcacaaatgctgaggggactaaaagcgtgtgcctcctcaacgtgtgacatgggtctgagctctgaatgcaaggtttgtggtaccaggctagcacattctcagcctgagtcactactctccttttggaggtttattcttaatttattcaaaacattttatttttatgtataagggtgcacttacatgtgtgtttgtgccctaccgcatgcatgcctggtgcccacagaggttagaagaggacattgtacttcctggaactagagtttcagttctgatccaccatgtttttaattactgagctgcctccccaagcctctaaatcacttcttaaaatgcaggaatgtatataaactcactggcagcatatccttggcaacctcactaaaactgtgatgtagctctaaatgtcacacagaaggagcaatgaaaagtatgtaccaaaaaaaaaaaaaaaaaaaagactggagcgggacacttagagctagcttcaaagcacaaggccctctcctggcctctgcaggtacctgtacttgtgtgtgtgtgtgtgtgtgtgtgtgtgtgtgtgtgtgtgtgtgtgtgtgtgtgtgtgtgtgtatttgtggcatgtacacatttgtatgcatatacatatgtgtgtggtatgtttgtgtgcatttacatgtgtatgtgcagtgtgtacagtgtatgtttgcatgtgtattagcagtgtggtgtgcatgtgtgcatgtatgtttctgtgtgtaggtatattatgtgcagcatgtgtgtgtgtatgcgtacatgcgtgtatgtgtccctgtgtatataacaaaggtaaccaaaaaatcttttttaaaaattagttaggctggagatatggctcagtgggtgggagcactgacagttctgcaagaggttctgagttcaagtctcagcaaccgaatggtggctcacaaccatttgtattgggatctgatatcctcttatgttttatctgaagagagtgacagtgcacacagatacataaaataaataaatctttaaaaagctgagtcaaaataaatactatctcaaaaataaaaagttgttttggctctattggtaaagaacctgacaaagcctgactgcctgaggtttggatcctcagaacctacataaaaggctggacccaggctggagggttggcccactggctaagagcacctgtttctcctgcagagaacctgggtcaactctctgcactcccatgactgttcacaacgggggatatgatggccttttctgacctcctaacaaacctgcacacgtacaggtaaaacacattcataaacttttaaaaacaaaacaaaaaggaaaaagaaaaaaaagaaaaattggaaacctggacacagccacatgcatgtgtgtgtgtgtgtgatctgagtgtttactctcactctgggactgagaaagcacagccctccagcagtcagggcagatctgattggcaaacaccactaaatgtcagcaatgtaagaaaatcaccacatgatcaaaatctatgacactctcctaaagggattttctctgcaaagacatagggtgcaagtttataaaataactcatgtcaaacatttaataactttattaagaaggctgaggcaagaggatgacaagtttgatgccagctaccattaacatagcaaaaactttctcttaaaaaacaagggtctgaggatatgactcagtggttagagaactggctgatttaccagaggacctgggtttggttcctagcacccacaaggtcatgcacatttccacggaatctggtgccctcttctggtctctgtgagtacggcatgcacatggtgcacaggcacatgcaggcaaaa

SEQ ID NO: 29575 - DNA, 1163 bp, Mus musculus
atccttgtaagctatgtgacgattgattaacaggccaagaagcgggccaccaattactggatataatgcttttatctgctcctgtatccattataccttgaaaggtttttccttctatttgtaattgtaaagtgggacgattatccaaatctaaagatatgtaggccacattagttcctgtagaaccgagtcccttatctccttgggaatcctggctactaggaagaatcagtaattgagcaatgcgatctccaggagaaatggctacaatacctcggggtgcagaacacataatcttaacttgtccctcataatctgagtctataactccaggatgtatcatcaatcctttcaaagcagaagaggacctacccaacagtaggcccactgtatcctttggtaagggacctctaaagtctgatgaaataggttggcaccccatttgaggtgtaagaattactctggaggtggcacagatgtccaatcctgctgaacccggagtggctctcctcagtctctgggtggcctcatggacactgtggtctgaaatgccccatacatttgggggcctggggacgggggcccctcaccccgttttttggctgttgcactttaaactgaggtattggccttcctttgatatctctgactgatctacattcatttgcccaatgtcttcctttcccacattttgggcaagtacctggttctgttttttcaaatctattctttctaccctttgtacactgcttttgcatatgacctgtttgtccacaattatagcagcttatttcttttgcttgtgccatcaaaactgcggcagccagccctgcatttgaaagaggtcctcctatttctctacaggctttcatccatgcttgtagccctttccctttccatggtgtgatagcatttctgcattctttggtacattgctcataactaattgttcaattaatggcattgcggcctcagcatcaccaaatatacgtcctgccgcttccatcatgtgagccacaaattcagagaacggctcattagttccctgaataatttttgtcaagttaccagatacctctcctcgattaggcaatgctttccaagctttcaccgctgcctgattaatttgatcatagacctgcactgggtatcctaattgattg

SEQ ID NO: 29576 - DNA, 1166 bp, Mus musculus
tacaggagagaaaccttacaaatgcagtgagtgtgacaaatgctttaccaaaccatcccatcttagtattcatcgtagaattcattcaggagagaaaccttacaaatgtagtgaatgcgacaaatgctttacccaaccatcccctctcagtattcatcgtagaattcattcaggagagaaaccttacaaatgtagtgaatgcgacaaatgctttactgacaaaggcagtctcagagttcatcagagaattcatataggagagaaaccgtacaaatgcagtgagtgtgacaaatgctttacccaaccatcccatcttagtattcattgtagaattcattcaggagagaaaccttacaaatgtagtgaatgcgacaaatgctttactgacaaaagcagtctgagagttcatcagagaatccatacaggagagaaaccgtaccaatgcagtgagtgtgacaaatgctttactgacaaaggcagtcttagagttcatcatagaattcatgcaggagagaaaccttacaaatgtagtgaatgcggcaaatgctttactgacaaaggctatctgagagttcattatagaattcatgcaggagagaaaccttacaaatgtagtgaatgtgacaaatgctttactcacaaaggctctctgagagttcatcatagaattcatacaggagagaaaccttataaatgcagtgaatgtgacaaatgctttacccgaaaatcacatcttagtattcatcagagaattcatacaggagagaaactgtacaaatgcaatgaatgcgacaaatgctttagtgacaaacacagtctgagaaggcatcagagaattcatacaggagagacaccttacaaatgtaatgaatgtgacaaatgctttacctgaaaatcacatcttagtattcatcagataattcatacaggagagaaaccttacaaatgtaatgaatgtgacaaatcctttactgaaaatggctgtctgagaattcatcagagaattcatacaggagagaaaccttacaaatgtaatgaatgtgacaaatgctttacctgaaaatcacatcttagtattcatcagataattcatacagaagagaaaccttacaaatgtagtgaatgtgacaaatcctttactgaaaatggctgtctgagaattcatc

SEQ ID NO: 29577 - DNA, 1149 bp, Mus musculus
atattgggcgggtccagaaggcggggctaggcagaagtgaagggaagttcctaggtttcatcattctctttgtatcttggttgcctggtggtcaggaagtcctggagggaaacttgtgcctagtattagtggaacatgaaaacttccttaagcaacagttgctgtgctggcctcctaggacattgagcagctggtcctgtcaccttccaggtcagaggagctgttgtactggttaatgggcaggagcagggcaggtgtgtggagcatggttgcattttctgcctccactatctcaattctgttgtggatatcttaccattatcaggaagtttgagatcctgtgaattgggttcatggtgatgttttaattaattttatggttgccagaatatatatacataatatattattattattcatttaaataaccccgtagatccttggccttctctggagtttgtgtaccgggatggttgtcttttcaaaagccttaatagagctcctcgaattcaaattcattcatgctttcttaactcgcctgttcctccatttgccatttcatttccctttctccaggaactgaataggcacccagagagagctttgtagatatttgtcatatgggggaccagtgcagatttgattgaattagaaaatattctttttaaagtaccgtcatgttgctgtacatattaatattaacctagcaaagttatagtctccgttagtttaacactgaggtatatgcagtctttgatgtaaatacagcattgagaaatgtgtctttataggcttagttattaatgtcacaccttaggtttgaataaaacatgaagacaggattgcagcaaggtacagctgaggagaagatatatagtaggttctgtcaaccctgagtgtttccagagaaaaactaattgtaccatgtgggcaagttttataaaataatacatcgtgaccaagagatggatttggtcacatgctacaggcagtttaataggccattgtagtttcctgtgaggctttatcattttcccaagacataaacctgcagcaatgcacgaagatacctggttcttatgctggcggtgcagttaatttttggcttttcagtctgagggagaaagcattcagagatatctgattggg

SEQ ID NO: 29578 - DNA, 1149 bp, Mus musculus; identical to SEQ ID NO: 29577

SEQ ID NO: 29579 - DNA, 1225 bp, Mus musculus
taaggaataaaatagatttccattcttttcttaaatcatctacggaatcttaatattttgcacatctcagaatatacattctgaagaaaaacaacagcttttgtaactaatagcgaagtcattaacatatgctgcagtgtgtatactttgcactaaggacacagaagcaattgctgtaaccataatagaaactatcaggacagccattcctgctaaaatcatgcctatggcccttttagatcgcaacaacaattctgtggttgcatgctcaagaattcctaggcctttatcatcataccaatccttagttaaattaactggtaaataaacataatcaggttgcttaacaatcaaaaaattacttaaggtataattaacacagttagttatttgacaattagtacagttaacagtattattatctatcaataaattcccactcaaagaagcctatggctctggaacacacgaacatacaaaaacttcagtcttattgtgtttgtcctgaaatgccatgatattccacataggaatccaggtaattgtggacgcccactcgccagcaagtaagatgccacaacaggatccttctgcaacatgtttattgggagagcatggactgcgtaggcgaaagaccccgagccccagaaatggtgctacttatataggcctagggagtgacatgtccataactgattggttatgctaccagtacctcattaatatgcctcgagccaggcagtgactctgcaaaaaactctggcacatgcgcacattggttgtttacccatattcatgggcattggcttactgaaaccagtgccatcttgtaatggcgtttgcggcttcccacatctccccctttttattgtaataaaatgatgctggattaggcctatgcaattatgtccatccgctacggctcctgttttaggtcgttcctctgtgtcacagccttacccgtcatagggtaaccctatcgccaccaggccccgtgtcttaggttgctctgtgcatgaggaaagttgcccatctttggataatgcaatgctgtgtgacagtaattgctaaatgacttattttgttcgtcctgaaatgtcatgatattccctataggaagccaggtgatgttaattcttttaactgttatcatcccaagggctgcaatggcttttcttaatgaagaaaaataagtttcattattttttgtcccaattccatgaac

SEQ ID NO: 29580 - DNA, 1157 bp, Mus musculus
cctggctgtcctggaactcactttgtagaccaggctggcctcgaactcagaaatctgcctgcctctgcctcccaagtgctgggattaaaggcgtgccaccgccaggcttttactatggattaagacaaaattagacaacatcttttgaataatcttgatcacttacttactggattgctgtctggaatctgggtcaaaataattttcttccagtcttccctcctcctcttctgtgttgctcagaaaaagactctgtatgtgtgttaactgtgtggctgactctcacatctttagggtaaactggaatactcggagaaaaataggtattctcatgatatcttctctttccttcatatttatccttttctccggcattgacgtctttcatttttgttccatgaacagttccatgttcattctaaactatattttctcattttcaggtctccatatgctcagtcaaatctccataactgtaaatcaacactaagagcactggatagttaaggtcaaggagactctcacaaaggatccaggtatgttagaggtattgaacaaggggtggagtggggctcacctgccagtacaaagaggacatgaatttgattttgccagattctatttccttaatgattctggaaaagaataatattagatgtgatgatatggatttaccatggaaggcagtgctgtcagctgtcacttgatgtcaatatttaattaattttgatcctgggaaattgctgctgcccattgaaatcaaagtttcttttatccagattgaaagcagcatcaggctatgggtgtgagaagggcaatttatacataaagcaaatatcatcagtagattccctcctagggcctgtgaccttccttaccggatttttaggcagattttcactgtaatctatggatttttttttcctgtggagcttgaaacagaaaacctgttacccacagatagtcttgccagtatcataaaaatttccatgccttgtctggcagattcagattgcagcaagcaggttgaaaacctgagtatatacattgataactctgcttcctgccccaatttccctagcagtttttgtcactatgaaagttcccaccagggtgtctaagatgtctgctgagagtgaatggtctgatatgaggtg

SEQ ID NO: 29581 - DNA, 2030 bp, Mus musculus
taattccaaaaaaaaaggagagagagagagaaacctctcttgagagtatgaatccataagctcactggttattgagtcccttattcgttttataagtaattcatgtcacctctaattgccccattttgtttttgtttttgtttttttcagaaaatcattgcatacgtggaaagtataggaaggtcttggatcaagacagccagtacattgtccatgaacacatgaatattcaagagaagtcttctaaatgggacaagcttagcaaggtgattcttgaatccccccaatgtacaccttacaaaacttatcacggctctcttcaatactcgaacaaaaaaagacttaagcccaggaacacaaagaagtttgcaaatacaatgactctgtaaacagtgtaagtttgttttctaccattagtctcaatcaaggaatccacatgcagaagaaaaaacacaactgaaatgcagaatttgcgaatgtttttgtttctaaacataaagtcatggtgaaacggaacaatactggagtgaacccttacaaatgtagtgaatttcacaaatatcttacccagagagaaaaacttcaaagtcagcagagaatttatcatggaaagaaatcttacagaagtagtaaaagtgacaaatgctttacccatcagatccatcttagtatccatcagggaattcatgcagaagagaaaatttacaaatgtagtgaatgtgacaaatgctttacccaaaaatccaatcttaatattcatcagagaattcatacaggagagaaaccttataaatgcagtgaatgtgacaaatgctttactgaaaaaagcagtctgagaattcatcagagaattcatacaggagagaatccttacaaatgcagtgaatgtgacaaatgctttacccgaaaattccatcttagtattcatcagaaaatccatacaggagagaaaccttacaaatagtttacatgtgacaaatacaatactcaccatgtcagtctgagaaatcatcagttacttcatatagtagagaatctttataaatgaatgaacgagacaatcctttaccaaaatatatcatcttataattcattagagaatacttagagaagacaaacttcaaatatattgtaggtatgaatcctttacttttggcctatttcctagaatataacagtgaatatacttacaggctagaaacttaactcatgcattgtatgaagaaatatctttgacttcatttcaggtcagagaaaacatctaagaactttttaagggatagtatttctgttgggaaaaatgtggcatatgttttattcaaggtgtattcttgacaacacttgaggctccactctagagaattagtatgattatgaaaatcttgtgaaaattttcatgcaatgttcaaatcttgggtaatgtcaactatttatgctggatgaactctgtacatgtgaaaatgtagaaagcctttcatgacaacttttacttgttcaccctcaaatgttacaacatgaagaaaagtggggaagtcagaagatagtattgcataacacactgagaaagaaataatccatttcaaagaaaatttattaaggtctttaatacaatcctcacaatatctaataaaactggtaacattctgtatatttaattcacatgaactaattcagaaaaatgatacttaaaagagtatctggcaaactgagccacccagacagcatattctttatcctataagtatgcttacagatgttaagtgtgcttcgagtatccagaaatcataattcttctcaattgcttgtttcacattataggataacaactgagtatgagtctcttgtgatctggtcaaccactcctttcctattgtcctgtaactaactccaataaagctgaaagtttcaacaagtttgctttggttgttttcaatttgcacttgggatactgagatgaatatatgttgcatcttcccaggaaatgcctcacataaaaaaatacgcggaagtcataaatatttttgcaaggc

SEQ ID NO: 29582 - DNA, 5633 bp, Mus musculus
caggagagaaaccttacaaatgcagtgaatgtgaaaaatgcttttcccgaaaattacatcttggtattcatcagagaattcatacaggagagagaccttacaaatgcagtgaatgtgaaaaatgcttttcccgaaaattccatcttggtattcatcagagaattcatacaggaaagaaaccttacaaatagattgtatgtgacaaatacaatactcacaatgtcagtcttagaaatcatcagttatttcatacagtagagaatctttataaatgaagtaaatgaggcaattctttaccaagatatattatctcaaaattcattagagaatacttagagaagacaaacttttcaaatatattgtaggtatgaatcctttccttttggcctatttcctagactgtaacagtgaatacttacaggctagaaacttaactcatgcattgtatgaagaaatatctttgacttcatttcaggtcagagagaacatctaagaactttttagggtaaagtatttctgttggggaaaatggtgtattcttgacaacacttgaggctccacactagagaattagtatgattatgaaaatcttgtgaaaatattcatgcaatgttcaaatcttaggtaatgtcaactatttatgctgtgagaaactctgaaaatgtgaaatgtagaaagcttttcatgacacctttttacttgttcatcctcaaacgttaccagatgaagacaagttgggaagtcagaagatagtattttataacactttaatcgagaaagaaataatccatttcaaaaggaaactatttaaggtctttaatacaaccctcaaaataggtaataaaactggtagcattttgtatatttttattgtcctgtaactaactccaataaaactgaaagattcaacaaatttgctttggttgtttccaatttgcagttgggatactcagatgaatatatgttgcatcttcccaggaaatgcctcacataaaacatagactgaagtcatgaacatttttgcaaacctgtatcataaagttaatagtggtgatttttaactggtggataacaatacctttgggatgtaacgaccctgtcacagtggttgcttaacagcataggaaaacacatatttccaattgtcttaaaattaagaaatcattcattgaagtgtagggtagtctgcccaccctaaaataatttgaattcaatgtcagtatttagcattaaaaagttaaaaatactgttttacatatggtgctttgtgttaactaaaataagtaagattcagttcaatgttccaggcaagtattactaggctaagataaaaagaaacagaaaatacgtagaagctttcagagcctcagcaacaagtctgctctctcttgagttcaaggaagtatgaaagaaaaatctacaaaaaataaatgaaaacatggctacatagatttcaaggatagctatccagactttgctgtgtctctgcatgattctgaagtcattaattcccatttattgaacaaaagtcctataagtctcagaaaaatgctgaccgttgggctggtgagatggctcagtggttaagagcaccgactgttcttctgaaagtcctaagttcaaatcccagcaaccacatggtggctcacaaccgcctgtaatgagatctgatgccctcttctggtgtgtcagaagacaactacagtatacttatgtatagtaaataaatctttgaaaaaaatctttttaaaaaaaatgctgactgttgacacatattacaagacattgtggtgtctggtcctgttgtgccttaatattccactctaccgtaaggaatgaaatagatttccattcttttcttaaatcatctacagaatgctaatattttgcacatctcagaatatacattctgaacaaaaactcaacaactcactactaaggtattatcttcatcttaatttcatgtatgagttcattcatacaaatatcatgaatctgtaaatcttagatgaggtgcatactcatgcactgtttagaaatccaaccatcctggagatacattgggaagtactgaaagaagtacttttactccgagttcaatatgatattagaatatttatcctaaattcaagaagtttcagtaaattaggatctaagaaaaaaatcaaatggtacaatgaacaaatctatatcactcatatattttccttgactttaaaaaaataacaaggaaattgttcagcttgtgtcaaaataatgaatgataacatttcattggtctcaatattggaatttgatgaaacaggacctcctcattagtagaatctaagtatgagaagaagcaatagtggcccttcatttcaaatgatcataggtattttctgccaatagcttcatcagggatgttgaaacttacataccaggcaaatgaaaaataagtggcttgagtagctcttaccagtctggaaattgcaaccagttggacagtctctcttgattctcattgcacatgttcagtggatttaggactcaccgcttaataatgactgagagattattacccaaatctgaagtaacttccaggttccaggtggaaaaatttctagaagtacacaatgaagacacatcttaccttgtacccctcacacaatattcattctatagccatttatacacacacttcttgtctatggtaccgcaagcatatggtgatgattgacaaaataagtccaggtagactcactgtttgagttatgtggaagacagcatgtgtagattgataaagatgcaagtccttggttcaggataattaaccatatcatgtttgaagaacatggagactaaagctcactggatttagaacattaactatttgtggaagagcattgtaaaatgtttaacaagagccacactataggagcctgatgggcatttctagaagaacttccagtggctagattttaagtaacccactaggtctatgtcagtaccttccagggaaaggaaacttctcttcagctttaggacaactgatgggacagcctgaggatgggaaacacatggagtaggtggaaagagttattccttggttgaaagtaattttattacaggagaactcagaagacggactgagggcctgaaggaagagagtgggatcagcagcccatccttgtcagtaggagtctggagctgcatgttgtggaactaggactagagaacactgcctgggttctcacagccatgtaaaaattcccttcctctttagttgtccccaagttaagtcttgtggaaattttcagtcaccagagcagtggcaggaactgcaaacaagaagacttggacactccaaggtcaaagaagctgctaggctagtggaaagacaggcactggaccatgattgaaaccccttactctgctgctcataagaacactgatcctcaaatcctagtgtgcatttcataactgtgttgttaaattgctgaccatgtaagtgtaacttttcctgatttttttattcatcttattgttgtctggatacttacataataatttctgagacgatgggcttgttggttgcaaacatggttatatttctcttggagcaggtttaaaattggtacaattcatatccatccattgtttgtaacgctgctattttacgactgtgctagtcaagatctttgccattggagattatgcatccactgggaggtttaaatattagtcccataaggaccactggatatgtcattgaaccttaagcaatatttagcactttttaaagttttagctgtctttagatttatcatactataaacatttattttttatttttattttttatttttccaattttttagtaggtatgttcttcattaacatttctaatgctatcctgaaaatcccctataccctaccccgctgctaccctaccctcccactcgcactttttggccttggatttcccctgcactgggtcatataaagtttgcaagaccaagggtcctctcttcccaatgatggccaactaggccatcttctgctacagatgcagctagagacacgggctctgggggtaatggttagttcatattgttgttccacctatagagttgcagaccccttcagatccttaggtacttttactagctcctccattgagggccctgtgttccatccaattgctgactgtgaccatccacttttgtgtttgccaggcactggcataggctcataagagaaagctatatctgggtcctttcagcaaaatcttgctggtgtatacaatggtgtctgtgtttggttgctgattatggaatggatccccaggttcagcagtctctggatggtccttccttttgtcttagctccaaactttgtctctgtaactccttccatgggtgttttttcccaattcgaagaaggggcgaagtatctacacgttggtctttgttcttcttgtgtttcatgtgttttgcaaattgtatcttgggtattctaagtttctggctaatatccacttagcagtgactacacatcatgtgagttcttttgtgattaggttacctcactctggatgataccctccagatccatccatttgcctaggaatttcataaattcatcgtttcttattgctgagtagtacttcattgtataaatgtaccaacttttctgtattcattcctctgttgagggacatctgggttctttccagcttctggctattaaaaataagggtgctatgaacatagtggaaaatgtgttcttattaccagttagaacatcttctggatatatgcccaggagaggtattactggatcctccggtagtactatgtccaattttccgaggaactgccagattgatttccagagtggttgtacaagcttgcaattcctccaacaatggatgagtgttcctctttttccaccctctccagcatctgctgtcacctgaatttttgatcttagccattctgactggtgtaaagtggaatctcagggttgttttgatttgcatttctctgatgattatggatgttgaacatgtttctaggtgcttctcagccattcaatattcctcaattgagaattgtttgtttagctctctgtcccattttttaatggggttatttgactttctggagtcctccttcttgattcctttatatatgttggatattagtcccctatctgatttaggaatggtaaagatcctttcccagtctgttggtgacctttttgtcttatttacagtgtcttttgccttacagaagctttgcaattttatgaggtcccgtttgtcaattcatgatcttacagcacaagcggttatagttggtcatgagacactgtgtgtacctatatacaaacttttgtcccctgaagagcagccagtgctcttaaccaccaatccatctctccagctcctagttcctctctttaaaatgtggctggcaaaaagcattcttgcttcaagtggtggagggttaaataaaaacttttatttataaagcatttggaaaagtgcctggtgtctcttcgtgatgctcaggagcaactgcattattagctgtaaggtgggttctgagcgccacagactgcacacagctggcgctttgtaaattaag

SEQ ID NO: 29583 - DNA, 1097 bp, Mus musculus
cagaggatgagcctgactgtttcatccttctgcttccacctcacaaatgctgaggggactaaaagtgtgtgcctcctcaacgtgtgacatgggtctgagctctgaatgcaaggtttgtggtaccaggctagcacagtttcagcctgagtcactactctccttttagaggtttattcttaatttattcaaaacattttattttatgtataagggtgttttcacttacatgtgtgtttgtgccctaccgcatgcatgcctggtgcccaccgaggttagaagaggacattgtacttcctggaactagagtttcagttctgatccaccatgtgagtcctgggaattcaatctggtcctccacaagggcagcagagtgtttttaattactgagctgcctccccaagcctctaaatcacttcttaaaatgcaggaatgtatataaactcactggcagcatatccttggcaatctcactaaaactatgatgtagctctaaatgtcacacagaaggagcaatgaaaagtacgtacaaaaaaaaaaaaaaaagactggagcgggacacttagagctagcttcaaagcacaaggccctctcctggcctctgcaggtacctgtacttgtgtatgtgtgtgtgtgtgtgtgtatttgtggcatgtacacatttgtatgcatatacatatgtgtgtggtatgtttgtgtgcatttacatgtgtatgtgcagtgtgtacagtgtatgtttgcatgtgtattagcagtgtggtgtgcatgtgtgcatgtatgtttctgtgtgtaggtatattatgtgcagcatgtgtgtgtgtatgcgtacatgcgtgtatgtgtccctgtgtatataacaaaggtaaccaaaaaatcttttttaaaaattagttaggctggagatatggctcagtgggtgggagcactgacagttctgcaagaggttctgagttcaagttcagcaaccgaatggtggctcacaaccatttgtattgggatctgatatcctcttatggtgtatctgaagagagtgacagtgcacacagatacataaaataaataaatctttaaaaagctgagtcaaaataaatcctatctca

SEQ ID NO: 29584 - DNA, 1085 bp, Mus musculus
cctttcctccccaacttgcttcttggtcatgatgtttgtgcaggaatagagaccctgactaagacaatggctgactgtcagctacctcaactactacaagaagaacatgtggtgtctggagccacaacagctctaggctaccagaacacttcctgagaagtcctttcatccagccagacttaagttgctccctctccaggccaggcttgtgtacagtgcacagcttggccttcgtacctgcaaaccacagcagtgaaactttatccagtacaatggtgtgtgtgtggtggtggtggtggtgggaggtccaccagcaccatgttatcattctcggtggttatcccgtggtaggtgggctctagccatggcttgtgcttgttaactgcattgggagaaaaagggaaaaaaacagtaagattcagatcactgcttcagtgttctgctgtctttgaagatgatcatgtgttatctggcttctgcgcaagtgaacacacttacaggaaagcaaagccaggcacataaatggaggagagcaaagagactgatcatctgaaaagggcaaactgtggtttgattatgggagtgccccatgtaaaatctaacccagatcatgaagacagaaattgactcgttccctccacaagacactcctgggacatgagctctgacagagcagcctcaggagggacagcactctcacccttagtccccacaggggcagcatggggtgacacaatagcagggatgactgtgggcattgacagaatctggtaaagctcacagcagcaagggccggtcttcatcaaagggttcatggaacaaaaggcacctcaactatgccatgggagatgggcaactcatccactgctgagaccccaatatattttatatgaaccacactaagaaggaagctgtgacaactcagggaattagcccgaggcaaactgctcacaaacaatgaagtctcagacacatctcaccatgctctagttttagggttctctctgtctctgtctgtttgtctctatccctttctctgtgtgtgtctctgtctttctgtctctttctctctgtctctctctgtg

SEQ ID NO: 29585 - DNA, 1080 bp, Mus musculus
agagaaaatttacaaaaatgcagtgaatgtgataaatgctttactaataaaggcagactgagaattaatcagataatttatacatttaaaaaaaaaccttacaagtattttgtatgtgataaatgcagtacccacaacatcagtctgacaaatcaacaaatatttcaaacagtagagcaacattataaatgaaatgaatgagataatcctttaacaagaaatatcatcttaaaattcactggagaattcttccaaaagggaaacttttcaaatacattgatggtttgaatcctttattttggcctatctcttagaatgtaacagataatttatacaggcaagaatcttaacaaatataatatatgctgaaatatctttgacttcatttcagtgcagaaaaaatatgtaaaatatttttttatgggaaaaaaagttctcctggggaaatgtggcatatgttttacacgggtaatattcttttcaacagttagtgctctaaactagagaattatgaatctgaaaacttttgaaaaccttcatgcaatgttcaaatcttagataatgtcaactattatgctggcagtaactctgaatatatgataatgaagaaacattttcattaaacttttacttgttcaccctcaaatattatatgatgaagtcaggtgtgaaagccagaagaatatgatgttgtgcaacaattcatggagatagaaatgatccattccaaaaggaaactaaataaagagtgtactatcgccttcaaaatgtctaataaaactggcagcattttgtatatttaattcaaatgaagaaattgacacagattgtacttgatagtgtatttgacaaactgagccaccaagactgcatgttcttaatcctataatatgcctacagatgtgaagtgtgctttgagtatccagtattcattattcttatcacgtcaatgtgacaaatgatttattggtttcacgtttcaggatagtgactgactatgagtcccttatgctctgtcaacatctccttcctcattgccctgtaaataaagctgaatattttaacaaggttgacttggct

SEQ ID NO: 29586 - DNA, 1196 bp, Mus musculus
ataattattgttgaccttctctgtactgtttgctttagttttgagtctgtcttatttctgaggtatgtttcttctcttatattcttgagagcttttatactgagcagtgtctactttttaccacagggctgtataagtaagtttcattctcctattgtcactgtaatttgggaggattcctgcctgcatctattaacctaggcctagtcatgtaagcttctactctacatacagtattatctaggcctggtgtgttttcagcctctgaaatttgctgctgaataagcccccaccttttcttattccttctcaatgcttacctggctgattcaattctgtttttccagctcacactcctctcccagctgagttcttctctcagacactgaattgttctactaggccttaaattaactgtcgaaatcttttgtaatcctctggctctttctcattctcctgctcattctgtctttgcccatgcctagcatgttctatcttcaatctgactctgtaaaactctcccagtaaaactgtgtccttctccctctctgtggatctactctctcaactgtactgtactgcagcccatgcactctactgtattcctttattattctcttctttgtgtaatgtctttctctgtctcaagtagcttctctttcctctctcattacagcaaagttgggcatatcctattctgtcagatctttctctaatattccatattttctgtcattcaattagacattgctttcaaacacaggtgtgttcttctacatataaactgtacctttgttattttggattaaagtgaatactaaggtcttgcctgtactaaaaccagagcgattaatgttgtgtcttgggctgaactgcaccctaagtcacaacaggttcaagtatcgctacacagtgtgatgtcagtttacttctgtacaattttttccttctgaaatgaaaaccaagatccacatatactattcttcaatatgttgatacctatttcattttttctgacttctacttgggattttattataatgttctttgaagatcggtcgatgatattctgttccttgtgagattgtattccttaggatttttaatctggaagattttgctggcagtttaggtggtaaagtatgtttactttgttctcaattccttgtgtgggatagagctttattgtgttgtat

SEQ ID NO: 29587 - DNA, 1497 bp, Mus musculus
agaaaaaaaaaaaaaaaagacaggatctagacaggaaacctaggcaactaaagaccgagcctcagctaaagaggctcagctgtgtcagactcaagttatctatttgagatacacccttcgaggtagaaaacagtggctaaaagaagccagaaaaagactataactacaccaaggcaagtaagagaattcttgggtactgctggcttctacagactctaggtacctgggttggcaaccttagctgccctgttgtaccacctaaccaaggaaggaaaagtgtttatgtggaccccagatcaccagaaagcctttgaagagattaaaaaggccctactgatggccagcctttgcctggcttaaccaagcctttcactctttatgtggaagagagatcaggggtcgccagagaagtccttactcagactttaagaccttgaaaaaggccagtgggttaaatatccaagaagttacaccctgttgccagtgggtggttttcttgcctgaaagctattgttgccataatctgcttgtcaaggatgctgataagctcactctgggacagtaactagctgtagtggcaccccaccccacgctcttgaaagcattatctgaaagtcccctgactgatggatggcgaccaacgctcctgtgacacatcagaactttttgttgactgaatgagtgaccttcgcttcattccgcctgctgtcccactgcctgagactgcacctactcatcactgcgctgagaaactggtacttgaaatgatctgaaggatcagatcagccgtggcctgagggtttgagctggtacacggatcacagtagcctcgaggttaaaggtaagcagaaggcggggacagcagtacggtggtggacataaagcaagtgatctaggccagcagcctccctgaagggacatcggcccagaaagctgaacttgtgaaagagggctgttgacatcggcagagaaagacctaagatactgtggctaaagaaaatcagatagcagatctaacggccaaacaggtggcccaaggagcaataatcctggcagtcaaggaacctaaagattattatgacatcagggaaaccagctttagatacaccgctgagcactatcaagttatggacagtatttgacccacctaggggccaaaaaaaattaaaaggtgtggttaggtcatttgactacgatgttacaggactctctgacttggcagaagaaatagccaaaagctgcaaggcctgtgctatgacaaagtagaatttacagaaattaagccagctagatattgcaacaagtacttattagtgtttatagacaccgtttcaaaatggatagaagcttttcctaccaggactgaagatcctaaaagaaatcttcccaaggtaatggacctgcctttgttgcccaggtaaatcagggactggccaagatattagagattggttagaagttacattgtgcatgcaggccccaaaggtcaggacaggt

SEQ ID NO: 29588 - DNA, 1185 bp, Mus musculus
tcatccaaatgttttaatctctatatgtggaatgttatctaagggcttattctctatgatctatattttcttttgtaataatgagaacttaatatttttccttttcatgcatatagtggctttatattttaccttgagttttatattttgagggtatataattctcttggactaaagacctgcatgtctcaaatagtatctatgatgctcaaagaacatattaatggatattttcttttttttcaatttatttatttattatatgtaagtacaccatagctgtctttagacacttcagaagagggcgccagatcttcttatggatggttgtgagccaccatgtgattgctgggatttgaactcaggaccttcagaagaacagtcagtgctcttaaccgctgagccatctctctagcccaatggatattttctatattgaataagttttgtccttttgtattagtgtgaagtaaggtctcttgtgccacatatatggcatttcagggatggtcaggtttctagcttgtgaatgaggatatagaaataagtataaattcacatcactaaagaagatatgaaagagtagaatttgtagaaggtaaaattataagagatctactgtcttgaatcctaatagtaaatatattattagctccctagggtcacagataatggaaggaaaatgtctttcttaccattagtgtaattgtgagctgatatagatttccgtattctgacacttttttcacacctcatgtcacatagtaatcaatgttgacactggaaatctatttgtctcaagagagatactgtccctgtggaaaattcacagtatagaaatagttatttacctctctttttggtttgagaaataactttaagtcctattttcttcacctttgtatttcatcacataagctatattagtaaaatttttctagagaggataactatggtgctgtgcataaaccatcaatttagaaacataaatgaatgtcctttcttattttttgtctctttttctttagaaggaaaaggcttgatacaatctgtgataatcttctccaaccaagctttgcattacatagggaaaactgaagtgttatgtcaatgtttctatttttcattatgatattattttctttaagtccataagtgtatatctgaaggtttttatgtacagtg

SEQ ID NO: 29589 - DNA, 1550 bp, Mus musculus
aacttttcaaatatatcgaaggtatgaattctttatttttgcctatttcctagaatgtaactgtgaatgctaataagctagaaacttaacgcatgtattgtatgaagaaatatctttgaattcattttagtcagagaaaacatctaagaactttttaagggaaagtatttctgttgagaaaaaggtggcatatgttttattcatggcatattcttggcaatactcaaggctccacactagagaattagtataattatgagaatcttttgaaaattttcatgcaatgttcaaatcttaaataatgtcgactctgacaatttgaaaaaatgtagcaagcctttctttctttctttctttctttctttctttctttctttcttttttttgggggggggttggtttttagagacagggtttctctgtatatccatggccatcctgtagaccaggctggcctcgaactcagtaatccgcctgcctctctctcccgagtgcttggattaaagacatgtgccaccacgcccagttgtagaaagcttttcatgacacctttttatttgttcaccctcaaatgtggcaagatgaagacaagctgggaagtcagaagatagtattgtgtaacactttctttaagacagaaataatccatttcaaaaggaaactatttaaggtctttaatacaatcctcaaaatatctaataaaactggtaacattctgtatatttaattaaaatgaaccaattaagataaaaatatacttaaaagattatctggcaaactgagctacccagacagcatattctttattctataaatatgcttgcagatgtgaagtgtgcttcgagtatccagtaatcataattcttctcaaatacttgtttcacattataggataacaagtgactccgagtctcttgtgatctgctcaacaactcctttcctattgtcctgtaactaactccaataaagctgaaagattctacaaggttgctttggttgttttcaacttgcccttgggatactcagatgaatatatgttgcatcttcccaggaaatgcctcacataaaacatatgcagaagtcatgaaatttttgcaaacctgtatcataaagttaatagtagtgattttcaactggtggataacaatccctttgggatgtaacgaccctgtcacagttattgcttaaaagtacagggaaacacatatttccaattgtcttaaaactgcgaaatcattcattgaactgcagggtagtttgccctgctaaaaataattagaattctatgtcagtgtttagcattaaaaaagttagaaacactgttttacatatggtgatttgtgttaactgaaataggtaagattcagcttagtgctccaggcaagtattactaggtgaagataaaaaggctcaaaaccgaaaatatgtagaagctgtcagagcctcagcaagaagtctactactctctcttgaattcaaggaagtatgagagaaaaacctacaaaaatgaatgaaaatatggcttcatagatttcaaggatagctatcca

SEQ ID NO: 29590 - DNA, 1874 bp, Mus musculus
attaactatttgtggaagagcactgtaaaatgcttaataagcatatgagcctgatgggcatttctagatcttccagtggctagattttaaggaacccactaggtctatgtcagtaccttccagggaaaggaaacttctcttcaggacaactaatgggacagcctgaggatgggaaacacatggagtaggtagaaagagttattccttggttgaaattgattttgttacaggagaactcagaagaaggactgagggtctgaaggaaaagagtgggatcagcagcccatccctgtcagtaggagtttggagctgcatggtgtggaactaggactagagaacactgcctggggtctacacagccatgtgaaaattcccttcctctgcagttgtccccaagttaagtcttgtggaaattttcagtcaccagagcagtggcaggaactgcaaaccagaagacttggacactccaaggtcacagaagctgctaggctagtggacagacaggcactggagcatgattgaaatcccttactcggctgctcataagagcactgatcctcaaactattgtgcatttcataactgtgttggtaaattgctgaccatgtaagtgtggcgtatcctgatttttttttattcatcttattgttgcctggattcttacgtaataatttcttagaggatgggcttgttggttgcaaacatggctatatttctctggtggcaggttcaaagctgatacaattcacatccatccatggtttttaactctgctttttaatcactgtgctagtcagattctttgccattggagattatatatccactgggagctttttagatattagtcccatacgaaccactggagttttgattgaatcttaaacaatcttaaacaatattttagcaatttgaggggctgtgggactcttttattcagtacaggaggatgggaagcacgtgaaaggggagtgatgccatggtgggtgccatgacaacagatgcaggagcagtcctgttgcctagagatgaggagcctcttcactgggttgaaaacctgactgtaaagacagatgcacctggtgctaacaacattgcttatatttgtagtacttctcttcaatacaaattcttttttgagccgggcagtggtgacacatgcctttaatcccagcacttggaaggcagctaagttgattttcacatttctcttttgttagcctgtttagtaacttctcataacaaagacaatattatatagtcaggaaggttcaacttctccatgtccaatgagttctctggatggcatgcttggtaatggagaactgctttcaatttctacagaacaaagagttatcttagcaagcgtctagattgcttgtggatccaagggacccacttagccaaaaactcaaataaaacccaggtagtgtactagaaagctcatttgaaggaaataccaggtcagttgggacttattcacccccatttgtacgttactgaatttcgattgtctttatagcatttaagaagtatgtaccactgtaggtttccatatcatcactcaaatgtccctctcaattccaactgtctctcagcattttctccttcaaccttaacttccctaccactctctacctcattttcccagtcacattcccatctgtctccagttcatccatggaatctattttatttacttccaccagggaatctgggtgccactgtgtgctctgaagtcaactcttctatacttaatatctctgaatacaatgggcctatgaatatcaagttcattattttagcattggctaatatccacacataagtgaatatattccatatttctccacctgtgtctggtttaccttagta

SEQ ID NO: 29591 - DNA, 1124 bp, Mus musculus
taatgtgaatatctatctatctatctatctatctatctatctatctatctatctatctatcatcaaaataatgaacaactactataaattagcggttgtctctctaaaaacagagaagtcagaactgagttccacatctagagtaagtggcctcagttgctgtgggaatgctagaactactgcagggctttccttgtgtctcagattcttcactccctccaggtatccaatggtacctatggaaggggaaaggaaattgttaaactccctaaccacagaaaggtcacacagaaaggtcacagtagctaccactactgatgttagctgctgtacatcacagcctctaatactagcaacagtatcaagaccagttctcaaacacctgtccccattgatccttcctatcctgactggctagcatacagcctgtgctccactgaaattatatggataggaaacaggaatccattcctcattaaactgagctttctaaagcagtcacacaccttcttaggaagtgtcttgtgatggtgctggaggatcttggctttcatgttctgcacaggaagctgacataggttatttttcctgggctgccaggatcttatggattcctttctatgggtgccctgaagatgagtagtttgtgttccaccaccagagaattaatcctctcccttcctgcttccaacctgtctatctgaaccatgctctgcctcaccccatttcacaactaattcttgttcattgcaagattacacttctgtttgtccagatgtcctgacacaaaattatccactttctgccccggcttctcgtgaactggcttggtatattgaccagacagttttggcaaaacttttcaaataggccatagatcttcaggtgttctactgtgagagcaatgagctgtcttccagagtcagtagaactgtgattgactgaaaggaataccccattcaattatccaaaatattcaaagaaatgtgtttttctagcaacattaataacacagcaacatttacacataggtaaataaaatgtaaacatatacatttcttagtttttaatcagtgaagaggatggacattttgaattacagttgttgctgtaccacagtgact

SEQ ID NO: 29592 - DNA, 1123 bp, Mus musculus
atgaaagactatgattgatgtttactggatagatgatataaatgtgggcgtctctgcaaacactagttctggtagagtaacaacccatgagaaaaaaaagaaatctatttcaatacagctctgtaattatttcagcactggttttgggtgtgttgtgggttattgccaatgaaattcatacagcactcagagaaaatctttcccagtgcctgtgttaacatctgaagtaaaaagtctcctggtactcagaagtcaagataaactacaaagccccatgggaccattgaccacacacaagataatgactgggaagaacactggagggagcctgcctgtgctcaggtgagaagcagaagagaaatgagtgggaggcaggctttgtatagggtttagttgtaggtgatggattttcaggattggaaatatctgcggttggagattgctggtattttatgttctgagcttgagcaaacttagggatttctgagtagttaaaaccagtaagtatgctatccattctccctgtagacaatgttgagtgtaacttttagattctgaccccagggtggttcattttaggaataattaagcacagtataattttggaaagaaagttcttggtaataattgtctcaatcctctgtgcacagtgaagatgaaagtgtgactacctcaaaagtcttttgcaaagtctatgtgagtctttcttggattctaaaactaaagggcctagaggagaatcaagcatacagtgtagaggaaaccaagctacaagatacatgtcacaactcctgcaaggcgtgtttgtattgcctgagaaacaatgatcaagggaagattgtctgggacaattttatagtttgggacttgcaggtgttttgtggcactacatctagcacagcttaccatgccacttactacatccattccctcacttctggtcagaaaaaaagtgtacttctcttccactaaagagagaactctgtggttttatgctcctggttaccttagagcttatttttgaccacaaggtccttttgctctctacagaaaaaaaaaattttatggatgtttctagttcttaagatgttaatatagtgttagtgtaaatagaaagacagtc

SEQ ID NO: 29593 - DNA, 1101 bp, Mus musculus
ccaagagttttaatctttcagtgtatattgtttcctaagtaaaaagtattttattaactaatgcttcttaaagtttaccttaaattcttactctcacccaaaagattcagagacaatatccttttattacttagggttttagtttactacaaaagtttctacaaaaaataaagcttttataattgttattaattagtaattaaaaattggttgtgcccaaaacaattctttggccaaaaaaaaaacattactgtaaagtcatttttctcatcctcccagccaatcgttggcccacgtgggcccaactagcttctgtggggcagagtcttaagacacagtttcccctgttccagcacagatgatctagttgtgtgctgtagatggtgttttaaaatactgaacaatcaaaccttaatttgtatattaatagtcaatgccatatctttgagctcgcaattgcttaaattgttcatccctcagatactattctcaaatttacaattgcttatgcatatttctagttaataaataaataaattatgcacatgtgactcttaataaccttgcaagccttctagttacaactgctccttaagaaaattgattgaaagtgcaattagtcactgcccctttacagccatgtgtttaaggtgttttgtcaactagttattaattcaaaagtttagatattgtaaaattttaaaactttaacttcttaaaagacaaaaaagagagaaattgtatccccgtgcatactatttagtgcattcccatgcacactattgaagtcttacctttattttcaaaatttaatattttaatgtcaaagagtttaataaatgctttatagtatcttaaagggatctacttattggcttatagattaatcctaaaacaactaccttattagaaaaggaaaaaacaggttttctccacagaacactgcagaagcatattagtaaattcgtgtgacgagctggtaggtaagttgactcatgtcctgattaaattgactaaaaaactaaattaaattcatgttttaaatccatccttacttgtcatttttccagtttagactagcttctagccttttaactttat

SEQ ID NO: 29594 - DNA, 1632 bp, Mus musculus
tattcatcagggaattcatacaggagagaaaccttacaaatgcagtgaatgtgacaaatgctttacccacaaatcccatcttattaatcatcagaaaattcatacaggagagaaaccttacaaatagtttacatgtgacaaatacaatactcacaatgtcagtctgagaaatcatgaattttttcatacagtagagaatatttataaatgaagtgaacgagacaatcctttaccaagatatatcatcttaaaattcattagagaatagttagagaagacaaacttttcaaatatattgtaggtatgaatccttttttttttttttttggcctatttcctagactgtaacagtgaatacttacaggctagaaacttaactcatgcattgtatgaagaaatatctttgacttcacttcaggatagagagaacatctaagaactttttagggtaaagtatttctgttggggaaaatgtggcatatgttttattcatggtgtcctggcaacacttgaggctccacactagagaattagtgtgattatgaaaatcttgtcaaaacattcatgcaatgttcaaatcttagataatgttaactatttatgctgtgagaaactctgaaaatgtgaaaatgtagaaagcttttcatgacacctttttacttgttcaccctcaaatgttaccagatgaagacaagttgggaagtcagaagatagtattgtgtaacactttcattgagactgaaataatccatttcaaaggaaaactatttaaggtctttaatgcaatcctcaaaatatctaataaaactgataacattctgtatatttaatttaaatgatccaattaagaaaagttatacttaaaaaagagtacctggcaaactgagccacccagacagcatattctttatcctataaatatgcttacagatgtgaagtgtgcttcgagtatctactaatcagaattcttctcaaatgcttgtttgtcattataggataacaaatgactctgagtttcttgtgatctggtcaacaactcctttcctattgtcctgtaactaactccaataaagctgaaagattcaacaagtttgctttggttgttttcaatttacacttgggatactcagatgaatatatgttgcatcttcccaggaaatgcctcacataaaacatatgcagaagtcatgaatatttatttttgcaaacctgtatcataaagttaatagtaatgattttcaactggtggataacaatctctttgggatgtaatgaccgtgtcatagtggttgcttaaaagcataggaaaacacatttttccaattgtcttaaaactgagaaatcatttattgaactgcagggtagtttgcccacctaagaataatttgaattcaatgtctgtttagcattaaaagagttagaaacactgttttacatatggtgatttgtgttaaatgaaataggtaaaattcagttcaatgttccaggcaagtattactaggttaagataaaaaggctcaaaaaaggaaatatgtagatgctttcagagcctcagaaataactcttgaattcaaggaagtatgagagaaaaatatagaaaaatacatgaaagcatggcttcatagatttcac

SEQ ID NO: 29595 - DNA, 1212 bp, Mus musculus
gtgaacagtctctcttgattctcattgcacatgttcagtggatttaggcctcactgcttaatgactgagagatcattacccaaatctgaagtgacttccaggttcatggaaaaatttctagaagtacacaatgaagacacatcttaccttgtacccctcacacaatattcattctataaccatttatacacacacttcttatctatggtactgcaagcatatggtggtggttgacaaaataggtccaggtagactctgtttgagttgtgtggaagatagcatgtgtatattgataaagatgcaagtccttggcttgggataattaaccataccatgtttgaagaacatggagacagaagctcactggatttggaacattaactatttgtggaagagcattgtaaggtaaataataagagccacactataggagccggatgggcatttctagaacttccagtgtctagattttaaggaacccactaggtctatgtcagtaccttgcagtgaaggaaacttctcttcagcttcaggacaactgatgggacagcctggggatgggaaacacatggagcaggtagagttattcctgggttgaaattgattttgttccaggagaactcagaagagggactgagggcctgaaggaagagagtgggatcatcagcccatcactgtcagtaggagtttggagctgcatggtgtggaactaggactagagaatacttcctggggtctacacagccatgtgaaaattcccttcctctgcagttgtccccaagttaagccttgtggaaattttcagtcaccagagcagtggcaggaactgcaaacaagaagatttggacactccaaggtcacagaagttgctatgctagtggacagacaggcactggaccaatattgaaatcccttactctgctgctcataataacactgagcctcaaattctattgtgcatttgataactgtgttgttaaattgctgaccatgtgtagtggttattcctggttgtcaacttgactgtatttggaatgaactacaatccagaattggaaggctcaccagtgacccttatctggaggcttggagatccttatctgaatcttggtttgaagatcttgagccatagtggctatggattccagaagattgaatctccgagtttaaggttacaccttctgctggagacaatataaggacattggaaga

SEQ ID NO: 29596 - DNA, 1173 bp, Mus musculus
tctctgctggggcattgaggcttcataggtctaagtgcctctcttccaattgatgaaagttaagacagtgctcttttacctaaacagctggagtcattggtccctccatgtgtgtactctttggttggtggtttagtccttaggagctctggagtatctggtttgttgatattgtttttctttttatgaggttgtaaacacctttagctccttcagtccttcccataactttactttggggtctctgtgcatagtcagatcgttgcctacaagcatctgcatctgtattggtcaggctctgcagaaactctcaggagaaactatatcaggttcctgacaacaagcactttatttattattggatcatacttactcctcatataagtaatccctgttatccctaattcccccttttttttcagaaaatcactgcatatgtggaaactatgagaaggagaaggtcttggaacaagacacacagcacattttcaatgagcatgggcatatccaagagaagtcttttaaatgtaatgagtctaacaatataattcatgaatcctcccaaagtacacctcataaaactaaccacagagatgccactcttcaatcttcaaacctaaaaagacataaaactcggaccactaaagaagtttgcacatataaagactgtgtaaaccgtttaaaggtgtcttctaccattagtctcaatcaaggaacccacatagagaagaaagaacacaacagaaataaaaatcttgatgaggttttggtttctaaacataaacccattgtgagacaaaacaatagtgaaatgaacacttacacttgtggtgaatttgacaaatgctttactcagagtgacaatcttcaaagtcagcagagaatttatccattaaagaaatcttacaaatatagtgaaagtgacaaatgctttacacaaaagttctatcttggtatccatcagaaaattcatactggagagaaattttataaatgtaatgaaagtgacaaatgttttaaacacaaattcaatcttagtatgcatcagagaattcatacaggagagaaaacttacaaatgcattgaatgtaacaaatgctttatgcaacaatcccttcttagtaatcatgagagaattcatacaggaaagaagccttacaaatgtagtgaatg

SEQ ID NO: 29597 - DNA, 1205 bp, Mus musculus
accttacaaatgcagtgaatgtgaaaaatgctttaatgaaaaaaacagtctgaaaattcatcagagaattcatacaggagagagaccttacaaatgtagtgaatgtgacaaatgctttacccaaaaatcctatcttaatattcatcagagaattcatgcaggagagaaaccttacaaatgcagtgaatgtgacaaatgctttactacaaaaggcaatctgataattcatcagagaattcatacaagagagaaaccttacaaatgtagtgaatgtgacaaatgctttacccagaaatcccaacttagtattcatcagaaaattcatacaggagagaaaccttacaaatagattgtatgtgacaaatacaatactcacaatgtcagtcttagaaatcatcagttatttcatacagtagagaatctttataaatgaagtaaatgaggcaatcctttaccaagatatatcatctcaaaattcattagagaatacttagagaagacaaacttttcaaatatattgtaggtatgaatcctttccttttggcctagttcctagactgtaacagtgaatacttacagggtagaaacttaactcatgcattgtatgaagaaatagctttgacttcatttcaggtcagagagaacatctaagaactttttagggtaaagtatttctgttggggaaaatgttgtattcttgacaacacttgaggctccacactagagaattagtatgattatgaaaatcttgtgaaaatattcatgcaatgttcaaatcttagataatgtcaactatttatgttgggagaaactctgaaaatgtgaaaatgtagaaagcatttcatgacacctttttacttgttcaccctcaaacgttataagatgaagataagttaggaagtcagaagatagtattgtgtaacactttcattgagacagaaataatccatttcaaaaggaaactatttaaggtctttaatacaaccctcaaaataggtaataaaactggtagcattttgtatatttttattgtcctgtaactaactccaataaaactgaaagattcaacaaatttgctttggttgtttccaatttgcagttgggatactcagatgaatatatgttgcaccttcccaggaaatgcctcaaataaaacatagactgaagtcatgaacatttttgcaaacctgtatcataaagttaat

SEQ ID NO: 29598 - DNA, 1178 bp, Mus musculus
gcatttacctttcttccagagctaagtccttctcagtcttggctggtaatttcctcgggctatttatatctttatcaccttgtaaggtttgaaataaattgctcagcacttgattggccaagccaattgtaggccacagccagttagtatctcccaataatttctgaaaatcattgagagtcctcaaatggtctttcctgatttgcaccttttgtgacctatcctgttacagacttattttaggtaataaagaattaatagaagccactcgttatattttttcaggggtgatttgcaatcttcagcaaggcaagttgtgttgttgttgttgttgttggttttttttttcatcaaacattctttccatgatatttaaatctgaattagcaaatagaatgtcatctatataatgacagataatggattggggaaattgtgaatcatctctaatggttgttgtactaaatattgaccatggccgagaccgaggagtggagcctggacaacttcttcaccaagagggacaagaagaagaaggaatggagcagtcgggctgccaatgcggcgagcagcacggacgggagcagcgcgtaggcgggctccaagccgggtgatggcgggagcttgggctctggtgctaggtcaggagacagcaggagcgcgggccctgctggcaaggatataatgaaggatgaaaatgagtggaaagaatttgagcaaagagaggttgattacagcggattaagagttcaggcaatgcaaataagtgaaaaggaagaagatgataatgagaagagagaagatccatctctctttggaagaaggtggaggtggcaatggagcagaaaaatcttcaggtccctggaataaaaccattccggtacaggcgcttccttgctccagtaacagttacagaaaccccggagccagcaatgcccagtggtgtatttaggcctcctggggcaaggctaaccacaacaaggaaaacaccacaaggaccaccagaaatatacagtgacacacagttcccatccctgcactccactgccaagcatgtagagagccggaaggataaagaaatggagaagagctttgaagtagtaagacacaaaaatagagacagggaggatgtttcaaaaaaccaggcccttaaacttcagctagacaaccagtatgct

SEQ ID NO: 29599 - DNA, 1843 bp, Mus musculus
ttaaatatccagaacaagaaattacatttctatacatataatagttgcaattataaaaatcttactattgctttaaaatgttcccttatttatgaatctaaaaatatacaaggtttcaagtggatatagagctgttggtttgggcaatttttttttatttaactttttgacatttgatctctgtgtttagatctggtacaacataatcattatcatagcattttagatgttgaaacaaatctatttagtgatttccctgacactatcggctatatcataaatttatacctgaccaaatttatacctgtttcagtgtcactctgaattgaactgtaaccatagaattagagatctattgtttagagttctactttcgggaaattcactacagatggatcctttatttgtcccagcttatgcaaagtacaattttgttttttatttattggtcttttatttatctacatgtcaaatgttatgccccttctgtttcctgtctggaaactctaaatcccacccctccgcctggcttttatgatgatgctcccaccacagatccacctactcccacctcatgcccctaggattctcctatgctgggatactgaaccatcacagtaccaagggactcccctcctgttgatgccacataaggcaatcctgctatatataaagctggagccatttgtacttccatgtgtactctttgtttggtgatttgatccttgagagctttgtgggtcttgatattgtttttcctcctacacagttgcaaagcccttcagcttcttcaggccttccctttactccttcattgtggtccccttgctcagtccaatggttggctgcaagtatctgcatctctttggtccagtctctggatggccttccctgcagcctcttttccattctttgtccctctttttcttaagacaggagcaattctgggttaatatatttgaggtgggtatgatgtctaatttgaaaataaaatttagcaggctattatcattttcaatcacttgatatagatcatatttgaatttctttgaggatacatgtaataattccaaaaaaaaggagagagagagagagagaaacctctcttgagagtatgaatccataagctcactggttattgagtcccttcttccttatataagtaattcatgtcacctctaattgccccattttgtttttgtttttgtttttttcagaaaatcattgcatacatggaaagtatgggaaggtcttgggtgaagagagccagtacattgtccatgaacacgtgaatattcaagagaagtcttctaaatgggacaagcttatcaaggtgattcttgaatccccccaatgtacaccttacaaaactaatcacagctctcttcaatactcgaaccaaaaaagacttaagcccaggaacactaaagaagtttgcaaatacaatgactctgtaaacagtgtaagtttgttttctaccattagtctcaatcaaggaatccacctgcagaagaaaaaacacaaccgaaatgcagaatttgagaaggtttttgtttctaaacataaagtcatggtgaaacgaaacaatactggagtgaacccttacaaatgtagtgaatttgacaaatatcttacccagagagaaaaacttcaaagtcagcagagaatttatcatggaaagaaaccttacagaagtagtaaaagtgacaaatgctttacccatcagatccatcttagtatccatcagggaattcatgcagaagagaaaatttacaaatgtagtgaatgtgacaaatgctttacccacaaatcccatcttaatattcatcagagaattcataca

SEQ ID NO: 29600 - DNA, 1159 bp, Mus musculus
cactaaagaggaagaaagaattaagatggcttggatctatctattcttttttctcatagccaacccccagtgtcatactttattcagtaatgttccaacagctaaattcctcaaacgattgtgacccactgaggacccaactttaaaagataaaagtattatccaataggagaatcagccttctaatatccttgtacttttaaaattgattttgatatcaatgtagaagacaaagctctaattttttgtatgggtttcctgtttgtttgtttgtgtgtttgtttgtttgtaaaacagggtcccacactctatttctaactttcacatgtccttatatagagaccagaatggcttttaggttacatccctgacagctaggatgaaagacctttctttgacgagctgattttttgtttgtttgtttgtttgtttgtttgtttgaatggtgtatcttcacatattggccattgagttaccaccaggcttacagaatttatttcagagtgagcattccttagatttttatatctctggataagatgttcacatcctgcacatgtataattattctcttacccacttgaaggaattctctggaatttcattaagtttgtttctgccttctttgaattcctgtgcttgttccctctttatgacatttgtccacattgaatggtgttcatattatattttgagtttgtttcataattcattttgtcatgagaattggtattgcattagtgatttggggtagggaaattttattaacattttcaaattgctttagctacagcctctcaattttcttttgctgtgtgtcatttaggtcaggtgacagggatttccatatgaggtgttgtgaataaactttgagaatctagggtggtgggaggaactaggttacacttacagtctaaatatatcattacttactttcatgactgcacattgtcaagattcctggtatcattttgcttttaatgtttatatatataaatgttgtttaccattgtctgtaatggtgttgtatttatttcatctctgaatcattcagaccttgatgtgaaatttcaagaagaattcaaactttgctcttcacagagaccctgggagaaggacaacaacaagaatgagtgtgtctctggtaaatacaccacag

SEQ ID NO: 29601 - DNA, 1136 bp, Mus musculus
cattgatttctagagtggttgtacaggtttgcaatcccaccagcaatggaggagtgttcttctttctctgcatcctctccaacatgtgttgtcacctgaggttttgatcttagccattctgtttgctataaggtggaatctcagggtcattttgatttacatttcttttatcactaaggactttgaacatttctttaagtggttttcagccattggggtgtccttagttgtgaattctcagtttactcaccattttttcattgggttgtttgggtttttttggtggttatcttcttaagttcttaatatattttggatattagccctctattgcatatggagttagtgatggttttttcccaatctgtaggttgttgatttgtcttattgactatgccgtgtaccttaaagaagctttctagtcaggaggtcccatttatcaactcttttgttgttgttgttgttgtttttgttttgttttgtttttgttttttcgagacagggtttctctgtatagccctggctgtcctggaactcactttgtagacaaggctggcctcgaactcagaaatccgtctgtctctgcctcccaagtgctgggattaaaggcatacaccaccaccgccctgctcaattcttgatcttagagcatgagacattccagttctgtttaggaaatatcccctggtgcctaatgagttcaaggctttttcccactttctcttcttttaggttgtgtgtatttgattttatgttcaggtccttgattaacttggacttgggcttcgtgcaaggtgacaaatatgggtctatttccatttttctacatacagacagccaaattagactagcaccatttattgaagatgcttccttttttccattgtatatttttggcttctttgtcaaaaatcacgtgtgcgtaagtgtgtggttttatttctgggtcttcagttccatttcattgatcaacttgtctgcctgtgtaccaataccatgctgtttttatcactatagctgtgaagacagaattagactgtgtttcctttcaggaatagcaaatgccatttacccctgagtcatctcttctttccagggatttacacttctggtacacttttatgatagagcctgaa

SEQ ID NO: 29602 - DNA, 1344 bp, Mus musculus
agctgctgagtattgggcgggttcagaaggaggggctctgaggaaccaggcagaaatgacaggaagttccatcttctcctggtaccttggctgcctcgtggtcaggaagtcctggagggagactagtgcctagtatttacagcacctgaaaacttccttaagctgcagttgttgtgctggcctcctaggacattgagcagctggtcctgtcaccttccaggtcagaggagctgttgggctggtaaatgggcaggagcagggcaggcatgtggagcaggggtgcattttctgtcgctactctcacaattctgttgtggatatcttaccattgtcaggaagtttgagatcctgtgacttgggttcatggtgatgttttaatcaattttatggttgccagaatatttttctaaagtatccttatagattcttggcttcatctggagtttgtataccgggaggtttgtctttgcaaaagcctttataaagctcctgtaattcaaattcgttcatgctttcttaactcccctgttcctccatttgccatctcatttccctttctccagggaactgagtaggcatcctgagagagctttgtagatatttgtcatatggggaattggtggagatttgattgaattagaaaatttcgttacgttataaagcaccatcatattgctgtaaatattaacattaacctaacaaagttatagtctccattagtttcacactgaggtatatgtagtctttgatgtaaatacagcatccagagatgcgtcttcatagtcttagttattaatgttaccccttaggtttcattgaagcatgaagacaggattgcagcaatgtacaattgagaagatatatagtaggttctgttaaccctgagtgttgtcagagaaaaagcaattctacaatgtttgaaagctttttaaaatattacatcttcaccaagagatggactttggtcacttcctactgccagtttcatatgccctgtcgtctaattaccatggcctagtcctgtaagcctctagcctcttaaaaatcttatttagtcctagagtgttttcaacccctgaaatttcctgcggattaagttccccctttcttttaggttcctttcaactcctttttttttaaaaaaaaaaaatgttttcttggttttcccgacagggtttctctgtgtagagtcctggctgccctggaactcactctgcagaccaggttggcctcgaactcagaaaagtgctgggattaaaggcatgcaccaccactgcccagcctcatttcaactcttaactgtctggttcaactcagctgttcaggctcaaactactctcccag

SEQ ID NO: 29603 - DNA, 1169 bp, Mus musculus
tgttgggtgccatggcaacagatgcaggggctgttgcctacagatgaggagtgtcctcactgggtctagaagttggctgtaaagacacttctagctgtccacagatgcacctgacgctaagcacattgcttgtatttgtaggatttctcttcattataaattcttttatgacatttttgtgatagtgacatgaaaaggctttactggattgattacttttttagggttgggcttcggggtgaattcttttctttttgtagactctagagaccagtttttttccatattgtgtcccagtctaatcttgtaggacatttgtctgagggaaatgcaaaggcagatacagatcaacacatcctcttttccttggaaatatcgacctaaaggaagcacaaatattttaggcaaacttccattagtatgcagcattgataaaatgagtttcaataacaacaacgacaacaaacagactcctgaacagaagtggagtgctcttcatgtacaaaatttaatatttgtaacccttgtgactcacacagtactgttgcaaaatcatgttttgcacattagtaatactcacaatcctagtttgagaggctgaagtatgctcatgtcattgtggacactttcagaacaattacccttatgtacattgatgcaaaatactcaataaaatactcaaatactgaatccaaaagacatcactaagaatccatccaaaatgatgaagattgttttctcatccaatatatcttggggagtttccattccctctagtcttctcagttcctgtccactttttctcccttctggatctccctttctgtatctcagtaggaaaacaaacaagcaagcaaacaaataaaatccatagactcactaattgacaaatctgcccccaaaaagctaaggtaaaagttataatatatttcaaaagaactagcccaagcattagtatttgtacatcacactttctagtctcaaatttctgatatatgtttgtgcattttttgtgtgaaatattttgctgattgctgataaagtatattttcctatgggtccttttaagtgaagatatcaagaagctaaaatttcaaaggggaagaaattttttggctcagctttgagttcattagtcagaatgaaagacgatgattgatgtttactgg

SEQ ID NO: 29604 - DNA, 1292 bp, Mus musculus
cacaatacatattgttaggaataggcaagtgtatatgtgtccataactgcctcttctccagccatcttagccttggcagactcattggatggtgatgagaatgagtgaaatcatttgaaggcatctgaatgcttggtgttaactgcaagcctcccacctccaccggatgcatggcatgaactttgtgccagggataattctgccttcccacacttaagaatctttcctcaatttcgcagcctcctctggtcgggctccaacaatctcctgccttgcagctgcctctttaggaccacaggacctgacctgaggcttaaaaaggggatcacccacaattgtaaggactgctgtctactcagggcttcattcccctgagtccaaatgtgatccttaacttactcaggtagaggctttgtttcacctaaacttcctcagctttgatgatcagggactaaaccctgtctataaacattgagctttcctacccaggaaaacccccttccattagtatagtggagtggtgccctaacatcataatgtcagtcacctgctccctttctgacacagggctgaggatatgtttgtgtttttccccaggaatccacaacaccaggatgaatggcagtatgggacacccaaccatccagggaaaagtagaaaagggatgaaccctgctcctcctcagaacttttgggtgaggaggctgcacttgtaggagataagtctctactcgtctgtgatccctgtattcataccatttgctttatacgctattaagtacaaaatatttccgaggcatatgaacaaactgtcccatttcagcaaggaaacttgagctaacatagtcttaaatgattcagtactctcagaaaaagtatatccttgctcaatgagagcagggtgtccattcttgcttttgatatggggttcattggaaacatttgggacaacttaaaaagatcttttgacacatcctggatagtatcttatgctataataataataataataataataataataataataataataatagtaatagtaataataataaatattgcttaagtgtcttgtacaacacatctcttggcaatgctctatctgcataggtatgcttcaactactggtggctcttgagcatctagactaaggcctacccagagaggctatttattatagcttagctcatagaaattccccagggttctgtttaggttccctccttacaccctgagatgccctctgggatggctgtcctttcagggctggtagtcaatgaaggctaagaa

SEQ ID NO: 29605 - DNA, 1100 bp, Mus musculus
atctgaaaaccatcaaatctatatcatgtcagtcaatgctaagcatcttgagttagctatgagagtacaacaagtcttcagcacccgtaagaaatccaagcacgacctaaatgttacttgaaaatataggaagcgtaaagcatagcttccaaaacccaaccaaactgtagacacagctgacaacctggacagtccctcacttctcaaaatggtggagtatcagtcttcagccttctggccaggatcatctgtcaggactttgtaaagcagaattttgaaggacagcttagcctatcttgacagatctattagttgctcttccacacagtatgtccttttcctggacaggacttctgtctgtagatgaagtgaggcaattcttctctggtggctatctcaccacaacttgagcaactccactgatgcacatttcatgattatacaaagagtggaatcctgtcaggagcagacatgtctctagtcaaattatttttaaaaatgaaattgccttattgtcgtattctgtggaattctggtgccttgaaaactatctgtgcaaagcatatctgaactgttaagccttgactactctcaaccatttctgattgaagtatctcaaagacaaaccccttttataattatcaggactatgattctgttacttggcccttaacttgtattttcaatcatctaaaaatagtttgtaatagcagatataaaaggcctgagtatgcttttttttgtttgtttgtttgttttttcgagacagggtttctctgtgtagccctggctgtcctggaactcacttggtagaccaggctgggctcgaactcagaaatccacctgcctctgcctcccgagtgctgggattaaagtcatgcgccaccatgcccggctgagtctatgctttttattcttaaatgtgttgcatgggcacaaatcctattgaatagcaataatattactcccaattttttgaatcaatctatgaatttcatacctttgaaaagcttaattgtattgaaataaattctgtagaaatataagatattataacttcaatactacatcaattataaagatttctatcactgtaagat

SEQ ID NO: 29606 - DNA, 1133 bp, Mus musculus
acttgatccagcaccatttgttgaatgtgctgtctgtttttcactggaagtctttggccatatattttcttctgtttacctgtttggggtgtagatgtataccaactttgtatgatgactttctagtgtttctcttctttgccttttacacaatgttatccttttggcattagtataaggtttgcctaaggaaagaagaattccatgctaatctgtgcagtcctcagatactgtcagaggaaactcttcctgcttcaatctgacccatgatattaatgctatctaaagctaacttccttatttatttcattaaatattctcaaattaattcttcattaagtattattaattcttctttatgaaaatatcaaatgaaatcacatcacaatgtatttgattgtatgtcttgtttttaattttgggtgtagacactgactttacacttcttaactgatacaatagaaagaaaactatttcttttgagtcattctttttttttttgatttttgttttttgtttttttgagacagggtttctctgtgtagccatcgctgtcctagaactcactctgtagaacattcttcctggcatctccacattaggactgaccattcaggagatggtaccaaggactcgtttcagtaaaactccagcaccaatagcccagcaaagaacacagaactcagttacaatatttataagctgcatgccttgggcagatattccactatactattctattctccagcttttagaacccttgctacctgtggcttctcagggtcatgtgttcttctccatcattcttccacctcttcttctgctaacttcccctgcctccttcatctcctcatctgcctcttctttttctgtctttgccttttctaaaatctccagctctacctttcccttctattgcccaatcacaagatctggcaattattcgaccaattaaaatggagagaaggttcacatgaaactacatgagtatatcccactgttcattggggcagcccctcttgaggaagcagaataagcattaaagtacaaacagcaccagggcagtccacatttcgttcattcccttttgttcaactaaaaggctcttttctctcacatgtaaattgagcaca

SEQ ID NO: 29607 - DNA, 1191 bp, Mus musculus
gctccaaggagttatgcatgtgtctgtgtctgctcctcacgctcacccggttgaaagtcactgtgcatttgataaagttttcctcagaatggcaccctgcagaatgactgatgggcgccttcacaggcatcaggcagccactcctactttctccagcctgagcacacctacagagagacagtgttgggggtgacaggatgccccagaaaaattcaggatacttctgaaattgccatgtttgtctcagaacttgtatcttgcgtttggccctcagctttagcactttttcccacttgcagagtctttcagttgtgcttggtagccaggctcaacacaccggggctttagactcaagcagcttatatgggaagctggagacccctgccagccagagcacagtaagggctcggagaaggtatgtgaactagggtatctgatgtggtagtgcagttggtgtctggcattgtgacgacaagggacttgcctcccttcttgccactgaggcccttgcttttccttcagctcttggcctgttggtccggtttattagtgagagctagtttgctccaggtggttaaaggatgtagcaggaggaatggtggaagatgggagctgcccgggttagtacagaagaggtctgtctatctgacctagcactgaggggttcacaaacctgtgaggtgcacctcactaattttggctcatccctgccttgctacaagctccctgtggccaccattctctggactgtaccgtgctgatgactgcagctggctacaaaacagcatgagaacctggccgctgttctcctactgcctccaccctcaggcaggcctcctcctcttctgcccctgaagcctcctgctgcttgctcctcctgcctccaccctcaggcaggcctcctcctcttctgcccctgaagcctcctgctgctgctcctccacctcagtcagtgctgaacttctcactgttgagtgttgaaattgttaatggtcaaagcagggaggatgccagtcaccaaggttgattgtcttgggaaagcagttttagagtgatgaatcctttgtaggacaggtagagagtatcttagagataaaaaaatgggctatgtcctctcctgcccatgtcttgtgctcactcgcccctcagtctaccctttttgctgggacagtgatggtcttggccaaggtc

SEQ ID NO: 29608 - DNA, 1175 bp, Mus musculus
gtttttgattgaccctctgactgtggcatgcctgaccctttctacactcgctctccctttactcttatagctgtgagcactgatgggactagggatatagctctgtcggaagagcgcttgccttgcatgaatgaaggcctgagttaatacctagcatttccccacacaccacacacacacacacacacacacacacacacacacacacacacacagaggacactgaaacttagactcagataagggagatgagtcccttccttgtcacttagttgatgagcatcagttagaatcctggcctcttgtttccaggttaggctcaccactgggatgctggggtctttgatgtgagcattgggaggtgttggtggtttcagcagagggggaaaagatcccaaaagcaggactgcaggccagagcagatgtggataagctctgctcagctgctactcagttctgtgtagatttaaccatgaatagaagaatcctgcctaagccgccatgtgcccaattgatccagtctctgtcccctcagggaattgtctgggacatttgctcatctgtgccagcaagttgacatcacccgagataatctggagcaggaaattgctgccatgaacaagaaagtcgaggctctggattcacttcagagcagagccaaactgctcaggtgagtggccaaggaccaagtgggggaggtggagcttgtctgccacctggtgtctccagtgtggacactgggtgctctctggggatttcgctttcttgtgagatgtttgcttggcactgctgaacgtgggatggacagtgctagtgctggaggcttaacagacagttccgctgtcctcaaggtgcttgcagatggggcagaatgacatccaggaaacaagcaaggcagtgctggatgtcacagctcatgggttgccctctgaacttgggcctcagcacttggcacagctgtcccacccagtttttgtcacccctataggtcatcagctctgcacattttgttgtgtttgagacaggatctctttgtggccttgactgggctggaacttgccatatgaatgaggctagtctcaaatgcactgagctccccctacctctactccccagtgctggggttaaaggtgtgtgccaccacacccagatcagctctgctttctaataggaaa

SEQ ID NO: 29609 - DNA, 1099 bp, Mus musculus
agttttgttcagtcaagaggtatctccctggcggggcagtggtgccttacgcctttaatctcagcacttgggaggcagaggcagttggaacactgtctcaaaaacaaaaaacaaaaaaaaaaagtagctgtagaccaggctggcctcaaactcagaaatccacctgcttctgcctcccaagtgctgggtttaaaggcgtgcgccaccactgcccggctggcaagcaagttttatccacgaagtgcttgctttagtctggtttgggagaagacaggaacatgaacattttaagagggacaactctggaaagctctgtgaagaacctggattgtgtagtactggcaagggtatggggtgggagggccacccctctgctccctggtatagagacactcagttaggcctgagtggcaagaagcagccagtcatgtgaccagaaagagggcattcaaggctggagactgccctaagcaggttaagccaggtgctgagcaggatcagggcggtgtgaacttgaagccttgaggaaggaccaggagtttattctgagatgggagaatgggaatgagcagagtatacactaaggggaaataggtacatagacagggcaagggggtcttgggagcccaagggcaggaggagacatcccagtcatgacatggacatagaagtggtgggtcttggtgttttggagggaggactgttaggcagtggtttgtctgtgggaagcgagacctggagggcagctccctgatttggggttgtgaacagttcaccctaagtcagttgtgcctgtcagatacccaggtgcagatgctgaggggggtgatgagccccatgagtctagactcattttaatagggggccatgtcacttaaagccacagtgctgaaccaggttagggtgctttcaggctgtaatctagcactccaggagagtgaggcaggaggatgacatacatagagagcctgcctccaaaaagaaaaaaattgaataaaatcagatattaagatagctttaataggaactggagagatagctcagtggttaagagtacttgttgctcttccacaggatctgggtttaattcccaacacgc

SEQ ID NO: 29610 - DNA, 1359 bp, Mus musculus
ctattagttaactctacgtcactgcaacaaaagcgatttgctgaagaaagtttattttggcttacagttcaaagaggggcaactcatcatggtgggaaagacacagtagcagaagtaggaggtggctggttggtcacacggcttctgcaagtcaggaagtcgggagagatgaatgctggtacctagctacagtcttggatctcagtccatggtataggacaaccaatatttacggtggctcttcccgcttcagtctaatgtagaaaatcttacgtagacaggcacggatgcgtgtttctgtggtgatttaagtcctaccacattcaatcaagatgggccatctcaggaagtaaggacagctctaccacacccagggcactgctatcttttattgctgatccaaagctctaccttctgtagctctcacctttgttccatctcttctgcctccagccaggccttcctccctaacgtgcaacctctggtattacaggtgtggagatgaagaggatcacggatgctcacacgccatctggcctgaccgtgaacctgaccctgtactacatgctctcctgctctccagccccactgctcagcccctctctgagccacagggaacgcgagcagatggaggcaacgctcaactatgaagaccactgcttcagtggccatgccaccatgcatgccgagaacctgtggcctggccagctctcctcagtgcagcagatcctgcagctggctgacctgtggaagttgaccctccagaagcgcggctgcaaggggctggtgaaggttggcgctccgggcatcctgcaaggcatggtgctcagcttcggcgggctacagttcacagaaaaccacctgcagttccaggccgaccccgaggtgctccacaacagctatgcgcttcacggcatccgctacaagaacgaccacatcaacctggctgtgctggtggacgctgagggcaagccctacctgcatgtgtctttggagtcccgaggccaacccgtcaagatctacgcctgtgaggcaggctgcctccatgaccccgtagagctgacctcagagcctggaggccacaccttctctgtcatggtgacccagcccatcacaccactgttgtacatctccaccgacctcacacatctgcaggacctgcggcacacgctgcaccttaaggccatcctggcccacgatgagcacatggcccagcaggatcccggcctgcccttcctcttctggttcagtgtggcctccctcatcaccctcttccacctcttcctctttaaactcatctataatgagtactgtgggcctggagccaagcccctcttcaggagcaaggtaggttacctc

SEQ ID NO: 29611 - DNA, 1430 bp, Mus musculus
tagatctaagacattatccctgtggtctgcttccctgtcagtgtgtatatttttctattttgagatggcctcatgtgaacttgctgtgtagtagaggctgatatgaactctgatcctcttgcctctacttcccaagtgctgggatcctggagagtgttcacccccgtgcgtggctcccctccctccccgtagctgtttctgcagcttggctgtgggttggtggtaaacagtgctctcttgtttcactgagcaggaagatcccagtgtctgagtgaacctcgagtcctgctctcggccaccgtttgcacaagacacccagcactgagcatcctgctgccgcatgaacagggagcctttggaaggaccaaccctttgtgccttgtgggggacagtggctcaggagcgctgtgggtacaggagtctgcactggagggaaggagggccgaggacttgtgtaagttttccagtcagtaaacaaacccatagggagcatacttgaagctgagcgcacccctccacttcccccatttcttcttctatcccaggaaatagatcctttttgaagacgtgtttaggaaaaattgtgttcttttcctaatttaatgtgttctttcttgaatggatttctaatttatttttgttgaagttttgctgggtggcttttcttccaccttagatcaggactgttggtgacaacaaccgatccctgccacctcattggcacccagaggccccacaaagtctgaaggctgggcctgagtcccagatggccaccctgcctggggaaggcgtgctccctgccctccctggtttgcacattgcctctttcttactttgagccaggggtctgtgcttttgtactttgggtccctgggagaggtgtttaactttctagtgatgatggttgttgggttttgaaataccaaagcttttttgttcttttttaaataaacatctttcaaacttccattactggtctgtgtgtggttaaacccttgagcacattcatcacatccccccatcactagattcttggggtggtctccagcagtacactcgacctcgacaagccgccttctcttgtgactgttggttgtgctgcttcagggcctggaacatctcccctgctctgctgtaggcatctcctcccttccctgccctaagggttctggaccctccagccctgggtttttccagctagagggaagaggcaacaggcagtgctgggcctttgctcacaggaggagagggatcagaaagggactaaaggggtgtgtggggggatagcagctcctgctggcggcttcacccttggagtgtctccccccacccacccccggggggggggggggcttccctgactttgtgactcaccaggaagcctggcctgattccaaggatttgtgtgtctaccacaacaggtgttcaag

SEQ ID NO: 29612 - DNA, 3174 bp, Mus musculus
ggagaaagcaggtggcccagagtccccttccagtccctcttcctctcctgctaccagctttctcccatttcaggacccactgattccatctgtgcccaggctgccatgactcctaacttcccctgagaggaggaagtctgtgtcgtgtcctcacgctatccaggtcccagttctgtctgtctgtttctacatcctgtgtacattgacgggaaccagctctctttacacacagtcttcctggtgggttttagcctgtgctgacctgggtgttttctccttgccctagatcgtggggatcattacacggcacaacctgacaaatgaattcctgcaggcccggctgcggcagcattaccagaccctctgacagttgcacccggctgaagccagcccactctcccagaggtgcctctgcaggtggcccgctcacttactggcccccacagccggcatgaaggctcccactcacccgtttgctcagatgcctggagtcctggaagatgggggtcagaagtttttggggatgtgttgagtaggaagttggggttttactaacttcctctgtaagaatcttccattccccagctcccctaaggagacgtcagggtgccgtcgggctggatcctaggtggacacttggtacctctctgttgctgtttcttggagagcccagctcttgcccagaccctcccgggaaggtgttggactgaggcaaacattgaggatgttatttgcatatcatgttcattactaggttcaagaattgggcactaagaactgttccccatgtttggggaggcctgggatcagaaccaagacttcagatacattctgcctcttcattggcccaactttcttctccttctgtttcctaggagcgggttcatgctctgaccccgtggcttgaatgtctttagactcattcctgaccagatccttgatgcactaaaattccagctaacagcctttgaagcattaaatcccaccacagggggacagcttctcccttctgtgaacattcagtagtccccactcactgattacacctgttctcccagtgacacacgctctcctcccattgtcattcctttcctctctacaactactcgactttctaagccttcatctgtcttcctggtgggacagccacaactttatcttggattcattcccaaagtcaaccaaaattgaggaacccctagacagaaccactaccagagtcctggtgaatttgagatcactctacaagctggcaagcaagctgtcctgagccaggaccgaccaaaggtccaaccttaggagaaagccaatggcccctgttgtggtcgctactcgagcccagcttcccagtgcactcccgactcggcctcttcccgaggacttgtaggggaacctgtgtggctgctggtctcggggcccaggtaggagtgggatgctcttgcccttgtgcttcattacttcatggcttctttctctcctggctgctggtcctctcggaaccaacatctgagtagggacatttgcattcatcttcctgcaacccaaggcccttgtggcagctgttctttggatacatgtggcattcatttgttttagattctttttaaatcatggaacttggtggtaggcatctgtgatacgcttggcttctagtagtgtggccaccaggcctggcagagtcctctgaccagcactcgggaaattgttccacggccatggtcaggggctaccttggatctttagggctgacagtgaccctggccctctgttttccccatttgcttacctttttaccagaaagagcttgacttactctgttttcaacttctgactgggggttgggagtggggtgggggttgaaactcttcccaagtagttgggaaaatagctaagcatggttgtgtttggccgctgccagcttcattttatggctgatttcaattcctgccctgctgtgtgctctatcaagaagaaaaccagttgctcccactaagagaaaagtgtgacacaccacagaactgtcttcccagcctggtgggtttgcagaattgtagcctgtggaggacctcagtccacagcttccctgcctccaagccagtcctgttgtgatttgtccatcgagtgtgtgtgtgtgtgtgtgtgaccatcagtttagcccagagtggacagggtccaggcatacccaccctggcccatgctcctctaggacactcagttttctgggtccctgctgaacctgcctttccagaaaagcccaaagacaacagctttttcacctgtgaactataactaagccgtggacccctccacccatggcagtcccttcgaactagtggctcagtctcttacttgtcgaagcttggtcccccaccccatcccccaatgcaccacagcaccttgtcagacacagttccatggggggtcactgaggttggcttgaggcagtttcctggctggcttctgcgcctgggcatttgtgtggctccggtactgctgtgggagttgggtattttatgagatgtctgcatgtgaccttgttaagcagttccagctgggacggacattagcttgactcagctagccatgtgacagtttgatgcagaccttggtgacaagaaagcttccggagaggccagcccagccttcctggcccagccatgttgacaaggagagttgcccttggctcctgtggacctcagagactgtccagttgcagcttccgcctttcggtcatactgtgtttatacggtaacattagctgattccactgtgtagataaatggtatcttttttaatttgtaaaagtctatttttatttggccctttggaaggtggacgttcttgtggtcactcttaagtcagaataaaaatgtctgcaccttctctgtagaccttgtctccacggtgctcgctcgctcttaagtagggaaagttaaggcgctgtagcaaagcagtctgtttctaagacaaggtctgatggaacgcaggcgatgacctgagctgccctgcccctccgtaccttccacatgctgggattccaggtctctgccatcagacccagccaggaaaggcagtctgctggcccgcacctccctttcactgcctgtccccacccctctttcttctgcggcacctgtcacctatgcacacttttggtctgttgatcttttcttc

SEQ ID NO: 29613 - DNA, 1163 bp, Mus musculus
gggtgactgcagtggagagcagccttggagagaatgagcagaagcagccaggaggaggaggtccttttattgtcccagagctccaggcgctggcccctccaactgtgggcctgttccctccctcggaaggctgggcttggttctcttatttctcaggaatatttcatagctgctgctggcccctactcaccccatgcctgctacacctgagccactgtaaactgtttccaggagcacaggctgctgctagttcttctcatgggctcttggctaccaaacgctggtgccacttttcaaaggcttggaggcagggcaggaagtactgcttgtctcaggctccctccagggtctgtactgggcctgtcagacttgacacctaagccatgttctgtgtgtctcaaccagaggccctttcctttgccctggcagccagcccaccctgtctctgcccaaatatctaggctcagaatagactggacttgtgacccgggaagctatgccccgtgacctgcaaacaagacatctgttctggacgcaggccctgcaaggaccagcatggggagccactgccacaaacagactggttctctgagtgagtgaaactgatacttggctgggcttgaggcccctagtcaagggctctaatgtccaggctgtgtgctctgtaaccaatggccaattcaactgaatgaggatagcgcagggtggtgagcagggacaccctcccctctccctggctcagcctggaggtggcactggtcttggagggctggctgggtgaaccaaggtaaagtcacctggaaaaggacccggctctcttctctctggtgtagctgttgagccacccggagctgaaggacctttttctgccatgtcctccacgcctgttccaggtgccattgtctgagctacagagagagttgatagaaaagatcctctgccatcctgtcagccctggcccttctgctgccaccccagggtgaaggagatgtgacaaggggccatcacctaagaaatgttaataagtgatcacacctgagcccatccctaaggctttgggcatgaggtgcaattagtagttagtgcctccagctagccaagggatacataggatgagtggggagttgttcccagggcctctgcttggtacagaggagctgagc

SEQ ID NO: 29614 - DNA, 1158 bp, Mus musculus
gctgaaaacatctaagcagaggctggctcagtactgcggtggagctcaggccagccctgagattgacattatgctcctgaattaagctttagatgttgccgaagccttgcctctcacatgtggcctgactccaaggtctgggctcccaactaatgcagcatacacaggggattcacagcaccacagaatggctcgccacctgcacgtgttgccaggggaaggctacctgggcatgcatgaacctgtggtaaagagcaggaccctgggtaccattctcagtgtctgcgtgtttctagaaacctcagtttatcagcatatcagccctgccttcactaacaagaagagaatgaaagtacatatacttttaaaaggttctagtgtactggtgaaatttcacgacgctgaggcaagagggcgagaggctgcctcatgagcttgaagccacctggactgtataagctgggtctacaaagcctgtaacatcaacaagcccaacagcatgaggcccatggtgtgccagcaccctgagcccgtacgaggattctgaaacccagcaacgctagtcttgcaattctgtttcaaaggcaaagccactttgatgccttatgttctttccaaagttaattctgttcctctggcatctgagcaagagtcttggtgaggccagattgtctttgggaacactgtctagcctgccagggacttgggctgagtcccctagttacatctgcagacctctaggcagtgttgtttcttgcacctggcatttgtgattatctctctcctcctgataggccttcagcctctcactgttgtgtcagagctaagaacttctggtctgaaggtgactttttggtacagaaaagagaaaaacccaaatttctactttattttctaaaatgagcacattgcatttttccaattaaaaaaaaattgctgtctccatatagctgtttttaaatgcttagcgtaatttatttttgtgtgcatgtgtgtgtgtgcgtgtgtgtatgtgtgtgcgtgtgtatgtgtgtgtgcgcgcgcacgtgcgtgtgcacacacctatggaagccagaacaggccattgagtcaacagatcacccggagcttgagcttcacagggttgaaagccaccaatgtggatgtgggtgctgggaa

SEQ ID NO: 29615 - DNA, 1766 bp, Mus musculus
cagtttctaggcagaaggaaggcctggagtatcagtgccgtgtctcttggaataggtcatgcttgcagagacgaataaggtgaggcaggggctcagcctaagtagctaagacaggtcccagagcctgcatccctcagatccagctgaccttagggaaaggtggaggaggaatatctctggaagagccccaaaagcagactagagcaggggagctgggctttctcattggtcaatggctgtcccacagtggatgacaaacttccagctgatggaggagaggccccgaggcaagcagaataggtgggtgaagagaagagacatgccctagaggcagcagtgggctagagagggtctaagtggaggggcagccccccaggaaggctggcctggaacactggccagcatgtggttaggaagtggtgtggctggagcgcttagtgtcagatagcagaagagcaggttgggagccaccatggggactgccttccactgagtaagaactcaagagagcatgcatcggtatccgaatctgaatgtgactggttgatactccctagaaggatactttgtacttgttggctgtgggaatgtgacaactgtcacctcctggacacactctgaaggtgggcctgcgggaactgctgatgcaccgaagagagaagccaggaatactaacagtaggattggggctgtaccctgtagttgccactgactggaaagccaagaggagcacacaggctggtggggcacaggatggccaggcagggtccagaaggctgtgcttgtgggacggggctcttcaaccagctgctctcacgggcacctgcctttgtgccacaaggccccgtggtggtttggaaacaggctggcccccaggttttagtctagagcctgccgttcttgggaggtctcttacctgttgcctgcagagctgaagtctcttgtcctgtttgcaagtctattgcttgcttgttgagttgaatcttcctgagaaactgcccctgaggcactcagtgttctgtctgccaaactgctggtgtgccctactcagtctccagaacagccctgtaggtccagccctctctgcaaccagagaaccttgttttaaatttcaaaggaccagtgagatggcctgttggggaagggccttgtcactaaaatatgagtttgatctctgggtcccatagggtggaactgactcctgcaagttgtcctctgacctccatgttagtactgtggcacatgcctcctccacaaataaacgtaattaaatctaaaggtaccctgagatttctgtataggaaacaactgttttaaaaaatctcactgtggggaggcagagacaggcagatttctgagttcgaggccagcctggtctacaaagtgagttccgggacagccaggactatacagggaaaccctgtctcaaaaaaacaaaaacaaaaaaccaacaaaaacaaacaaaaaaatctcactgtgtctcagtttcctgttctgaaaagtggggataagatgggccattgagatagctcagtgggtagagggtacatactgccaggtctgatgacctgggttcgagtcctaggacatgtataagaagagacttctcacctccatataaacaccatggcacttggcgtgtgtgtgtgtgtgtgtgtgtgtggcacacgcacacacggtaaaaatgtaaaataaagtgaggataaaaatcgtgtgtgactcagggactagtgaaggttgagaatagtggaacctcgatggtaata

SEQ ID NO: 29616 - DNA, 1123 bp, Mus musculus
tgagtcatgtgcccttggaggtcaagagcctctagcttctcagtggagaagagcccagtcctaattctccaggctacccctcccttcaagacacctgttaacccctgggctagagctgtggttggttttttcccctcctaccccataactataacacactcctactgaactgcccagagtgctcagggccagccaggcctcatgggttagtgatcactgccgctcgggctgccccatggtgatcagcccttcctagaagctctgtgagcttgtggtcccgctcagcctgctctgcaaaggggcaaagttcctgtgcctgtcacggcctcatgacttggtgtctgagaaccccaggcctggatgcagtagttcttcagaggcccctctcagagtgctggcattaaaaattcaggggttctgtggctgctctgtgtctgagccacgattgagctccaagcacagacccaccctgctgtcttggtatgatttttgcctttgagtcaagagcctgatggaaggaagggctacctgtgggcctgtggggggagcctgactgtggccaaacggtcagtgtggcatgtggacagacatctgtcctctgaatctaagtgactatcactgcctctgatactgacccatgaggcagggcatgggtgactccctctatctcctgcgttcttaccacagtcgactgcctcctgaggttccagggcccctattcttactgccagatctctggggacagatacttgaagacttatggggaaccacaggctgaggtgactgtcctgaaaggactgtctgcacacctgtggacaggcagggaggctgagtgacagcatctgtgaaaagtgaaccccaccccccacccccgcctctggacagggtcactgtggaacaccatcccatacaatcagcatcccatacaatcagcatcctgagcccagtgtgagcagagtgaggagcagcgtgtgccactagagggaggtagttgtgaggcaacctctcacaaaacccttaggtttgtttaggttgtatgcagcacagtataaaacatgagccggggcccagagacgaggctcagcagcaggtgaaaggagtcagtctactacttagcgtgaca

SEQ ID NO: 29617 - DNA, 1177 bp, Mus musculus
gaggcagcagtcttgctctgctgcccagagtggcctagaactgctgggctcaagcaagtttcaacccttagctttctgagtaactctgactccaggcagttacggtggcgcctacctctaccctaagggctttaactaaaagtcctggaacacaatttagaagcagagtgcttgctcaggatacacgaggccttaagttccatcgctagcactgccaaaaaaatttttaagagcttagttttgttcttgtggtttttgaaaaccaacctaggctgacctgacctagtagtagcccaagagatcctcctgctttaggctccttagtgcttggaacacaagctgccaagtcccgcacattgttcacattacatctcttccaaacgcacctagaacaggcccggaggacttccaagggccacactccacccccaccctgtaagcgcttcctggcagggtttccggtcaggggtggacctgcgatccagaacctgatgggaggggaggagtctgctgtttcaggtcctcagctcactgtcttccccctaccactcccaggtctgggaacgtaattctctgttgccaccatggtccacatcaacgagctgccagagaacattctcctggagctgttcatccatatcccggccccacagctgctgcgcaactgccgcctggtctgccgcctctggcgagacctcatcgatgtggtgtccctatggaagcgcaagagtcttcgagagggcttcttcaccaaagaccggtgcgagcccgtggaagactggaaggtcttctatatcctgtgcagcctgcagaggaacctccttcggaacccgtgtgctgaaggtgggccggccgggggcgagccctgggagccttctttacttccctgaaccgcagggccttggtgcttgcctgtccacgctagctaacgacaaatgtccccgtgtccctaacagtcctacactttggttccttgttctttgggtctcggaccagcttagagtcttcatctgttacattgttttataggaatgtttgggggatggggacatgcgcatgccgcgggacactcaagaagagagagtagcttgtggagttggcactctacttccatcatgtgggtcccagggatccaacccaggttgttaggcctgacagcaagcaccttacctgcata

SEQ ID NO: 29618 - DNA, 1183 bp, Mus musculus
ccccgcaccccgtggtaggaaccgggacccaaacaaaggcgggcagcagataaaaggcggcggcggcggcggcggcggcggcggcggcgagtgcttcgcgtgcgcgctggggacgtagttgtcacggacctggcggcggtctgctcgccagcgagcggagcttgggggccgctggcctcctacagctctgaggacctttcctcctgaaattaccctcaagggacaagtgttcgccgcggggtggccgaagccccttaacccctgcggcacccgtgtatcagcctagctcggctcagccagcgaggtgagtgagactgcccctgggcgccatcgggactggggatgcgctactctggagaggggaagggtctaacgtgccacatgcgcccggtctgggggcggggagaggggggagtgcgggaagttctctcgctctcaggccacccccggcctcaacgccctgagaaagccggctaatgggacagagttcagatctcagagcttgtccctgcgcccccgaagcttgcaccaacacgctggggacgggctgcagcttcggtctgcgggagcgtgtttaatgtccagaatcatcctggctccctatctccatacccctgctcgtctcggtaggtgtctgtctgggttcataaaagttgagcgtcagcctgaagccatcccaaatccggctgtccgccgggacttcagaggagggagggaacaggaaaaggtaacgatggcccctgtagctgccccctacttgagcgcactcacgcgcttggtgggaccttctttgagtcttgggctgcggtgaacccgctgcaggtgccgctgcgtgccagccaggacctctgaagctcaggcaggcgatggaagtggagcgctagagggtccctgggtcgacccagaacatccataaggactgtgatggggtggcatctgagtagccgtggagcacagtcaggaaaagatgaccagcacgagtggcggcgagtcccgagagctagccctgccgctgggaggacttttcccaactctcctaggagacgcctccccggaggcttcctctgttggatctctgtctggtacagggatgcttcctgagtctgggtgcgggtgctagtctggttgcactctcggtcagtacctcggacagcgcactgaacccaccagccccaagctccac

SEQ ID NO: 29619 - DNA, 1109 bp, Mus musculus
gcttttctatgtctttggcatcatcctggcaccagcaggcagcctgcccagactctgaggagaccagcaactcccaccacagcacagcccctcctcaggcagtgcagaagccagagactgagaaggggtgccactggccagggtgggtgcacagcataggctgcaaactcctgaacttgtgtgttgggattatcttcctaaagataacctgctcgtgatttgtgttccatgttacagggaaaccctgaagccactctagtgtcgttcctgtgttatttataatctccactagagggtgtcatcaggccactttaggatggaaagtccatctcccccttgtcctagacagaatgccctgacagtttgtgaaggagctgtgtcccaaaagagccatagtaactaggcatggtactgacccgttaccttggcacgtaggaaattgtactaattggtgccaggccccatttatacagagcgcttgtcccctgaatgtgctgcctgctagagaagggccctcattagcaaggagtgctcctggctttttgtgtagttggtggttcagatgtttctgtcctttatgtctcccttcgatcctcgccactgtggaggaaagtgtcagatcaccctgtagcaagacagttaagcctggggcggctgagaaaagcactctgctttcagtaaaacatggcatggtggctgagggagctgcttccctctgtagactccactaggaaggcagtgattctgggacctgaagtggcagtgggatgggcgtttaaagcccaaagggctttgtcccctcccagctgcctcccctggtattcctcttgcctacccaggatctctgtccctccgtctgtttccagtgccagactgtgggcaacagcaacacatgagtcaaggacacttacccctctccacagagccacaagatgggcaaatcagggaccttctgaatgtatgagtcagtggacagcagtcctggccacactcagctggaatgtgaggccctgccagagaaagaactatgagcacgggtccttcatctctctgtgctctgatgccttgttcagaatgtggcttcagtgaggtcacacccaaaggaccag

SEQ ID NO: 29620 - DNA, 1196 bp, Mus musculus
atgcgtacagtagattaggtgaaaaagatctttcagggttctcccacgagtttcacagtagttctcgacctgtgggtcacaatccccccttttggagtcaaacaaccctttcacaggggtcacctaagaccaacagaaagcataggtatttacattacattttataacagtaacaaaattacagttatgaaatagcatcagaaatagttttatgctgggcagtggtagcacacacctttaatcccagcacttgggaggcagagacagatggatctctgagtttgaggccagcctggtctacagagtgagttctaggacagccggggctacacagagaaaacctgtctcaaaaaaaaagaaaaaagaaaaacaaagttttatgtttgggggtcaccacaacatgagtgttgaagtgttggggtgttaggagggttgagacaccacacaagggcaatagctgtggaggtagaaacagagaagaggctggagggatgggaccctgaagaggtgttcaaagccctgtttgctcttgcagaccctgatatccgctactgtgtcttggcatccctggacgagcgctttgatgcccacctggcccaggcagaaaacttacaagctctgtttgtggctctgaatgaccaggtctttgagatccgcgagctggccatctgcactgtgggccgactaagcagcatgaacccagccttcgtcatgcctttcctgcgcaagatgctcatccaggtaatggctggccggcagggaggagcagacctccacagcgaggggcgccctggggacagggagggaagaaggagggagaccctttaccacgtcatgtttgcaccaagagtctgggtttcccagctctgggttacagtccgagtgtgagcctgtcatccgcaggatgtgaggtgctttttgggtccagactcacctctcaggcagctcctctgtctctgtggcaagttttcagcaacccagtgtcttggcactcactgcttttgcagagtaggactcgggcctcccactcttctctaattgcttctgtcattcttttctaatagtagacaagcacaggggctggctgtcttaacatggtgtgattaccacatgatcctgtggtcactgcacttggttggggctcattgacattcatttttaagtgatgtgaaatgtgtatgttctctagagagatc

SEQ ID NO: 29621 - DNA, 1219 bp, Mus musculus
cttactggtagctaaggtctgagagattaaacagggctaggtaggggagagactaaatttgaagcaaagagtccccaaatgtgaccttgagataagcaccatcagcatccttgttctggaagcgttttgggaatgcaggatcttgggctcaagctgcagattcaggaacgtaggctgtgtcctaagcctctgggtaccagtgtccaacaagtgaagtcactgtgggcagcatcgtgaggactttgtcttttatgctgagcaagactagaaggcttgggagactttgatcacaggacaaatagaattgatattttaacatgatgattgtcagtgatatattcagaatggactgcagagaaagaaacctgggcattgaggaaagccagtggagggtgatggggaattggcctggaattacatctggagtgggaaaggagttgtagggacttttacagggaagtggctgccctccagtgcacagcagtgtgttctgccatctgctctccagaataagagtccttgctgtcttactccctcctcttgtagtaccagatcttcattccaatggtgaataaagtcctcgtgcgacaccggatcaaccaccagcgctatgatgtgcttatctgcagaatcgtcaaggtgagcaggcacccttctgccctgaggtcttcagcatctttccttcttggcattttgtcatagcaaagggcaggccatgtccagcttttcagccctggctaggactggcagacaggctgctggagaagtagtgtttttcagcactataggctgtatggcttctctgtatggtttctgttgaagccatccacataacacaaaactaatgagtctggcctcagtccagttagattttatttgtggacactgaaatttgagtttctcacaattttcataaattgtaaaggattaaattttattttgactacttgagattgaaatgaattgtttttagctcctaggctgtatggaaacaggcagcaagctgtgtgccattggtgccctaaatagctgatcgtttatttgtgctcacagtttgcctttgtctggcttttttatgacttacccattaaaggtttgtccgtgaccccagcagggagttcaggcacatggttattttgtgtataggtgccatgcatactgcttgttgaaatcctggctcttgcaggtagggatctcctgaggttcgtgcatgttttat

SEQ ID NO: 29622 - DNA, 1139 bp, Mus musculus
cctgggctgtcaggagtttgccgtggacttagaggtaccttcaagtcacctgtgctgaaatcttcattgttttaccagttatctacttgggagtctaaagttagcactaactgtaatgtctgttggtctttatatgtgggggcctgagacaagtattgctctttaggccagactgactttaaactgactgtgtaggccaggccggcctcaaactcaaacccatcatcctgccctaatttttttttttcttctaaaaatcagttgtgtaacttgtgtagctagccattaagaactggtaggagaagttgtgtagctctgtgaagtattcccagaataagaactgaaaggtgaaggagcccctagtaaccctctcctctcccccgccctcccccctcttctacatgggtcagcatcactcttacagaagcttcctaggactcacctgcctcatgcagatctccacccggacagaagacttcattgtcgacaccctcgagcttcgcagtgacatgtacattctcaacgagagcctcacggacccagccatcgttaaggtcagcccttctgcttcctgcctgagctgggatcacagtgctttttggcctagagctagcgcagggagaaaccctgtcatctcctaccctgccattcagcacgcctgtctgcttaactctaggtccccatgaggacattcacagtgtagcttgctggtcagagactgtttcagggaccctagtcaattgcgttgcggacacatgtggagctctagagctccttacccatcccggggcctgaaagcagggcagcccttaccagtgcacagttacagacaggctcagagcctggggccagagtaaaagcagcaccgtaaactacatccaccctgggctgggggtgccatccagcagtagcctgcttgcctagcgtatgccagtgccagggtccagttcctaccccaaaaagaagggctgattgaggaggcagatggttagcctgctgctggtttgttttcaggtcttccatggtgccgactctgacattgagtggctgcagaaagacttcggactctatgtggtgaacatgtttgacacacaccaggcagcacggcttctcaacctggctcggcactcactcgacca

SEQ ID NO: 29623 - DNA, 1120 bp, Mus musculus
agtccttggaagcctttgggagtctacaacaaagggcttggggctgggaatggagctcagttagtagcgtgcttgcctggctcgcgtggagccctggtttggtccccagcacaacgtaaagctggcgtggagatgcacacctgtgagctcagcacttgggaggagacagcagaggacccgaagctcaaaggcgtcttcagccacacagtgtattctagataacggggggtctaagaggccctgccttttaaaaaaaaaaaagaaaagaaaaagaaagagaaagaaaaagcagcaagcagcctgctctgctctgcttcacacgagtatcaaaataggatagtgtttgtctaatgtatgatagcccgggttcaaatccaaaactggaaaggaaaaaaattgttttgtgtttttctaatggagtaatttatatgtaataaagtacataaataatatagtttataacatttgtatatgtgtatattgcttcaaggctcttagagggagcagcctgagttgaggagattgccttgcactgtggacaagagcacccctcacacagggccctgtagaaaggatatgctctgatgacagccatcagcacagccctgtcactagacagcaccctcgctggcctcggtcctgtgctgaggggcttaacctgctgctcttaggaggagtcccagggccatcgaggtggctcatgggtaaggggtcctaccaccatgtctgaaaagctgaactggatcccaagaccctccgtggtggaaggagagatgtgactccaagttgtgttttaaccttcacacatgcacggtggcgtgtgtatacacaaacacacacacaatgagtgaataaaatttcatgtaaacaggtggctgggtatgacagtgcacaccttttttttgcttggttggttttggttttggttttggttttggtttttcgagacagggtttttctgtatagccctggctgtcctggaactcactttgtagaccaggctggcctcgaactcagaaatccgcctgcctctgcctcccaagtgctggtattaaaggagagtgccaccacgccgggcggtgcacacctttaaccctacacatgggacgcagaggcaggc

SEQ ID NO: 29624 - DNA, 1149 bp, Mus musculus
acctaacctcccagtgtcccaggacccacgtccccgactgtctctgcccgcagtaaaacctacggcaacgtgctggttctggatggcgtcatccagtgtactgagagggatgagttctcctaccaggagatgatcgccaacctgccgctctgcagccaccccaacccgcggaaggtaccgcattgcccctgggttcagccctgagctcggggtcctagaaaagcatgtcgggctgacactaggtgaggatgtttgggggcagatgctacccagatgactgtcagaaaatgcgggtcggtcaggatgaatagagctcctgggagagctggtctccttagaagccccgagaggggaacccaggctgccaggaaggaccccgtggcacagaagcgttctggagagtagagaatgactcagagtcctgtagctgggaagatcaggttctgtgggagtgggcctgctcagtcctgacttgtccttccctggcccaggtgctgatcatcgggggtggagatgggggcgtcctacgggaagtggtgaagcacccctctgtggagtcggtggtccagtgcgagattgatgaggtgggtgcagtccaggaggcctggatttgagtcaccagagtcagctctgtcccatcctgactctgcaccccgaggcgcaatgttcttaccatccctgccctgtttcctcagtctgaaaagagggttcagtaggaaaaccagattgttaaggcctggcacacaccacaccatggatgttaactcttagtgctttcagagcccaggcagagccagagagctcaacaacttatggcatctccccttgagacccagcatggttttagtgagcacttactgtatgctgagtgttacccaaggtgctgggttgatacggccatggacaggtgagcccctgagtgtagagctggtgtttgggttggagaagacaccataacacagcatgacatgatgaggccagacagggataaaagatatggagaacacaggctgataggaagtgtgcagccacgcatgcttacagccccagcacttgggtagaagcaggacgatcaagagtttgaggccagcgtgagttatctgagaccatctctcaaaaatgcagaagctcagatgggacttggtctgc

SEQ ID NO: 29625 - DNA, 1798 bp, Mus musculus
ccagctcaaagctgactctccacgtgggcgatggctttgagttcatgaaacagaaccaagatgcctttgacgtcatcatcaccgactcctcagaccccatgggtgagccagggcacgcgcgtcctgcagcacacagcagccccagactagagccatgtgatgatggaggcctgaggacggtgggggtctagccttggtccatagtgacctctgcttcctctttggcttcttccctgtgcttgttggccagcatccgggtgtgctatggtgcagtgggggagggtttgaatgcagggcctcccaggtgctaaggcagtagggggccacatcccacaaacatgggtccagcacctgctttgccactgagctgctgtgggtgactgtggcctggaggtctcaggcaggatggccatgctctacccctctaggccctgctgagagcctcttcaaggagtcctattaccagctcatgaagacagcactcaaagaagatggcatcctgtgctgccagggtgagtgccagtggctgcacctggacctcatcaaggagatgaggcacttctgcaaatctctcttccccgtggtggactacgcctactgtagcattcctacctatcccagcggccagatcggcttcatgctgtgtagcaaaaacccggtgagctgggggtgactgcctgcagggtggggcgagggcaggcactaagagccccatcttgatgctctttgtccctggttcccagagcaccaacttccgggagccagtgcagcagttgacacaggcccaggtggagcagatgcagctgaaatactataactcggacatgcaccgtgccgccttcgtactgcccgagttcacccggaaggtgagtggcctgccaggctccctgctgggcctcatcctgcacagcttgcacatcctcctgactgccttcatgtcccaccaggccctcaatgacataagctgaatccaggtgccactgtgacaccacccgagacctcaatcggattggaccaaggatcttccaagttgtctggggaccaccagtcctggaccagactcccagatgactcttgcccaccaaccaagtgttacaggccccacgatgctgcctggcctggcctggcctggcctgccctgctgggtggactcagtctctgtctgtctatctctgtggcgttcagccccacgcctataccagctctgtacagcaccgcctatgccctgtgacccaacaaaatacatgtgtatttataacaagctcagtcatgacctctgaccttttcatttttgttcctaccagtggtactgccggatgttgggtgttctgtgagctctagggagcctgctctagggcccagtgtaagggtccaggtagggcagcctgaagctatagcttttcaactgcccacgggcaagagtgttcctagcttatggattgaagcagggtgcatcatactttctcagtgaggcattgcttctgctgtggatataaacctgagttcaaatccttcccaggtttccaaagttacctgcatgggcctggcctctctccgaggtgctgaacctgaccctccactgcatcgcagcctcttgctggaaccaaggctccggtttctggagaggagcgagttacgggtcttcgtgtctgctctccccacaattgcatgtaaggctcgctagagcaggagtcaccaaccctttcctgccctcgccaaggggcacggaggggaaatgatgggaaaattgtgggttagcagggtctccaaggcagttggccccctactggagtgacac

SEQ ID NO: 29626 - DNA, 1873 bp, Mus musculus
cagtgttgatcagccttttaacatgtttatggatgacatagctgtagttagttacttgccgtaaatgaggttttagaaataaactacttggcaaagatttggttttgaaagtctggtcatcaaaacgcgttcattccttagaaataatgaagaacaactctttgaaccacagttgaataaaaggttttcttgccaccaacagtttagtgtctggagtcttactggaagaaaaaaaaattctatatcatgacaatgctagaaaagttaaggtgacttatgtgggaagatgcaatatagcattttcatcctttaaaatttgagtctccaggtgggtgtggtggcccatgcttttaatcccagaattggtgtaaatgagttgtaggccagctatttccccatcttgaggcaccctgtcttgccttgttggaagagccagttaaaatcaaacatgacctttaaggtcagcatcttagcagaagagcagtttatttcaggataacttactgtttttgatacataagcaaatgactgtaccttgtacagttacggttgacttccctgagcccaacgctcacctaagaaaagtgggctgggtatagtgaaacacctgttaaggtttttggaatgatttgctaaattgcccttgtaaagggtaaaatgctgtttcgtgttctttttatctgacaatttggtgaatctggtagaacatgcctatatcccaatattctggaatggacttggtgttaatttaatagctgatctaatgtgaaggtcacacacctgctttccgcttaccttccaaaaggtattctggaaccactcagaagttactcagaaagtaagagcactttctgagctcattaagaccaaatctacacactagacacaacaagccctttgttggccagaaatggaaacagccagtataaaataagtagattgtagggaatcaaatacaacttgttttttctgtgttgggggttggccaagcactgttaaacacaaatcaaagctgatattggcaagtgtttggacctgtaacaatctcacctgctctgattttggggtaggctgtcattcttaggtttgttactaagcttcccaggtacttggcgatatgaggaacaatgattggacgatgcaaattagaaattacttattatgttctcaatccagggaatatagttgatgacttttgtgtagaccccatactggtctgccgccccacaattaatggaaccccaggaaactattcctcccacaaaccatcgctgtgtctcattatctagaaacactaatgcccccccactgtcacctctgcagctgtccttgccaccagtctctaagccagcacagagcatgttagcgcttactcttactcctggatagagcttttcatacacggcggtacatttttggtggtcagcaattggtatgtccacaaacattaggtttctagcaagaagccccttctgggttaacccccagccagccacagttccagtgaagtctgttctcattaaggatgcagcttcttttcgcggtaggcaaacaggcatgatgcttccgttgattgtgactttgttcttgagtttaatcaatgctatatcattgtcaaaaccagcaccgtgagtgtagccttcatgtataaagatttcctcgggccaggcttgagtgtaatgaggtgagagccttttgaggatgcccattcggatgttcagggaggacgctgccattcttttctcatatacagcatgagcggctgttaggacccaattgtcatgtataagtgcacctgctgctgctgtagtttgacccagcaacaagacttgccaaggaaagtcaccaggctttgcaggctgccctccaacta

SEQ ID NO: 29627 - DNA, 1640 bp, Mus musculus
tatattcagcagtatttttgacatttttctttagaaaaaaagaggggaaagctaaatgaattttataagttttgttatataaagggttaaaatactgagtgggtgaaagtgaactgctgtttgcctaattggtaaaccaacactacaattgatctcagaaggtttctctgtaatattctatcattgaaattgttaatgaattctttgcatgttcagagtagaaaccattggttagaactacattcttttctccttattttaatttgaatcccaccctatgaattttttccttaggaaaatctccatttgggagatcatgatgtcatggtgtttgattcttttggttttgtttttaacacttgtcttccttcatatacgaaagtacaatatgaagccttcatttaatctctgcagttcatctcatttcaaatgtttatggaagaagcacttcattgaaagtagtgctgtaaatattctgccataggaatacttctgtctacatgctttctcatccaagaattcgtcatcacgctgcacaggctgcgtctttgacggtgggtgttccatttttatccgctactctttatttcatggagtcgtatcaacgctatgaacgcaaggctgtgatatggaaccagaaggctgtttgaacttttgaaaccttgtgtgggattgatggtggtgccgaggcatgaaaggctagtatgagcgagaaaaggagagcgcgtgcagagacttggtggtggaaaatggatattttttaacttggagagatgtgtcactcaatcctgtggctttggtgagagagtgtgcagagagcaatgatagcaaataacgtacgaatgttttacatcaaaggacatccacatcagttggaagactttgagttttgttcttaggaaacccactttagttgaatgtgttaagtgaaatacttgtacttccctccccctctgtcaactgctgtgaatgctgtatggtgtgtgttctcctctgttactgatctggaagtgtgggaacgtgaactgaagctgatgggctgcgaacatggactgagcttgtggtgtgctttgcaggagaacttggaagcagagttcaccagtgagctcaggtgtctcaaagaagggtggaagttctcatgtctgttagctattcataagaatgctgtttgctgcagttctgtgtcctgtgcttggatgcttttttataagagttgtcattgttggaaattcttaaataaaactgatttaaataatatgtgtctttgttttgcagccctgaatgcaaagaattcatagcagttaattcccctttttgacccttttgagatggaactttcataaagtttcttggcagtagtttattttgcttcaaataaacttatttgaaaagttgtctcaagtcaaatggattcatcacctgtcatgcattgacacctgatacccagacttaattgctatttgttcttgcattgtccaaagtgaaagtttttctttggtttgtttttaatttagtttttcttaagtctgggtgaccgcacctaaaatggtaagcagttaccctctggcttgttctgagtgcctctgtgcatttgattttctatttacatgctgtataaatctccactggggaatcatgcc

SEQ ID NO: 29628 - DNA, 1132 bp, Mus musculus
taccaggcagtttgttttggtttgctttcttttaatgtgggctgtggggttggagctctggttgctcttgcagaagactggggtttgagtcctagcacctacatggctgctcaccagcacctgtgactctaggcctgggagggatctgatgctttcttctggctttcacaggggttgcatgcacacaatatgaagctatgcagggcatccatccacataaaacaaaataatatatatttctttaaatgtgggctctggggatctgagctcagaccccctaagctagtacagtcatctacccgtagctccctgctctatgcctgcgaggatgagggcagctacaccaggctcctctttgtgatggatggaagctgttgggcctcagagaccatgttccacccagtatagcaagcatccagaagctgagcaggtgacctcttcagcttcagtttgcccctctgtcaaatggcaacaacagtacaattagtgacgaaggtgtataaaccaccggatgagttgggtagtgtgtctgctggagctctggctactggctgcgaacggggagccacaaggagactagatgtggcttcccctggggagagggaggttactggggcaggggcagccaccagacaccttgccctgtgtcctccagagctctgagctctgctctctgtgtccctgaagcgtggacacttcctggcccctgtcatcccctccgccctggataaacagcacctccacccgcccgccttctcagcccctcacgcttcaccagaattaaattcatcattcactttttatggtttgtacatagtgtaatttatgttttcaaatatagcgaggtcacactttaacggaaaaaaagtatttcacattgaaattgaaggcatgtgtgttccactaaatggggatgtttgggataattttaaaaggctaaaactagtagaaagtaacattaaaataaaatttgagagatgtaattacccctaatcgcaccataaaataatcaataccacattccattatttctgacttccctagttatagctttttttgttaagctcttgaatattgatgaggtgaaagggtcgtgtcttctggcggaggtctgatggaggtggaattaagg

SEQ ID NO: 29629 - DNA, 1208 bp, Mus musculus
tgcccctggcctgtgccctgtgcacctctcattgataaccgtgtgtctgcctgtgcctcgggtcagagccctttggtttgaacttgcctcatactgagaggctgagacgtgagaaaattatgagcaggggagaggagtgggaccttgtgacaactggcagctgtggagaaaggggcaggctctgtgcccagggtgagcgccatctgggcgggaggcctggcttccagctgtgggggctctggaagggcagagcctgggaggaatgattttgaagccactactatggagattaaggggatgagaatgtaaatctcaagtaaaaaggtaattgaatgtaatagcaaacactgctcgctctatgttaattttagctcttcccctggatacaagacgctgtattagtgttttattaccattttgtttgcactaataaaatagtaaaatttatttcaaggaagttgaaggatggttttacaatgcaaatttgaagaaattggacttttcatttatgcttcagctattttaaaccctgacgggtgtaaattagctacaggaaccaagcagaccccactgatggggattttggaggcgggagccctggcagaggttccagactagctgagggcagaaagtacaaagcactctttagaaaggccgaggccactgaggtgcctgactgggtggcacagggtggtgggtgagggtgtgccgggcataaatggctgtgggtgtagacaggtacatcatacactgaattggtagagagacacttgtgaccatagatttcagatctttgtctttcctcttgatcctttggccttcttcccatcctgacattggcctgtattagcctagtgaacccccaggggagctgagaaacttctgttttggctggacatgacaggtagaccagttgtccagaccacacttgccctctgaagacagagtacagattttaaggagaggaatcctcggaatttggaacctaaaagcaacacgagaaagacaggctagaagccaacaagacagaggttgacaggcacatctgtccttccttgttctttcttctatcccaggctaccttgagaaagtaaaacaggacttcctcagtgagccaacatcctttcaagtagggacaaatgactagccagacataggtgtggtagtgtctataaaccaaaaaggtttaatttttgcttttaagtcaa

SEQ ID NO: 29630 - DNA, 1154 bp, Mus musculus
accgagccaggcatggcgcagcacatttaaatattaactattattatagttaataacggttattcctgttgcattgggataaaagggtttttaattttttattaagaaaagctatttttacatcaatgagattattcctctaaacctgtcttgttcaatacaagttactctctggtcacatgtggctatttaaatgtaaattaattaaagttaaataaaattaaaaatttagttccttagtcagagtcaccctattgcaagtcctcggtagccacagagtttcttggtgtccagaggctgccatgttggacagtactggacattctgctaggcagccttcaaaacagtactagtcaaagatttccgccaaatctaaggttgtggctttggggatttgtttgattgtttgtatgtttttggttttggatttcgtttgtttgtttttgtttttttgttttgttttgtttccgagacagggttttcttttctggaactcagtctgggaagattgtcctatggcctgtgtagtcctctgtcacgtgactgaagcacactcttctgattggtttgcgctctcttcccctcccttcctctcccctcccctctctggactcggattagcacagagtcacctcttcctagcacttaccctgtgttgctctctgattggtgcaagacgctgagggattctgggaagaacaggcagcctgctgattggcttccaagtaggaagagccgggacaagagtccaagtactctcctcagtgtcccctgcttcccagggactggcttgtccactctttcacctcacagggcgggagacaggagagacaggaaggatttgctggagctaataaaaatgaacaataacgtcccacccttcactgaccagaaggtccaagatagaatttagagcctgggataaggagaggcagcctgtctcctttcttccctccctcttaatttttttcactttttaagtagtgcctgtgtgtgtatgtttatatactgtgcacatatgtgtgtgttcatgtgtgtgtgtgtgtgcacgtgtgtgttcatgtgtgtatatgtgtgtatggagactagagtgtgtcttcctctcttgctttcatcttaattttttttttcgagacagggtttctctgtatagc

SEQ ID NO: 29631 - DNA, 1195 bp, Mus musculus
cacagggttcctacttcctaacccagaggaccctcagtgaggacaagttggtaccaggtaccaactgaagctacagatcctgtgcttaatctctggagacagccactgagaggccggaagctaacacacacacacacacacacacacacacatatacacatacacacatatacacacacaaaagcacacacagacacacagacagacagatgcacatacacacacatatatatacacatacacacatatacacacacacaagcacacacagacacacagacagatacacacacacacatatacacatacacacatatacacacacacaagtacacacagacacacagacagacagatacacacacacacatatatacacatacacacatatacacacacacaagcacacacagacagacagatgcacacacagatacacagacagacagatacacacacacactgcttagcctgtcctatgtatgccctctttaggctgcctagggtctcatgggcacactggtcaggaagattaacaagggcagacacacatacacattgtaatcccatacagcaatctgtcagctgtccagtcatccatttagtgaggtcctactgtgtgccagaccttacagtatggccagacacagggtagtggccatatggaaggtctctgctcacaatacctttccatatagggatccccccacacacaccgccatctactttccgcagctcttgccagctgccagggaaattgacacgtcccatatgggtcagaaggctatgtgaggggctctgctcagaagccgtgagccacgatggtcaaatacatggaaacgcatatcctgagagcccacctgtggctatagagccctcgtgctacacaaaaataattgctttgacttgtgcacccagattgaccactccttcaaatatacaatgcccagtggccccagatccttgccttgtcacaagcggctcttcctggcccagaagggactgggtaatgacagcctagtctgctgctacagaaaggtctgctaagactggttcccagaggtcatggttttaggacctgtggtcccttaccaagccaatgcctactctagtcacgtctgtccacagtgccagacctgcgctgtccacacaaatccctgagctcccacacgtggacccatcttgaaactcagtg

SEQ ID NO: 29632 - DNA, 1672 bp, Mus musculus
tgctgccagggtgtcctgccctctgtccccttcttgactcctccctcagaattgttctcttctcttctgtcttcctctttctggcgctggcagagcctaactcgggtgtttcaggcttccctgttcttttagaaaagctctgtctttgtagatgataaaccagcctgcctccatcttgggcttaaaagacattttatagtaaaggcaactgaggttcattcctgtttaccatttaatctgtttctcaaggagtgctctatgccccacctgaaaccttaactacaaatggttactgtactgtactgcctgtaccaagaaatggcaaccatagctttgcttttaaaagttattataggctttctgcgctacccggggacgggtctatacggcgttgttcttgattcccatcgtaacttaaagggaaacttacacaatgtccggagcccttgacgtcctgcagatgaaggaggaggatgtcctcaaattccttgctgcgggaacccacttaggtggcaccaaccttgactttcagatggagcagtacatctaccaaaggaaaagtgacaatatctacatcataaacctgaagaggacctgggagaagctgttgctcgcagctcgagctagctattgttgccatcaagaaccctgctgacgtcagcgtcatctcctccaggaacacaggccagcgagctgtgctgaagtttgctgctgccacaggagccactccgattgctggccgattcacacctgggaccttcactaaccagatccaagcagccttcagggagccacggcttttagtggtgaccgatcccagggctgaccaccagccactcacagaggcctcttatgtcaacctgcccaccattgctctgtgtaacacagattctcccctgcactacgtggacattgccattccatgcaacaacaagggagctcactcagtggttctgatgtggtggatgctggccagggaagtactccgcatgcgaggtactatctcccgtgagcacccctgggagatcatgcctgatctttacttccacagagacccagaggagattgagaaggaggagcaggctgctgctgagaaggctgtgaccaaggaggaattccagggtgagtggacagcactagctcctgagttcactgctgctcagcctgaggtggccgactggtctgagggtgtgcaggttccctctgtgcccatccaacagttccccacggaagactggagtgcacagccagccactgaggattggtcagcagctcccacagcgcaggccactgagtgggttggagccaccactgagtggtcctgagcggctgtgcaggtgcctgagcaaagggaaaaaagatggaaggaaaataaagttgctaaaagctgaaagaaaaaaaaagttattatagggctggagagatggctcaatggttaagagcagtgactacatttctaagaggtcctgagttcaattcccagcaactacgtggtagcttacaaccgtttgtaatgggattcgatgccctcttctggtgtgtctgaaaacagctacagtgtagtcatataaatgaaataaatctttaaaaaaaaacgcacagaaagaagggagggagggaggaaggaaggaaggaagaaaggaaggaagaagaggttctaagtggaagcttg

SEQ ID NO: 29633 - DNA, 1569 bp, Mus musculus
atgggtggtgctgtgctctctgggtctcagtagcattgacgtccctgaagtgtgtcctgtagaccggaacctcagtgtctctagggcaaacccagctcctgaccttctgctctctgcgctcaggactcctggcggcgggtgatcagcactggggtgcaagcaggcattcccatgccctgcttcactactgccctctccttctatgatgggtacagacacgagatgctgccagcaaacctcatccaggtgagcgtggggcgggtggtaccttcacctggctggttccgtgggcctgagtatcaccctgaccctgaccaactgcattcctccctcaggctcaacgggattactttggggctcacacctatgaactcttaaccaaaccgggagaatttatccacaccaactggacgggccacgggggcagtgtgtcatcctcttcatacaatgcctagtaggcctgtggcttgccctccctcccagcaataggacagccccgtggcgctcagcaccccccctttgccctagttcctgctcttagccaagtgttggctgtgattgctgaagaagtcaccgaggtctatagtttctgaaccaccacatgctccacctccgtctctgtgctgcccaggacctgaccctgtgctgccactgcgtgacctgaccctgtgcgccactgcgtgaccactccctgactgagccgtgccatgtggaccagacaagctgcagctcttagctcacagagggggtgggtgtgtgggatcgtacaacctggacgtggaccatgcgtgtgggctctgctgtcctccagtcagtgaagtgtatatggttacactctctgggtgtgcctggcagaacgatctgcactgagttcactattgcaaattgatttgttttcctttagccttgttcacttttaactccggctttttttaaagactccaaataaaacaggacaggtagtgagtaaatctggagggaggtgcagagccgaggagtcggtgggcagaggctctcctgtcgggtatttcttactggcacagtaggtacctggatgttcacagagcatccgccccgtcccacttgtaataaacttttagactggtttggcttctttgtttcttctcctgcaccaatccttcgaggtgccaccctgctctgtgatggggctttcaatgcggtcagtctgtccctgaggcttctcatctgtcttgcttactgattgcattacctggccttgggccatcgcactgttaggccagcagggaactctgctctgtgacgctttttctggactgatttagagtcagtcccaacagtggcctgcgagcagagcagagcaaacagcgcctgtttggacagctgggacagggtctgtctctgactctagcctcagaggctctcggggaaggcagagccaacacagaaaacatcaaaccctcctgtgtttggctatttgagaaccaagacccctctgcctcaagccccctggagtagagagtgcatccctacacactgccaaattgactcttaaaccttcctagacctaagggccaccagggtttacct

SEQ ID NO: 29634 - DNA, 1186 bp, Mus musculus
atctttgtagttgaatgcctgcgtctgtgtggagaggctaacttggtctttcagttctggaatgaacagagctatgtggcccttccccataacccaggtcaaagcactcagcccttggtgcaggctggatctcttgcccctgtcctggcctctggttggatccctgatcggccctgtcttccccaccaggagaagctgtctttgctcggtgcttgtcctctctgaaggaggagcgggttcaggccagccaaaagctgaagggtcctaaggtggtccagctggaaggcagtaagaagtcattcctggaggacatccgtaaggtgactgcccctcacctcgtcgcctgtggtggggtctgtagaggtcctccaattccagcctttcccgttctgtcaccctctctcacgtctctgaggtgcgaatgaaactgggacatgggtgtggctactccaccaaccacagctctgaagtcctgtgtcactttccaggccctctatgcttccaagatcatctcctacgcccaaggctttatgctgctcagacaggcagccactgagtttggctggaccctcaattatggcggcattgccctgatgtggagagggggctgcatcatccgaaggtaggtaagaggcgaacccgggactgcagtacactgcccagcagtgcgtgccttgccctgtagccgggacagccaccctgccactcaacactgcagcgtgtggatcccattgtcaccgcttatgcagtacttttgccttatgcagtacttccttctgcataggtgtccactttaaaacaattgtggttcaaaaggttagaaaagaatgagtcggagtggcacacaccttcaattccagcacagaggcaggaggatctctgagttggaggccaatctggtccacagacttaagttccaggacagccagggctacacagagaaaccctgcctggggggcaggcacaggtggaggacacaagtaaacagtgtgtaccgcacttgctaggccctttagaaaaggcagtgaacatttggagaccacttttctcagcatggctccccaggccgtgccgggaacctgcttcacgtcccatccacatcactgtgagcattgtaggcccgccggacggtgcactgcacggcgtctgtgtgggtggtttgattgactactctgggggaggagct

SEQ ID NO: 29635 - DNA, 3290 bp, Mus musculus
cttggggagcattcacactgctgtttcctggccttgccagcctgtttcagcatcactcacgcacacaggaaggcatctgctcacctccagtctgcgaaggctcctggctacctgagggtagagaaggaatggatttccttctggtggagagcccatctccactgcagagcagccactagggaggcgagcatgcagccccttgcttctctctgaagaacaggactcccagcttcctttgttacagttgccttgcaaagaaaggaaaagtggaccatggagaaaaggaaaggaaaggaaagaaagcaaaagaaaagaaaggaaaaggcagaaatcagactgttcttatctaaaagatgctcagctctggtggatttttaaaactttctttctctccttaaagtataggttactaactgtaatgttacttgttttctaaacatatctatgagatttttaatgtagttagaagtctctgttgtctaatggacacagcatgtccttctggtgtatactcaaattcagcagactctgtctatgcctgtagacagtttcctggaccggaactaaatctaatttcagggaaacgaagatcaaaggtcgcttttaaactgaatcactgatgttgctgctgttaggaaggtaggcagaaggatccatgtctgtgccgagaggtgtgacgcctgggggagggtggcagtgtgcggcacactaaaccctgagataacttgttttcttttaactcaaacaaaactggtttagaaagtctttgctttgcaaatatcaaatgttagcatgagccaaactggaccccgccttcatcagaggccccttaaggagacctcattagaaagccagggaaagtaaggttggagcttgggcacctgtgcctctccctgctgtcactgggacccctcctactgtaaagcccaggatcaggtcagaatcggagcatttgggggctttatattctgtttccagacaaggtcacctgctccgaagctctgaaagagaaagggttttatggcaggacctgttcatgagatttttgtgattgccatagtagcaggaaagttaagagaactaatctttaaaataagtatttttaagatttttttttaaattttcaaagcactcctttaaacaaacaaacaaacaaacaaacaaaaaacctacaaggaaaacatacaaattacagaaaagtgagtgctggttaaaatgaattagtctcccccttcctttatgtctttatcctccttcctcccaagcagatatagcctcataactgtcccccgccagtgctcaggcctcgcctgcttctgggagacgaccctgggagtcagtcagctctcagtcccagactgtcagggaccaggcagtccctgcacaaggcgaggtgggagcacaggccagactgcttctgagcaggccctgatctccagtccataaatgagaaacttgatgaggtgagagctgaaggttcttcagctaagaaaccattatttttttttctcttcagctatgtggaatttgtatatctatcaatttttcaggttttttttttttttatcttgtttagatgaaggaatgaatggttgtgaaaggtgtttggggtctaaaacatgatttttcctggcacatatttcaaagcatagactttgttacctgctgcttcttgtctaatttacagggatatttaattttgtaaggtatttgtatatttatacaactgtaatgaattgcacattggactgaaaggggaaggctctgccctgtgtggctcctgctgggactctaggttgctgtgctttgactttcctgaacaataccaggggggtgtggtttgtttagcgtgggtccatcacttttcatttgggttccttttggaaaatgtaatctttaacttgctctgtgagaagaaaagaatgattgtgttgctgctcttggaaggtctgctgaatgcttttgagtgacctctggcactgtgtactgcctgtgatccaccaagagtgagtaagaccacgaccgtggagcaagtcagagatcgtcagccgagagattattgctgttactgttcaaaaggccatttatgaagtagatatttgagctctttaaaaaaaaaaatttaagagagcccctaattacttaaaaaagaaatttaagaaagaaattaagagttgatacagaaccggtgttaaaaactcacagccagaggttaggggtgttggttagtggtagggcacttggcaactatatgtgatgccattggttcagtcccggttctgagatcagacagaaagcctcacggtagatagctgctcagacaaagtccaggcagaggttggtcttgtgccaaaccctggatgttctatgttgtcatgtccttaactgattcttttcatgctgtgtattctgacatcaattcaccgaagggacccaccagcctcctcatgtttaagcattgtcgtagactttgtggctctgacatacttgtctgttgagagtggcgtctcctgtcaccatccccatgctataacagaatccatgaagcataagtggcctttttgaaccaagactttgcaaactgatctctccccagggaaggagttgagcacaagcaacaatgtacattattaattttggatttcattttcatgttttattttgtaaatatctaatgtttggagcttgagtatacaaaatgtaaatacagttcttgtatttgtactaatcctgattcttttgctgtatagccctagatgtgtaatgcagacattatctaactgtgtatggtaaccttgcatcacagaactgctagtgaacgaggtaaaaataataaaggtacaaccagtgcatcacaccatgcgtgctttagtcttttgttttggtttctggagacagggtttctctgtgtagccctggccatcctgggccttgaacttggatctcacacacacaccaccaccccacccccacccccgctgcctccagggtactgaattaaaggaatttaccaccacctccaggcttttgtactttattctttgccctttggaaagccattgcatactaattaagattcttacagagcctttaatcccagcacttgggaggcagaggcaggcggatttctgagttcgaggccagcctggtctacagagtgagttccaggacagcctgggctacacagagaaaccctgtcttggggggggaaaaatattctttttttaaaaaaatatttatttgtttgtttgtttgtttgtttatttattatatgtaagtacactgtagct

SEQ ID NO: 29636 - DNA, 1100 bp, Mus musculus
ctcagcagttaagagtactggctgctcttacagaagactcaggttcaattcccagcatccacatggcagctcacaactgtgtaactccaattccaggagatctgactccctcacacagacacatatgcaggcaaaacaccaatgcacatttaaaaaaaaaaaaaacaaaagaaagaaaaagaaaaaaggcaagctagcttcttgatgcaggtgacacttcagtcgcatatgtaggtgggggtatgcttgttcagcttggggaggctgccattagcttcctttctgttagctttacccccctccccagcactcaagtgtcacttcagtgggggatattgctgtatcggggaaactggtgggtaacataaataactcttggattgacttggtagaagcgacgagcagtttagacaggcgtagcggattgtgttgtttgacgccaagctgagcgccagagtaagcccctccccccacgcgtacttccattcagtccttgctggctttctttctgtttagcggatgaagaagcccctgattatggctctggaatccggcagtcgggaacagctaaaatatcttttgataatgaatactttaatcaggtaagaagtatttggggaagaaggaatgaacaccttgaggaaacaaaaggaagtaaatggacttttgaggaaagtatccatgcgggcaccaattctctggtctaaaactctagcaactctaaggtgttggttacaccacagttactcagtgaaatatgagatgtgtctaaaagttacaaagataaaagtgcactagcacattgccttttctcagacaactcttagtccatttcattattattttgcaaaaaatagtttgttgtacaaacagaaatcagttaggaactgggagagcgtgtcccttacctagcctgccttactttcagagtgacttctcgtcagctgcaatgactcgttctggtctgtccttggaggagctgaggattgtggaaggtcagggccagagttctgaagtcatcagtcctccagaagaagtcaatcgaatgaacgacctgggtgcgtagaccgatgactgtcactgaggagactctccctggg

SEQ ID NO: 29637 - DNA, 1191 bp, Mus musculus
tgttccacaggagtcttcgtttgtccactgaggttttagtttgtggaaaaaacaaaaacaaaccacacatacacacattgccactccaggaaaacaaagtctatataaatacccaagtttaaaattaagattgtaggctggagagatggttcagtggttaaaagcactgactgctcttccagaggtcctgagttcaattcccagcaaccacatggtggctcacaaccatccgtaatgaaatttggtgccctcttctggtctataggcatacatgcaggcagaacgttgtctacataataaatcttaaaaaaaaaaaaaattaaggttgttccctgagtttaaaatgtaggtggccagtttttcagctagtcacaagcttcttcttgttgttgttatcatcatcattattattgagtatatgctctgtatcaacctccttcccctcagccatgccatcgccttgtctctgagtcttgcctactgagagagggccgtgcacgctcgcctatcctcatcctctcattgcaggtgcagttccagtttgttctgctgactgacacgctgtactcccctgtgcctcctgaactgcttccctcggagatggagaagacgcacgaggacagacctttccctcggactgtggtggcggtggaggtccaggatctgaagaatggagcaacacattattggtctttggataaactcaagtaggaaaatattcataaaagattattttttttaaaagaaaaggcctggcttggaggcgcacgcctttaatcccagcactcaggaggcagaggcaggtggatctctatgagttcgagaccagcctggtctatagagtgagttgcaggatagctagggctacacagaaaatccctgtatcaaaaaacaataacaacaaaaagtgagttgttgaagtggattccctcatcacagctctctctgaggatggcatcagttccttctctgtggtttctaagtgctgtgaccagttaacaatattattacccattcatctttttcctaaagtcagcaaagctcacctctcagacaactttgatatttgttgatttttaaatttacctttataaatttcaatgagccagttagttctgtgtttctttctctcttggatctggcatgatccctctaactttagtcctgggctcaggatcatctttgtaataa

SEQ ID NO: 29638 - DNA, 1237 bp, Mus musculus
acctagcatattttttcaagttggaaaattatgcattgcaaatgagaagacaacacatgaatctcatatgcatggatttttaatatactgtgctttctgagagaggcagagcctacgttgttctgtaccgcatttcacatcctttccctctgggtactttgtatttctccactctgggagaaactagtgcaggtttctaagatccctagtgttctcggacacagaggtagttccagtgcggtgtgataaatggcctgcagtgatggcgttgtaggcagagccatatccagagaggatagtgggaggagtttgtggaggaaggaagccctcagctaagagcaagtcccacagtacaactgagaatttcccaaagtgaaagagcaagagaaggaaggatcagggaggaagacaatttaggatgggggagatgttaattacttgggatggtcagaaagtcacgtctgttgtggtggacaaaagacaaggagactggaggtaacaagaacagacttgtgtgagaaactacaacccagtgtctacagggagattcctttattagaaccaccttgtagaaagcttcctgcggttacagtatagagggtagattgtaggcaggcaagtgcagagccatgtggaccagttggaaagttgctacttgatccaggtgagaaagaatgcttctccaagcagtgccaagagggagatgggaactattttgatcttagaaacaatgcccatgtctggcactcctgtcatcgcagcactgaagaaactgacagggagatctcatgggctagccttagctacatgagagcctgcattttcaaaggggcaggcaagatggttcagtggttaagagcacttgctcttacagagtaactggattcaaaacccacacccacaaggtcgatcacagctccccataaccccagtcccagttctggggatccaacagacacacactgcacgtacatgcatgcaggcaaaacaaaatctaaaaaaaaaaaaaaattaaaccattgcttagaacaactgttggacccttggggagcagacatcattctgggattgtctccctggtaatgaggtaatgctaatgttgaccagaagtgaggtgtcacctgggacatggggggacatctccatccctgtgattgcttgctaattatgtcttgtcattacaagccgagtctctctcgttaaaagctgcctatccagaacactaaggatggtgact

SEQ ID NO: 29639 - DNA, 1371 bp, Mus musculus
cccagagatattccaaagaatcacctttgttcttctgctaatccaagtgcccttgtatgactgaaataccagacattaaagaaacccttgcttttctaggcaaccagaaaagaaaagaattcactgctagcagtatcttttcttgcatttgagagcacttaccttagaaaactgtgtgtacaaaatagcttgttagactcactgaacaagtataaaccaccatcatgcttttgtggggtcttattcctttattaagacggcgtctcctcgatttgcccacactggcctcgaacttggaatccttttgcatcagcttccacagttgctggagttagaggtgtgtgttagcaggctcagcttgtctttttgtttgtttactttttggttttgttttaatatagtggtatctccccctcagcttaaacaagaccaaagaaaacttgtcttcattaaagcattattttattctgaaaatattcctaggtgttatcattgtgaaatggagagaagtgttcatacgtgggaactggcattaccaggcctgtagtagagtcctactttattggataaggttttccagagcagactgttaattctatggacagttacaaaatctggttaataaattaaaaccaaagggcttttcctctactcttgcttctgatccttctagcatagcacattgtttctcctttcataggtaacacgacaaataggaattgtttattacattgaagtgacttgaactgacctttgtgctttagatgtaagatactaaaaacaaaacactgggtctgttaccgcgatgcctgactttttaaatgctatcagattataagcagttgcgtgggcttcccgtggtcactgctgtagcgggtgccttcctggtcctttgttgacttgccttaatgatttacacagaagccttcgagcagaggaagcttcctggggcctactgcagtgtgatgaagacgttttaggttcagtgtaaagcaagcttgtgttctgtactgttggagacagattcgttacaaatgattttcatacctgtctgattgatatcattttaagctctgctctaggtgtggcccactttaggttgtgaaatgtatcgttttttcctattattactgtaaagagaagttgtgaatcttcttgttgatgaactctgatttttctctcaatttcttaaaaccatgcttgaagattgtctgggtgtgagactgccttctcagaaagggagagttagtttgtaatattaaagaaataaaatcttcctgaaataagccttggcatgatctttaagtgtggtttatcactggggaggaggggtaagtgaaacaggggaattctgatttctcagtctcttcc

SEQ ID NO: 29640 - DNA, 1195 bp, Mus musculus
ggctgggcctgcacagagcccttgcccaactgtgtacattcccaggctcagtccccagcaccaccaccaggaaaagggacattggatccagaaagtacccaaaagccacagagcactccgctcactttggctgtaaatgtttccctgtccatggctgttccttctgcagtcttcagcgcccacagggagtgagcaccgtggactctgtgtccacgcagatagaactgcagtggaagagcctgtcatccgggtcattcatcccctgtgctttctccctcagtgccagagctaaaggagcagattcaggcctggatgagagagaaacagagcagtgaccactgaggccccatcgctcctccgctggaagccgccacgccagccagccaggccgcagcagcatctgcctcgaggctgcagctccagcctgtaaccagatgtggccagatcctgagagcccacccgtgtgaccaaacagtggagatctgaggggatgacgagaagaggattcctgtacatatatttaagtgacaacagtcaaagcttgagggacgagtttacgatggcttgtgtagtaaagcgcacccttcgcctgtcgctacctggggctgtggcagcggaagtgtttagtgacaagtgggtctgggcagcttcccctgagcttacgttttgttttgttttgttttttcgatgtgaatagagaactcggacattttgctgctaaacaatctcccctccctcaccctacttgcactgctgtgggttttttaaagagaaacagaaccagactcctttcccggccctccaaacatgtattctgtgcgataacttgtgcctgcgacaagtgttaatcttgggatcgtatttttatatcatattcacatacttgtttttttaattggtgttagatgacatgattaataaaaaaggcaagatattttcagaatttgaatttcagtttttttttcttttgaaatagcccttttaaatttttttattataaacaaaatgaagagaaccctgtgagcctggtccttctagcaaccctcagttaagatcctgagggacaggtgcagcagcagctggctggagtggatcaggactcctgtgactcgtggggctcgggggaggtgaggggtgtgtttggttttttgttgttttgttgttttgttttaatcctatgtgacaattccaacta

SEQ ID NO: 29641 - DNA, 1215 bp, Mus musculus
aaaacccccacttttggacagtgaagatctttttgtgaagtttcagttatggcttttgcttactttctaaaacacattgcagccaacactcaggtttgctttgaatctttgtggctccagtgtgcacattgttgaaccatgtagaggcactccagtactccccctctgctgtgtgccccagtatccccctctgctgtgtatgtactccagtacccccctctgctgtgtatgtactccagtaccccccctctgctgtgtaccccagtacccccctctgctgtgtatgtaccccagtaccccctctgctgtgtatgtaccccagtacccccctctctgctgtgtatgtaccccagtaccccctctctgctgtgtatgtaccccagtacccccctctgctgtgtatgtaccccagtaccccctctctgctgtgtatgtaccccagtacccccctctgctgtgtatgtaccccagtacccccctctgctggaccctgtctccttcccggcctagcgagctctccgagactcaccatgtgttttctcctctttacagatactctcctcaggtgctttatgagccctgcactcaggacattgtcatgttcctcgttgtgatgctgtgcaaccagaactacatccgaaacccttacctagtggccaagctggtggaggtcatgttcatgaccaacccttctgtccagccgagaactcagaagttctttgagatgattgagaaccatcctctctctaccaaactgctggtgccgtccctcatgaagttctatacaggtgggtttcagagtaggccctggggtatgtggtaatgtacttgacccaaggttgtttcagagcgaacttaaatctaaatctgtgacctagattcacaaatagataaataaataatcctgccatcaaggctttaacatctgcttatgtaaatcacttcctagccccagctcagagcacaggctgtcgcatgccttctctcccggcctctgagagctcgcactggccactgcgtgtgcggccttccgttgatttacactgttcgttgttgttagtccaagctgatgttttcatctgagttgttaacctggttcatttgctgttgagtttacagtatctgatatataacaccatcctgtggctgccttttcaaagagatggaacaggagagagtttgatatatgcattctaggtcatccttgactgccac

SEQ ID NO: 29642 - DNA, 1173 bp, Mus musculus
aaattcaatagcaaacacattcatttttccttccaacttggcattctctggcctgttgtgatgctgtgaagtctcttcaggtctgtgtagacatcttgaggatgagagtggtaccctagtagtcacttggagcatctctcctaacgtgagagactatagcactgtctgcccaagtggtgccactcgttttggctcatgaacctgtggtgactccagcctgctcaacgctcagcagcagtttctagtccttccgatttgtaagttagcatccccagcaaggccaggtcgccctgacaggctagggtgtttcccagacatcattggttggcctgggcgcagacaaagcagcaatgagctgcagtgtggctgcatggggaaattgtgcttcaccgtgggtgcaggcttctaaccggctttctgctgcaaagtggccagctgtgctctagaaagctgtgctctaggagtggtactgaagaggaaagcattgtcaatctgttttctcttctccaaagtttgggagcctctggtggagcaagtaactgggattcgtacagtgaccatttcaccattgaaacctgcaaagagacggacatgctgaactacctcatcgagtgttttgaccgagttggaatagaggaaaaaaaagcaccaaaggtactgcggagcttatttatgcctgtgctgacccctgcgcaggagcagctcttagggcctgtctgtgagaacggaatctagtcctggagaactcacagcaccttgtagaccttatgccagagctccgctgtgagtgggcgcgcctgggctctggagtctgtcctctcctctgtctgcccatgatgtccgtggtcctgataattgctgattgtgtcagttttccagtgctagcacagaatgtccaggaagctcaaagcaagaaaggtgtattacgctcacaggtccttaaatccatcaccaaatgagtccattgtttctgggatatggtgagcatctttgtagacaggtgtggtacagctaaattgctgttgtcatggtgaccaaggagcaaaggaaagcagaggaagtcctgggatgagctagctagactgctcagccacactctaattgacctgcttcctttcatgaggccttacctgccaatcctaccgtatcatcagtcagtgcattgctgaagct

SEQ ID NO: 29643 - DNA, 1187 bp, Mus musculus
tctaatgaaagtataggactttacatactctacaggccgaaagccaccagagtcagaaatgtaagggctgtgcgttctgacttgtatgtcaagccagaaaagcaagtcagctggagacaaggtgactgctggggacagaagtgactgccgcaaatcccacagatctttaaaatgagacatggcggaatagtgttctcgtcaagtgtcatcatggggggtcgtctgaatgcatgtgccggacagtcagtgctgtaaagacacttgtgttctgcactgtgtaaaaatagcttgtcctgaaaatccattctgctgatttcttcgtttttgaaagtgagcccaaggaaatgataccttgggaaaaacgactgcagcacgtaagatgaacaggacgcttatgtgctgccagtttgggaggagctgctagacttacaggaagaagggggtgggggagccagtgttactgtgctttcctgaccagtgagccttgatgctgggagttttagaaaagatgaacgacatgtttgtcttctgtacttaaagcatgtcccaggtggatgtggattcgggaattgagaatatggaggtggacgagaacgaccgaagagaaaaacggagcctgagtgacaaggtcagtgatggcaaagggcgctccgtttctcagtgctcgcttggctagcctgccctagccagagcgtctgtctgtctgtctgtctgtagctaggcttgtccttttgaagaatgcttagtctcagccttgccccggaaagttctcactcctcagtctgagctggcttggaactggcagtccacccgtgtcagcttcaggtgctggaactgaagatcccacagtccaactttagtctgcttagcagcagcagcagcagcagcagcagcagcagcagcagcagaactgggcccttttgtacagtgaaacccctccattctgcttggcttggctgcatgtttttgaggtcggtcaggtgggttgggtttttttgaggtagaaatcctcctgggtagcccggaactccttcctatctagaccaggctgctccctgatgtgtgtgcctgttcaacgtgtgtgggtattaaagacaggctgccatgactggctgggtccgcgctttcataagtaaaacttaattttgtggcagcaagtaaaaactcagggaggcctttctgtttat

SEQ ID NO: 29644 - DNA, 1105 bp, Mus musculus
tggggcgagggggtaagagtagggttggaggggtaggaggatttacgcttccagcgagggcttcgccagtcccgtccctcccctgccccccaccggggttctcgcgtggaggcggggcgagcctggcctgcttttagaggggaggggcttcccggtccggtgctgggctctgcctgggctgctgtagggtcgccgcgcctcgggggcatccagtgtgcagtggagctgttcccgcctgggcccaggggtgggacccggagcagggtctgcgggagaaaaaaacgcagctgccgcgtcaccgccacgaagacacggcgcgcagcgggcacgagccgagctggagaccgcgccgcccgccctgggtaacctgggaagctgaggggagtcagtggcgcctggagaggaccccatagcggtggccgtggccagaggcggcagctctgggcgcttgctgctggaggaggctgcggcggtgcgagcggccgaagccaaggcgattcagtgcctcgtgttcttagtttttaacctctgactatgcaattctgaaacctcccccattgggggaccagacagcccgatagataccttccactcttcctttgctcccgccctggtctcaagaactgaaggatctctctaacgcctttcaccattaagaggaaagcgatggaggagctgagcgctgacgaggtgaggaggctggggcgtgggggggggcaccttgaaaggattacttggcaactctttggcgctttggatggggacagatttttgccctggtggtgtcgggctcttgggattggggaggcaacggagatggcattttcaagaataatgaaatataatggaagtagtcattcatcatcaggttggctgtattgtaagaagcccttggctccactttgggctaccgtctcagtatgtttactcgatcactaaaattctccagagatagagaatgcaagagggtctctcgttttattctcctttattctctctcgtttcttcattcggaactccactcgcttttctttcttttagggtctgaagacgggggtggggtggtgaggagcatcttgaaggtgttcaatctttttaaaagggt

SEQ ID NO: 29645 - DNA, 1152 bp, Mus musculus
gcaactataaagctaaactaggattttacatatgcttttcgggcctagagctgagttaggaatcctcaccagaaagccattctcctagccggactgtctgtgcaggagggagatgtgggcagcagtggcactgtagggctgacacatctggttttctgttcctacctgggctgaagtgcatttgaggcaacctttttactttgtgtctttccctcaggctctggagacaaggtccttgctctggcagggttcgatgttgaaaaagccaagaaatgacggcgtggtgggtttggctctgccggccccacccctcctgcacacggtgcttccatcctgaggactcaggccacacaaagctgtagagactctcacaatgcagcaacagcccaggaacaggtgacttggaacacagtgtggcttctgcctagggtcctcgtccctctctctgtggatctcccttcttacgtgaccccaggcttgttggacagagggacattgttcactatgattcgttttgttaagatatcttggttttagtgctgataggtgtgagagctatgagctaagactgtcctgacctctgtctgcatgccttgggatggacagcagtgatgtccctggccctcctgtggctggagaatcttttcagtttttatacaaggaaaccaagacttagcacttgtgatgtctaaagtcacattagaggcagagctgaggctggggctcaggtgtcctgaatccaagttttacttctttattctgtactgttttatatatatataataattaacttgtatttgtgcaaattggtgtctatgaaaattcagtgtcctaactcagttgaatgggcactgaggggctgttcctagcctgttcatgggcagcatgaatgggccccattgtatctctgggttcctaagaagcaacaatgggagccctgttgagagcctcccgaagtaacttaaccccctgcctgtctcagtggggaagcaataggaaatggcaacccacagccctctgggtctgacctcttgccagctctgtggtggtggtaatagcaagttactatcaactgtgcagtttggggagaaacacaaaataagttatgaggaaagcgagtttctccctaggagccatggctctgcatgggca

SEQ ID NO: 29646 - DNA, 1089 bp, Mus musculus
cttaaggagcttcgcttccgtcaggggagctaggaggcctgccttttacagttactttgcatttccctccctcaatacagttagccttggtgccattcaggctagtgtaccattcctgcgctcatcttgccactgagtgacacctgcttccccagtgtcatgttcaccagtatgttctgtgcaactgcagttattaatgccagcaagccgtgtctcctgttcacattgtcatcctttctggaacttggaaggtctgccactcacagcagctagcctttaatattcttatgccacgatgttttggtgaaaatttctgcatttcaagccaggtgtggtggctggtgcccacctgtgatcctagtgcaggagggggtggggggatgggacagggccaggcaggtctctataacacgaccatgtctcaaaatacataaataaattttctcatttctccaagaattagggctaaagcaaaaatatgttccaatgagagagtgtcaaaacgggctattagttaagtctactaacttagactttgtgtttcagagatggtgttcagtcttgtaaatggcaaatcaggtattctaggcaggtggattttccaggagaaaccaaggctttggggcaaacagcatgttaactatgattgttaggtctttctctgaaggcagagcctaggaaaggcatgttcagtgaataaaagactgcgagtcttccatcgacatggtgtctgattgcagtaagtgatggacaattggaattatttctgaggaagtgagcctggccgtcacccaccgtggtcagcccccttcctgtctgctgttcagtgtggtttatttttctacatagtctttctgttacaaagacctttctattactttgcctctcgaaatgtttgtccaacattagtatgtaaattaaaactgtcagcattcccacagattcccaagaacaaattgcaacatacaattgcttccattctgtctggccctggaagtcaaaaaagaaactagaaactggaggaatgtgttcaatgtttcatcacgtttctaaaagccagctaacactgtggccctagtagataatccc

SEQ ID NO: 29647 - DNA, 1245 bp, Mus musculus
ttggcaagggtgggaagataaggagggctgctcccagtgagcacagcctttctgccttgtcctgattccagaagccattagcagttcttgtcccctggtctgcaggtgcagaggacgtggtgatggcgttttccagatcggagacggaagaccggaggcagtagctggaagcccctcggaactccctggaagctgcagatggccaagagatctgtgtggctcctctgccggttgagtggtagcaaaccaccgtcttcttaccctttgcaccccttaccccatccgaccctccccacccagccgccactcagcagggctggcatcaaggtggtttgtgattggcttaaagggatggacttgagattggctgcaggaagaaacctttttatttttaaatcttgaccaacggaaaccttttatttttatttctgactctttatttttttaaacatttgcgcctcggtatctggcttccccggaagctctccgagctctggtgctttatttaggtcatttttaggaatgtgaagaggcctgattggttgcttaaactggaaaagggttatgattggctggctagtgggacgtggtcttttctttgattggctgtaggtgttctgttcacatcaccgacttcctctgttctgaaagcagaaaacagggtttgggatattgttatatttgacttgaaaaaaaaaagaaagaaagaaatgaagtgagctttgcaatatttattacacaaagagctggctgctgccttcacgtagtgggtttgtgtttggatttgattggcagtaagatgcgggtttggtttcccattggctcacccctgactcccgttgctatggtctttcttccactctgctggttacatgaggcctgagggtacacctggagaatgcacgtgctttaatgaccacacctgcctccaccagcgaagggaccccagggacgcgagcgcgagcggggtccacagctggagaacaggcccccaaggggctttgtgttctcctgagccagcagcccagagctcaggggtgaccgggaggcaggattgatgtactcagttctaagagctggcagccagccagtttcctggagcgaatggattgtgcagagctcttcaggcctttctggccagcccatgctaagtacaggagtgttgaccggcagctccagcctctctgctgccccctgtgtctcacttccccaggtcttggcatccccagatcctgaaggttatga

SEQ ID NO: 29648 - DNA, 1225 bp, Mus musculus
acaacctagccaggcttcccagggtccattgccagtggctgtagttcccggatagcagatgtgttctacctgagcccaggcccccattacaccgtgtatcaccctgtgtgtcagcatagaagggggagtagcatggcttatttattaggaagcacccacttggaagaccagctagactttcacacagtaggccccacaggctactcagatccagcccaagggtcacattttagagcagcgactgagaagaaagatatgggtggtcgtcccatgcccaccatgccttccctgggagtgagagaaacggtgacggccctttctggtcctgggcaccatgatccggaaaacactggagcatcttttcccttcttggggcttcggcctcccgtgtggcagggagtgtgcaggatgccagtgccagcaggtcttgagttcaagccctggggcacctccctgttggtggacggttcaagcttcccagacatgtcccaggaggagaatgtgaacatctggtccctcagcacatcggccctgttagctgacagtaacatgctcgctttggccattgagctccagggagcaaggacagtggagaatcagctccgccaaccccagcctgaccagcaagagcctgagaggagagcgtcattgctggggaggagcagcgtgtgtgagcaggcacggtatgagctcacactgactgacagacgcgtgcttgttctgctggcgcagtgtggcctggagatgtggctgggcccgtgggcagagatggggtcattcagtcttcctcccctgtgagattgtatctaaagtccggtgttgccagcttcagttggttcctgtgactgcctcgaggccaagccctggtgatggtgtgtgctctgtcttagcagtggttctcggctcagcctctgagggaaaaagatgcaagtatcgatgtggcttcttattctaactgaaagtctatctaatggagaaaaaaaataacaataaagatttttcacagcttgctgggtgagctgagctggtttttctctcaaagctgatagtactgggccccttcccaggggtcattcgaggagggagggcagcatcaagcttgataagcagagtggcctgagctgggggtgtaactcaatggctagtgcatacttagcatgcctgaagccctgggttgatccccagcatctcataaaccaattgtggtgactcatacctgtaatcc

SEQ ID NO: 29649 - DNA, 1106 bp, Mus musculus
ttctgccaggttatattaagaacacagagaagctaaactatggcaaagagcatcagtataagctcacagtcacagcctacgactgtgggaagaaaagagccaccgaggacgtcctagtgaagataagcgtcaagcccacctgcagccccgggtggcaaggtgagctgccgtccctttagctcttacatccattctgaaacgaacgcgccatagaaaacgtggttgcgagcttcctttctttctctcacacccatccatgggccaacgcaggctggagcagcagaattgagtatgagcccggcacgggtgctttggctgtcttcccgagcatccacttggagacctgtgacgagcctgtcgcctctgtgcaggccacggtggagctggagaccagccacatagggaaaggctgcgaccgagatacctactctgagaagtcccttcaccggctctgtggtaaggaggtctgctgtctgaagccctctgtctcagggaggcgagttccttaggatcccagcccctgtgacttggtcagtaaactgatgggtagaacagacgcagtgttctgaagtggctttggcttccttgctgtctggttttcattccggacgggcatggggagtatacagaccctgcagaatcaattcagaattacgtatgtgtccgcactgaagagcctgtgtttcaaataaagtaacgtatattcagagtcatcagggatgggtgacataagaacaaggaaccaggtctggggatgtgctctgtaatctagctattctaaaggcaggggatcctttgagccatgagttctggttccgcctaggccacatagggcatactgttggaaaggcacgtgctttacctaatgcatgaggctgagttcaatcccagctcgagaagggaggacaaaaagtttaccctgacggtatgtcctgatggttgtaaatcttccctctgctcttttttaaattagatttttttttttaattttacgtgtgtggggggcatgtgtggcgtggtgttcatgcagaagtcagaggatgtctcgtgttagtgggttttctccttccaacactcctcaggttctggggactgtgctgagttag

SEQ ID NO: 29650 - DNA, 1099 bp, Mus musculus
ttagtgtgtgtatgagagaaagagagagagagagagagagagagagagagagagagagtgtgacttggtgttgatattttgtctcactcactctgtagccaaagactcacttgtagcccaggcaggctttgaacgtggcagccctgcctctgcctctcaagtactgaggttactatctgtgtactattaattacatttccattaagacaagaaaaatgccttacttttcaggaaaagcaaaaccaaatccgcaagcattccaaccccttagtgaggcactgaaccactcccaggctccctgttttccgtggaactcacaagtcctgtccctgtggtttcaggggctgctgccggcacctcagagctgctcccgtcccccagtagctccttcaactggactgtgggcctccccaccgacaacggccatgacagtgaccaggtctttgagttcaacggcacgcaggccgtgaggattccagacggcgttgtgacccttgaccctaaagaaccctttacaatctccgtgtggatgcggcatgggccgtttggccggaagaaggagacaattctctgcagttcggataagacaggtttgttgggtccctggactggctagtgttcttcagagtctcctcacagggactgggtcctctggctgctcttcgttctatgctggggacactttgtcctcaagagagacaagacctagcctgggggtttatcagttttactcagtagattactcagtaaagtgcccgtgtatccgtttctaacccctgtcttggcccgactggagggttcatttgtacagatcaaatctttaaatccattaaggagccagtccttactctccccttgggcctgaagttggcagtttacccacagacactgtctgtctttgcagatatgaaccgacaccattattcgctctacgtccacgggtgcaggctagttttcctcctccgtcaggacccgtctgaggagaagaaatacaggcctgcggagttccactggaagctgaaccaagtgagtagctgaacctggccaggtctcatctctctggatgtgacagcctgagggacactgtggtctgtgtatc

SEQ ID NO: 29651 - DNA, 2218 bp, Mus musculus
aagatgtccgtggtatgacaggactaagctccgcccctctgcattgagcaccccatcccatgtgagtggtatccatgttgctaatgagagcgtcacctgccgggtcactttggcgaggcgactcccagtaccactcaggcccttctgtcactgtggggttggctgtgttttcctttgtggcttttagtagatagacactgggcgatggggctacaggctagatttacgccgtcgtctctttgccagacatatgaggaccagcacagcagtgaggaggaggaagaggaggaggaggaggaggagagcgaagatggggaggaagaggaagacatcaccagtgccgagtctgagagcagtgaggaggaggaaggaggccccggagacggccagaatgccacccgacagctggaatgggatgactccacactcagctactaaacccgcactcagcgcctgctctccagactctctcccagccccacgggtccacgatgtacaaaatcattttgaccagcaggtctgcagacccttcccccactgctcaaagtcctcccgtgcttggtgtgtgggaccaccggctccaccctccccgcccatcaccattgcagttttgctagaagctggcgcttcctccccagggcaggggccccacagcacctcagaccccaagtgtgtctggagttccctgtcggccagggagaggacaccagcacctgggacctccagagaagccgcactgagcggacttgtcgacagagggtgaaaaattactcccacgcagtcagtaaccatttctcttatttttaaaagtttttttatttttttttcccaaactagtgcatgtataaagtgggagagcagagggggttaatatgtagatggccaaccgactttttaatattttgtaaataaattgggattctgtgtgtcctctgtgctagtagtccaggacaggaatgtaaagtcagaatgcggggccaggagggcctcttcctccctcttccctcccaagaaaccaggttggagaggcccaagtcactggggcccacccttgctagggtttccgtacagccacgtggccggggccatggctttcaagtgctgtctgggggggccagccccacgagcctccaaccacattagaggctgggaacagccaggatgttgccaaagcccctggcctttcctgtacacgcctgtgactggcagccacatggtttctgcttattaacgtgagcctccctgttggtgaaatggtgtagctgggaacggacagcaaaggtgcaggcggtcaggctcctcgcttggaagaccacggttctgagcaagtctgcacaacagcaccaaaaggagaccccgaggcccaaagataaactgctacaatgctccagaacaatcttttctctcctccccagaggccccatgggatgccgcgtgctgttgggtttgggctaagatctaagacccagcagataggagacagcaggtaccacccacacagcacagctcttcattcacagtcaagagtttagactgctccagctgggacatccagtcctcgctgctgttgctgctagttcgaaggatgccgccgtgctgtctgtggccgccctcccatgtcctgtcccctgtagctgctttcttagatggaaacaggctaacgaagagagggacactgtcgtgtcagtagccgcagggtcccctttaagatgtgtatatcgacactaggtcagaaagtgtatgcgttataataaagttctggttctaactccagcctgagtggggtccattctgtcatgtttgttgggtacgggttggggcaggggttgagggatttatgaagataggctgggctcaaacttaaagcaatcctcctgcctctgcctgctcagtgctgggattacagatgtccaccatgccgggcaaggattattaatttttatggtactaaggaatgtacctgaagctttgcacttcgcagacaagggctcaaccagtacactgtatccccccaagtccccttgttatttgagccaagaacttaagaacataaaaacgtttttatttcttttcacctgtctttacctgttgtgtcaaggttgcacaaactggtctcagcccccatcaatgagaggaaaaaacttaacaaaaaacccgtcttccagccaagtacacacccaacccagaaaggccgagcctgtgcagaatctgcagccac

SEQ ID NO: 29652 - DNA, 1121 bp, Mus musculus
tacagtgtagaagtgtaaactgagtaagccctttcttccctaacttggttttggtcatggtgttccattgcagcaagagaaaccatgacttttctgattagagtttatagcacgcatttaacaggttttatggtagctgtatctgcttccctttgccctgcccctgactttagtcctgtggtgctttcattctgttgctgtgacaaacgccatgaccaaaaaccacttaaggaaagaatgggcttctttcatcttagagggtgaagtctgtggtggtttgagtaagaatggcccccggaggtgcatatattttaatgattggttaccagggaagtctattagtcagggttctctagattaacagaatttatagaatatatatgtgtgtgtgtgtgtatgtgtatatatacaaacatatatacatatgtgtgtatgtgtgtgtatatatatatatttgtgtgtgtgtgtgtgtatatatatatatatatatatatatatatatatatatatgatttattaaagtgatttatgggctgtactccagctaacccaacaatggttggctgtgaacagaaagtctaacaatccagtagttgttgctcagtccacaaggctgatgtctagctagttttcagcatatgctggaatcccaaagaagtaggctctgatttagtggatctcaacctgtaggttgtaaccctttgggtgatcaaatgaccctttcacaggggtcacctaagaccattggaaaacaaatacttacattactattcataacagtagcaaaatttcatttatgaagtagcaacaaagacaaaaataaattttacggttgagggtcagcacaacatgagaaactgtgttagggaggttgagaatctccgctctaacttgaagcgaatggactatgaaggaatggactttctagcaagacaagaacaaatgggcaaagaaacttctttcttccatgtccttacataggcttccagcagaaggtgtaccccagattaaaggagtgtcttcagctgaagatgcagtcaagctgacatccaagaatagtcatcacatagtccctccctgaggggaggtcagggcaggaagtaaggcaagaaccatgggaa

SEQ ID NO: 29653 - DNA, 1155 bp, Mus musculus
ggcagggaccaaccaggctgcctgtgcccgtctgctgcctccgagacaccagaggtctgctgcagagccccaccaagaaccaagatgaagaaagcccctgagagatgcacatggagcctggatcacttcatcctcacacctgttccctccagagggcccggctccctgcatcaggcagcagccgcccatctcgccccaactgttggctccaggcagggctgggcagcagggagcctgggactgaacaataaacccatgatctcctgcctcacacacctgtttgtgactttcccagcaagtagctctgttaccctgagaacaccagagctccccttgtctccctctctctctcatccagggtccctgcctgacccaccagttgctcgtgagctgcacagttcagatgagactggaccctcccttacttactcctgagccctgctctcctctcctccatcctgtcccaatctgtgtcccccttgacctgtggctccaggccatcggcattggtgcctacgtgtccagccactgcctgctgagggcactgcaggcttgctggagcacgctggagcacatcctgtcccatgagggaggaggaggagcgttggcctaacactggctgtttcgatagtgtgggggctacatgtgcctgtaggggtcaggccttggccctgtgtgcgtgtgagcctgtgtgtgtatgagtgtgtgtgtgagtgtgtgtgtgtgtgtgtgtgtgtgtatgtgtatttgtattatacccctggggattcttgtgggggaggggcatggggaagggaagggtcttcactgtcattcagggataaaatttaactttatttttctacacatctgttgccaggtgaggcacgtgctttgaagcagatgccttcagccctccctgctgggaggtggtctctcaagctctgggtgcttttagtacttttttttttttttaactgtagggaagcagccctgaccttacctctccactcctgtcccgggagctctcaatgctatcctggattgcctcgtaccagtcagaggtcaggactccatgagtccagctgccacaaagggttcagcttggaggtgacacctctttggtctacatttgtacaatggatgcatcaagtttctaaattttatttcctgcct

SEQ ID NO: 29654 - DNA, 2498 bp, Mus musculus
caggggggaggacaggtggcagatgggccgggctcggccccgccccctgaagctggcaacaacttgtcttagccatcccactcccaccctcttagcacagctttgagttcatgctcatcccctccgctcgctgtcttagccatcccgctcccccagtctcggtgctccccaggtggcctgtactggctcaccactgccaccgcttctggcctgagaccctgtcatagccccatagcttcctgccagctctaggcacccagtcttgtcattgcttccccctggctcctagtccacaggcgagggtgtagactgctgctgtacccttgtaatttgcttgacaccggccagtttacaagccatggcctctgagcatggtgagctaggactagagcagcccgctcatcccccgaacctcctggtccctctttcctgagactcatggtccctcagggtccttccctggagtagcaagggtcgtccttgggtccagcctgccctggctgtgtctgtgaggcaggctcctctcgggtgggcagtagaaagccccgcagttccttatggtcagcaagttccaatggtctgccaggtaggaggaggatggatcatcctagatcagtagccgctccgcacaaacaggacccaacagactgttggtgacaccgggtcattgtcccttgtacctctctagcattggtggcttccttgaaataatttttggagggtgccaaggcttctgccctcggtttctctgggggcagctgctggccccatgtggtctcagcctcaccctcctcccaggcacagcttcccccaaaatttgactcagctcaggcccctgctaactgatgggtttttgacaaatccctgttgtctcagccatccggagtgggaagtgctgggtcctcttataaggctctgaggtgctggcctcagtggatttgaggaccacgagaggtgacacactggcagtgaaggtaatggccatgggaagaagtcattcattgtctaaggatccatctggaccataggcccatgctccgcccacctggcatgctgccctctggtggctcccggttgactcacactggtggtgttgctactgccgcttgtctgctaacttaaatccctctaagtgcggctctttcaccctctgcactggagcccagggagggcagaggaagatttcacacgagtgagtgtcacatcagacctgaccatccactggggtctttgtgaggtggctggtcagtcctccttggaaccccatagggagcttgagaggcaagcaggccccactgtggtaaagctgtttgaggcctctatcctctgaccctccgttatcagatagcaacccgggattactcagcgtccatgtggtggcctgccagtgtcaggagagcaggcgttgcttcaggcatcgcagggctcagcttgctctgggtgagggtgtggaaggtctctgacgtgtaggtgaggccctggttgatgtgggctagttgctgctgaccttgtggggtacagctgtctgagaggacgaggaacgccttcctgtctctttcctccaaggaactggcctacgggaaaaaagatgtaacaggcggtggggctgttgtctgcgcgtcctctcctgtgtattgtggatctcaaagaagctgacaatatggtgttaatttctgcatttttggcattagatagaagccggtgtgtgcgtgcgtgcgtgtgtgcatgtgtgtgtttaaattatttatgatacacagagccagctctgagcagccagaatccctgctgagcctgtcaccctgcctgttggtgggagtagacagcatgatgggtcgggattgctggccttttaaagcgttcctgctactttttaacattaatggtcctttaacgttttgttagttggagaaagcgtgttctggggtcgctggcagaagctgaggaaactcaggcacccttgggttgtggctcattgactgggacaaccactgggccgtccccgttcagagtgggatcatcccaggtacatagaggtggtgtccctgagaaaggagggagggagactgctcacgtctgcgtctggggcccacgctggcccgagcagagcagactccagtaacccttgccctggagcaggccaccctccatccccaggcagcctgtccatcccgcccgccgtgccctctgtctgcgcccagtgcaagcccgtgtcatgtagtagattgtgattgtccagcgaccctaacaactgtaaccaccactggccatagctgccatgttttgaatgctgtgttttcaataaatgcctcctgggtcctgctcattccggttggcaccaggtaccgcgtctttttttctttcatgttcttcagaagggcttctgttccacaagggaggtgggttggtttggggtactgcatttggggttgggagcaggatggggatctggcgatgaggaggagtgcttacgggcccagctgctcctctgtcctgtgggt

SEQ ID NO: 29655 - DNA, 1147 bp, Mus musculus
gaccagcactgggccactgtgctgggagggagcccaggtggcttttcagctagacagagtagggggagccgagggactcatgggagacgaacacagtctaagaagaacttacctttattttcttttgcttttctcaagacaggtctcactatatagccctggctgtcctggtctgtagctcaggctggcttcaaactcccagagctctgcctgcctgagattaaaggcattaagggccattgtgccctgccagaacttaaccttccgttgtccttcttgcatatgactgcgccgtcaggttagagccaagatgcccagtagacttggtgccttgacttcttccccctgtctctcctgcagaggtcatcaggacgcggctccgcgaggaaggcagcaagtacaggtcgttcgtgcagaccgcgcgcctggtgttccgggaggaaggctacctcgccttctaccgaggactgtttgctcagctcatccggcagatccccaacactgccattgtcctgtccacctacgagttcatcgtgtacctgctgggagagcgtgcttagtgacagggccacatggttgtgctctagaagaataaaactgaaaaccctagagattttcttttccgttgatgtttagtgttcaaaactgaaacagcgaaggccatagaatacctggctcatgtcacctgttggacatttccttttggattcttgtttctggaaggttgaaattcattaacgttaatagttaattataactttcttttttaacttaagaggactgaggattgaggagcaagtaaattaaatcatgctatttaatgtaagttcgtgctgggctgtgttctcctttgtgcttactgggctgccctaagccggccacggggtctggctgggcgtggggaagtgagaagcgtgacttgtggggactgagtggtggacaggaaagagcggtcacgcttggtgacaactgtgagcaaatggtccacagctttccctctgtacatctccatctcccccctccatggtggtaggtttatctgtaatctgtttccagacactgaatgggggtgggggtgggggtggagtgtaacttccttaaccaccccaccccccaccctttctgagtcagggtcttggtgctgtag

SEQ ID NO: 29656 - DNA, 1166 bp, Mus musculus
cagagctcgttaaacagtgcacctgtaaaatgacagtcctcactcccactcagatgattagcatccatccagaataaagaatgtgaaaagagctaggcagtggtggcctacaccttcatcccagcactctggaggcagaggctatgagtttgaggccagcctggtctacagagtgagttctaggacagccagggctacacagagaaactctgtctcaataaacaaacagacagagtgtgaaaggacttttatgtgtgttaccaaaaatcttatttctcctctgttatcctggccatggctgtcagcactttctggaatttctggaaggcatgaacatccaggtgcagtggcagcctgggtgtgagccagcctcttgtttccttgctggctaagatcattactctcttctgtggtctcctctttgggatagatggtgcagagggacctgtgtactttaaagtgcagtaatgctttaatggttttctctttttgtcctaccagggctgtgtactttgcatgttattccaaagccaaagagcaattcaatggcatcttcgtgcctaatagcaatactgtgcacattctctcagctggctctgcaggtatgttccctagcaagtgttgtttcgttttgctttcttttttttttttttctttccaggaattagatgttaactccctgcctcttttgaccctaaaaccatttttaaagctttgtattggagtttgtagaacatgactattagcagtttataaacaaattttacttttctgttcttcatcttcctgatttccctattgagttgtaatgtggagtgagagctgctttctttctgattccccaaggtatctggggtgcatctgccctgcacagctcacttgcacagcaagaatcagggttttatgtgttgtgtggtacttgaggctgtacctaaggccttatgcctccagatggtctgttttcttctgaggaagtccgcactgcagagctcagggcagggcttgccccagggagtgtttgtgagaaagcactggctcctaaattgctaggagaagcctctgcccttcttcatagaggcttctgtccatttgaatctaacagaatttttagagaatttagattagcattttagaatttcttccttctgttaacagcctgcaacgtg

SEQ ID NO: 29657 - DNA, 1195 bp, Mus musculus
gcacgctttccacgtggacccgggtgggtttctggctgtaagaagccgttggaccaggggcagtcctaggtaccaggttctcagcctcagacatctcagacactgctgggcacctcagaagagccgagaacaaatgggggccctaggggcagcttggtcatccctggggccgaagagaggagagggcaggggaagaggggggagctgggtggtcctcacgcccacgtgggcaagagtccttggtccagtccgtggctggagcgcaggaaggcctcctggcgggaggttagacatggctcgatagcagaaaacctatcccatcgttcaagcacagcgggccttgatgagcagagacagtctggttttagagctttattgtagaaaggcagggagaaagagagaaggtagaaaaagggagaccggccatgaccacgtggagagagggggaagggagagagagagagaaggagagctagagaggagagtaggaaaggtgaaagcttaaagagccaggagggtccaagcaaccccttttatagtgggctgggctatatgctgttaccaggtaactatggggcggagcatacctggctatagtcaggtaactgtgggggtggagtctagccagaatgccaggagcttgggacatgtctgcatgactgatagtcacacatctctccttccggggctgtgagggtgataacttcgacagaagccaggggtccaggagccatgatggaacaccttctgtcccatgtaggtggaaatcaccacccatcaggtccccggggttctaaatctttgctcgactggagaccaggctgtctgtgcgtagcccactgccccacagcagaggaagagatggagagaaggggagagtactaaagatagaaagagaaaccttgtgtcagtacagccatggcttggacttcccatctcttccctggttccaactccgagtccttctcagtagggaggctagatgcactagtctgattatatctgggtcttatcccctggccacagacacagggagagggggcagcagcaggcagcttaggtcgtctgtaggtgtcctgcccagtagcttcccctccatcctgtctcaacgtgatccgagggaagttcatcacacaaagtgcccttggccctgaccaaggtttgaggtatcagtgggcttccatcccgcgcagcc

SEQ ID NO: 29658 - DNA, 1114 bp, Mus musculus
tgggggaagatggcgggcaggagttagaacccaacctgaactggcagtgagttgggaggctctgcgctgttctgcctgggctcattttaactgtagtatttgggggtacccggctgaagatgagattcgttcctggcacagccctgcctaagcgtaccttgagcccgtcagcagccacagtagcttagctgcgcagtctgcaggtgcaggagagtcagctcatacctcatgctgcatcccatgtggagcagaactggcctccaggcatcaaaggatttcttgcaagggtttggcccctggaagggagcaggcatcaaaccagaacatgttcctggaagatgcacggggcagatgtcttccaggaacatcgaatcctgccttctgcaagctcctcacacccactgtaggctcctcacacctagaggtgggtgtgaggaaccccaaggatctttcagcttctagctgagcaaggtgtcaattcaccacttctgtcacaagcacaagacagcctgccaagggatccgaagagacttcactgtgatctagcaagccatgtgggtagtgatggcttggatgttttgtacctccggccgatcaaggttgggagtatatttatttgcaggtcccagaggatgtccacgtctctgtgtgaccatggacaggacctctgaataatgacccctgtgttcattctttgacctcaagggtgagtttgttaaagtcctacgttgctttgatggcttggtgttttaaacgaactctatgcatctttttctgtccctttctattgagtggcaatgtttgtatttgctagatgctgttgagacaatttgaacagccgagagtttgcaccgagagtgtgggtgtacacggacaccacatgtgtcaggatgcaggtgtacatagacacggtgtttgtcagggtggtccttggcctcacagaggtctggaggagctgtttattgttgcgttttgtaaaaagagaaaccagagatatgtttggtggggacgaggtatggtgtgggggaaggggtgcctctgtgggcctgtgctgaggcatcccttccccttgaggtaccagccacacgacataggtatagtatagaggagagtt

SEQ ID NO: 29659 - DNA, 1104 bp, Mus musculus
acaggcctggatggtgatcagctggtggtgctgacggagagcccgttcaggccacaccaacgcatgagcctcagcctgcccctcatcaaccgagccaagaaggtagctgtcctggtcatgggcaggacaaaacgtgagatcacaacgttggtgagccgcgtgggccatgaacccaagaagtggcccatctcaggtgtggtgcctctttctgggcagctggtttggtacatggattacgaggcctttctgggatgacagtaccatcctggtcttagtcactctcagccttcctctttagctgcccactgtgcctcagctgtgtggagcctggtaccagagtcaggccccagagaagggaggacaaaactctgtgccgacttcctggacccactggttctcgggaatttcggtgcctgcacatggaaacaaggtagagctctggcctcaaaacccagataggagagggactaaggcctccagcagttacacaccagtagctacaacacacagtaagactgggcgaaggctccacgctaaagaaccaaagtggcctgccaagactggcctgcgatcttcaaactggtttctgtggaaagaggggccagtgttgatggggagcagggtgcagagactcctggtgaatgtcttgctctgagccaggccagcagagtagacacaatcctgagcctgcaccgggcgccttgcctcttctggtatcccatcatccctctgtgcacctagctgagatccagcgctcctccgggcagcttctgtctactctgggaggacacccactgtcctcagtattccccattacccctcagcctctccctctctacagacacagacactgccacgtcagaagttcccccagatctagagaccggggctccctttcccactaagaactgttatgctgtcattgggctgtcgggcatctctgatctatctagacgggagggctctgtctgctcctgggtcgggggtgactccagatcacagcctctttctagggcttatgtggccaattgccagcatcagggcagactgcagctagccctcctcacactacctctctctggcttcaagtctggcagcagcccc

SEQ ID NO: 29660 - DNA, 1150 bp, Mus musculus
tttgttgtaccttggctaggtatactcttgcactgggccatggggtggtgtttttagctctgtttagcggtaggacatccaagccagtcaacaaagtagccctcattaggaggtggctgtcagagccagcacccagcctctccgggctgtcctacccgattctcaccttgatcaggtagctttccctgctggcctgtgcccagggagggagaaggcagggcaaggaagctggccaaggtccagatatgtttcttcctaggcctgagactaggacctccccaagcacattcctgtaaggcctgacgggatgatcaatcccttctcctagaatacttgtagatgaagggcggtcggtccaaccgtcccctttcctgtgtcatgtgaggcttgctgtggcacaccttgtcataggttcgttagatggaagaatgaggatgccagggcagtgatggggtagcatcccggggaccctctgacggccctcgtgtcactcaggtcgggccagtttctatgaggagtatggcgtcatccgtgacacgctgcagaaccacctgactgagatcctcacgctggtggccatggaactgcctctcaacatcagcagctcagccgccgtgctccagcataagctctgggccttccaggccctgcgggggctgcagaagagcagtgccatcctgggccagtaccaggcctacagcggacaggtgcgccgagagctgcagaagccagacggcttccagagcctgacaccaaccttcgcaggtaggcaccggagctggtgtctgtggggccaccagcagctggaggccactggtccaccaagtgccctttgcagtgtgggactccgggagatcttttcacctcctaggcctgttgccagcttaaagctgcaggtcacctacctcaggctccatgcagtcccaggaaatctgtgggactcggataggaaccaccttcgtggtgggctgtgtttgtcacttctatgatgaggcacagagttctacccagccacagccaaggaatggtcctgtggagagacaccacattggccatcagatacctgctagagctacctggaaggtcccaggaggatttagggagaatggctggctgttagaaggcagagacagggcatggccatctagag

SEQ ID NO: 29661 - DNA, 1224 bp, Mus musculus
ccatggacctccctggtgattcatgccattctccaatgctcagagtggcagactgcgctggttccactcagtggcctaggactttcccaggcacaattcctgtttgcagagcaagctcccgacatacttttggcacggaagacagactgctcaggagggaggggattgctgtgggactgtaacattttcctgagaaacaagtgaccgtttcttgccaggcaggaaatgtttgatgtcctagctatgttccttctacatcatagcctcctgacccatgtctgattcttccttgttccttgtctgctcttcccaggcacacaggcatttggaagatgctcctagcggcaatgtgcttggcccttctgggctgcctacaggcgcaggaactcaagggtcatgtttccataatcctgctgggagcaaccggggacctagctaaaaagtacctgtggcagggactgtttcagctatacctggatgaggctgggaagggccacagtttcagcttccacggtgctgccctgacagccccccagcaaggccagaagctcatggacaaggtcttggaatccctctcctgtcccaaggacttggtacccagtcgctgtgatgaactcaagggtcagtttctacagctgagccaataccgccagctgaagacagtggaggactatcagaccctcaacaaggatattgagacccaggtccagcaggatgggctctgggaggcaggcaggatcttctacttcagtgtgccgccctttgcctacgcagacattgcccgtaacatcaacagcagctgccgaccacacccaggtgcctggctacgggttgtttttgaaaaaccctttggccatgaccacctctcagcccagcagctggcttcagaacttgggagctttttccaggaggaggagatgtaccgtgtggatcattacctcggcaagcaggtgagctgcagcttggagcctggcatggctgtgctaggtggtgtaccatggctcagtcacgaggaactcactgccgaatggaaaactgagctggagagtgttaggaaccctcggcctccatggtcttcctgaaggaagaccggaaaggtagaagttgaggaaatgggtggaatagcaggcaggaccagtctctatatcctcatctgggcttcccagtgagagggtatgtactctgagtcctccatgttgatctgccttctccacagaagtggtc

SEQ ID NO: 29662 - DNA, 1101 bp, Mus musculus
attgaagctagtagacacccctcactacacacacacacacacacacacacacacacacacacacactttagcctagcctggtaagtgctttcttagcccattacgagcctgcagcactgcaccttgccctgaggttttctgcagccagccagcgtcttgctggtttgggctccagccccagggtctggtggatgatgtaagagccagggaagttggttgtgtttgtgggatttttttttttaggccttctatccaaggcctggtgtgggggaaagacagaagcccgactatgtgaacagaggggtcagaatcctaggtggactactggagcctgcccagggtactgaccccgtgtggaggaccggctcctggaacgaggcctggcgtgtcagtcggttcctcttggggtagctgagcgaaggtgctggctttgagttgaggcttcataaagtgttcctcgcagacaggcacaccctgcgtgaggcccgagacctgccgggccactcccagccgcgggcagctgcctcctgttgctgtgtgaattccatcagggcgactctctgctccttcctctgcctctctactaccttaggaaatctggggtctgtttttccggtttgagtcttacagttgggaacccaccctgcatctattgggaaactctctgtgtgtctccagcttccccattgggctctcactgggtctcttctgctgtgactctccaagactccccttctttggacagctcagaagcacatggtccgaacccaagggtcagacatccatccggcttcgttgtaaacactgtgtctgtgaccttctacccagacggggctgtgtgtgtagacgctacccccgtgccaggcacggggtcaaagggaagagaagcgaaatctgcctgctcaggcctcttgatcctgggtaacagggaaattgccaatgatgctcgcagcccagagcccctgtcccccaccccagctatgccaatcagcacctcggtgagtccagcaaaccaagccatcccctaacaaaccagcagcacccaagaactcagggattctttttgaagtttaggagcaagagggacagatgggccctgtg

SEQ ID NO: 29663 - DNA, 1209 bp, Mus musculus
gtgcgtgtgagactcggagtacgtgcggcgggctcaagccctcatgcccgccgcgcagcccagccccgccccgccccgcatccgggctccgtagaccctcggccgggccccaggttcccagccggaggctcgccaggcattccagctatgccccaagcaggctaggcccagaaaggcaggacaacccccgcccccgtgccctcgcccctagtctgggcaggccgagcggccgcctcggtcacgctcttctattggagtgatggcacgctgagccaatggggaggcggcgcggagggagggcgggcccgaaaggggagaactgggcggggcttaacgagcaggaaaggaagacagagtgggaggcgcttagtgctgctccggtacagggtcgcgctcgcgtctgtccttaaggctctcctcggtgtccacggcaccctctttccttgctttgcagcgatcctactgccaggtatggtccttgtctccaccggggtcagctctcctactagcttcgcttggggacccggtgggcacgtgcacccactagcctgggcgggagccgctatccggggagcactcgggtcagcctcgtggaaggacgcaggctcttggagggtggaggtgtgagccccaccagtgatcaccgagtttcagggttgcaatgtaaccgggttcccaagcagacaacagcaaatgcagaccacggatgatcgcggccgtggagaatagaaaagtactttctgtgtagttaagtggaaggtttcagagggagggagagcaacttaaacccccgatgctcattaaatcctttctcagaatggaagggccagaaataaggatgcccaagaggcagagcgccacaccctagtagatcctgctggggctgtagctcctggaccgcaatcgagcgtcactgggcgggagtggtccagcccatctctgctgtggaatattcctgacctgtgagtgtcggttaggtactaagagtagaggaaattgcagcagtcccgttggataattgggaagccctcaggagacctcgacgcaattaggcaagagctacaggtttcctgggtggctactagccggccgtgaactgacttaagatgcatttaagaaaacttcctgttcgttctggcctaggcagtgtggttccttggctgactcgctttcgggatagaccacagctagtctgctgattagcctgac

SEQ ID NO: 29664 - DNA, 1209 bp, Mus musculus; identical to SEQ ID NO: 29663

SEQ ID NO: 29665 - DNA, 1397 bp, Mus musculus
cctgtgtataatatactttatagagaattcccctagctggtggggtctttggcaggaagcaggaggcaacttaacttgaggtggcccttgccgaggtttcccttctgggtccctgcctgcgttctatttaaagccagtcctcaggacagctgatctcagctcagctggtcactgtaattgtatcttggctagcacagctgccctggcactaaatttggtgggaccattgaccacaagaaaggctgtgttaaacttgatatggctttggcacttagtggccccagtgtccctcatcagtggctttgacttacagtaggaataggaaccccccaggcagggcctggagagatggctcagatggttaaagaggactgactgctcttctgaaggtcctgatttcaaatcccagcaaccacatggtggctcttaaccatccctaatgaaatctgataccctcatctcgggtgtctgaagacagctacagtgcttacgtatgattgatagattgatagatagattgatagatagatagatagatagatagatagatagatagatagatagatagatagataaaatatttttttaaaaaaatgagccccaaggcggcaggacagagtgcagtctgctctgggacagtctcggcagctgtcacagtggagcctgacttctgttacccaccttggcctcatctctccagcactggagctgctcaagactgcaatcgcaaaggccggctacactgaccaggttgtcattggcatggatgtggctgcctccgagttctacaggtctggcaagtatgacctggacttcaagtctccggatgaccccagcaggtacatcactcccgaccagctggctgatctgtacaagtccttcgtccagaactacccaggtgggtatctgaggcagtctgtggctccctaggcagcttctgggccacggggcttcacaccagtccttctgtagagatggattcagtttggtcagggttaggccaagagccctgcacactcctcattcctgcctgccccgttctttcgttctttcattctttccgtgacagtcttgattaacatagctcatgcagaccttgagcaaaggatttgattcgtgctttcatgttaatgttaggttggagactggtacacgcccttccttaatcagcagatgggcagatctctgagtggggttccatataacaagtttcaagcgagttagtgctatagtgagacaccatcaaataagatttaaattttaaagcacattttagttgggtgaggcagtaacacatgatgtcatcatgcagagattgaagaaggaaaattctaagttcaaggtgaccttgtgctgcaccatgagttcacagccaaactctgtactacaaagaccct

SEQ ID NO: 29666 - DNA, 1397 bp, Mus musculus; identical to SEQ ID NO: 29665

SEQ ID NO: 29667 - DNA, 1142 bp, Mus musculus
aatttttttatttttaaattggtggaatctggaattcaaatgagaaacatggatgggagacgtgcaactgggtgtccttgacagatgtcattaaaactggaaaactggaagatattagttatgccttgtgtatagagatgtcaaaaaacaagtccttggaatgttaaaatcaacaacagaagttaagataggattggcaaaaggagaaaaccaaaatattgtagactctcatctttcaaagtcatacaaagactgctaaatcagggcagattgttactgagaattggattaatgcattggatacaatgctttgtgggattcagggagaatctttcaagagtaatctcagtagagtgcttggattagcaactttataagggcagggcagtggtggcgcacacctttaatctcagcactcaggaggcagagtttgaagctagcctggtctagagagtgttccaggacaaccaaggctacacagagaaaccctgtcttagaaaacaacataacacttgcaggcaagcatggatccctgaggctgaacctctaactcacctagagctggtgtaatgcaagcacatttacagtgaaatgggaggcagaaaccaccacagctcttcagccatctgtctggtctgtgtgtgcagtgctgagcaaccaaccagcaccccacagtgctgctcagggctctaccatttgtataccctctgaaaagtctccagatttccaaatgtcacacactcgcagacactatttgcacctgacaaaatcatgcccctgctagagcaggaggcaaataatagtcagctgctgtggacagtctgaagcagccccacatcccacacctgggattaaaacgaaaccatattcttacattatttctgtggttttttttttttaaagaaaccaaaattccagaattctcattatactgctaggcatggggcctgccataaagagtggtttgtatgtacactgaacctcataggagaaaacgaaattttctttttttttaagatttatttatttatttatttatttattatatgtaagtacactgtagctgtcttcagacactccagaagagggagtcagatctcgttacggatggttgtgagccaccatgtggttgctgggatttg

SEQ ID NO: 29668 - DNA, 1164 bp, Mus musculus
gattaaaggtgtgcaccatcactgccccctaagaatagactttatacagcgctttctggtgtcctagagaatatgcctccacggtcttcacatggtctcggatttctgtaaggatagagctagattcatgcttcagaaccgtggcctgcgctgaccacggctcacacttagctcttgcttacagtgctctgacccagggggttgcctaggaaaccgttcagtgactgatgactccctgcagggtatgatcaagtgattatgaacagcacatgagaatgcgatatagtcttgtttatgttatctggagaaattgtggctttccccaagcattggcatgtggtggattccaaatgttaaacacagttttttaaaaagtggggcatcaggtcccattacagatggttgtgagccaccatgtggttgctgggaattgaactcaggacctctggaagaacagtcagagctcctgacttttttttttaaatgccagaaaggaagaagccgacgacaattgccaggactcagattcagagccctgcatatgccaggtgcaagatccctaccacagaactctaccccaaccttagcatctctgctgattcttgtgtttgcttgtcacttactagtcagtcagtcatctcttcaagtgtgtgcacatgcttgtgggcaagtgtgtcacagtgtgattatggaagttggaggaaaacttgtgaaatcagttttctccttccacttagctgtgcatgggcctgaggatgcaactcaggtcaccaggtttgcccaacagtcagccacctttgctgatgaaccatatcatgcccctcccccccccccattagactgggtcttacagtgtagcctggctagcatgaaacgcaggaacaccaggcttgctttgaactcacagggatccatccacctgcttcttcctccttgtgacaggttggtaagtgggtcagaacttggagactgagtgtgcctgagaaaggtgggttggtttcctgcttgtctaattgttacccaggttatgtttccacagccattttttttccgctcctgggttttagatggctcttacttaacgtagcctgctttgaaacctctgtctaccaaggaagagtgacaaggagctcttggttctcctccctccagcttccaggttgc

SEQ ID NO: 29669 - DNA, 2784 bp, Mus musculus
aggaatatcgtctaaagatttctctatatatttaaaacccacaactaaaacacatctgcataatagtgtttgtttgttgagaggatttcctgagactggtttgggtctccctgcatgacagtcccccagaaacttggtgtgtcctgggctggactgacacccagaaagcttacctgcgagcttggggtttggcttgagttctcttttccttgatttctcagtaggtgctagagtccgttcacacccttcactgtgcgcgcagacactgaggcacgtgggctctggaacccgcagggtttgcagagaggcggcatatgagtttgaaatccaagagctataatttttaaaaaatcttttattttaatacattgtaggaaatcttcataatttgagacagttctgcagcatggctttttacatctgtaaataaataattttagaagtctttttttctttccacagacgactattctgatctattttttccagccatgtcacaaagtgtgaattcctaccagctattgacagagtacagagttgattttttaataaaaagttatatataattatccctttaattaaagggaacagatgggcgtttctagttttaagcaggcaggagcttgggactaggtttggtcacagcagcgagcatccaagggttggcagggacagtgttacaggctctttattttgctgctttgattttgcttctgtctgcccctcacatgtgcagtggcaggcgtgtttgagcgagcctccttccttattcatagggattcagtgttgactgttccctggtgtccccgctgtcctgtgtcgtctggtatagaaagcgcatgtttctgtatcggtgtctgatgataagtttccttggagttttatgcacatgtttgattgttctagataaattgtcataaacattctaggaagttcaagaaaatgatgcagtacccagcacatgaaagacctacaacatgtgcttgccaaaggaatgttagaatctgctcatgtgtgtgtcaccatgccaagccatgccagccacagactgaggcttccgggtgaggaacaccctggggctactatgtttgtaggtctcatgtgctcagggctatgaagtaggctgtgcaggtgacagcaccctgctaggaagctgtgtgtgtcctgcctttcctcctggaatatgtacggatggaagtcttggttgaagcaggttcccctgggaagtgctctcagcaggccttgcggagcagagcagagctgggcagagctgactcctgccccgctgtccctgatggaaccttccttccagagctgtggaagagatgtttgtgacccctcccttggactcttgggggccaatcccactcttgagtgcaatggttgcatttagaatcagctagctagccaggggccatcctgtgggtcagtagatgaggtgtgtcctggccctgcggagagaagaggcctgtggttcagctggcacgctctgctccaggctctgactcaggggtggctgagcctcatgctcccagaaccatgcatggggcagctaggatccatttgtctgttggaaatgtttgtagcttttttgttttgttttttaactttctttttctcattccatttctgccttaactttggttcttcataggaggcaagctcaaattaaccttttgccatcaaaccttgtagccgtcttggcatgaaggcatgttttccttctgggggtggtgacatgccctccagacggcctgccatccagccctctggcctgaggaagacccccataggctccggacaggcaggtcctttctatcccatgccaccacttccttccccctttaactgagtctgctgttcagttaagcctttatttcctctccagtacccatttccaaagagaaagagtgaagtactttgaagtctgtacttgaaatctgtctggaagtgtttccttgttagttttgggtttctcccctgtcccaaggctcagagtcttcatctcctacgtgactgactacagttggtttggaggccctggacctctgtggcgtctttgaagcctggcctcttggcttccttttggactttgcttgctttcatttgaagtttgggtttgctttctgtgttctgtgcgtatcttgttcagtgtcgtcaaggttgggcttcacgtctcactgcagtggagcgagcggacattctgatcgctgcatttctttagatctcggagctaagtgtatatatgagtagtttgccaatggataacacagtgtaaacagtagacacccagaaaatcgtgacttctgtgttctctccatttgagtattttgtaatttttttgaaatatttgtggacataaataaaaccaagctacactacagcaccctgtgtgttggccagtgcactgtctcattctggagtgtgggtggggcactggagacagactgggagtgtgggcggcattctagagatgggccctagaaagagtgggtaagggcactgcagatggccccggggaagagagcttgatattccttgctctggacgcttaacctcttggaacttctagagacaggcctgtgctgtctgggagaagctgccatagccaatccccttgatctgtgaaactaagatattgccacccatgcctgccactcagcctgtaccattagggtgtgcagggagggatccctgcctgcctgcctgcctgcctgcctgcctgcctgccgaagagagattggagccgcctccagaattttccagataccacagatcctacag

SEQ ID NO: 29670 - DNA, 1201 bp, Mus musculus
cttggtggagcccaccacattgtttcagaggaacagggagaggcagaggaagagacctcatgtgctggtcttgtgtggtctgggactgcagaggaccaggcagtctctgtcctcaccgctgccctgcctctgccacagcagccctgtggcaaacaaagtaggcagtggagaagtccatcaccagtgcccacagagctctcccacgtgcgctgttggtcccttccagccacccttgcagtcactttaccatcgtccccacagtacccggtagtctggagggcagaggagacagacctcgggaatggcggcagcagtgtgtgtagagtgactgtctgctccctgtaggtcactacagctactcagagagccgcgtggagaaggacggcctgatcctcaccagccgcgggccggggaccagctttgagtttgcactagccattgtggaggcactcgtggggaaagacatggccaaccaagtgaaggcaccgcttgttctcaaagactagagcccaagccctgggccccacgcttgagcaggcattggaagcccactggtgtgtccagagcccagggaacctcagcagtagtatgtgaagcagccgccacacggggctctcatcccgggtctgtatgtttctgaaccttgctagtagaataaacagtttaccaagctcctgccagctacctttgtgtctggggtcttttgtggctggctacatttgcaggtggttgctgttggtgcagctgcagactgacggagcagctcggcccctcctgctgcggagacggacggcctctgatggcgggcgcttcctgggctcctcaggcgctctgagagtcactgggctctcactgaggagtaaaatgtgctggggctgggcctcatctgccctgaccatgtagcccaggctaggctggtcagtggacaaggctcagcttgggtattctctttctctgctgggatagccacgaaggaacttaaagatggagtactggcagccatcttgtcactgtgaagaaagaacacacctgcagtcctcaggagggacctggcagctcctgtcaagaaagcaaagctggaaactgcacattgttttgagacggggactcactatgtagctctggaactaagtatgtagagcaagctggcctcacacagcagaggcgcgcctgcctctgcctcttgagcactggggataag

SEQ ID NO: 29671 - DNA, 2037 bp, Mus musculus
gcgaggttcctgcggactagcggtggcttcgcgtgggtggaggaggcgcggctgcaggtcagcgccctggggctagaggccgggctgtgatccgcccgctgccccggagggtcccggctgggcgggctgggggcagcggccgcagtgcatgccgggccaggctctgcacagcatcctccgggttggagcgagcgcagttactggaaggcttgaccaaagttgtgatgcgtggggagcgtgcagggaaagcacgcggaaagtgcctccgagtggcggctagctgttcccggccgcagcagggctgacctcctaaagagatagtccatctttattaatcattagcagtgtggtcagagatttagcacctttggactcccccaacccggtcctgacattttagcagtttattggaacatcaacaacaagaacaaaaccttcgaaatttacaagttggttttttaccagtgaaattgtggatttggggttttttgttttgctttgcttttttgttttggtttgggttttttgagacagggtttctctgtaaccctggctatcatggaactcacgctgtagaccaggctggcctcgaactcacagatagatactcctgtctctgtctcttcctcccaagcgctgagactaaaggtgtgcgctcgactcgctccccctcccctccccttctctctttctcttatttctcttattcttttccttccctccctccctccttcagagtattttaagaaaaccagcctctccacagtgtgactgatatgcagggcccgttatgtgacctgtcttcgttagagattggtcctaagaaagcacagtaagggaaaatgcaaagaatactagcacacattggcaatcccacatttattattttttttaaaggatttagattttggttggttggtgtttgtttgtttgtttgtttgtttttcgagacaggatttctctgtatagccctggctgtcctggaactcactttgtagaccaggctggcctcgaactcagaactccacctgcctctgcctcccgagtgctgggattaaaggcatgcaaggatttaattttgatgtatcagcattctgcttgcatatatgtatgtgcagaggccagaagagggcgctgtatcccctggacctggagatgcagacaattgggagcagccctgtgggtgctgggaactaaaccttgatccagtgctcttagccacagactacccaccccagccaccctgttttcatcccgggattagagtgctgaaactctgccatgtgaaccagttttaatctaagctgcttgcttccatggatcccaacctgtcacacagaagttatttactctgcgtgaacagatggttgttacagaggcaacattttgaacacttttttttcctgtttttttaagtctttaagaaatagaaatggcttccaaaagagctctggtcatcctggccaaaggagcagaggagatggagacagtgattcctgtggatgtcatgcggcgagccggggtgagttcccctcatgggctagctctccctgttttaaaaacgaggggactccaagtcacttttatttgtttaatgttgtgtgtgagctgcatcccgtggtgcagatgtggcggtcaggggctgtgcgctgtcttccgtgttagcctgggctccccactctgtgtttatgtgacacggtgagcatgggatgcactcaggtttgccaggctcaccctgagcatttcctcactcagacctggcagcagcatggtcagctctctgcctcttttcacaaaccccaggcagagacgctcagcagcgctgatttccagttagagcagggctcagacccggtttcttcatttcacatcgctgcacagttgggacagcataggaaagccaccacccctcccctccagtgacaaccttatgacactggagtaaatacttcgaggcgttcattcatcttttgtgtatatatgaatgtttgcccacatgtttgtctgtgcaccacatgagagcctgatcccctggaa

SEQ ID NO: 29672 - DNA, 2455 bp, Mus musculus
ctttattttcattccagtctatgcgaacatcctagcaaagcatgccttcctttgctagttcttgttagtatttccttttccacttttgagtttagtcttccccagagccctgtagcatgtaaagaagctgccagtggaaaactggccaagtcagtttctctctgtccctctttagacagtagaagtccatccctactgagtatttgcacacacaaagactaacatgcccttttcattgtttctaaatcttccctgcctcttagtgtggtgtgtctcttaatgaagaaccgatgaaactgaagcccgatattcaggatcttcttcaagactttctacttagaacctgccgtgttatcgagcttacctattgttttttttccaaatgattatttttgttagtttacatacagtttagtgcctagaaaatgtgcctttgtttttcatatacactccaaactggaggtgtgacctaccctccccacattttgcacagtgcctttacagatttctggactgggaaagaggacttgtgtagttctgagtgctgaatggaggtggatgttgtcactcaagatgacttgttgtggattccaggaagggggttttgttcaaggcagctgtccccacatctgacatcatcttcaaaaccacattttaaacttttgggtaattagattcctaacttggaccttccaagaagaacactactgcctaacagcaatgggtgacaatagcagggtgtgccttattttgatagctaggaaactgttctttaagattattctccgtttgtaagcactactgactcccgctgtatttaagatgctggtgaagagctcatgctcttatgttagatatgactatgtttactttcttgttcttgttgtatatcactcctaaaatagtattttaaccagaaataaccctttaagaagtttttatagaactatgaccaaagtttctattttgccaaaagttaagtacaaataaattgccccaatagatacattcaaataagtgccaaatgtaactcaaggtgtcctttaagaaaaatgttaatactgtgagagcgagccttcaacatgtcggcagtccatcctgtgaaatgctatagagaaggctagtcattctgatttggtttcttctttagagctatggaggtgggctcagatcacacctgtagacaagatacttagccagcagtttgtagactgagctaggctgtggtctctagtgcgatgtgagcagtagccgtgcagcctcaccaaggcatcagtctgcacagagttccagaagactgtgtactgcttgtactcatctctgtcttatgcttgaggtaagccaccggtcactcgtagaggatagctaaccagagatgcctggtgctcttagaatgtagccattgctgtctgggacagtttcattgtttatatgagactttcatcaaggcttggttcaaagacaggagttcaggcatgggtggaattgaggaagtggtgaagggaaagctgcttgcctatggcagtgccactagaatgtcctgaaatctgtgtttgtgtgtaaagcagcattactcaagatgtcatagaatctggttctagttttttgtttttgttttgttttttgagacagggtttctctgtatagcccttgctgtcctggaactcactttgtagaccaggctggctcgaactcaaaaatccgcctgcctctgcctcccaagtgcagggattaaaggcgtgtgccaccaacgcccaactggttctagttttttatctgttcccctaacattactgaaacaatacagatgttgaagatatgccttgccgcatcagcctagggcttctgtcctggtctgacctcacaactttggtgctgtctcctcatattctgtcccatgtaactcagtggctcctgtattaacacagtgatacctcgcttctctgtgcatttagctgggaatgttcccggtatggtgaccagaataaagttgtttattaacatgatcctgtgtcgtgtttcttggagtggagttgggaatacacctgatgcatgtcctaaacttctgacccttgatgctccccctccctccctgacaaactatgtttttttcttattcattatcctaggagcacatattcctgtgagaagatgtagatctcaccctgtgttaggggactctagagcaacagaactaataaggtgaacatatatttttaaaagatttttattatgtggtatggtctacctcacactgaagatgctgagaacctgatagctgcttagtccatgaggctgagttcctcagaagtttccatctggtactgtgggcctggaggactcctggaaaatctctggtgttaagcccatgtggaagcccatgtggaagcccatgaaaacatactgagttctgataacatcagagtgcagcaacagcagggtagattaactcgcc

SEQ ID NO: 29673 - DNA, 1293 bp, Mus musculus
cccggtggagattggtgttgacggaagggtgccacggtacagtactttccaggtaatgaggagccaaagaaatctgatgctttcaaagctaacttatgagagaaccaattttgcatttgctaatgccagtttaaaactcccaggttaagtgtgagaattggttggtatgagattttctttttttaaaaaacaaaaaacaaaaaacaaaccaacatggttctggctgccaaccgtgagttaaaactcgaggcttgttgtgaagcctaaaaatattcacaaatgagctttaagctggtgtcttcagaaggaaggtagaaacaaaaggattgtggttaaaaataataataataataaaaactggggtcagtgctctcggtgccttttctataattgtacttgttttttaattacttcctttcactgccaacctcaaattactgtacagtacatgtctttctgcttgtgatcagcttggaacagcgacagccccacagctaggagccacctgtacatttgtaagctgacccgacccaattttgtttttacatgtgtgggttatgttgcagctgttgcaatcctcgacccccctacccccgcccccaccacacctattattttacacaatttgacctgtctgaggacactgagtaatttacataaacaattgtattcataacagggaatagaatgtaaagccagctcttttcagaatatcctatctcaatcatggatctggatacatttactccattgcttatggttcagatgaccaatcatttgaccagagcaatgacctcagtggatttgcttcaaccctcacatttattttttagtgtttcacatgccacattagctgaatatgttagaaaactctggaagataaagacttacatagaattaggaagttcttatggaggagatagaagtagggtcaaaacctaccagtacaactgtgaattctaggtgaggtcgaagcatacttccactgacacaaagcatttatgaccaccttttttgattgtaactcttaattttgaatataaggtgataggcgcagctttcttggataatctgaattcccaagtgccaggagtaggatttcatgataaaattaatagctaatcttattctgtctcctgaagatttaattgctatccttgttacccattcaaaatcagctgtactgtgtgaatgaaataaagacattaagatgaacccctttctggctgcacggtcgcttatggcagttccacacagtagttggcgcccaacggggggtccctgagacttgca

SEQ ID NO: 29674 - DNA, 1161 bp, Mus musculus
ctgagacagtgggaccattcaagctatacctgcctttagccgttctgttccaaggagggacggtatctctcactccacggtaccgcctctgcctttctgaccgtggcatttgatttgtgagatacggctctccactcccctgcctgccttcattagatgcttccatcaatcagctgagtcagtgttctgtggaagaattcaccattagagacgtactattgaaagggcaagcccttcactgcctcccacccaaataaaagagccggtcgaacgccttctccctgtttcccacctatcttccaaaaatgcggaggagtatcaacttagtgttattttcacatcgttcagtcaaacttagccagagttccaacgccctacttaaaattcaactagaaagttacctaccaagtactaattagcattataaagtcagagcctacagctccaggcttttcagttagttgttcactaagataagaaaggacagtcttaagccagatacagtttaccataagaaaagttaaagaatcccagtgaagcaagttttttctttagccctagattccaggcagaactattgagcgtagataatttttcccccctcaggccagctttttctttttttaaattttgttaataaaagggaggagatgtagtctcccctcccccagcctgaaacctgcttgctcggggtggagcttcctgctcattcgttctgccatgcccactgctggaacctgcggagccacacccgtgcacctttctactggaccagagattattcggcgggaatcgggtcccctcccccttccttcataactagttatcaagaacaggatgaccctgatctgatggaatggaatggatcctcaaagacatgaagggccaaagagttacggacagaccctggcctaactgaatggtggagagggtcatctcagaaatctccttattgggacagcaagatggctcagtaggtgaaagagcttgcaatcaagccagataagccgagtttgtaatttacatgaaaggacccaactcctgtatcttgtcctctgacttccagtaccatggcacacacgtccctctcctcacacacacacacaaatagtggaatagaaataaatacttccacacccctagggcagagtctagaatgct

SEQ ID NO: 29675 - DNA, 1175 bp, Mus musculus
ttcagtggcaggtaccctctgcctcctcaggtaaaccctactctatatgcagctatgtgttccttagattcctactcccaagctcttgctgggaccccctctgtcctgaatggcatacccacatgccctgcttttagaatattctgctcccttagagctttgagacctgattctgtaagcctagctagggacaccctggctacccattgccctgctccaagatccctgtactatatgcacacacacacacacacacacacacacacacacacacacacacacacaaaggtatatagtagttatggtgctaatgctgccattagactctgagacccttgaaggtcgtggctgtggccacccaccctcctttcatcatgggatgaatgacagtgcccaatgcaactggatgcttagaaagtgtgctaatgatggcatcagggcaagaagcgctttgaaccacgcaacagcaagcctggcattcagtaagctgccttcatatctggagaacaagacccagacatgagaggcatatgacttcccaaggccaaggccaccctgaagcaggcaccctggcggccacaggatgggaactactgtgcgctgtgtggatgattcgtgccaagagtggctgctctttttgtctctgctttctgagctgatggggggcatctctactctacaaacaaaagcctggtccaaagagggcatatgacttccctgaggtcacacagccagaatgcacggagtcggagtctgtactcaggtcagcatcctcaaggagcccggtttgtgggtgtgtccatagtgttccagagaatcggcagaaaccactctccatactgaggaggactgatggggaggcagtgcatgctgtgagaattggaggcctctggcatggcccacagtagggcaaggcacgggaggggccatggcagtgatccacccccattcttgcctgcccagggggaggccggtttgggatcccccgcagagtgaggccctggagattcagctgctctttcctgtctggtatccgcctctcagctgtctctgttccactgagtggaacaaaatttgctggcccccttgtggcccttgcatcttccgctatctctatccagggcccttctgtctttcagcctcacagggaaaggattatttacagccttgtttat

SEQ ID NO: 29676 - DNA, 1115 bp, Mus musculus
taaggggaaacccttcttggatgctggggcagaaggcacttttcaaaatgcaggggtagaaaggggatttctgccttcccctatccatcgcagcccaacacgcggcatcacaaaactggagccaggcagcttctgggcccaggccacacataactttcagcaatgctcctctcaagcctcccctggcacccccaggtgagccccaattaaagctacagatgtgatttaaaaataccctcaccagatgttaacttaaagtgacccgtgactggcagtggagctggaggaggctgcttccggcgcccagtgccttttcctagactgccattgggatgcaaatgaggctgagcggttcctcagagccagccataaaacccactgttctgaaagccacgctcagtaaccctctcacctggcatctggcaggggagcgctcagtttctaactagagcatgcctgcctgccgcagcgtggggtgggagaggcaggctttgcgcccgcagacaaattaaagccgcgagccccttggctgaagctccgcctgcaaactttagaactgaccctttatttaaactgacttccggctctgagaagcacctgccgaatccgaacggattcatataccatgcaagagaaagaccacccatgcccacagccaccagagccaggaaaactggatctccctcagagatccctcctggggactctttacggttttcttgtgcgagtctccattaagttctaagcaagtggaacttccggtgcttcccgcaaagctcagggatggaatatagtgctcagccttccgcatcctccgtgcaaaaagattccttctttgtccagagactgacgttgacacacagcactgcctttttttaatggtgcctttattaaagtaaacaagtgggtcaatcaacagtttacccagcagccacctgtcaggatttgggatgtcaacagactcccggtgacagccttcagaacagctgagccatctcagctctgcatgtccccagcctccttgaagcccttggcttcctgtggctctggatgaaagatctcccccccacacacacacccccacccctatccccaccccctgagagtctcacaca

SEQ ID NO: 29677 - DNA, 1191 bp, Mus musculus
tctaagacctcccacctttcccctccactgcccattcataggctccagcctttattggccagtcaaaacggggagaaggttcacacgagatcacctgagtacgtggtcgactgctcgtcgggggcagcccctcttgaggaagcagaattgacatcagaatacaaacagcatcgggcaacccacagcatttccccctttctgtccaacgacgatgagtttgacagatgctcgcaggcgtgatgtaggtgctgccattactggaataagaaaggcacccaagtcaagggtgtgtgctcctccatcatccgtccatcttgccccgcccccacctctaaacgagcatttgttttatgtcactaccaacaggtttgcattctttaaacctctctctaaatgttgtggcttgtgcttttaaccctgagccctgtgctcacctgaccatttttgagatccatccacattcctgcacgtgttaaaatccagagcttttaacagccaagtagtgttacctcacccctgatattcgcctacctaccctgtgatgcacacgtgtgctgaagggtgttttattagcaaataaaaaatttgcaagcatatttgggggggattgggctaacttttatattttttatcaaaaggtgaatgaacacgtgcatttagatttttgcagggacgtagactcttgtttcttctgggaacctctgccaagagtggcctgcctgggctgcgtctctcacgttggaggccacaggcagctctcctgagtgcttgtgtgttccctgttcccaggagctcctgcattacctcaaacacactatgcccctccccacctcactcacttaaaagcctttgcaggaggaggggcacattagctgtatttctgaagatggtgatgttgacagtttcccaggtgctcgctcaccgccgctgtggcttctgtaatgaaatgttttccaatctttgcctatttaaaacttggttcccactctgttattgaattgtgactctccaactgcagacatggcattggctccgggggctttcttttgctttgctttgtgagacagggactgtctccctgtgtagctctgactggcctggaacttgctctccatgtggaccaggctggcctcaaattcgcagagatatttctgcctctgccacccaagttctgggattaaagatgtgcac

SEQ ID NO: 29678 - DNA, 1181 bp, Mus musculus
tggtttgggtggcgatgtggtgactccctggctggcagcacttgtgcctcctctctggtccactgagccagctttggacaatggagctgtgtccgtggtctctgtgctggtgggccggggggtgggggggtcgggggaacctggcaaacccgctgaggcaactctggatggatgggaggtagatttcatctgatgatgggcaggtcttcaatgcgggatgcagccatctgtctgagcgttgtagcagctgggcacgggtacagagaccctcagactctgatcactctggtaatgcctgcgtacatgctcctgccagccagagagactctaaaaagtatttcttcctgacagttttctgggttcacgtgtatggcagatactaagcccgggagggaaaaaaaatgtagagaccatggaccagcaagctgcaccacagacaccaggcagggggtgtcagcttacttgtggagctgatattaatgccagccagcctctgggtggcttagtgttggtcaaagtcagaagtcacagtgaaagcgaccaagcttattcggtctcttctttcctttaacttagtaggcctgtccagtgcaggggaccccctccctccaggtcccccattgccctctgccagtgcagtttagagtcttgcaccccacctcctaatctcaggcttcttccaaggtcttctcttctctctccggacatttctctgatcagcctatctctcagtccgccaagtggctcaggcatcttggagcacttgtctgcatgggcccacaggctcaggagccgctctgttgttcagagtcctgttctgtccctctctcttgactttgtgcttcccagtgaactaaacacacacacacaatcagatacacacaaccatatacaatcatacacacccatcacactcacacacatacacatgcacactcactcacacacatataccccccccacacaatcagatacacacaaccatatacaatcatacacacccatcacactcacacacatacactacacatacacatgcacactcactcacacacatataccacacacacacacacacacacacatacacacacacacacacacacacatacacacacacacacacacatacacacacacacacacacatacacacacacacacacatacacacacacaca

SEQ ID NO: 29679 - DNA, 1146 bp, Mus musculus
acagtgtctcatggataccgagaagggctctgtctgtccaggtgcaggggacaggaatggggagacaaacacagcgaaagatgtcgaggaagggtgggtgtggctgtctcctttcaagctgctccatgtgttctcactgtgcatagaagactaaagctaagaagagcctgggctaagactgtgtattctatctctgtctgtctgtctatctgtctctctctctcatctagctctgtatctatcatctatttctatctatcatctctatcatttagccccatttctatcttttatctatgtatatatcattggtttatcatctgcatatgtatgtatgtgtatatatatatatatatatatcacccctcttctcccttcctccctcctctcctccctctctcctctcctccctccctccctccctccctctgtccctggcagtgctagaaggggtcccagggccttgtacatgccaggcaagtgatccctcactgaacgtacctgtatcttcctatctctttagtttaagattaaattacagcttgagttattgcttagcatttgagtctgagagtgttggaatgtggaatggggaagaaaggaacctaggcaccattgacaccaacttccttccaaagctgctctgacaataagcatcaggaccgcatctcccagcccccagcttcttcaaacagcagcgatgagttctcactccctacaggacccagggaaagacttgcaagaaggactgtgctttttctaattttctgggatccagagaggtgggggtaggggtatgggtgggagggcaggaatcacagggcaaataggagtatatacatctgcctgcttggactgcaggtgtgggatctagggcagggggatctgcaggtttgggatctagggcagggggatcttcaggtgtgggatttagggcagggggatctgcaggtgtgagatctagggcagggatctgcaggtgtgagatctagggcagagggatctgcaggtgtgggatctagggcagggggatctgcaggtgtgagatctagggcagggggatctgcaggtgtgagatctagggcagggatctgcaggtgtgagatctagggcagggggatctgcaggtgtgagatctagggcagg

SEQ ID NO: 29680 - DNA, 1235 bp, Mus musculus
gatgctataattaaaagatttgctcaaatgtattttctccctttttgaagagtttaaagaaatccatccatcctttcctaaattgattctttctccaatgtcattgctgtctggcagtcagtgtgctgccatggtgctgatttgatggccgctttctgtcaaatgtaaagtagtttgttttttaatcctctgatttagacatttaatagaaagcaaatgtttggcttactttggtttctgctgaacctgtatttaaacccgcaaacagtttgaataaagcgaaggcaccactggactagctattttaaacatctcaggatgtaagaatgctaaatggggttcccttttaaaaatagaaatggctgcttgcatttacataattactgctaactagcacaacgttttaaacagtgataaactcaagctagagaaagtacctgtttttaaaagcccggtgataggaagttgttctgtgagtggtgctgctgatggagggcctcagagccaggctcttcaggaaggaggggggctgggaagagaggggtggctccggcaggtcctggtttgatgcgctgcagtctgcatccgagttagaagctgctgagggctgaagtcagtgtgggcgaaagagcatggaagagagtgaagatgaagggtaagctgggccgggccacacctgcagtccctgcactggggagactgaggccagcctgggctgagtacgccccgtctcatagaacataaacagtttatacaaactcgttggttaaagccagagctctgagtgtccatggttttgcctttccccatcccaaacatctgatccatctgtctgtttccttctaacctggatcagactggatgtctccacccagcaccaggtctcctccttttttgctggacagctgttcccatttcctccttggacgccctgcctctctttgcctccctgttcagtagccatggtatctgcccagaagtgagagtggcagttgccttgtcatcctccccattcccctcccccctccaggttgtttacttgtttacaggttgtttacttggcctctggttactgaagctgtccacacctggagcacatcagacatggttctcttaggctcctctgttttgtctacctagcaagctttcccgtcagcccattcccacttgtatgtactggctcctctgtaccagccagggctccttccgaggatcatctcctcagacgatgccac

SEQ ID NO: 29681 - DNA, 1125 bp, Mus musculus
atactgaacatatatttttacattttgtgtatgatatcaagtactatcttgaggaagggctggaaagttatttaattgaatttagaacagttggtttatcccttaaaactattaagtcattgtttcatatcttatgacaagataaatcttaaaaattaaatgtaaaagttagagtgctaaaaatactaggagaaaatgagtcaatatttacatgttgttgacatgctaaaggccattctagtcatgatgctagaaccagaaagaaaaagctgatcaatttgactagcaaaaaaaaaaaaaaaaaaatcaatttgactacatgtaaatttaggttttctatgtgttataaaaagtccataaagtttaaatgtaactggagagaagattttggtacatacttggaagagggttactatttcttttttatctcatagtgcaaagaaaggaaagactcattgaatattgagaattgtgtgtgtgtgtgtgtgtgtgtgtggttagagagacacttttagcaagttggtgtgtgtggtgtgtggttagacactcttagcaagttgtgtgtgtgtgtggttagagagacaagacacctttagcaagttggtgtgtgtgtgtgtgggggggggagttaagagagacacttttagcaagttggttcacttcctctacctcatggattccagggatctcctcaggctgtgatgcttgcaggataacctgctgagccatttcactggcctgaagatgttcttgtttcctcttgcttccaaaaaattgataaaatgccagaagggaaacctgcagagtttaaacaaaagaatgggaatggggtggattttgttttgctggtggaaggccacgtgcttgggtccttgttcctggtgtacttgtagaaaactttacagaggcgagtggtcagaagacaggggaatggaggttcaaattgatacagagcaggtaaactaccatgggataattctgctcaacaaaaccatggtttaaaagaggggacaaaatgagaacctttacagataaatggaagtttgttattgggtagtgactgagcctgtaaggatgcagagattctgagttagataatgaaggtttgtgactaactaggtctca

SEQ ID NO: 29682 - DNA, 1480 bp, Mus musculus
actggcaatgagtttagaggcagggaatggattaggaagagattgctttacaggagtagacaagtaagcaatgtgtaaatgaataatggaggtaaatataaagaaaggatctgggaaggaagcttcaggaagtcagacctgctgtgttgtctaatgcagtgaattcgcaggctcacttagcaggagctacatttgatgaactgcatgacttctgcagatgtgttcatggaaatcaacttaaagtgatcagaagagcttccatgttacctgttagtcaactctacaggcttaaattcttcatgagagtttgtgatttcctttgcaaagggtaaatctgatttgtattctaggggacggaggaacatttagtttatgaataaaagtcacatgtaattatatttctttgaacttcaaaaccatgaaactttaaacttggttaacacacagtttctagattttatgagattaagtcattttgtaattctgaggttttttttttaaagaaaccctggaagagtctttgaagtagcttctggtgtgggtgctgctggggtgcttcccctctgcttgcttgtgatgggtgaagctcaggctgtttgtgatgctcacaggcaggcgcttgctgctgtccaccggagagtgtaggtgaggaacttagaggagcgaggctctctgtgctcttggtttaagccccacagtagagctgttgcttctgcccttgacagtatacttaaaaggaggcgttctctttctttctctgaatttattgtttttttctttatagatgatcatgggaacagcaatagtagtcatgtaaaaatctttttaccgaaaaagctgcttgaatgtctgccgaaatgttcaagtttacccaaagagaggcaccgctggaacactaatgaggtagatacatttcaatttttaagagtatattatcttatggttggactcgttagaatgttttacatagaagtactttatgctagctttaaattcaacagatggaacaaagaacctgtcaatgaaaacaattcctgatcttgagttggcacaaattagcttgtgtcttggccagtctggtgtgcttggcttgcactggcagtacagtgtgaacgtgactccactaacgcagcatgagggtcggttgtgttttcttgcccttagcatcttgcatttggtggtttctttccctctatctcagggcagcatgggttctacagtcccagtgtgagacagagaacagtgctctggaaattccaagtctgtagagttgggaatgagcttatcaggccgttggtgatgaaagagtttgcttcaaatactgactgctttgccttactaataggagtttattagcactgcaggctggattgtaggccacatacttgatacccagataggtaggtttggagtagatggaaaggaagtttgtcctgggcagactttcctctttgatcaattgtaatgtggggatcttaat

SEQ ID NO: 29683 - DNA, 1109 bp, Mus musculus
acgcacagtgtcccccgtatccgtggataagcacagggatggacctgggatggggataatggaggacgacttgtacagatacagacagtgctgcgtacagctgttcatatagcatgtatattagtcatgtctgcagtcctgtccacgccagcaagcctgggagatgactgtctggaaagtgcttgcaggggaacatggtttgatccccagcacccatgtcaacagtccagtgcaacggctatactgctgtctcagtgttggggcagtagatagacccaccagtgccacacacacagttttgagtactaaattctataattcaagttctaatgaatcaaactcccccttctggcctctgcaggtactgcatgcacatggtgcagacataatgcaagcaaaactcctcacatgcatcagatggtttttaaagtatacttactggtgaggatgcggaggttttactgccattttgcatctctgagctgaggtcctcgtgccccattggtcaggttatatgtgccttcttcctctgaattaaaagctctggcaagccacgggcatagctcaggcactgaattcagagctgggcttggtctgagcacttttgcaaattcccagaaagagcctgtcgctctgtgtttcctgtgatgatattaactgcccaaactgaatttgtttaaaagatttattggttttttattttaaagatttatttatttacttttatttatatgagtgcactgtagctgtacagatggttgtgagccaccatgtggttgctgggaattgaactcgggacctttggaagagcagtcagtgatcttacctgctgatctttccagcagatttattgtttttaattatgtgtatgagtacagctttatacctgtaaatgcaaggcttcttggaggccagaggtgtcagatcccctggagctgggctgctacaggcctctacgcccatcttaactgctaagttgcctcctgccattaacgagttatttgagtcgaatgtccttcacccttgacctaagaatgttagagctcagatttccaaatatttgtgtacatagtaggaaccttgtggctagggcccaaatctaaatgcat

SEQ ID NO: 29684 - DNA, 1444 bp, Mus musculus
gcgctaaatggtagctcacaaccatctgtaacgtgtttctggatctgacgccatcatctgaccacagcatgaagcatgcgtgtggtttgatcagacagaacatcatacacaaaaaactttaaaaggaggttgggagatacggcgcctggctgcagctgcgagtggctatgtagaagtgtttttcctgggaacagaagcagttgcttaaagtggagtgtggtgggacttggggcatggtccagtgatctctgagctccaggccagccagggctaaaacttgagcagcagcagcaggtgcccctagccaggccaggggatgcagaagggagcttgcttggccagttgctaacctgacgtgttcttttctttcgcagctcacagaatcgacacagacgggtaaaccgcttgggaacctcgaggaaaaagaggctacgaaaaccttttcctaagaggctacaaatttggaagcagggaaaacccagacatgagatgtttttagtttatttctccagaagggggcactgtatcaattatgtgaagggacatgcagacagcctagctccatggtgctgtggggtaggactgaggagccctctggccagaccccagcacggccatgtctctcccaaggatcatgttcctggaggtcacgcccctggtccttctcataagtggctgtgcacagcagctctctggaggtatttggaacattctgctgtcacacatgggactgctcttcctgaagcccatgctgttcgtgggaaacatgggaagaaaggaagacgtgtcgtgtgctgctcagtagacttcccacaagccacctctctcttctgaaacgtcactgaatggactggagaggactgcgggtttataaaactgctttttatctgagaacaatgggtttggaaactagtctcttttcttcccacttttacagagcttctcaaatcattcctccaggccctgacttggacaggtaggggggcagaccctgggtcccaaggtgcactgtccaggcacactgcccacattgctaagagaagaggccctgctgccagtggacccttcaccccacacgagacacctgtcttgcctttaggacaccctcctctagagagtggtgttggaaggaggggacctatgtaaggagttggggcaggcatgaatctgccaaatactggatatggatccaaggctggcccaggcacctgcacctccagtgagtggtcagcaggtggcgctgctgcccgccaggcttcacagagtccctttagggagtctgctcccagatcccttctggtgcacacttactggatgtcactgcaagctctaccctctgagcaggtgttgcaccacagtggcgctgaccctggccccgcaactgcaactgctgaaggcaggcattgcctcagccattctcaagacccttcaatttttaaaagca

SEQ ID NO: 29685 - DNA, 1420 bp, Mus musculus
tgccttccatacaggttcctggggcaaggcaaggtctgagtgctagagcaccagcttgcagagtttcagaggtgtgaaccagagccctggtctgagtgagggctggctcagctcctggacactggtggtcctggggcagagggaaaggaggaagagggcgttggctctcaaaccagcatctccagtgctcattctttctccgtagtgtttcctacccagttgtcacgcgtattctttgttagcctgagacagagcagagtggccagtgtgtcacctttcttccccttcctggagtacctttgtaaggtcacaggcattctcccacattgtcttaagcaccaaaggagctcagagtgtagactgtaacttggcaaatcagagcctttttttaaaaaaaaaaataatagcatctttctcactcacccagtttaactttctttctttttttaaatcctgttgctcatattaaagtagaagtactgctgagctctgtagattgtgcagacctcaaggggagagctcttctaaagagaagctgtgatagaaacagtcttgcccccaggctattgtgtggctctgatgggacaaatacccaggacaagttagaggaatttgccaaagacctgccccatgacagttgttgtccagtgtcttcaccctgagaataaccaaagttgcagtagtttttttttctttttaagtgcatttaagaatatgtgtggttttgttgtggaacagtggagctggccattattacatgtgctcagagatcaatgcctctggaatacatttgacatctgtttgtgtttgcttgctttgtttttaaggggatctttccctgtgggtggtgtcagaatttggacaccttggtttgggggtaggttgagctgggcagctgcaatcagcttgtttatgcaaactgggcgtgagcctctctgggctcctggttgatggctaatgctgggagggaagggtcagccccaagtagacccttcccgtgggctttggccaggccagacacaacatcgtttacatgttctgtgtaattataaagtttatgtgtataaagcaagctgtttctgtgaaactgtatattttgtaaataaagatattgctactttgaggtctgtgcctccttaggtgtcctgtgctgaaaaaggctgtgggtctccccagttgcttgtcagatggcggatctggcagagctgaactgatgatgaaaagggaccatgacccctgctccacttatccagttagctctcaaacccagtgtgcacttttgaaaggcttccctttccctcaattcctgtcacacttgtctgttcaggtgtgccggccacccctaccctctaccccgcacttgtctgagctttcaaagccacagccattagggccctttgaagttcggactggtgaggtg

SEQ ID NO: 29686 - DNA, 1990 bp, Mus musculus
tgggactctcctggaggacagggagcaaagctcacagagctggcttgctgtggtggctcctcgggggcctcactgacacttagctaagggcctgggagcagagacccctgcttctaaagagagccgagtggggcggccccagcacttggccgtaggtttgaaaagctagctgacctaggatttctagggtcatagggccagggacacaagtactagggcacctggaccacagcttaggggatccctgggtttctttgtgactttgagtggtttcatgagtttgggagctgagacccccttgtaaccggtgggtttgcctggggtttgttatcttttggggggaagaggccattaggactttttgttatagacaaagccaaagttcagagttgcctttttctagtgaactcaagggcagatgaggctctaggaacagaagtttctatcccatcacatgcctactgctgccttcttgtccagctggcagagggggctgccttaatttcctcctgttttgaaagccatgttctagaatgctctgctgggcacctgactctgggaaagatggtaggtagagggcagtgctctcccaaccgatgcccgctggtgacctagggttcccttggggatgtgtgggttagggttaggcttgtttcattttctggtgccaccaacccatccttccagcgagtgctttcttttctctgaaccttaaaaagagctgcctcccagggccaccagagttgtcgctctgctatggagtgccttgccacagcagggtggggtcctgtgtgtgtgtgtgtgtgtgtgtgtgtgtgtgtgtgtgtgtgtgtgtgtgtgtgttgtgtatggagtgccttgccacagcagggtggggtcctgtgtatgtgtgtgtgtgtgtgtgtgtgtgtgtgtgtgtgtgttcagtaccgaggacagtgttgttcagtcctcttggggacaggctaggaggctttccagaggaaggacacgacctgcagcaattaactgcaggatagtgcacacttgcacagggcccctctgccctgctccagagctactcaggtttccacatcagggcccctccaaaactaaggatagtaagaattgtaagcactttgtgtgcccaccgggagtccaggactgtccctccctgggcgtcacctctgccactggctctgggctgtaacccactgcttatcacatgtctctacactaacagggattgaagctgggccacctgggtatgggattgtccctgtcacatgtacaaagcttttatatgttaggacaaaacttaagttatgagagaagttctgtgcctagtattgatctataagggatttttcttatatttatgacttgagagacttaggaagactgcctgcctgccttaggaaggcggcactcagtcaccagtggctgggcagatttgtatatttatttttgtctgttctgtagcttctgtgtccagcatcctgaggtcttagggtgcttccctaatttttgaaataaaatgtttcctatatgctgggtgtcatggccttcatcttttgatagggtagtcttggctcgcctggaactcactttgtagaccaggctggcctcaaacttagatcctcctgcctctgcctcccaagtgctgagattaaaggtgtgcaccactaacacctgacgagaggtcaacctcctgctgctctgtcttctgggaatccttggtgtgagaggcaggtgtggtgggaaggatctagctagggatgcggtgtcggcagatgtaagtttggggagcccagcatctgagggagcttgcctcacagcctttgaggccctttcttacgtcagtggtgaaacatggcatgctacccaaaggcaggctcctgcccataaagatggactctgtgctgggagggtacctaggtggtgaaccccaaaagactgaaaaccacagacatttacatttacagttcataacagaagcaaaattacagct

SEQ ID NO: 29687 - DNA, 1169 bp, Mus musculus
ctgtagagatggctcagagtttaagactgctctgtatggaggtgttagacaccatgaaaaatgttttaaatgaggctggagagggctcagcggttaggagcactgagagctcttccagaggtccagagttcaaatctaagcaacatgtggctcacgaccatctgtaatgagatctgacgccctctcctggtgtgtctgatgacagctacagtatacttagatataataaataaatcttaaaaaaaaaaaaaagctggacctggtggcgcacgcctttaatcccaacacttgggaggcagaggcaggcggatttctgagttcgaggccagcctggtctacaaagtgagttccaggacagccagggctatacagagaaaccctgcccccccaaaaagagagagagagagagagagagaaagtttgtaactcatgactatatgatgcttattaatgtagaagcaaataaatgtatattcattagaaactttccttacagtttcagttgttatatttcagaacgctcctgttcgggtcaattctgagtttacaactttgaagaaaattggcatcagaagacagaagaggaagaaagccatttgcttgagtgagagtggcctttgtgccctggaagagttagtcagcgtgtcctgtggtgagttttgcctgttgtagatgcctgtgtccccgaagcctcagtcactgctcaggactagagtcctgaggactggctcacaccagggctcactgtttgttttacctgcaaaagtagatggctgccctgtcatcctgttgtgtggcgcttgtgacattggaaagtcaacgttcaatagaatactgattaaccagttattaaataggtaagctcgcttgtgttttcattggtcatctgggcatgaagtgagattcaaatggagaaacttgcttttgtttgatcttctaaggtgtggcctcactctctagaccaatttggccttggtgattctcctgcctcagcctccccagtgctatgattataggcataagccaccatgcccagcttgatggacagactgaagttggggatttgtttaactcactgctgtcagctgggccatggcattctgcagggcagtcccctgcctcactcccatgctgatgctgatctgcagcagaggcacctgctctccgtc

SEQ ID NO: 29688 - DNA, 1188 bp, Mus musculus
ttgatggtttgagaattcctgatgtctttggcaggtttggcagggacacagaatcctggccactgccttgtggccatgacacagctacttttgcttggcagtgctgtagatggaacccctaagagtagtggttctcaacccgtggatagtgatcgcccacaatgctgcatattagatacttacatcatgattaatgacaatagcagtattgcagttataaagaagcaacaaaaatagttttatggccgggcagtggtggcgcatacctttaatcccagcacttgagaggcagaggcaggtggatttctgagttcaaggccagcctggtctacagagtgagttccaggacagccagggctacacagagaaaccctgtcttgaaaaaacaaaaacgaaaaagttttgtggttgagggtcccttccaaggtgaactgtaataaagggtcgtagcactgggcagatgaagaacacggccctcgagcgttgctctgtcttaggcgagtgcttggggactcactgctcctgtgttcatttcctaggaccgccgtacactcaccagaggaaaccacagaggatggtgtactatgggaagatgaactgttacaatgactacgagaattacattgacatagtaaaatacgtgttcagagattacaagagagagtttccacttatcatcaacacgatgggctgggtgtcaggtaagacctgcacacatgtgcagctgccatgagcactgcacccacacacgatgacatggggtgctcgggtgagggggagcatgggtagcttgtagctgagaacagccctggatgttccaatgcagagcataccggcattcatcatggctgtccttcttatgtgctgctgagcatcaaacccaggagctccggcactcgagccacagctctgagaatctcttatataaacagtacctgttaataaacaagccagccgggcctggtagcacacacctttaatcccagcactcaggaggcagaggcaggcggatttttgagttcgaggccagcctggtctacaaagtgagttccaggacagccaaggcgaaacagagaaaccctgtctcgaaaaaaaaaaaacaacaataacaacaaaaaaaccaagccagtggccaatgagctgaggcaggacatagaaggttgaacactggcaagaagagggaattct

SEQ ID NO: 29689 - DNA, 1128 bp, Mus musculus
cgacgttgcgcctacccacatactgtatgctgtgaatgccagctgggtcggcctttgcaggatcgtggatgatatgaaaggctacactcggggccccatcctgcttgcccagaaccccatatgtgactgtttgggctttggtgagtgaacagtaaacaatgcctcctgccctgtcctcttcactggagacagcagtccctgactgtatgttgtattaacatttggtgccagacatagatggcatggttttataccaccatcacgctctgttagcctgtttcagtcctcatggctgaacatggaactttcaaatactttgaatggtacttttttttttttttcttgtttttttttcaagacagggtttctctatatagccctggctatcctggaactcactttgtagagcaggctggcctcgaactcagaaattcacctgcctctgcctcccaagtgctggaattaaaggcatgcaccaccatgcccggtggcactttcttaaaacttatttttagctaggcatcgtggctgacttcaggaggcacaggcaagtgggtctcttgtttgaggacagtattatcaagttagcaagttcttggacaagggctatgtagaccctgtctcaaaaaaaataataatttttaattctgtgggtgtgttcccgtgagttgagaagcctttagaatagaggtgttggtcccagtgctggcatagatagcgcttggttgtgagtgcctgagattggtgctgggagctgagcttgggaggaataccaagcgctctgcccctgtcgggctacctcgtcagccccacagctgcacattatattctgtgtaaaacactggaagggaaaactccttcatttattcctcctgttggggtcgcgtgcctgtctgccagctgctctcaaaggccagatgtgggcatcagacccatgggagtacagttgtgagtcagcatctgggtcctagagatggaccgtaggtcctttggagttaagcaaatgtgcttaactgctgagccccaaaattcggaattaaaactcttaatgtaggactggagagatggctcagtgattaagagcactgattgctcttccagaggtcctgagttcaattcccagcaacc

SEQ ID NO: 29690 - DNA, 2151 bp, Mus musculus
ccttggaagacatacacctttttttttttttttttctttttctttttttttttttttttttatttccattttatgtgcactggtgttttgccttttgcctgtgtgtgtgtgtgtgtgtctgtgtatgtgtctatgtctatgtaagggtgtcatgtcttggagttacagaccgacaattagttgtgagttcctatgggcatcctgggaattgaaccctggtcctctggaagagcagtcagtgccctggagacagacactttgtttattatgggacttgaatgccacactccgtttagacagggtctctatgctgcttctttgtgtttccatttcagcctgggcccgaagggtcagttccttatgtcaccacagattataatttaaatatccctggagcaacagagaaaattggagagagagagtatggaaaagcattccctagacacaaattacggcaaagaagaaaataagcctgggaatggagagactttgctcccgggatgcctcgtcccaggccgagtcagcagactgcgtgggctgtggtgagtggggctgtgtggctgccgagctcctgctcctgcccgctgttcacggaactggaaagtgtgctgtgcccctccagtgtcttccctctgagacaggagggccttgtatcctacagctctatctggcctcaaactctgggtatttcaggcctgtgttaggacaccagctctcagacttttcagctctttggtctcaaacttggccccagccctcttgacgactggttgtcccggctgtggcgtgcttcctgagagctgtgaagcagtgaagaaagccgtggtgtcctcagaacaggcagaggaaggacagccttgcagttttccaagaaaatcgggaccatgaaagtatggctagaaactgggcagcaggctgacccgcaggttctcatgtacagcgcacagactgccgggggcctgagcaggctcagtgagaggcgtgttgagccatgtggacattagcaaccaggtgccaactccttggtctgatccttgggtgccatcggatcttccagtgctgtaagcaagtcttagaagattgtatttcatctgttaatttcagggtcttttgaatcatgaggctttatgttgaagaacttgctctgacatccagaaagccccctggttaattaaggaaacccttggctccttaagtctgggtttgctctcactgccccttccttgaggcagtggatactgccatggggccctccagcctggagtggacacatacatgcctggtgtcggcaaatcttggctatcgaggatttctccgacagacccagaggccactgcaggtggatgttgtgaccaggagtgactgtgtcaggtcatttctgtggttgcagagctgaggagcttctcaggcaggcatgatggatctgtcaagactccaccttccagcaggatcatgaaagaccaaggctgtggaaggcttacaccattgcttacctccatcttgtctgtagccatgggagtgtgccagtctcctttgcttggtgccatctttgtggcagcctcagcatctgaaaatcccattaggcagagctgctgcttccccttccctgtagagcactcactaactggtccccaccgccccctcgcccagtctgtgtctcacttgagcttgtggtgagcctttctgggagggaggaggctcttagcctgctgcccaggcaggtctctgggcaccgttggctctcctgcctcgcagagagtttgaagacagccttctaagacagcctttgtcacctttgtccagttccccagatcttctggtcttcacagtactaaagatcgagtggggctggagaggtggctcagcagttaagagcactgactgctctcccagaggtcctgagttcaattcccaacaaccacatggtgactcacaaccatctgcaatgggatcggatgccctcttctggtgtgtctgaagctacagtgtactcatgtacataaaataaataaatcttttaaagaaaataataacaaagattgtgaatacagctcttcactacattttccttaaaagggtgaattttggcttttaaaagctgaccttgtccatctccaccagtaaagactcacttcagtagtagagggtgct

SEQ ID NO: 29691 - DNA, 1202 bp, Mus musculus
cccccagaggatcttctgctccatgggcaaacaagagccagtgtatctgtgctcatttaatctcgaggtcttgaagctaaattttagaatagctgtaactacccagtcctctgggcctcctggacaagttctagtccaggcctcactccgtgcgctcggtctgtctcccctgcttacccagctgggctgtaattggagacctgctctgtggtgagccagacactgctctctgagggccgtgagcagctgctctagctctttgctcagtggctttgggaaaaatcattgctgtgagtccttcaggccaggggatgcttctccctacagcacctgtggccccaggaagggaaggtgtcctctgcctgtcgctgtcccctataaagaggactgtgaagtccttagtgcttgtcatttcagccttgatggacacactatattgagtgagagccaagctgtgttggaaattcatgtccttcctgtgggagccagcgagtccctgctgtacttgcttctctccctaggagatcactgtcacagtggtgtcctcttgaagaggctcatgtcacttctcttacctgctgtaggatcatgcgtccagatgatgccaatgtggctggcaatgttcatggagggaccattctgaagatgattgaggaggccggggccatcatcagcacgcggcactgtaacagccagaatggggtaagcgctgggtgtgtgcgattcatgtgcacttgggttatgcacagactgtggattctatggccgcaaggccacagcagtgtggggtcgggaaagtagttcacatggagcccagatctacagtgttcctgccttgcccacccactgtgtcttctggaggtctgacagtcagccttgcttgggggtcccatggaataaggtttggttttcgcctcagtgtggagttgggaaatcagcagagacaagctgctggacagctgaagggctctcaccacctcccatgcctcagggccctgtcttgagccctgctagctccttggttgtggtcagaaatactctatgcctgtgtgaatctgctatcatgtttgagagctgagtcccatttccgtccctgactaggtggctgtgggctcgagctttggttttctgtgcctcagctgtgttctgagtatgaagctccacagcaggccctgcgtattgctgaggctggtgtttcacct

SEQ ID NO: 29692 - DNA, 1134 bp, Mus musculus
tgtctgggactcacagctccatgtgacttggtgccctaatttgccagatagagacagcagtacacctgtctgctggggttgctttccaggggcgctcagcatcagtctgtatttgttgagaggagtctatggggactgacccccataggcagaggccctggacttactggagcagtaagtctcctgccagttctctgagctcagccggctttgcagagtctctgggtgtatgtccacctttctttggtctgccagtgccagacttcatcttctccgtctttgtactttccctggaaccagccagctcatccttgtcagaagggttgggcttcctgaggtctgtgtcctgagaggacggctgtgctgaagtcagtgttgtgggctcagcatgaaggagtgctgtgcctggaggccagtggcctcgctccttgactcttcctcgtggccattctgtgctggactgactgatagatgtgatctaaatgcacgtctagattctgggcacatcttttcttggtattcagtgtcagtgtcctgcagctgatgctgttgatagtcatctgagccaagggaacttatgttgaccaccaaggactttgttgtgacttgctatggtatgaggatggtctgagtatgtgatggtctttatggagaaaatctacctagaagaactcagcctatgaacacacactctctgtcctctcctgagtgcacacacagatttgcggtgaagccacggccatatcaggatataatggcatggctcgggacatgcctccgtgtgagtgaggggctgactgtcttctgatcccctgagccgagtgcatgtggtcccagacctccctgaatcttccaggcgcattttacttctctctccttgtgtgttcatctccaatcctgagtctgcaaagacccacaagaaagtgaagttgagttcaacaacaggccttgcttcccaccatagagctacagcaacccttacccctcacctcatctgtttgctcctcagctgctggtgcctcctcttctgcacagattgccagggtcacctgctcactggggcacccagtcatgccccgtgtcatccatgggcatgtacaaggtttgattgtggggttgaagcatggggtcaga

SEQ ID NO: 29693 - DNA, 1192 bp, Mus musculus
tcccgtcagtccagcataaagattgtaaacctctgaactcacctgtagtgctcagaacgtcacagtatggcggctgtgtagccagtgggcaccaccctgtcctagaggacagggaagatggcaggttcaaccaacccctgaggcaggactgagcaagctcgcccagagcctggctgactgacttgtcccttctggccttgtgtttagtgggtctggacctaggggctgccagaaatgctagggcagcagtgaatgtctgctgtggagacagatgactcacactgactaataatgacacgcactaatagtctgttgtaatgtctcgtagtggccgctgcctgtgttgcctaactcagcatcttaactgtcctcagtaacatggcttctctctggcatgccctgcccacaatgtacacatgtaccgcgtgggtagagaccaagctgatgtccgataatgcagcggctccatatcctctgcaggctgtgtcatcaccatctccggacgcatgaccttcacaagcaataagtccatggagattgaggtcctggtggacgctgaccctgtggtggacaactcacaaaagcgctaccgggccgccagtgccttcttcacctacgtgtccctgaaccaggagggcaagccaatgcctgtgcctcagcttgtggtaagtgccctcatggttacatcctgtcctaaacagggcaggacccaggcctgggaccaggggctgtgctcaggtatagtcaagtctctagaaagcagccttgcaagctgcaggctgtcccatcgctggccccttgggatatgatagcacaggctgccccatcgctggctccttgggatagcacagcgcccaggttccttgggttgtgtatccgggccgggggagggggggtcttaggaacacctcaggctcctcagggggcccccggagagctgaggataggagggaggagggctgtggcgtggaccctcccaatgtgactttgggcttttgtgtcacctgatgaaaagcaggcttcagttctgtgctcctgggactcaaaggggtggcccacttgtcaactttgtgaccttaggcaggaagtgaggagaccagaaagtcctggccagagagagtcctggggtgggaagcaggaggcgccatctccggaagctgtgcgagggcagcctcagatgcaggagcagatg

SEQ ID NO: 29694 - DNA, 2022 bp, Mus musculus
attagcagctttctgagctcgccctccgagtcctcgggctacgtcacgctgcactcggactcgctgggctctgcgtcctagggctcccagagacgccatgcagagcgtggcgccatgaagaggcacagcgccaaagatgctcccacaggtgttgggcgacaataagcgccacctaagctaggggtgaatggatggtggactctgcgcttctcttacagttctttccttctggtgtcgcctggagggacgactggccaccttggatggctgcccaggacatggacctgctcctgggcaaggcatctcccaggaaggggcaggctgtgcctgtgtagcgagtggcatctgcactttttgtacagctctgaggctagaccagggcgtagggaaccctgagacccgaccaccatgagaaagtacgttcctagagaagcttaagccggaagtcacgactgcatccaacttcctgcactgccgctgcctcacctcaaggtgtagcatgtagaacgaccccaagcacaagggtcttcagagcccaaacaagttctattgagcaggcgtcccatgtggcctgcctcagtttccctatctctaagagtgaatgaccatgatacatctctcagggctgtttgaagaactctcccggtctgtgtgccctcgcacttgaatggaccaggtgtgagaggtagtgagggccctttgttagggtcagccttcagcacgtgggccccaattgaggcccctcagtcttaatgacctttgccctcttggagacttgccccactttagctaaagcacaacaccatgggtatataacagccacctggacccctgttagtgtccccatgctcaaaattccaccatattgcctgtctcccactatgtcggccgcttccgtggtcctgctgtgaaggctgctggtgcctatcgcagagaaccaaagctcgtggaagtggactttcgtgtctcagtgcccatctccagttttgcctcccacaggcaaagtccttggaaagggtgtcctgtaccccacttcccctgcaagaagggctttgctctctcctgggtctgggctgtgccagggacatgggtattcccaggagagtctgggagctgggagcagagggggagagctgtcaccagacagcggaccctctgtgttgggacctggagatagtcttaaggccagcacagaaccagcctgtgtctccttgttcttgagacgtggtggacaggcctgtctcctctccctctgcagacagatttccaaccacagctggggatgagggaggagggctggcctaccctaggcctcagaggtctctgttatccctggttaagtaaaagatcagccaccacagaagagtagagcaggggactgtggtccatgattggatttgggagaagctgcctctggccatttgctgctgtgccttcagggactgacatgtcatacaggggcagaggccaccagctagccactgtctctctcacaggtctcaaatgaccaatttaccacttgggtttcactctgtattttgtattcaatggcaatacttgtagtggggacatagtccccctcagtcactcctgatttttacaaaactttaagggcaaaccctgaactgagggccgtaggcacctagggctctttcccacactaagtccagcctccctgtttgctgacagctctagctatctctataccaccacccagcccagaggcagggattcgtttgtattttttttttttttggaaaaaacaaaacaaaacaaaacagcgtttcttttctgtacaggacccaataaaaaattcctcatggtttgcacacatccttctgaggctggtttcatggaaccgcctgctccccaagtctctctacatctagagcctgaagcctaggccagtacgttcccttggacttgccatgtctccaagcagatggtgcagtctcacctggccatcgagacagacctgagtcctcaactgtaggaagcagcatgtgggccccaaagcccatg

SEQ ID NO: 29695 - DNA, 3603 bp, Mus musculus
gaagacttctgccctcggctcctcatacatttaatcacatttacacaccaattttataaaaatagcagtgtagattccaagggactctgagcctccatgcctgggagtttctaagtccagcttttacgtggcaacaggtagcacagaccctcagggtgctctgcagcttttgagtagccattgaacctgggctgaggatgggggccctgggttcttctcaggtcctggccttggctcagctgtacccctaggaagtaatgtccgtgctcattctgagaaatgctgccctccgtgtgtttgggattgttcttatttatcatagcttgtgttttttgtttctgtgttgcaatgagtctgtcaacttagtttcctgtgttttttcaaagtaagccaccctcctgctgcagcagatgtcttccagaaggttctagcacagcccatacatctgcggcccgaggcacattaaccctcagcagtccacagcagaggggcctcgctgagtttccttagcatctttgttctgctggtctggaagaacctttggctctctctgtgttgcgcacaaaagctttgagaggtgtagctcttgattaatcctggactgggcaagagcctggtcctgctgtgaggcccttgcagatttggtgtggtttgctgtcctcagagctcctactctgagatgtagaagtcttagtctgccattcatgagcacagagtcatgggtggagaatcctgagtgtctcagctcacacccagcgcttataaaggcgtgctgtgctgcgaggctgaggatcgtgtaccgcgccttccctgccagctccagcagaatccagatcagcctacatagtgctctgtgccgcagccaggtcctctcagacttgagaaaacccttttccttctcccctgttccactgagcagaccctgctgggttgcaagtttagtgttcctggccttcagacatgtggtcacccttgagtacagctccatcttcctcagaagacctccttccttcacaagagcaccgctgcacagcagcacacttggtacatcaggtcagacaagcccaggccccaacagtggccatggtgttgctaagcacactggcagcttgctgtacataggccaggtctccagcagggtaccaaagcgggcttggtaattaatgccaagctggaattcagcagaacataagtgctcatgagttctgacttagggcttcgtgttggcagtggcagcattggcgtcttcaggaacaatgtgacagttgtgccccgatggggggtgctgactttggccactcacagttggctggctgaagcaggactgctgttctgtgccacacacagcaaactgctgctgctgctgggcatattcagctgccgggtctgcaggtctgtcccaccagtactcagaggtccctgggaaggaagccgggatggagggtgtggctctggccaagaggatggtgaaggttaatatgaaggttaatatgagtgagtgctcaatattgagatactgtaggaccttgtcaggctggagagaacaggcaagtggctggttctgtgttgtaatgcagccagagttgacagaacctcgggggctgggtaaatgaattctagcttattcttgacataatagacaggcattctatcagcagggaggtgaccccagtaccagttcctccaccaaaactgtgagattccagaagcctcaaagacgtgtgccctggtttgtagtaagccagggaaggctccaggagagcctcaggccagtccagctggaagtgttccccgggccacccggcccatcgcctctgcagccaggactccacgatcacttccaaactgcagtggtgctgaccaagggtgaaggtggggatgtggccagagcactgctaattaccacgccctcctgtgcttgggcctcccatcagggtcaggatggcctccctcacaggggtgttatgggaagatgagctgggtggcataatgaaatcttaggatgagaaccgggtttctgtgtgttagaaagcagtgtgtgctaacatgtgtccaaaaaaacattctgccagctcgcaagtaatttatttttagattttatggcttaattttgttgttgttgttgttgttctatataccaaagaggcttacgggtttgccagttacagtgtgaggccagttagttggctcggaagccgccagccttcgggacctgaggcttgcaggctccgtggcagccatggctgttgtccacaccaaactgcccaggaataagtatggtgatatgagtggagacagtccacacttcccatagccagtcccactcgctaggctgcaaacgggaggaaatggatttgtggcatcatccccagctctttatcagtgcatctaaactgagctggctccagcctcctagtccccttgagggccgtgaagttgtctttttgatggatggggagtggctaatggcagcccttggcattgcgggcagtaaggcaaaatgttggcattggatgttaccctccacctgccagaggccagagagagggagcccaggccttgggactcttggtgagatgctggattgcatcctaggagacgggaggctacgttccagggatgtgggtggaggaagatcaggccacccttctgacattcccaggatggcagtcagcatttcaccagggactatgagcatcatcccggcaggatctggcaggtggctgttctctgctgccgtggactggagattattttacctctatggatgtagccgtaaccgggggcagcagaattggcttgccgaggctttcaggtattataagggcagccatgtcctagggtttccacagatggaggagttgtcaggagattggtttgtctgcttgcaggcttcggagtggaggtttctgtgtggagagccggtaccttacagaaaataggcgacttggcagtcatggggcagggagcattcaggaggccctgtggctgctacaagccggtgtggcagggcagaaagcttaacagcggtgtccttggtgggagctgctgcttggacctagggtgtctgtcgccttaccaattcttcccacttagttgctaacttggggccactcagcctgagggctcagccaaagctcctgggttgcctcctctgcattctcccctgccttaggtatctgctgcggcaaggtagagccctcagcctcccgatgggcagggcaggcagctgcgtggctgtgaagcttgtccctcactgtcctgagaggaggcagcctgtctgacccactgcaaggaggactatggagtgatcactgtactcttctttttacatacagaaatgtttatttaaatatattaaattggattttctttcacagatactgaatattctttctaattcttaaataaaactgtacttggtttcactatgaggagtcctgtatcaggtgtcctgcatgtcgggtgtttacattattattcatagcagtagcaacattacagctatgaagtagtaatgaagtaatttcatggttgggggtccccacaccaggggaactgtattagagggtcacagaattaggaaggttgagaaccgctgtg

SEQ ID NO: 29696 - DNA, 2635 bp, Mus musculus
tgtaacagagtgtctgggtggccatgatgtgtatgggttgggtcaggggacacagaatgctggtgagcagcctggacggcttcggcccgcccccttggggaggcttgctggatatggcggtgcttggaggtggttggaaggttaatggttccagcagaggtggaaggtgtgtggagccgtcggctcacctgtgcggtctttctctagtggtctctccagaccattctctagacgtctgctgatatggtctcacttttattgccaagctagggatgtgtgatagacgcttgcttgccttgttagagcactggctctggtgtacttagcctgtgtctggaaaacatcttaaaattgttttcagtgcttcagaatgcaacaagccaccagtctggtgtagttcttgtgctctctctgcaggtatttgaaatatctcaccaaaaaatatttgaagaagaacaacctccgagactggctgcgtgttgtcgccaacagcaaagagagttacgagctgcgttacttccagattaaccaggatgaagaggaggaggaagacgaggattaggacacattggtctgcaatgttttgtattaattcataaataaaatttaggaacaaaaccggtggtttatccttgcatctctgcagtgtggattggacaggaagttggaaatgacagggactttaactgggctgctgctcctttgtatatagacacttttttcctgctcagaaacttgagttctccagtagcaatggccaaacagaagaaccaggctagggggctgcatctgacagagcaagtagacgagaggctgggtggtgggctccggccagcccgagtcttagagctggtggttggttatatctggtgcctgtctcgaggagggcttgagacacagtgtggtgctcctcagaagcagacaggtgatttctttgtgtgatttttcttttcccctgggacaatgacagtcagtaagacaggtttcagggacttttgtgtccaggtctgagcactagtcgctcacagttgtgtgtactaaccttcttccttcctattgaaatggcaggggtctttgagtctcactgctgcatgttctgccttcatagggatctgtaagtatgctgggcatctgggcttttagggggctctctatagggtgtctgagatagaggtcaacaagggcttatagacaactcaaacaaagcccatggcttgagcaagtctgcaacaagctgtttgtctagcctccagcagagggcgagggagacagcttccagatgttcccagtaggtggagcccctccaagcccagggctcaggaggcttacagggtgggaactccaatactggtggagggaggagggcgtttgatgggaagatagggaagttgctgcttcctaaactgtcacaactgggcttggataggagtcatagtctgggaccacagccctgtggtagaatgctagcctggtgtgctccaggtttaatctccatcactgcagaaatgagtccaagctgtgtgtacctccagggcactgggcatggggttcccttgccattgtgtgtgcccggagaactggcaggcgggaaatgtctttatcaagggttaccttggaagaggtcccaacactgtagggtgctcctgttgtcaaaacctatgcagaggcatctgcttgctctctaataacagtatgcaatgctaaagggctcgcttacagccggtggccacactggaggcctgcacatcaggtggccacaagttctgctgctgcgcctccgaggaaacacttggtcctccgatcgattttaacctgttgaggctttgcaatccccctgtggcaaaggctccagtgttttctatttctatgcaaatttcttgaagcagaactgttactgtctttctcctctgccctgggaggaggcgctagcgtttccttccaacttcaggtgcagcccccctcgtggttagcggtcttaagttcgtgacttgggtttgcagatcttttttgttacatcgccggaccatgtggtggtctttagctgtaaacaacattaaccctgggttgattagcatatgcttctaaaagatggtcccagattctgcgacttgtaataaaatggaaacttgctggtttttatgcctttctaactcttgtatttgaatgaatgttgatcactttttgtattaaagtggctgacacatggctactgtcactgtgcaaggctttttttcttctcatacttcacgcaacccgctaaaccttctcactggttagttgcatcgggcacagggaaaagagtctcctgtctctctgctctctcccgtctgtacagttgagcctctgtgaggttggctggagttgactgagcctggagaattgcttttcaaacaactggctttttctggtgggcaacgtggagtggacctgttagacctgccgtagcagctgtatccaggcccctcctagacctgtctcctttatgtctgtctggccttgtgccttacctgtctttatcggaaatgttggcacacaacacgggagttttaagctgtgacttcacggaagtcagtactggcacaggcttgttccctgccagctgcggttgctccaggtgccctcccctcctttgaga

SEQ ID NO: 29697 - DNA, 1181 bp, Mus musculus
tattgcagcaatctggaaggcttcttggaggagtttgctgacatatccaaggaagatcagatcaaaaagctgcatgatctattggggccgcacatgcttcggcggctcaaggccgacgtgttcaagaacatgccggctaagacagagctgattgtccgagtggagctgagccagatgcagaagtgagtgctggaggctcaccctgtcctgcagcaactggcccttctcctggtcttgtgtcctcagccaccccttcccgcaggccccaactggctttcctgaccatttcctggggttgacaggagtccttgctcagtgatttccttccccctccatcaattgcagtgactacggtcaggctgcctcagttgtagtaatgtctcccattgacgttttatccatacctggtgcctggggcaccaccaacccttctgaaagtagagcctgccccttaggaatctggtgggacctgaggaggcggagtccagctaaccttgaccgcaccctgttgcaggaagtactacaagttcatcctgactcggaactttgaggcgctcaattccaaggggggtggcaaccaggtgtctctactcaatatcatgatggatctgaagaagtgctgcaaccatccgtacctcttccctgtggctgctgtggtgggttccctgtgatcatcttggaggggtccctgtggttgctgtggtggattccctgtggccatcttggtgggtccctatggctgccatggtgggttccctgctacagtggtttctttatggccatcatataggtctctacaggtctgtaccggctcttgttgttgcctgtggtcactgtgatgggttgtccgtggccaccatggtgggtctctaatggcttctgtggtcgtggtagatccctgtggctgccatggtggcttccctgtgaccatcatacaggtccctagttgggcgccatggttgaactaccatggttggttcttcatgcttgacactcatgtgttccctgtggacagtaggtgcctccctgctgtggtggtttcttgtgatctctaaggaaggtgcccatggctaggtgccttggccccagtcctctgttcctttcccagtatgacttgtagaggtgatgtgtgtctccatcctgtccctttggaagctgcctctttacactgcttggctcca

SEQ ID NO: 29698 - DNA, 1199 bp, Mus musculus
cgagggagcttggtaggggtcagattgtccctggaaaaggagttggggggtatgcagcatctctgggcctgccaaaaatgggggcaggtctccatggcttgttttgaggacactgggcaggtggctggcctttacttagcccagatatgtacacatctgtaacatagttcctcctctgctcctggagggctggacccccacagcttcttatactttgccactcctatacttgagtgtctatccaagtcttaaggctagcaactggccgcacactgtgggtaggcggggagggggaggggactctggccatagacaggaccactgaaggcttgagtgcattatggtggctgaccccgctctccaagaagggctgtcctctgcacaggagtgtcttccctagttcgctccccaacccagacctctgtgctaatcccaagatgggcaagatggtcagccctgttggcctcagttgccacactgacatcctaagacttaggcctgcaggctcacgtgggacagaatagggtctgtgtctcttgacttcaggggtccatcccttccctgaagacttcccccaggagtcttgctctgtccatccatctctgcttcttcctgggccatacccaccctctgtggccttcccctctccacagccaccttgacctgagacccctgctggcctgggagggccttagcgcctcagttctccagggtagactgcccaggcagctgaggagaggacaaagtccttcagagtgttcgcatcttggcccttcagctgtcgcctgctagagagtgataggatagaggtggcatcttgaggtggctctcattttgctgctgatagaactgggtcctcatgcccgagctgtcagagctgcagtgacagtgatttctagctgctttggcttgcttaattctataggatctctgtggaaggtgtggggtggctctcggtgacataggggtttgggtcagagctacatcatctgagggcaccccctcacccctgttctgaattgcttactccccataccccaggggccacctgtgagccagggttccctcccccagcctctgggtgctccctagcccatgtgggctgctggctcagtgacaccggcaaccagtctaagtcttgagtcctgcagggggcacgtggagggtaggctagggggccagggctctttgtagtctca

SEQ ID NO: 29699 - DNA, 1099 bp, Mus musculus
gtgggtggggctgacagccttgtccttttcctttctcacaacctttgtgagcatggagggatgaccccgagaatggcccttcacattttacctttagattttcatgaggctctgacagactttagtgtatgtgatttctgtctgttcatgttcactctacgagaagtcagaccccagaagcatcgaaacactagttaattttaaagtggctcgagtaaacctgattatgggataataccaaaacaaaacccccaaaacaaaacaaaacaaaacaagaaaaacaaaacaaaacaaaaaccaaaaaaatccctttgaaatggctttgtgcttatggcaatgttttcacggacttagcaaaagacagtttgttctgcgagcttctgtgcctccttcgtctgctgtcttgcttggtagaagcctttgtgggaaatccaggcccactggggaagaggagggcccaatggtgggtgttctcggatggtaccctcctatcgatagcagaagttgtttttggactggccatagaccaggctggccttgaacttgccctaatcctcctgctgtctccccgctgctggtattacaggtgtgtgtgtagctctgcctagctcacacggtgcagggtgtgtgcacactaggcaagcgctgtatgggcgttttctcacagtccgttttacagtggagtctgtccaccgataggctgactacgcgccagctctcgcctcagggttttgaacttctgcggtcactgggtattggccagttggactgttcgggcgcatgagtttcacaggctgtccgtgaatttatggatataagcgtacacccctgtccatcctgtcctgtggctgtggcatccatcctgtcctgttcacagggaaggtcctgaagtaggacccagtcaggttggaggtgggggacacagatgtctccaactcagatctgtccacagccctacaacagcccatgtaccacaatttggacagctctgatctgggctgtcgcctgggtctacatagatgtcccagaatagagcagagctggccctgcccctctctggctgcagcacttgggagagcagccctcacccgagcatcac

SEQ ID NO: 29700 - DNA, 1149 bp, Mus musculus
ccggcccctgattggtgacgtggcgatgacatcagacgccgcgcgcgcgctcagagccgcgcgattgagacttggcggaggagcgttaggccggggcgctcactcatgaggagcaggaaggtgaggggcccccgcaggcggggtgcgcgccgccgagccgcactctcccaggggagccggcggggggcgggcgcctcgagccccgcccctgggaggggaacccgcactccaggcacctccacccgccccaggcgcggggctccaggctcgctccccggggtgagggccaccgggacccgagctttgccctcggccgtgcgggctactgcccgggcttcctggcctctcgcactgcccacagatgggcgtgctgcagccgagcgagctcagccaagcccctgtgtcgtgtgtaacctgggctgagggcgggcagtgggacgggagctagggtgactgggacctaaaccccggctgcaaagggtctctggccgaacgagcatggcagggacagtgagtcccttagcctgaagtgtgtctgccctgcaccgctagccaaagtccaggctgacgtccctgcctcttgcgttgcgcagacgtttgtgtgtagcgaggctgacaataactgttccccgtgtcagtggtcatggttgctgcccctcccttgcataaggagactttattaaggtttaatagttccccgctgtgttttttacttctttgcgcgcctcggttccagtgagacacagaagggtctaactcttgtgaggttctctcccactttccgttagctgtctgttgacagtgcagccttgcaatccttactttaccctttgcagccacttcctcaggccagcaagggcccctcggaccctccccctttgtttgttcctgcctgttgctagcacgtgcctcttttgcctgttcagagaagtatgtttaagataattttatgttagggactttccttgggggtcgagggtgccctttgtacctggattactgattgggtccttagcttcagctagaactcccggtggttctaaagcaacaccccctcccccctccacacacacacccatttgcatctggaaattcctttattctcaccttcatcttagaggacaggttttctgggtatggattttctta

SEQ ID NO: 29701 - DNA, 1160 bp, Mus musculus
accagactgcagctccctgctcccactctattgtgtacccatggtacacgaaaccaaggtgaacataattgatcatgttaatgcaaggggaaaaaatgaactatggtgtgtaacccacatacacacatacacacacacacaggctcacaagctgggaagcagctcagatggaaaggctgagaaggtagcgtccctggcttcagccccccctctgtgtcttggacctcacacaaggttaggaattcagatctatgatttcatgaacatgtgaccatgtctgttgtcatctcttgtttggagtatagcatctttcttaccaagggacctgtgcctagacagatttcctgggtctgtaacaggcctgctttgcagagccggagcggactggccaagtatgaatgtggatgccctggcaatctcacttaagactgaagtcatgctttcttcccctctaaggatctgccaccagcctcttcatcttatccttccatgagcagaagagaattcagaaaaatgcacttcagagccaaagatgacgaggatgacgctgaggggtagagctgcgggcgccttgcagccggtgtcaagattctgtatggcatctttcagagaacacgctctgagaacaaggtggacatcagtgtcactggctggcacagacgcccaggcgcaccatgctggcacagggggctgggcagtggaaaacaaggaaaactcctgagagctttggctgtggtaacaggcttactttccatgccagactgatcaccggggatgaattctgctggaaggactcctgtttctgagtggcgctaaccatttgacctggtagtttttgcaaagtatatatgagaaagaaataaaatatattttgaaaatacttttaaagaaatactgtgttcacaaaagtgtcatttcaaatatttgtgaatcaagggaggaagtgaactgtgtcctgggctaggagcactcttgaggcccattagcaagcaggaaaggcaaggcccttggtacagggcttgactggagttggggtgacagcccctccactgggatagaggctacccacaagggtactgggaattgaacttggctcctaagcaagagcaacaagtggtccaagcctatgaggagtttacagttctgctcctgttcagaca

SEQ ID NO: 29702 - DNA, 1248 bp, Mus musculus
cctgtggcagggtcttcacgctcaccgccccagggctgaacttggccactgtgatgtgtgtggggtgctagtttgtgctgagcttttatggcttctatttctactgcaaatggcagctctgactatacgcctctgaaagaaacggtgcttctgggataaatgtttgcattttataacgaacatgcaggacatcctctgctgcattgtttaaaatggcagaaggtgggaagccatccagatgtctcctggtgtgaacagccaactgtggcattattttgagccatgtgaaactgatgtttttaatgggttaaataatggctgtcatgaatttcatgactcaacactgatatatgtatgtacgcacgattggagcaggtttaaactttcatgtggagaaatagggaactgttaaaggcatagatggctttatctgtgcagggaatgaccttgaactcatgatcttcctgcctcatccctagagctgggaccacaggtgtgcaccaccacacctggcatttggttttgtaaatgtgtgtcagcttgtgcatggtctgaggaaatgacactctgtaaccctgggggattcagcagggctgagattgatcaccaagtacaatctcctacatcatgtattttataatacttcattctgctttttctctgagaccgggtctcactatgtagctctggctggactggagttcactatatagaccagccaacctctgcctcccgagtgctgggattaaaggtgtgtgccaccacgcccaacctgagtttatttttgaaatgggcattttatatattttgtaatgtttggatttttatatttgccatgtaatcagaaaaacaataaagtgtttctaaaatagacatgtcaaaattttttgaacatattgaggaagatggggctaagggtgagatactggcaggcagaaattgaacatttatctaggtgagttcatcttcacagaggtggcagggcagtgcccgaggcagccagccaggtggggctctctgaggacccagctgcttgtcttagtcatggatgcacactgttcacaatgtgtcttattctgcttttctgtccttctcaaacaccccaggacgtgcacaatcactgccccctacagaattgttgccaggactgggctttctgaagtttgatgtgtgtgtctgtgtgtgcgtgtgtgtgtgtctgagtgtatgctagtgcacctcgtgaatgcaggtgccaggtcggtacga

SEQ ID NO: 29703 - DNA, 1050 bp, Mus musculus
tacacagccagtgtgaagctgaggctaaaaacagagccgccccacacacccgtcccacaaaccccttgcgtccagactctctggcgagcgcgtgttctctctatggtcatttccggctcccgccggaagtgtggcgccgcactccggaagcggcgcacgggcggcgcgatggcggcggcggcgatggccgtgtccgaggcctggccggagctggagctggccgagcgcgagcggcggcgcgagctgctgctgaccgggcccgggctggaggagcgggtgaaggcggcgggcgggcggcttccgccgcggctcttcacgctgccgctgctgcactacctggaggtgagcggctgcggcagcctgcgcgcgccggggcccggcctcgcgcagggcctcccgcagctgcacagcctggtgctgcggcgcaacgcgctggggccgggcctgagccccgagctggggccgctgcccgcgctgcgcgtcctcgacctgtccggcaacgcgttggagacgctgccgcccggcgagggcctgggccccgccgagccccccggactaccgcagctgcagagcctcaacctcagcggcaaccgcctgcgcgagctgcccgccgacctggcgcgctgcgcccctcgcctgcagagcctcaatctcaccggcaaccgcctggacgcctttccccccgagctcttccggccaggagctctgcccctgctcagtgagctggcagctgccgacaactgcctgcgggagctcagcccagacatcgcgcatcttgcctcgctcaaggtcagtgggacccgaggggagggagacgcgcgccctgctgtccctccttggaggatgtctttgcccccgcaaccggtccgtctcctctcagttctcagacctgcgagctcagaggtctctggacgtgtggcagtttaaaagttgctatcaatgttagacttctcatgtgggaagaaattcaagagcagagagccaggtgtggcgcgcgtgtgtgcgtgtgcgtaactgattgggtttccaaatggcggagcgtccagacaa

SEQ ID NO: 29704 - DNA, 2210 bp, Mus musculus
ggttaccacagccgacttcctgggccacttctctctgttaaaaaggtattttcattttcagagaatggcagaactgagcaaaagcacttcagaaaataaagaggaagacatgctctcagggacggaagctgatgccggctgtgggctttctgatcccaacttgactctgagctctgggaaggatggacagtgccctctggtggtggagcaggtccgagtggtggacctggaagggagcttgaaggtggtgtacccatccaagacggacctgatcaccctccctccccacgtgactgtggtccgctgacaggctcctgtaggtgtgggtgtgctgtaggtgtctgtgtgggtgtgggtgtgctgtaggtgtctgtgtgggtgtgggtgtgctataggtatctgtgggtgtgctgtaggtgtctgtgtgggtgtgctgtaggtgtctgtgtaggtgtgggtgtgctgtaggtgtctgtgtgggtgtgctaggtgtctgtataggtgtgggtgtgctgtagatgtctgtgtaggtatgggtgtgctgtagatctttgtaggtgtaggtatgctgtaggtatctgggtgtgggtatgctgtagatgtctgtgtaggtgtggatatgctgtaggtatctgggtgtgctgtaggtgtctgtgtgggtgtgggtgtgctgtgggtgtctgtgtgggtgtgctgtaggtgtctgtaggtgtgggtatgctgcaggtgtgggtgtgctgtagatctctataggtgtgggtgtgctgtaggggtctgtgtgggtataggtgtgggtgtgctgtagattctgtgtaactggttctttgctgtttctctgggtgttttaaggtgtctgcttttgtccaggtgactgtggtaatgtgagtttgcatcatcatcatagctccaatgtgactctcctgtctcctgtcctcatggatcactcagtaactgctggggatgttctgaatcatgtggcctgtggccgtgctggagagtcaggttgaacgcaggcattctattgaacagtatttatttttctacaacatgttaatagaatttttttttaaatcagctgtgcatagacagttgagaacatcatgttgtgagtgtaatcttcttagagcttgtttccaggcaccgtgctgccgccatgctcccagggcagcatctgccttccacggctgtgcttggaactgtagtgctggtcgttgttggcacatctgcgccttggccaaggaagttatctatgtccgtgtagtcctttgtagtcagacagatgcttcgtggactgtgcctcacacatggccctgcaggctccatgtcagcgtgtcccactattcatgtcccatctctgtgcatcctgactgcgcacatcccatctccgcatgtgtacgcatctgtaccagcacacagctgccatccctcgagccacagtgcctggtcctaaggacccagcagctgcacagaggacttggtggccccgtgccttgccatctggctgagaagagaaccagaccctcagccttccccctcgacaccttctcgttggtgacctctgaccttaaaggaccatttctaccttctgtaaaagaacacctgtttggggttgcgtgcggctttcatcctaaggccgtgcgagagccgttagctgtcagaactagtgaagctccaggctcctcgtggcagaccctggacaacgctggtagctgttctccatgagacacggctgctcacaggtccctttgagtggctgtggcaagtactcacctactaagtgtttagggtggagctatcctgtgctcaccctgtctccccccagttcctgctgttccctccagcccagcccagcccaggtgtgagattcattgagatttttgaaactgtttttacagattcaagcagaacgcctctttgttctaataaaaacccttggtaacgacatctctgcatcagcagccttagcacatgcgtctcccaggacagtgttgcagttcaccagtcctcaggtgtagcagacatcatacatgggagagcagcccgaacccccaccagggtagggtgtccatgaccatggggctcactgagcagctccgcaagattactgggcagctgccaggagtgggctgggagcacctgacccagtgtggagtgcagaatgtggctggaagcccgcctcactgtcagcccgggactacaggagacgcctg

SEQ ID NO: 29705 - DNA, 1203 bp, Mus musculus
tgtataaatactacgccactgtctataaagggctttatttaagggtgtctgtggggttcctgggcctgatctctcatgaacgctgagggtcacgggtagaatgggaaccacgtatggaattctgaaggtcagtagctggtttcacatggtgaaaagagggtcagagctgtggctcagtagaggagtgtttgcctggtgtgtgtgaattgtgggttcgatccccagttctggaaagcaaaccaagaaagaaactggtgaatgtaatcaataacttactcctgccactgtaggtcatagcggtgtgcagagagtccattggggtacttttcttcccacactcaaaccctttgtagccattggtccaaccttcagttctgtgtggttcctcacagactcacggctcaattgaggcataggagctgccttccagaggagagcattatgactggtcaaggccaacagcatgcaggcgctctagctgctgtagccagggctagcccctctgagctcagcagagactgtggcaagaccaaggtagaggcttccactgggcggttgggctgttgtcagaggcccgtgggagaatgggggtgcttgaatggggggctgtgctgggccaaccggagttctgacttgatgttgctcaaattcctacctcagcagaagtgggaccatgaattcctacctggagtctgttggcagaccttggagtggggtggggtctcctcagcctagaaaccccacagagtgggaggtttacggcctgcctctttctgaagggggcagctgtcgtatcccttgttccctttgaatggccttggtgctgggagaggtaaaggttgggtgctttcctgttttagacagggttattaaggtataattcacagagcatacaatcttctcacttaaaatgtacagtttggtaggggttgtaactcgcatggcagagtgcttcttgcctagagtgtatgaggccatgggttcaattcccaacactgcacacagtgggtaccctggtgcctgcctgtaatcccagcactcgagaggcatcggcaggaggatcaggaaagagttcaaggtcagcttcctatataatgagctccaggctagcctggctgacatgagaccatgtctcagaaactaaaaataataaagcaagaaagtaaataatgaaatgtactgctcagaagcttttgtctgaac

SEQ ID NO: 29706 - DNA, 1365 bp, Mus musculus
actccatgaccaggggcaagataggcttctagacagctgcgtcccggaaaccaaggtggtggggactccctgtgccacctcatgccacccactggctggagggaaggagggcatgtatccgattagaatagtcaagtggattatgtatatttagttggatattggacatcttggcaacacaatcttacaaaggcagattcagctgcccccataccactgtgttccttctgtaacgccacgttctccctccagcatgccgagcacaatgtccacccacttgtgctgtgtagactgttgcatacagctgagtacagtgagcggcttctgcacatatttaactctccctatatattaactctcaagtgctgtattttaaaattcagcccgttttttaaaaaagctaaatacagtagcagccagcagccagtcactaagaaagacagtctgcctggcagctcctggtgaacctgcctttctgtgaatgtgtctgacttagaatcacactttataaattaatccaggttgtgttaatacagcagttttcctaggcccaaaaggttactctcataacataagctagccccttccggaagtcatggtggtgggtttctatcatcctgtctctgtttaaaagggactgaatagttgggttttaaaagtgcatgctataaacagacgagcatcctagagctcactgagcactgctgagctttgacacgccagccacacacagcttgctgctgtcgttctagccttgccagtgcactgtagatgctggcctgtcactctatacctctcgctttagttaaccggcatggatgtgaccggaatgccatggcctatccaagaggaaaggtgacctcagatgcacctgttttcagcctgtgcttttgttctagtaaagacatttaaaccaaatggagttgctcctttttgaagttattgtcacagaatcaggagtgccaaagactgtcttgaggactgaagtctggctgactgaggacccttgtgagcatggtcctctttacagaaactcagatacacaagtgtgcagtcctggtgggaaccctggtcaccagtacagacatactggtctgtctgctttcaaggcacttactagagatagagaggtttgggtgggctgagctcttccactctaccaggcagtgacccaggcctctctgcagaattcacttgtaaggccagagacctgcccaactgttgtgggatttacagctcacacggggacaggcacaggtgcggggcacttctgagtacatccagctgcaggagggctggccagtctgacattagtccaccttgttccaaagcccactgacagaaaacccctcagggaatgctgac

SEQ ID NO: 29707 - DNA, 1100 bp, Mus musculus
agggtattagaagccttgatggcctcctgcaagcccctgaccctgagtgggtttagagtcagagcctcagccttccagtccacttagctctagctactgagtgtgcttggtgacagcctgctgcttctccttgacctgttcctcggggcgatcagtagaggaaacaaaccagaggaagtgggtttacaccaaggcacctaagcttctgccacaggtacctattagcgtacacacagcatctgtgcgcacacaaacccctccccagtcaccagtgtgctgtccccttcactcacgcatacacacacacacacacacacacacacacagagcagctgcactggggtgaagatgaagatatttatcccttttaggttgaaggaggtactaggccccatctcagagtcaacccagctatgcctactgaactctggcctggccctcaggtaagtgggtgagcactcgttctgctgaggactgatgtcaggctgagcctagacttggcccttctggctgccttgggcccttgatttttggatgcacagctcttcctcaggcctgagagatatcaccgtctgtgcctgtcacatctatagcaaggtagagcccggtgggaagggaggcagattctatagtacatgttgggtgctccgtcctgatctggcgctagccaagcaaagacacaggtttcagtaccagactgaagggattgttggagagacctgaacagccagaccaaccgtgttcgctcctagcccagccctagtcagctcagaggctgcctttctggccgggaggtatacagggcctaagatcaccacaccagagcgtccccattgtgtcccagttctcagagccctgtggccaggctaagcatgcaagatccagctgctaccatccctgaccacacaagcggagccttgtgcaagaactaaggacagaacatgagaccagtctccacctacctgttatatgttatatttcactgaaacaggtggctcacatgtaaaacaaaattttaaagaaatacttttatgttatttagatctgtaatcacaatatccctgctggcacctcaggtcacctgccaccagcaccgtcct

SEQ ID NO: 29708 - DNA, 1142 bp, Mus musculus
acagagccttagacgcctccagagaggcgctggtccacctttgaagcatgcatctgtttttgctgccagactgagaaccttcttccctgggcttattccagtgcctgtgcttccctggcagcccagcaccaagcagggttagagaggggtctctgtgaaagatctacagatgtctggatccagaggcagggccagacactcattatcaggagcttaccagatgccatagctgtggggtgccatgttcagtgtatggaagccaaaagcaaagtacatttgcccagcacagacacttactcactggtaatcctggatctctaaaccctctctcatggatgaggaacaagtgtcctggggcctttgagagggggccaggaatgaatagattgaagagtagacctacgaccacagcaggaggggggagcatctgctgctggcttggtcctgggtttggggtaattcaagaaggtgctcaggtttgtgccccctcccaggagtgtggagtggctttgagcagccccggcttggcctttgtctttgtgttagctctagggacgtggccattctgtcttcagatgcccccacctggcatttattaaacttgattgaaaactccgaaagaggtaaagtaatggcaggcagcctgtacactctttctcccaagaggttgaagaaggtatgggcttgtgccctgcagtatgaaagagctgagaaactgagatgtctccacgctggctggaaaggctcaccagaaggaggacagaatgtagttgggatggaccaagagagtcagcgaatggcaacaagggggtacaggcacagcatgggcttagacagccatcaagagatgcatatagggtcactcgggtgaaaccacaaaaacctgtgtgtgtgtgtgggggggggtggttagagaactcattttggattgccaaagccatggggagcttgagatgaatatattcctctccaaagagcaggcatgactttcctcagattggaagccactaacacagattccagaggtgaagaacattggctcagggatgcctcaccttaaaccctgcacaaagtagatgctcctggatccaaataatccccaccattgtaggactgtcccttactgctgccccaaccaaaag

SEQ ID NO: 29709 - DNA, 1120 bp, Mus musculus
tagagcaggagcttccactgtttaagacgtcacctgtcccatccccttgcccccctccatgaagtgacgtcagaatgtcaggcaggtgactagatatcttgaagctaaccctcctcttggccctcacgtcttggacttcacctcccgaaggggtgtcagcggagtctctgtgacctctgtcaccacagtgattttcttctctccacctactacaacccaggggtacttcagccaaggcctcagatgtgcagagtctaccatggacgcctgaagaaaagcaatcgacactccacagagagatgcacatctacctttccagcccagaaatatcccaagaggcatcttattccttgcagcgaaatgggatccaagaacacggaaggaggtgggggagacagttctgagggtctcacaggaaaatatgatctagttctccaaggcccatgtgatactttaggacccctgtggaggacttgttcatggagggagagtggcaaccggtctacagaagcacgggcaatccatcgtcaaggctccacgctgtctgctagtttccgcagaagtaattgtggagagcatgtgggagccacacgcactgctggtgtgactcagtttccacttggagtttatagtctctattgccatctgtcctgagcaccagctctccttcaccacatgcttgcagcccacgggacgttcaacccatggatctcccggatccagcctctgtagaccgctctcctcctactcatctgcctgcaaggctctgcacacagtccctacatgggcccctgaaacatgccctgcagagccccatagtccacttctgctgccagcaggctcagctcacagactcaagccctgaaaatccgacctcctggattgggctctgaccagtgatgtaggaacggccaatccttggggccagagggacacattaaggaacctgcctacagaaaccaaagcagctgatgagctagagcctgttcatattatcacagggaaaggcaactccaaaggatgactctaaatcaaacctgaatccctcccccaaagacagatgcacctgcctagctgcccctatagctcctccctccccttcacaaccttgtctctgagc

SEQ ID NO: 29710 - DNA, 1197 bp, Mus musculus
cccatggtggggagcactaccagacaacccacactggagagcactaccagacaacccacactggagagcactaccagacaacccatggtggggagcactaccagacaacccatggtggggagcactaccagacaacccatggtggggagcacaaccagacaacccatggtggggagcactaccagacaacccacactggagagcactgccagacaacccatgttggggagcacaaccagacaacccatggtggggagcactaccagataacctatggtggggagcactaccagaccacccacactggagagcactaccagacaacccatggtggggagcacaaacaacccataatcagctcagagaaagactctagaacaagtctgtcttctaaccctgccatctgaccccaggttaactactcttggccccaacaagtcctccgtgacagacacatatacacatgcaataccctgctcacactcacaagccgaaccagccaggtctggacatgggaaggctctggacatgggaaggttctgatgactcaaattccttattaggccccaggttgggggtggtgggtgaagctgctggtcatccccaggggctctgggcctttagagacacaggcccaacacagtagacacagaacaggcaaggccagtttccagggagagtgtcaacatcccaaagctgcctggctgctcagctatgccctctagtggccagacctgctcaggcagtggggagggcaagggaaggaggcaaggtttcgctgggcttcatggggcagccttggaggagagaatctaagtctcggaggagggaggctcaggagtgtacagtgcctgggttttgggtgaactgtcccatgctttgtgctagcccctgccccacagtttcagtctttgtctctgagtcccagaactcaaccttggacagggtgatgattcttcaccccataccacgcctggtctcgctccccttcctgcagcccctgtccacgctgcgggtcctatggtcttctaatttgccccaagtccttggccccactgggcaagtaggctaggatctagttctgtgctcacagcctgtttcctgggttgccctggctctaccagccctttgatgaggatggctaggtctagactgaggagggggcatacggttcagttttagaaggaggaagtagag

SEQ ID NO: 29711 - DNA, 1804 bp, Mus musculus
ctcggcttctggccgtgagtcccagactgcaagccctctgtgagaacagaaccttcgtggaaggttgctggaagtaggaaaaccctgggtagggccaggtgggcttgggcctgcagtgcctcagtggctccttctagcgcaagcttgaggtcctgcagttgccctgctagagcgcgggtaaggcacatccccacactggtggtgtagctgtaccccttctgaactctccccagctctttgttcagaggttctgttgggctttcagacaggcctattagtgagctagaatgcctgaaccccacgctgttggcttctcgatttcagttgtgctaggcagaagcaatcgaggggtacctttggctgttcaggcctagggaaaagggttcagcagaaaactgttttgaagtaactcaagtttgtttgtgtgtttgttttcccagcacatgattaaataccggtacataccattcacacacgggaagaggagatacaaagggaaggaggacgtgggcaagacatttgctagttagaagctggactgattctcacacggactcaagaacggttttgagccattgtaacaatgcctttttcttcacataaagtagttgattatgaggaagttgaattttctttttaagaggagcctcaatgatttgtatctgaaatatcaggttcttgaagaaactggcatttaaaccaaattgcattgatttctttttcagtgatgttcatgtgtttgaaatggacagattgtagtgaaccgtaggcttgggaggcgaggtgggtggcaaccaccgagagggaggacgggagtgcggccctggagagctgccttcctgaccccgctgaggccactcctctgtgccagagggacaagccagcctgcttcctgctgtgaaaaagactgtaccgctttgagggtgatttcacagagctctgtggggttctcatgccagtgtctgaatctcatctcactagagatgtttctcgaattggcctcgatcataatgactcaaaactatgttcttaactaccatgattgcttttgagggcctggaattataaatatatattatattttaattgtttgagactattttgacactttcctttgatatataacatttgcttttgattaatttaaacttgttctcatgcaacaagctctttaaggaaagagaatgggccagagcacaccaagtctggggcttatcgcatggccttttactttctatggggaaaacagacctaccacgtgtcaaactttttaatgtgataaaaataatactctttaaacattttactaagtgacttttaaatcccagttttattaaagacagtgtcccttgcttgtgcagccttcgtctacacgagtcacctcactgaagccagcttgcttgccacagctattacaagggagccactgggccaattagcaccaggacagcagacaccacaggtacagagggacaggctgtccagtatcagcaggctcttcaatcccaggctgtgacctattcagaccccattagaggtgtttctcatccatcccatggtgttagattctgagtaagtcagccacctgggtggccactcggatgctccttttaaaggtcacatcttgtacacctaaccttagaacattttctaatgttctaagtaagtttgttttttaaccatgtgagcacttggggcaccaaccctgcatgtttttgtttacatttcccacactattttcctcatcgctgactagactcctgtgtgctggaaagaaagttgggtctacctggccagagcagtg

SEQ ID NO: 29712 - DNA, 1205 bp, Mus musculus
tttgtggtgcaacagagcttcatgggtatgggctcagtgaactggttccggctggctgggctgctgttgatgatgctttccttttcttccagggttggtacattgtgacctacgccttgggaatttaccacctaaaccttttcattgcgttcctttctcccaaagtggatccttccttgatggaagactcaggtacagcagggccaacgggtgctgtcagagtgcatcctcctggggacttggacctgggctcgtgggctctgtgtgtgatcaggaccctcactaaaccctgtgcagctgtgggaaggctcaggagaaaagtgaagctcttggtttaaacaacacatccagggtcacatgggaggacgtgtagggcgcaggggtcactgttgggcgtgctctcgtacggccagagcagttatagcagaggtacagcgcagaccgggaggaccctgcttgccaggagtcgggacaggctgaggcattgggtgtgccctggtttctcagtcgaaacgttcttgggtgtgggtttttgttgttgttgacacagggtttctctgtgtagctctggctgtcctagaactcactttgtagaccgggctcatctcaaactcagagatccacctatctctgcgtcctgtcatgggtttctcctaccatgtggcttccagggattaaactcagatcgcctggcttggctgcaggtgtcctgacctgctgaggcatttcattggcactttgtatttattgtgataatggatttctgtgtattccatactggccataaaaattcatccttctctcaggtgctaggattatagcacataccactaagtggcctacattttctgttacctgctttatgtaaatgttagtttatccttatttatttatttcattattattattattttctttttttgagacagggtttctctgtatagccctggctgtcctgacactcactttgtagaccaggctggccttgaactcagaaatccgcctgcctctgcttcctgagtgctgggattaaaggcgtgcaccaccaccgcccggccttgtccttatttatataactatatagtacaacaaatgaaaaatctgtatgggattgagttttttatataattattttatgtacattagtgttttgactgcatgtatgtttgtatgagtgagggtattgggttcctggaacagattta

SEQ ID NO: 29713 - DNA, 3338 bp, Mus musculus
gattgaggacctgcaagcgaagctgcagcatgcggaggccgaccgcgagcagcttcgagctgacctgctgcgggaacgtgaggcccgcgagcatctggagaaggtggtgagggagcttcaggagcagctgcggcctcggccacggcctgagcatcctggaggtgagagcaacgctgagctgggtccctagcctgggcagtgattgccactgccacgtggacccctatgcgtgcgcagagggcagcgggtatgtggctttgcaggcccggcccatgcctctgcagccacacagcacaacgtctctactgtgcctattaccaagcgagtgtttgtaaccacatacttttggaatccactgcaaaattttctactggccaagttcaagtgagcaagccatgcccccagctgcagtcagagttgagaccggctctgtggctcgtagctggttctctgcttgctagaacattctaacatttacacttttgttataagctatttaaaaccagtaaggagacttgatattcagagaatcaacatgttttttaatgactaactgtaaaaggcccctacacgtgacgccatctggacacccactctggcgggggtggcaccacccaccgccgtcctgggaagccatcaccgctcatctgtgcccgcggctacaagaggacagcaagggttttcttcagagtctattttttcagcaacaaggaccccagtcttcctgctgctgccaggaagagcagggagagcgccgcgtgcgagatgagccccaacactgcccgccttaccgccgctgccccgcccatcaccatcaccactaaccccgccctgcgggcaccaggaggcctgagcctcggtttgcccaggcccctgggtgcccctgcccacctacaccttgaggggctgacctgtgttaggcagtggccatggcccagtgtgatgttgtgttgctcacacacgccacccagccacccatgcgctgcctgaccacagcaaccccctcccgtgcggcagacgtcactcctcgcatcgtgagctgaggctgcagcattggaacaaaacagcattacatcacttttcctttaatttttttttccttttgttttgttgttgtttgttgttcatttaaacatgtatttagaactgcactttgtcagaaccttccagtcccttcttactccccggttaactgaggtttttaccaatttctagagcagttcaaaccctaagtgctcaagcgcttacacatcccctctggtgcttggttgaacaagggaatcacgagacaatgaaaatgcagagactgaacttgggggtcgttctgtgccttccagcatcttgtacagcaaaccctgacttgtctttatacccccaaaataccgtcttcagtagcgactgaatctgccactgtcaaaatacgttacttgcatttattccaaataatctcgtttactcttaactgtttatgcaaattgtataaggtttcttatgcccaagcttgaaaaatgatttcccagtagacaagaggcccccacccatcctccaattgtgtttatttacatgagaagatcatacaaaagccctccgctctagtcctagcagggcagccatgagccgaggggaggtggagaaggcttgtgcaggtacaaacgacctcaaggactgtggcctgcaactggagactgctaagccctgacgtctggtgccgaggtcgtctgcagggttttgcccttggtttactgaggggggctgagctgctgctggtccccccttctgacgtgcaatgcaaaagggacatcatgtatacgcagcatttatttggagtttttcctttggctttttttcctctctttttcagttatgaaacttgtatgcatggatttcacatctccatagctagacccgccatgggcattatgaccgtgtctcctaaagggtcggttttgttacgcaacacgaagaatgctgtctcagccttgtttttctagagttgtgtttttcagtcatttcttcaagaaaaactaaaatgatttagttggagcaaagctttaagtgtgttggtgtgcttctgtgtggctgtccctgttgctagcagatcacagtgatttggtcccattggagcctttggccccaggggcactcactttttctcatcagagtctctccttgccacagcccgggtcaccatcggttccctggcctccctccgtggtccagcactggccccagtatgctgtgtatgcagcagggactcttttccccacatgccaggatgacttggatctgggaagggcgtgtcatctcagtttgttcctcccgcacccctcctccccctgcttcctgtgggatcagagtaaggctcctgttggccagtagcttgtgatctgggacctctggggcctcgtgtctgcctcactcccgggccccagtcctgggtgaagttggcaaagcactgggtatcttgtgcggctgccgtggaaggcggccctgctcgatgcagggtctgcagtggcctgagggcagccaggcactgcatgcctgtctccttatgaggaaggctgcaaatttcagagaaagggaggtgaggtttccaccatgttggctgttgactctccctgtatgttaaacccttgaccagtttactcgtttctatcctggaagatttttaacaaagggaaaaaccaacagcaataagtcattggtgagcagctaactcgctcattgatgagcagctaactctcacacacatacacacacacacacacacacacacaccccgacaccctgcttttcatacagaactagccaatgtaaagatgactcacatgtaaatacttttttccatttcacaccgttgtattataagtgtatatggcgactccttttccagaaacttttcttacctgttggttgtcttgtttcctgggttgtttttaactgaagacaaaattgctcatttgccagaggggacagaagcatcttgtggcatttcccatgtggtggcctccatggcacccactctcccagttcctatgcaggttatcccctgtggtttctccccacatgcctaccctacctagggctgagggggaggggctcttgctttaagtcagaagtctcaaatgacatgctcatcaattaaaggaaaaaaaaaaccccacctcaaccttcataactgcccaacaactacccccacccccacccgcgccctccagtcctacgctgctgctaacgacaatacgacggcttactctgctactcgagaactatttttatgtaattaatgtatgctttcttgtttataaatgcctgatttaaaaaaaaaaaagaggaaa

SEQ ID NO: 29714 - DNA, 1242 bp, Mus musculus
atgtcctttttgttcctttcctgtgtttccgtttagtgctcctctgttgacctgctcagtgatgagggcttcctctttcgtgtgcgcatcttgagtctgtcctgtactctaggcatggcgaggccttgcgtttcctctgagactggtgtgacagaaatttccaagtgaacatttaaaaaattctcacaacctctgagtgagtaaatgcctcctactggaaggtgttgctgatttgacggccgtagcaggtcgtgctttacgggagtagagggggaggctggagagacagacagacagaccgggggttaggaatgcgtgccgctctatggactgggtcactgtgggcctgctagtgttgtgggtgtggagcaagcactgtgagcagagggtgctgcatccccatgatgtcctgttgttaccgtggagcgatctctggactaaaggacaccgtctgacattctgggctgtgatgcatgttaaggatcttaggagatcccagcatgttgagttgctttgcagctttactccccgccccccataacccccagtgcagcttccagacagccaggatatgatacgttattgggacagttaataacaggatgtagaattttaagaagggactattttgaaagtccagtatcttccttgttcaaagtagtatactatgaatagtttccatctgttttaccctctagatgagagaaactcacaaggtagacgacagttgcactgattttatgaagggcccccagcaagtgacagaggatgaggttgtcacaagatatgcagctgtccccagaaaccgcacacccctgatagtagtcctgaccctgtatgcctttctgctcagtagtcattacatacatttggaaaccatggtggctacgtatgtaaatgacagttctggacctttattgtgagatttagaaatctgagaatgatgggaaaaatttttccaatgaaaatttcttttaatagaacctttgggtgaataagtgcttctaatttgaagaaattactggtttgaagtctattgtgaatttgaccttatgggggaaaaggagggctggagacatggcatagaggttaaaatgcttgctgctttcacagaggacccaggtttggttcccaacaataagacattagacacttctggcttctttgggcacgtgtgcatactcacatacagatatatacataattaaaaattaatactttaaaaacaagggtttttttttg

SEQ ID NO: 29715 - DNA, 1124 bp, Mus musculus
caagcatggggtccagtaacatctgcaaaaccgggcgatgccagcggtggggctggtgatcaggaaggggggtcaccgagggccattcgacattcagctcgagcagagatgaaatagatttcttttcccaatctgtttgcagaaaattccaggcagccccagtccctttcagggtgaagcaggggtaggtacatctgtgctgtatcggctgaggtggggtggtaggaaggcccgccccgcccgtggtgtgtcgctggggatggacctcagtattcacatgctacattcattgtagaggctttttcagagtgagaggagggtaggtggctttaggatttgtcaaggcctgagggtcgtgatgaacacaggtgagttgtgaggcgtttggaggcagcaagagctttaggagcggcagccctagtgccagggtggtcatgttctaatgaggtgctgattactcggttctacttttaaactgcctttggggcccagggctcgtggttgactgtcagggaacactagagcattcagaagtgaagggttgatttgtggtcttcctgcttccagaatgttctagaacactgtgtacagtgttaatgagcttgttctccaagcacacacacacatcctaagtagcctgcaagaccttccagaggcacagtttggtgccattgcctagttgagtctggggccttctgcggtggtgggggctggggctctttgaggctctaagtcaggttctgtcaccttgggctgttagggacccttgggctacttggaccccagttgaaggccatgcagctgggtcactccatgcttctgtagtctacagtgaatgcctctcactcttaggatgtgtattgcaagaagaaggtagagacgtgtagttgacataacaaaagtgatattttcctatgcaaggcggcggggggtggggtggtggtggtggtggtggtcatcacacacagttttgacagtctaaaacccctctctccatgctgctcatctgtgtctgtgtgacatactttagctaatggctgggcccagtctctcacagaaggtagttcaagggtcaggatcctagaggagcttctagctgcagggcagatcaagatagtatcttg

SEQ ID NO: 29716 - DNA, 1145 bp, Mus musculus
atttactcgtagtcactcactggcatttaaacagacgggattcagctggaagcacgtttcagtactgtctgcctatcagtcactctgctgactttggtctttttcagacaatggaccattttcctcattaaatattagaatctcctgcttcttagatgctagtattttgaaatttacctatttgcatgaagaatatctctttcttctatacatcattttgggatgcagttccttgaaggtattggggtctttctggtttgggtttcaaaaattttattttaggtggatctgagtgtgggtttagtagtgctcctcccattaccacggagaccctccagaggaacaagaccttgtgaacttgagcagtttcctgttttctgggtagggatggacaacttttggacactgtaagccctgggcctattgaccattcctgacctccatgatgcctttacacacttagctgggttttgttgaattcaagaggacactgcaggcctgggaccccggtggctcagtgtcccatggtgccgcagatctctgggaccttcagctccagcgtgcctggtgtcctctgagccttgccagttgaatttcgtgttctagtttgtccgtccccgctgctgcccggtcgtcctgcagaccgttgaggtgagagggtgacaggccttagccctgtgctagccgccgccgccgccattcatcccagtgttgccacatccacctgtgcctttcggctctctaatcagcattctgacatcatgttgcttgacatcacgcctggtttggacatctgcagccaccaggcctctctctctgggctcatccttacaatgttttgagaaagttgccctgttactcaaggactgaagactacaaaacccagaaataaccttagagtttggagagagaggcccttggggacgttgacttgatgtggcaaaggtaggcaggccgtgctctgcggcagcaggttttggggggtgggggagcctggattgtgctgactggcacatccattctgcgtggatgttttccttttgcaataattttggctgcatcaaattcgttttgttaacatcttcattactgccttttcagtcttagtggggatgattatgaacaaagtgccgtgattttgacta

SEQ ID NO: 29717 - DNA, 1099 bp, Mus musculus
ccatcagaataaactgatccagactcagaagggacaaccccagaaccagctgcccgctagaggcttcacagggccaccggtactcagttctgcatccaagcattcagcaagccacagtatatgtatggaagtcagaggacagcttgggagttggttttctccttttaccccatagtgaactcaggtcattgaacatcagggtaaccctcccagccatcctgctggctcagggctttaaagtaattttcgtgaaggttatggttagctggtctgtagcaggattgtccccctacccctgaaatatctttggttttgatttattggtgagaagtgtcctttcttcataaatgtcaagaagtaatttttgtttcttctgagtatttggtgaaagtgagcaggaagctgtgtcagcctggtgtgcgttaggctggtttacagcttccgcagcctgtaggttgtctgctctcacgagagcgttaagtatagtagatgggactttgccacacctggacctgacacacacgtgcacacgcacgcgttgttttttgagatagtctctctgacctggagctcacagagtagactaggccacctgtccaggagtcagtcctaggtctgcacctgtccgcacctcacccaactggttctgggtcttcatgtttgtgtggtgagcactgttgtctagagggctgtgctctcagcctgattcccttctgactactatggagtggatacagccttccactcttgcgcctgtcttgccagcctgtcctaaattctattgccatcaaggttctcaaagatctttgctttcgttgactgtctttaacttttcctgcttctttggttcacatttttaactttgttatcatttctttgactgcctttgggttgaatttttgacccttttttattttttaagttgaactctgagttgtgttgttttcccaatgcagcatttggagcgctgtctcctcagtcttgttttggggcactacacaagagctcttctggttgcctctttcatgtgtgggctacttaagagcgtgtggtttagtttccagatatttgagatttccagtgatacctgttgctaatt

SEQ ID NO: 29718 - DNA, 1206 bp, Mus musculus
gaaaccctgtcttgaagaacaaaaacaaaaaacaaactaactaaccaaacaaccaaccaaacaaaaaacaacccaaaaaaactttattttcttctatcatgtggggaccagggactgatctcaggtcatttgtttggaaggaagtgcttaacatcctgagccatcttgctggccccagagaggcatgggccaggatgcgtaagccaacagacgctgtggaagcttctcaaacactggtcagggaaggagtctatggggctaagaaatctctgacctagagaagggtcctcaggtaatgggggctggggggtgactaactcagtctaagttatggtgacccctgtttactgtgccctccagctgactggccatgggagagcccagaactcttctcggggcttcagaacttggtggaggcccttcctgtgcctggtgacagtttcttctcccctgtaggctgacccagctagatgtggatagccaccttgctcagtgcttggctgagtgcaccgaagatgtggtgtggtgagcatcagggtgccttgctgtatctccttcaaacctacacaccgacattggatgtggcttctgagacatcgtcgtgtggacacctgagtattggctccttctggttttgttcatgggcattggacataatgctggtcactgacagcaggcagcactgatcctctgtggactcatcttcattgtcagcctgacaggatgtggaatcacccaggagacacatctcaggtgtgcctgtgaaaccgttcccagagattacctgggacaggaagtcccagctgaatgtgggtggcaccgtggcctggggtcccactgattgaaaagggaaaatggagaaattgagctgtttcctcactggggatgtgatgagatgcaccgctcgcctgctacggcagccatagctacttttgctactgtgccctccttgccacagggactgtaccttaactgtgagccagaataaattttaagttgctttccagtattttgtttccttcatagcaagaaggggccgggggggggggggttcacccaggaaggggcaccaggatctgtcacaaggtagaactgcagcatctgtagcttggcagcaccttttcttgaccgcaagagtgatatactgggtcacattccacagacatttttaaaaaaagagataattgtgggcagttgtatgtgtct

SEQ ID NO: 29719 - DNA, 1195 bp, Mus musculus
cctcctccaccagtcattctctggaccacttgcacagctgacccctgaactctgccagatcagatggcccaggatgcagcaacaatagactgttgtccccagcaaaaacctgatgtctgttcaaggtgtgctgaggactggccctacctactggtcctggacacggtgagagaagattcagtcttctgtccccagaactgcgagacagttcatttgtgttatcggcctgtggctacttgttagtagctgagctgcagaaaactaagacaacagacaccattgtgcaggacatttgtgaggacttcagacaggggaacctcctctcctctcccactgaggtgcaatgcgctggattctttgggaatggttccatctggagacacatcaatcaaactcacaagactccttggaggtcaacagcccttatgattagtttttgggcctgattttcagcactgtctgctctctggctaccggagaaagtctttttaaatatatcctggacaagtttctgaccttcatgcatccctgaggccatagttggctatagtatcagccttagggaaggctccaaaggttgtctggcatcaatcaccctgtgttctactagtagagatctaggttgtccttgcactaatgagcagcacaatttcttactggcttggagctcttttaaggaccaaacatgggctggagagacggcttagaggttaagagtgctggctgcttttccagaggtcctgagttcaattcccagtaaccacatggtggctcacagccatttatagtgatatctggcacccttttctggccttcgggcatatatgtagacagaacactgtatacataataaataaatcttaaaacaaacaaaacaaaattaaaaacaaaagaaaacaaacaaaggaccaaacatataagctcaagagactatagaaggaacagggttacacagagggctttaatgccaatgtgtgccacaagtgtgttcgccaaatgccattccggtctgcagaggtttgctcctgtggtatcaactcccttgctctaaggaagagatactcataggccagaaatgaggtttctggataaaacactgcccacacattgcttagggcctgtaccccagctgatcataactgtaaggatgagggatagggtacccgaacatgctaagaaaatcagcattttcagt

SEQ ID NO: 29720 - DNA, 1195 bp, Mus musculus
atcctgtggcctacaaggaggttgggcagccaagtgtgaccatgatggccaagacactgtcatatctcagaggctcattcactcattcaacaaagaatagtgttaagttccagctgtgttcagagagttaagaggcaaatagcatctctccaggtggcaaaacagacaatatagcacaaagaagaaatgtcagtctaggagctggctcagttggtgaaatacttgctacccaagagtgagaacctgcatctgaccccagcccccatgtgcagagcatgccaataatcccaacacagaagaagtagagacaagagggtccagaggtctgactggctgataagactagcaaaatctgtgagtttcagactcggtaacagaggctgtctcaaaagaataaggcggagaatgatccagtaagatatctgatgttggtgtctcagcacatgcaggtacacacgtgacagtgcatatgcatacacacacacatggacacacatggacccgtgcacacgcaagcgctcaaaggaaagaacagaaatgctagtatagaatgctgcgatcggggaagagacaaggctgcgtccatgaagctcgtgaagtggaagttgtagcgttggtcactggtggaaatggctgatttgtagagtgtttatatctgttgccttatttgtttagagacagactctaactctgaagtctatcctatccccaaattcacagtcctctgtctcacaaaccctagactcacaagactgagccaccacacctggctctctgtggggttaaaaaccccatctgattctgtggatcagcagctcagtgtccacagacgatgagtcgatgagttatggacaatgtgcccaccagcactacacacatgcaggcgcacttcatccatgtcccgtgctctcaggcctttcagctttccctgcaaacatactgctgagaggagaactctgctcaccctgcataaaggcctgcatctggcggtatgattgggcctcaacaacagtagacggcacactaagagctgtatgctaggaaagaagaggaacagagcgaagactcagagtaattctgagggagtgtgccaggcctcgggagtgtttcagggagtgtgccagtccttcctgaactcaaggcctgacaagtaggactttggcttctagtttcctaagagaaagtgagaggccaa

SEQ ID NO: 29721 - DNA, 1100 bp, Mus musculus
tggtccctgtaggcatgcatatgggacatagacatacatataggcaaaacacccacatacataaaatataatgagattttgtttttgtttttcaagcagagtttctttgtatagccctccctgtctgtcctagaactagttctgcagaccaggttggccttgaactcaagagatctgcttctgcctcctgagtgctggaattaagggcatgcgccaccaccacccaaccataaaacaaataaatataaatatacatatttatttacttattttaaccatgccgagattctggctgcgtcttttttttttaaagcactgagcactatctctctctttctttcattcgttcgttcgttctttttctttctttattttggggggggggggttcgaggcagggtttctctgtatagccctggctgtcctggaactcactctgtagaccaccactgcctggctgagcactatttcttactctgtttatttgttttactgcatgtgagtatactgttgctgacttcagacacaccagaggatggcattgagtcccattacagatgtgtgtgagccaccaaccatgtggctgctgggaataggattcagagcctctggaagagcagtctgtgctctttgccactgagccatctctccagccccataaaatatttttttcccctctgggcattggtggcgcatgcctttgtttaatcccagcacttgggaggcagaggcaggcagatttctgagttcaaggccagtctggtctacagagtgagttccaggacagccagggctgtacagagaaaccctgtctcgaaaaacaaaaaacaaaaaaatagttttcaaacaaaaattgggatttttgtttctgctatcattgacacagtatccggtattttaatggatggtgtgtgagtgcacgcacgtgcattttacagggatgaaaccccaggcctcatgtatgctaggcaaataagtgttgttccactaaggcacacatccttagaccggaggataatgtactttgcttatgagattagaggatagtacaagtgaaatggttttgttaattataaaatgacctgtacatgatgccatgat

SEQ ID NO: 29722 - DNA, 1184 bp, Mus musculus
ggtttcacagattcagctctttaaatggacatgatacttagctttgaatcctctccattcttgggctggtgagcaggaagccggccttttcactatagctcactctgccccatagcaggtacttcagtcagtgtgcgggagggaaggaaattgtttgtagaggagaattttaaaaataaggcattgctgaatttttaaaaagaagcattacctttctcaggactcagccctgacaattagctccattaacacacaaatacctgtctccactgcaaaagggtagaaaaacttcccatgctatttggtgaaaattgagttgtgcccagaaacgatatctttgtttctaagcacaagttgtacttacagttccttccctttggagagggcatgctgccactttcatctgacttcaggtgagtttccagaggatcatacctagaacagtgtttaagagtttcgaagaagccaggtgtggtggcgcacgcctttaatcccagcactcgggaggcagaggcaggcggatttcagagttcgcggccagcctggtctacaaagtgagttccaggatagccagggctatcagagaaaccctgtctcggaaaaaaaaaagagttacgttgttgctgataggtacatatgccatgtacataaaactttctttcacccacttttcgagtcatgctgatacctggccatggccttcatgtagtgtgagaaagtggagagaaagagtgggcagcaagccaggatgttaaactgttttggggtgtggggtggtgtagtaaaataaacgggaagtttgacaagagaattaaaagacaattcctgaatattagtttttttcacttctgaaacatggatatataagccccaagatccgccatttagatgtttaaacaaatttggataagtaccgaggttgcatcattatgaaactaaccagaagtggctgtgcgctccagttgtaccggaacaaaaagatgctggcacagcaagcttcatgtcctttagaactttattataaagttggagatgttttttagatacattggtatatttgcattatagacttaatgaatgtatgtaatgccaaacaatgctaaaatactgactttttaaaaaaaatattagtaagttaggagtgttggtgggtagttcaaggtaatcctaaactacctagtgag

SEQ ID NO: 29723 - DNA, 1186 bp, Mus musculus
ggcatcggatctcattacggatggctgtgagccaccatgtggttgctgggatttgaactcaggaccttcggaagagcagtcagcgttcttaaccactaagcaatctctccagaccctgttcttgatttctgagagactcagaatctttccatgagaaggacctgtgctgttttaatattgattgattgattgattgattgattggagattgggtctctgtggtacagattggcattgaaattaagatcttccttcttggccacctaagtagtggaatgcaccacctctattggcattaattttctttttcagtccaccacaatattttcagcagtatattagtacagttaataaaagtgaagattgtgtttttaatccagttctagatagagtttcaaaagttctgatgagtgctgcagaaaaggtctctgcattgtgtgattgtagctgtgacgttttcagttaatcataccgtatcttatgcatttcttgccatgtttctgttgcagagcttggattctgaagtgtggaaagcactgagacgtgaagatgagtgaacttgaccagctgcggcaggaggccgagcaactgaagaaccaaattagagtatgtagtcatgcgggtttgatatgtttcatatcagaaacatatctattgtgtgtggataacagagtgagatgaaattgatctattatatgctagttatatatctgaataacttatgttgtttcagaaattttgttttcttattagctacaagttgttgcttgaatgtacatggcccatgtctgtaatacttaccaaagcttttgaacgtcttcctcccagggaactaggttttggaccctctgtgtggccactgtggccgctgtgtcagttctgaagcagctctgaagagcacggctactaaactgagagcagaaatagatactttaaatgaagggatccgtaaagtggcattttagatgtctctgtcttatttttcatagtttcgcaatggtttgtgctccaggaagaccattggaatgtatgtaacagctcttaggccaccatagagagcagacttgtctacctgggtacaaaactaaatggaagataattccatgtattctgagttgttctttctgtgctggggactagtgttagaaatggagctaagagcccacacatcccaggcaaatgtgag

SEQ ID NO: 29724 - DNA, 1098 bp, Mus musculus
gttaatagtgctacttaagggagcaatgtgcagccgggcagtggtggcgcactcctttaatcccagcacttgggaggcagaggcaggcggatttctgagttcgaggccagcctggtctatagagtgagttccaggacagccagggctatacagagaaaccctgtcttgtgggggaaaaagggggggggaagcaatgtgcaatttaaagtttatgaattggctgctggagagatggctcagcagtttagagcacttgctgctcttctagaggactgggattctgtttccagcactctgtagtggttcacaactgtctataaatcttctggtctcctagggcttctgcatgccaaaaatattctctcacataaatataggattttccatttaatatatttttggttcttggttgatattatattacagagcccacagaacgcaaaccaagagtctatttgctaaaattaatcttcactaattttattttttaagatcacaaacaatattgatccagtgggaagaatccaaatgcggaccaggagaacactgagggggcatctggcaaagatttatgccatgcactggggcacagactcaaggtatgaatggggccttcctaaagcagtacttgaaatgttgcctatctgctggatttctaaaaggtaatggttagaaagttgaattggtgtgggtgtgatagcacactttgaatctctgtactcaggagacagaagcagacaaatctttgtgagtttaaaggccagcctgatttacatattgagttccaggctagccaaggctacaatgaaatccatctcaaaaccagtaggatggggtggggtaggaagtttgtggtaccagttatctgtatccaggtctcatgttcacaggtcatactcagatttccgtttagctggctgactgcactgctgtcccttgcatagcagcacctgcttttcttcaccctataccttttagctgttgggtctctgttgtcttggctactctgtgggctgtgttttaagagttgggcaatggaaggtaaaaggtactgagtttacaacagcagactgtggtcccaaaaactaaatgtagact

SEQ ID NO: 29725 - DNA, 1194 bp, Mus musculus
cttcatgtggggttttcagccagctcagcctcaatgctcactgtctgcatgacattttttcttgttgattgtttttctaataagttgtctcatacacagcatagagttaagtcttcacttctgtttaaagtctctgcctttaggagctgggaacgtagctcctttaggagctgggaaaatagagtgcttacctaccatgaatgaagctctaggtttgatcttcagcccagcataaaaccagatctggtgatgtagccctgtagttcaagcacttagatagatggaagctgggagttgaaggtaatcctttactgtgtagtgagtttgaaactgcctgaagtacacgagaggtagcttttaaaataaatggttggggcaagtcctgtaccttgtaaatactttacatatagtttcttcttgacttataatgaggttatatccagaaatatcaatcaatcaatcaatcaatcaatcaatcagtctctctgtctatctatctgtctgtctgtctatctatctatctatctatctatctatctatctatctatctatctatctatctatctagggtttctctatatagccctggctatcctagaactcactctgtaaaccaggctggccttgaactcagaaatctgcctcccaagtgctgggtatccagaaatctctttaatgtttaaaatattagccactgaattatgttgactctgtctagcctgccatcccacatcttcctcatcttatattgaccaggctggcctgaaatctgcctgcctctgcttcctgggtgctcagattgaagtgtgtgctgcttcgatgggtgtataaactctttgtagcctaggacatttgaggctgctgtgttacattcttacagtcctgacagagagcttcagttcattgctgataaccagtaccctgggcagattatacataccacttattgataggttgaaagaattgcatttaaaatttgaagttcatttgcactaaaaaaatcctaagtgttgctttggatgtggttggagttggtacttagggtggttctctctccctctgctttcttttctgctgtctttctttctttctttctttctttctttctttctttctttctttctttctttctttctttctctctctctttctttctttctttctttcctcctttccctccctccctccctccc

SEQ ID NO: 29726 - DNA, 2315 bp, Mus musculus
ctgttcacagcagcaggtggatggatgccatggcgactggaagaccattccaaccttgaatcgttacagcgatagcatatcctatccaaccatactaacgtggacacccacacctcccctcagaacttcaaaagggcaagatcttttttccttcacttattgctgaaaccaagagcacaattcccattaagagaaggatctctgtgctgtaaactaaacaaattgtgcattttttctggggccattgtttttggtttattttgttattttgttttgtttttgtttttttggtttcattttgttttgggttggtccaattttaaaaggaaatactacaataaaaatgttaaccagaaggtaaccctgagtgtgattgtgagagagacacgcctttttactagttcatttgcatttaaatcagtgatcctgttctgtggcattcatgaaaaacaagttgaagaatttgtttatctggaattgtttctaaatataagtcatttgtagcaagactttggaagcattctttcttaaacatattcctttatgttcagtagttaagagaaccagggcccacggcggtctctgacttgtcactgatgttttttttttttttgtccctggcttgcttttttttttttttttttttttttttttgtctcatgtcacagatgactgtttcgcacaaacacagcatagtggaagaaaaaatttcagaagcaaagtagccaagcacatgttaggatggccacgaatgcttggtcagagtccttccttcccttgctcagcagcggacttactcccagcgccttccctccctcctgtccctcctgtcccctcactgtccactttctgttctttccttgggtttcctgtgaagttggagggacgtttgtagtcatgtgacactagccgtcctgcccctgctgtcagagatttttttctccagagaggtgcctgtcctgtgcttggatagtcagttggttatttgtgtatgaaacaatgtacaaatcaatgttttgaaaataatgatctcagactttctaagttaaattttaaacaatttgattgtttgccatattgggtggggttactcttagaatcgcatgctgtagaaatgctctaaagtgcatataggactcagtccttagatgttctttttattttaagaaataacctcttcaagttgtaaccgtggcggctttgtccattactgttgctattctgcacacatatcggaagcagcaagcgctttacacacttgagtagtgggataagtcactgttttctttacaaaacaaaacagtcctgttgggaatgattgctgttggattctggaagggaggggaaagctgctctgctgcctctttgccacttcctggaagccttcctccctggaagaacagccttttgcatctgaggcgaccatttttacaccatgcagatcttcgtggttatcatctcaaagccatgttcagcagcagcgtttggacagcagtgttctgtgggccctcccctcccccatatcctgcaccccctcatagcagtagtggcttcgccattctgttttctgcagtgtcctgtacaaaactgtgctgtgactgtgcggtaggcctggacatggcaaagagaatacagcgaagccccttctcttcctaccaaacaactctgtagagctctctgcaccctgtacccttttcaccttttgtatttaattttaaagtcagtgtactgcaaggaggctggatgcaagatagatactatattaaactgtactgttatttaagatgtaataaagcagtttgacatgagggactctggtgtgatggttatttgagggtcatcttcagtgtgtgggggtttgccccaactgctgactcaacagttatataacgtcatgagagacccttataaaagtgtcagctcgggctgaatgtagtagtacacacctttaatcacaacactcaggaggcagggccagatggatctctgaggttagggccagcctggtctactttgcaaattttaggactgccaagcaatatagacactgtctcaagggacgtggggagatgggctcctgggaggtttctggtatatatctcaggtctgcagagccacatgtttatcacgacaagtggcctttcaccctcagcacctgggccctgtctgccgtctcctgctggaccagccagctgcttcgacttcctcttcctgcactaaaatgtctgaggacctgcccctccagagatactttcctgttgactaagcaccatttccttctctgtcgataaaggtcactgcatcttgaaggagcg

SEQ ID NO: 29727 - DNA, 1775 bp, Mus musculus
gagagcttgggtctgccttttgcagaacagatcagctttttaatgtttttaaaacctctttttcatttctaaaaaagcaaaatgagaactgggctgggtgtcctacatctctcccatgggcccccgtatccccctgagattcccaggtcaggaattcccataaatcagtctgttgaaattctgagggggtcagaatgaattgatcttccttttgatactgaaataaatgtctcagccagaaatcttcttttaactgcagtgcttttccacagggcctgtacctttccccctggcagctttgctatgggtgggcaaggcaagcttgctttttgtgtttctggagatggctaggtccctctcagtctggcccccagacctctgactccttccagagcagacagaggcaacacttggcacagccatccaacaacctcacattcctcacacaacagggcagcagcccctggggacagtttcaatcctgtatacactttttagaggttattttaaactttctgaagtgattatgtacatattttcttgtacacactttgtgaagatttagaggggactgcctgttgtccagtgtttacattgtgtccaggacagggctctgtgcttccactcctcccttacacagtggccacaagggttttgagaccagctcactattgacatcaggctcgtgggcccgctctccttccataagaatcttaggtttgattccatctgaacagcagccatatggagcctgtgtgcgagatgcatggagccatgtaatgcaagtaacattagcacgtgagtgccacacaggccgtgagtgccacacacgccctagagcctttgtggagtcagtggtcagccacgtcgtctcagctcgctagctactttcagttttgtcctcacctcttgcagcaggagtcggaaggaaggactgcctgtcctttgactggcttttgtctcctgcttctaggaaaggtttgtcagtcagctgctgtagaaccaaacccactgagctttcctacctgttaaagtcaggacctactgagcacccatggagccctaagtggtctgggttcagtgctgttatcatggtgactcgtccccacggtctgtgctgttcatctgtgactgagcacagcaggcctctgctatgatccagaggagagcagggtctgaagtgtgtgccacgcatctcaaaagcaagtgttgacaaatctagaagcagctgccaccagactgatctagaacacatggagttttcacgtaaattcttaatgtttcatattgttaatatcttaaaattttgttaattgttaatgaaggccttattactattttcagattctttcaataaataaacttgtttaaaaaaaattgagttaagtaacagctttcttctggctcaactccagggtatctccagaggtcaccttatctacaagagatactgttaccctgattgatagcaccatggccctggcgtgggcacctggctcactcttaacgaaatatagtatggtatcgtaagagtcgggggcacagtcacctctgcaaagaggtcacatgtagtgcccaaagctggtatagactggtgactaccaaggccaaagactctgagaggcttggcagcctctcaggggagtgtcctcaagtcagtctgtactgtcatcaggaagatcctgagaccaaagtggaagtcccaagagtcccattgctgcaagggggtgaggaaagccatttgtccctcacccttcattcattcaactaggtca

SEQ ID NO: 29728 - DNA, 1926 bp, Mus musculus
ctgcctgagccaccaggtctccagagcttaaggtggagtggaggacaacagtgggccttgggttaacacgctgaggttctacattattcggcattttgtgagttgtgtgtggggtgcagtctgttgctagccagtctctaagactccattacttacaagctgcagccactggcactccttgtccaggtctcactggtcctccctgctctaagtctttcgtgcacatggtggttcaaaaagataatggggtgaaaaagagcaataattatgtctacattttatttacttgaaaaagccatctgccatgatgatggatcaaaatgaggccttttaatccataagccaacttttaaaagaagctgatgtgtgctggacatcagctaggtgtatctttactatgctatgtaaagatattgtgaagatgttctctcatttgactttgcccaggtttctagttccttcctctttgctcttctcaaaataaagatccagtggaggacagatggcagacgttggattaatctgtgtagacctgtctgctcaagatctggctgtggagctgctgacaccgaagagcacgtgcttgtgggtattggttggcagagctcttctggccttcccgcagacctgtctaagtatgctcagagctctacatgcctggcttcttactattatttggaatttctgcctgtgtcctatgtttaattaggaaatgacctattgtgacttgctctggccatccctcccccatgtcacaagactcagcttgttttgattttcttaaggtttgggctagaaacaaaaacaaagatttttcttaaagcaattttctctaaagctgctttgagacttttcctcataggtggaaagatcatggaatcagctgcttccttcaggtcttccaggacagggctgggttgagaatcgtggaacggccctgcttgaccatttgttatgactataccataacaatacatttttaattgactttgttagtactttcatagaatactatgttcttcatgaattgttactgatgtaaatgtacaaatattgacaccacgtgtcattccttgtcctggataattcctcctgagtttatgtcattgtctggtctgttgtaaacagaacactggattgaccttctgagccagctagctgcttactcactgcacgcatagttaaaagatatacacatttctaatttcaaaaatagttctaggagctacagagatggccgagtggttatgtttcttgctgaggacccaagttcagttcccagaactcatgtagagtgtttcaccaacttcctataacttcagcattagggattctaatgcctctggcttctctgggcatctgcacactggcttgtgtatgaacacacacacatatacacacacacatatatcttaaaaataagtacatttgctaggggaggtggtgcaagcctttaatcccagcacttgggaatcagaggcatgtggatctctgagtttgagggcagtctggactacagaacaagttccaggacagccagggcaacacagagaaaagcctgtcttgaaaaaccagataaatagataaataaaatttaaaaacgtccatgatttggggtataccttagtggcacatcactggcatgtattgtgaagctcttgggttgatcaccagcagcagatgtgggacagaaagataaaggggagacaacaaaaataaccccaaaacttctaatactaaaagacaaggaaacgtttttgttttttgggtttttttgttttttttttgtttggttggttttttttttttttttttggtttttcaagacagggtttctctgtatagtcctggctgtcctggaactcactttgtagaccaggctggcctcgaactcagaaatccgcctgtctctgcctcccaagtgct

SEQ ID NO: 29729 - DNA, 1433 bp, Mus musculus
gtctcaagaaaagtaaaaatgatgagtcagaggagattaaagagaattaaagctgttcaagggattcggccaagtaaactttactttgtgccttaaaaacagcacaaaacaagtggctttgtgatcctgctctcagatgatcactttgctcagtgataataacagatgctcagcacagcctcctgtcacatctgtccaagtgatgtcttctttttttttttgttgtttttttttgttttttttttttgtttttggagacagggtttctctgtgtagccatggctgtcctggaactcactttgtagaccaggctggcctcgaactcagaaatccacctgcctctgtctcccgagtgctaggattaaaggcgtgcgccaccaccgcccagcaagtgatgtcttcttaacattggaaaggggtaaagaaagatgttagtacagatgggaaacaatgccggctcctcctgagattgcatttacctatgtaacccatagtgtccttgaactctagattcttctaagtcatcgttctcaggactgagattacaagtacgtgtcaccacttctgactcctgcctttgaacatcaatcttttgttttttcttaacacgtaaatattgatctccctgtgaggcggcctcttcatctcttcattctcccacccttcgtttattatgctaggcatagtactcagggcttcaggaatgctaggctgctattctttctctgagacatggcctccagcctgtttttcttagtttatcaatgcctttgctctccccatgaattagaacaggacatgctgattgtggacaaatagtatccaccacaattagagtgtagtaggttttaacttcagtgtctctgaagtacgttttcctgggtactctgatcctgactttgccagctgctggacccttcctaatatgtccaagtttagtttgaattaaatcaagttggctagttgtgtgtttgtggggtttttgtttgtttttacttttcatttctgggactcaagctgcatactaaattcatttgtaatgtctggacttaataataatgtaattgtgagtatgttcgttcaatgttcgttcaatgttggcactttggaaaaggccacagtttagggtggacaattgtctgcatcaaagccaagtcatatttgctttataccaaacaatactagagaattaaaacacatcataaaatgtacactgttttgtatttcacctctttcagtatttaaataattatattaatgcctcctagaaaagaattctgttagataattcagtgattcctgaaataaattggtattgtgtaattaatcctgcagtagcctcctcattctttttatccaagctgccaatggttcttgtatgaatatgaaaacatgtaactattttgttcgtttggtttccttttttttgatac

SEQ ID NO: 29730 - DNA, 2237 bp, Mus musculus
gtttggggtgggcaggttgcttcctgaggcctagcctgccaccctccccccaggcaagccagcagagctgcagcgcagggtgagtgctgatggccagcccttccagcgtggggacaaggtcaagtgtctgctggacacagatgtcctaagggatatgcaagaaggccatggtggctggaaccctaggatggcagaggtgagccacctcttctgctgactccccatgtgttccccttcccaagtcctttggaccccatccctcttcctgccccaagcgtccagcctgacccagccatagcctccgtgacccgccacagtttatcggacagatgggcaccgtgcaccgcatcacagaccgtggggacgtgcgtgtgcagttcaaccacgagacccgctggaccttccaccctggggctctcaccaaggtgcctagggggctgggctgagccccacttattgcttctctgattccctccatgtacttgttcagtcttgggagtggttaggcatgaataggcaccagtctccccatgagtttgcacacctgaaggaaggggagaacctggtgggtggaggaaagaccagaaggcaacgcaggtgtgaaggacacggaggagactgaaacgtaggcatctgagaccagaacctgtggactctgtcctgagaacaagggcgtatggtagaccagatgtggggttgcttgccatactctcttgagatgctgtttgcaccaacgagacagatggaatctctgtaaggagactgaagtgggggctcgcatgccaaaggcagtgaaggctaggctgagtatggtctgtggaagctgtgtggaacactggactgtggagatgagacatgtgccagatagatgggcacgtccaatgggaacctagaggaggatactttagagcaggttctctgtgcacagatgtgtgcatagatccctgcaggaaccccacaacccaaccagccctaccctccttcccagcctctcacccggctccacccgtaacttctttcctgtatctatactgcattttctgtgctgccctgtgtctggtcagtggatagggagccttgcaacagctcttcttgacctcacgcgtcccagatcccagagctggatctcggtctctgcttctgagactgtgatcccctacggctcagagtgaccacccaggcctgtttcggtcaactgaggccctcgaccggcagccagaccattgggttgtacttgaggcaggaactggggccaaggttgtcttcttgccctgtggagcaggatgtgcccttccacatgaccctgagtagacacagatagctggagaaagtccccttattggcttctctgtcatccagcacaacagcttctgggtgggtgatgtggtccgggtcatcggtgaccttgacactgtgaagcgacttcaggccggacatggtgaatggaccgacgacatggctcccgtgagtcttaatgtctgttgtcagcacgttgaccctgcccccaccgctgtctacgccacccctgacctgttgtgaccccacctcttctcctcaggccctgggccgagtggggaaagtggtgaaggtgtttggagatggaaacttgcgtgtggcggttggcggtcagcggtggaccttcagcccctcttgcctagtggcctaccggcctgaggaagacgccaacctggatgtggctgagcgtgccagagagaacaaaagtgcggcatcagtctcagtggctggtgggaggcagggcagcccctggccagcacttacctcaaccctgcccccaggctcactgagtgtggccctggacaagcttcggacccagaagagtgacccagagcacccggggaggctggtagtagaggccgcactaggaaatgtagcccgggctctagatcttctgcggaggcatccagagcaggcaagttaccaccctgcccttgtggtagccaccaaggagagtgcccagagttcatgtgttggctttcttcacaggtggacaccaagaaccagggtagaactgccctgcaggtggctgcttacctgggccaggtagagctggtgcggctgctgctgcaggcaagagcaagtatggacctgccggatgatgagggcaacactgtgctgcactacacagccatggggtgaggcctgggcaggctggcgggtcctgtggggaatgaactttagagccggtgtgcaaatggactgtccccaaaccttcccgc

SEQ ID NO: 29731 - DNA, 1466 bp, Mus musculus
agaggcctttatagagccggccagaatatacattcccttctggcaaaaaccactggcacccaggatcatgaacctgaactttcatcctgtgccaggttgtcaaagcttggccgtgattgttgcttggtcactttgtactttgcagattgggaggagtgacctctggagcctgtacccaccccaccttaccccagtgggcttaggttagctttgtgccttagtatctctgacccactgcaggagccacccatcatccctcagctgtccatggggactgtggccctgtggctgtctggcttatgcatgcttcaggtcagagtcccattgaggacacaccatctttgagacttccaggagcctggggcaagggttcacaggccctgttttgtcttcctttgtgggtgtccgagaagccaagagccatgatgtagctcagcaggctgggcccagtgtccagctgctgcacccaggggtgagtgtcctccacctcaggaggctggggattcaccctttcctcttgcttgtactgccttgattaggatttttttccagggtggggtgggggttgggaagacgggacgctgagggaccctgaggggctgaaggaaagctgccagccttgccccgccaaacctttaactgtgctctgggtcccaagcctagaaacctcagtggccacagtgctactttacgagcccaggtcttctcacacctgagctctgaccccagtgatagtgcccctccttctgcatggccagaggctggtcttgcctacctcctgatacacacacaggcacctggttgaggtcactcagccaccttgtgatattgggaagaataaggcattgcccctgtgtctctgagcctgggctctgaccactgaacttaaccttggcgatttttcctcccattctcaccccagcgaccgtgatgacctgagccctggctggcagcacccgtgtcctacctctctgtctttgctctgcccgttccctgtgaggcactggtcagttgccaacatctaaatgtccatcactctcagaccaaaaccactgtcttgtgtgtttatttggaatgctggaggggaggctatgggtgagggacgggaaggtggattcagttcccccaagggcctcgggcattagtccagtggctggccttaaagctttccactgggatggaagatcagccccagacagtattcactggaatgctgacttacagttcaggcaggaggacagtcagggcgtccataacttgcttgtccaccttgagatagtatctttctttctagaccagctgtgttgtgcgggggttggggaggtggaactagcagtggttagaaatagcctcgacacacagtaatgacccatttgagctgtgacaagcaacagttaggcagctttaagagggggtcctctccccagtgtggcttccctctgcagtgttaaagttgggggtaggac

SEQ ID NO: 29732 - DNA, 1200 bp, Mus musculus
ctcctttgggggtgtcaaacagcccttttacagggattgtctaaaaccattggaaaacacagatatttacattttgactcataacaatagcaaaattacagtaataaaatagcaagaaaataatgtttggtcggtagtcaccagaacataaggaaccatattaaaggcagcatcaggaaggttgcggttgaagcgctgctctagaggcagccacacacgtaaagcctgctggatgtgatagtcagaaggccctgctctgttgttacacggcagtgcatggctgagtaaatagaaactgcatcacacggtaggccgcctagctgctccctttacaaaggtgcgtgcacatggaaccattggtaaggcggtttgacattactgcagctcctggaaatatattagctgggttagtggctcatgcctataatctcagcctttgggtggctgaggcagggagattgctgcaagtttgatgccagcctgggctgcaagtttgaggctagcttgggctatagaccaagaccctgtcacaaaacgttgctgtgtttaccaaacagaagcatgaaaaaacagtattctgagagaacttcaagaagaagtaaaacaggctgaattttgtactggacacttgtggggaaagacaggggtattttaacgtcagttctccataccacacatcgtataatggttaagctaatcagtgcttcaggtttaatgagcaggtcatctcacttgaaatttcccatgttcataagcttagcctgtgcatagaggccaaatgtgtgcatcaaacaacttggacttttagagatcagacctctgggttttgttttgtttttttgagacagggtttctctgtgtagccccggctgtcctggaactcactctgtagaccaggctggtggcctcgaactcagaaatctgcctgcctctggttttatacatcctcttttttttgtttgtttgtttttgatttttttcgagacagggtttctctgtatagcccttgctgtcccggaactcacaggctagccttgagcctgcctctgcctcccgagtgctgggattaaaggcgtgcaccaccacacccggccattgagtcatttcttatacaaactttctgtttttagagacatgttcccactatgtatccctggctggcttgtaacaatatgtatagacaaagctagcctccatttt

SEQ ID NO: 29733 - DNA, 2177 bp, Mus musculus
gctttcaacaagccctgttaatagtttagcatactgtgagcagagcatgccatacccttgccaaggtacatgctctgtatgaaagggaaaaggtaaaaaactgattttaattttagaatttgaatctgagggtttttttgttttgttttgttttgttttgttttgttttgttttttgagacagggtttctctgtgtagccctggctgtcctggaactcactctgtagaccaggcaggcctcgaactcagaaatccacctgcctctgcctcccaagtgctgggattaaaggcatgcgccaccactgcccatcttgagggggtttttgtttgtttgcgtgtttatatttttatgtacagaggttattttgcctgtgtgtgtatctgtgtgttacatctgtgcctggtatccttggatgccagaagagggcattgggtccctaagttacagatggttgtgagctgccatgtaggtctgggagtaagcctaagtcctctggaagaggagtacatgctcttagctgctgagcagtctctctagctgcccatggtttttcttttaaaagagtccagtggtaggcattccacttccacctcgtcacagacattgttctagagctttataagggtcgtctgggtgacctgaggcaatattatgtcccctctcttttcttgctttctgaaatcacctgttaacttttatcatcattgctggggttaaaacccacgaccttgtacatgacttctgccattcagttacactcccaggcttatagcctctctcttctgagccagaaatacctgcatctgtcaacccctgtagtcttacttgataggaatcacagcttaatgagtttatatttctctaaagtacagtaaatagttagcccaggccagaagttttagtgtccaggtgaccattgaccctaaccatgggacctgggcctccgctggctctttcatgccacagcctctagtggctcccttctttgtcctcactcacatctatacgacagaatcctgctatgttctccatgcaagatgtccttgctgttcctttcccacagttcccaagtgttccacactagtagaatgttggctggctactctagactcagtagatgtcttgtggctgtatcctcctgtctgttccaacatagcatctgctgtattctattgaagtagtttctttttgttggttattgttactttttgaaacagggtattttttagcaggcctggaacttacaggttctatggtgctggaaataaaggcatgtaccaccacacctagtgttctcaagtggtttctgatgcttattataggctgtggttctttgtctttccagtgccaggtggagctcaacaggaaagttcttgtggacctggccatctatgaaccaaagacgtttaaatctttggctgcattggctaagcggaggcagcaggagggatttgctgcagctttgggggatggaaaggagcctgaaggtatcttttccagagtggtgcagtaccactgaaggctgcagtgctatagactgttataaacaagataggaccaaaaggactgtcaccagtaagtctgatttgtatttatttacattttagcaacaggcctgagacgacaggtctttattcagtgacacggccccaaactgtcctgtaaagattgtataaataaagcctttgcagtgttgaacttgtgagttatttcctggcatcaagtaatccccctttagggatataaagcttgttactgcccatagacttgccatcactggctgcctgtggcaggaaaggctgagtgggggtagcaggcttcagctctcatgttgcttttccttttaaggtaggggtcctatatcaaccctcctccaagttgtctggtctgccttaagtactgtaaacatttaacctcttttggtcttttccttgtgtgtggcatgggcccagggaatcagcagttgagccactagctgctttccttctctttccatgcttccagttgggtacacatcagaagaatatgtctcattatcagaaacatgatgctcttggtctcagttgaaaggatggccagcttcagagtgggctggggggcacttttaaacttatgttatgtagctaggccttttcacaagactgctctgtaaggttaaggaatgaattctggacag

SEQ ID NO: 29734 - DNA, 1141 bp, Mus musculus
cctagtgcagaacccttaggaacaaccaaccacctttgatgacacatggtggcacaattgcccatggcattacagtcttcctggttttggtttcaggaactacatgaatgacagccttcgcacagatgtctttgtccggttccagcctgaaagcattgcttgtgcctgtatctaccttgctgcccggacactggaggtaagtatgtggctgcctgggttttagtctagattgtagacattttcccagcctgtaggaaatgttaatatttatcaaactagattcatttgcagcagagattctttgtaactggcgggccattttcaggtgtttccctaagaatcttattggcctcgaagtgctttggtggtggtggtggtggtggtggtatttttttgagaaaaggtctgtattatgtagctctgactgtactcagactcggaaaggcccacctgcttctgttttctgagtgccgagatgataaggtttgcaccactacaccaggccttgaagtttttaaggaaagtaacatgagaatattttgtgttcccagatccctttacccaatcgtccacattggtttcttttgtttggagcaactgaagaagaaattcaagaaatttgctttaaaatcttgcagctttatacacggaaaaaggttcctctgtatgtttttgtgtttgttctatacttgtgtttgtttagaagcacttggttctgaacgggtgattctggttctcaggttgatttgacgcatctggagagtgaagtggagaagagaaagcacgccattgaagaagcaaaggcccgagcaaagggcctgctcccagggactgcgccaggcctggacagtgctgcggggttctcgcctgctcccaagctgggtgagtgtccagagtttatttcccacaaagggatagcagcttgtgaccgtcttttttttttttttttttttaagatttatttatttattatatgtaagtactgtcctcagacactccagaagagggcgccagatcttgttagtatggttgtgagccaccatgtgtttgctgggaattgaactcaggacctctggaagagcagtcagtgctcctacctgctgagccatctcgccagccccagcttgtgaccttctaactt

SEQ ID NO: 29735 - DNA, 1133 bp, Mus musculus
ctggtaagaggacccagtcagagcttgaggagttcctggtccccaggaagatggccatcagtcctctagagagctggctgactgctcaatacttattgcccagacggaatgtcgaggtcccagtgactctggctccctcccagttctacgaatgtccacctaggcagggggaggaggaagcccagcagggagtcagggaagcctgggatgccactccagtgcagtgcaaaaacgtgctgaagatccgaaggcgaaagatgaaccaccacaagtaccgtaaactggtcaaaaggacccggtttctacgtcgcaaggtccgggaaggacgtttgaagaagaagcaggtgaatatgggcactcccttggacctagactgacagtggttaaaagaggctttgctcgttataataagttggttgtctcctctgcccttgcagatcaaatttgagaaagacttgaagcgcatctggcttaaggcaggcctgaaggaagcccctgagaactggcagaccccgaagatctacctgaagaacaaataatctgggttcctgtccctctggctctcttgctgcttctgacccactataataaatattggaaggactcaattattctaggccgacctagagtttctttggcttggtgtgagatctcttcgggtaaaaaaagactctgtcataggaacccagggcccaagtgtgcctaattgtccttgacctccagcctgactaatctgcctcatttagagatgtgtgctctgggaccactgaacagctccaggaaggtggacatcaatgtgaatactgggtgtcctggtgtcctggagctgaggggtacctgggttaaggggagtgctgattatggagtaagagatgatctgtgaggactcaggagggaagcagaaaagggaagctcagatgtctcaagagatggcacgtggtcctctgtagttgatgagccatttaagttgccctgttggctgggatggactcgtcttgccacagggacagggtattggggtgggtcgccagtgttcccagatgtcccagcttctgcttggctcctcagccgtgtgggtgggagcattaatcaggaaggttgcctggatggtgtgttttgctaggttcagtgtt

SEQ ID NO: 29736 - DNA, 1169 bp, Mus musculus
tgccttccttccttccttccttccttccttccttccttccttccttccttccttccttccttccttccttcctttcctttccttccttccttccttccttccttcttttccttttcctcctcctcttcctccttccttctcctcctttttttttttttggcttttgtttttttgagacagggtttcttctaggctgtcctggaaccaggctgggctcaaactcaccgagatctgtctgcctctgcctcctgagtgatgagattaaaggcatgtaccaccatcacctggcttgcagaggttttctgatgcttgctacttacatctagatcccaccctgacccgaggccacagcatcatcaatgtcattgtcccagaggaccacacacatttcttccagcaactgggctatgtgttggccacgctgctgctcttcatcttgctgctcatcactgtagtcctggctacacgatatcgtcacagcggaggtgaggctgggcccttggaacagaggggcccagattaaccgagaacagtgagagcaacccaataactctcttcacaggatgcaagacgtcggacaaaaaagctgggaagtcaaaggggtgagtttgcctgcccaactctcctcccagacctgtcctgccctggcctcctaaactgctatctccctttaggaaggatgtgaacatggtggagtttgctgtagccacaagggatcaggctccatataggactgaggacatccagctaggtaggggtgagagccacaagggtccaggggaagtacgttttggagtggcacttattattatttttttccccaaccagattacaaaaacaacatcctgaaggagagggctgagctggcccatagtcctctgcctgccaaggatgtggatctggataaaggtgagcacttttacctcctcatcccatatgagactctacccattccagggactccctgccattttcctgagaaggtcttgggaagtcatgccaaatgtctccattgactttcccactgggactaagggacagagagcagacattagccattttcttggcttccagagttcaggaaggagtactgcaaataaatggaccctgagcttctggctgggccagcagctctgtatcaaaggacatctccctgaccctcctgcggt

SEQ ID NO: 29737 - DNA, 1125 bp, Mus musculus
gagcggacagtgcctccacattctgagcacctagaaggagaatcaggaccggcctaacctaaggacactcctctgctccctggcagaccttattggctcaaggggagcgatctttccagggtttctctgtctttctggggtccagcgtgcccacctgcccagaaacctcagacccaaacgcctcaaggatcgcagcctgttgggaatctgggctccaccccaagacagcgctcggagagacccgaccggccaggccttctgagcccgcccagtcccaccccggttgccccgcccgtgcgcaagccgtagccccgccccgccggacccgctctgcgcgtgcgcagtcccgccccgcccgcgctgcgggcgactagtgacgtcaccggccccgaagcgccctccggcggcggcgcgctccaccccagcaggcggttcgtgaacagcccgagggggcggcgggccgcgggagccctcagagccgctttccctggcgcccgctccggggccgcggcggatgggcggccgcgggccgcggggcgacaggcggggaacgggtgcgagccgggaccgggaggggcggccgcgccaaggggccgcggggcggccgggcggggcgcgggccggcggtttgggagggcgccccgcgtccgagaggcgagccgggccctgacgccgcgcgggttccgcgtcgcccctgccgcgccatggcggagaccaaaatcatctaccacatggacgaggaggagacgccgtacctggtcaagctgcccgtagctcccgagcgcgtcacgctggccgacttcaagaacgtgctcagcaaccggccggtgcacgcctacaaattcttcttcaagtccatggaccaggacttcgggtcagtgggccgcgcggcctgggcaggggcgctggcctcctcccgcgcctgtgtgcacgagctggcacctgtccgcgccggctgggctttcgggtctggggacgtcagagagcgcccccgtcgccggcaaccctgctgcgcatctacagcaggtgtaggtagagtttctgcgcccagtgaccctgagtgtggcaagctggggttccgagccactgactaccctctgggtaggccagacagttctttctgac

SEQ ID NO: 29738 - DNA, 1102 bp, Mus musculus
tctagctttgagctttggtgctcatcagagctattacaggggcccattacatatgaaggttttgtttgcttccaacaccttcacaaatgtgtacacaaagatacatgtacatatccctccaggcctggccatactggtcatctgcatgaattgagggtcctgccaggcctgtgcggaggggggaattgggaggacatggcagcctctgctttgcttttctgctacctaacatagctaacagcttgttctctccggggaggggaggggggctgccttgcctacgtggacttgcactgtgggacggggaagaatctcccggtcttagctcaagtttcgatgaggggcatctcccaaggatgggagataagaggtttgaccctggcccctgctctcaaccccatggaggttcacgctgtgagcctgggctcagggaagtgtgctctgcagagcttgaggaggcaccgctgactgtgaagagtgacatgagtgccattgtccgcgtcatgcagttgccagactcaggactggagatccgggaccgcatgtggcttaagatcaccattgccaatgctgtcattggtgagtccctggctgtgtgggaagggccccgtctgttcctcattctggcgtagcttcccagggctcagctaccctgactttgatggacctgtggccaggggcggatgtggtggactggctgtacacacacgtggagggcttcaaggagcgaagggaggcaagaaagtatgccagcagtatgctgaagcacggtttcctgaggcacaccgtgaacaagatcaccttttctgagcagtgctactatgtctttggcgacctgtgcagtagtgagtaggggtgcggttgggtagggttgctgtggcctcattcatttgccttcacttacccctccctccctccctccctgccagacctcgcatccctgaacctcaacagtggctccagtggagcctcagatcaggacacactggccccactgccccacccatcagtaccctggcccttgggtcaaggctacccctaccagtacccaggacccccgccctgcttcccgcctgcttaccaggaccctggcttcagctgc

SEQ ID NO: 29739 - DNA, 1322 bp, Mus musculus
cccctgtgagttctttgtggacatcatgtgatgatcaaccaatgtcttcagcgctgcctgtggctgagtctgtgctcctgctgtgccaggagctctgcgctggccgtggtggtggccagccaggatagatcagctgtgggctctgggccagggcagagggagcaggctacagaggagggcctgagggcagccataccaccaggatattggcttgacattttgtctgctcttggggctgctgatggtggtacagctcaagtatctatagagtcttgtaaggagacatctctgactttaagtcctcagcacaagtctcagggaccacctcctggttcccttctttggaagtgacctccatttagaacaagaaaggctctcttgggctcttggtaccccttgccccaaagcctcacagaactgtgcacagggacacaggctgactgtcgctaagttcatgggcctcacctgtcaggccaaggtgggatttttgaggggttagacagagccttcaaacctctctggctgcccaggtggggtctaacttatttatttattgctagcctgcctgctctaagggtggcagctagttacccaaaggggcagtttgcatgcccctttccccacctgctacttggcacatgacaacacagtttgtactgaaggtatgtgaagggtagctagtaggagagacaggagagagacctggcacctagccactgtctcagtctcagtggtgggtgacagtgaacacaagagctgcagagctgggccctgttctgtttctgttctggtggctgcccatcatcatgtgccactgccatcccggcacagcggccccacacatctacactagacactgtgtcaaagtctgagtgactgggtagttgacatagagctgcttctgtgtaaatgctgcttctgtgtaaatgctattttaaacactaaaaaaagcgtttaattttatgggactgatgtgtggcttgtttctcttttctccagctgagctgctccgggattcaggtgtgggggccagtccagaactgacccgggtctgatcctgcctgcagatggacgatgctcttgtcccttgccgcttaggcatgtggctctgtccctggtgctggccagtaaggggccttgcggcaacttttctgtccttggtactagaagctgattccaggggtcccgcgtggctggcgctggccgtggtgctgacccgcaccctgtgtgtgatctgtccaaggtgctggcggcgacctggttctctcctacaggctagggctcagctagggatggagaaggctggatgttgcctacctcct

SEQ ID NO: 29740 - DNA, 1190 bp, Mus musculus
actaaaattccttttgtgcttaaaattcagctgagagcaacagctctcaaagctgttctccagctactctctgagccagctcccgacaggaggccagagactagcctcagctttacaatttgcatttgaataaagtacctagacttccccgaaagaagttctgctttcctactttctcactgtctttcaagattttgtctttcaagcaggtaaatcaacattctcgaggcggaccagtggatgtgcatccccgccccccctagagcacacaggtggcagctgttatccccagtctcaggacatttccagcacgtggttttcagtctgagttaaaaatttaggtttacctagagggctagaagagtagatatttctatattaataaagattggtttttattttgatagacaggcttagccccttagctgacctctggcttttcacccttgctgttactgcaaggtgtccttagctcaataggctgtggaaaaaacagggatgaggaggaacgacttccagctcctattttagccacaaatcgtggtgttactaacgacataattcttgcttaggctttgctaattctaaggttgataattctcctttaggagctgcacagcactcagaactgtgcatactggtttgtgattgtacaaattcagtatgggcatcgcttggtgcagaggtactgcaagggaagctccggcttgaccatttctgagtttcctgtgagataaacccggtttaaaagaggttggtatcatattttggttaaaaataaaaaatatttttcggctctacctcgcctccccaaaagatacccagagccacatgtgtgggtcttaccagtacccacgggaggaatcgggtccatgtccacccaagccaaggttaaaagcccactcatctacggatgagaaaatcatttgatcacctcagttaagcgttgccttattttaacttaattaataggggggagagagattggagacgtactattgaaagggcaagcccttcactgcctcccacccaaataaaagagccggtcgaacgccttctccctgtttcccacctatcatccaaaaatgcggaggaatatcaacttagtgttattttcccatttgttaagtcaaacttagccagagttccaacgccctacttaaaattcaactagaaagttacctaccaag

SEQ ID NO: 29741 - DNA, 1193 bp, Mus musculus
ttttttttgactagatgagcaataacagcaataagagagctccaacaacagcaacacaaaggttgaagcaggactaccttcgaattaagaaagacccagtgccttacatctgtgcagagcccctcccttcaaatattcttgaatggtaagactactgtagtcactctgtcgcaggtcctgtagtggtccagctgctaggcctgctcatggtagaggcagtcttgtaactcctcagctgtggatggacactcgagaggcctgtcaatactctgggctttgcagggagtgctatgtcaagaatattatagagtcctgcttggcttaggctagggctaaaaggagaaatcttctaccctgaggtagtacttacgtggactttgagtttataaatctctcacgtgttgctcaggagcattagggttggactgcattttgctttctgacattgggaattcactctatagcctgggaacattagtgcaacattgatacgatgaacccttgactctggcctaagccaagcgctcctaactcttgcactgaccgtgatagaggtcataaaaaacatttggtgcatggtagctcttttgctccattaaaagtgtggagtcattgggtatggtggcacacattaacccaggacttgggaggcagaggcaggtagatctctgaatctctgagttcaagactagcctggcctacagagtgagttctaagacagccagagctacaccgagaaaccttgtcttgaacaaccaaaccaaaccaaacaaaaaggatagagtcacgaggtttcatgttctctgtggaaggagtcacgaggtttcgtgttctctgtggaagtgctcattaccagctttgagaaatgaaatacaagatttgactcaccagaaagcattttttactgggtgtggcacatacctttaatctcagcattcaggagacagagacccgtaactctcttgagttctgggccagccaatacagtgtactgaggtcctgttttttgtttgtttgtatttaagacattttttaatacttttataattttccaaatccagaggaaaatttttcctgaattaaaaagaaatgttttgcgtttgtatgttgatagaagaaatgcatgaggggcctcttcagtggcattagaactaaccctgttccagagatgagagttagatgtagtccctagg

SEQ ID NO: 29742 - DNA, 1193 bp, Mus musculus; identical to SEQ ID NO: 29741

SEQ ID NO: 29743 - DNA, 1156 bp, Mus musculus
tgtctgtgtggctgacttcaatagaggccacctgcaaagtagtacctcatacctttctagcatcacagaaatcctggagacatactgaccatgatgacccatgtgaagtacagtgatgaccagtattttagttctgtacttttcttttcttctctagttttttttttttcttttttctaccaggctggcctcaaactcagagaccgatctgcctgactcctgagtgctgggagtcgaggcatgtgcaccaccgtctagctttttttttttttttttttgacaagatttcacactgtaggtgaggttggccttgaatttgctgaagtttcccttcctcagcttctccagtgctgggattgttggtgagaggaaccctaaatggccaagttctattcattcttaaatttcttcaaatttctcctcctaaagcaatgtctgcctttcccccaccttactgtgttttgtgtttccattagttgcgcttcatttcctgctgcttactggagggcccttgtcctgttcctctggtgagaccagtatatgcctgtccaggttgtaggaagttttgaagatgcttttcagagcttcagggagtctggtgccctcacagcaatccatctgtgactcctttgggatgtagtctcactgtggccattttactctggtgatgaacagtgatgtgggaataaaccctttcattcctaacttgctttttggtcatggtgtttcattgcagcaatagaaaccctaagacttgggctggagagatgacttagcagttaagagcattgactgcttttccagaggtcccgagttcaatccccagcactcacgtggtgtcttgcaactatctataatgggatccaatgccctcttctggagtgtctaagatagcaacaacagtgtactcatatatataaaagaaataaataaatctttaaaaagaaaagaaaccctaagacaactatctaaggtctttacgcctgaggtcccaactcaaccacatctgatcttcttgagtattggttagttttctctgtgataaaacattattaaaggcaacttagaaagactttatttgagctatggttccagagagtttgagtccataatggcaacaggcggtaagcatggtggcagcaacagttaagttggg

SEQ ID NO: 29744 - DNA, 2815 bp, Mus musculus
ctgggtgaaagacagaaagaaggagtttgaggaactgattgactctaaccatgatgggattgtgaccatggaggagctagaggtgagcaagggaactcatgagtgttgttgtgtcccaggaaggaccctgggtttggaggctcggctaatcctacagctcggtaccaaaggaaagggggcttgcctacatgatgccccgagacagtgcgcatcagcgttaatgtccaggttgacgagatggaaaggtcctatgaagcctgttgtctgtggaaggcatctggggatttgtttgttagtgcttaggatgaaacccagggcctccaaacatgctaagcaattgttctatcacagagctacatcccagccctgtgttaagagattcttaagtccccttatgggaccagaaaagaaaacacatattagccccgcttctcaagtgacccttgggctgccgtgtaagtatggcagctgtgggctcagggcctcgttgacactgtagcagggcgaggtccctgatttgtgccttggtctcacagaactacatggaccccatgaatgaatacaatgccctcaacgaagccaaacagatgattgccattgctgatgagaaccagaaccaccacctggagcccgaggagatcctcaagtacagtgagttcttcaccggcagcaagctcatggactatgcccgcaacgtgcatgaagagttctgagcatgcccctcagctggggccaggtcgccagtgtcctgtctgacccttcccatgcttcgaggaggctatggtccagtgagacctgtggatggctgggtccagattgggtctaaaatgctatctaccctgagtccggaggcttccataggccccaagaaagtgctgttccagaacctcctccttctgttgtgtccatatgctctggcttagctcctgccatggcatggcccaggtttattaaagatatgcttaataggctatgtgtcctctccagcatgtgtctgaggcagtagcccttctgtaccagtcatgagctgagctgcatttgcttgaccaaatctcttttcagttgttaaattctgtttctgagaactgcttgggatggttggttcaggtgagggtgctgcacacatgagggccaggagctctgggctgggcccctctgtgtgcttaccacactgggaaataatgcaactcttgcagtttccttgaaaactgaaagattacgataaagttagatcatatttctctggaaatgatcagccccacagccctggaggtgctgcctcgttggtcttggaggccatgggagtcgtccccaaactcctcagaaacccgcagagtcactgtctaccctgtgagaaagtgcgggtgcttgttgtaacaagaatcattactttagccagcagtagtgggtggtggtgccacacaccttagtcacagcactcaggaagcagaggcaggcagctctcttgaatttgagaccagcctggtctacagagctagctccaggacataacatacatctctgctacacagagaatcccttattttgaaaaacaaagcatatcattattttaaaatagaattgcctttttctcacattgtctctctctctgtttctgtctgtctctttctctccctctcaccttctctctctctctctttctttctttctttctttctttctttctttctttctttctttctttctttctttctttctttctttcttgttgttttttgtttcttttttttttttttccagacaaggtttctttatgtagccctggctattctggaactcagttatctacctgcctctgcctctgcttctaaagtgctgggattaaagatatgcactgccactgcccagcaatacattgtcattctttagatggggaaaaaaaggaaaaagaaacactgtgggctagctagtttacactagaaatttttgaggtgaacactggttaaaggggttagtagctttcaataaacattgattttcctcatgatagaagtgaaaataggacccaaaggccagacaggaaagagtacgatgggatttcatgcacgagaaaaggttatgtgggatgaggttgggccttgagtgtgggagcagcagcagagtctgagctaggcaaggtctctgggccagtgctcttgaaggtttgttttggcactcaggtcccctgccttggtgttaaaaggggatagagtagctgttaggacagctgagacctcatcacgatcccaggcctctagatacctgtgtgacccagttttcccacaggaagctacttctgtgtgtggtgttaggtgtgtggggtgcaaagcatggcagctcattagtcattagagtggaggcaccgagctgattcctaggcaaagatgagacttgaaaactcagaatggtaatgtggacaggaaggtttcagcaggtcccagagtggtcggacacacagcttttgagtatggttctctcagtagacttttagactttgccaccatccctatcctgctctgctcgtgccttggcctggagatggcatccaggaccatgtctccaggaaaggtgcagagcatccttagaagcccgctagatacctgacaggtagcttatatagtagcgcctggtctttcagaggttctcattacttcctgtctggtactcaaggggcagcaccctgtgggagttgctttagatcccttgaactgaagggatgagtggggcctaggattgctatcttccctgcagtttttaggggcagcagctcagtggatacagtaaggccggctgctgctagtgatctttccagtac

SEQ ID NO: 29745 - DNA, 2378 bp, Mus musculus
tggggatccctgttctctaggcaagacatgcaatgtactttagaggtgtcccactggggtttgggcattggtgttgtattctagctcagcggtgggcaacgtcctcttgatatagacttgcaaggcaactccgattctgaagtgcagactgttaattagctccatggcttccaggagatacaatgctcctgtactaaccacacaaggaccacaaagatcaaaagatacaggctctatacctgaggagatgttttcaggctgatgacatcagcaaatgtcagcacctatgtcagacttcctgtcccacccacttctaggtacctactgccagcgactactaccaagaacaagcagctccaaaactggatggtgggcagagagattttcatctgctcgccgttatctcctcgatttgacgagcagctccctgggtttcctcgtggtttgtttcacaggattcagtgaacgtgttccaagcagcagagggtcctggcagtccgaccctgtggggaatccccagactgacatggggcctcagtaaagggagtttttgagataaggtgggggtatagagaatgtactgtgggacagcaccagaatgaaaaggaagtaaacccaggcatagacattgggtgttcaattcggggagaggttcagcagccccaaaatgaggcagctggaagactggaggcctgagcccagtaggaggaggcggaggtgtgacctgcctagtgtggaggtgacacttctttcctacaatcccaccttccaccctccccgcttcctgttggcctctgtaggcatgacttccttacgggctgggggctgccgactggtctttcactccagccccagacttaaggtgtggctgtacacaggcacccaacgacgggcatttaggagttcagtgggtgtctcctttggctgggggctgctgaatgcagaagtggtggctcaagttcatcatatctggccacaggtaggccaagtaaaaaaagatggggagggtgaccaaatgttcctataacaccaggccagtgacctccagtggcaagagacaggaaacagccatctttacatcttcttatgcttcaaagtacagctgacgcagcacagcactccacaccccaccaggatgtctagtgactttttttggtttttgttttggtgttcatttgtttgttttgagacagggtctcactatgtagtcctggccaacctgaaacttactatgtggatccaactgcctctgtcttcccagtatgtgccaccacatttggccatatagtgactcttttttaaagttacatatttattgttaattttatgtgcattggtgttgtctgtgtgtatctctgaggctgttggctcctttgcagctggagttacagatagtggtgagctgccatgtgggtgctgggaattgaaccagggtcctctggaagagcaacaagtgctcttaattgctgagccatctttccagtcctacatctagttgactcttaacatgtactacatgacaccaatctttgcccttttggcttctggtttcatttgattatgaataactgttgttgtgggttggttctaatgctatttgtgttcatttgactctcaaaatcccacaggatcctgctcatctacactgagggtccctgaccccagttggctccgattgggaaataaagttgccagtggccaatggcttggcaggggacagaggtgggactttcaggattccagagcaagaaatgcagaggaaagaggaagagaggattcagccacgacaagggtataggagacagatcacacagggaaggtggaggagggagagatgggcaagatgtacatgcaaagggaaaagtggtcccagggctgcccagaagggttcagagcagcaaagacaaatttagtaagtattaccttgtaatatcagagggtctgtgttaaccatgtggaggttcaagagtgacccagccactgtggtagttaaggcatattaaaatacaaaggttgagggctggagagatggatcagcagctaatagcactaactgctctttcagaagtcctgcgttcaaatcccagcaaccacatggtggctcacaaccatctgtaaagggatctgatgccttctagttgtcggaagacagctacagtatactcatatacataaaataaataaaatcttttttaaaaaatacaaaggttgtgtgtgcgcgtgtgggtgcgtttcactcactcatgaatccaaaacatttgagcaggcatagaggacgagcatacccgccaggagcatagagcagatttaacaatttactgctacaaactagaactttaatttttttcaaatcttatttttaatgatgattcttcaac

SEQ ID NO: 29746 - DNA, 1156 bp, Mus musculus
gataagaagatatgatttaaatcaaataatccataaacaaatgaatgaaaaacttgagctatttttatggaaactaagtgaaattatttgaaaagaccaggtgaaagtcagatgtggtggcttgtgcctttaatcccagcactcaagaggcagagggtgatggatctctgtgagtttgaggccagcctaggctacataatgagttccaggacagctagggctatgtagataaactgtctcaaaagaagaaagaaaggaaagaaggaaagaaggaaggaaggaaggaaggaaggaaggaaggaagaaaaagaaagaaagaaagaaagaaagaaagaaagaaagaaagaaagaaagaaagaaagaaaagagagagaaagagaaaggaagaaagaaagaaagaaaaaaagaaagaaagaaagaaagaaaaagaaagagaaggagaggaaggaaggaaggaaagaaggaaggaacgaaggaacaaaggaacgaaggaacgaaggaaggaaggtgatgaagacaacatgtgacactatttgaagtaggtctctgtcagctctcaaggccccttaacaggcgggtatatactgtgtatttctatacttaagttaaaacaaaatgggggtcttttcaaaacttctctgactttatactgtcaaccacacaattgctagtccatcagcaaacacagacaagcccacaagtaggatgactggcttccaggacaaaagccaaagcaagcaaagctactgagccaggatcctgaatccaggacagctaagtgtggcaacacccctggaccctccctccccatgctcccactttacccagtgcctccctgaatatacttgatggcttgcttttggacaatacaaaggcgacaagcagcacactcaagattggatgatagggagcctgtagcttcatcttgagttccctgtgtgtgtgtgtgtgtgtgtgtgtatgtgtgtgtgtgtgtgtgtgtgtgtgtgtgtgtgtgtgtgtgtgttttactggagattgtctgacgatctcaggcaagctaggtaatcattctaccactaaggaatatctctaccttactgttttggttttggttttggttttggtttttttttgagacagggtgtctctgtgtagccctggctgtcctggaact

SEQ ID NO: 29747 - DNA, 1688 bp, Mus musculus
agtaccttcaggctgggcactcagagcaaaatgtttacccgtggggcctccatctctgaacacttaggtcacttgtccccttgggcttgtgagctcatgctggttagcagtcctgtctttgctctcctaagactccagaagcctgtgagctgctagtgtggctggtggtgttggccatgtgtccctatagaaggaggtggcctgatgaccagtgccatcctccgtctagcatcttctttgacgtcaagcacacatctgatgttatgcacagtgttaggagtttgctttcccagagttgagccagtgactcaggtagcagcagcaattccaagctggaccaattcaattagactagatcttctctcctcaagctttgttgtcccaaggtctcgtattcagtgtggtgtgtgggagcgaactaccccattgccatgtccaggggacaagtagggaggggaagaagaagccctcagccggactcagagcctactgttgtctggtggaactggcagtgcagcacaacccatcccctcatctttccctggccatgtagcccctcccatttcaggacaccatcttgcatgaagaggtgaccccgctccttaggacttgaggtagaaagtgccagtcaagcacggcatggttttcagataagactacatgcatcactaggctttgagggggccactggcagtttatggatctaattgacccttggggaaagcagaaccctcgacctggccacctgagttcattttagtggtccccctcaaagcccatgtgtagacgtacagatgtgtgtctgctgactagaggcagaaccggataaagagagccaaatgagagcttagggattctagaagtcctgccaggtagtttgataagaatgcctacccagtgcccccaggcttacatacttgaattgctgagtcatcagggattacgggagaggcttaggaggtgtggctttattggaggaagtgtgtctctggggatgggcattgggtctcaaaagctcaagccaggcccagtggctttcatttcctgctgcctgtggatttggatgtagagctctcagctcctcgtccagcaccatgtccgcctatgctaccatgcttcctgccgttccgataatggactaaacctctgaaacagtagacaagccccaattaaatactttgttttataagagttgttgaggtcatgatgtctcttcgcagcagtcggatacttactaagacactgccctagctttataatttctatagatctccctatgcactggttaaaaggctgtggccagagacatctgttgaaacctcaaatgagtttatggcccttggccatatttcagaaaagtgctggggaggctaagatgtaggtttccaggcccagatcatttgttctgagaccagtgaccttgccctggggacaggatagaatctgacccagcatccttgtgttcagcagctagggcctagagtagcattggatgccctaaggtttggggttccccgggatggtttctgatgaaaagtggaaagggacattgacagcatgatgaagtgaggcccagcctggctccctggggtcacagccgattccttgcccagctcatcctgagttcccagacactccaaaggggaaacctcggattattccagccacctccatgggtcgcgccaccc

SEQ ID NO: 29748 - DNA, 1323 bp, Mus musculus
gaaaattctgttagaggctagaaaaatagcctgggagccaacgggcggtctacacagctacaaaatgagatcgacatgggattccttttgactcgccccagttgcgactgcaacatggctgaaggtaaggagagcttaaaaatctatcgccaggctcaggtctccaaggttcctcaagacgggcccactaatttggctaaggtaagaggtaatgcaggggcggatcgaacctccctcggtgttccttgaaaggcttatggaagccttcaggcggttcactccctctgatcttacctcggaagcccagaaggcctcagtggcctggccttcataaggcagtcagctcccgatatcagaaagaaacttcagagattaaaaagtgtattatgagagggagacagtcattcgatctagtaaaagaggcagagaaagtgtgtgtgtgagagagagagaggcaagaggcagaagaaagagaaaacaggagagatcttagacaagagagaaagttgactagaatcttggccacagtgataggaaaaaaaaaaaaaaagacaggatccagacaggaaacctgggcaactgaagaccgagcctcagctaaagaggctcagctgtgtcagactgaagtgacttatttgggatacacccttcgaggtggaaagcagtggctaaaagaagccagaaaaagactgtaactcagatccccaccccaactacaccaaggcaagtaagagaattcttgggcactgctggcttctacagactctagatacctgggttggcgactttagctgcccgttgtaccccctaaccaaagaagaagtgtctgtgtggaccccagatcaccagaaagcctttaagaaaatgaaaaaggccctactgatggccagcctatgcctgacctaaccaagcctttcactctttatgtgaaagagagagcaggggtcgccagaggaatccttactcagactttgggactttgaaaaaggccagtggcttacctatccaagaagttacgccctgttgccagcgggtggttttcttgcctgatggatgatgaccaacgctcctgtgacacatcagaactttttgttgactaaacgagtgacctttgcttcattccacctcctgtcccactgcgtgagactgcacctactcatcactgcactgacattctggcaaaagagctggtacactgatggcagtagcctcgtggttaaaggtaagcagaaggcggggacagcagtacggtggtggacagaaagcaagtgatctaggccagcagcctccctgcagggaagtcggcgcagaaagctgaacttg

SEQ ID NO: 29749 - DNA, 1223 bp, Mus musculus
agatggcagatctaaccgccaaacaggtggcccaaggagcaatgaccctggcagtcagggaacctaaagattattatgacatcagggggaccagctttagatacaccgctgagcactatcaagctatggacagtatttgacttggcctgggggccaagaaattcaaaggtgtggttaggtcctttgactactatgttacaggactctctgacttggcagaagaaagagtcaaaagctgcaaggcctatgctatgacgaggtagaatttctaaaagaaaccttcccaaggtaattgggtccaataaaggacctgtctttgttgcccaggtaaatcagggactggccaagatattggggattaattagaagttacattgtgcatgcaggccccaaagctcaggacaggtagagagaataaatagaaccattaagagaccctgaccaaattgacagcggagactggcgctatgattagatagctctcctaccctttatgctcttcagggatagaaacacccctggacagtttagactgacccccctataaattactctacagggggccccctccactggtaaaaatagcctctgtacatggtgctgacatgctgctttcccagcctttgttctctaggctcaaggtgctccagtgagtgagacagcgagcgaaaaagcagctccaggaggcctactcaagagaagaagacctgctacattagacgtctccacgcagaaaaccttaagactccggtagaaaggcccttatcttgtactcttgacgaccctactttctacctttatgggaccccttttgattttgcttctgcttttaattataggtccatgtgtgttaaatagacaagtcacctttattagaacaaaaattagtgcagtttggcttttagttttaagacaacagtaccatgccctaaaggatcaagtatgtcagagaaaagatagtgtctagttctaagattagaactactaacaagaagaagggggaaatgaaagagtagtaaactcagtgctccaaggtatgctaatcataaaacagatagcggcattcctccacccacccgcttcctgggttcaaggagtgttcatgcaaagaaagtcaccctgaccattgctggaacctgcaatgcaaatgtgctatcgttaggggctctgagaaactgtcttgagagttaacaattaccaggtattccttgtgacacctgtga

SEQ ID NO: 29750 - DNA, 2078 bp, Mus musculus
cgggcatacccaaggctctcaaactatatgatgggtagattgtcctggagctgacatctggagtggctcatctggataacagatgggctatccggggcagggcagcacccctcttcttcattaaccttgcagatcttagtttgtacacatgtatagcaccccactggcagtcaggtgctggcgggccccgtgtgtcagcatcactgcctgctaatctgtttccgtcctgtaggaggcctacagaagcttcctgtggggcaggctctccccaaggcctatggcacgggttttgtgggctgtctgcgggacgtggtagtgggccatcgccagctgcatctgctggaggacgctgtcaccaaaccagagctaagaccctgccccactctctgagctgccactagagctgccaccttccctcctgtaattattttctatttttgtaaacttgttgcatttttatatgattttcttgactgcacgttggccagaaggactgctggcctggcctcctttccgtccgggcagctgtgctgcagagacaaaaagtggtgctgagggactcctaagtcggccgtagcacctcgagccctgggctttgaaggcagccttaggacaaactcctctgcctaaggcatcatgcctcagccccttgcactgtatgttcctatatgtctacttgtattgatcctttgggtctcctggcccattgctaggcactgtttgtgtgttattaatgtgtaattgggtgagaactgtgtccctgagcaggaggggctgttggggttgagggggccttcattaaaccaagtaacattgggtcctttttaggtcccacttaagctgctctcctgtgtgtgctgagggccagcctcaccccaggctagcctggacccccagtgctccctgtgacaatactgtgatatcaaaaaactgataataattgggacatcatcttacttcccaaaatgtgtttgcctgtccccggaggctggaagtagaagccaggctacatctaagttgccctgactggccttcagctggccttacccacttcttcagttaccctgaacatggggagtgcatcacgatagggtgtggctgacctccattgcttacctgcctgagtagccagctgcatccatctctcaaagatacctagccaggctcctaaccatgttcttcaaccattgattttgtttgatttctgatgtggaagtgcggtcattcctggtttaactcacagcaacttttaattggtctaagatgagggcatccctcagttggtccattgtaatgatgatcgtcctcatctgagtgacagttactgcccagggtccagccaaggacaggtacaggaaggcagagatcactatagagccaaaaatgactgaaactgaagcatccatctgcttctccattccctgtcttttaagtccagcacattgggagacaaactaagcaaatctgggatgggggcagtctgaccttcttcctgcttcggtgatccgaggctagagggagctgcatggtatcttgttactaactcagtatgtgtcaatgtcaaataccatgaaataaagtctgaaaaccttaaaatagggactgtgtttgtacttgacagccgggtggcttcttgctcagattcgtgaggcacagacttcaagctctcctgtcccttggtggagaaagtagaacctgaactgggaatgcactattactgggtaacaaggctacagtgtgtgtgtgtgtgtgtgtgtgtgtgtgtgtgtgtgtgtgtgtgtgtgtgtgtgtgtgtgtgtacaaatctgcatataaggaagagagctagtggttgcactgaggataaaaccagacaaataggatgagaatgcctttgtggaaatatatgagctagaagagtagccaggcagcgctttatctggctcagatgtatatggtaggagacattaactagaaagccctgagaaggaattctgatcactggcacctctaaaatatctaagtaggaagtcttcaagacactgaagctccccctaagagcaggaagaaaaagaggtagtagagttggctcagtggct

SEQ ID NO: 29751 - DNA, 1174 bp, Mus musculus
ttcttggccttccccaccctccgagcctaccacacgctgcgtctggcactagaattccgggcgctggagacagagggactgctgctctacaatggcaatgcacgtggcaaagatttcctggctctggctctgttggatggtcatgtacagttcaggtgggcgtgtgcacaggcgtggcttctgtaggtcaggtggcctgtgtggtggcagggaccaccccagaccttctgaatctaggaagtttggtggactatgggtgagatgaggtaggccgggcttctgggaggcctgaaccgacatcctaagcaggggctcccgtgtttaggttcgacacgggctcagggccggcggtgctaacaagcttagtgccagtggaaccgggacggtggcaccgcctcgagttgtcacggcattggcggcagggcacactttctgtggatggcgaggctcctgttgtaggtgaaagtccgagtggcactgatggcctcaacttggacacgaagctctatgtgggtggtctcccagaagaacaagttgccacgtgagcagaaatcggctgggactgactgggcccctggtctctgactctgtaacaaatgatgggtaatagaggaatgggtgcggatggatggtagctgtaactttggcctcaaccgatctcctgaccctctctcagttcctgcaatgctatccatggcagcatgcctttggtgggacctgtgaaccatcagccctgacccttgaccctcatacccacctcctgattctgtcttgttactgagctggccaccctgtgaacacagtcaagagtaggcacaggggcatcctcatccctagccgtggtttatgggctgtgttagaattgtagctgaatgtgagaggatgcctctgactgacccctcctggtatcagggtgcttgatcggacctctgtgggcatcggcctgaaaggatgcattcgtatgttggacatcaacaaccagcagctggagctgagcgattggcagagggctgtggttcaaagctctggtgtgggggaatgcggagaccatccctgctcacctaacccctgccatggcggggccctctgccaggccctggaggctggcgtgttcctctgtcagtgcccacctggccgctttggtgagaactagcctggtgcccgggaaggaatc

SEQ ID NO: 29752 - DNA, 1156 bp, Mus musculus
tggctccactgctacctatggcctccccacactgtgcccaaaccccctatggctgctgccaggacaatgtcactgctgcccagggtgtgggcttggctggctgtcccagtgagtatttgagcccagccctgaccgtggtctcgcagagctgtgcagttccagtgaccagtgctttctccccttgtaggcacctgccattgcaacccacacggctcctatagcggcacttgtgacccagtcacagggcagtgctcctgccgaccaggtgtaggaggcctcaggtgtgatcgctgtgagcctggcttctggaacttccgtggcattgtcaccgatggacatagtggttgcactcgtgagtaatggaactacatgcattcctgcctgtccacccatcactgatcatggcttggcccgacccgtatctggtagggctggggcaggttgggaaacgtatccaggtccaaaccataaattcttccctcccactccccagcctgcagctgtgaccctcggggtgctgtaagagatgactgtgagcagatgactggattgtgttcctgtagacctggtgtggctggtcccaagtgtgggcagtgtccagatggtcaagccctgggccatcttggctgtgaagcaggtgagggccggaactggtgctgaccccaggactccctatgctgagagtgggagtagttgagttaacaggaattttttatccctatctcagatcccacaacaccagtgacttgtgtggaaatgcactgtgagtttggcgcctcctgcgtagaggaggctggttttgcccagtgtgtctgcccaactctcacatgtccagaggctaactctaccaaggtaaggagggaaatctgtagagagcgacggggataaggaggcctttcccaagcatgctttccctggcctccaggtctgtggatcagatggtgtcacatacggcaatgaatgccagctgaagaccattgcctgccgccagcgtctggacatctccattcagagtcttggtccatgccggggtaaggacctagagcaaccgcctaaagcaaaccagaaggacccgaccctgttctgactcgagcccctaacatccgtctttttgcagagagtgttgctcctggggtttcccctacatctgcatcta

SEQ ID NO: 29753 - DNA, 1153 bp, Mus musculus
cgtatgtggctctgacggacacacatatgctagtgaatgtgagctgcatgtccacgcctgtacacaccagatcagcctatacgtggcctcagccggacactgccgtgagtaggaccagaagggataggcttccatgagtctctctctccatcggggaagctccatgagtctctctctccatcggggaagctccatgcttactctgcttcttaccatctcctgtagagacctgtggagaaacagtttgtacctttggggctgtgtgctcagctggacagtgtgtatgtccccgttgtgagcaccccccacctggccctgtgtgcggcagtgatggcgtcacctacctcagtgcctgtgagctccgagaggctgcctgtcagcagcaggtacaaattgaggaggcccgtgcagggccgtgtgagccgggtaagctcgggtaaccggtgcgcacccctagattccagtctctgaaggagacctcatggtgaccgctctgttttcctgcagctgagtgtggctcagggggctctgggtctggggaagacaatgcgtgtgagcaggagctgtgtcggcagcatggtggtgtctgggatgaggactcagaagacgggccgtgtgtctgtgactttagttgccagagtgtccttaaaagcccagtgagtaccccaactttcccatggttccagggtgggtgcgctgagggccaaggttgctgaggttgaccccactcctcaggtgtgtggctcagatggagtcacctatagcacggagtgccatctgaagaaggccagatgtgaagcgcggcaagagctgtacgtcgctgctcagggagcctgccggggtgagtggcacatcccgcgtgttctgtgtggcgtgtcctctgtatttgtgcctctctttctctgtgcgtgtatgttctgtggtgcatggcatagagatagaaggctgtgggtatgtgcacacgctatggtgacttttatcattattgatgataatggctttttatttatttatttatttatttatttaggctttctttttgttattttacttattttgagggaaggtttctctacatagtcgtggatgttctagacctagctacgtagatcaggatcaggctggccttgaattcatgtctgcttatgttcct

SEQ ID NO: 29754 - DNA, 1082 bp, Mus musculus
tgtctggtcctgactggacccttagagttggacttgggctggatagacctgaggtgggacaattgttagatggttagatgattgttagccttcttatgtcatcctgaatccagtaggtgtctactgcactgcagccttggaacatctctgcccaaggctggggttcactgtgcacattggcttgagctagtgagaccagagagggggaagggtccaggtgtccagcctgcaaccctgtcctcataggaccaatacacttttacttccatgtccgctcaggttcgagtgtggcggtacttgaaaggcaaagatgtggtggcccaagagagcctgctggatggtggcaacaaggtggtaattggtggctttggagaccccctcatctgcgacaaccaggtgtccaccggggacactagaatcttctttgtgaacccagcaccaccctacctgtggccagcccacaagaatgagttgatgctcaactccagccttatgcggatcactttgcggaacctggaagaggtggagttctgtgtagaaggtgcgtggtgagagtgttcctttaagggccagtggcttgctgatagtgacagaaatttatgggatcagggtggggtgcagaggagagcttgccgtgggcaggagagtaaaccatcaccccgccgcctacctgtgatgcgttattgctcctagctccttctctagccacacagattgaaaaaccccaagctctgatgttagctctttgtttggtcttggagccataaacaaaaaggctgctgtcctgaaaacagacaggtgtctctgctttgtcttcctttttccctcagcactctacactcccccttcaaagatccttttctatggaaactgggagcaggtaaatgcataccacttattcctacagacctctaaacatctggttggattggctaggcacaggggattggaaggtggagaactctcctgtgtgttccagaggcacacagtttgtgggattatactgccatcctcttgaaggtgaacagaattaccttgccatccaggtctcccctctctcttcttcagtacacccccagttg

SEQ ID NO: 29755 - DNA, 1122 bp, Mus musculus
aggagtgtagccccaggggttgtgcacacagcacctcaacagtacggcaggtccttgggttccccccgggcatagggggctcctttcgttgccctgtccctatggttactccctctgtgccccactcatttggcctgtctcttggcttgccccttgggcttactcttgcctatccaactccccaggagcacacatgacctggtggccatggacggctggctctacgccgtggggggcaatgacggcagctccagcctcaactccatagagaagtacaacccgaggaccaacaagtgggtggcggcatcctgcatgttcacaagacgcagcagtgtgggcgtggcggtgctggagctgctcaacttcccaccaccttcctcacccacgctgtctgtgtcctctaccagcctctgacacgcgccagactgcacagaggccctgcagccccccacatgccttaaaccctacggggtggccctaccgactctgtcttctctaccaagtgttagggcagatcacgtagcccaccagagatttcctgtccttcggtcttggtctcggtgttcatttgtcctcgttcatttatgtgtgcgctgtttgtctactcacgtatttattgactcactatttactgatggatgagaagtgctgcagctacaggttcacacatttactctcgattgtcagctctcctgcattgaggggaccaaggaccccttcggagtgttctcttgcctgtctccctctgtgggacaatagagaatgctgggtagacactcactgaaggaggatgagcaacacagctgggccttgcaagcaggaaggggcagagcaactgtggcaacaggagcagcggcaagggctttctaagaagatgatgcagacccctagccagcgctttgcacacagcacttatctgtctctgccaggcactatccctgaaggacacaaagcagccttatttcctatgtcccgtgtacacagtgtgatgtcttttctgggtcttctatggagctgggcacacaacatgcacttagatcctacacagcaatatgagccaacttgaacaataaacatgtttcttgggctccatgggcctgaggctgaatgtccatctttggc

SEQ ID NO: 29756 - DNA, 1168 bp, Mus musculus
cgtgtaggagttgctgccgtcgggaaccgactgtatgctgtgggcgggtaagcatagaagctggccatgtaggctgaaaggtttgtcacaagcctgccgggccatccttggtcagtagcggactcttctcctagctacgatggaacctcagacctggctacggtggagtcctatgaccctgtgacaaacacatggcagcccgaggtctccatgggcacaaggcggagctgcctaggtgtagctgctctgcatgggctcctgtatgcagctggtggctacgatggggcttcctgcctcaacaggtagtagtttgggttagggccccagtggctttgcagggtcggctcagcagcagcagctaaggctggcttaactatgaagtcacatctggctaagagaatgagggcctaatccaggctactgggtcctcaaggcttccttacctcagggcacagcatccgcagggccttggcaccattctcctcctggaggggccctccctccagtccaagcagccagcagccagtatccgcccagcacaccttgctctctattcatagagtctgtgatgcccgggatttcagccgtagctttggggggagtgaggggacagagcctgggcaaggatgacttaactgttgtaactgaacgtcggcatcattctggtgtccacagtgctgaacgatatgacccactgacgggaacatggacatccattgctgccatgagcacccggaggcgatatgtgcgtgtggccacacttggtgggtgacaggcttcccgtggtacccgctttcctgcctctccccttcccacccacccccaaaactcctacaccctgcaggagcttcgtgggtatattgccttcccacagatgggaacctgtacgccgtgggtggttatgacagctcgtcacacctggccaccgtggagaagtatgagccccaggtgcatagcgcaccccatcacaatgtcctcctctaaagtgctgggggggatggggcataatcccagattctggccatctgtgccacccaaggggtctgctttctatatcccacccctgaccctcagatacccaaccaagagtagagtctatgtggtggcagggttggggggcccttggtgggtctgcctccagcctgtcctattgtctctacaggtgaat

SEQ ID NO: 29757 - DNA, 1197 bp, Mus musculus
aaaaaaaaaagaaagaaagaaaaaaaaagaaaggaagaaaaagaaaaaagaaaggattgttttccttagctttgctcaagaaaaatacagctatcctaaactggaatcttcccgtattctttagagtcttaagtatagagtttaacttcacttttgtcagctgtcttgagcttatttctaagtagttttgttttggcttttggtgagtgaggtagtgggaggttaattttggggtcttttttttttttggctttgtttgtgtgtgtgtgtgtgtgtgtgtgtttatgtgtttggcttttgggtttggttggttagttgtttagtttgtttttttgttgttgtttaatttgctttttctaggcagggtttctctatgtggccctggctgtcctagaacttgctctgtagaccaggctagcctcaaactcagagatccacttgcctctgtctcgagtgtgcttgaactaaaggcatgagctaccctcctcagcccactccaaactttgagtaatatttttaaatcatagacatgttggtattagaaacatggcgtattgtggtggatggtagagaaagggcgccgcaacctctcaggacatcatatgtctggccagctcttcattcatataggtgctctctggatatgtctttacatcagactcacacctctgaaacccggttttcacacaaggagacttgccattggggtctttagtagcccagggaaacatagagtaaactgaagagcttactgtgtgccgcttatccttagatggcctcatccagtcacaggtctttgtcagaatctaaccattgattcactgaggagaccctactgccctgaggttccactgaagcagcttttagtgagactagggcaagaatataccgaatagcttctgttcaaggtttggttccagagactctaccatttacaggactggctggagttacaacaacctcttaaagagggtagggcgggttctccagttagaccccctaacctcacaggtgagtagtcctaacctgacagccttagaaacacagttgccgagtacctgagagcacccagtggcccgccgcctcctattcagcccctctttaaagacgacagacggttaagccatggagaagctgttcaggtagcacggggccatttctgcccccagcttgtcatgttttttctctcaggaccca

SEQ ID NO: 29758 - DNA, 1111 bp, Mus musculus
atctcacaagctttaattgttttgtgcttggtcaagtattcatcttcttcttcatcgagctctgattcttccagcagttcttcagattccgaagatgaggtaaggcttgctgtgatgcttttcacgtaattgctgtctacttgagtgtcagagggactcctgttgtgaaattgctgctagacatgttgacatttttatttcaaataattattcataacttagagtaccatagatgaataatgagatgagagcttaaatattggtgttttctttttttaaagtttgctttgttcacttaaaataatagattcttttaaattctaaaatgcttttgactcattgggtggaattataagcatataattcagatcacttgactctttaaatagaaaagtattatgttacattacaaatatgaatcgaggaaaatatgttcataagctggtcctttcattatgctctggtcattactacattcatattagttaaacggataaattatattctgaaacagaaagcaaatgcttctaaaatgttttatgtaggataaaaaacaaacaaaaagaaggaagaaaaagaagagccgttgccataagtctcctgagagctcggggtcggattcggcttcagacagcaaggtgaggctgcactgggctgctgagagcggaaacgtgcccgctttctgtctgctcttctgtctagcatcacttgagttcgaaggagcacatttgatttgagttttggtttttttgagacagggttttttcctgtaatagacctagatcaggatggcctcaaactcaccgagacccccccacttccactgcgtcccgagtgctgggattaacggggtgccccaccgcgcccagcgacatttgacttttgtactttgaggttctgcaccagttgactggtgtatttaatactgaacatgtagcatctttgtatctgcaggtaccttcttcatatgcatgtttctatgttcccaagtctccatgatagtgtttcaaaataatatttataatcctaggcaaaacaaaacaaaacaaaaagcacattggaagttgagctaattactttttgatgcctagcccagtatgctttctttttt

SEQ ID NO: 29759 - DNA, 1156 bp, Mus musculus
tcctcttccagtgcttggtgactctgggagatagtactttgcagtcatactagtgattaagatatctggaataaagctaatattttttactagaagtacttaagaataaatcaacagaaactgaatctggattcatcttttaagatgtaaccagaaaaaatgagatgactctagtaaaaattttcaaagtagggattacattaatatttcagaatccttactctgtagataagtatattttaattttccccatgtatactttgatttacttggggaaggagcttttaaagggggtggtttgctatctctttagctaccagaacagtgtgcctttgatctcacacatcctacttttatggacacagtagccatgcttcctgggaggacagagctgggcaccgtcattcctgcccgactgaggttatgacatccttagactttgttgtatgctgcttcgaatgaaccagagatacccggccctttgcagcatgagaaagcccccaaagctctggaatttacctccacatcaataataagtgaatgttttcagggttacattgtgttgtgtcatttgaattcaatttgactacgcttgggctttggagagggactgttgagtagacgcaggtactttctgagcttgatagctgacaattctaaagcgcatgtgttacacaagttttaaccagtcaggagatttttacatagccagtgatagatactttatgttttgtataaattttgtttaggctgcaatgtttagcttttaactaactcttgctgtcttaagttcataactatgtttaatggcacacttacaagatatttagcatgtaaaaagcaagacttttgtttttttgtttttaacggcttcatattgaagctgagactttaccacaaacaagttgagtggcaggcctggtatgctgtatcttgttacataaagctcttgccagaatcttagtaaacacatgttttaaaagtttgttgtctttgtgtatcagtaacagatgatgacactgttgatgatgatgatgttaacttgtgtgagagctacagtgctgctcttctgtgctgtgtcctctaagactttgtgcttcgaagctgctgagtgatttggaagggtcaaaggacttgataactcactttcatttta

SEQ ID NO: 29760 - DNA, 1110 bp, Mus musculus
ccagtatagtaaccttgctacgaaggagagaggctatcagtaaatgttgacactaagtcctaagtgcatattacaattccttttttaggtaatgggataatacagggtttcacatatcccaggcagttctgtcgctcatttacagccccattttaaccatatatatttttaaattagcttctaatttaaaaaacaaaacaaaacaatgtaatcacttcagaactgaagtgaacaatgtgtttcttaaggttacttacagctcagcaaattccttcccttcatcttcactaatagacggtcttgtgtgggcaagtgcagtcattaaatgtgcctggctaatagcaaaagtggttttgattggtccaggctggttaagggattcatcctccttaaatacaaagcagattaagcagatgttaacttaggaattcaagagataaagtggcagtccctgtgttatttcttgtcaagttctttcctgagaagcgaacattctctttctcacgagacagtcacggaacaaggaccgtcagtgggcagagtccctgtgcttcagcacttggcttgtaaataaacatttaaaacgcaaagaaacacatgtcaaacaaagaaaagcaacttgtctaagttctaagaagaagggaaaaggccatactccactttggctccggtatctgcctttgatgatgctgatctctgccctcagctgatctctctgctcctgggtgaggtcttggcagccttcttgggaaggtgtcctgaacacaggatgttgtgtaaataacgggtctttcccaggagctgcaggtaaatcctgagtcacggagcttggtgcagacagacagtgtgagctctgcatgatgagtaaagaccaaagacacagatgggagagaagagagggagacagtcatgttcactggagataagaaatgaaaactttgtttccttttaaaaattcattgcttgagaatttcgcacgtgcatatgtgattttcatcaaatccatcccactttcttgcccccctcccctgccatagtccctcccactttcccttctaaactcatgagtgcttggtgccccttggtctacttggtaggaatatagccaga

SEQ ID NO: 29761 - DNA, 1767 bp, Mus musculus
ctagaacacacacatcccaaaataaagccaggtttccagtttccttctatttataatataacaagatatgccacactcatttctctttataaacctttttctctaagttcttgagatagggtctcatgtatagcccaggttcaggttggcttggccttgagatccctgcctcgtctgccttgtgtgacaggtgtgttatgtaggtagttaacgccagaacttcttcatgaagttcttacctggaaacaggacttgagaaaaatgttacctactacccagtagttgtattacctgcttagtgcctgttgcttagaaaatcacagggtgaaaaaagaatgaattgaagtgaaataataaatttaatatgtattttcccaggcaaagtggcagattccagggaaatcattataaacatgtagtgtctatttttctttataatttatttctatgaactcataaaatgaattacatttttattggtgtaaaacactaagttttagatttctctcttttattctctctcttctctctgcctctgtctctctctacttttcttttctgtttttttttttttttttttttttaacctagaatctcactctgtactcctggctgtcctactcattctgtagaccagactggcattgaactcaagagatctgcttgcttctgcttcccaagtactgggactaaaggtgtgcgccgccatgccaggcttaagttttagatttctgatcaagaactaaaccaaaatgtgagcagtatgtcttacaaagccacagtcttctctctcgaagcagaccttggctgctttagtcctgtagaaagcagctgctgggtgatgggttagctctggctcttcacactgatctcacaccagagcggtcagccacttctgtagacctgcctttgcctgtcagcatcagctgcttcagccagatctttgatctgcatgcagcatcccctcctcttactgaggcagcagcctctgtgagagtggcctgacgattgctaaggcagggactgaaaggtcattagttttgatagtcaaaaaactcaaacccagaccatgtgctggaaatttggatggtgtgctttggttgtatgatgggggagtgggcaggtacccacttgctgcctctgtcctcatctatccagacagaccgttttaactataggaatttatgagaatttgacttgatcttaatgattttcatcaaaactcttttaccctttttctttagtcccaaagttggaaaaaagcaccttcgtgcttacataaggtataataaagttcattggaaatactattgaaaatgattttctaaatgctaatattccagtttttgattaaaaaatatttctacagtgggtttattttggatttttaaatacttaaaaaggaaatgggatgcttcccccaagatggtatgaaatagaaatatccatcttttggttacatggctcatcgtacagtgaagagtcacacagtgctaccgaggggcacaggctttaaattaaccggttgacctttaggggagatttgctgtcctcaaggcacagcatatttcccgtgtgctgtgggaggctgtgctgctcgggtttctgttttaggctggaggacagtttttttagagtttagaaagagaaactgcatattagttccctatcagatttaggataggtaaagatcctttcccaatttgttggtggcctttttgtcttattgacagtgttttttgccttccagaagctttgcaattttat

SEQ ID NO: 29762 - DNA, 1183 bp, Mus musculus
agctggactgtacacactgctgccgcttgtctctaatctcaaagacatttttctaaaagctgggcacatagctcagaggtaagagtgcttgcctgatggctcaaggccttcaattcaatccccattaccacaggtaatgataaaaataataataaaatccttacatgcttagccccaacaccatgcctgcttctcaagggacctgtgccaccgacaaggcagcacttccctcattttgagtacttcatgaaggtttcaaaatggtagtcacttaggccagcagcctccctgaagggatgtcggcccaaaaagctaaacttgtgactttgatacaaagagggctgttgacatctgcagagaaggacctaagatgctgtggctaaaagaaatcagatggcaaatctaaccgccaaacatgtggcccaaagagcaatgatcctggcagtcaaggagcctaaagattattatgatgtcagagagaccagctttagatacacccctgagcactatcaagttatggacattatttgacccacctgggggccaagaaattaaaaggtgtggttaggtcctttgactgctatgttacaggactctctgacttagcagaagaaatagtcaaaagctgcaaggactgtgctatgatgaggtagaatttacagaaattaagccagctagatatggcaacaagtacatattagtgtttatagacaccgtttcaagatggatagaaacttttcctaccaggactgagacgaccaatgtgatagccaagaagatcttcccgaggtaatggacctgcctttgttgcccaggtaaatcagggactggccaagatattagagattggttagaagttacattgtatatacaagctccaaagctcaggacaggtagaaaagaagaatagaattctaaaagagactggtgcagacttggtgctccttccccatgcccatcactgtcttaaatgatgtgtctagacctacatgttgttgtaataataatctgtaaactaagttaaaaggcttgcaggtggtgaagaaagaaggctggtcacaattggctacagcgaacgagccggtaccccaaaagacatctcaccagttccagccagagatctgatccaagtacacctacatcatgcccagaccttcaagcttcactagaagggtccctgcct

SEQ ID NO: 29763 - DNA, 2182 bp, Mus musculus
ccaccagaagactcagtgtccaaagatactggtgttcatgaaggtgaaagagcccagatggaagaaaatcctctggaagagaatattctggccagggaagagttgtctcaagctggtgacagtagtaacgaggcagtgggcaggggggacaggccagatgctgccagtcaaacccctcagacctcaagcgactggctcgagcaagtacattcagtatgaactgcacacatttgctctctgggtgaatcacagtacaggggtctgggaggtggcgtatgctttagagagactttaatgcacttaatttgaacttggttatgaaccactgatgttaggattgaatgcaaaggagttcccttcacatgataactgcagtgctgactttaaccttacagggaatttcttttgtgtctatccccctttttagtgacaaaaaggagcaggagaacacaatggaataaatgggctgccacccacattccgagagaacgcagctctgtctagcctgcagtcggcagtacttaggttgaccttttaaatcaaaagcttactccttgatccttagatggcttcctcttttttatagaagtgaagaggtttcttcattgtagaagttgggccagacagttctgtcctcggtgtctgtctcctctccaggggcctccttccctcctgttgtccaagcagtttgagctgaggcgtccgtgctgcttgtagtgctgcgtctaccacagtgagcaaccggtttcctttcacatcatcaaagattccttctcatgtctcttcacagtccaattgtgccaaactctgactcgtgcgtgcgctggctgacagggcagggaggtgtgctgcaccctggggtgctccagggcagttgtcagcgtgctcgggagtaaaaggtgccactcgctagcagtgactgtccagaaattagtgggcttttgttgccatggagactgcatttaaataaatgtagcctgtagcttaagtaaactaaagctaatgctgctgttaaaacagtttattttaatattaaaatacagttgattagcaacagcggtgctgtatttaagagacactttattggaagtgcaatcatagttctttgttttcacagttttacagtgcattctaattactaacgggtgcaattacttttaatggtgttttataacatagaaaaactggagttttcatgagttacagtaaatcccacagttattagcaaattcaatacaacatcctacgcaacatgttaccgtgcctttgcctaacctaaatggatagatgccagttaagtaagtcagtaattccaatctcaatgtcttttctgaagtaactatgctatgaattgcgaagacctccatgaaaccacccatggccttgcctttacagtaactatgacaactaagtgttcaattggtttgcctagatagcaaatgctgctgtgtttgttctcttgcgcaatactcatttgctgtttgatcactgtttagtattgaaaactcaacctcctagttatcagtgtcctactgtgaagaaatactggtcttagttgtaattacgatgcaatggtccagtgtgtaattaaactagagtaaactgttggaatgactcttgtacttacattattgaagctagcataacataagcaacatagatacaaggggcactcctggagtgctttgccacattgttaccagaaaccaaaatctctctactaagtgtgtacagggaagtcctaggccaagtgaacgattgtccttattattgatatccacgattatcatttttcattacctctttttcaaattttgcttttgaaatattcatgtactttgatttcatatggccaagaagacattgtacttgagtatttaattggtaattgttcatagatatcaagagtcctaatggttttttttcttccagttaccacaacattggtatgaatccctattgaagttagtggggggaaatgttaactttgtctacagtgtattactgtatattaaactgaaatagtccattaaaggattttttatttggattaaaaataggaacaaccataaaatttctagaccaagctgtaacttttccagtagaaagctcttgtaatccctagaggcatcttgcacatccatggtgaggagagggtgtacccagaggataggaggggtgc

SEQ ID NO: 29764 - DNA, 1195 bp, Mus musculus
tcatggaggtcttcgcaattcatagcatagttacttcagaaaagacattgagattggaattactgacttacttaactggcatctatccatttaggttaggcaaaggcacggtaacatgttgcgtaggatgttgtattgaatttgctaataactgtgggatttactgtaactcatgaaaactccagtttttctatgttataaaacaccattaaaagtaattgcacccgttagtaattagaatgcactgtaaaactgtgaaaacaaagaactatgattgcacttccaataaagtgtctcttaaatacagcaccgctgttgctaatcaactgtattttaatattaaaataaactgttttaacagcagcattagctttagtttacttaagctacaggctacatttatttaaatgcagtctccatggcaacaaaagcccactaatttctggacagtcactgctagcgagtggcaccttttactcccgagcacgctgacaactgccctggagcaccccagggtgcagcacacctccctgccctgtcagccagcgcacgcacgagtcagagtttggcacaattggactgtgaagagacatgagaaggaatctttgatgatgtgaaaggaaaccggttgctcactgtggtagacgcagcactacaagcagcacggacgcctcagctcaaactgcttggacaacaggagggaaggaggcccctggagaggagacagacaccgaggacagaactgtctggcccaacttctacaatgaagaaacctcttcacttctataaaaaagaggaagccatctaaggatcaaggagtaagcttttgatttaaaaggtcaacctaagtactgccgactgcaggctagacagagctgcgttctctcggaatgtgggtggcagcccatttattccattgtgttctcctgctcctttttgtcactaaaaagggggatagacacaaaagaaattccctgtaaggttaaagtcagcactgcagttatcatgtgaagggaactcctttgcattcaatcctaacatcagtggttcataaccaagttcaaattaagtgcattaaagtctctctaaagcatacgccacctcccagacccctgtactgtgattcacccagagagcaaatgtgtgcagttcatactgaatgtacttgctcgagccagtcgcttgaggtctgagg

SEQ ID NO: 29765 - DNA, 1134 bp, Mus musculus
ttttttttttatcttttttttaagtatttttttaattaggtattttcctcatttacattttcaatgctatcccaaaggtctcccatacccacccccccagtcccctacccacccactccccctttttggccctggcgttcccctgtactggggcatataaagtttgcaagagaggacaactttaaagagtcatttctgtcctgctacatgagtgctatgaatgaaactgagattgtccaccttttatcacaagctctttgccttctaagctattttgctggctctccatcttaattaagtgaattagtcagtgacacacctcaatagaaattggactttagctttgaagtagacttaacccttaaaattgttatattctttgtatttttagataggaaaaagttgtttttatccttcctttccattttaggacttttctttttggtagagatggaaacccaaataaacggaatgtgcacaatgaaacatctatgcatttgttgtgtatgggacctcaaatcatgatatctgaaggaacccttcatcctcgcttagcacggcctgtggaagatgatttcagaagggcagattgtctgcagatgatcttacagtggaaaggagcaaaacttgaccaaggcgaatatgagagagcggctattgatgccgttgataacaaaaagaacacaccccttcactatgctgcagcctcggggatgaaagcctgtgtagaggtaaaacctgcttgcttttccatattctgtgctagcagattgtatgttgatagtatgtggtagtcagggtttgctttgtctcagcagttctcacctctagtcattctaaaagaaccaaagccctttataagtgcctttataagcccttacattgctttagggaacagcaaccagctttccagcttttcagaatataatgtaataaaaatcaagaataattgttaatatctcttaagatattaataggtcagtagtatcatactgaaaatagtaggggtttttatctgtgtttgctgaaaatttaatagccaatttctaaaacttccatatcttggatatgggggaaagatgacaactattacttattgatatattatctttacttgatttgtttattaataga

SEQ ID NO: 29766 - DNA, 1169 bp, Mus musculus
tcaatgtatatttatccttccaagtttactgtaagtacttgcaaaatataattaattgtatggtaattatctttgaatatatgtttagcaccaaataatcgtaattatttataattaagtaagccacaatggaatcaaggatttagtgtacattaatgcatttgatttgtgttaagaattatctgcaaaattttctacaatttttttctagtcctatttatgaaaccaggtctttgcaaatactaccagattctatactattgatcacatcctaagcccaagaaatattctttactttttaaaaattattttattattgtatgtgtattttccctgcatatatgtctgtgcaccatgggcatgcctggttcctgcagaggttggagaggtgttggatcccttggactagagttgtagatggttttgagccaccatgtgtatgcttaaaattaaacctaagttctttggaagaacatccaatgctcttaaccacagaaccatctctccagcccatagtctacttttgttttatttttttgagacaggatttcacatgactcaggctggcctcatacttgctatttggctgaggataaacttgaacttgtggtggtgttcttaatattcacctccaagtactgggattatagtcttgtgccctcatacgtagctcccaagaaatgctcgtataattatgtcattaaaaacagggacgtaccgggcgtggtggtacacacctttaatcctagcactcgggaggcaggcagatttctgagttcgaggccagcctggtgtacagagtgagttccaggacagccagggctatacagaaaaaccttgtctcaaaaaaccaaaaccaaaaccaaaaaaaaaacaaaaacaaaaaacaaacaaaaaaacagggacgtatccacaatttgggtagtaataattgttgaactttgatttaaatttagatctataaactgtttgatacttagatgcatatagtttaatgtaaggtttctatgcattgatatagtggatttattttacagtattattcataaagaacagctctttttcaggtcttcagttcaagccttatcataaacccttgcaacaagttcatgactggccagaaatacttgctgaattgactaatttggatccacaaagagaaacaccac

SEQ ID NO: 29767 - DNA, 1212 bp, Mus musculus
ggggggggggctttgaagctccacccagtgtggaagagccagtttttctcctggttgcactctgtcaagatacagacttctcagctccttctacagcactgtgcctgcctagatactgctatgcttcctgccatgatgtcaatgactgaacctcttaaactgtaagctaaccccaatcaaatattgtcccttggcaacatggggtcatttcacagcaatggaaaccttaactaagacaaccaccaacattgaaataacaggaattaataatcattggtcattaatatctctcaaaatcaatggactcaattccccaataaaaagatacaggctgctctttctgtacccagcgcagccagggctcgtggtcccaagaaacacctgaagcgcgtagctgctccaaaacattggatgctggataagttgactggcatgtttgctcctcatccatccactggtcctcacaagctgagggaatgcctgcctctcatcattttcctaaggaacagacttaagtatgccctgactggagatgaagtaaaagagatttgcatgcagcgattcattaagattgatgggaaagtcaggaccgatatagcctaccctgctgggtttatggatgtcatcagcattgacaagaacagagagaacttccgtctgatctaagacaccaagggtcgctttgctgttcatcgtattacaccggaggaggccaagtacaagttgtgcaaagtgagaaagatctttgtgggcacaaaaggaatcccgcacctggtgacccatgatgctcgtactattcggtaccctgattccctcatcaaggtgaatgacaccattcagattgatttggagacaggcaaaataactgacttcatcaagttcgacactgggaacctgtgtatggtgactggaggtgctaacttgggaagaattgttgtaatcaccaacagagagagacatcccggctcttttgatgtggttcatgtgaaagatgccagtggcaacagctttgccactcggctgtccaacatttttgttattggcaagggtaacaaaccatggatctctcttccccgaggaaaaggaatccgcctcacctttgctgaagagagagacaagaggctagcggccaaacagagcagtgggtgaaatggtctctaggagacatgctggaaaagtgtttgtacaagcctttctaggcaacatacatgc

SEQ ID NO: 29768 - DNA, 1193 bp, Mus musculus
aggaccttcaacaacaatgcctttatctaaatgaagagatcgagaagcaaaggaatacgtttgcgtttgctgaaaagaactttgaagttaactatcaagagttacagagggagtatacttgtctgctcaagataagagatgatttagaggccacacagaccaagcaggcattggaatatgagagcaagctgagagcgctggaggaagagctcctttcgaaaagaggaaatccagccgcgccaaaggggaagagttctggaattttcccatctgagacgctggaaattggggaagttgtagaaaaagatacaacagagcttatggagaagctagaagtaaccaagcgagaaaagttggagctctcagagaaagtctctggcctttctgaacaactaaagcagacccattgtaccatcaattctctaagtgcagaggtcagagccttaaagcaagagaaggaacagcttttattgagatgtggagaacttgaactcctcgctaaccctagtggaacagaaaatgcagctgtctgccctgtgcagatgagttcttaccaagctgggcttgtgatgggcaaggtcggggattctgggggatctatttctaaaattagtaaagatttggctgaagaatcaaaaccaatgatagaagataaaattccctttaaagaaagtgggagagaacagttgctcttgccaacaagagcacaaaaaccgtctcatgcgacagttgaaccatgtgaaagtgaaaaactccagcaagagcttcatgccctcaaagccgagcaggtatgtccacatgctctcgggacatcacagggcacatagagtcacactgaagccgagcaggtgtgtccacatgctctcaggacatcacagggcacacagagtcacactgaagccgagcaggtgtgtccacatgatctcgggacatcacagggcacatagagtcacactgaagccgagcaggtgtgtccacatgatctcaggacatcacagggcacatagagtcacactgaagccgagcaggtgtgtccacatgatctcaggacatcacagggcacatagagtcacactgaagccgagcaggtgtgtccacatgatctcaggacatcacaggacacacagagtcacactgaagccgagcaggtgtgtccacatgctctcaggacatcacagggcacacagagtcac

SEQ ID NO: 29769 - DNA, 1143 bp, Mus musculus
tccgccacgacttgtgcaccagaagattgtgcaagaggtaatggctccgtgtgcttttgaaataatgcacatcttcctcctcgcacagttcagggcactcccaggatacagaaatgtgcgtaagggaacatgctgggctttatgggccacgcacagtgtcacacatattcatggcctgtcagacacgaagaccttaaagctgcttttctcagccgccatgattgtatagcatttgcaaatgggtgcctcagggctgtcgtcgtctgtagccagggttactacctgcctgctttccttgtctacggataaagaataaccccgtgtcactactcggggatcccatccatgtgtaaactaaaaaggttaaagtgaagaggctaaaacaagtctctgtaacactgaagtgttttctctttgctctgtcctctgataggtcttcctgcctctttaagtgtgaagtgtagcagaatgtgtcttgtctgaggttgggactcagtttggactttccttccctgttcttttggctccttgccgtcaccttgctgatagatagggtctggaatccgggattagaaggttaaatctagttttcgtccaacatccctgacccctgtccctgctggctcgaggcagttcttccacagtgctgctctgtaactctggagaacacgcagcctgctgagcttcctgtggagaaatgagaagaaaatagccagttatagatggtttgcttagttacaggttggctagcagtgtgtttcttacctcaaaggaaagcttgatttaaaattttaaataaacttaacttaaaaacatttcagttgagtttaaaataatctctaaaatgcttttagtaaaataagaactgaaatactaacaattcttttcttttcaatttcggtcttttcacacttggccgattgacgttttagaccagctctcctgcacaagctgtagacaaagggtatttactatgtatggatcttaatgtgtgtacaacaggattctatgtaaaacctgtggaagcaaaattaaaaacaaagatcttgttttacttaaccatctagggaggagttttcctgttctagtcaaactgatgccatgctgacttccacagtcaaacactgactgaggaaacggcct

SEQ ID NO: 29770 - DNA, 1146 bp, Mus musculus
ctagtctgtgcaggcttgccgggcaaaacattctctaaaagaaagtaataataatgggatcattggagtcattttcccatgggtaacttctgtaaatctagagtgtggctatcagaaatcactgggaattttccatgtgaatggttggttttacagatatacaaatatgcaagttcctatctaaaatatcttaaagcatctgatgttgcttatttaaagtcttgcattttgtcctccgctctgtttttagttctgaagcatttgccccactctgagaaagagcaacactgtagattatcagtctaggggactgggagcagttgaagatgtctttgtagtaatcacctgaattacaaatgagttcttaggagtaaaatactaatcacacgtgagttgccaagctatcttttaactccagtctggcttctttctagaactcctggactgcagtatgcagcagaagcagtcgctggaaatgcaactggaactcagcagcctgagagacagagcagccgagctgcaggaacagctgagttcggaaaagatggtggttgcggaactaaaaagtgaacttgcacaggcaaaactggaattgggaacaacactcaaggcccagcataagcgcctaaaggaattagaagcattcaggtatgctgagtgctttagtttaaggggcagtggaggaattgtactggtgtgtcataccattatgcagaaagcgcacggaatttaaacaacagaagaatggctgcagaaggaaacctcctggtgtttccacatttaaaatgtgattgttttggcagaacctctgctatgaccaccctgcgctctgacttctgttccagtcaacagttactagatatagttttgggctctatcttaccacagactagctttaagtgatgcttaatcttgggttttagttgactagtatttgccaagtatgagaatcaagactgcataggaaaaggtgtgaatactgacgtattctgcttgccagaggcatgctgcagctacacacatttttattttggacattgatttcacacacacaaattcacatgatttctatgtgcagtaaaagacaaaaaaagttaattagtattatctttctggcaattaaattatactattagagacagtagt

SEQ ID NO: 29771 - DNA, 2978 bp, Mus musculus
ttttgactgacaggttcacagtgatataagagacctttggacctatatctcacactttcccaagctagaatcccgtgtcatgatttgaaccttctaaaaatagcatcctagtcacccatgttatcctctaacactggacatacctggacttttaaataatttagattctcaccttatgtgcaggcgtcaccttttatactgttacagatttccttcatttaagatgagtactgttccaggctgaaagaaggaatgaagattttaaaacttattctgatgaaaatttattttaaaacagggcgtcatcgttgtgttggagaaaattttgcctatgttcaaattaagacaatttggtcgactatgcttcgtttatatgaatttgacctcatcaatggatattttcccactgtgaattatacaacaatgatccacaccccagaaaacccagtaatccgttacaaacgacgatcaaaatgagaagaggaacaagaagccagtgtggagagaggaccgcaagccgcagctggcaaagaatgaagcctctgagaagctctcgtgctgtactgggttgaagagtgtggttctgagagccagtttatgattttaatgttttattaactcggtgatttttgtcagaccgaatggcatttgaaacagtttatagtagttttgataggatttcagggaagccaagtttatgttagaaatcatttgggggggtgtgtcttggaattaagaagatatagaatgcagcatccaggtaattaactccacacattgccacagggagatttggaactggtgtttgaagtttcaaagccttgtcaaatgctacaaaggtaatggggtcgtgtagttgggccacttctgtgcgtaaagatatgaaaggataaaggttaagtttactgcgaagcttgaggtggaagtaaacgctacttagatggtgtggtgtgtcctttgaaatgttaactggagcaccgctcctggaagatggcagcgatcttgaaccttgccttgataaccttaattcctaaaagtaataaaatctaaagagtgcttatgtatgttactggtcccaaatggtcacagttttgtgaaaaatccaaaatcaaatccttgtaagacttttttattttaatttggcttaaggttttttgttgttgttgggaagtttaaatttaccaggcttttaaaagtgtctgattttgagattagtgagttctggccttgagactggggaatgggagatggtatcattgcccgtattctgtgctcaggagacaacctaacagattgtaaccacggacccaactctgtgacatgcccttaatctgtgttaggagtaagaatagctctgttgctggagtggtgctgcacacctgtaatgctgttattcaggacctgcggcaggattgagaatttgaggccaacctaggctacggagcaagactaacacactccccaaaataaaacctcttttctctaaaagtatgtgtactggctggtcttaggcacttgacacaagctagggtcatcagagagaaaaggaagcctcagttgaggaaatgcctccatgagatccagctgtaaggcattttcttaataagtgatcaatgggagaggctccagcccactgtggtggttccatccctacgctagtgatcctatgaaaggctgaccgtgacatgaggagcaaaacagtaagcagcactcatttatggcctctgcatcagctcctgcctccaggttcctgacctgcttgagttcctgtcctcacttgatgataaacagtgatatggaagtgtaagccaaataacccaccttcaccctcgggatttgctttttggtcatggtgtttccttgtagcaagaggaactgaaactccgttacagttttaagaggcttttgaagactcccagtgaaggcctaaatctctgctgttaaaggctccacattaaaattctctgagaaagttttactggtttgtattcatgaatttgaacttgtgcttcagtaagtacagttcatgaaatctgggcatatggaagcttacatcctatttgcctgaaataggttccttttagtattatctttggttatttaggtaagtcactcttgttatcaatgccccatgagaaatcaggtattttcataacaagttacaaaagttgctcacctctcaaaagtgtgcttgtctcttactgagtggttgttagacttttaggtcatagatgttacatttgacgtgttaggttaaaaccttgattaaagtttgaagactgtttgtttctaagtaacagattttctttgccagtgtagatgttttgtgtttattattcctagaggggttctagactttgatcaagtccctccttttactgtgtggttgttaagacttttaagtcatagacgtgttaggttaaaaccttgattaaagtttgatgattgtttctaagtaacagattttctttgccaatgtagatgttttgtctttattattcctagaggggttctagactttgatcagattggtagattcctggcagagttgtgacttgagtaaggctgtcctgtttactgtctagttttagactttgacatattttcagtgctgagatttaaaagggctcaagcactagaattccagattgagatactgaccacagacgagctattaagttattgtgaacaacacagcagaggctgagggccatagggtgttagtagggtagactagcagtagggtagattggctggcaagcacctgtccatctgccttttcccgactgaactgtcttgacttggcaactgtattagttttttaaagagtttaatgcacaactttcctgctcaactagttgctttagaatagttttgatatttttagaaagcctagttgaaatttgggaaataaaattagaaattcccagcaatgcacagctttgtgattgtcttcatgtagtgcagagaccattaat

SEQ ID NO: 29772 - DNA, 1164 bp, Mus musculus
ggaactcactttgaagagcaagctggcttcaaagtcagggttctgcctgcctttgtctctgtctccctagtgctggggtcagaggtgtgctggctgaggcataggctttaagtgacttgtttttatattattgacttgcggtctatcattgattatggatgctagtttcacatcagaaacatgagctgcaaagttgcctcaattttccggcttgtcttttgatctcatattgatatgccgagaagcactaacatttttgattgggtccagctgcccattgtcgtctttgcttttcatggaaatgattcatatctaagaagccattgccgagtttgtgatcttgtatacctacacttttgcttttttctagttctagcttttacatttcagacagtgatccattttgagttaatctgggtatatgatgcaagggaaggccacactattaagaatcaagtttgacttcagtttctaggatgacctctctcaaatcctccatatcctagacatagaacctaggggaggacagagtttcctttaaaagtgtgattacatttaattaaacaaatacctaagttagagtggcatctgccattgggcctctctgtcccttgtggaactccttccttacaatttggtttataaattgtctttgccccaagagtggggaactcagagatggacacagacaaaggataatgagagataatcatagttagtgtaaaagaaaaccaatgtagattggaagttcagctgtcttacactctcagtgcacatctgtttgcttataaagccaacatggagagacatgggctgagaggtggagagatgtggatcttcccaggacactgcttgggcttgggaaagcacagtcagaggtgcaagacagctggagctgagttggtggtccaacggcctgtgatgtggcctgggatgggctgtctggttcttaggctcttggacatccaggcgctgctgggagctgtggaatagctgagaacagaatctgggcctgtggctggatctagctcagggccaggggaaaatcaaggaactctgactggtcccaccatgattgtccttggcttgacagcaggctgcaggcttggcttagacttggtagttgtggctgggagcgtagagcagccttctaagggagactag

SEQ ID NO: 29773 - DNA, 1326 bp, Mus musculus
ctatggttttttaaaattacaacttctagccttttccacctctggttcttctcactcataaatggagctgagtgttggtcattccaagacagtggcagctcgaattctgagactaataatagtgttttccctttgttaattaatcttagttcttctctcactaaactgtttccagatggaattctaccatgccttggtgttagtatacagagataaaagtagggccaggtgtagtggcttttgactttaataccagcactcaggaggcagtgacaggtgcatttctggaaattctggtctccatagcaagttccaggccagtcagagctacacagtgagaacctgtctttaaaaacaattagaaaaagtggactcagcaatgagaatactagacagttttcagctcacaggattgtaactacaaacatttaagctttcttatgagaatctttcggcattatcatctatagcctcaaattactgttatgaattcactcaggaagagaaacagctgtttctgtattatctttttagtgttccagattgggcataaatagctgttttttaaagccatcaaaggaaagcacgtatttacaatgcttttgagtcactggggctgttattgagatggggtggataacttcttttgttgctaaaaagctgttgattttaaaggccttctaaggagccagttaggcaaagaaccttgaatgtgagacggtgcatagaatttctgttacccagctttgggagaagaataaacctgagattctgagttcactctgcttgtacatacgccctatgacggatagtgtgtgctgtaaaccacaaggtagaatcctcagtgggtgtgctgtgctgcctcatgtttattaaaagatgtatttttacaagtttgtctctgtccttttctcagctctaaggttaaatattttggaaaacatttgtcatgtgtatgtcaacgaaaataaagcactcctaaagaccatggctgcgtgccctggtctccgcggagacacgaacgacacggacaccaagtcgggttcacgcagcaacttctttacttgtggctttttttcctacagctctcttccccagcagcttcttcttctactccttcttgcagcttttcttacactacctcacttatagcagcttctcttacaacagctcgcttcaactcagggcaagggctaaacaacaaccaaactcctatactcacaccaactgacctcatctagctccaccccacctcatccaatcagaattcacacgctccaggcacgagctcaggtcaatcaccaataggctgacaggtcctggtca

SEQ ID NO: 29774 - DNA, 1175 bp, Mus musculus
gggactaattgaataggcatcagtatactgaagattgctatcttctacctcattccagggaaaagtaaaacgcattttacatgacagagtaaagctaatatttaagcatggttaacatttggcttcttcattggtttcagatggggtcttgctgtgtagctctggctggcctagagatcactgcagaccagtgtgtactcagactttctacccgcttgcctcctgagcactaactacaaggcacacccaattacactaacaatgcgtcaggagacagtcagtatgttgcttcatttgaagcaagaatccctttccagatccccttatcaggtagtgctcatgcgctggccaagctcttagtgcctaggacaaaattgtttttcagggcgcgggagtctgttctttagtgtcagcgccaaagattcatttggtggctactatttgagtagtggctttagtctgttcagttcctgcttcagaactgatttcttgcttctgacactgcttaacgtttgagtaagtacttcagaggatacacaaataggagaaatagccatgtctatgtaggaatgttgatctaattcacctgataaccagtgggaagtctgacattatggtagctggtaagcttgtcaagcattgacccaggagtgtatttcatctgaaagatgtctttgtgacacagacagcctgtggtccaccaccagcaatagcctggacgctggaaattccctttaatcaggtctcctcccatagccgtaataatggtctcagatcatgagaatggtaagataggagagagattaaattatacctattctacctctgaagctaagatgataaattaaagaggggcaaattttaaaaatatctcttctgatgtgatatcaaatggataaaaccatgttagtactaacatgacattgaggggtgttgggtcttagcttagggatttgagctgctcatttagataatgtccacgtactagcattgtttgtaaggactgtagtacattgtgcttatagatttttacaagcagctgattttatgataacagtttctgatgcctcttttgcaaatctgagtctttctgtagagatatgtagtacttttccctaagtccaacactactgtatgtaggccaacactactgtatgtaggcaagttaatccaat

SEQ ID NO: 29775 - DNA, 1205 bp, Mus musculus
atgttggccatttgaagtctctaggaagaataaattatataatcagcggggaagcccaccttccaagaagaaacagaattttttttcctttaggtgaaatgtgaaatgtacatgcttacttctaaaaaatacatccaagcagcacacaggagcaggaggcaacagaccttagctagagaaagttacagtcagcggcttaaggttttatgaaaattttacattttttccacaaatgagttcactgtaattttctttctttctttttttttttctttttgcaaagtagcagcaagttaatgagctttaaaaaattgcttactaagcgcggtagtgtgggcctctggtggtgtggtaagctctggtaagcgtggtggtgtgggcctctcccacaccccttgggaaggagaagctaggagttttgagtaaaacacagcccctcctgggtgacatagcgggttgtaggttgctctggatttcataatggaaccaggtttaaaaatactggtttttaacagtatgtgttttgattattgtatgtggtttgttgttttgtcctcaagtaagtctgtgtgactgtgtgaatgaagtgtccatgacagccagaagagggggtcagatatcctggaactgaaattctctacagtggaaagccaccaagcaagtgtcggaaatcagaaccaggtcctctgcaagagcagccagggttcttaacttccaagccttcttctccagcccctttctttaatacttttttaatttgttaaaaattatttaataatttattgtttagtaaaagttatggttattgacccctttttaaaaatcctttttttaattatatgttgattgtacttaaatttcttctgacttaataatgtgtatagtttgataaaatattatttgaattttaatctagtttctgttcctaatgtttccttctcgttctagtgcatggactagtttttcttggatctcttttttcttcattacaggggaatttattgagcactgtgcagggctctgtgatacaaagaacaggtagaactcttatcctgcttgtactgcacagcagaagctgtggggagctggcatggcctacttcataacaaagaagtgaagctgaggaaaagcatgccgagcttatactggccagcctacatgattgaagctggccttgttagatgctgtatcctatcagttccctt

SEQ ID NO: 29776 - DNA, 1137 bp, Mus musculus
gaccttgaaaagttataaatagtctaaataatataatctactcctgaaaataattttccacttaatacagcatcacaggtggtccaaaatcccaaagtacttggaatattttccagcaacctaactgttgtttttaacttgtttttctcttttgttggacaaggtacaagttggaggtataatcttctagaagtgaatttagagctcattaggaacaatggagaatatgacgtcctgtttgtcctgcgtaagatatgtgaagccaagactggattaggctctatgaaagctgttaaggaataattttctttgtttggggaaattttttaacaagctcctctccacggggttgactaagaaagtgggctggtcagtgactgaacacaactccataccccattggaaatagatgagcagccatttttaccaacaaaacacgcccaagagatactctggcaatgcagccttttggcccttgaagcaactattgggactcaccttaataattgtacctcttctgattactgtcttgaggaacgtttcaacatacaaagcagttaattattgttccagattccatcagcatccctggaagcctaggaaacatcttcctgaagttctctatccgctgcctcaagccttgctgttagcatcctttcccaaaactgaaaaatgcattcctaattccatttacctttaagggcagcaggcctttgtccaactgagaactggagtaaaatcttcctgaagagcagagtaatggctaattcttaagtttcatgtaaatggtaggtcatccattgggcaagtagttgacattaagtttcatgtaaatgattggtaggtcatccattggacaaatagtaccagacattagtgaactgattggaggcttgctaaatatgtagttattcactatttgaatcttaattggatttttctgctctggttctcaagagaataaatactttatattgttccatcaaacaaaagtattgtagccagacaaacggtggcacatgcctttaatcccagccctggaaaggcagaggcaggcagatgtctgagcttgaagacagcctggtctacagagcaaaatccgggacagccagggctacacagagaagaaaagccctg

SEQ ID NO: 29777 - DNA, 1136 bp, Mus musculus
tagtaaaatttaagataagatttaaagcaatgcctctttattaaagcattaaagtttgctttaataggtattcataggtattaattgacatccaaacttcgtaatatgatagtaatgcttctaatattgattttaaagataataaattgttttaaacttgggttttgctttcccaaggttgtaggtattatcctaaccttgcacaagaaacttaaaaattttgattaaaactgccattgttccattgactgcagcttgcagtttgatttcaaatttaagatctttaattcacctgtatactgtaattaagataattacaagagtaatcatcttatgagagcgctcatacagctcacttcatacgaaactgtgacagagttatctagttatgtttgtctttgtgaatagattagacaaatagtttggctatagttgctgcctggcaggaaactgcagtacgggcaattttttcacaacactaaagttgtgaagaacgttttaactgtaaggcatcttaagaaagagcatcaaaatttagaggcgtagacagttatattgtttctctagaattggtccttattacaagagggccaagatgctcagattaaaaagtattttacgtttgagtcaatacatggctctgggcaaccccagagcggcttgtggcctttcttttgttttgcaaacagtgcctgagaaagttttttccctgtgttcaagagaatttctttttaacagtgttgcagatctattcagatgtttaaaataatgcttaaattcaaagagttttgcttctagtgaactggtaattactagaaaattttgcctctaggtatggctaatgtaactttacattatgtaagaaaaatttttattgtttctgcttctatacaagaagccaagagttttaatctttcagtgtatattgtttcctaagtaaaaagtattttattaactaatgcttcttgaagtttaccttaaatccttgctgtcacccaagagattcaaagacaatatcctttttttacttagggttttagtttactacaaaagtttttacaaaaaataaagaaagcttttataattggtattaattggtaattaaaaattggttgtgcccaaaacaattctttggc

SEQ ID NO: 29778 - DNA, 1876 bp, Mus musculus
gggagggggtttcgccattctctctcttgctctcttgctcctgaagatgtaagcaataaagcttttgccgcagaagattccggtttgttgcgttcttcctggccggtcgcgagaacgcgtgtaagatgtgtgtgtgtgtgtgtgtgtgtgtgtgtgtgtgtgtgtgtacagagagacagacagacagacagacagaatagataaataaatgtaattttttaattaaaggattatcttggctctttttggtttctcaccaagttacattaaactgagttgaaagtagacccaaaatggttactgtgcataagttttgaagtttttctaacttgtaccaagacacaaaagaaaatgtattggtctcattgaacgcagaggcagctgccgggcattcgtgtggtctcgtcgtcagcgcagctgggcctacacgcaagcaaccatgtctaagggacctgcagttggcattgatctcggcaccacctactcctgtgtgggtgtcttccagcatggaaaggtggaaattattgccaatgaccagggtaaccgcaccacaccaagctatgttgctttcacggacacagagagattaattggggatgcggccaagaatcaggttgcaatgaaccccaccaacacagtttttgatgccaaacgtctgatcgggcgtaggtttgatgatgctgttgttcagtctgatatgaagcactggcccttcatggtggtgaatgatgcaggcaggcccaaggtccaagtggaatacaaaggggagacaaaaagtttctacccagaggaagtgtcctccatggttctgacaaagatgaaggaaattgcagaagcgtacctcggaaagactgttaccaacgctgtggtcacagtgcccgcttacttcaatgactctcagcgacaggcaacaaaagatgctggaactattgctggcctcaatgtacttcgaatcatcaatgaaccaactgctgctgctattgcttatggcttagataagaaggtcggagctgaaaggaatgtgctcatttttgacttgggaggtggcacttttgatgtgtcaatcctcactattgaggatggaatttttgaggtcaaatcaacagctggagacacccacttaggtggagaagattttgacaaccgaatggtcaatcatttcattgctgagttcaagcgaaagcacaagaaagacatcagtgagaacaagagagctgtccgccgtctccgcacggcctgcgagcgggccaagcgcaccctctcctccagcacccaggccagtattgagattgattctctctatgagggaattgacttctatacctccattacccgggctcgatttgaggagttgaatgctgacctgttccgtggcacactggaccctgtagagaaggcccttcgagatgccaagctggacaagtcacagatccatgatattgtcttggtgggtggttctaccagaatccccaagattcagaaacttctgcaagacttcttcaatggaaaagagctgaacaagagcattaaccccgatgaagctgttgcctatggtgcagctgtccaggcagccattctatctggagacaagtctgagaacgttcaggatttgctgctcttggatgtcactcctctttcccttggtattgaaactgctggcagagtcatgactgtcctcatcaagcgcaataccaccatccccaccaagcagacacagactttcaccacctactctgacaaccagcctggtgtactcattcaggtgtatgaaggtgaaagggccatgaccaaggacaacaacctgcttggaaagttcgagctcacaggcatccctccagcaccccgtggggtccctcagattgaggttacttttgac

SEQ ID NO: 29779 - DNA, 1195 bp, Mus musculus
ttacattacaagagcaagttagtgtgtgaaggggaaaaaaaccagtatgtcctgaagacattttctaggcaaatccagtttaggaaataaacaaaagcaacctccccattgagtaatttattcatacaagtaacagatttaaaaataaccaagtctgacattattcagcaggagaattaatccaaattaattcattaaaataagataaaataaagaaaacatgccctctaagtaaatgtggtactgattaagctttgtctcctttaagaagtatttacatctcattacaaactcaaaattttacatccagaaaatttggatgttctataaaatatgagctatgtaaatggtactttgattaagaaaggttgataaagtcactcagtattagtgaatgttaccaaaagtgaaaatatcttgccttagggttaacaggtccatttgagacaaaatgaataggtatgaatactcagaacttcattgactgtagaaatcatatctgaatgccttaaaattataagtaaggaaaataatgattcggggtgacgcccgagtcctcactgcttatgtgagaagaatttttgagcgggtataggttgcaatctgaggcgacccacctactttgcgggatgcctgggtaacgcgatctgccagacccctaatacgataaaaaaatagaaaaaaaaaaagaaaaaagaagtcatatctgaaatttttattttgggtagaaatatttttaatattttattatatattgtcttcatttacatttcaaatattatcccgaaagtcccctacaccctcccacacccacactgctccccaatccacccactcccattctggttctggcattctcctatactggggcatagaacattcccaggaactagggcctctcctcccagtgatgagtaactaggacttcctctgctacatatacagtaagagtcacaagttccatcatgtgttttctttgattggtggtttagttcaaagtagctctgggggtactggttagttcatattgatgttcttcctatggggcttccgaacccttcagctccttgggtattttctctagctctttcattggggaccttatgctccatccaatggataattgtgagcatccacttctgtatttgccaggcactggcagagcccctcaggaaacagctatatcaagctcctt

SEQ ID NO: 29780 - DNA, 2260 bp, Mus musculus
cttggctagaaactggggtatggggctgtagagttcaatggatatgatttcaatgaagaaaagaacctgaggaagtcaagtctatgtaatagagtgtcaaggtaaaataggatgcctaaagaagaagttataaaaatcctttctgtgctcttctgtttatctgtggaaacatgtgtacctcacatcagattttcctagagtggttgcaaagagagatgaggttagcactatcctcagaaagttcctgtgtggcaattttcttgatgtatcatggttgttttcttccaatatgtcttagcatgcagaatagaatgcacaaatactgtttaagatataagtactactctgtgcgcctcctcctcccgaagtgctcctcttctacagctgttccgcagtcgccgctgccatgagggagatcgtgcacctgcaggctgggcagtgcggcaaccagattggcgccaagttctgggaggtaatcagtgacgagcatggcattgataccactggcacttaccacggagatagcgacctccagctggagcgcatcaatgtgtattacaacgaagccaccggtggcaagtatgtgccccgcgccgtgctcgtggacttggagccctgcaccatggactcggttcgttcagggcccttcgggcagatcttcagacctgataacttcgtctttggtcagagtggggctgggaacaactgggccaaggggcactacacagaaggtgcagagctggttgactcggtgttggacgttgtgagaaaggaagctgagagctgtgactgcctgcagggcttccagctgacccactccctgggtggggggactgggtctgggatgggtaccctcatcagcaagatccgggaggagtacccagacagaatcatgaacaccttcagtgtggtaccttcccccaaggtgtcggacacagtggttgagccctacaatgccaccctttcagtccatcagctggttgaaaacacagatgagacctattgtattgatgatgaagcactctatgacatctgcttcagaaccctaaagctgaccacacccacttacggtgacctgaaccatctagtgtccgccaccatgagtggggtaaccacttgcctgcgattccctggccagctaaatgctgacctgcggaaactggctgtaaatatggtgcccttccctcgcctgcacttcttcatgcctggctttgcccccttgaccagccggggaagccagcagtaccgtgccctgacagttcctgagctcacccagcagatgtttgatgccaagaacatgatggctgcctgtgatccaagacatgggcgctacttgactgtggctgccgtgttcaggggccgcatgtctatgaaggaggtggacgaacagatgcttaatgtccaaaacaagaacagcagctactttgttgagtggatccccaacaatgtgaagacagctgtctgtgacattccacctcggggcctgaaaatgtccaccaccttcattggcaacagcaccgctatccaggagctgttcaaacgcatctcagagcagttcacagccatgttcccacgcaagaccttcctacattggtacacgggtgagggcatggatgagatggagttcactgaggctgagagcaacatgaacgacctggtgtccgagtaccagcagtaccaggatgctacagctgaggaagagggagagtatgaggaggaggctgaggaggaggtggcttagagctgtcttagtcactaaagcatgggagcagtgtgtactctttattcatttacagcctgtctgctagccatgtccactgtgcacttgctgtcctgtgtcctgacatcacttgtacagataccaccattaaagcaattcatagtgaaaaaaaaagatataagtactatctatgaaaaaaccagaaattctgggaatcttttagtattttaaaaatgagtttgtgtcagcaagatggctcaatgaacacatgtaagatactgaaagggagaaccaatggcataaagttgtccactgagctccacatggtgttgttggtaagtgcatgtgtgtgcatgcataggattcacattcttaacaaattggggcttagagatatgtatctgagcactttattgattagaagggctggatcagttggttctggcataatttctctaagactccaagcttccaggactcacatcactctgtcttacatgtgcagttctgggaacagcagagcatgatgaggtaagccag

SEQ ID NO: 29781 - DNA, 1194 bp, Mus musculus
cagctccaagattggtactgagccccattggcccgagttaaaagtagacatctgtgtcctcacattgggtgcagatgccgcctggggcacccctgattattaaatgcctcaattaacagcagttaacacaggtgaatttgagccccctccccaaaagacgtttttttctcatcatcggccgagtgtccagacttttacaaggcctaatggtgactcctacagtggttaacaccgactaccatggggagataaaaatcttagtctccgccatgcagggaccacttacccttaaggctggagagcgcatagcccaagccttaccactcccactattcggccatttcccttatatgaaagaggagcgaggaccttcctccctgggatcctcagaagtctactgggcacagaaaataactgattcatggcccatgccaactttgtttctagaggacaaacagtttcaagggctcctggataccggggcagatgtgacagtaattttctcaacacattggcctgcagcctggcccttacagcccactaagggatggtgtaatccactgatcataaaatttactgctaagaggaggaacttagaggcttgagaaagttctcaccctctcacctggggcctaagattgtatcaagataactatgacaatggcctgacttttaaggttccgcttctaacaatcataaagcatccataggactaccaggtacccgcccccctgttcctgccccagggtgtgctacaaccctgtttcagcccactctccctgtggggaggtccccctcttccactgatttactgtggtctatattgaatgcttctgctttagccttgttgcataagacacaaagagataatgcgtcagaatctgaagattgttggatgtgcttttctgcttccccgcacttttatgagggcatagccttatttgaaaattttaccctgctttcagacactaggcagcttccccttgagtcagttcagcttaccttgacagaactctctggggtaagaagttgtgtgttgggcccaggcatgcttcgaggcccttgctagagatttgcaataacatgtttagagtaaataaaaatgggttttaaagagacttcgtaaaggtcaaaaaattcatagattaggttttattggaagttaagaaatcatttcctaaaactatataattc

SEQ ID NO: 29782 - DNA, 1527 bp, Mus musculus
ggacagatccacatgcttctcttctgggtaccttgaatctctgctgacttcatcctgcctgttgccctaggctttctgcagctactttacctgttgcccttttcatgctttgtcccccttttttgggggggaggggggtacctttaatccaggaaaagtgggatacctctgcctgcgttttttctttcagagtcaagtttgttcacttcactgtgtgagttttctattgccatagttccatcttaacctttgatctgtacagtgctttagagaagccctgctctgaaggcaagattactttttagtcttacttaaatgtaaaggaaagaaaggctgtttggtagcttgcaccatataaagagaaggggacagagtttggaactgatgggagtaaggagaagcaagacacctagctgcacagccaggggtggtgcagctggctgctgctactggctgccgtgtttggggcattctctaaagatctcagcagcagcaagttggcttgagcactgagacacctggactcctgttggcagcacattttctactttttatgttcctaattgtctcttttgtttgttttcttctatagctatcatctgcttccctctcctcccccaaaaggcagtcaaattgaatttttcattcttattccacgagctttatatgaccagctgacatttctgtggaagagggcttagttggggccttgaatacttagtttcctctggtgggagagttaagactactctggcttcagagacagggtcctttctctggccactggagagctggggactgggttccagatcctcctttatcgtattgtaaagaattgagctggcatttgtgagaaccagctgaggccacagcccatctggctgtgtgagagcagcatgctgtaaaagtggcttggccgttcgctgttggcacctgcttatagcatatgctctgcagggcagacactttcagctcaaagacgtttcctaccacacctgcagggacagaacaaagttgccccggacttggagagcagaaggtagtatttccatcccagttttattcatggttttgccagttctcaacatggagcacctaaagtcaggcagcagaaaatgaaaacttacaagacgattgttggttgtacctctgcccttcaaattcatggccttatgggacagtatcatttctgttggatttgatggctgcatttagaaccttcctacttgcaaagttccgtgttcagtatctgtgcggcacttttcctcttgatcagtggcatcccctattcggggccttctttggttcaaatgagaattaggaatacagagtggtaatgttagttttcatttccttctgacatgctggtttgattgtgcaccatggaaagtcgctaagacatgggtctcagggtataaatctcaggaagtgaataagcaagcggcacagagatttgagagatcctgggtcacttagtcccagcctaggagcacagtggacatccacataaaccatgtagcagagctc

SEQ ID NO: 29783 - DNA, 2536 bp, Mus musculus
acagaaatatgtagaatatcaataaaattaactcccatgacccaagtttagcaggttttcctgagggacagaagtggattcagaacggagcattctgaaacacatcctcattgcaaacagtaacgccatatgcatgacgcttctgtttattgttttccatatataaggaaacaacatctcataatagaaactagcatgcagaggctaaggcatataggattcttctgcaggactgtaaggctttgagaggccaatatcccatacgctatctttaaacatgtatttttattttattttttacttttcatatttatattagcatccaaggacaactgtacatatgtaaacatttttaaaatttaaaaagtaactgttccacataagtgtatttttgccaaatgcctacagtcagtcacagttctgtcaccgtcctccatcctgcgtcttcagcgtacaagtggacgagattgtaaatagagtggtcagtgctgtaaacgtatctctccataactggtgtttgtctgaaacatgtgatttccgtttaaagtgtgtccagtctggaagaggttttattgagtaagagaacaaaatgctcaaacgtctagcctctgcttctcaccgaaggaggagtccagatgtgcggcagccgtggagcttcagggtaccctggagctcacaggctctctgggagtctgccagcctatccactccacagctaagacacatgacgcctgtcacagtagctgttctcagtaccagggcatatcaattaatcttaaccgggggccatggagtcccctcctctctagaaagtgtcttctatgattggccagatgcactaaagacatggaccccagagcgcagagctccctcttgaccaatgcctgagccttgtctgatctgaagtttgggttcctggacagaatcctttcagccattctcatctgtggaagaaataatgactcggttcaactcggttcaatttgaacacgtttcatcaccaggatgtgagtcccagtaggtcattctgtctggctttgaaccagatggtggatggaagcctgagcaagacatgaaagattaaataaagcccatggctacacaggtgcagtaactgcaagaggaaccataagcctgcaagggaaagagccttgggtgttgagccaacctttgatccacttttttttttttttaaagaatgttctatgtgaaatcttgtcatttaaaaagaaacattaatagctgtttcaatgcaatgttgtcatgcaaagagaaagcccctctagtgagatctgaagttggtaggctcaatcatgtggtccactgtgaaccacacttgtgatttcccccttctccttgctgttttatgtgaggaatgcagtcatcagacaagaactcagaaatggactctaagtttgacttctttgagaggcatccagggacacagtttgttgcatctctgtgtagttgtcttagatacccaaattgaagaggcagactagaaggcaaaggtatgctcagctcatgtcttttgcaatggtccactcttctaaaacgctctgaaggtgttagaaaacaaatttaatcaggcaaaattatacagtgaaaaacatttttcctgacaggcaaggatatagtttgctgatgactcaataaagcagtctcagacaaaggcatagatgagtgttgaacaatatctccacatagcttaaggtatggcagacaggtgacagatgaaagagatgtagcaaacgaagtgacttttgaacaagaacactttagatgtgcactgaatgtttcttggtattgagtatataaaggctaatgtaatataaggtttattttgactacggaagagagagtttatagtttgactgagaggtgcctcctgtaaatatgctttgtagttatagttagttacctaagccctaacgtgaaagaattcacaaaaggttagctagtaaactcattatctgtctacctactgatctttccttaccttctcaattatttttacctggggttattattgagaattaaaatcattatcgcgtgccttttgggagaatcagttgctctggcttgtaatcatcttcagatgaaatgagaggaaaaggttttgcttaacttgcaaagtgattttagaaatataatagctttaatgttctagtctgggtctctatctctcatgtttaagcattcttagaattgtttttggaattaacagactttagtcttgatggataacttcaagaagtatgtatcattccactgaactctgtatgacttcattcactgaggtacacagaagagactcgtggaatcaaacccaagcacagtgattatttcattcttaaatgtctattttgaagaggaactttgcagctccatgtggtttgaatcatgcaactagtattcatacttcccagtgtgctgtgggatcattgctacaaagaggagggcagcgatgtgtttgttcattggatgctatttctcgttctcataatcttggcatcgatagggcttcagataccca

SEQ ID NO: 29784 - DNA, 1187 bp, Mus musculus
gtataaatcaaatccaattctgatacttatttgagatacatttaaaatcttgaagcctacttagtgaaaccaactggacttgcacatagtttccaagggaaaataatgagactagttctgttctggccttactgtaataattttgtaaaaattctaaatattataattatctcatagaagaattagatcataagtttctattgcttcctatacttaaagatacttctgggtgtggtgatatatgcctttgacaccagcatatgggagagggaggccagagcaaccaaagttagagccagttttgtttatagtaagaattcgatgctcatctgggctacttaacatcctatccccgtgaaacaaaagaacaagaatgtaaacgtcctttggctattgtttttgttttgtttgtttgtttgttttgtttttatatcaaataataagcagaagtccagagaagcgatattgtctccttttagttttaaactcagatgagagtgaattaacggagtcctgttttctctctgcacacaatgtgtttgtagtggcgcgcatgttaaacttgaagaagatgtggatcttggctatgtggaagatgggacgccctgtggccctcagatgatgtgcttggaacacaggtgtcttcctgtggcttccttcaacttcagtacttgctccagcagtaaagcaggcaccgtgtgctcaggaaatggagtaagtgtcagagcctcacccgggaaaaccatttcttcatgttacaaaagtagatacaatcctgaaatgtttcctaaatcatagaccatgtgattatccatgtttctggttgagatgtgaacactaacttgatcaaagctacttgagtatttttgttgtataatcaagaaaatctgagaatacgaaaactagtaattttcctattcaaattcgtttttcttcttttcttatgctaataggatgccttacagtataatgataggtttcctgcgtgtgatttagaagaattttagcaacctacaggggaatttttttttaaatggggagtgaagaaggaacagtgagccattgtttctttatttaaatatatagttaaatgtagcatttaactacttaggtcatctggatacacatgaatcagcaatggccacaaataaatacttgttgaagccataccagagatgacagctgag

SEQ ID NO: 29785 - DNA, 1146 bp, Mus musculus
ggagactggctttcatgcaactcctgagtagagcaatttgacagttagatcctgtctcatttatttttctttttaacccacaaacctttttatgggctgttttagatttccttcctttccagctagtcttagggatggcccctaggattgggttaggaccacatttgtaccacgtgggggtggggtgggggctgttaatgcgaagctgtctcatttgctctctaactgagccctctgatcttgtttttgcccaaacctgcccagcttacagtgggttgttactttatctgcctcgttttatgaattcagagatcttaaaaaaatggcaaatatgaatgttggtgtccaattggccatgtgtttcatttcacatgcatgatgataaatcactgtaataggcccccagatcctagctcaactgatggaaatatcatttagcctgtaaaaactaagcaagtaaacagtactagtagctgaaaagacctaatctatcaaaatcagagttctgggaaagtctcaatgtactaaccttgcttttttggtttctgtagttaactgaaacatgtcaaccaggatacagggtttgtgcttaaaagctcaccctgagaaagacttggatcctgcacacccacccaatgtagttgtcagctggctgatactgggttaaatctgtgtctgcgtagtactcttcggtggatgccccacaataattgcagaaaataactttatctctcagaaagtatgtaactacattgaagatggtttgatcttattctaaatctcccagggactcagttatgactttactactggaacttgccataacttttaaaattttttttaaatatttaaaatcttttaaagcttgtatgtatactttctgtaatatctgtatatacatatatgtcattatatatgcatataatatataatgaatattgatgttgtaatatatattgaacagttttttctccctctacttccctcagtccctccctcctgctacacataactctcctgtctcccagatcccttcctcttcccctaagaggagcaagccacccaggaacagcaaacaagcttataaaacatacatacatacatacatgtgtgtatacatacatacatgttacagccataacaagc

SEQ ID NO: 29786 - DNA, 1409 bp, Mus musculus
atttccagaaggacgtgggcgaaagcagtgggcacctgctcaagccgaactctcagtatgaagaaacccagaaacctgaagaaaagcatgggtttgcttcagagcccacaacctattcttcagctggattgaaaggatgtgacaggaaaccagtgagcatgttcaatgcaagtgagcctgacccagagcaggagtatgcacagctacctctgcgtgacagcacaccggaacaccaagtgaccgagggtagaaatgacggagaacagagagtagaccctgctccaggcgtgtcgcagtcatgtggacaagtttctcatctcagtacagaaagtaatctaccccaaccacagttagctgcagacattacacagctttcagcaaaagatctgcaagaaaagggctttcatgttgtgataggtcatgcttctgacctggtggcattaaatacatcaaaagagcagctaacaatgaaggcgagaactccaccctgtagtccccaggagcctcatgagtgtgacactgagaacatggagaatttgccttgtggtaaaatccagcggaaagtgagaatgctattagggcaacagaaagcaaatgctgaaccgagtgctgaattggataaaaagagaactgagtatcttcctgcacatgaagacagaacttgtgggtcaccagtacagtctctattggacctttttcagacaagcgaggagaaatcagaatttttgggttttacaggctacactgaaaacagtggaatatgtgatgttttagatatttgggaggaagaaaattcaagtaccctgttgtcaacgtttttttcttccccttcaacttctgcattcgttggattttagtattaaatgtgcttttcagaagtgacagctatattcctgaagtttttataaatacatatataattagtggtgggggtttgttttgttttcgccaacttttttatggagccatctgtaaatattaattaaggtggtgtttgtaattttttacaggattgactagctgttacaaattatacaataaaaacttaatgacttattttatattcctgagaataaaaatgaatatcatttgctttatcactgaaaataatttcaagtgagatttgaaacctatcaaaaatgtatgcactatatattacacactattaactgttacctattagcatagatttcttttttttttctttttttttttctttttggggttttgtttttgtttttgtttttccgagacagggtttctctgtagccctggctgtcctggaactcactttgtagaccaggggacctcaaactcaaaaattcacctgcttctgcctcccgagtgctgggattaaaggcgtgcgccaccactcccgactttagcataaatttctatgaccaacatgt

SEQ ID NO: 29787 - DNA, 1200 bp, Mus musculus
gctttgctgctgggactccagcaagtcacttccactttcatctccagtgtatgtaggtaagtgcaggagagtgtgtggactgcattaattaggataaagtacttaagaatagtatataacacatggtattattaatgaaactcccattatatttcctcagaactatgggctcaaaaatgcagcatgaaaagcaccaatttgtaaaacattagattatagccgggcatggtggcacacacctttaatcccagcacttgggagactgaggcaggtggatttctgagttttgaggccagcctggtctacaaagtgagttccaggacagccagggctacagagaaacccagtcttgaaaaaccaaaaaacaaacaaaacaaatctcacaagacattagagtatatgaaattggaatttgttcacagtgtctttaaagagctttggaaaagtttatatataaattctttgttttttttctagcgagttgaagaatttctcagcaaagatatcagttattttgtttcaaataaaaaggaagcaaagtatgcacagacattgggtcgcgtttctcctgtaccaagtccagaatctgcatatactgcagaaaccacctctcctcatcccagccatgatggaagttcctttaagtctcaagacagagtaagtgtgtcctatatgctttgagcctaggggaaagtggatatcatagttttctttttgttttaagacaaatccctttcagactggtttgaactccctcagaattcttattctttctgccttagtgtctcccaggtcctggagttacagatgtttgtctgacacctgactctgggcttccagtagcagggttacagtgcatcgatagagtggttataaagccaaagatctgtggctttctcacctaatgtttctgtctttttgaaaggtgattaagttttcctcaataatacagtagtcaagttgtaccctgatttcctaaagcatgcacttgcactttagacaggtagcttttgtttcttagaataatttacaactaaagttaatagccagccattcttttgaagaaaaaaaaaaaaacttgtaaaactttcaaagtagataaactgaccatctatagcatactgactgtgcacaacatataagttaggcatatttttacatatccagaagttggtgggaaaaacaaaataatattttgtg

SEQ ID NO: 29788 - DNA, 1153 bp, Mus musculus
gtgtgaaccaaagtataatcatttacatgatgcaaatgtacaagcaggaatgggctgctggtaactagcttgccttccaagtgtcattgtttgtagaggtctttaggtcagttctacaactttttctactacaatcaatattccctagtctaaaaggccaaattataaaatgctccaaaaatttcaactctatttgatgtcccaaaatgatgttgttataatcccacaccttcactcaggtgacagcatacagaacgcaggcacatagaaacatttaaattgcctttaggctatttgtattaattgtatatgatacacatgaatatatttatcactttaagtaggaatgaggtttttaaaaatgacctttgtttattttttgtatatgtctacatatacatgaaggtgagaggaaaccttgaagagttagttctcccattccaccttgtggactttgggatttgaactcaggtggtcaggcttagcagcacgtgccctttcccacactgagctcaggaatgagattttaagtatgatgagaatgcaggggtagaaaacggtggctttggaatgtgtaactcggagtctgatctctggcacagatgataaataatttaaaagtaagtaagatgccaatgcaagaaatgctatttattattatttacttatctctataaagcaaaaagcactttatcacgttttatgtgtattctatgaaatatgacgtataccctccctgcctaatgtatttcggtgacaatgatctctagggttggtaggtgaacaaatgcattttgtatcatagtggaaagtgtttgtatgtttcatcagaaataaatgatacatggtttattgtaccatgttgttttacattacaatcctgtgttggtttacattaaaatattaatatatacagatgtgtatttgtgatttgtagtagtaaaaattttaaaatcctgacccaggccttcttttctgtcttagacagtttatgttgtcagatgaaatacaatgaaagatgcacataatctttattcttttaatatgccttaggcatataacagctgcacagtagctgggcagctgcctaccctccatgctgttagaatctactttcctattgataaccctgagttatcacatactgtttact

SEQ ID NO: 29789 - DNA, 1914 bp, Mus musculus
cagtggctcgttaagctttccttttaccagttggtaccaacttttagcatttcataaagtttgtagaattgtgcctttttaggcggttgctgacttaatttgtcaggtatggaggaaaagcatcttttcccaggtatgcctaagacattggaaacatttcaaacttcagaactaatgttggcaaggggttactaacctcagaagtttccagtttaatgaatgacttgataatgatttttaaagagctgcagagtaaccaggatgtctgactgtggatatacattggagctacaatgctattttccctgtgtgcaacaatgacttacatactgggtgtttcatagccattaccactatgccatgatttctcatttttcaaattgatcttagtgtttaaaaaaaaacaaaactatacttctgtaggaaaacaggttttttaaaaagagctgtgtttcaatttttttttttacaatttttaaaacagctacatgtgtccctaaaaattccaccctattgaaaataaacacgtatgaagtgtgtattctatagtgagtcctaggaggaaaacaagtgtgccaaagacatttcctatactgtttcatgaaggggccacagtgctcactcttgtctgttgatttttatatttaaacttagcagctgtgacaagtaggaagtgcatccctcctaaagcttcctggggagtgctgaactcacaggttcactccttctatccaaagtgtaggggtgggaggttctgggaagtgcttggagcgcagtctcatggtgtggaatcaatcaatagtaacatgaccagtgtcacatgtgaggcagtgcagacactaatctctggggcaaaggaggcctgcaagctcatgacagacattgcatcgggtgactcagaacaaactgagcaatttcttcctgaggctgatgcattaaaacagagcacctccatcttctctgatctgtgtgcaccatattaagtgtacagtggccaaagccacgtttaagtagtgtcaggaatagcaaataaagacagcaggcctgcagcaggctgcatgaggacttagatggtcatgagaacattgggaatttaggctggccgtgggcgcacctctactttcctaagaaagtcaaagtgtttactgctttatcaccacggcctgctctcacctgtcatttatgatttttcagatataaaaccttggtaagatcttttcatacatttttataaagtagaagggaatacaagattccccagttggtacactttttcagatctgtccgatagaagcactagtttgtgacatatccctgctgcgaactgcggactgagacatgacacctgaggatcatggctttccctccattattggagctcttgatataaagttcatctgctactgtggaacccaagtttctgcagttggtttcgagctacaggcagtttgtaacgcttgcatgagtgaacagtgtctcagtctttaattttcagtggtactgtttatttttcagaactccacaaagaatgctggctatgtctatctttccatctgtattttgttgcctcgatgtactatatttgttgcatgtatattaaagatttttttaaccatacagtactggtctttttccttgacaaatatagttacctggttcaagtgtttactgaacttccatttcagcacatagaataaatattgaggactaattaaatccaacacactaatggatatgattggagaaaacccttctgttgagattgaatattatacatacttttaaaatattccttatatagcacatgacattttgagagttactgactacatataggacaatggtcccaagtaactgagagaagttgaaaaattcctatcccttagtgacatcacaactctctaatataaaact

SEQ ID NO: 29790 - DNA, 1205 bp, Mus musculus
gactagattaactgctggtttcgagttaggaatcattgcaaaggagtgagagcaatgtgtcatgaatccttcagaattttatccaaagcctctgcttactgtaaaccatattccaaaacttctgaatctgcatttttccaagaaaataagtgtttcaaataggcccaggtatattgacacctatcttccttaaattgtaagcagtttcatggctagatgaccaccatcctcaatttaatataattgtctgatccttacattctgatttgctttggtgcatgggtttttggtgttgaaagattatggaaatacaaacttgcactttgggttattattctacacttgtaaatcatgggaaatctttgttttagaaaccaaaagctttgtataaaggcatctttccttttacttcataggtgagaagctttttgtgaaaattagttattattcttaaatatatacttaaacatattttagactataaaccatgtctcttctttttcaggctacagggtctaggcttgctgtgattttccagaacatagcaaatcttgggacaggaatcatcatatccctaatctatggctggcaactaacacttttactcttagcaattgtacccatcattgcgatagcaggagtggttgaaatgaaaatgttgtctggacaagcactgaaagataagaaggaactagaaggttctggaaaggtgagttgaactaaatatgactggtcactaagtaaaaggacagtctttccagttatgctttcttactctcttttactatgtcctggcaatgctggtgtgtgtgtttgtgtgtgtgtgttccttcgggtgtacacgtatgtatgtgcaagtgcacatgcatgctgtgtggaggtcagaatacaccctgggcgatatttctcaggtatagtccagtatgcctcttgagatatggctgttctctgtttgagatatgacctctccacccatccctgtaccttcagaactaggattacaggcacatgccaccaagcgtagctgagatgtttttccctgaatactagaggtcaaacttgggtccttgtgcttgcaaggcaaatcctttaccaacagagtcatctcctcaatctacaggaattttgtttggttttgtttatttgtttgtttgttttttgttttttgagacaaatatggccttgactgtcctgaaactgactct

SEQ ID NO: 29791 - DNA, 1175 bp, Mus musculus
agccaatttcatgattgcttcctctccccaccaagcgtcatttcagagtagttattgtaacccggtgatctaaaatatttttctgcccaggagccaagcattgacagcttctcaacaaagggctacaaaccagacagtataatgggaaacttagagtttaaaaatgttcacttcaactacccatcgagaagcgaagttcaggtatggtgctactatggttcagtaatctgctgggtagagatactcttttacatatgataaaagaaaggaaaacaatatacataaatcatatattcacctttcagctcatagaactcatgtgcatccatctgtcctggaaaccggcctaacattgacttctcacgtgtcttggtagatcttgaagggcctcaatctgaaggtgaagagcggacagacggtggccctggttggcaacagtggctgtggaaaaagcacaactgtccagctgatgcagaggctctacgaccccctggagggcgtggtgagtgagcatgtagccagcaccagttaatgctgctcaccattctgcgtctgtgattccaaagtgtgaacaccacatgctttgttccaggtcagtatcgacggacaagacatcagaaccatcaatgtgaggtatctgagggagatcattggtgtggtgagtcaggaacctgtgctgtttgccaccacgatcgccgagaacattcgctatggccgagaagatgtcaccatggatgagattgagaaagctgtcaaggaagccaatgcctatgacttcatcatgaaactgccccacgtgagttgtgcctgagctctgtcatgccaggctcagagagtagagctctgattaatgcggttcatgggaacccaggaaccttctctgaggtagaacaagtgccttagctgggaaatccatttaccttggattttacagcccacaccccatcaaatagtggtagatatgtttatttatttgctatatcttcctattttttgtttgtttgttctaattatagcaatttgacaccctggttggtgagagaggggcgcagctgagtgggggacagaaacagagaatcgccattgcccgggccctggtccgcaatcccaagatccttttgttggacgaggccacctcagccctggatacagaaagtgaagctgtggtgcaggcc

SEQ ID NO: 29792 - DNA, 1129 bp, Mus musculus
ttaaaaagaacaggtacagttgcatatccctataacctcagcattgggagacagagatgtgtggaccctaggagttcatgagcaagcttgtggttcgggagcagcaaacaatagaaaaagacacgcagatctgttctagcctccacatgggtgaatacgccaacctcctcatgtacacggaccacataaacacacatgtatgtatatacagcaatacaaacagcctgaaaaaaagaaattggaacagagagaaaagctagctaaatgctgaatattgatctactttcatatttacgtagaagtcagggaagtcctggtcttagaaacacaataaacttagaagtcaaccactttagtaactgggaagataattagtatatttggatgaaagtaaatagccccaattcataaacatgcattttatggttaattttaaaatatgtctctaatttgttgtatttttcaggcgatgggcgccaggcttgctgtagttacccagaatgtagcaaacctcgggacaggagtcatcctctccttagtctatggctggcagctgacacttctacttgtagtaattataccgctcattgtattgggcggaattattgaaatgaagctgttgtctggccaagccttgaaggacaagaaacagcttgagatctctgggaaggtgagtcaaactaaacgcagtgcttacctggcacaaaacaaaacaaaacaaaacaaaacaaaacaaaacaaaacaaaacaaaaacgacccttggtggtgatatttagcaattccctgtctgctctggggagggccttcaaacaattctttgagaagaaacgttagctccctgcagagcatagctgaggggaagtgggcaatgcatctgtgtctcagagactgactgacagctgcttttgacagcttttctggtttcagtcattgtctccactttctcctgggtccccatccaacctgctccttctttctctccttctgtcttttctctccccctttccttctctcccccatcttctctgttgttctttctctaaaccattcctttctcaggaatgtagacctgctttgttatgaatgacgcgggacactcattatgggaccgtccacctagtgttattc

SEQ ID NO: 29793 - DNA, 1188 bp, Mus musculus
gaattaaaagttgttggctgctttagaaattggggctaagcacggaggagtcggttcagctcccactaagctccgagcagtctagtcagtccttaaagactccgtcagacatggccaccattgagcaataattcctgttgtgaggacttttatttcctaatctgtacggcaacctaggaatccacacaactggaaaagtacatcttaaaagttaagtgacttatccaaacttagcagtcagtacatggcagaagaggtttgtgagtcaggtctgtcatgcccctgcctcagcatttgtccagtctgctgttgtgaagcttcagtgcacgtcattgtgtactgatgagagttgtttttctccccttaaacatgtagactgtgtttgtgctctatttttactttagtttccataaatggtgcttcagtgaacacaatctatttcaggtacatttttatctgtgaagagaatctggtaggatgaatgtacaaaaatattcataacctgaagatgcttcagactgtgaatatggtaaaataacaggaaattaacaaatgtctgaattaagttgatcaaaaagaagagggaattttgtattcaggttcatgtgtggcgatggaaaatgtgtcaaattgtcaggaggcagggtctctctacatagccctggctattgtcaaactatgtagaccaggctggcctctaactctgcctcctgtgtactgggattaaaggaatgtgccaccatgctggccacctgcagttgtgagactcctctccataaattgtctctgtttatagttctgttcagtgttcactgttaccttgggcgttgtaccagtgggcagagttcacagttcactagagtcggccagtgaggcaagaagtctcactttccacccttgtcccgctggttgtttctggtgaccatataaggggaagatcccagttaggcagagccatacagctcagaagaaacaacgccaccgacagggtgtgagttttcttacttcattaagcaaaaggaaacctcccatgcttcatttcttctcagggtcttttcctctcagggccatttacctagccatttctagagcttggatgacctgaagttttcctctgtgacgggaagaaaagccaagtcatttttgaaaatctatctctaacgtatagcatgaaaatccttaagtttg

SEQ ID NO: 29794 - DNA, 1148 bp, Mus musculus
atgtacctatcagacctttagcttattttatggaccagaatgagacctgagtgtgtatgaaaaactgcacttttatattcaatgtcatgtaacaaaggctgcctagagccagaagtgtgcctcatttgatgatccaggtttcatactttgatgagcgagaatctgccacatatctcagaagtgtcctctgtcttcaagagacacctaaagttatgtatagtaacatgtcttttccttagctaaggactagccatatactgtggctgtaccttcccttttgaggagtaacagtaaaatgagtatgaaccctcccttttgcagaacttcacagagatgtgtttgtacagtagatgttattaaaccccagcaactccctcctccgcaacgtgagtccaaaggcagcgctcagtggcttatcgtaattgacactcactctgttatgcacaagattcactgaacacaaatgctcttgagatcggacagctgagttggctacaccaacgagcatgggtactgtgtaatgtcagtgctgtgaaaaggatgattcagatcttaggtgggctggagctagacatgattttattatgctactcagaataatgtagtttaaaacacatacactgtttattttgggaatttctcttttggatttctgacccacaggtaacttgaagccatggacagcaaagcctcattgaagagacaggagtttaaatcagaaattatttcataggcaatttcacccataaattctcttacctcttcctactttttaagtgttctggaaactcttttagagtttcaccttcatctttttattgttactgtttcacacaaaatctgttttgggaataaggacaacattagttgctgtggaaatagaagactggacatgatgcttgtgagcattctaaactctatagcaacagagtgtttcccaagagtggatgatagctgcttggctcctggatggtcctgtctatatcctgttaaggcctttactacctgagtttgagtcaatgtgtaccttctaacagtgtgctggacaattaaatgactggccagacaagaccggggcctttgtaagttacaagtgtagtctgaagcagaatcagaattataaattgttgagactatcagtttatttt

SEQ ID NO: 29795 - DNA, 1142 bp, Mus musculus
tttctcatctcgtgtgttctacagccctgagtgaccaaggttgagatagttaaactatgtatttacttacgtaagccctcttaacagacctaatctgagtgccttcccttctagtaactcaaatatactaaaaatgtatccagatatatattctcatctaacttgattagtatactactttgacattagaacccagtaaataacaaaaccaggagtacatagggaaacgcttattagcgctacttgaatcataggggattaaactgaagactatctcaggacagtaatctctaatgctatccatatgaaagaagcattagttgtattttacactgtaacagctggtcatacttaaatttgtatttgattcttcttttagatctactggtatcgacaaggagacttagaaccgaaatttagaaatctaatttactatatcttattttctatcatcatgttatgtatatgtgcaaacttgtacttccatgatgtgggaaggtgaggctgcagagacgaaatacttaccaggactcttggaaatctatgtgaatttaactgctgcaaaaaagtatgctgaagactcatcgacagacgtgtggtacatgatgtttccatgttaactgtaaatctcaatcccccctgcgagggggctgcagcatagatctctgctctcctttaaaacgcccacacattccagccctcaaatagcaaggaattctcacttttgaaagaattttttttttttgtttttgttttttttttttttaacaatttaattgcatggctcaaaatcttgcattttaagacaaatactcttttatttctgttaaactgaatatacaattattgttcccctaggcaaccaacttttgcttattactacagttttacattaataaacagatggtgaaaagacagctttgattgtgaagatctaattacaataataaataaaataatttatacaagtttcctttttttttcctcctttttttggacttttctataaggatcatatcattaaagccctacaggctagttttggctttaccttaggaatgactcttgatttgttttcttttgatacagaagcaaattttgttttttaaaagtgcctgagggagaagctatagtgtaccccc

SEQ ID NO: 29796 - DNA, 1184 bp, Mus musculus
gcaccaagttcatcagacaattgatgatgaaacaatacttatcgttccttcacctcatggctttatccaggcatctgatgttatagatactgaatctgtcttgcctttgacaacactaacaggtactctactgagacttaatcatgagcctgatacatagtaaggggatggggggaatcgggctgttgttttatgcatccatgctaacttttctcttgatctatcagtgttcttttattgggtaaatcctacactttggtaaactattggactgaatggagaatcagaaacacacatttaatactaactttatttaaacttgactcattacagatccaatattccagcatcatcaggaagcatcaaatataattggatcatctttgggcagtcctgtttctgaagactcaaaggatgttgaggacttagtaaactgtcactagattattagaaacaggtacttcaagaagccacattgtgactacattgtctccaaagaaaggagccatcccaggagttgtggtttgccattcctctggcttgtacttagctgccatgcttaagccatgcacattgttgctgctgttacttttacctccttctcagtagatcatctgaggtccaattttataacagttgttatgatggaggataggaagtgtgaattgcccagacttgttaggttttatgtcaagagggagttgcagtcactgcagctacttatatcaccagagcttaactactctggtttaaatataagtagtaatactcatctctgcagttagacacagctctgtccagactcaagctgggctggttgtaattcagcttatgttagcagtgactttcagaaagattaacttaggagttgatgacatgaccatgaccagcatccagataccacattatggggggtggttgtgctggttaacccattgctggcagtgggagctgactgaggcagggtaaagaagcaaagcattacagagttaagaaaattcactacaggtctttgatttttaacttttaaagggaacgtggttaaagtggtaacaaaacagttatcaactctcatcagaaaccagtcattagtttacagctagcactttgaagtgaaattaaatgaggggagaggtcatattgcctgtgtctgataaccatgactttttttatgacatgtttta

SEQ ID NO: 29797 - DNA, 1177 bp, Mus musculus
tcctggtgcacatttgttgttcagtgtctggagcatctctgtttaggccttttgtgtgtgtgtgtgtgtgtgtgtgtgtgtgtgtgtgtgtgtgtgtgtgtcatagttgttgttcatttctagtatttgtgtccctttttttgccaggaatgtaacatttcaaaatttattcttaattcacccttttaaagaacaagtttctaaacttatctttccatttatttgattggttattttgcttttttgattttcttgtacctgtttcaagtatacttttaaatttttaatgatttctaaatgagttaaacagaaattgagttgtttgagttggatagtttatttttgtgcccttaagtatcataagaataattaatgcagcattaagtttatatctgacttattagcattagagtctctcaatgtcattgttgacctttaacattaaactaatttaaagcatgctatatccatatacattgtatcagccatccctaaatcaaagaaatgtaacccatttaggctcgcggaataaaagatgctacagaaatcatctttgagatgtcaaaagacgaaagaaaagatttctacaggactatagcgtgggggctgaaccggcctttgtttgcagtttatagaagagtgctgcgcatgtatgatgacaggaaccatgtgggaaagtatgagaacctgtactgtgcatgttttcatgtaacagggggagtggttaaggaactatcaatttttaaagttaatttctgaattggaggcagctatgaatcattactgataattttgtgattttgtaagtatttgatatgtggagaaacctgataataaggacttctttaagagttagaatctgaactaccttacttaggttaacttgattgaattgactgtcagagtttgctttgtaggttaaacattggtgtggttaaaaatctaggaagtgttaataagagaattccaaattcattctttatttcctgatttgggaatataatagtaataataggatagtgacgtcgtttgactttaaatgaaaccagagtagaaagtaaattagctagtaacaggttgtgtggaaaggcggccagccttcctggagagttgtcagggatgctccatacaggtactccatgggtggccgtggccttggctgttcttgcctctgaga

SEQ ID NO: 29798 - DNA, 1200 bp, Mus musculus
taaagccctgaagccatttttggccactctccaactgtctgcctttgcctctatgtcttttctcattttcctttaacattctttaatttcaccctgatctcccaggtctccagacaccttgtgctaaacctagtattctttttttctttcctcctctctttgtgtttgtcttttatgtccatcttttagtttgacttgtgcacatcaaaccagcctctaagtatggaatgccccaagactaagactccgctcttagagtgcctcctctgttcttacttgctacctaggggatcttaatttgtgttttttctttttggtgatgatggtcctacttatttcagccagacttggtatagtagatagagccttttccctcaatttttgatgtttaatagttatcttagtcatgtatttaaaagtgacttactgaaaattcacgaatgcttaatagtagtctattcttattgtgtaaatttaaaaagggggcagggcacctgtcatccttgtctttccagttttgtatacatctcatctgtcttggaagcatattggctctattactgacatgcgttcacaatttgaactgtttatgcttccccctagtcgaaacccctggcctctctgctcattctagcccttctgcccttccgattgctttcctgacagcagccagcatgatcctgttaacgaacgatgcgtatgtcaattatctgctcagagtcatccagggctttcttgtcccgtctttgttatggcctatgaggtctcactcagtctccttctgctcttacttcatctgctatgacaacagtgaattggttacacttgtacgcatgccctatcacagagcctttgtgcttatctttcctgaaaatgccttactgcgagactagcttccttccttaccccaagtcgtatcaccctagttcatacctaaaatttgagacacactgcttcactctatccgttccttttcctgccttattttgtccttggcttatatgagtgtcacccaacataatgtcttgtccatttgtagactgtaagccccatgaaaggagtttcctacctggtattcatgtgtattgaacaattaacgtgcattataatgattggtaaaagtggcttaggaaactagatgatcgctctatggacgtttgttagggtaattaattagagctacggttatggatgtttgtt

SEQ ID NO: 29799 - DNA, 1186 bp, Mus musculus
ccgcgcgccacccccgacgtcacttccgtctgcgtcggcaagctgatgggttgctgcggaatcgagcgccattctcagcgagcgatagggtcggacggtcgccgtcgagctgtggcgggtgatagacgtaaaggagggtctttcccttggcaggcgtctgcaccatctgtcttttagtttccgcaatctccgaagcgaagagggagcggtgtgtctctataattcttgtgaaaggtgacctccgtgagtgtgacctcgcttttaggagactacagttctttatgcatttaaagttcagtgctggtagctatgccgagtgcagctctattttctggattcttagagatgaacaaaatagaagccctgttcccatgccaatctttaagaatcaggttcatacatgaatagatgcattttgaccatatttactccttcctatccactccaactcctccccgtgttttccctgacatgcccccgactcaaattcatgtcctattgtaggggtgtatttctgggtacacacatgtagcccagatgtacttcagtgtagggctgcgccccgcttggacgtgggaaaacaatctgatctcttcaggaaggaagttgactcttcctcagcagtcttgactgcttgtagctccctagccagagatggaaccttgttcgccatccatgctggaatgtggagtggagtggtggtatgcatgggaccacagctgctgagtggtgggtgttaaaacagaagtcttcccattcccctgactctttcaagttttctgccccccatcttcagcaacgctcctatacctttggtgtaaggattgcattataaaaacccacttagggataggcattctacagtcacttaactgcacactggtcagatgtggttttctgccataaacactgctacaaaaagtgcagactctatgatgagaacatcaaaaaagttgccttttgccccatgctgggcacaattgttcgaacctattaatttcagcagagaagaggttgaggcagaaagaagactggattttgaggcagtgttggctacatagaacacatctcaaccaaaccaaaccaacccaaaagttctaagatacacaattctgagcattggggttcctattggtgttgcttttatgattcagcagatacacgttatactttgctttcctttcac

SEQ ID NO: 29800 - DNA, 1231 bp, Mus musculus
tagaccaggctggcctcgaactcagaaatccgcctacctctgccttccaagtgctgggattaaaggcgtgcacctccacgcccggctgaggagcaagcgtcttgttcctggacttttctgcggtggtctagtgatatgcccagcagggactatggcagagtccaacccttttcagccagagctacacagcgaaggttagtagccttcaatacattgagcattgttgtattaccaagtgttgggcaacaaaaggtctttccagcagcaaagtactgaaggaaaaagaaattggcttaacttcatctccattgttccgggaacaacaaatggaagcttgactttgccaagacttgaattccttcgggaatgacactaataaaagaccaagacctccggattgaattggatgtgaggtgctctgtaggctgcactttttttttttttttccttttttggctttgtagttttcctttctcagttaacatctcacactctaacattccacgttccccagcagtgcggggccaactcaagtttacagtcccgactgaaagtcaccctgcttctagcttatctgaaccctgcgcctcactcctatttattaagcatcacactaccagggagatgaactttgagcaaactgtgcaattgataaaatatactctgttctttacgttcttgctattgtatcatacataatagtatcactttttctacatcttggtcaaataaatttttgcatattaaaaaaaaagaaacaaaaagaactaaatctacaagccttgctagattttctgactcaagagttttagcctctgatcatacccttttgcacaatcacacatttgaatatggcctccataaacccagggtagggttctgaatcgcttctggatatcttaagatatatacactttcggaatgtgacacatctaaagatggcatggaagctctataccctgtcctccatacgtctccctccgtatcttgtatgtcagtagagtgcaagcttacctaagattctgtggataagaataagctggaagtctgaaatttaagtgtgactactactttggcttagtgaagatatttataaatatatatatatatatatatatatatatattaagagcagtcagtaatcttaaccactaagccatctctccagctcctggctatgttttgttttcatcatgaggtgacacttgccaaagtatatttttgaaataga

SEQ ID NO: 29801 - DNA, 1154 bp, Mus musculus
tgacatacctcaaaaggaatatggtgaattttataagtccctcaccaatgactgggatactacttggcagtcacacacttctctgtaggtcagatagaatttggaccattgctctttattccttggcaagcttcctttgaccttttgagaacaaccagaagaacaacatcaaactgtttatcagttgtgtgttcatcatggacagctgtgatgagctgataactgagtccctcaactttatctatgacatggtttgctttgaggacctgtccctgtaaatttcctgagttgtgcagcaacagaacaagatcctgaaagtcatctgtgaaaagacggtgaggaagctccttgagctcctgagttgtctgaagagaaagagaactacaagaaactttatgaggtattctccaagaatttaaatcttgaaatcccccaaaattccagcaaccattcctgcctgtctgagctacttcactaacatactgctcagtcttgaggtgagatgatgtccctgtcaaaatatgtgtctcacatgaaggagaagcagaagtccatctaatatatcactggtgagagcaaagagctggtggccaactctgctgaagtggggctttgagttggtgtatataactgagcctaatggcaagcactgcatgcagaagctcaaggaatttgatgtaaagaacctgttctcagtgactaagaagggccaggagctaccagaggatgatgaagaaaacaaactggagtagatcaaggcaaagttgaaaaatcttcgcaagctcatgaaggagatattggataagatgtttgaaaaagtcaccatcttcaatagccatgtgtcttcatgctgctacattgtgtcaagcacttatggctggacatggaacatggaagggcttgtgaaggcccaagcactttgagacaactctacaataggctacatgatggccaaaaacacctagagaaatattctgaccaccccattgtggagaccctgtggcagaaggctggggcagacaaaaatgacaaaactgtcaaggacctggtagacttgctgataggaactactgtgctcttctggcttctcacaagaggatcctggaacccactccaattacatctaccacatgcctaaactaagcctgggcatt

SEQ ID NO: 29802 - DNA, 1143 bp, Mus musculus
taattaatgtgcctaggaagcacagacaagaagaccagcagatctcactgttcatccactctagttgggtctgagtcccagggagagaacttgtctcaggtagcaatgaaaaggatggtgatgatgatgatgatgcaaaaaaagacaagaagaaataagatacacaaggagaaccacccaaacttgacctctgacttctacatactggcaaacacatttgcagcctagtgtatgccaacacgcatgcataggtatgtatacaagtgtaagaagaagaagaagaaaaatgggtatctctcaagcatcgtcttttctgtgttgattttcagtgccagctgcagttctgggcacgcagcaaggggatcatttaaccgttctaaaagcagttcctattcccagagatatgctgtgactattggcatctttgccagaggcattcatctgggacagatcaggacagcgacgggcctcctgggctcgcggatgcacagggattatagtctgtggttctgagaaggaagagcgttcaaagtcccctacctcctaggtgatgatagcatttctgcggtccagccataccctcaggtgtcagaaaagaatcttgttctctcctcctaaactaccgtcaatgtcttcatttctttctctgaaaacacattgtgatgtttcaaggtcccacataaacttaaataattcccaggaccttgcttcaaatccgctgctgctcctcgtgctgcagtcactcgtgctgctgactgtagataaatcctgagctctttttaccagtctcctctgactcagctacaaactcaccgtattggatgattgtagatactgcttcgacagacttcgtacttatcgtattaaaatccttgtaaactcatattaaatcctcagatttggtataagaagcactcgaattaactgaatcacacgtcatccccatacaacgatcacaataaaacagttggtatcgaggttgaaaaagttagccaaaataagaatagcggagacagcgtcaccaaataggtgtcagcattcaccagtgtcccccagcgcttttctcttaacactgagtgctgcgttttcagttcagaaagaaatggctcccaggatacacagcgaagaggccagcgcctctct

SEQ ID NO: 29803 - DNA, 1193 bp, Mus musculus
ccatgagttaaaatacaaacaaaattattttatttaaatctatttacagcattcatctcctttgaagtttgaagcaaataaagcaaaggtgatccatactttctgcgtgtaggcatctgctatctactacctatcctgcatgtaggcatctgctatctactacctatcctgctgcagatggctctctttcctcagttttcacctacctattgaaaacagctgtacaatcaactctctaaaatgtcacattttgtgtgctgtgtcacaaaagtttgcgtgcttccagtttcctcagaaagagcaattgtgcacaggcatcagaagtttccacagtctagactgaacttctttttccaacctttgttcccttgatactggatcatgctgaaagcattaagtaagactaagctgcacagtcacttgtgtactgggttggtttggcactgctatgaagaaggaagttgccatggggtagcatggatggtggaggcttggccatgaaggctggcctgatggaacagcctaggaggaacatggcaagtgatatctcggggatcacgagagattggagatgtactattgaaagggcaagcccttcactgcctcccacccaaataaaaaagccaattggccttgtactacaagagccagtcgaactccttctccctgtttcccacctatcatccaaaaatgcggaggaatatcaacttagtgttatagtgtatttcacatttgttcagtcaaacttagccagagttccaatgccctacttaaaattcaactagaaagttacctaggaagtactaattagcattataaagtcagagcctacagctccaggcttttcagttagttgtttactaagataagaagggacagtcttagccttatacagtttaccataagaaaagttaaggaatcccatgaaagcaagttttttctttagccctagattccaggcagaactattgagcatagataattttcccccctcaggccagctttttctttttttaaattttgttaataaaagggaggagatgtagtctcccctcccctagcctgaaacctgcttgctcggggtggagcttcctgctcattcgttctgccacgcccactgctggaacctgcggagccacacacgtgcacctttctactggaccagagattattcggcggaaatcgggtcccct

SEQ ID NO: 29804 - DNA, 1183 bp, Mus musculus
cctggcgataggatttcaagctctccttacctttagccatgttgtagtcccaaccggggtgagtaaaagggaatcccatgttgatctcattttgtagctgtgtaggccgcccgtcagttaccggggtattttttctagcctctaacagaattctctctcactctttggttgtgaagagtgtctgcagcatctgctgacaatcaccccaagtaggctgatgagataacataagggactccaccaacactgtgaggcattgaggatcctctgagaaaagggggtggttagtttcccagttataaaaatcagcagaggaaaatgacagtactgaaggtgttataggttgggcgggtccactggagtccatagggactctgcactctccagctcagtgttcccacagtgggtcagactcctcccaccccaggggttctgcagcctgaacactgcggggaggggagtaccggggaggggagtaccgggacctctgtgtcagtgttccccactacccccaccccccgccacggttttccactcggagcctcgcctcaatgggcacctagcagctgacttagaactggtgcagaccaggggaatgcaactgtttaattaaaacaatgcatatcaaaggccctctggtgggtgttgaggctgtggataagggggaggtagtggaaccaatggattagctggtggctccaatttgggagaagtcttcacttttgatttctcttgtaacaccagagcacaaccacaattttaggaagcaaaacccaattttaactgtgtaaacaatctgatctctttaataatcaacaccaaaaacattacttgctacgaagtttggctgcctgttcctgcacacaaacgcaagaaggtgcaggcccccaacacttcaaagagacactgccctaaatcctatcttctataagtctggctgctaggataagaattacatagagtattacccaatttaggcgtatctttagagacctatttccttgggttgtctcatgctgcatgttgtagttctaaattactccaacccagagttaccagttttaagccaactttctgttaccaatggtataaatttttaatcataaccaataacttatgagccaataatctatgaccaagacatataaaatatatttatacctttaaagctattcagaaacaa

SEQ ID NO: 29805 - DNA, 1118 bp, Mus musculus
agcactggatcatctattcataaactgttgaagttgttatatatcttttttatatatttttattaggtatttttctcaattacatttccaatgctatccccaaagtcccccatgccctccccctgtcccctacccacccactcccactttttggccctggcgttcccctgtactggggcatataaagtttgcatgtccaatgggcctctctttccggtgatggctgactaggccatcttttgatacatatgcagttagagtcaagagctccgggtactggttagttcataatgttgttctacctatagggttgcagatccctttagctccttgggtactttctctagctcctccattggaggccctgtgatccatccaatagctgactgtgagcatccacttatgtgtttgctaggccccggcataatctctcaagagacagctatatcagggtcctttcagtaaaatcttgctagtgtatgcaatggtgtcagcgtttggaggctgattatatacggccataccaccctgaacgcgcccaatctggtctgatctctgaagttgttatatatcttaaagaacaaacaaatgtcctctgcattgaaagtcgaacatgtcttcctatgtttagcctagaaaaaaaaatcattactgggtttcactacaataaaatttagatcccaaatcctcaatttatgtataaatctactttctacaggcatgaaagtcctcttcaaggcccagtgtcttcccagtcttgtggaagctgctaatttatagggcagcttaatgcacgcacgcgcgcacacacacacacacacacatacacacatacacacatacacacatacacacacacacacacacatacacacacacacacacacacacacacacacacacacacacacacacacagaacagtacccagtatttctttgaaatattgtccacagatgcagtcagctcccctgacaggctattgtctctttccattctcactgttctgcctccacccttgcctctgagccaaccttcatccagctgttgaagtgtgaatgcctccaagggtcaaggtttgttttctatgatgccaattggggtaaatgaagaatact

SEQ ID NO: 29806 - DNA, 2841 bp, Mus musculus
ataatggagttgcatggcctgcaagtggagtgtagggataactgtagtaagcgccatgtcaataacaatcttgacttgtaattctttatagctgtggaagatcaaatcgtgacagttgagagaaatggaggtgtagccgggatgccagagcacgagcgctgatggagctggctggaagcagtgggtggctctgctccaggagtctactgggaaagaagtgtttacatcagaatgtattgtgcaattcttatatttattttacttgtccactggttttgttttgttttgtgtgtgtgtgtgtgtgtatgtttgttttctttctttttttccttttaaacatttagtttgttttaagcattgaagtttttcattgttgaaagggtggcagagcggatccagatacctgagatcctggtaattgttgacgtaattgacaagcagattgtgaaaacagaagccattgctaagcactgtttcttcattaatgccgtgaacttgccttacttgaggaatacgtctttaactctgaaatagtgcgttgtctcagctaaacacatgtcctctggtaaaccagggtccgctcaggatcgctcttgaaatacttcagaacagtactgggatctagactgactaagctgcagttgaagcacccttcagtattaatagatggtgttgtataacaggtcaacaagtgctctttgataataaaactcttaatggagcaataattgtaaatggttaccatactgtaaaatattttgataaaaattaattagtaataaatgtatttatttaaaacactgagctgtttgcacagctccaactgtgcatgctcaaaatgtgcactttttaaaatggtttcttttggtgtatatctctatgtggatatgttacagtgtactagggcataatatggtatccttttgagtgaggtctatcctcatctcacaagtgaagtgcctattgttattactaaataaagtgcgttacgtttactcaaaagaatttcccatggtacactatagcgtatgctgttcctaccacacttaaataaagcttaagaataaagttgtctgattgctagttataaaatttccaaattttccagaaggacagctccagcctaccagttctagcttccagatttaatctggtgcacccctcccctggctccattacataagggctatttttagatgcttttaacgtggaaagctagctgctctccccttcagtaacttgtccgtgtccggtgggagcttatcatgtttccctttggcaaatagggcagatatgatagtccctacatcgggccttgattctaagttgttacctttgtacaatcagtagtgttttaagaattacatgaaacaatgtttttgtgattgtcttgtttaagccaaccatttggtttttaaaacaaagaaattatttgaaacaatctaggattttcttggtgcaaagtcatattgaatatattcatatttttagcatattttaaggtctttaaaataattaattgtaaataatttatttgattggtgcagttctaattcgcaaatcactcttaaaatcaggatgtgtagagaccagagccatgtgttaaatgttgcccttcccattcctctgagcaacctcagctaagcctcactggagagtgctctctgtataggaaacggcagacagcattgtgttccgtctgcctgcgctctaatatgtccaataatgaccaaagtgcattctgggtatttttcgaggaatgtattactggagctttaagaacatacttagtttctcatgtgaagaattaggctttgtctgatatgttccttcctatattgtctaatttgaggttgtttttaggcactatattttataaactttttcaaaataaggtacatacctatacagaacttaccattttgcacagagtatatcaaatatattttgagaataaaaaagtacagcatgagttctgttaggaataaagtgagattgttgtatcttaaaaaacttatttcagattggaggtatttttgagaaaagtagctgagtatactgacttaggaaaatgcttgctttaggttgcagctgtgtttaacgtagagttggggtggattgtacagtatcggccgtgccgttaacgtgggcagcagtagagttctaggaggaaaatgtgctaagcagcttcatagttcacagagccatttcagagtagtaagtgacatccctgcctttaagtataccatgaatgtaagaagtagaagttgtaacatatcacatcatagagaaaaagcaacccagaggtagaattatggcaaatgctgtgtgctgtttctttgccgtgtgtttttaaaagtttgaacagcaagtttaaaataaaacattataagactgacttgtgtgtgtttttttaagtgtgggttggtttttgtgcttactgtaatataagctgtacttactgccctttagacaaggacggtgaaaataaagttttaactgtacctcagcacttcatagtttgtttaagtcctgataacatgataggctaactctgtgtacaccaggaagcttggacctggggacacttgtattggaatgtaaaaaatgactgtggcctgggatgctgaagttcagtagcgggactaatgggaaaattgatgctggctagctggagctaaggaattagcggtgattaagaagagaccagcaggctggtgagatggctcagcaggtaagaggactgactgtgctttcaaaggtcctgagttcaaatcccagcaaccacatggtggctcacaaaccacccggccaacagagggagcggaggttctaaattca

SEQ ID NO: 29807 - DNA, 1170 bp, Mus musculus
taaataccatgaaagtatttagaaaagataaaatgccccccttttttatatattattgactttttagacaacttcagttgaagtctattaattcacctttatccccccttatgaaatattatatttcttaactttatggaaatattttgaaatagtatatgtcaacaatctattgattgtattccttaggtcactatgaatgccaaacatatcctttatataaaatgtgggaaatatatcaatccttgagttgtgagttagaaatgctgtagtgtaaactaaatagtcctattccagctccactgtaagttctacatttttataactgcataatttttatgttatctgtttaattataactaattttaaattgaggtttttatgtagctaaaattgtatgtgtataaatataactaatatacagataaatgtattccatttataaagtatatatttaccaattttatttagtatagctatatatagttttgtaaaactttgatttgtgaaatgcagtaatgtgttcaattctttttttttgtagagtcatttgccctggcttcatagttcccacccaggattagaaaaaatcagtgctatagtgtgggaaggtaacgactgtaagaaagcagacatgtctgtacttgaaatcagtgggatgataatgaacagagtgagttctcaattttcactctctgggtaaagggtaaatacattggctattgatacatgaactaaatgttaataacctgtgtacctccctctttttttcctcactgaaaaattgttacttttcttttaaccccatctaaaaagtgatttgccaacagacccttccaccatttgaagggacagtgaggtgtgtggtatgcatgtgtcacaacttacttgtggaagacaggtgacagctttgtgcattctgttcttttttttccacttttgagtgcgtcctggggatcacactcagttcaccaggcttatgtagctagtgtttctattgacgtgaaatagataccacaatgtcatttttctcctttcttcttttttcttcaatgggtaagattttgtgtgtgtgtgtgtgtgtgtgtgtgtgtgtgtgtgtgtgtgtgtgtgtgtgtgaatttattagcatctaaaagtcaagcaggaaacctgtattgtgcgtccttg

SEQ ID NO: 29808 - DNA, 1217 bp, Mus musculus
ctagcctggtctacagagtgagttccaggacatccagggctatatagagaggaacttatgtgtgtgtgtacctaaggtaaagtatttgggatagtattaagtcattaattataacttagctgatgaaacttcaaagataaacttcttaaaataaaagcttaaaatacgttaaccctcacaaattgggaaaaatttttattctagacacttcccacagcccaggtaattaagactaagaattatactgtaaattagggcttttctttgtgagttgttatttgtaagaccttaaaacctaccataagtctaactaagattttaatttgaacgaccatttttttctgatattctttttcatttagtgtaaaatgtaagagtagccattaaaattctgagaaatactgctttttgaaataatactggattttaatttctattgacccatccagaatgagctgagtccacatgaacatgtttctaactattcttggttctaggtcaaagaaggcaaagaattcaattgataagtcaaccgagactgacaatggctatgtgtccctcgatgggaagaggactgtaaaaagcagtgaggatggagcacagtaccatgagcctcagtgtgaaactgttggaccagaagacgcagcctgggccacacgaacgccaaggagtgttcctgccaaagtcagtgcatctgcagcatctgtttgagtttttatctgccagcgtggagtgatggagtagctgctctgaaagcaaatgttttctctggaatggtgctgtgaccttctatgaataatagtcatgacgctagagatcaggtcgatgtcgctaaacatgactgcacgtgtaactctgtgcgttccaaattgattatccagtacaggtgtttaacatacattgggaacactgaaaaatcttcttccctttctgtgtttaaatgtgcagtaatttgtcaaccataattacagaaaataagttattcctcctatccacaggtacccctgtgttccttaggcactgtctattcatccgctgatcctcatcttcctagactctctctctctctctctctctctctcacacacacacacatctgtgtataatactgtcagtataactgtacagtagatgaaataagtcctatgcagaaagactcatactgtgactttgacttactaccagttctgtttctgctgctttacaacaaaatgttg

SEQ ID NO: 29809 - DNA, 1238 bp, Mus musculus
gtttaagattattgatgagtagaacttgataactcagacttgtcaaaacactagattctcatgggcatgctctttaaaagttgtacttacttttgggctaaagttttcaatatgaaaattataatactttaacaattcatttacagtagaatcacttgaattttaaaggaagtaaaaatagtgtattcaactagtgtatttttaaggttcttttccctggagtagctttgactcaggacttcttcatcttgagtaccaatcagaatgcattgtagaaaactctacaaatgtctcaccacccaaaaattaaaaaggcagaactgttaacgttggctataacagtgaggatttttaatctgtagtttttttttttctattcaaattccagttcataaaataactgatttttttcttagtaaacatcatatttattaagtacttttcagactaggcattatgctacttgctggcaacaaaacataaaactaacctagtagagatgagttgcatataatctaccaaatagtatatggatgccagcagtgccttcgtgaaggatgcatccttatttcagggagatcttcaaagtgagttttgttgttgtttgtttgtttgtttgttctgagtttttgtttttgtttgtttgtttgtttgtttgtttggggattttcaaggcaggatttcctctgtgtatcactggctattttgggactcactctgtagaccaggatggctttgaactcagatctgcctgcctctgcctccccagtgctgggattaaggcatgtgccaccactgcaaagcttaaggtgagttttaccaagtagttggatacaataagttcttggaaaatggataaagccatttcttttaagttgttttaaggatcattatatgaaatcacacaaaattaaagtttctgtgtgctaggggaaactgttagcagagcaaacagacagtccacagacttggagaaactttttctagttactcatcacaggggggttgatgtaagtaaagatttacaaaaataaacaccaaaaaacacaaaaccgctagtcagtaaatccacgaagtgatcagtcagttctcaaaagaaaccaaatagccagtagtttttatttttacgttcagcatccttagcacctaggggaaggcaaactaaaaccactggagttcccatctcacctattcagaaaggccatcatcaagaaaacaaaccacaacaaatgcttcca

SEQ ID NO: 29810 - DNA, 3487 bp, Mus musculus
aaacacgaacctggtgcagctctaagaatcaaggaagagcctgggatggctcccatacctgaaaagatcagaacaccaaataacacggaaggcaagaacagtaaggcgagactggatcgcgctcagttttcagattttcacattgacatggattctgcatttgagaacaccaacaaagacttaaaggaagactcgtgtcctggcagtgtcagtaatacagttgatacacagcagcatagttctgtacgttcaagtcaagacagaagtgaggatgacagtttgtgctaaatttgtacattacgtatagccttttctttaaaaaataatttgtaatgattcatgaaatctgaaagcaagcctaggaattgctctcaagtctgttacaaaatatagttgatgtagcgttgtcacattcctcagtgcctgtccataactgtgaagtatcaagcacttagggccagatgcactgtaaacattgcaggcggaaacacacaggagtctttagaaaagtcattgagttggagttgtaggctttagaatagagctgacaaaatcatataaatatattttttgtaatatgagccagaatttttttgacaatataaagtttttccatagagcttatttataccaactttttttttcattttaaatgtcagcactgtagtgtaaatagctttacaaaacctttttagtgtgatttatattgaaatgtgagccacttaataaaggttcataataataaatgctttctgttgagcttgcaaaaacatactgacaattcagtttgtttgatatattatgttcccgttaatatacatgaggtgaagtgatggagggaaaatgtgtgttccaatctagtaaatatttaaaatttccatactgtacaagcattcagaaagccacaattctgttattaaaacatatacatatggattgtgtgtgtatgtgtgtgtatgtgtgtacacgtatgtacatgtgtgcttgggaatgtatatatgtacattgttttgcacaatttcttaaattgatgaatatataaaagttcttagtgctacttcctggattgtattctaaaatatttctgttcagcagtaagaaaataatttaattaatagagttttagaagttgggagaacctgtgttgatggttttatccttctaactaatgaagtcaatgtggctggagtctttagccctagtgtaattcttttgtgcaaataataagtttagaaaattttctaataagcacctatatgtttagtaatagttgacttaaaaattgacatacagaaagtttaattaggagtaattaaaagtcttttacattttttcatatcacaaaaatgaacttttaaaccaagggcagtgacagtgacccagccatcattcacagatgtgactagcaaacactgtcagatcatcttcctcaggacccttcgccagcctgcagggcaaacctaaggtgtacctcctctagagatgctctaggggttcattgtgtaggagacagggtggccagtgcctgcacggtgagtagacatctgcacccatggacttgagcatggttccagtctgcttccactccgtcctagtgattgcaaatgccgtggtgtttgttttagtctgggtccctgccttgattggcgactttgagttggctctccttgtgctgcgtggccttttgggagaccgctgttcccacctcagtgggctccactttcacctcagttttggtaagccatcaaagctcatgcttctagctggggagaaaccacttagagaaatgtatttcactagaactgatgaaaatcagcaccagcagcagtgtcttgtgtccttacttgaggtgggcacataaagtagaaaatgctggtggcttataggaggatctcaggatgtttgcaggtggcgtggaggtgggggtggggattcatggagcagagaaattaaaaatcgtggcagtgtaaatagggtttggttttctatgtaactagctgtctttcactgccctcatttaatctattctaagctaaatttagggttcttcatctttcttaaggtgggatagcaaaaattcttaacatatgagtattaagaaatagggagggatattgttaaaatttagtttttaaattgacggtgatatatttatcacagtatgttttatttccagttgcacatatgtaggcccactgagatcatactgtaagaaaacactgttagggtatttccaaaacatatgagccttaagttttagcttaaaggaaggtacacctgagatagcatcgccactgcttttaggtatagtttcttatgtgacccttagttcacatagttatccatacagattaattgctctgtcaaatgcatacatctctgaaggtgaagtatgtgtaaaccagcaggctcaagatttcaagataaagccttacagacttgaatcatgcttacgccccaggcttacgggttattttttaaaatcctcttcagatgccatctgagaacttgttaactacttttgttacagacaaattcctattttaatattgcataataatggttttctagttagtatactcccattctccatgtgaatataagatttttatttccagtatcttggaccagaacataaagcagtcaaggtatagttttaataaggtcatatgctatatagagtgaatattatataagttattaagtgatatactacagacctttacatcaaaacgtaggtacatcagtggtatttgatatatatactttttccccctttttctaattttatttatattttcttagatgtagtatatatcccatgctcaggttagctatcaaaagaatgaaacatttttgatatttagttgcaaatttacataaagccatatattatcttccttatgactgacgaaactattgaccttaatgatcaggttggtttagcacaacactgtgtattgtatttatgtgtgtatttctgaataagtttgtttgaaatatgtttccaaaataggaggggtaggaaattaaggatgggaaagactttcttaggtttaacttttaaggaatgtacttaatgtattcaaagtaggatttcattttttcaaaattcagttctatgtaaggttttttgttggtttgttttttctttttttgtaaataataaattagcattgtttggtaactttgcttttttgagggtattggaagggacaatttatttatatgtaaagtgattatttccagttagccaaggtacagatttggttttggcatttgagaggctattttccttgtcttccacctttcaataaatactaagattgataaccacaatctttttacctttgttttgtaattattttcttggatttgacattatattttagtctcagacttcctatttctgtctgtacctactgtcttctgaaatagcaaggaccgaggtgggggtgggagtctagtcttatatttcaggttatct

SEQ ID NO: 29811 - DNA, 1199 bp, Mus musculus
gacctgtaggaggtgtccgctttgtacatatatgtacagacctgtaggaggtgtccgctttgtacatatatgtacagacctgtaggaggtgtccgctttgtacatatatgtacagacctgtaggaggtgtccgctttgtacatatatgtacagacctgtaggaggtgtccgctttgtacatatatgtacagacctgtaggaggtgtccgctttgtacatatatggagtctgttccatctttgctccgtgagatgctttactcgtctccattgtgaattgagcggtaacgatgttttcagtgttggacggttggggtttgttttttgtttttgtttttttcaagacagggtttctctgtgtagccctggctgtcctggaactcactttgcagaccaggttggcctggaactcagaaatccgcctgcctctgcctcccgagtgctgggattaaaggcgtggtttatttttttaagacatcaaggaagttagttctccgtttaggtggtattttactaattttaattgtctgaattttgtgtgtttaattcagatgctgatgttagtgaggagtcgcctcctcctttacctgaacgaactcctgagtcttttgtattagcaggtgagcgtaatgagtatttcttccatattgctgggtttatttaatttgccaactattatactgagtaattaaaatcaaaatgtaagttgtaattgatgctgacagtttttattactcacttgaaagctctttaagtagtatttttccatacctaaagttgctaagtgactatatttgtggtagtcattggaaactactagaatgaagaaggcaaatgcaatttcaaatgtattcacagcgagcgcagttgctgtttcattcactaatccagacaacttctgctgcttcactttctagtgaatgtaagttaacattcaacttgagttgtgaatgggcatgtttatgaagatagtttctaaaatttataggatttttttctaatgactttaataaaaaaaatcaaggattaaagacagaagtttcaatattgagatttcttttcttgttccccagatatgcctgtaagacctgagtggcatgaacttccaaatcaggagtggtctgaacaaagggaatctgaagtgagtcgtgtggggactggaatagctctacgttagctccaccttagagctgttatcct

SEQ ID NO: 29812 - DNA, 1211 bp, Mus musculus
ggtggtcagaggttgactttctggctcttttacaccatagtttctgtgttaatgtctcttggtaaactagcactggggtttcaggccccagcgccacaccagcatttatgtcagttctgtggaactgcagccaggtcctcatacttatttacatgagcacttccctgacttgagccgtctttctcaccccttcagaactgtgtaatttttcccccacctatcagttttttgtggtctctgtgtttcctgcatgggctagtcacattctgctgcgtgattctgaggaccggatacgtgcatctgcagcactgtctgtctttgtctgatagctagagcgcagtaaatacttgcagttatccagcctgtatctaaggtctgtgtgaaaacttggagggtattttactattttctgataatgttatattctttgttttagaaaattccagaggaatttaatgtatttaatttaatacaagaaatgagaacacagaggcactcggcagtacaaacaaaggtagagttggtttttctctttgtaagttatatttttgtaagtgtttctccttggatgctcctcactgtctcgtactttatcatttctctttataataggagcagtatgaacttgttcatagggctattgctcaactgtttgaaaaacagctacaactgtatgaaattcatggagcacagaagatcgctgatggtgtaagtgttcttggctcactagccttggcagacttgcgatcttgtgctgtaggtgggtgaggtggtctgaaaaaggagtttcggtttggggtttttggggaggtggagctgggggttcaagacagggtttctctgtatagccttgactatcctggaactcaactctgaagacaaggctgatcttgaattgagagatccccacctctgcctcccaagcgctgggattaggcgtatgcaatgactgcctggctcacaggagttaacttttatctgatgtgggtcactaactcactttactttttatcagttacggtccagagttagtgattcaaactgaataagtaaaatttaaaaggatcttatgtcaaagtctacattcactattgtttcaagtacaaactacctttaaaaacttaactgcgttactgctctcacccttaactacgtaattgtacgttgagtttaactgaaatttattttggcgtggcagtataacattttgt

SEQ ID NO: 29813 - DNA, 1210 bp, Mus musculus
agggatttgagaagttaaataatttgcctatttagtaattgacaaatatagaacttgcatattggaactgaaacccaagctctgttctttctactgacatctagaataatcaatcttaaaagttattgaggggactaaggagactgctccaaggttaaatgcccttgcagagctcccaggttagtttctagcacagcgctgatggctagccactcacattccactcagatctaaaactctctttgaccatggggcatgaggcacacacagcatacatatgtccgtggactcataaatgaaaataaatagtttttagagttactgaggcatctttggatgtttaatttatgcgggctatcactttcaatatttactataaggttaaaattggggaaaaaatttaaagacgtggaatacatagcttacaagtttgtaaatacattcttctaattactgaatttctgcttttcttttttttaatatttatttattatttatatgtaagtacactgtaggtgtcttcagacacaccggtagagggcatcagatgtcattatggatggttgtaagctaccatgtggttgctgggatttgaactcaggacctttggaaggacagtcagtgctcttaactgctgagtcatctctccagcccctgaatttctgcttttcatgtaggaatcccgtcggctctatcagtttcattacgtgaactggccagaccatgatgttccttcgtcatttgattctattctggacatgataagcttaatgaggaaataccaagaacatgaagatgtgcctatttgtattcattgcaggtacaaaataattttctaaatgtagagaagtacagtgtttatgttttgtgagataaggttttatttctacattaatatgatgttttattatatcttgagcttttcctagccctgttatggtgtgtttgagaataagaccctgtgaattgatataatctaatctggttaatagactgtctaaatgttgctgtaaaacatcatatttcctcatatgatcagtgtcaggcaaattttcatgagtgatgaagtctcagactttaaaaactgtatatagatataaaggccttactgatctgagatcccgtggtctgcagagaagtgctgggtgtagggacacgcttataaccccaaaccaaggaggctgatgtgagctttagccgctcagggcta

SEQ ID NO: 29814 - DNA, 1231 bp, Mus musculus
tatccagtaaattagcaaaagctgaaatgaattggatatatttttgccatgttttatactctaaaagaaaaatgactcttgatgaaaacattactaataaaatttgaaaccttaatgaaatattcttgataactatagtaaatgtaaagtttacctttcactctttcagggtgtgtatgggccaaaagcatatgtggcaacccaagggcctttggcgaatacagtcatagacttctggaggatgatatgggagtataatgttgtggtgagtgacttgtcatagattttgagatctatatgtttaatgaccttatgtgtcttactgagaaagaagtaaggcaaccttttttttgtataatttatttttattttatgtgcattggtattctgtccgcatgtatgtgtgtataagagtctaaagcccaggaacagagttacaggcagttgtgagcttgcatgtgcctgctgggaattgaacccaggtcttctggaagagtagccagtgctcttcactactgagccactccagcccctaagaatcttctgggtaacctttgtgttgtttttaatgattgtattcatttttatttattgtgaattggtattaggtttgtagatatgtctttgtgagggtgtgagatcctctggaactgcagttacagacagctgccatgtgggtgctgggaatttgctgccatgtgggtgctgggaattgaacccatgtctctgaaagagcagtcagtactcttaacctctgagccatctctccagcccctgtaaaggcctagctttttaggtataatgacctaagtgtaattacatttctagaaaagacaaaagctacttttgaagatggctcattaaattctcacaaagtagttcacatattttaagaaaagcgtgactaagtcgggtgtggtggcgcacacctttaattccagcacttgggaggcagaggcagacagatttctgagttcgaggccagcctggtctacagagtgagatccaggacagccagggctatacagagaaaccctgtctcaaaaaacaaaaaaacaaaaaagaaagaaagaaagaaaaccatgactatagtttaaattttgtcctaagccaaccaatgatatagctagtaaataactttaaaatcatttttcaaagaagatgaatgcttgcatagaccaacgaaatgattgatagtataggtatgctcttttaaaaaaaataatatttt

SEQ ID NO: 29815 - DNA, 1224 bp, Mus musculus
atcctcaatgtcctaggcactggatcaccactacacccagatcaggaaccaagttctgaaaaattcacttcatggacagggagaaaaagagatcattggagttggaatttacttaggagaatcagtaaacattggttgcattgttcagtgaacagaggcattagatagaaagaagatgctggtaatagaggtgagcctgccccgtgacttgaacaaacgcatttctgtccattactttataaaatacatctttcttttttaggtaatgttgtttaataaaactaatatatatggcaaaattatattagatttgtttactgtttgtggagtgtgagtgtacatcacagtgtcacatggagatcagcaggcaactttcaggagtcagttcttctgtcacatgggtcctggggttcaaactcagttcatcagacttggtgggaagcacctttatctgctgagcaatctcactggcccaaaaggcacaattttattaccctgctgatttaaatagtcttttatttctataaaatactttcatagtatggaaaggataaacttagattaaaagtttgtgtttctagctgggactggtagaacatattcgaggtaccaggacttcagaggcagaggctgaagaatgtctcctatgagttttggtgataggagctgccgttaataaaatgtgatgccctggcctacgtcttcaaggaattctagttataccgagggtggtgtgcttgtgtactgggttgtgacctccattagcggtccatagaaagagctggggtagagatgaggaagcagttgggaggaagtggatgacaaagtgttacaacagtactagtcttagggaaatgtttgacgatgatttctattctggtgtactgagaagcaaagacagatggaataaatgaaccagagaagtcagctagggcaaagcacacagtgaattgggttttttgttttttgtttttttttatctaagaaaccccgagattctcctttattttcctcagttatatccttaattaatcagtcctgagttacagcttcaaatgaaaaaacaaacaaaaacaggctggagagatgactcagtggttaagagcacagacctctttttccagaggtcctgagttcaattcccggtggctcacagccatctgtagtgggatccaatgccttcttctggtgtgtctgaagagagcaacagtgtacttacataca

SEQ ID NO: 29816 - DNA, 1142 bp, Mus musculus
tgaatctgattcccatctataaacatgctgtttcttaccctttcttttggtcctgatccttgtttaaactcttatttttctccgtgtgttttggtccctggggtctcacttcaaaacttcaccctctcctaagagtcgcgtccttggtatccaaagtaaccacagctgagtttatcccgtcccttctactcttcctattggtcagttacattaactttttttctttctctgctctcttggccaatgggcttgaagcaacgggaaagcaacgaggggggagcgggggctcctctaccaatcggctgtcagtctgtgtattcagcgcactgtctcctgggatatgtagtttcacagttaccagaacaccttgatgtttggctcctttaaaactacatatcccgatggcctccgccaaaggggcggaaataggtgacttgtccaggtcagggtttcaactaggctctttgaagttttaactttcctaccgggatttaaggcgttaagtactgtgctgggggcctggctcgttcttccttggcggagccgtgcatgctgtccccttcgtgactgacccgaggcagctcgtggttcttgtggtcccgggaccagcgagccaaggctgaagcgttccaagggagagcatgttcggccgcctccctccttgcgcgtcccgagtgcgggcgggcgccttggtcggagctctcggggctcggacttgcggctccagtggggcgcagcggcagggatcagcgcccgatgactctggggccggcctggcgcgtggggctctgagggagtggacgctgcaggtgagcccgtttgggcgactgagggcgcggctcccttgccacctggccgtgaggcccctggatccccttgcgcacccggatggcgaccgcgtgcaggtggcggtgtgcggcgtggagcacgtggcgcgcggcctggacagcctgcaggtcaagtatgatgctgatcggcaggagatggccattctgtcggacgacatcgacccccaggcgtcggtggaggtgaacgcgcccgtcaaatttggcaagtgaagtgaaaaagggtttgggtcacaaaactaatagtgtttaagcgttgggtttccaattaaggaggaaaattaaagccgagtggaa

SEQ ID NO: 29817 - DNA, 1151 bp, Mus musculus
gtatgtgaatgtcacacatttgcagtttttaaaaatgtagcataaaaatttcccccaataatttctgacttattttcacttttaaaactttttcatgttgtgtgggaattaggtgagtttcacgttacaatgtcagtgtctttaagccatagataggcctctttggaaaatctcatgattatttctctctacacaaatgagcatgcatgtgaacatttgcttacaatgtcatgagttccagaaacagtccagaaattcacttaaggtcagcctcagatctgaaagcagagttactttggaaacaggtctttctaaaaattcattgatatcttggcttttagattcacatctgtgactgtgacaaagttcgagatactataaaccaaattcttttgagaacggttttttctttttgtcttttcaatactttgcttaaatccctggattatcttatggacatgcacagaagaaaaagtttcatgcaagcttactgtctctaccctctgtggttttttgtttttcagagtcaaaagttgcatgttcaaaccaaaggaggcgatgtgatctgttgtggaacggtttacggaaatatagatattcatgcatcggataaaagtgtaagattgaagtgctctcagtaacttcagcttagcttccccacgaacagcagctgctacaaagtttatggtgtaatattttctttttagtgcatttagttctttaacaagctcatatttggaactgatatttagttcattagattcactaaacccttgataagtctgacttatctaaagaggcttttattttcatggttatgaattaaaatacctcattaagtaataccacaagtatgggaattggatttttcttaggtgctgggtttacttgaatattgtattctcccagacttgctgccttatggccgtcctaagggtaaattctgaaatgatggtcacttatggacagcactgatttaactcatgggttttgaatggagaacgtgatgttgagagaggagaaaaggcagcagaggaactctgggatgcattggaggtggggtgagcagttgatatgctcaaaatacatataatttctatattcatatagaaattaaaaagcgtctggaagcccgctttagcatttccact

SEQ ID NO: 29818 - DNA, 1487 bp, Mus musculus
agcttcatgctccctccgagatgctgtgcatttccctttgagaaaacccgtgaggtacaggcaggctgctcctccatttagtcctaccattcactgttggataaaggtggagccagatgtaagaaaaaggatgaaaacagcacagagaacataattaatataagaatgaataagataagcaaaggaattgagtggtcatatggagataagtattcgtgtggaaatttttcctaatacagataaattacttgaattaatgagtttattgtggttgctagattaaggtcaaatataaaagtcaagataatataaacttttaagagatattgtgtaagagcacttttcaaatatctggtgggaataaacgaataagacaaagtctacatagaaaacataacataccttgttcagaggaagtaaagaaggcataaatcaatggagggcttgcatattggctctgtttcccatctcacagaatgcatgttgctcacagtcttgcagttgtcaaggtgactgtgtactttcctgacgctggtctttgctctagagccgtgggtctcaacttcccaatgctgcgaccctttaatacagtgcctcatgttaaggtgacccccaaccataatattatttcgttttagtattacttcctaatggtaattttgctactgttatgaatcataatgtaaatatctgatatgcaggatatccgtctgaagtgggaccccgacgggggctgtgactcagatcgagagctgctgttctagatgagctgtttgggttgtttacacgttgttttatgatgaactgataacgctctctctcctactagactgtgagcatagagaaacttcagggaagttgtgttaatatatctacggaggatggtttgcttcaagccaagtatctttatacagaatcttcctttctgtcttctgctgctgggaatattgcactaggaaatgttcatggtaagctgacagaggcctagtatatctcagactttacacatggcataaaagttaagagatgactgtacagttaaagcaagatcaggaactggcctacataattaattgtagaatagccatctttttaaaaaaatctatgaaggtaaaatatcttacaagctaatttaatttaattttgaagagaatttggaaattatgctattttttataaagctaatagtagttctgactttttaaaagatttttattattttagtgtgcctgtgcatgcatgtacatatgtcatctctccagccccagtagttgatatttaaatatattttataagaagaaacaatatccaagagatgagataaaagcaatgttaataaaggtgggattcttagcggttactttccatgctatgagaggttaaatgcattaagcatttgggtagatgagactatagagactctatgatactgattttgggtacactgcattaatgtgtatttctcctggcacaggtcctcttagcaa

SEQ ID NO: 29819 - DNA, 1131 bp, Mus musculus
caagtgaaactaaatatacaggatcctgtggctcatggggcatggtgagcaggtcacagtgtgtgaaatccagagtcactgaagtcacaggctttggagacactgcactatgcctaccactatctgtctgggaacttgagcaaatcctcacctataaaattggtgtgataaagggacttcagaaagccgaaatggtgattgtctgcctctttgcaaatggtcaccattagcatattttgtctttgccatgtgtatggtaaattactgcttttttttttctttcatggatgagctgtgtaaggatattagcaaaagaagagctagtagttcaaaatgttctgatgcccatactcttatcagaagtcaggatgggtgagtgccttgaggatactgtgattcctgggagagttttattttcaattaaatttaaatatgatttatttgtattgtttcactctaaatttgccacaggttctattgctgtcaaggccccatcttctctacgagcttattttaaattatcaggcaaagaggtagttgtggatgaagaagctcatgttcaggaaatggccaaagactgtaaaggtgatggtgtgacggttacaggtaaggagacggcatattgctgtggatgaatggttgtggccctgtgtgcatggcacagtgtgttaactgcagattaattcctagccatcctcgattcccagtgtctgagactgttcctctggtgataatgatcagtaacccaatcagacactgttgaaaaggcctcctttcatagcagatcctcagccacagggctccatacccaatagcactgggagggaaagagcctccaaggagtgcagacaggcctatgattgtaggtgggatcacccatgctgctcagagaaacccgtccagaaccctgaggacacaggaaccaaggggctgcctgggacaggagtcttccagtctctgtctgcgcccagagctgatcctgtgccacagagctacatacacaaattcctcccagaaagaacaggtcttccaggagtgcctacacacttgtgagcataggtaagaccaccacttctcttcaaattcctgacccaagagggaccctcacagagccatcaggacacaggaacc

SEQ ID NO: 29820 - DNA, 1073 bp, Mus musculus
aatgtgtatgtaattccgctattcattgtctgttgttctgttccagattataaaagtccccaagatatgtcttaggacctccagtgatacctgaaaccacaaacagtatcaacgctgtacactgtggggtttttgcttttaatataaacacatatgacagccaaatgctttttctatacaactaagcagttatttactctggccaaagcccttaccagtttagtcccaatatcaaaactagatgcctttctttttcttctttacaagttcacaaacagtgtgtccaccctgactgtagggcctagcagcttcagcagatgatttttatttttaatttttgcttactaagttgagaacgtttacctttttcctaaagcactctgtggcttctctttgccagacctaattagtgatgtcagacatgacactgtggttgtgctttagcgccattactaagctaaggcttcttgaaccctggtactgtgtgctactgtgacagtttgatggcctcggtaactactgagtgactaacggacggtgaacacccagcatgcgcgtactggcaaaggaatgcctcgcagcccaaatgcaatggcagatttcctcacgcttcttcaccgaagaaataaaatgcagaaccttggatgggggcaagagaacagtgctaccccagatttaataacttcagatagcgttccctcaccggagtctatgtagatgcttatgctggggttccgcttagtgtatcacatggccgggataaaagtgttgtccaggctgaggatgctatctaggagctgcggggagaactctgccaagagttatagggaaaatcggcttccttatacctggatgatgtaatttcttactggcttcagctaatggtcacctcgtcttctaaagacaaccacatgctcaccttcctagtgcagcccctcttcaggcaaaacagagtccttctctcatgccctgaatgtctgactttcttataagctggaacaatctctgcttggttggccaagttatttaacatgattatgagaatatcctaggtatgtacaccactcccacta

SEQ ID NO: 29821 - DNA, 1149 bp, Mus musculus
gagacgcgccggagcgttgcctagcaaccacaaaggaggtgccaaatagtccaagcctttcgcgagatgaagaaagaacctagcagggagggggcggggcaactggggcggggcggggcgattgcagaggggcggggcagagaggggcggggcgagtgcagagaggcggggcagagcggggaggggcggggcaggacagtacaggccggggccgggtaaaatgagagggctggacgggagagtgagtgttggggcggagctagggtctgtgttcaacgcgccgcagtcccggtcttggtccaggaaaaagctgcttgcactaggggcatcccgcctgcctggtgaaaggaaccgcagcacacagggtgggagggcttccgattttagcagggcggcttccggaaggcggagctccaaccccatttcctttctctgggctggttctggcccagctgcacctgcgtgtggccctggctcctcggctccctgcagctccgaggcagcagcatgggtggcgcgcgggacgtgggctgggtggcagcagggctggtcctgggcgccggcgcctgctactgtatctaccggctgactcggggaccgcggcgaggcggtcgccgactgcgcccttcgcgatccgcaggtgaggcgatgggctgcccggcaggtggactggttcggggctccggacccacctcaggccaggctgggttggaggtgccctagacacccgcgactgcatggggagaaaggctggaggtagacagacgactctggaagcccaggttgccttgggtgggtcctgagccgcttccctgctcccacttctttgtttaaaataagagctgaaaacattgcccgaagtgtcctgttacttcccttcggcttcacagccaagagctgaggtttctccgagccaagtagattgcctctcattttaaagttttacctgagcttttgtgttgttatcaaagagatgccccttactgtgagaaggttctcaggggcctcaagcctgggttgaaactttgctcgtgctatgtgaagaatggatccctgagatgcaattctgccagcactttgtggcacctgtcctgggaagtacctttaagtcatccgtagcgtccctgcaaccggggtgtgtgtgttggg

SEQ ID NO: 29822 - DNA, 1904 bp, Mus musculus
aaatcttagtttttcccctaacaaaacgtcattttcacttgtaacatggaataaaaatgaaacatgtcccttacgcttgcctggagtcagacttttacagtgttaactaatggatgctgttttaaaataggacagtgacgctgtttcctctttcaggtggattcttcattcctttccctttatgacggccaagtagcaaatgagattcttcttcgggctcttacactgtttcagaatataaacaactgcctcaaagtggaaggccggttagctaatcagattccttttgctaaagggtcattgttttttctgttatacggagaagaatgtgcccagaaaatgagagctttagcctgtcatcatgatgtggatgtgaaagagaaagctttagcaataaagccgaaattctgatcggttgctcctatttttatcaaagactcaaacagtaaggcagtcttaagtcagcacacgggagcgtttgcctgcctttaaaaggggtctttcagccgatggagttaaacaataaaagtgagtgagcagctctaatccaacacgatgttcaaaattttagattttggagtagttcagatttggggtttggggattgagtagagtctggaaccttccgaggatgtggatcatttacggggcaaacgtttggttatgatcgtggacagactggccatgctcttcaggactatttgaaggattctagtgctagtgaatgaatatgaggggctgtactgaagatacttgctgaggtatttaatggtttcctgacacgaactgagtggcctgtctctgtacaatcctaactcctgggagcatttgcagttgctcatgagacagcgttaagtgctgagttgaagtctgttactgccacagcaaggaccttgtgcctcaaaccagtgaatactgcaagctcgagtccaccaccaaccctgccatgctgcttgcaagtctgagctcatcgtgagacactgcctgcagcatttctgatcagtaggactgtactcccatttacatggaaagcgttttcttactgcttacccccttgtgtaagatactgcagagcactccaagcttccacccacaggcagacagccctttaaaaaagagtgtcctgataagtccagatggatacatggagaaacatacccatgagatggctgctttgaaagcatgctgggaagcaatgtattagggtcccgtgtcttttttttctctcagtaatgataaatacacttatacatggacagaacatttctagaacgattcagaaaacttctgggactgggactagggtacatagatttctttgtgttcctgtttctaccgtttggatttgtactgagcataaattgtataattttttaataaaaaggaaaaatgcaaggtgtacataatttcttcccccactgacattattttactaaatttcatcacatttttcttaagtaaaattacaatacatacattttttaaaattttttccaatttgttttatttgtgtgagtgttttgcctgcacgcatgtatgtatgagcaccaggtcaaaagaaggcatggcaactagagtaggaggtggttgcgagccaccatgtgggtgctgggaactgaacccaataccagtgcctcttggcaccgagccagttctctaggcccctgtaaacattttcaggtatcttttcaagtacttttataatatttactttatttagaagatagacatttttacaatgtatattagactaacaagagtagactttttttcaaaatttattttcactttatgcatacatcctttgaaatgtagattagaaaaataaagtgaaaaccattcaatagggtggttgtgtgagagagatttggtgtacttcacgagtggaacttacatgtaaacag

SEQ ID NO: 29823 - DNA, 1168 bp, Mus musculus
tctgtagtcaaaccagttggcccgagagcctctgaagcatctgtcctgtttctgtctgtcctttgtgaacaggagcatcccgtctgtctcacttctacacagtcagttttgtattgttatttcagtttcttgactttttgtccttagtgaatatgaagcatctgtaggagaggtagctgaatcagggtgcttgttgaagggtaatgtgctaactgctcccgttcttggagagaaaggcatgttctctcaagtgttgcctgtttgacagagcggttggttaaggaacatttcctaggctactgctagagcccagtggaaccagaactgggacctcattctccgcgctttctgccaatgacacacacacacagacacacatagcagattacatccaccccgggctaggaaagtggttttggaatgagtctgtttgaggttgttttgtttgacactgaacaccaggacagtaatgttttctctctttccctcctcctcccgtcagccgttgtactttggaggggaccgactaagaagcacacaggctgccccacaggttgtgctgaatgtccccgagacacaagtgacatgtttggaaaatggactcagagtagcttctgaaaactctgggctctcaacgtgcacagtaagtcactgctacagtcttttttgtttgtttgtttgtttgttttgttttttcaagacagggtttctctgtgtagccctggctgtcctggaactcactctgtagaccaggctggcctcaaactcagaaatccgcctgcctctgcctcctgagtgctgggactagaggcgtgcgccaccactgcccggctggctgctacagtctttagtcggcaccttgtctgggagggagcagccacagctgcagctctctggttggctgggttctccgagcttgaaccttcccttccaggtgcactttggtaccgagtgcttatgtccttctctcactgctgacatctgcctctgacggtcatgagcctggccactttcccacggccgtcagcaacacaagctcagggagagtcacgtggctatctgaggttataaagcttatgcttgtatctgagcctgactttctgacagtccctgatgtctattccacagttattaattagatgtgctaaatgagctatgttaagaattt

SEQ ID NO: 29824 - DNA, 1099 bp, Mus musculus
taattgtatgttgtagtataatatatgccaccttgctctttaggtcagtaaattagatttaacgagcatttcccaatgtgttttaggaagcgtctgtgtacagatgtgactgagagtgaggttgcacgtgcaaaaaatcttctgaaaacaaacatgctgctgcagcttgatggtgagagttaaggaagggctgcaggtgcacggagggcgggcctgctggggaggaagtttgccttgtctgtcgggatactagctgtccttctctgaacagggtcaactccaatttgtgaagacattggtaggcagatgctatgctataataggagaattcctatccccgagcttgaagcaagaattgatgtaagtaataaatgtggggcaaataggtcatttataaaggctgaggttccccaagtcttgacttagtttagaaaagtcacatatgtggaatctaagttcactacaaaaagttgtaattatagtatcatccctattgaaggctgtggatgcggagacggttcgacgagtgtgcaccaagtacattcatgacaaaagcccagctattgctgctctgggtaagcctgcctcttctccttctgcacatagagttggctaaggacttggaattttgccctgttttcactgttttcttttaaatccataggtcctattgagcgactaccagattttaaccagatttgtagtaacatgcgttggattcgtgactaatttttgtgatcaaatactctgcacatatatatttataaaactaagagactggaagttttcaaaactgccagtgttcaaatgaaaaaataaaaatatatttggaatttttgcgttagtctgttatatgtacctctagaggctaagtctacaaccctgaatgtttgatgtaatggttgaactttatgttgggagtaacacacttttaaatgatgactataattccaagtgaaaatgtgtacagtattttcagttttattataaaagtgcacacacaaccaggattgcctgcattatttcctggctctgcttgcattcagcacttgctcctgagcagctttcttggctttcaccatctccacaagttcctaag

SEQ ID NO: 29825 - DNA, 1106 bp, Mus musculus
agttcaaggccagcctggtctacaaagtgagttccaggtcagccagggctacacagagaaaccctgtctccaaaaacaaaaacaaacaaacaaacaaagaatgttaatttcacaccttcttgtctgaaccttagtgctgtttagtagtcaggaaagttatggaatactgtgttgaagctagcagtattaatttggtaatacaggtagcaaaccacggggttgttttgttttgagacagagtttctgtgtttatccctgcctgtcctggaattctctctaccaagccagccatgaactcagagatccacctgcctctgcctcttgagtgctggaattaaagacatgagccgcgctgcccggctcaaacttcaggtatttttaaaaagctttaggtgatactgattgagaatgctgttaggaaaggtgtgcagtatatttattataatttaaaagattttgaaaccaactctgtaataaccaaattttcttattagggagctcgaatggttcgtgagctttttgaaatggccaggacaaaaaaagcctgccttattttctttgatgaaattgatgccattggaggtatgaatgatattttattgatttagttactttttagtgtgtgtggttaaaggacaaatctatgggagtcaattcttttctaccatgttcaaactgggcaaaattccagccctgagcaaggaaagtggacacaaggtctcatcccttcccatgaagcagtttgcagttggtgcctgctgggaaaggagccctcgttattctccagtggagcgtcacagtttctatcaccctcacccagggcaggcctaggccaacacaaaacaaactgggttttgtctgcttttcatttcattttgttttgctttgaaatattttgctttgcaattagttttataacttcaaagtaggttgtgcacttagctgtaagggaaggctgtgagccaaggggtggcattttcaggtcctgagtggtgatgctcgcagtggacatgagctgcttctctgccttcttctcaggggctcggtttgacgatggcgctgggggtgacaatgaagtgcagagaaccatgctggagctcatcaat

SEQ ID NO: 29826 - DNA, 1197 bp, Mus musculus
aactttgtaccgtatagttcacacacaaagtgttgagaggctctgactttgtgtttgtcttaagtactttatgaatggctcaaaacggtttaaaagttgtgtttgtaagttacatttaaaacaaaatgagttctagtgcatctgacagcattgtccagttgtagtttgctttgcagtcattcagagctgagcagtcgagacgggaggctaacatgctatctgtttttgtttctaggatggtgaactttgacataataaaatacttgtatgatttcttgtgaaaacaagcctcaaagccatatggacactgtgacaatgactaagccaagctgtgttcatccaaatactcagctggccggggaaaggagttctttggctggattggatttgtccaaacaggtgctggcccagcatggaatccgatgaaaaccctctgattggtctgggtagctgtgagcagaagacggtttaccaggggcccaggagtatttggaagcaacgtgttaattataaacagcagggtttgagcacaatctgttctactcttaatgatgttatcttaacactgaaattgcctgaaacccatttacttaggactgtgttttgctctatgaactatcccctgcgctttgaacgtgccagcagcccttgtttatttgcccagccttttcacttcctctccacaggagtctctgctggctcttgccaaagcagatttcctaaggccactattttaaaagatcatagttgctaaagtatgtgctgtgtatgtttatcttcttacctagttttctcaaaacctggcagcttgttcattgtgcacacagcagcttcatgtctaactctgcttgctaacctgacagtactggtcactcccagttcaccaacgtattgtgttccttccttccatttttcttttgagttgatgaattttgagagcgccacaataaaattcttcctcttacattagctgtgttctttggttctgaccaccttacttgttcatattttctaaatagtttcctgttaccactgaatacttgaaaactgaatgggtttaaagagtttaattataatttagtttaaattttggagatattttactctttcattccattttatgaagaaaaattctcacagtcagcattcctaggtacgaagtcttttcatgtggtgattttctgaccctttcttctt

SEQ ID NO: 29827 - DNA, 1196 bp, Mus musculus
ataggtctatagaaatctctttaggttgggacctttcttccttcctttctttctttctttctttctttctttcttttttctgtgatttagttgaaaatattttctgggccttggagctctgactctaccttcttctatttcaattatttttatgttaggacttgtcacggtatcccaggtttcctggatgttttgtgtcagaatgttttagatttaacattattttctcactgatgtatcagtttgtcctgttatatcttgcatgcctgagattctcccatctcctgagttacgttggtgatgcttgtatttgttgttcttttccctagattttccatctctaggatttcctctttattgcttctcttttcactttcaggtcttgcacagttttatgaaggaaatacttcacctgtttaattgtattttcctgtatgtctttaagggattcatttgtttccactttaaagacctctacctgtttgattgtattttcttgtatttctttaagggatttgttcatttgctctttaaaggcctctgtcatctttataagattggatttaaggtcattttcttgtgcttgagttgtgttaggatatccagggcttgctgtaggagggcatgtgtgctctgaaagtgtcatattaccctggcttttgttgatttttttttgagggcctttagccatctggatggctttggtccctggatgctcctgttgtaatagatattgggagggaggttaaccttgatgctgctgatttgccaggcctctaatgggtatccgtgggttgtatggttccatatctgcaggtctgtttggttcaggatctgtagatcccacaaaggtgggcagaggtggatggagagtggaggtcctcctgtgccatcaggctgctcagggcagctcggctggctccagaggtctcagcaagcagggaagaaaagtctgggaagggaagcttccctgtatggcttaggatccacaggtctgatgaaggtgggcggagaggagggtggagaatggaggccctcctgggctagcaggctgctcagggcaactcggcgggctccagagcaggttaatatttcttgtttgctgtctctgatatgtaactgctttctcacttacagttactctttttcttttctctttctttttctttttctttttcaacatttactatcagtat

SEQ ID NO: 29828 - DNA, 1205 bp, Mus musculus
cgcccagattctaaaactcaagtgactgtgcagtaaatgcaagattggggtgctgtgcttcccatcagagtccacacgattgttatatctgttttgatgaagaagtttgtcttgatgagatgagggatgctctgaaggagaaagtgatcaaggctgttgtacctgcaaaataccttgatgtggatacaattttccacctacagccaagttgcagatttgttattggtgggcctcagggtgatgctggcttgactgaccgaaaaatcattgtggatacttacggcggttggggagctcatggaggaggggccttttcaggaaagggttacaccaaagtggaccgttcagctgcttatgctgttcattaggtggcaaaaaatccctcgttaaggaggtctgtgcaggagggttcttgttcaggtctcttatgctattggagtttctcatccattgttgatctccatttcccattatggcacttctcagaagagtgagagagagctattagaaattgtaaagaagaattttgatcttcgccctggggtcattttcagggatctggatctgaagaagccaatttatcagaggactgcagcctatggccactttggtagggacagcttcccatgggaagtgcccaaaaagcttaaatattgaaagtgttagccttttttccccagacttgttggcataggttacagagaagccttcaagctctgagggaaagggccttcttcctaaatttttctgtcctctttcagctcctgatcagttgcagtcactctaatcaatgacatgaattttagcttttgtgggggactgtaagttgggcttgctattctgtccctaggtgctttgttcaccattataatggatatagtgagcataggtgagccatgtaactgcctagaaacaaacactgtagtgaataatgctttgaaatcgaacctttgtgccctatcacctaatcctccaaagttctaattgcaattaccttcccaccagatgctgaaaacgtccttgtagtgtgcacgcaaagtacttgtagtttgactgtagactctggcaatgccacaaccctgtcagcatgaatctacaatgtcttgagctctatttattgaatgtgaagcccctgcccttatcctccctgtaactcatttctaattatgtagttctttatcagggagtgttcctatccaatcagt

SEQ ID NO: 29829 - DNA, 1466 bp, Mus musculus
gccgcctggcgcccattaccagcgaccccacagaagctgctgccgtgggtgccgtggaggcctccttcaagtgctgcagtggggccattatcgtgctcaccaagtctggcaggagtgctcaccaagtggccaggtaccgccctcgggctcctatcattgccgtgactcgaaatccccagactgctcgccaggcccatctgtaccgtggcatcttccctgtgctgtgtaaggatgccttactgaatgcctgggctgaggatgtcgaccttcgtgtaaacttggccatggatgttggcaaggcccgaggcttcttcaagaagggaaatgtggtcattgtgctgaccgggtggcgccctggctctggattcaccaacaccatgcgtgtagtgcctgtaccttgatggccctctggagcccctcttctagcccctgtcccttcccctcccctatcctttccattaggccagcaacgcttgtagtgctcactctgggccatagtgtggcgctggtgggctgggacaccagggaaaattaatgcctctaaaacatgcaatatgttttattattcagggccctacctgagccaggggtggaggaggaatgcaggactggaaaccctctgactttatcacagaagggcagcagcatctctgtactttgtttctgtagaaagttgtcagagaattcccagccctagcctggagttaggaggcagcaaaagagtaggggctgagggtgtggggcccagggtcccagtgtagatgacaacgtctggccctggccctggccctgacctgctttcccaacagctttggcctccccactccttgtgcactccacttctgtcactgcagacactccactctccaccttgtactctgcagagtctccaggccttttgctatagtgctcacctgaatgtcaataaacagcagctgaagaaaaaaaaaagaaagaaagaaagaaaaattatccaataaaaaataaaaataaaaaaaggaacttagtgatttggcccgtggccctccaacacaatgtaggtccagttggaaatgacatgtttcattggcaagccacaattatggaacctaatgacagcccatatcaaggtggtgtattctttttgacaattcgttttcctacagactcacccttcaaaccacctaaatgggttgcatttacaacaagaatttatcatccaaatattaacagtaagggcagcatttgtcttgatattctaagatcacactggtctcctgctttaacggtttctaaagttcttttatccatttgttcactgctatgtgacccaaactcagatgaccgccctcccagtgccagagattgctccgatctataaaacagacagagatggatacaacagaatatctggggaatggtctcagaagtatgccgtgtgatgctaccttacagtcggaataacctgcattatagctggaataaac

SEQ ID NO: 29830 - DNA, 1390 bp, Mus musculus
tggccatcaatgggaggagaggccctttgtcctatgaaggctctatgccccagtgtggaggaatgctagggccaggaagcaggagtgggtgggttggtgagcagggggaggagggaggggataggcggagggtgtttttcagaggggaaaccgggaaaggggataacatttgaaatgtaaaacatctaattaaaaaaaattttttaaaaaagaaaaattgccccgcacagcagcgactcgtccttactcgactgacatccctctaggtatcgcagcagcaaccgaagtttgcccgaggactttaggaaccatgccgaagccacacagtgaagcggggactgccttcattcagacccagcagctccatgcagccatggctgacaccttcctggaacacatgtgccgcctggacattgactctccccccatcacggcccgcaacactggcatcatttgtaccattgggcctgcttcccgatctgtggagatgctgaaggagatgatcaagtctggaatgaatgtggctcggctgaatttctctcatggaactcatgagtaccatgcagagaccatcaagaatgttcgtgaagccacagaaagctttgcatctgatcccattctctaccgtcctgttgcggtggctctggatacaaagggacctgagatccggactggactcatcaagggcagcagtaccgctgaggtggagctgaagaagggagccactccgaagagcaccctggacaacgcttacatggagaagtgtgacgagaacatcctgtggctggatacaagaacatctgcaaggtggtggaggtgggcagcaagatctatgtggacgatgggctcatctcactgcaggtgaaggagaaaggcgctgacttcctggtgacggaggtggagaatggtggccccttgggcagcaagaagggcatgaacctgccgggcgctgctgtggatctccccgctgtgtcggaaaaggacatccaggacctgaagtttggggtggagcaggatgtggacatggtgtttgcatctttcatccgcaaggcaaccgatgtgcatgaagtcaggaaggtgctgggagagaagggcaagaacatcaacatcatcagcaaaatcgagaaccatgaaggcgtccgcaggtttgatgagatcttggaggccagtgatgggatcatggtggctcgtggtgacctggacattgagattcctgcagagaaggtcttcctggctcagaagatgatgatcgggcgatgcaaccgagctgggaagcctgtcatctgtgccacacagatgctggagagcatgatcaagaagtcacgccccacccgtgctgaaggcagtgatgtggccaatgcagtcctggatggagcagactgcatcatgc

SEQ ID NO: 29831 - DNA, 2284 bp, Mus musculus
gagctttttgttgtctaaatgagtgaccttcgcttcattccacctgctgtcccactgcatgagactgcacctactcatcactgcgctgacattctggcagaagaaatgatctgaaggatcagatcagccttggcctgaggacagtagtctcgaggttaaaggtaagcagaaggcagggacagcagtttggtggtgaacagaaagcaagtgatctaggccagcagccttcctgagggacgtcggcccagaaagctgaacttgtgactttaagacaagctctatgaatgtcaaagaaaagttgacaacaggtatgcttttgccactgtacggggcaatatacaaagagggctgttgacatctgcagaaaaagacctaagatgctgtggctaaaaaaaaatcaggtggcagatctaaccgccaatcaggtggcccaaggagcaatgatcctggcagtcaaggagcctaaagattattatgacatcagagagaccagctttagatacacggctgagcactatcaagttatggacagtatttgacttgacctgggggccaagaaattcaaaggtgtggttaggtcctttgactactatgttacaggactctctgacttggcagaagaaatagtcaaaagcttcaaggactgtgctatgatgaggtagaatttctaaaagaaatcttcccaaggtaatggacctgcctttgttgcccaggtaaatcagggactggccaagatattagagatcggttagaagttacatagtgcatgcaggccccaaagctcaggacaggtagagagaatgaatagaaccattaagggacccttaccaaattgacagcggagactggcgctatgattggatagctctcctaccctttatgctcttcagggatagaaacacccctggacagtttagactgacccccctataaattactctacagggggcccccctccactggtaaaaatagcctctgtacatagtgctgacatgctgctttcccagcctttgttctctaggctcaaggtgctccagtgagtgagacagcaagcaaaaagcagctccagaaggcctgctcaagagaagaagacctgctacattagacatctccacgcagaaaaccttgagactccggtggaaaggcccttatcttgtactcttaaccaccctactttctacctttatgggaccccttttaattataggtccatgtgtgtaaaattggcaagtcacctttattagaacaagaattagtgcagtgcggcttttagttttgagacaacagtaccacgccctaaaggatcaagtatgtcagggaaaagatagtgtctagttctaagattagaactgctaacaagaagaaggggggaatgaaagagtagtaaactcagtgctccaaggtatgctaatcataaaacagatagtgacattcctccacccacccacttcctgagttcaaggagtattcattcaaagaaagtcaccctgaccattaccggaagctgcaatgcaaatgtgctattgttaggggctcttagaaattgtcttgagagttaacaattaccaggtattccttgtgacacctgtgactttgtacttccttgtgactcttatctggtatttttggcattttccaacaacgcccttcccacctccttgagttgtgtttttttcctttaaatacccccttactcagctactcggggcgccacagtcctctacccctgcgtggtgtatgaccgtgggcccgagagcgctcttgaataaaaatcctcttgcaatttgcaaaaaaaaaaaaaaaaagaatgaataaataaataattaaaaaaataatgccacttcctccattaattgatggcatctcacatataatattgactgacatcaatgttggtatggtattgaaaataaaatctcatattgttgcctaacttgacatctttttttaaaaaattaatttaattttagttatacttaattctgtgtcccaaatgctaaaccaagcactgtcatctttctgtttgtgatgcttgactccctctgtgtctttttcccttatagttatgctcctttgtaaagtgttgtacactgccattgaattaccgtccaaggtctttagcatgccatacaggaacatgactcaactttcactgagctcaaacttctacacactcactcactcctcactatctcaaactagctcagggtcctgtgtgtgagtatgtattgctgtgtgcccaccagcacagatctaacatatagatgtctatgcattattgtaa

SEQ ID NO: 29832 - DNA, 2231 bp, Mus musculus
tgggaagaggagagagagaaggctggcattggactataaagaatgaataaataaggcgccacagtcctctacccctgcgtggtgtatgaccgtgggcccgagagcgctcttgaataaaaatcctcttgcaatttgcaacaagaccgttttctcgttggtgattttggggtgtcgcctctcctgagtcagaacgtgggggagtcctcacgttgtgggtctttcatttggtgcgttggccgggaaacgcgaccacccctcacacccgagaaccgacttggaggtatggggatcccctcttgcgtgcgtgtgtgccggccggtgtctctgttttgagtgtctgttttctgaaatgaacattggaacatgtgcttgttgtgttgggttgtttgtgtcttgtcctatgtttctgaagtacggcgaagtctgagtttggatccgtctgagtttattgaatttgtgccttggttttccggttgcgagatcgtgggttcgagtcccacctcgtgctttggttttacacctggcagagtgagaaacaagtgagattctctggttttggttgtctaggtagaagtggacgacggtgtttgtagacgatggggtgatggggttttctgaaatgcgcgcgcctgtatttgcagctgtccttttgggccgtaaggaccggaggactgtggtcggcagacgtgctaagaggaccacaggctgtggccctgggggacgccctgggaggtagggagagtcagggacgcctggctgtctccggagatcggtcagagggaccgagttctgttaaagcggaagcttccccctccaacatcgtctaattcttttgcctgcttgtggaggacaagaaagggtcgactgtgtctggatttgttggtttctgttttatgtatttttgtgtacgtgtttagagctatgtgaaaatctagagaaacaaaggtaattctcataggtgctgtataccctgactagagatagtttacacctgagacgtgagagaatgggttttgagaaaagcagtactctccgactatctggagataatttggtaattaaaaaaataaaataaaataaacaatattaattggtctttggaaccctgcacctgtagttaggaatctagtgtggctagagaagccctgctaggcactgattataaatgctgttcttatagggaccagcagcttctcaaagttctatggtaagggaacagatggctgtttttcctacaaaaattggattcatcaggtgacaaggtgctcctctcttgaaattacagctagaaaaaaaaaaagaattttgtttggtttaaatggacaaatgtacacgaccatttcatttttgttcctaaatagtttcaaaagtataaatatgttttatatgtcttggttatagattagtggctcataagttattggttatgattaaaaatttgtaacattggtaacaaaaagttgacttaaaactggtaactctgggttagagtaatttagaactacaacatgcagcatgagacaacccataggaacaggtctctaaagatacgcctgaattgggtaatattctatgtaattcttatcctagaaacccgatttataatagatatattggcggctacaccttcttgtgtttgtgtgcaggaacagacagccaaactttgtagcaagtaatgtttttggagttcatttttaaagaaaatagattgttttcactgttaaaattgggttttgcttctcaaaattgtggttgtgctctcatgttacaagagaaattgaaggcttctcccgaattggagccaccagctaaatcggctcctctaaaatctataaagcctcctgagtggcctagttcacaaccttccccttaaacacagcctcaaccccagccgccgagggaaccccaaacccctcggggcgttgagaggtggaccgctgtgagtacatggagccacagggacccgcagagcagagactctggtggacccgcccaaactttaaacccttcagtactggtcattttcctctgctggtatttataactggaaaattaaccaccccctttctcaggatccccaatgcctcacagggttggtggagttccttatgttctctcatcagcctacttgggatgactgtcaacagcggttgcagatgctcttaacaaccgaagagtgagaaagaattctgttagaggctagaaaaatagcccgaaagccaacggtggtc

SEQ ID NO: 29833 - DNA, 1165 bp, Mus musculus
agccagcgattgcataaggtgaggaacaagacaccttattaaattcctcagggcagtacagcaagtaaacatagttgatcctgataagccacgtgataggatttactccctccccgcacacactgtttaaaaatgctttatctcaaatgttgtgtatctgaagagagatatatctgcagattatcacaaatgttagtcttagtaaataattagtggggaggtgcagaacttaggattaacctgaagcctccttaagatgtattaggtaattcctcttttagtattaagatgctatttaaataaaacagttattttgatcagcttcttctttctctctaggccccttgattgaatttaaacagtctcctagattgattctgcctcccaacaagaacaaactgaggaagtgatgagccacgtagccggtgacccttagagttttagatgtgcggttcccttcatgtatactttacagaaaaccagctaagccgggcgtggtggcgcacgcctttagtcccagcactctggaggcagaggcaggcggatttctacaaagtgaggccagcctggtctacaaagtgagttccaggacagccccagggctatacagagaaaccctgtctcaaaaaaagaaagaaagaaagaaagagagagagagagagagagagagagagagagagagagagagagagagagagagagagaaaagaaacccagctaaagtagagaaaggtgtttagaaaacttaatgttaacttttttgttttaacttttaattctttaggaatgtttcttaagtagtgatttatattagctactgggattataatgctaagctttagacattttatttggaataaaatgttatatggattcttttgtcatgcatgtgatttttgtgctcattttgcaataaagttaagtattttggttttattttgtttggggtttgtttttgctgaattcctcttctcctagggcacagtgctagtaagttttagtacttgtagtaattagccattcataagaactcagagataatttaagatgccagaaagctttgtggtgaagaccaagttcaattaaatcgccagccagtacctactaaggtccaataatcattcacgtgtgcatgggtggactaagaataagggaactgcagtaa

SEQ ID NO: 29834 - DNA, 1149 bp, Mus musculus
cctagatccgccctatctagactgtctctcaagaatgatcaaatttaaagtcaaagggaaatcactggagttagttctaaagtaaatttcggtgttgcttattttattcatcctttagagatgaagataatatatatgtgtttgcagttctggagaccttggagaagaatcaagtgaggtgcattcagctctaggttgaagatagcaatacctaattgggaaacagtctccctttccctttaatttctgagatggagagtaaaaactgtaatttccctcttttgtcctttacagattctaaaaatggcggccccaggctgatgttgtggtaatctaatcagctcgggtcctccacaccccatgcagtgcgtttgtctgcagtgtattacaagcgtattatgtttacatgaaaaagattgggcttgcccccccctcctccaagccatttacaaaaattcgtcaattttattgcaaattacagtgttgtgttatagttgattaattttattgggttttcctaagaggcaaataaaacaataccacttttgaaaacaataagacatttggccttggaaatttcatggtcggggggcttttaaacattaaacatttattcgatgcagataatagtctgtgttgactttaaatcgcccatttttaactaatatgtcaaagtaaaatgttttgttaagtagcccattttgcatgattgggaatttttaccttcagttaaacatttctcactcaactcctaactaattttgtatattttggttcttgtattctgttttggagtaaaatttagggagctgtacaaacagacctaaacctgttactcactggatataaggattcttttcttcctgttttttgtgttgcctctgttttctcctgtatttaaagctttaatcatttccagttgcttgtatatgtggtaaggtgacactccgtgctttgctgcctcttaaatttgtcttattgcatactatcatcattatgtaagttaaaaaataaggctttggtcttcattccttcccccatgcccagttccttattggattgggggatttgttgtgatagtccttaaataaaagcatttcttaatagggacttgaatctgttttatgccatctttaaaatcttgaagtc

SEQ ID NO: 29835 - DNA, 1639 bp, Mus musculus
ggcagcaccagccagcaatcagttcctggacatcacgttactccagggcattttctgccatctcaaaaccccaccattcaccatcaacctgctgctgctgctgtggtcccgcccccgcccccacccccgcccgctccaggaccacacctcatacagcagccaagctcacatcagcagcactctgtagcacatggagttgggccagttcatgctgttacccctgggtcacacattcattctcaaactgcaggacaccatttaccaccaccccctccaccacctggtcctgccccacatcaccatcccccaccccatcctaccacgggactgcaaagtctacaagcacaacaccagcatgtagtaaactcggcacccccgccccctccccctcccccgccccctcccccagccagtgttctggtttctgggcatcattcagcatcaggtcaagccttacaccacccacctcatcaaggacctccacttttccctgcaagcgctcatccagctgtcccgccgtacccctcacaagccacacatcataccactttgggaccgggaccccaacaccagccttccggaacagggccacattgtccattaccagttgcaggtcctcatctccagccccaaggaccaaacagtattccaacccctactgcttcagggttctgtcctcatcctcatcctggctctgtggccctgccacatggggtgcaaggacctcagcaggcatcgccagtgcctgcacagattccaattcacagagcacaggtgccgccgacatttcaaaacaattaccacggttcagggtggcattaaaatggactccaataacattttttaaaatgttctgtaagataaactgtatatttcatatgtacctgttaaggtactttttaaagcttgtacatgaaactttgtataaaaaaacaaaaacaaaacaaaaaaaaaaaaacaaaagcaaacaccagtgctctttcattgtatctttcccatttttgctttttacacttccttatgaaatgtgctcttaagccagctgtaggtatctttattttgtaagtgaacattccaactgtttttctgaccatagatctgatgatacatgacctttaaatttcattgttgcagttaaattcatttaatgaatattttctgtattattttatacatatgcattaagtatacagttaaagaaagcactaaggatttccttttttttttatggtcagcagttatttgagtgcatcttaggtctgaaaatgcaatacaggtttttatgatttggtgtggacatggctcatattgttttatcagttttttgcaagcaaaatgtaatttaatgtatagataatttttagtgtctcctgacagactgtaaatactgaatttcctttgcgtatataattgctcccgcccttttcatttggaatatagcactgtacatatggcaagtctgctgcaaacgtgtgatctctgtgaaagtagtacagcacatgacctttcctttttatttcaatacgctgtcacattgaagcactggttgggcattttaattcatgttaataaaccacaattatgtcagttttactaaattgttctgtacaacttctgagattgaggtctgcttaatgat

SEQ ID NO: 29836 - DNA, 1143 bp, Mus musculus
tcatatttgagccgtggaaaagatcaagacttttcaactggggaattctgctgaagaaggtactcacagaataatctggaaccatctggtatctatagagtgaaacctttataaacgaataggcttccagcaatcctttctcaaacagctaccttgtaactccactccaagcaccagtgtgtgtattcacagatgtttagaaaggacttcaagcgggttttgggcgagaaccagactcagctgggtgtgatgatcacccctgtaaccccagtactcggagccgagcctggggaatcaagagtccaaggccagcctagatcacacactcacaaagctagacttctcttcctgttcctagagtttagtgagacagcctgcacatgggtgtcgtgatggccatggcattttcttgggtgtgtctcacctctttggcattgtgtgggcctgtgaagtcaggggacatgtactttgggttatgtagacagtcccatgggtgactggttttaatgtcattgtgtagtttgcaggtagtaccaggtcttaaacatacctccaagcagtgtctctctctcctcaccctaagaagtggatcctcagagaaggctggagcaggagggcggggagctcaggtcgtccttagctacactggccaccacaggttaccatggcctgggggatcctgccgaggacaacaaaactctggcgctcttggcttgggagcctgtgtttaccagcttaggttcagttgtgtttatatcctctgttaaagtttgcttgaggagctgggagagttggtaaagtggttgccgtatgccctttaagggctgagctcagtcccagtgcttacagagacaaggcagccgtatcggtacatatgcttgtgatcctggcgctgtggacaccaaacacacacacacacacacacacacacacacacacacacacacacacacacacacacacatacacatacacacatgcacacatgcacacacacacacacacacacacacacacacacacacatacacatacacacatgcacacatgcacacacacacacacacacacacacacacacacacatacacatacacacatgcataccttgagtaggcatagagtccagtccaggttatttca

SEQ ID NO: 29837 - DNA, 1146 bp, Mus musculus
tcctctatccctttgcatctctacatccttgcatccctatgagcgccgcttcctcctctccggcgggcgtggaaagggcacaagaccaagagctgaggaacctgggtccttgagtgtctgtgtgaccttggagaagtgattttcctctcttttcctactccattaggctgcgtgagtttaacgaaggaaagatgcacacagcttaaatggaaagtttgtcacagaaagcctaattttctaaataccatgagataagagcctaaaacagcaatcatgccaaaaagtgattttttttttcttcctcctataatggggaaactaaaccctaaataggtcaaacagttctaccagcctgtatttctattcaggcctggctggtttctctttctgccttcccaggctacctggtttctctttctaccttccaaggctatctaagatgcaaatcacgctgactgacacgtagttaccacttcagtgttctcttgtctctttgaacaattacagtatcttaaagatactggtcctgaacactcagtccttcattggttacaattgtatcgttgagttacaactgtatcactgagtcttactctaaagatgtcccaacaaacaggaaaggccgctccaagtttgaaaagattttactttctccattttttttttcaaaaaatctgaaacatacaagaaaaatgcagtaatcggcactattaacccacattcactaggttttttttaaacgtttctccacagttgctctgtgtgtgtgtgtgtgtgtgtgtgtgtgtgtgtgtatgcatatggtgtattttgctgagtcattcagtagtttgcagactgttaccctccaccccaaaagatttcaatacatatctactaaaagcaaagattttttttttctacataatcagaacgttatcactctaagaaaatccaataaaatatgtttggcgacattttttttccaacccaaggtcatccgttactgttagtgcccatgtgtttttaagtgtgtttagaataatccctgggttgggactttttttttttttttctgatactttccctgagttccaaggcaggccttgaatttacaatgtagccagtctaagtacacctgcgttgcaggcctcttgccttacttag

SEQ ID NO: 29838 - DNA, 1283 bp, Mus musculus
ggctacacagagaaaccctgtcttgaaaaaaccaaaaaaataaaaatattaatatttgaatataataaagtaaagcctctgaagtaagaatgagcaatatttaaaaagaaaatgtttcaaaaaatggaaaatgatatagcagaaggcatctggaccctgtgtagttccttttgagttaccatggggtgcgtgggttacaataggtttaacaatctctccaagatcaggatcaagaaaaaggattaaatcttgtcttctcttaaattcacaggaagcagacttagggaaggagcggagggacacaagggtacaaggtgtcggaccaaaattaggggatcttctaaatcagaataaaacacgttctccactcaagtcagaagaactgtccattcaaagcctacagtgccaacctatgacaagattgcaggatggcctgttaggaagcccacaatgactttcccattcactataagttacccacagatgaaagaatttcacaatgtcacaatgaatttggttgccgacacagagatcctagatctaaggagatttcaggaggcagaggtaggctgctgaacacactccatgtgaacaactattatataacttgagtgtttacaaagtaacttaagctgtagatggagccatatcaggtccaggtgctagagaactttccattaaatctttaattttgagactgttaatgctgaatgcaaaaaaaaaaaaactattagaatttcaagagtcagatctacgcctatttatttatgggttaaaactactgtggatattaggtctagtatttccaattcagttatgattgggcaggcaattaccaaaggtggtctgagtgccttatacttttagccgaggcagacatttcctaaagggctggagacaagcagtacctaacaagaggacctaactccgctggcagctcctcattagttagatctggcagccatgttcggtcttaaatttcccaggacagcccagcttcctgtagaaaccccagaaagagggcagccaatcagcaactgtcctgatgtctggccaagggcttataacaggtatgaaagagtccctataaggtagcaatctctcccttgaggtacaaaccaaccagaaatttacgaatatcctataccataaagctcaaccaatcctggtgaaggtgacccaactacaactggaaaaccaactggttctaaaaggggcctactagcctccctcatggtccctgattgtgcttggatgattgacccctacatgccagctgtatt

SEQ ID NO: 29839 - DNA, 1265 bp, Mus musculus
cccgtgatctttggtcagtcttttggtcactcttctttcttgcccggcagaaggcaaatacagggctctgaagatggacttttctcttcctccttctacttacgccaccatggccattcgagaagtgctcaaaatggacaccagcatcaagaaccagacccagctaaatacgagctggctgcgatgaacagtgcatcgctcagagaggggatgcagacctgcttctgacctcctattctggtctttttttaagtgctgactcatgtttggagtttaaaacttttgtagtaaaggatgatttgtattttgtaaagtttttaatcagcttaaatactttgcaatatttgtacacatatacaagtcctgaggatcctaatttcagctcagagatcgaattgggtcagcatatcctgtaggtgcttagattctagtacagcatcagcttcctgcctttaacacagggaagggggacttggtttaaagttgcggttttaggttttgctgcacacctgaagtacaaaccagaatcttagatgtttgtgatgagattacacatggtccgtgtcagagcaaatgcagcagactggaaactagagactgcacacttaacacgcagttcccgtgttggtttcaataataacaaaacatccacgggtttataaacacggcgtggcttttgttgagtgactgtgttagcttcaggtgagcatttatacacatcttagcttgcagtggcttttctggttagtctatcagcatctttcagggcactcttttccttgataggagcctgtagcttttcttgggtacagtctgattttactctgggtgcctcttactctcagaaccttttcactggactcagaagtaaatagtgtgagttccaggacagccagggctacacagagaaaccctgtctcgaacgcaaaaaaacaaacaaacaaaaggtaaatagtgaccatgaaggaaatctgggaaacttagaatggctcctgcagccgggcgtggtggccacgcctttaattccagcccccgggaggcagaggcaggcggatttctgagttcaaggccatcctggtctacagagtgagtttcaggacagagaaaccctgtctcaaaaaaccaaaaaaaaaaaaagaagaagggctcctacttccatctgcagcgctgaccctcagccagcagctgcttaggggtttccatcatggcagtgcagaaaaccctcctctaaaaagatggatatgcctttcagacagtgtgagaca

SEQ ID NO: 29840 - DNA, 1126 bp, Mus musculus
tctgcttaccaaacatggatatcctcactcaaatacagaaaacatggcatttttaaggagttagccgctcacctgagtccatctctcattatttatacttcagtcaatgtaaacatactgtctgtcacttggtgtttatgtcccctaatgttctccatagccaggagactttccatttatttataaccctaagaaaagttagatattttttgtttttgtttttgtttttcatcacatcagtacataagatgtctgtgtctctgctgcatgtctcaagttctcctgtcagtggtctgttatttcaaagtagatgtgctgcagggaacccataggatgatgtcataggagacttgaaccccctagggcttggtcagtgtcccctaatggatttaagagatggtactgtgtagaagactccattgttggtcagtgtcccctaatggatttaagagatggtactgtgtagaagactccgttgttggtcagtgtcccctaatggatttaagagatggtactgtgtagaagactccgttgttggtcagtgtcccctaacgaatttaagagatggtactgtgtagaagactccgttgttggtcagtgtcccctaatggatttaagagatggtactgtgtagaagactccgttgttggtcagtgtcccctaatggatttaagagatggtactgtgtagaagactccgttgttggtcagtgtcccctaatggatttaagagatggtactgtgtagaagactccgttgttggtcagtgtcccctaatggatttaagagatggtactgtgtagaagactccgttgtttgcagtgatgcttctggtgaggtgaaaggactgaagagaaagaaagccagcttgactccctggaaacggtcaactggaagtgagaagctttgagtggctggaagggaaaggtggagatctgaggctacttctctattggtgccaaaacaaaacagacagacagacagatagacaaaaaaaaaaaaaccaagggaagctaggcatggtgtcacgtgcctgtcgtggggggctaaggcaggaggatgtacaatgtctaggtcacagtgtcttagccttcgtgtcagacaagcctgcaaagggctcactgcaa

SEQ ID NO: 29841 - DNA, 1211 bp, Mus musculus
gtgggctcttgtaaacaagttccctgtgttgtagttttctttccgttagaggttagggttctgttgagccccttcgagagtgaagggcagcatgagccaccttctaaggtaaggagttatttttcccttcctcattcaggctcaggagacacatctgacgctgcttctggttttgaaatcagagaaaatgtttcactttcttaaaggaagagtactgctattacctgcagtactatttgcttctaaacattaagagtttttgcttctggggtggaaatagtgggaaagatggcccagagggaataaaatggactcccagctgtcagcagtatgaagattagagctctgtgcaggaataaatgctagtcagaggcaggccttccatcaccagatgcagctaggagccaccaggaaggtcctttctgaaggaagctgtggctgctgcttgtaacagtgctggttcttttttcttttgagcagatgagtgctgtgtccaggatgatcatgaattcaaggtatgtgttagatggcaagtttggctttccaggcataattccaggaacagttcttggccaaggatgagaactctaacctgactggatacgctgctgtgatgggttaaaggatttacctgaggccaatagaacaggcaggaatttaatgcagtcaccccatgtctttttaaagtagatgaggggttggagaatggagtgagagggcttagcagtgccaagcccgttacctttgattctgggacctggtggagagagccagctctctagagttattcttgcaccttcatgtgtgtgctagcacacgtgtgtgcacactcaaaataataaatgtaataaatgggagcgttggtgaatgtttaatacttagagggtgatatggctttgcatttcaagttgtgttcaaacatttctgagtagatccacccaatgtactgggtagtacattaagtgttctatttatactaaaagatggttaatgtcaacatagtccacacatgggtgtgttgctttatttattaagtaatggttgcagatgtacttacctctggtgttccttctgcagctctggagcttgagatgaactggtccgacttctagaagagaaggtaggcatctgtgtgtagagtcaaggttttaggttacctgttccccttcatatcgggaacgggtgaattctgaggcattctcattgtatat

SEQ ID NO: 29842 - DNA, 1211 bp, Mus musculus; identical to SEQ ID NO: 29841

SEQ ID NO: 29843 - DNA, 1211 bp, Mus musculus; identical to SEQ ID NO: 29841

SEQ ID NO: 29844 - DNA, 1169 bp, Mus musculus
tcttaatcctccactgttgccttatatccctcctgcaacgccctctgaagacactcaggaaactgttgaaggctccatgccttctacccctcaacaagctacctctgaataattatttaagactcctccaaacttgaccacaatggaaataacaccttggctttccatgttaatgttcaactcacttgatcttggttggcccttagactggcatccctaccaagcttaccaagagcttagacaggcagtttgagaggatggtattcatgccccttgggccaagtctattctcctgaaccttcctgctgcccttaatataccacaggactggcatgacatctgttgaccctccttgcctaccctcctgttcctttagtgggaggctttttatagaaatgaatgcctgcaacagatcaggaaaaatcaaaaccaaacccaacaaaatatcccttggggctttaatgagcttttgggccaagatgacttctccacacaacaacaggctacccaacctctggagtgctttggtcaagtacaccttgtgcacttcggatctgggatcacatagtccctgactctgcatcccaagactgggcttccttgcttctctgcctctggcagatacctgaaaaagccctctctgactttgttcttagaacaaacctgagcctggaaatcaaaattcctgactctatgggtagagaagtcctccttaaaagcatagtttggggaggcgtgaatttggaacactggctggtgtgtcagagctggaagatgaacattataagaaatgatagttgccactgaagacattgggaccctataaagccgcctcccttgccaaggccttcacagaggctcttaaaacaaaaactgttttaaaggtagaaaggaatacttgaaaggtgaatgtcccaactctgcaccatctaacggagtggaagctgcacaccccaaaagcctttgtcctcgacacctgaaaggattccattggaaaaagcactgccgttctaaatgtgataaggatggcaagcctgttttgcctttaaactccaaaaggggcaacctgcagcccaaacaatgtgacagaaaacccacaaaatgtgagtcattaatatttctgaagactcacacccctaactcaatataaaagttggaagagaactatt

SEQ ID NO: 29845 - DNA, 2308 bp, Mus musculus
tagtatcttaataaaacttcaaaatttcgggggcagacctagtaaatcagagctgaccttgttaaactagggatgctagtatccatctgtctttgtgaagacagtttcagagtgctaactgctggtctaatgtagggtcctcagtggtctcacagccctcaagcatgggcattagattctaggtcgtcacaattgtcataggttttgataaccaagtagcttttttaataacattgacatgtgacttcttagagactctcatttcaaatccccacttctcatttgtttctgtaataaaaatgcagcaccttttgcctctcttgttggcaataaatgagcccagcgctgcagacacttcgggtttaagcaggaaagccctctttgctcttgagctgttagatgagacacagaggaacagttgcacacacgtccatcctcttacaaattctgtaacagcttgcacagtgcaatgagtctcaagtttgctccaaatgatttacatcaattgatttcctggggtgtggtgttacatgaacagtaaagttcttttatactacttttgatactatttcaagtaaggattgtgtacatcaggggctttcataccagctgccaaggccggatgctgtcacctgtggcaacagctgttctagtcactttcctactcatctttcaaaggtgagaagttgtgtggctttgtaggcttgtttctattaagatgctagtgtagtcatctcatggatccagaggaatagcttttaccaagaggattccacacagaactggggtctggcaccccatagttagctctagataggggctttggattgactcaacccttgcacgcctctgacactgggcctggcatgaacctcggcaatccaagtgaagagagaagcagaggatccagctgcccgggtgctgctacccttccacttcctggagcctcgagaaagccccttggcatggctgggacacggcctgacccctttaagcccatctctgtagcacagaacagcaggaattccagaatgactggcttgttttgaaaaggtagtgtttcattgccctttcgattgtaaagcagcaactctgcaaatagcactctgctgttaaaaaaaaaaaaaaaaaaaaagttgaattaaagggaaatctgtctttaaatcaaaatagatttttaaaaatcccggtttaaagggattgtgcctattttgaagtatcatagttaaaatgttgaatggtaaattatggaggaaaatatatacactctaaaacatgattttaagcaaagagttagagtaagacagctcaatgtttacacccgtgggcacatgagacctcagtaaaggagagcacgctgaggaagcctgtgctaagtattgtaactgacagacaatgcgaaaacgcacaatgttggcactaaggcactgtagatagaaattaatgtacaatagtgtcttcccaacccgagtgaaaggctaaaaccccagtcctttagtgagcacgagtttacacttgcacatttgctgctgagtggtagaacattgggaaatggagatgtgtgctttttaatactgctcgtcttcacagagagcactcgtgggctgccttctgtactttgtaacttgcacatatccaaaaagactgagcgtgaacaatttgaagatgttttgtatttttgcagaagcgtgctagtggacatgggcctcagttgtgttttttgggccccaagttgtctgtcttgttggaactggccatctgcctctggcctttccttctgatcatgtgatgctaaactcttctcacaaatacacgtgtcattgtatgcctagtgtttacattcctaagaataaatcttggatatcattatgtgctctttacatttttaaggtttgaaataaactggagttgagttctttgaagttttgtacatttgtataaatgttctccatatgcagtactttatacatcaagtgtttcctcttgttttgttgaaataaaaactaaaagaaaaaaagtgttcttctagatcattctattcactaaaaactgctataaaatctgtgagcttgctattggggcagaagaaagcttgtgtggacatagccacaggaagctgctggggttggcccgccgttaccctcactcctgactttatgtctcaggatgaggaactggaaccgagcatccccactggtgtccatccgaagctgagccccagggccctggcgtggtggctgacttataccagaagcatgagcaaagtggccttcggtgtgggggcatggagacagggaacacattgggt

SEQ ID NO: 29846 - DNA, 2272 bp, Mus musculus
ttgtttaggagatacagaattaacaggtcaagaagaactgatggacataactgaagttgacgagggattttattccagggctgcgtctagcaccagccagtcgggtctatcaaacagtagtcacaattgtagtaacaagacaagtgtaggaaagaaccagagacggtcgggaggaagcaaagctggagcgaaggagagagaaactgcaggggagtcttgcagagatcactttgctcgcaagcaaacccagagagcccagagcgagaaccttgagcttctctctctgaagagactgaccttaacctccagccagtccctgcccaagcccagcagccaaggcctggctaagactgcggccactgtatttagtaaatcctttgaacaagtcagtggtgccccagtcccacgtagcccttctcccgccattggctgtgttgctggagcagatgccaatagattttctgcctgtagtctccaagaagaaaagcttatttatgtgtcagaaaggactgaacttgcagtgaagtgtcaagccggccagcagggacctcctagtattagcgtcactctgtctgcagagtaactgtcacttcgctcctggagccagtgaagctggaaagacggctctgctcccttatgaaagcactgagtcttcatgcctggtcctggcaggagcctggggtcttgaattctgaaggcccccctttgactatgaagggaataatgtctagtttgcagtaagctgagatgtggtcgtgttatttcttgggaactcttttcccctgggtttaagttctttattcttgtattctcctttcctgttacttgttactgttaacgtcctcagtgaggttatttttaataccttgttttttagtggttgtgtatttgccctgggaagtcaaagagagtctgtgagaggactgggctgtagagcccagggggaggagcgagtccatgaagccatgctgctccacaggcatgtgagaaaacagcctcacgtgagagcagtggggatgctacgagctgtgaccacatcatgcttaggatgggacagtgtgctccacaccgcaagttgcctggcaggacagttgcaaggggaagctgggagaatttctgttgcagtccttagaacattaaatagcaaaagtgagattgctggtaggtgaccttctgaagtgtgtgatctggactgcaggcatgaaagtccctttcggtgtctaaagtgtaaccagccacaaagctgttgggctgtgctgctctggaaatcctagttagtttgtatcttagtggtcagagcacacatcatagaagacgtcctgaaaacccctgtaaatcttgtagcacagctaccgagataccagaatgaagcatttatttaatagtaaatgtctgtgaatgaaggaaaccaggtcatgtttcatccacaaaatgtggtgaaagaaaacagtaggtgtgggcagaggacatttgtgcattagcttgtgtttgttcttgaatttaacataagaaagagtgcacttcttgtttgtgagctttaagtattcttgttatgttgtagaaagaattcagctatcacccattcctgccaaccaagcagtaagaaatgtggtaaggcagaagctaaactctgcgtcctctagatggacgcccaggcttggtgcctgtggtctgctcagttggctgacgctcctgtgaggtgcacgtgctgtggtgctacactggggcatgagaggagcagggtcagtggggaggcctgggactctgtctacttctcagctttcctgacttagcacactgaggcctccttaccggtggcctctcgctgtgctcacagaacatgctagtggtcctgtctcaaaccacgtgggtccagctcatggagatgagaaagctgcatgggttgcagagtgcaaagcatttttacacttgagatacattttttaaatgcttacctcctagtttaaacctgattatccaaggcctatgctttttagcataaatgagcttaacattttattttagtttcagtaacagaacgaactgctggcttaaattgtcctcatcaattttaaggtaactagatagtaaaattgataattggaataatctaatagtaatcttttatacagttgaaatgtttgtaaaatgtcactgtgaatttcctgttgtctttttgtaattccttaagaacttttcttaaacatagttactaacagtgttgatattattaagaagaaatttaaagattgtcactaggcaagttgaagtg

SEQ ID NO: 29847 - DNA, 1104 bp, Mus musculus
tatctaacagtttgtgtgactccgcctgagtatcagttctgactgacattctgaatacttacggattgtgttctttaagatggaaaggagaggtgaggtccttctgtagacacatggcatgtttgattgacttagagactataacttgttagtacagaacagtcactacactgtctgtgcctcagccatcccgagaacagtgggactttaatgtcgttggacattttctatgtggtctgctatgcttttgttttgaaaatgcaacagtacacatgttacctactgatgctaatggtaactgataatggagttttaactgtctttaaattcctttaattctggtctttaaaaattgtcttagagggaagaaaggggagggagagatgttgtaattataacctcaaaaaattaaacctggataaattgtcctaataactaaattttatttttaaaatgttgcatgcaaaaggtgacttttaagatatttccttttacttttgtaggaaatagttgacaaacacggacatagtaaagtattgagttttacaattccatctttatccaaaccatctgtatatcatgaagtaagtagttttttatcaaagtacatttgttgggtcctaagctccaatagtcccctaagttagggtgtagttacctgtgcacagaagtgaattgttagtacctcaaaaggtattgatcatcaccacatggagtgtttactctttcaaaagagaagtcaaaaatcactaaagaactgaactaagatctgacagtgagagccttatcaaaagcactttttatctttgtataatgagtaaggcttgtcttaatttgtgtctgcatgtggggtgagtggataattgtgtactctgtgattgaattttggaaatttaaattttgattttcatttgtagtttagttttaacttgttattaaatcttggggtggaaatgtgacaggcagtctgaatatccctaagctaaatggtacacctagtaggcactctccatgctttgtgcattcttagtatcaccttcaacaaaacagcatctcttctctagccttccagcattgggtctatggcgctgacggagagtgcgc

SEQ ID NO: 29848 - DNA, 1719 bp, Mus musculus
tggctttgaaagccctgtttttatagtgctgcagatcaggctgggctcacccaggccaggcggattctacctgacccatactcctccctaactatggcttctgagattgacttgaatacgtttatatatatatatagctttcagtaatttgagggattttaaagtttaacttttctaaacacccagctaaataaaggatagccaaaaaagtcaataagcaagggactcttttgtactgtaattacgagtggaactaaacagtacagtgtactgaataaagtaattttctcattctactccactttctgtccctttaaatagggatgtgaacagtggtttctggagatcaaacccaggtacagtgtctcctgcatgacaggaactccgtctcccaactctgacttgtgcctgcatgtgtgtctgtgcaccacgtacatgcctggttcctttagaggtcagattccctgcagctgaggttacagttgtgaggcaccatataaaggtgctaggaactgaactctcgtcctctgaagcagcagtcctcctaacctctgaactatctacctctccagtcccaagccctcaccttttacatgggagaaaatcaaacgtggaaggagccgctgagtgggtggagcagtggctgcagagatatgcagatgtgaggacccaagctgatgcccagcacttaggcatgggagtgcgtgaatctgtctccccagcactcaagaggcagagacaggtagatgcccagaacttgctgaccagccatttccagaaaccctgtcaaaaggatggagaaatgataggggaagacacctaacaccaacctttggccatcacacacacctgcgcacaaacacacatgcgtatagtagaccaaaaaactcaagcaaatggcttacctattgaaggatgggcactccaggtgttcatgaacagtgcggagcattctttccctcgggatccatattctgacccttttaaagtgtgattcccatctaacatcagaggcgttgctcttctatggagtccagcaaatgcagatcaactacacaatgacaggcggaccaatacatgcgtgtcattaacaaagaatcttccatcacgtgtcctttcacgtgcttgctttagcagagcatcctctctcctgtgtctgcttcagcgaaacatgccgtcacgagtctgccttagcctttcacacctgtgtccactttaacaaaaacgttccttcatgtttgccccagcaaaacatcatccaaacaattttccaaagaacccttaaatttccacttcattatttaatctggagtccaccctgagaagtgggtatggtacggtatgcatccactttccacaatgaacatccaataaacaatatagataaacatggactgtctgttatctaccaccaccatggggagcatgcaggtctttgctacagagccgctgcagctaaatctcaggtagaaggcctctgtacttccagcctcctccactgagctaaggacaatcacccctgagacaagctggcacttcccttcctccccaggctctcacctagatgctgtccccagcccgtgcacacacacacacacacactcctccgttctcagctcttctgtgactcccaagagtccaagaaccccactgccccagccttgtcacagtcctggggaccgccgagccagctccagctttcccacatctcagactctg

SEQ ID NO: 29849 - DNA, 1208 bp, Mus musculus
tcccctcaggtccccactctgcccacctaagcctctctgacctccagtctccgccccttcctcctcccccacgtttctgacctccggtctccgccccttcctcctcccccacgtttgagtgccttctcaagctctgtggtctttgcaggtttcccagttcgtggcgtttgaggagcttcctgcaggagccccagagctcccccaagatggccccactcgacgcctctccctgcccggccagctgggggcccttacctcccagcccctgcacagacatggctcagatccaggcagttagtgatgctgcccactgtggacatgtggctcaccctgggttcagggcattacctgaccgctctccttggagaccctggtttggaggggagacctgtgcagaagcacctccatccccacccttgggaccagcatctcctcctgcaataccctgggccccactgggaggggcaggacagagctgggcagtggatgggggtctgtggtccccccactgccctgggggcattagctggtctaactgcccggaggcaccggccctgggccttaggcacctcaaggacttttctgctatttactgctcttattgttaaggataataattaaggatcatatgaataattaatgaagatgctgatgactatgaataataaataattatcctgaggagactccagggtgctggttagcttcagccatcacctgctgtatctcatgtttatgttctaaacgtacttaagtggcagtgccagagcctctgtacagggatcctggcctctctatgtccaggcctacaggggtgaccagatatccttccccttttctgtgtgtgtgtttgtgtgtgtgtgcgcgcacacatgtgcgggcacatgccttctcatatacccatgtacccatgtacataaaagatggagagtgtttcctggagccagacaatatggtcctggatttgggacaaccaagccatgtgggctactttgagtctgataggctacttgtaccctgagtgcaacccttcacaatcatgctgatttacttcctgggcactggtcctaagtcagccctacatggtaaaaccacacacttgtccctctcaaatagttcacaagtccggcatcacacccacctgggttctctttggtcagagttcagcttccctacccctcattggctttaggttgaccttgtatagt

SEQ ID NO: 29850 - DNA, 1122 bp, Mus musculus
aggggcctgactttcttcctgaccccactcctctctggctccaggtgccttctctggggtgtccaatattttcagcttctggggggacagtcgggggcgccagtaccaggagttgcctcgatgccctgcccctgcccccagcctcctcaacatccccttgtctagccctggtcggcgatcccggggtgatgtggagagcaggctggacgcactccagagacagctgaacaggtaaagatgggtgcccagggaatgggcacggggtaggctgcactgtgggggaacttggggcctctttgggtttctgctgatgtttcaggggtgctctgtctaggactgtctgtgccaggcaggtggaccctctccttcctcagctgcatgaggagggagcctagagtgaaccagctatctccacttctgagaaatcttccttccttgccccaggctggaaacccggctaagtgcagacatggccactgtcctacagctgctacagaggcaaatgaccctggtccctcctgcctacagtgctgtgaccacccctgggcccggccccacttccgcatcccctttgttgcctgtcggccctgtccccactctcaccctggactcgctttctcaggtacattctagagcccactcccagcctccagccgcaccctctctgccccaacgactgcacagctgctgggtgtgaaatgtggcttcctcacccccatcctcttctacctgctcctgccaggcaacctaagggccagatgtaaacatgatgtctgagcctgggccttgggtctggatgctgcctgagagtggtccctgctgtggttatccccctctgactttgccgcctctcatcttggctcttactctagcagtgctatagcctcctgaaggctgctggcatgtccagggtgccaagatcaaggctctgagataggacctccctgatccacatctcttctctttgagtaacctcctgaaggacagctgtagctgggtcttttctgccagctctagctttgataggtgcttgaagggggtgggggtgggggctcctatggcacccagaggtggcttgggatctactcccacccccagctctgctccctgtcccatatgctg

SEQ ID NO: 29851 - DNA, 1203 bp, Mus musculus
ctgagtgtgcccagcggattctcagtgacagccccagacaagcggggctgggtcatcaacccccttggagaaaagacccccttccctgtgtggatgatggtggccagcctgctgcctgctgttctggtgttcatcctcatcttcatggagacacagatcaccacgtgagccatcctagctaagggagtagggtgctcccagatgcaggaatgtgggacctactgccattgggccctgaatgccaggctaactagtttcttttccaggtaacagaaacgtcactgatgttagctggggttggacagggcacaggcattgtaggctcctagcagggcttgctaggagaaatccaaaggttcaggctgaggataaaagttctgttacggaggtccagtcccggggggatggacagaatccaccagagccagctgggccatgctggaatgctaggatctcccatgctgcgagtagcctaggtttcacaatgcctccctcctcccaggctgatcatctccaagaaagagaggatgctgcagaagggctctggcttccatctcgacctgttgctcattgtagccatgggtggcatctgtgccctctttggcctgccttggttggccgctgccactgtccgctctgtcacccatgccaatgcactcactgtcatgagcaaggctgtggcacctggggacaaacccaagattcaggaagtcaaggaacagcgtgtgacagggctgctggtggccctgcttgtgggtatgccgcccatactctgaacctcaccttccatgggggggtccccaggtttactatggaggggaccaactgtttttccccttttcccaggcctctccatggtcattggggacctcctgcggcagatccccctggctgtgctctttggcattttcttgtacatgggagtcacctccctcaatgggatccagttctacgagcggctgcacctgctgctcatgccgcccaaacaccacccagatgtcacctatgtcaaaaaggttagttcctgcacttgagggcagccttggccagcctgtacagaggaggtctggaaattctcatagtacctcatctcccaggggaggggaaggacactcgtcctcttggctggctggaatgtatgtctaggctcacctcatctctgcctgcaggttcggaccatgcggatgcacctgttcactgcct

SEQ ID NO: 29852 - DNA, 1118 bp, Mus musculus
ccgctgcaaatacaggtgggctaggggaggggcagcccaggagcagagcaggagagccagagccaatggttcctaacagaagatactttcctctaccactgtgctttccttttagtcacaaggacatggtcgctgaggggctgcgccagctattaggggaagaaaactaccgtcagaatctgactgtacctccgggctactgcacaggtgaggtgtggatgggaacgggtggtcaacagtttaaagcttaaggctaaggcttatctgtcctgcagactttctactctgtgtgagtagttctggtgctgtgctgcctatgaggacacaagaccccttcctgccctacccaccacggtcctgccaacaggaccaggcaaactttaactccacaacccaagaccctgcccaaaggtagggaaaatgaaacagggttgggagccttggttgctggtctaacagcagcctgagccaagccccctgctctccagggtggtgctgatgctgagagaacgctggcatttctgccgagacggcagggtgctgctgggctcgcgggccttgagggagcggcacctgggcctaatgggctaccaactcctaccggtaagaaattgtcccactcagtgggtgcatgtgttcctgtagccaactcactgtaacctgccttctctccacagctgccatttgaagagctggagtctcaaagaggcctgccccagctcaagagctacctgaggcaaaagcttcaggccttaggtcttcgctggggacctgagggtgggtgaggaggtacacacagggctcaggatggatcccctatggggaggagggcagacaatttgcactttggcttcctgttattattattatttttttcattaaaacccctttccttcctgatgctaagtcttgtttctgggataactgggctgggccaccgcatctttccattcatgacccccaccaccaaagacacaagaccaagcctaggttggggttgaagcactttactgcaggatagggagaagggggctttaaattattcacttaaataaaaatgaggaggggcaggaggagaggacccccagccctcaccccttagtccctctgctgtgcct

SEQ ID NO: 29853 - DNA, 1158 bp, Mus musculus
tgttacttggtgaggagggtattggaaggtgtgggtgtttcgggaagaatagaggaagagagagcagtagaggacccaagccattgataaaactcatgttcccattcacctccccaagcacatttgctgattgctctctgtatccatggtggatgtccaagtcaagcagcatctttctaactgccgggtactaggttcttcctaatacagtgctctagggagccacagacgtatagtctgttatactcggcacaaggtgacttttgtataaggctttccccacacactgttgatacatcatgctcacatgataccaaatcactccactgaaacaagtattttcccattcaagaaacgatgacaaggaatttggggactcattcactccacttggcaagatggcacaccccagctctcttaccaggatggtcttcatccctctctcaggctttccatcagatggaccactcctgtgtgccctcgagcaggagcgcaggtcccgtctccctccaaagccaccctccccacatcggcctgccatctatggtggtcaaaggttggaagtggccctgagctgcccccgtttcctgcagtaccctcgtcagcatctgatcagaagcctggcaggtgccaagggttaaaggcagaagggaggcaagggatgagatgaagccactgggatgaaccacctgggctagagtgcaatctagcccacaggagtcttccttgaagacactgtatgacaggctgttcttcacagaggcaaggccagaagaactgactcctcacgtaatggtgcttctggcccaacacctggcccggcaccgcttgcgggaaccccaacttctggaagccattgctcatttcctggtggttcaggaagcccagctcaacagcaaggtgggctggccccccacccttccacgtttctctgagttgtccttagcaacttggtcaggcccagcccctatccagcttgtttggcttctcctggagcaagcattccagctaggctgtgttccttaccccaggacatctgtctcttgctcactggttttccaactcccataatcagtagagtagtatgtctaaggccttgaaactttccaacgctcctgcatagctgcttagttctgctctagtcctgtgagccatacc

SEQ ID NO: 29854 - DNA, 1205 bp, Mus musculus
gcacacacacacatacaaaatgtcatttattctcctttatattaattctattcctttggttcgttactccaggatttgttcaggtttaaaataagttagtattttaagttagtatcttagtatagatttttcttagtcgtttgtttctgcgttcggggagtgagcccctccaccctgcactgttctcatcggcgctttggcccattgtgctctagcagggctgacagggctagcccctgatgtgtctgaggccctgttcctgaccatggtggtgtctggtgggtgctttgtttgacagtattgctttctctttccccagctcccctccttgggtaccactcacagcccctacctcttgcttttgaaactgatatagctgtgacatttgtacctaaaccaagatggagggtgaggggaatctagacccctaagtcttcctgctgtgctcctgccaggtcaggcctcaaaggcatcgtgtttctgggacaccaagtatcactcttgtttggagggtatttcctattagagtctaactaccctacaatccttgttctgaggaaacttgcaaagatttgtctgctttccactctaaaaacgctgctgcttggctcttgtctcaagattactcttgactttctacgttggaataagtagtcaaagcctgtaaggagggctggagagatggctcagcggttaagaccatcgactgctcttccaggggtcctgagttcaattcctagcaaccacatggtggctcacaaccatctctaatgggatctagggccctcttctagtgtgtctgatgacagttacagtgtaattacatataaataaaaaaaatctaaaaaaaaaaaaagcctgtacggagtggaattaagaaccatgttttagagctgctgaggtcacttgttgcacaggcctgcagggttctgctcctcagaaccgacagtggaagccaactccttagagttgctctctgacatgcccaaaatacacctgcacatttatgaatgcacgtgtgcatgcacgcacacaaacacacacgtacacaaataagtgttactcagatggctcaaccaagcctgacaacccaagtttaatctctgggatccacatgataaaagcaacggttacaagttgccctctgacctccacttgtggcctatgactagaatgtgcatgtgtgcatgcatgtacacaaaata

SEQ ID NO: 29855 - DNA, 1223 bp, Mus musculus
cgggggaccaggcccggctggatgctgcgccaggctcgctgaatggagaagaagggagctcggcccacgccggccggccaaagcgaagaggcccagaggggcgggggcactcaagcccgctggcccagctgctcctggggggagctttcctgcccctcccctcctctgctccttcctgcatggacttctgccgttcctgctcctgctccggaagccgccgccaccgcgcttgccttgccccctctttttggcccctcccccctgtttcctaggatccgcatttgggtggactctgccccaggagcttggcagggtgcaggccctcttctggcctctctcctctctctctccatccactgtgcccctcgggccacaccgacatgctcggtgccgtgtggtgtctgtgccgcaaagagcacctgcccgctcacttccggactttgctctccctggttgtcgtgccctgtgctcctggccagccctcagccccaccgggccacctctcctcacccctcccttcacttaacaaactccaggccctgggctgcacactcattgcgccctccgtattttgtgtccttgctctttgtgaggggcgggcctggctcagtgacctgtgctgctctgtatggtgccgtgtgtaagaataaacccattggaatactcgtgtcttggttccttcccgacccgccgtccaggccaaacccagagttaggactgcccaggagagggaggaaaacgggagggtggagaacgacaggcgggcaggactcgccagagaggccccagacctctaacgtgtttgttcttttctctttcagtctcgaaaaggtgctgacctggacagggagaagaaagctgcggagtgcagagtggacagcatcgggagtggccgggccatccccatcaagcaggttagcccaggacaggagccttcttcccggggccaggatcctaggcctactgtttaccaagggactggtgatcctcctggtctgaagcgtgaggcccaagaacctggtccccagacagctgccttccctcttccttaccactggagagcagcagagagccacctgcggccttcagttggcttccggacctgatggttcgctggtgcaacctggagagggagcctcctggactctgagctaaggaaaagacttgggggtgggggtgggggcggtaacgtaggggctgggtatggtggaacgtgtctgcag

SEQ ID NO: 29856 - DNA, 1219 bp, Mus musculus
tgaatgtagatctatgtatggtacttaacacacaacccagggatgggcaaatgacattctactgatgatatactccaagtccaccaaagagaaccaaggactggtcagaaactattcaacaaactgttgtctgggactgtgccaagggctgattgctccccagtaccctggtgtgggtggtagcttgtgataggagcttcttggaagcctgggactcctcagccacgtgggtactctccacaaaccctttctttaccacctaagacatctcttctaatggctttgagcctaagtgtttggttccagagcttttgtttgctcttcctcttgtcttcctagctgaactccacccctctgggcaccgtggagacttgagcataatccaaacttggagatttgtttggcttcagagatctgctttctgggactaagtgccttccctggcacttgtcccccagttagcagagaagaagaaggcctagacagtggagggcagtcagtgctggagacaagttgctgaggagaaccaatctaaagcatcttttgtcatctgtgcacccttaggattacatgcaaaacatccacggcaaagagatcgacctcctacggactacggtgaaagtgccagggaagcgtctgccccgagccacacccactacagccccaggcaccagtccccgtgccaacgggttggcaatggagcggagtaacacacagctgggtggggccacaggtgaggtggcagctgtggtggagagagagggaagttttggagatttggggagtggctgtgcgtgggcctagcaggacaggctgcttctgagcctgggcatcagggcttcgtacgtgctcaccagccaaagtcgacttgagaatcctctccaccgggagtcatggctaagatgcagatcagagcagtttgttgaggtagccttgcctatcaggtggggctagggcatggggacagctagtgatcctccatgcatttttagctaaggtaggccaacaactcagctcaccacaggagaggggcagagtcacctggcatcatcaggaaaccatctcaggtctgtggtacatgcaagatctctgtacagaaagtgctggctctaaacccagtggttcaggagggcacaccatggagaatggagagtcaggaaccgtaggttgacagttgtgtctgggcaacttgtctatggctatattcttttattatgtc

SEQ ID NO: 29857 - DNA, 1159 bp, Mus musculus
agcagggggtggggtgggggcgagggacggggtgggtatgccatggacactgagtaaacagggatgtgcctaaggatactgagtcctgtggactgggcaggaagacccaaaagtaaaaacgttttcattgtaggtactggtgggatttgaaccctgagccttgtacacactagcgttgctgatctgtgtccccaccctctaagagtgctccttgtttgaggcgaagtaccttatgtgattggtcattctaagtgggctggagatgtgaggaaaggtgcaagagggttctggctgcatcatttgatctgtgccagtatagcagatgtctcagaaccaggtaccagggccacagcagcactgtgcaaattagtctccagtttcatgaggaaacaacagttctggcgctgtgaaagcacactgtaattaatatgtctatatactatatgtcaggggtctgggatcgtaccgtatgtgagctgagaatggggagctctggaggtgtaccccaggaaagcaggccaagggaaaggcagtccacctgggaggtaatacacacaagcccggcctgcgtggcaaaaagaataactcccatattgtcctcagtgctgagctgcagagctcctccagagttctgtgcagggagcctatgtggccaacctcagccctacgtggaaacctcaggtgtcttgtactggtaccataggagggagtaaggtggccaaaaaagcagacctttcctcaaagatggatagtgagaggaaaactgggatatctcccaaaaatgggaggcacaagatgcctctggctgtcccatcccatcctgggcccacctaggatgccaccgttggcgtgcgggagggggccccagcagcttgctcctgtaattacagcacccacacatagaaacacatggatgatgcttcgcaagcacgagttcctgctgccgcacgctgacaccgaccctcatgcacactcacatgtctctcgctcaccgggcgatgttaacatctcattatctttgttactgtaattacattatccgctgctttatgcagaattatcctcggaggactaattgatggctccatgtttaattcattaatcattagcatcaaattcgacaattacagtgcacactgattgtgggattgcaggcgta

SEQ ID NO: 29858 - DNA, 1220 bp, Mus musculus
gaggatgagtgttgtcaaagcagggtctggatggagttatggcagtggggtgggtgccactgggtatgttcctagcaaagagccctgactgccacttcccttcccagaggcagaggagtcctttgagtttgtagtggtgtccctcactggtcagacctggcattttgaggcctcaacagcagaagagcgggaactatgggtgcagagcgtgcaggcccaaatcctcgccagcctacaaggatgtcgcagcgccaaggacaaggttggcaggggtggtagagcctgcttggagagcctggctaggggagagccagtggaggggcttgagactgatcgactcctgttatctctcggtctcatgcagactcggctggggaaccagaacacagccctggcggtgcaggctgtccgcacggtccgcggcaacagcctctgtattgactgtgaagcccccagtgagtacgaggccagcagagctaggagctgggtgtctagggttcaagtggcaatgggaggtgggcagtatgcagaggggtgccacctgctctatttttctccttctgcccacctagatccagactgggccagcctgaatctgggtgccctgatgtgtatcgagtgctcagggatccaccgacacctgggagctcacctgtcccgagtccgctccttggaccttgacgactggccacctgaactgctggccgtcatgactgcaatgggcaacgccttggctaacagtgtctgggagggggctctggatggttactctaagccaggccccgaagcctgcaggtaagccagtactgcccaggaaggagacagccggccccatcgtgggggtagacagaacctgtggcaatagcagcactaaaagggttaaaaggctgttgctctgcttggcagtcggaccctgggggaatccctcctctgctggtgcctgtcactcaggcacctcacaacaacagggccttttctgagctgttatcgcaggtcaggggccagcaggagacgcatgcgtggaccccgtatcactgcgccgctcctgcgtccaagcccacacacggagatggggagaatgggtggtagatagggcagccgtggccctcgcaggccgtcacttgctttgttccagtgccaccaatcagcttgataagctgccactcaggccgctcggactcctgctctctatgccctcatccctgctggccccaggggtc

SEQ ID NO: 29859 - DNA, 1195 bp, Mus musculus
gcatgtctttaatgccagctctccagaggcacaggcaggtgcatccctgggagttcaaggctgtactggtttatctagaaagtgccaggccagccaggacaagcctctgtctcaatgctacagcagctgctactgctggtagggatagtggtggtgatggtgatgaggatgaagaaaaaaatatttcagttggaaagaagagaggatataataatatgagcaaagggctttgtgttgtgctcaaggctgctctaagaagctgcaggcaagggctctccctcaaaggtcattgacgagttgggtctttccatgagctgacttgacatcaggaaatagaaatcaggtgtacaaagaaagaggcttatgtgggcatactgagagaagagttgcggtagaggtgagaacatgatttggagcagcgatcctcaacctctgggtcttcatcctttggggaattgaacaaccctttctcacaggttgcctaagaccattggaaagcagatatttactttatgactcacaacagtagcaaaattacagtaatgaagtagcaacaaaaataattttatggttgggggtcaccacagcatgagggactgctttaaaggctcacagcactgggaaggctgagaaccactgactgagagggtgtgaggcaaagcctggactgggtggggagacacagctgtgtgtgagctggagttagagatgggtgtgtgtctcagcccgtgtgcacagacgccggaagcctgggctcctgttgcacaggaggggctggcagtcgttgtcaaactctgaacatgtgggaagagttaccagtttggaggaatttggaggcactattgactggggaaaggctgggggaaaggcaggttaagggagggaggctagcaggttgaattcgggtgtcctcaggagagacagccccatgctggtcaaagccaccaagtagggtctccactggcccctgggaagagtaaaaggcttcctgtggcagcgagcatctgtatgtgaggtagatcctggctgtgggaaccgtgggcacgagagccacgagggccacagcagaaagcaccgtgcaaaggatgagactaacagaaatgtttctgacctgggtagcagcagcagatttccaaactgtgaagcacaggaaagaggggtcagaataggggttgtagcaaagctagaattttca

SEQ ID NO: 29860 - DNA, 1125 bp, Mus musculus
gttaaaaatgcaggtacttgagctagacctgtcagctgcatttggtggagtgggagagatgcctaacatgggattctattatcttttctatacatgcccttttattagctctgctagctgtagtagctattcctggttgtcaacttgacaatatttggaatgaactacaatccagaattggaaggctcaccagtgacccttatctggaggcttggagatccttatctggatcttggtatggagatcttgagccattgtggctatggattccagaattttgagtttgaggaacacacctttaatctgggctacacctttcatctgggattaaaggtgtggtggaacacacctttaatctgggctacaccttctgctggagacaatataaggacattggaagaagggagtctagctcttgctcttgctccttcgcctgcttgctgcgtgagactgagtaactgctagatccttggacttccattcacagctgcgactgaaccattgttgggaattgggctgctgactgttaagtcatcaataaattcctttactatctagagactatccataagttttgtgactctagagaaccctgactaatacactagcttacattcaaggttctgcatacatagcctgtgctccattggaatttggaggcttcctgtcagtaggcactgccgtcctgagaaccttagtggccatctttgtgaggaaacacacccagccatttttcagtgtgtgcgatagtacatctaagatagcaaaagaaacccccagatggtgtccaaatccccaaggagctcacagtcacgtggggaagccaacacgacgtaggaaggctacatcatgctcaattttaatttggatagtagcgtcaaaagtactcaaaatggaggaaggtctcctaagcccagcccagaaacgcagacaatctgttcccccaaaaaagtgacaaaggtctctcagatgatgaggtcccagagctgcttaagtggagcgaccaagctatcctactgaaagttgagattggcaggtctaggttctaccacagctgcagagaaacctggctcagttcactccctgggcaggaagcagagtggtttaaatcagcctgccctgtgt

SEQ ID NO: 29861 - DNA, 1215 bp, Mus musculus
gtggggagtccacactgcattcaagcctgctcctgggaagcaagttgttgaggctgcctcatggcctccgagagttggtttcgtgtcttagagcatgagtgtagactccacttgctggctggaagtttctctggctggttcaggagctcgctcagtgcaggctggagtgtgatgatcagacgcgctcttactgagttccccaagactgcttattgcagtccggaagccaggccttcagcctgtcccttgttttacagtgtaagaaaaggacattgtttggcaacttgctggagtctgtcagccccgtcaagtaatctcaccttaatgcttgttgccttagtagcttgtttccccttgtcctctgatgcgcaccagctccatcactaccttcaggtgcagaagatctccggtttccctgcagtcccaattcctgtaactcactttctacctttccttcctctgaggtagtaagcagattggcttaaggattcagtccagacctgaccaacgtcgtgacaggaaagctgcacctttcatttagcatttaagatgtttctgtttctttggcatccatcagagccctctttattcggcccttcatgctgcttctggacgagcctaccaaccacctggacctcgatgcttgtgtgtggctggaagaggaacttaagacgtaagagatggggctgggagctgcagtcccagggaggtcaggagcagagtacaaagggattaggtgctcagaaactgccctgatgagtgcaggtgaaggaaggccagagacaggccagatgcagccagtgccagtgaagtcagaccggctctttctgtttcattggggtgggtttttaagtctgaaatacatgagtcttgtttttcctatgtccaaaatacagcatcttcactaaagaaaatgtttaattgtatgtgtgcatgtgcacacatgtgtacataaatcatgtacagtgagtctaatgcttaaattcatggtgtggtggtgatacagaaaaataatagtaaatctattgtctcaacgttaaaagtaaacaggagctgccttagtgctgtcttcaaaaagaaaggacttctgtttctcttattgagtctgggttgaccccatccacgcctctggataccttttatttagatacttgtgtgtgtacagactgttgatagcaggacttcacccatccgtacttcattctgttgacagaa

SEQ ID NO: 29862 - DNA, 1299 bp, Mus musculus
accaaactggaattaaactcaggccggcgctatggcctcattggcttaaatggaattggtgaggcccttgggggtcaggtggaggaggtttctttcttggtttgcctgttactcactatgtgtttagcactaacaaagcaagaactttatcccatgagtgggggaccagacatgctggagacatggggcttatgacacagctgtgtgtagcaggtaccatgggagtttttgacagaaggtgctatagagaggttggtgggggagtgagggtgaggagtggtggtgtgaagaagcctttgtaaatgaacaggatttcacaggcacagtaagattagacttgaagggaagctgggaaggagagcctgagagtgagccagtgactgcctgttaggaacaggtgccaaagagtggcggtgaaggggcttagtgtcgcctgtcaccctcttaggaaagtccatgctgctctcggctattgggaaacgtgaagtgcccatcccagagcacatcgacatctaccatctgactcgtgagatgcctcctagcgaaaaaacacccttgcagtgtgtgatggaggtggacacagagcgggccatgctggagagagaggctgagcggttagcacatgaggatgcggagtgtgaaaagctcatggagctctatgaacggctggaagagctggatgctgacaaagctgagatgagggcctcaaggatcttacatggattgggcttcacacctgctatgcagcgcaagaagctgaaagacttcagtggtggctggcggatgagagttgctcttgctaggtgagttctcccctttccaccatccttggagcccctgtctctcaaaggggagtgttcactctggtaggagtattatgtgtcggatgagatagccattagtgatgtaatgtgggtcagtgtgtggacctgactgactgccctggctgaagtactcaagaccacctccatgctcggagccagttccagtagtgctctgagcagacccaagtaaaatggtagttaagtgtcggttttcaccttgacccccttcctgccttttgtgctgctgtcctgctagtttttatggcagtatgatactggacacattgatgctacctgtccttcttaccccgtaagcctgaggttaaagtgagtttgtagtccagcactacaccagcaccctccccagcatgctgagatgtgtgtgctttctcttaaaattataaaattatggagcatctcaggctgcacactgtgaacaaaataggtgcatctttgttcatgactctagaggcac

SEQ ID NO: 29863 - DNA, 1188 bp, Mus musculus
atctctttccaagttaagtgtagcctgacacagtatgccctcagaaggtagagaggccaggagctggagagatgactcagaggtcaagagcacttgcctgctcttccagaggactcaggtttgattcctggcccccgtgggcattacgcatacatggtatagcgattcatgtaggcaaagcacccatacacatgaaattgtttttaaaaaggttcattcaggtgagagctggagaggtgccgtgggtagtgcagtggctttgcctgcgtctcctatggaaacccagcggctgcacacggttgtctttagatgtgttgtaatgctttgtttttttaaaaaagtaataatcttctgagtgtggcagctggaagaaccctgcctgcttatttttacttttttagcagtggaatcgacacttagaatgggaaggtgtgataagggagccgaggtgatggtgggaggggtggggctctgtgaccacttaactcctcctacctctctctgtctggaagccactgccaggctgggtgcagggatcctggcctcggcctcgagcacaagctctgagactcccactttccatctccctggcaggtgccaaacagaaggagacagagactgaatgaccgccgtgaatgtagacgcccgcgcaggagaacttgaacaaagtctcggggtcacggtttgcctcatgaacactggctgcaatagaagagagtaaaatggctaagaatgtataccagggtttagcgatgggtatttttccagtgatttgtaagtataggaaaagattttatgtgcttgaagattcaggcttgcgttcaaagactgccctcagacctgtctgaaggattttcaatgctgtatgtcattaaagtgcactgtgtcctgaaatagtactacttttcatttcaaagaagtcactgggatggaacaggtgacagaaagtgagtgaacggcacgtccagatcacggtgccttatgtccaaacgcaatatgtcaccgccgctgccgcacgccccaaagtgctgctgaagagacacccagcccaagtgtgagcatcttcagaccttttacccagtctcttccttttcacttaattggttgaaaagttttaatttgagtacaggcaactgaaaatgtgatgtgatgcctctaagcgctctgcatccgtcctgttctggctgc

SEQ ID NO: 29864 - DNA, 1951 bp, Mus musculus
cagcagagtcacagaatggtccagcactttttttttcttttttctttcttctttccttccttttgtttccttgtgggtgggttttgttttgttatgttttgttagtctcactaaggagaaacttttactggggcaaagagccggtggctgccctgccccagggtgggggccttcctatgaatgtaagactgaaatcaccagcgaagggggctgtccagagtgctggccacgccttactgacaggggcaggccctcagtttaactaaagtggacaccactgatcaaggaatgtactgagatgacttccttagggatagagctaagggataataacttgcactaaatacatttgaatacttgattccatgagtcagtttattgtagtttttgatttctgtaaaataagagaaactttttgtatttattattgaataagtgaatgaagctatttttaaataaaagttagaagaaagccaagctgctgctgttacctgcagaactaacaaaccctgttactttgtacaaatatgtaaatattttgagaaaaacagtataaaaatagttattgaccaaatgctaccaggcgctgcagcagctcgggtgcttataaccgtggtagggatgttacaatataattttgtgttattaaatatgccattataattatgtaataaccaaaattttgccccggtattcctgggctttttggaaactgtctcttagtgcttgttttctacacctaacttctgacagcagcgcgtgtgctacaactacaacttttatagctgttggcgatttaaactaatgtttcatattatattgttgcatccctacttcttcagtcaggtttttttgtgcttacaatttgtgataactgtgaataacggcttaaacacaacccaaatggaggctgaattttttcttcagcaaaagtagttttgattagaactttgtttccaacctcacagaatcatgtaaacatagagtcatgtagcagggacctaacccaactccttagccttctatttaacataaaaatttgaaaaagaaaaaaaaaagagagatggggagaaagagaggtgtgattatgctcccagctgcaggactctggcaatagggtttttcgaagatgtaattttaaaatgtgtttgtatgaacttgtttgtttacatttctttaataaaaaaaaaccacactgttttgtgtttgcttgtagaaacttaatcagcatttgaaccaggttagctttttattttgtacttaaaaattctggtactgacacttcacaggctaagtataaaatgaagtttttgtgtgcacaattcgagtggactgtgagctgtgggtacattcagtgactcagctctcagcttgtaatgtatatggcatgatgtatttttatcttacagaataaatcaattgtatatatttttctcttgataaatagctgtatgaaatttgtttcttgaatatttttcttctcttgtacaatactctgacatcctaccagtatttgtcctgccgagtttggttgttttctgttctgtataatagtatctaatgttggcaaaaattgaattttttgaagtatacagagtgttatgggttttggaatttgtggacacagatttagaagatcaccatttacaaataaaatattttacatctatagaatgtgcactgtgttctctgtgggctgtggtcatgtttggagtttggttctgcttggtatctttcagaattgctagtctagacatttggatgtaaattcagccatgctccctggctgtgggctcccctcccgcagtgaaatatggaagagaacttgtattagggtggagtacagcagattaaagatcattcttcatgtttatttgcttgtttaaactctgtgcattggtttgtgtctgagatgacgtctcactgtgctgcccaagcccaggcagccttt

SEQ ID NO: 29865 - DNA, 1134 bp, Mus musculus
cctaaacatttactcatctgtgcctgccccttaagtcatagactattaagcttctctccatcagtagacttgctttactggcaagtgaatccttcccttttctcatgatttctttttgctgcccaggaatcccttccgtcactgccacagtcccctatgaaggagccttccaaagcatttcaccagtatagcaacaacatctccactttggatgtgcactgtctccctcagttccaggaaaaggtttcccctcctgcatcacctcccatatccttccctccagcctttgaagcagccaaagtcgagtccaagcctgatgagcttaaggtaacggtcaagttaaagcctcggctgaggactgttcctgttgggcttgaagactgtagaccactgaataaaaagtggagaggaatgaagtggaagaaatggagcattcatattgtcatccccaaggggacctttaagccaccttgtgaggatgaaatagatgagtttctaaagaaattgggcacttgtcttaaacctgaccctgtgcccaaagactgtcggaagtgctgcttttgtcatgaggaaggggacgggctgacagatgggccagcacggctgctcaacctggacctggacctctgggtccacctgaactgtgctctgtggtctacagaggtttatgaaacacaggctggtgccttaataaatgtggagctagcgctgaggagaggactacaaatgaagtgtgtcttctgtcataagacaggtgccaccagtggatgtcacagattccgatgtaccaacatttatcattttacttgcgccactaaagcacaatgcatgttttttaaggacaaaacaatgctttgccccatgcacaaaccaaagggaatccacgagcaacagttaagttactttgcagtcttcaggagggtctatgtgcaacgagatgaggtgcggcagattgctagtatcgtgcagcggggagagcgggaccatacctttcgtgttgggagcctcatcttccacaccattggccagctgcttccacaacagatgcaagcattccactctccgaaagcactcttcccagtgggctatgaagccagccggttatactggagcacccgctatgccaaccgacgc

SEQ ID NO: 29866 - DNA, 1196 bp, Mus musculus
aggagattccctcagtgtagacttgctcttctgagcccttgggccttgttcacagtataccttggctttcacttctctctgatgctgtaaatcgcataagttatttgtactcattgctctttatttcccatagaacttgcagtatcagcttacctgtcaggaagtggatctgtgctctcttgatgcactgtacatatttgaggatcttggtgctttgcttttgtttgattctttagtgctagcctcctttttcagctgtttgggagtgggtgttttcctttatttgaacttcattgtcaaatattagattccctgccactagagcttagaaaatttttattaaagcaaaaaaatataaagtaagtaatccatgttgtaatcgattacatagtttcattttctattgtgtgctacctgtatctttggtcagttttaattgctaacaaaagtccactccttaggtctttctgggtataaagactctagtcatggtccagcagaaggtgcgtcgctccgaccacagtggtgctgccactgtaaggtggttattcttggaagtggtgtgcggaagtcatgcaaggatctgacctttgtgaacaaggtactttactattcttcccatgacctcgtcctacttctgtttttgccagtgacttctgcatcaagacaaagtgcttcatgggatatgatagacaagcatgtagtagatgggctcagcttcaaaccaaacagctatagcagactactaaattgttcatttttagaatacagtaagatatggacagtgtagtttctggggttttttttttttgttgttgttttttcttttttttttttttccccttctaaactatttgtgtctctatttagccctggctgtcctaggccaggctggccttcaactcacagagatctaccttcctttgcctccaaagtgccgggattaaagccatgcaccatcatgcccagctttgcattggtttttaggtggaaaattatcatagggtgaatattgggacagtgtcttcacagttggaggatatagagcactcacttttgaatgtcacctaagattagcagtccacagggtactagtttaattagcatgtgtcttactgaggtcccacacatttccctttgcttttcagggttcccgagagaacaccaaaaggatggaaaaggatattgtcttttgt

SEQ ID NO: 29867 - DNA, 1099 bp, Mus musculus
tatctgagatgtaaattaggttaaagacaaatgctgtattttcatattttaataaaaatagaaaaaaggaacgtttaactactttttgcaacttagtcaattttaaaactgctttttattggttattttaatgatgaaacttgagaacaattatacaaaattaagtataacaaaaattaggttcttcatttcaaagctgaatgctcaagctgggccaagtaggcaaatgggtaacagcattgtatttgataacctcgtggccctgtgtatatatatttttgttcttgtgcatttggaactggagatgcctctagattatgtttcctgtagccttgcttccttgtgctaaaaattctcagaattaggttttagcaaggtcaatgcatatttgctcagtagcatataatttaaaattttttggtctcctgcagcagaataatttaagtaatcctccaacaccccctgcctctcttcctcctacaccacctcctatggcttgccagaagatggcaaatggttttgcaacgactgaagaacttgctggaaaagctggcgtgttggtgagccatgaaggtatgacaatagcatccaaatcttacagctctgaagtatctacctttgaaagctatgtgtatactgaagtgtctgcagaactgaactgttccctctgtatctactctgttctacatactttgattctatttgtttgctcttgcagttgccagagctttaggaccgaagccatttcagctgcctttcagacctcaggatgacttgctggctcgagctattgctcaaggcccgaagactgtggatgttcctgcctcacttccaacaccgcctcataataatcatgaagaattaaggtagaaaccactttttaaatgtgcgcatgcatgcctgcgtgcgcatacatgtgtgttgcctgcatatgtatctgagcaccacatacctggtgtccacagaagcctatactatagaacattggatttctgcaattgatgttccaccctgtgcactgggaattgaacctcggtcctctgcaagagcagcccatgctttcaaccactgaaccatttctcccagcatcagaagctac

SEQ ID NO: 29868 - DNA, 1192 bp, Mus musculus
ccataatgattctataccagttactagtttaattagaattaataaggtttcaccaaatggatttaactatagagattaatcactagtttcatttttttttaatttggtataatcattatatacaaatgcgtacaagaattgtggaattatttgagatatttttgttttagactataaaagagctaagtagtaccccttattctcacccccaatgtcttagtctatagtccaagttggcttgaaactcttatgtagctcaggctggtcccgaacttgtggcattcctcttccatcaacttctcatgaaataacaagcttagtctatccatttttaataaagattgcaactaggaaaaaaaacttccttgtttgtgtattgaagctagatttttcactgtaaacgtatcataaaaattatttttctgaaacctatgagggcccaagctctgcaatagtttagctggctttttatgcagctttactggtccctatgaagatagtggcctacccattctgagcggtcatccatagtaatgggaaggtactgagtgcatactgagaagaggtctgttgagcatccagaagccagttgtcggaagtctccagtgttactcttctctcccctggaagagaggagtgttaggtacctgtgtgatttgttctgagctcatcagttgatgctgtgcgcttttctttacagattccccttcatgggcccatcagtggctggaacacaaaacaatgacggccagaccctagtgccacaagctgtagctcaggtaatgctgctcgaatcactggtttatggaagacacatggacctactatgtcttaccaaacccaaatcataatgaagcccctcctagaaaggaataggagctgatcttctggcaacacagtgaaataaagatgtgttgttgctgtgtaaaataaagacagatttaaagacgagaatttctgcaaaggacttgcacacgttaatgatagaaagtcacttggaaggaagcgaagtgctctggctttatattcatttctaactctcgaaagacatttcatatcctgctaattggaattaatccatcacatttaaaatgtataattattggaaacagtagtggaaaatgtctgtaatcattctattaggtataattattccttgagatgatttttttttaatattgagcatctataa

SEQ ID NO: 29869 - DNA, 1162 bp, Mus musculus
atacttcctatccaaactttatttaaatggttgtataatgaaaaaatgaagcatatgcaaattagatgtaaaatataattttgctctcaaggtttaacctcttggattattgtatttagaaatcccccattcagtctctgctggttttcttctcagtgctccttgttttgttcttgttttggaagctgaggataatagtgggtaccagtaatctgagtgcttggtgatgccgaggcagcaggatggtgaagctgagctagtctgtattacagtgcataccaggccaggctcagcgacatagtgacaccttgtctcaaaaagcacttgaaaattaaatcatgaaataatgcctttgaaaaactaagagctgcttttggggttgggatggagcacctgggtacactatttggttggcatacacaaacgctctccccacctccccgccccgcattaagaactaacatcctgttgtattcatacatttgttgaatgatacatgtacagcaactgaaaattaattctgtataagtctttttttctcaaacatttcctgattggttctttttctgttcagtgccttcctcagactgctgcgactcttctcttgtggcacagatcgtcacaaaagtgaaagagctaggtaaaattggaaatgtttttcttttaattcttaaacaactgacttgatgcttaaattaaattaagtgaattgtctgatgttaatatcaagaattaatatataaaatgttcatatcccattttgatgaagtagtattcctataagtttcaggaaataatgaaaataatagctctttggattaactgttagtatcttgcttgccttcacttcagctgggtattgtgcttgcttagttgtcagtaaggagaaaaagaaagcctgtttaactaagcactcatttagtactaattaatattttacaatttgttctctgataacttagaatgatgacatgacattttatgatagatttatcctttaaccaatatttttacaatatttggatataaaaacatttggattatattgaaattattttaataaacaagttttcacattaaaagttatcttcagaatttatgatcttattagtattttaagctagaacacaaaacagtgtattaatgggtttgaatacatgta

SEQ ID NO: 29870 - DNA, 1134 bp, Mus musculus
ctgtatgcatgcatgtatgtatgcatgtatgtatgcatgtatgtatgcatgtatgcattcacgcacagtggaaattcatgcaatgttctagttaaacaaaaatgattctaagttaaatacataaagcaatcacatgggttttattttctttttccagatcactaaagtggttcttagcaaaggttggagatgtcttgagtgcactgtgtgtgaggcctgtgggaaggcaactgaccctggaagactcttgctatgtgatgactgtgacataagctatcatacctactgcctagaccctccattgcagacagttcccaaaggaggctggaaatgcaaatggtaccctaggattcatgttactttgtcagtctttcaagttctgaacttctgttctcattctgtgcacttgtagcttctcagatttttacactttaatacgaaaataaacttgatactttcactgggctttgggtttcaggtgtgtttggtgcagacactgtggagcaacatctgcaggtttgagatgtgaatggcagaacaattacacacagtgtgctccttgtgccagcctgtcttcctgccctgtctgctgtcggaactacagagaagaggacctcattctgcagtgtagacagtgtgataggtactgcgccccttaacctcctttgctatctttaaagcaggtttctcaaaggtagtaacaaaccttagaaaattactttgctggattataaatttagggaacaaaactttgctttctagatttttagtctattagaagcttccggactactttactatttaaatttttaaattttagacacttcaggctttcaattgggggtcttttggtgatttatcagtcccttgaaatcagatacataattagtgtttgcacatacacatttttgtggagaatttctcagtcttttggtagattctaaaaatattctccctacattcttcttttttctcactatttcgcccctaaaacttaagatcttgatcttcctaactagtatgtgcagactgcttctgttgtttttctatcagtattgttagcagtttagcactgaatgtacagtgtcacctttgactcattggtggtgcaggattatttgtaagtaagttgtg

SEQ ID NO: 29871 - DNA, 1146 bp, Mus musculus
gaaggctggagcgggccggcgaacggcaggtgtccgccccgcccccacccccgcgggcaggaagaggaagcggtgcggcccggccccggggccacccgcagggcctcgcggggcgggggcgccggagctacaagaagcgcgtgacctagttcgtcccgaagtggacttgacaggttgtcatcgcggctccccgcccccactgtcttccgggtctggctcctcccccaccctcgagctcccactggcctcgcccaagctgtactccctgccattggcttcaaaccaggggccacgccccaacccagctcgccctgccattggccacgcgtcccaggccgctctcccagtcattggcttcgtcccagaggccccgcccccagtcttgctggtcctcgggttggccttgcagcgcccctctttcggctcgtcctcctattggcccctcgcgccaggcgccttgcctcctatggtccgcggtggattccagctggtcactgttgagtttgttcccgtgggcattccggtttctgtcggcttccctccctctttgctgcgtttcttcctgctttctttgggtctgggagcccgggcctcgatacctggtcccggtcccaaactcaatgtagcagcgatctacatttgcctctgtaccccgccgcaccccgcccctttcaactccttcttccccagcccccacgcacaccgccttcattccctcacacctctccttaaattcggctgagtggaacagacttcatttcgaaatcagggagaggggttaagtgataaacgtcaatatcaatattagctggttttggttccagaaaggaactggacggcccagatcattcaaacattttgttgttgatggtggtgggggtagtgcttttctttgggtgtgtcttaggtttggaggtttcttcaaacaggatctcacctctccctttgtatctctgactggtttggaactcgctagttccttggtacggggtttgactgcagaagccagagagggcggccgctgggttcctggagccgctggttgtgggccacctaacttgggggctcctctgcagaaggtttcatctctccaccctgggattgaatttttttaattaattttcattttatgtgcattggtgtttt

SEQ ID NO: 29872 - DNA, 1231 bp, Mus musculus
tgggatcccatgtccatcttctgagccatcgatggagtcacaggcaggctgccatgccatgccaacctggcacttctgtgggttctggggcggggggtgaaaaacagtggtcacacagacatggcaagcactgcccactgagccttacagatctccagcatatatgttcttgtttattttatttggcatgtatgaggggtgtacatgccccagcacatgtgtggtgagaggtgtatgcttatggaggtcagagaacaacttgaaggccgggtgtctttctactctgtggtgtttgggagtcagtctcaagctgtcgggcagcggatgtctttgctctcagagccacttcacacacctctgccttgaaagtgtccacacaaatcctagacaattctattttacttagaagttctttttagtgcatatggttcacgatatttttaaaagtataaccgcaatgcttgtgctacactcatttttatttttgttggtttgcatcaggatctaaccaagctcctgctagttttagtctgtgtggaaaagtggtcattctattgaagtctagcttcacagtcttctttgtgtgttccttcatcttcatatttgaataagacggactgtcactgtggacagccagcaaggaagttgccacaacaggattcttctgcacatgtttattgggagagcttgatagagaaggcaaagaccccaagccccagaactggcgctgcttatataggcctaggagtggcatgtctatgcctgattggttgtgctttcagtacctcatttacattccccgggatgggctgtgatgtggcgtgaaacccttatgcacatgtgcacattggttgtttacccaaacttacgggtggtggccagcggtagccagcgccatcttgtaatggcgtatgtggcttcccacagtcaccacactgaagtacctgagactgggcaacttactaaaaaaacacaggtttgtgtttgtttagcttctggtcttggggcctaacagtgctgtactggctggttttgtgtgtcaacttgacacagctggggttatcacagagaaaggagcttcagttgaggaaatgcctccatgagatccactgtaaggcattttctcaattagcgatcaagggggaaggtccccttgtgggtgatgccatcccttggctggtagtcctagattctataagaaagcaagctgagcaagccaggggaagcaagc

SEQ ID NO: 29873 - DNA, 1155 bp, Mus musculus
gctggcctgcctgcgggctgagctggacagtccttttgttgtttttttttgagacagggtttttctctgtagccctggctgtcctggaactcactctgtagaccaggctggcctcgaactcagaaatccgcctgcctctgcctcccaagtgctgagattaaagatgtgcgccaccaccgcccagcctgggttggacagtccttaagcagagaaggtaggagctgacttcctgacttcctcagccactgcaaggtggacagccagttacttcagtaatgcttccctcggggtatcatgctccccagttaactcttctcaaagactaatcagtgagaaggaagactttttaacccagggtctcactgtgtagctccggctgccctcctagttgcaggcattaaagatgagttctggtctgcttggctcattattataatttaaaaaatagtttggcatttctaggagccagtcttacagcagacatcccattctctggctcttatagtctttccgccccttctgagatgctacagccctgagccttgatgcaggatgtactgtagacagatgatgggccgggcatctcatgctcgcttgttcccttcatcttgatctctgtggttttctgtaatgatttctgtggcaaagagacatttctttgttgaggaatgagagctatacttaatctttgtatatttacaatgcacagaggaattatgctgctttaataaagtggtttattaatacaatttaaaacatttctatatttcatattttcattgttttcatttaaaaaaattgttgtgtgtaccagcaagggtgtggagttcagaggacagctctcaggattggttctcccctgccatcttgtggggttcagaggtcaaactcagaactacacatatgcacctctacatgtcacgcaggaataatttattaattattcgtaatttcctgtatggaatctgtcacttttacagtgctgttctcccatagaagacgtgcaaggcagtctctcccctctcagccctatagcctggtaaagtgtgtgacaagcagctttgcagggcctagcagagctctacccttgatgtgatgtgatttccctatcctttaatggactgggttattcaggaccatgactaaaacataaca

SEQ ID NO: 29874 - DNA, 1120 bp, Mus musculus
tcagtcagaacatgctaaactccaccgagcttgtcttgaagctcaaaccatgatacacatttcagactaggtcactttctgcatactttaggaagggttcaccgctggtcccttggctcctagaggctgtggctggagagagtgcacagagctgttactctaatcaaaggaagacacacagggccaccagctcatctgcctccctcaggaaactggaatgagctgggtgtgctgacaggtggctctccgtgagctcaaagcttgtctgatctagatagtgaattccaggatagccagagctacataatgaggtcctgcttcaaagagctactcaggaaacagatagctaggtaaatagatgagactagaatgttcgagtcttcctccttcctctcgcccatttttcttctttctacctgctccccttgtcccaaggatgtcctatagttcaggcaagtcttcatcacatttctgcctctgaggtagccaggtaaacaatgttgctccttggagctgagaattctgataagttgcacttgaagatgaatgtctatgatttggggttctgtgtaatttttcacacacagggaaatgatgtactcactttcgaattcggaagttcattttggaatgttcatctcactaattgatagatctgaagagttatactagatgccttggaacatctaggctgttatttccagctgtgcgctgagggagacttggcactgctcaggaggtgtcctagtgaagattactgttgtcatgaccaagcactgtgagcaaaagactgttggagaggaaagggtttgttataaggtttacacttctcttgtatattgtagtccatatttgaaggaagtcaggacaggaacttaggaagggcaggaactttgaggcaggtgtcaatacaaagtccatggagggtgctgcttcctggtttgctccacgattgatcataatgcctactgcctgatcttatggagacatcttctcaactgaagctccctcctctctggtgactctagtttgtgtcaagctgacataaaactagccggcacagagtacctgtaggaagaaggctttagaaaatccctttacatcttctgacccagggaaa

SEQ ID NO: 29875 - DNA, 1120 bp, Mus musculus
aagagagctatctgagtgcttatactatctgagtgcttagccaaagctttgaacgaatgcttcaaactgaaattggttggttggttgattgattgattgattgattgattgaggtaaccagagctcaataccaaggccttgtgcttatgagtcttcaattaagctttgtcccacctctaaactaattcagaagagtattatgtaacagcatgccttgcgtcttgtcaccgattccagagacccttttctccaaacgctgctgagaatcaccttgcatccagagagtagcagacattggcgtgggaaggtgttctcagcagggtccaggtacagaagtgacccagtgcatcattgttccagcctcacaaggatttgtgtagttgctgaggccagagctcccgaggctctgggtggatttgggtctgttctgcagcttttgctgctgcttccttctgtcttagccagtgttttattgtcatgatttaaatataaggacaaattaagtagattaaaagattaaaccaggtctggtagttcacacctttaatcccagcatttgagagcaaagacactcaaatctctgtgggttcaaagccagcctggtctatgtagtgagttccaggacaaccagggccatattgtgagatcctgtctttaaaagcaaagcaaataaatttaggtaaaattaataagttcgaacatatagtaactctttgttccctaaacagacactgtagtttttttataaagtgactttaggaacatcttaagaactgattgattgtgtattttcaatgtagtgtgagaaattaggtgttatttaaaaactctaccattaagatcagataaaatgtgaaatcttaggtggaggttggagcaattctggttgaaatttagggactgagccaggactttacaaggctctcactcaaaagagccttcttcaggatacagttgccgagtcctgtgtaaagatgggtaacagttttaagatgtaacatttccactttggaacagaaaataattgagcttacattgtcaccttctgctcaagacacatggttgtaggaggaattttgagtatatcgaagtatgttcaggcagctaattctcctgactt

SEQ ID NO: 29876 - DNA, 1162 bp, Mus musculus
tttgctgttgctttgtaaagttgggaattgctgagtgagttttaaaaagcgaagtaaactgcctggtttgttatcaggtcaggtgtggtactgtgattggcagggacccatggataagtccctcccctttgctcaatgttttcctcttcccacctgctcatcttcttcctcctgctggctgctcctcttgcagccggagttctttcaggtctgtcacaccaagaaggactatgaggaatacggcccaagcatctgccgccacaaccctgtcttcggagtcatgtcctagtgtctgcgttggagccattgtctgacaagtgtcctgttggggaataagtgtccttcagaacccagagcagccacggctcctgtacatagcagtgtggaatgggtgtgtgagcagcgtgctttcatcgccagtggggccaggcacggtcttcccagtaaagccatttatccggtacgactgttcgtggtcctcctcccggcccctcccctcctgcccctcccactctctctcctttccacccgagattctagtcaagtgtagctctgaaggcgtccatgcaactgtagaaactactagaggatgcagtggtttctccaggaaagactgtaaggtggaggaaccctggccttcccagcctatttttgtaaataaaatgttataaacttgaaatacaaattgatgtttatatttcctatcattttgtattttatggtatttggtataaccagctaatgctaagcatgagtagtcacagagttcatggatgtcagagttctgtaataaagtacttgattgtgaggcatgttctgatgtgtgtgcaggctttatgccatgtctgctgggaagtgattacatgttgttggggtggtgtgacatctgagcaccaaccactgttgagtgagagttgctacagatgtatctaacttcctggagctgctttatagaagacaatggtttaatgttgttgagtgcgggatgaaatactattgcactgttgtaataaaggctgctagaatctttataactgttccttgtggtctcttttgcctccccatccattcagagaacctcagactctataggtttgcagacaattgatgattgatacagtgtgtgtgtgtgtgtgtgtgtgtgtgtgtgtgtgtgtgtgtg

SEQ ID NO: 29877 - DNA, 1133 bp, Mus musculus
gcacagcctcagccaggtgcctgctttcatgagctcaccctgtttattgtctagcctcctgccatgttctggtctgagcccctcaaccccaacattcttgtcatcaaactctcctcttccccctttctcttctgcttcttttccctttcttcccttccccctctcctctcctctcctctcctctcctctcctctcctctactctcccattcccttcttcccctctgttttctctccttgcttcttctctccttaagatgacatcaatgtcatcctagcccagtcaatcattctaaaatctgtttttctcctgaatattcaggcactctgtccttatttaaaaaaaaatcattatagggtatggaaacagtacctcgttgtgcactaaattgcgggtggggagggggaggttgggagcatggaagagtctcatctagaacggcccagcctataggtccacatggcatcagaggcatgttttcaggcaataggagagcagaaggggatgtctgatttccagcctgcctgactctcatatgtgagaagatctagaacactctacactgactttccctcatcagaaggaaagctctggatcccacgaggactttgcaggtgtctgcggcatcttcctgttccctgagagatgtgttatctgatgtttttaatagcatcatctgctggtgagggtgaggctctgagctgcagcattgatcttgtcactttggggaacagtttgatatttaggttataaatagcattttcattgctctgttaccatgttcaagactcatttgacatctgagccaaatagtataattttcttatcaaatatgaagatgtacagttttcctgaggcctgaactcaagctttctgaggttatattgacaggtactaaagaaagagctttgctgtgaagccatcataattcagaagggctacagcgcttctctcctgtagaaggaaatggagccctcactgagtcgataatcactggtgaatatttcctaagccctatctctaatccagccacagagacttaggtcttgtgacaacctgatgaggaaatggcatactcactgctgtgtcacagtggcagaccaaagcgaggggcacactaccacagggctaca

SEQ ID NO: 29878 - DNA, 1147 bp, Mus musculus
aaataaggctgctatgaacatagtggagcatgtgtccttcttaccggttggaacatcttctggatatatgcccaggagaggtattgtgggatcctccagtagtactatgtccaattttctgaggaaccgccagactgatttccagagtggttgtacaagcttgcaatcccaccaacaatggaggagtgttcctctttctccacatccttgctagcatctgctgtcacctgaatttttgatcttagccattctgactggtgtgagctggaatctcagggttgttttgatttgcatttccctgatgattaaggatgttgaacattttttcaggtgcttctctgccattcggtattcctcaggtgagaattctttgttcagctctgagccccatttttaatggggttatttgattttctggagtccaccttcttaagttctttatatatattggatattagtcccctatctgatttaggataggtaaagatccttacccaatctgttggtggtctttttgtcttattgacagtgtcttttgccttgcagaagctttgcaactttatgaggtcccatttgtccattcttgatcttacagcacaaaccattgctgttctattcaagaatttttcccctgtacccatatcttcgaggcttttacctactttctcctctataagtttcagtgtctctggttttatgtggagttccttaatccacttagatttgaccttagtacaaggagataggaatggatcaattctcattcttctacatgataaccaccagttgtgccagcaccatttgttgaaaatgctgtcttttttccactggatagttttagctcccttgtcaaagatcaagtgaccataggtgtgtgggttcatctctgggtcttcacttctgttccattggtctacttgtctgtcgctataccagtaccatgcagtttttatcacaattgctctgtagtatagctttaggtcaggcatggtgattccaccagaggttcttttatccttgagaagagtttttgctagaggatagatttcttcatttgtcctatctgaaaatggagactaacatttaatcattaaacattggcaacagcctccattcaggaaagtgaaataagggggctggagaggtg

SEQ ID NO: 29879 - DNA, 1148 bp, Mus musculus
tggtcccttctccaaaactcgcgtgtgcgtgcatatgtatgtgtatgtatgcatgctcatgtgtgtgctcacaccagccacgagcatgtactgcttgttgaggctcaagacagtggatcctttgaagctagagattcaggcagatgaatgcgtgctgggaggtagacttgggctctctcagagagcagctctcattcatctctgctgagccatctctccagcccatcagttatagtttgatattctgatgggactttctgatacagtgtgaaggtttgttagggtggtggatctgctctgagagcatttggtagttagtggagacaccagtggtttccattgtgaagtcggatctactggacactgtatgccacccaggcagttctgccacacacgccactgaccaaaatgtccacagtgctggggggaagaagctcagttttaagcaaaaccgttgcattcctgtttctttgaaatgactgaatggtatagtgttactctgagtgctcggggagattctgcgaatggggagtgcggcacgccagggtcatctggcctctgttcctagctggctgaattgaaatcacagttggtaatagtctgaataattggaagtggtgacgggtttcctggatcttttgtgtagataatccaggcacatggtggcactgtggaccccactttcacaagccgatgtacacacctcctctgcgcaagtcaagtcagtagtatgtacacacaggtaagaacagctggccaccctggttgggaggatgccacagtgttatattcatccctagaagcaagtgcttgctgtgtgtacttgtggaacagggtgtcatgttgtgggaaatcgtaaaaaagattggcaatttcctgcactatacccaactactctctgcccatgatcccactgcctctaggctagcctctgtgtgagctagtcttcccagctcctgttcgcctccctcagagctgcccattcattctcagccatctaccccctgtggtcagtagtcccaaacttcagtaacccggtaaaatcaaaactctagaagtcagatttgtataacaataaattctcaattcataagatccccacacaatttcagagccagttgataatgatacaagctgcccacctagat

SEQ ID NO: 29880 - DNA, 1667 bp, Mus musculus
tagttataatcaagataatttcttacagaggtgcccagatgcctgcctcctaggagccaaattggcacttaatattaatatcataccctgccactaagtgttggttttaagttgtattcatactgtatgtttaacttcttgggggtaagagggcagccacacctttctgaccattcctaatgcattgacctgaaggcacttgcccacagttcctttagtgagtgtcaagactgtcttggactgccagctcggcaaaaagcattaatgtgtataaatagagatttcagctctttttttattattttccaaaagatttctagttctctgtgtgtacttgaaatgttacctataaaagttgatttaaaccaactcttgtaagcttcctacttgagtcaaggccccttcttgtggtgcctcttacagctctagctcacaggtacaggagtgggcttttcctctccgggtagcatggcaggcacatcaacagctctgtatccatagccctcttatcgcaaatgcatgattacaggaagagagcaaaagcgtcattcagtatgttatgtttcattcctaggagaaatacgagcgtgctgtcaaaagaacaagtattaagattgtcaccccggactgggtcctggactgtgtgtctgagaagaggaggaaggatgaagcgttttaccatccacgcctgatcatctatgaggaggaggaagaggaggaggaagagggagacaacgaggagcaggactcccagaacgagggcagcactgagaagtccagtgtcgccagctctgcagtggcctcccctgctgagcagccgtgctctcccaagcccagggctgaggtgtccaaaggagagttgatgtttgatgactcttctgactcatcccctgaaaagcaggagcgcagcttgaactgggcccctgctgaagccccaccactcaacacagcccagcgcaggctgcctcagggaaaagggccaggactcattaacctgtgtgccaatgtcccacctgttccaggggacattctgcctcctgacatgcggggtaacttgatggcccctggacaaaacctccagaattctgagcggtcagaaatactagggacctggagcccagctgtccggacgttgcgaaacattacaaacaatgctgatatccagcagatcaaccggccatccaatgttgcacatgtaagtctcgggagtctgaaagctgccttaaagagtggggttttatggccctgccttcagatgaggtgacttataagtcccatttttgtgtgaatttctttatattcatgttaaacaggcagaagtcacatggtgacatttgggccagcagggaaccaaatacctgctatccattacataaggccttatggccctttattctcccaggagtgaacttagtgggtttcctaaagacccatgtctttgtatgctttccctattggtacttgttattatgtatttcagtgttaaagtcacactgatagcaggaagaatcttatgagggaggtgatgtcagtcagacttgaatggcaggtgtggagaggaccaaggtccgagttctaggtgaagcccaaagtgggcaaggatttgctgtcctctgagaacaggagatgttgcctgggtggtgtgagaactccaggggctttgttat

SEQ ID NO: 29881 - DNA, 1195 bp, Mus musculus
gggattttgtttatttcttttctaggtgggtggggtgagcagcagtaagagtgtggacctaaacttacacgtctgtcaaaatcataaggaatgcagtggctgcttcactctgggcctggctgggcttgtggcttgggcacatgacctttggttgctgctacctggtcctcatgcttacaggcgggtgtctgtagtaggtcacaacagagccttttaatttccaaaagcaactactagtgaggtcatgtcattctggtcacagattgtgaatgttttttgatttgtgtaattcttctttttcagccttcctgggtgactctgtccgtgcaatgtggcgctctcctgccgtatccttttgtgcgataaggacggggatagctgtgggtttaagaaacagtgagttagtgggctcatgagttgggggtctgagggaaagcttgggtttaagatacagtgagttggtgggctcatgagtgaggccagccctttcctctgcacctctgcccctgctctttcctatcctgtatgaaatggtatgtacctggtcctcgtcattacctgcgtcaaaaagctgtgactagcagttgtggcgaggaccctgggttgcagctcttctcagtcttatgtctgtttagacaaagattagttttagaattctaaatcaggtgaggaagtacgaataactcctagaacatgaggaggaagttctgagtttgaaggcatgtgtttgtcttttcagttagatgcatggaaagtttattattttacacttcctacccagcacttgctctggtgtgaaaatagagtgatgaagaccttattctgggactaggggttgcagctcagttatagaaggctatcttaattttgggtcctgggctcagtccccagcactgtatgaattgggcatattggcgcatgctcataatccgaacacttgggaggtagaagcaagaagatcaatagttgaagcttatccttggcttcataagagagagttcaaggctaccctgggctgtatgagaccctgtctcaaaacaaaccaaaagcaaactcactctgcactgtgtagcctcctccttacctgtgtccaccatgtcatattttcatgctcagggtcctgtgttgtgtcccaactgggccactcctcaccattgctgtcttgctggaggcttactggcttctgcttcactgt

SEQ ID NO: 29882 - DNA, 1059 bp, Mus musculus
agacagtccctcccttcctgggttttactctctttgtgtcttctggagtgcccaacttctgctgtccaaatgttttggagtccaatctgtgtttgtgacagttcctaactctgagaaccacagaaccttctttgccctccactttacttacataatcctcatttcacacatgcgaaaacaaactcgaggagacctgtccagcctctctcccttcttgagaccctaccctcctcacagtgtgagacttgtcttcactggggccaggtcaaggctgagaaaaagagagcagtgtggggtggccttcccacagccttttcttacaggtgtatgtaaggtaatactttgtgctacaggtgacaaactgccgaggaaaataagtggtttggatcctactaataatgaccacacaaggactgattttcaccagtgtatcctaatcctgttttgtttttctttaaacagctgttgtcggtttactgtatccctgtattgacagtcacctgggagaaccacacaagttcaagagagaatgggccagcgttatgcgctgtattgccgtgttcgttggcatcaaccacgccagtgccgtatcctcagttggtgtctgtgcagagggtcatctgggttgtggcagggtatattgacactgctcgtcccctcgttcctgagcttcagagtatgacttggctttcacgtggcaggaattttggggttccgttcctaggacctctgtactaagagtagaagcagaggtttactgtggctcagtggacttttgtcctctctcttgccttctaccccactgatgtgctctgtggtagtgagagccctgtccctgttctctgtcacaggagcccaaggctggtcaggaggtccctgcgggcttctactttccatagctgacattttgcccttcgtgtaggctgctgtggttttatgcattttctatgaaaatgaccaatttgatggtaaactcttcaaatgctaagtttctagagcaacttagagtaaaagatcttgtgaagttgtgtctgcacttggggccttcctttcctgcca

SEQ ID NO: 29883 - DNA, 2726 bp, Mus musculus
aggcctagcagaagcagcgactcctggcttgacctgacaggctccagcaaaagccacttaccttttccataagtaaatctcatttaaaacagttccaccgggtcagctctctggtgcacctgtcctaccttggcgtgggtggcagtgctttgatagtgctgtttcctgtggctagaagcttagtcatgtagttgtcatcgtctggcttgtatataacaggctttataggaaggcattagcagcaccagtctctctgaggtcgagattggtgtaacttgataggtgcgtgcttggcagcctgaagggcaatagtggggctcaccctgagcctgtcaccgtctgcacgcacgcaggcagtcgtttagccccaacatttaagcactgatttttctttctcttttccacacagggtgttccggaaaagcctcacagtgactgagcttcagcacatggttcagagtggaagcaggatgtagagacactggtcctgggtgtgatgaagatgatctttttctcaatgttccatttaggctgggctgacgataaatgactcctaaagacatgttcacttagtctagactagcaaatggaggcaaggactgcttacctaaaagtcttaccttgctcccccaccctcacacctgtcttctttggaacattccatcccaggctgtatgtgaaagtcgggtaaggggggcagtttcccgagtattagagttcactcatcattcaaagcaaatgccatatttcaaagccttgaatcaaaatgaattaccaactagcagttttgtgtcagtgcccaaaggagggaggttgatggtgcttaacagagatgaagtgtgtgtagtaagaatatttatccagaattaaaataaagggttgtgtaaagaggggttgagagcagcagtgagttggaggaagatcatctcccagtaggacctatagtgcagccatatctccaggtcacgctcaggctggcgctcacgtgtgggtttcatcagtgtgggaacgatgctttttactgccgggaggtttgtagacgacaatctcactgaaagccgagggcagcacaaagtcagggttctgcactgcgatgctggacttctcacctcagtttaagagaagttttatccgagctctggaccatctaagagtgagtcgctgtctgctgtttcagtcataatgagccgaaattgtgtctctgtcactccagggtggagaggactcttccacagccctgtggagcttgcaatctgtgattgcttcgtaacaggttgagtgtgcacgtcactgtgttaattacgcagtgtcctatgtgcgttggacagcatagaacacaacacgtgggacctaacttgcaaggattgggtcttcaacttcaagtgcaatgtgtatgaaaaccaatctgagccttgtattctcgtaaatatttattttgtaatttttgttaccgcacgagctattccggagaagggttctcgggtcatttcagaggtgcgtggaggcacactcagcaatactgtgtcagccgtgacgtccctcagtcataccctccactgcacactagtcctctgacatactccagctttgtgagttcagtgatttttacttacaaatttaccatttttgtattccaaaatgtgtttgttttaagttatatgaaactgacctcctgacacagtcgttggtccccaggcggggcagaagctctgtacctgtggacacctgggtttgggttaaccctcgcagggctcctcatagggggttgcttttttttttttttttttttttttggagggaaatgtttgaagtaaacctttgttttctgaaactactttggctaaaagaaaatgggttgtgctagactttgggacggttcttaaagtttcctggaaataaaaacaaatgattggtattttgaagacattcttcagctaagactggagtgtcttgcacaagctacagtgactggaagaaaaataagtgatcttggtgatgcacttgattgtatacaatgaggtttttttttttttctcttaaactggaaataaatgttagaaataatgtagccaaaaaaggtgaatctgaaggatgcttttgccaatagttatagcagttacaacaaaccaaagtgactgagtttgtacaaatggtaactagtaccaagcacactcactttcctgatctgaacacccagcgaggttcatgtccgtgctaagtttgcagcattgtgttcttttgcattctttttttttttacttttattaaaggttcaaaaccagctgttgtattcctgaggttttcttttggaggagacaggcacttttgcccagagtgttgggtttatggggaaaaggggtatgatggaatcttgatagacactttgggaagtgtcatttgagggtgtttcctatgaggtaggagctaaatggagcccagcaaaaatttgccactgcccctcctgcagtgatgtagcgggtaataggatgctcacctgctcttgcaagctactggcctcgggatttagggtcaagtgattggtgcctatatgcagaaaagcctcttgtgctccttaagtgctcaaagaaggcttctacttctagaatagtcccaacaggcttaacacaaagattcccttcaatccagagcacccaccatgcttaaccgcccaattgctggaatttcgggcactttgagcaccaacggcccactgctctatgacagtt

SEQ ID NO: 29884 - DNA, 1206 bp, Mus musculus
gaaagccacgggcaacaagaacactttggcggtgcacctcatggcacagggcctgtacaaccattccaccacggccaaggagggcaagtcggacagcgagtagggcgagcagggcgggtgggccggccggccggccaggtctagggccgcgagaaacaatgcaataattttaaaaccgtgaacaaaaggccagtgtataaagattataccagcattatctgtgaaaatccagtgtattagctatggttctacaataatctatgtacatataatttacaggtggtgtaaaatccaaaaatctgactataaaatatttttgagttttttttttgtgtttcagaggttatgctaattttatgttattattatttttctgcaaaggggactgtttagggtttcagatctttctttcatttttcttttctccctttttttaatcccttaaattccattatgggacattggacacttcttcccccgaaagaaaaaaaatttaaaacaacttgctgaagtccaaagatttttattgctgcatttcacaggactgtgaaccgaataaatagctcctatttggtctgtgggctctgccgcttgctttgtgctggctcggacagcactgtaggaagcgccagccagagtggtgatggagagctctggtggggagagagggcgcagttctttgctgaggtctgagaaagtccttgcaggccagcagctctcccggaacctctccgcctgcttcctacgcagcctctcttctcaaccatctcagaggcccgtgctggcagccaccgtgtgtctgcgtctgtgtcgatgacccctgtccgccacagccccgtagcgacctgccagcgccaactctcccgccaccgtggccagcgttggggcctggggagcagtgggagtgtgtcctgaaggcttgaaggctttgctgccgggacagctagccctgacccaaaagccctcaccgagataggccttggggcctggcagagcgagttggaatcatcttcctttcctttttcttccctcttttttctttttcatttatttttgaatggtaaatacatgtatgtgtacatacttgtgtatgcatgtgcacgcacaccccaggcctgtgtgaagctggggttctggagctcacagctaccttgactttcaaaggaactcgaatcctcccgaatctagaggacatgtgtaaataat

SEQ ID NO: 29885 - DNA, 1163 bp, Mus musculus
gaggtttgttggttttgtttgtttcctcctgattctgtgccattgcacattagtggcatcttcttggtttttgttttgttgttgttgtttgtttgattttggtttttgaattgaggcttctctgtgtagtgatggctgtcctggaactcactttgtaaaacaagctgacttcagattcatgtatattcacctgcctctgcctcctgagtgcttgtactaaaggcatgcaccaccatgcctggctagagacattttcttactgacctcattggtgcccagtagaggagtagtttcctcctctactgtaatggtctgtgaacattggctattttttagatttactaaatctacactgtgaaaatgaaagcatttaaggttgatagatgatacttgtactagagattggtgcttacttggttcttactgttctctccacagatgtgtgtgtgggggttgtacttaacacctgtacatctttttacatagaactttctgcagaagccaaagctgcattgctggaatttgaagaaagagaacgacagcataaacagggacgctatggttcccggcggggaggaaggcgaggaggttctctgatgtgccgtggaatgggagaccagaggcgagacaacagcgaaaggggaaggatgaaggagcacaggcctgccctgcttcctacacagccgtctgttgtggtaattataatgttacagtgcagtaccagacagttttagaagaatgaaggtgtgctcctgtggtccacacagctcacacttaccttttctgaagtgacactgaagcaatagaagaaatactgaagcttctcaagtttggtctgtgccaagattctatttgtagcccgaggattgggtatttcattattggcctgttagaaatccatctcagcacttctgttgagtagctgatgacctatgtggctaccaccgagccctgcttttctcccttatatcagtgagacctcctcaagtatgctgaaatatgctgatgttaacgcaggatttaggtcatagttgattgttttataaactgttttcctataggttttccccgctgtagcagttttcttaattatataccttctaaaaatgttcataacttgagattgaactatgcagttaaacttggatggatttcttctggga

SEQ ID NO: 29886 - DNA, 1172 bp, Mus musculus
ggcaatgcattctaatcttctggctctttctcactctctgtcttgttctgtctttacctgtgtctagcttgttctctctgcagtctgtctcttcaaaaaactgccacacactcaccacccactttcctcctcagtgctcttaaataacctgtctttcctgtctgttctttgtgagttgagtgtatcctgtctctcactcattctgtcagtctttctctaatccatcactttgcccctcaattagatgtcactttcaaaacatggctgctccattctacacactaacctcctcttcatttttagggattaaaggtgtgtgctaagggtgtgtccatactctagccaggtcctactgtaatccagtaggtatcagcattctggagagaccctgccttagcatgtgatcctatgccacagcagccatgttgctggattaaacttcctctatagcgtatctaagaagtgtttctaacttgaaggtaatgaatcactattcagtttcaggtgaaccaagattccccagtcatctttttttggaacagcgaagtcctcctccaccgccgcctcctcccacgctcctgaacagcagccatcctgttcctactcagagtcccttaccgttcactcagcctggaccagcttttaatcagcaaggacagcagccagtgttccctcgagagaggcctgtaagaccagccctgcagcccccaggcccagtggggatcctgcactttagccagccagggtcagcaactgccaggcctttcattcctcctagacagccatttctacccagcccgggacagccattcctgcctacacatgcacagcctaaccttcaggtatgcacatgagctagccttgaaggaaaccatgcctctatggtgctaagtctttgtgtttcatgaaagagaagtttcgggttttgtttctgctaacttacagttatgtaaatgataggagtagtagtcttaagtatactgttcatatagccagctcttttggacagtattgtttacttccttaatactaggaaatgtgataaagtgattcttgttttctaggaactgaacttggaattttaaaagcgatgtaagaccactaacatttaaagtatttaaagccctgatagtttatcttgtgtaatgcttttttagcatcctattcctgct

SEQ ID NO: 29887 - DNA, 1214 bp, Mus musculus
ttggagacttttaaaaaaattttaaagatttatttgttttatgtattttatttattttatgtatatgagtacacagtagctatctttggacacaccagaagaggacattagatcctattacagataattgggagcagcctctatgtggttgctggggattgaattcaggacctctagaagagtagtcagtgctcttaacctctgagccatctctccagcccacagttggagatttaaccctgtgtatgccatatgtccattggcctgcgccatggtgggagaagtgtatgtttggctaattgctgccagtgttgtactttgcggcttatgatgaatgaaagtaatgccagaatcccttccaaatatagctgtagaactttgggacttagtctcattctacttgctggtattgccctggttagctattaggccaccctttaagaagatcttatggctcacagcatgtcctgagggaccctgagcactttcttacttttgtactttattagccactacaggaggaatccactcaggtgtcagaatgtatcttctttgtcattgccaggccatcatgcatggacgaggacgaggagtggcaggtcccatgggccggggacgactaatgccaaataagcagaaccttcgagtggtggaatgcaagccacagccctgtgtggtgtctgtggaaggtctatcctcatccaccactgatgtccagctgaagagtctgctgatgtccgtgggccccatccaggtgggttgcctgtatgtgatgataatgccagtgggttatctttccagaacagtggccattgtgggttacatttgtagtaagatggtactcaagaagaaaaatgctagtgcttgcctcacagagtttaggaagtaaacactctagtggaacaaattgtcctttgaagtctgtcctacagttcacatgtgtacaggcacctatatgtttttgtgttggatcacattttatttgtggtaatttctcaaattttgaagtaaattagctccctagtcttattttctgaagctgtgtcacacactcacagttctggtgctcatcttagcatttgcaatacagatgtagcagtaacttacactttgtggtcatgtcctttaaaattgttggtctgagattgttacaaggatgaagacagacaccactccatgtcggctatgagcaaatggtctgaccctacaagtgg

SEQ ID NO: 29888 - DNA, 2399 bp, Mus musculus
gaaagaatgttaccagctcaaattccgaggatttttttttccacagcaaagaatatttgataatggttgcacttatcttcagtacaggctagaaaagagttctcaaccaggcttaactggagtggtctcagaaagccatcaacaggctctggtaaaacataggtaaaaatgggtgattatgattgacactcacctgccctggaaagccagggtgtgagatgggtgtctgggagtggtgccatggaagtggcgattctgcttcttataaatacctccaaagtgccacctgtttcaacagaaacgctcagattgctagctaggcaagcactgggcactccagagccagtggctctgccaccctgcaggcagccctcttggcctagttttcctggcatagggtgaggcacagcttgaaaggtggtcagacctgcttgggcttctttgcttttcaaatgtcctagctctgtagttcgtgctgtcattggtttgattgtctcactgtccttcattcagggctctgagtttcctttgggctgcctttctatcacatttgtgaaggatggatttctcagcagggctgatgctgcccaagataagtatatctgtccacattagtcattttagtcgattccaacaggtgagacttgctttctacaaagcatcccttagaagtccatgctgggcagacattgaacacagtgccttattatgtttctcccttgaatgcttcagtgttttgagtcatactctagaatggactgacactaggacacactcaggacttttttagttgtattttatacctgtgattttatctcacatatcttggtaggatggaggagacagaggtctgttgtcatctactgtcgctgggtaataaggagggagctctggactcaaagcagctggcttccacagctgaaggttttacattacgttttcaattaagttgccaacgttttaacaactggagaatggtattccaggccccaagaaactttgcttaggattgattctgagatgacactgtgtgctggcaaggagcattggggggcacagttgttgtttggtatccaggcagttgagctgaggcattcataggatgtcttagaagacattgtggtatggtgccacctctgaccacacagcctctgcctcacgcctgcttggtacactaagggccagccctgcaggggctgtacccagcttggccttagcccatctaagtgctgtcaactggtctcccactgtcactcccactcatttcatttggacacaggaaatgttgatagatatttcgttaaattggtgagtttggtaatatgttagctctcattggacaagatagacgccatataggaggctgagggttaggacacagtaaaatgaatttaacagtttcactgctttctcaagtagttttgagtgctgggtccttaaaacccaactatgcatttttgtctgaaagtaggcactgaagcattgaagtaaggtaaggagacatcctcttcgacaccgctgttgaccgaggagctcagggccactttgagtgtgatgagatacccaggaacacgtgtgcccacagctgaagttttacattacgttttcaattaagttgccaacattttaacaactggcacacacatgagcctacacacttgagcctacacacatgagccagtttttccttattgtagtgtcctgtgagacagaccagctccaagcactgcttagaacaacggctcactctgaccttgctacacatccatttggggtggactatcagaccaggcaagccagtcctaaaggcttctgtgaaggaaaccacagaaagtgaaagaagcagaattagaaagagcattccccacttgcagtgtccttctcacagggaagtcagacggtggaagatctgctgcaaccattatctctgttctttgtgtatcatgcatttaaaatgagatggaaaagcattagcatactgtgtaaatatggaccttttcagattaaaacgttaatggaaatgcttttaactcaaacagcaacatcttagctatttgttagttctcttttgttgtcttatcaaagtttaatggagacactttcataattgttgttgtgtgtacatttgattttcataaagatggtagtaagtcaatgcattaaccctcatctgtgtattatttgttcacaagttccagaggttgaaggactgactctcacatctgtcctgaggtagagagtaggggtggggacaaggtactttccctctctctgccttgtttattttgtactgtaatgaatgtgagtcactcagctgcttacctgaacataaccttatgctgcccttggcttggccacatttgttaaatccttattatattgatactcttcttgaggag

SEQ ID NO: 29889 - DNA, 1099 bp, Mus musculus
ttattcatttggaggttcttaatttgaagatgggatccaggtttggactgactggagatatttggtgatgagatggaagtgggctttaaggattgtcttaccttgattcttgggccttctgtggttgatgcactgcgtggtcaccaccctttgagggtcactggtcactcacctgagagttgcctggagggagggactggttccaggtgccatcacttcactgggcatgtgctagaggctggctgatacagaacttcacgaaaggacagcagcatgctgaggcttcatattccaagttcgtgaagacagttatatgcaggagtcctgcattgcagtgctgttttacagagtgcagaaagctctgcagacaagagctcccattcacactagtcatggcactctagttttgactagatgaggttgcaccagtgactctgttgagtagtccttttgttctcttaccttgaatgtcctctttaaacgggcatgaaactgggcatggtagtgttttccttatagcactcaagtggcagaggcagaaggatccctaagaatttgaaccagactaggttacatagtgagttccaggcaagccagtgctacatagtgaaactgtctctcaaaagaaacaaacatacaaacgaaagcaaaaagaggaaatgagggttggaggtggaatggctggagagatggctcagcagttaaagagcactagctttgctttcagaggactcagatttggttcttagcatccacatggtggttcacagtcatcagtgactctagtcccaggggattaaataccctttcagacctccatgggcactgactgcaggcacatggtgaaggaaaaacacttccatacataaaaataattactacaatttaagctaaaagggcaccaaacactttatagatcttgatgagaggctatatcaaattttatacattgtgacaccggttttttatagattttctagcatatattttagatctatttatcatctatctatctatctatctatctatctttctatcatctatcttatataaaataaagtctgacctaaatatgagaccctgtatggttgtctaaaaa

SEQ ID NO: 29890 - DNA, 1271 bp, Mus musculus
gcaagcatcacacattcccagcttcccactcttattctataaatttgtagtattttggaactggtcttgtttattcagttatgtgatgagcgttaggaatgggtaaagtgttgccactggaaatgagatgtagaagtggaatagacatcatatatatgtaagtagtggggaagaacaggttctagtgaatggcacctaagcttggtctttaatgtaggcatgatggggtactcatgccagtcacacatgcaagtgactggcatgtgaaggtcagggatggcttgggttgccctgctaggaagcagtcgtatgcttcatggcagagtcttaccacagaactctacaaacctctgaggcagtctgtggagtctggcctaatcccaactgcatttgttacaggtatggacacaccccactttagtaagaactctatttttattttttaataggaatcactagattcgatctacttggagactttggaagatttaattggctgggaaatttctatattgtattatcctacaatttactcttcgccatcatgacaacattgtgtttgatcagaaaattcacatcagcagtacgagaagaacttttcaaggccctaggtaatcttgagatttatagacatttttctctactaatcatgactttaatatttgtctctctatttagtttctaagtgtgcatggctgtcagtcccatccttgactcatgtgttggtgggtctggatcagaactttgtcactgtactgcaggacctcatctgtaaggtgtgtgagtaggaactgtggttgttctgatggggcctcaggacagggcggaggacatgataagaactttaggatggcagtcagccctttctgtttatcattgtatcattgtgtcattgtatcattgtgtcattgtatcattgtgtcattgtgacattgtgtcattgtctcattgtatcattgtagtgaggaggaagacttggtgttgcaggcttggtttttatcatggtaccttttaccattatttacttgaagttttaggaggacttggatttcctaagtgaaaaagcaatatataattctcgccagtaagccatataactctggaaaacaatgttagcattcttggtatggacaggatagggtgtttgctttcatgtctccatcatttgtattgtggtaaagagcctgctcaagtgatatgtctttgctgcattactcctacacacatgctgaacatagtcctgggtttgtactttagggtaagcagcactc

SEQ ID NO: 29891 - DNA, 1226 bp, Mus musculus
aatttggggattgaaaatgctcacgtgtgtccagtggatgtgtcactgcacagacatgtattcacagcaagaacactgggagcaaagatcctgtacagtttacagtggcactgacaagaagacattcctggggtaagactgagaattgctccagacttcataaaaacagtattgcaactgtagacttaaaggcttatctccagcttgtggtgctattttgcacaatggttctcaaccttcctaatgctgtgaccctttaatatagttcttgatgttggggtgactcctaaaccataaaattatttccactgttacttcatagcagtaattttgctcccattatgaattggaatgtaaatatgttttccgatggggttaggtgacctctgtgaaagagtcatttgactcctaaaagggttgcggcccacaggttgagaaccactccattagaaggtgcatcttagcagccagaagctggaggcatgtccttgaaggatatcctgtctgtagtcccttcccttctctctgcttcctggacaccttgagatttgagaaaccaggaaagcacctcagggtgaggtgttatcagggagaagcacctcagggtgaggtggtatcagggagaagggggcattgacacaggtccaaggggttttgacactaagctttgtgcacacttcattctgataagggtaagacgtaaaagtcaatgaaaactaagacaaatagtgtggaaagttgatgttctatattttactgaatgtaattagggtaaattgacggtaaagacagaatgaatgagtgtgggctacttagaacatcatcttattctaggtcctccttgtcttttctctgataaagccaaagctttgtatctttcctttcctagctgaagtaggaagcactccaaagctttccattctgagtctagtgacttaaaggccctgatgattggggtgacctcttcctgctgtgctgtgctcaccaaggctccagaagcagatcttggggaaggggttctctaacattcttacctcttctgcttcccttttcttgtcattctcacctattatttctaagtctcgatgtgaatttccagttcctgttgttatatctccattttcatttctgattctgctaatttggatactgtctctgtgctctctgcttagtccaggtaagggttcatctatcttgttgattttctcaaagaaccagctcctggt

SEQ ID NO: 29892 - DNA, 1124 bp, Mus musculus
gagatcagggatttcccactgttgtacccacacagtctgtgcaagcagaactgtttacttccagggctcggcagtgaggacccattacagtaatcaggagaaaatcatttatagctcttcccagtgttaagaggctgcatataccataacatgcttaactgtttaagtaatgcagcagcattaattgaaataattagattttgtgcgtgtatagcccatgggtgtactggataactttagaagttctataatgaatagaaattatttttttttgtttgagttcaaaacatttacagctcttttaaggtaatttatttttaaactattaaagtctttgaactataattcaattctgttaggcactattttcatctttgtgataaaaatttgtatatcacttttggaggagtggcagtttcttgcttgttttattctaagtaagtttttttttttttccagtactggagattgaacactgggccttctttgtacatgctagccaggccctctaccactgagctctcgccagcctcttgatcctaatctttttttttttctttcttttttttaaggctgttcacattaaaatttacattaactctttattcagagcacagaagcagtagcagttttttctaggttttaataccgttgggttctgaaaaacaaaggggctgaggagaacaagctgtgcctgtgcagcctctcttcccggacctcggggacctcggccagcttctgtgtcattgtcagtatttgattcttgctacttagaagttgagtttcagggttttgtgaagatactgaaactcaggatttatctgtggctgctttgtcatagtgctttctgtcaggcacttgtgttaccgctgtactgcaggcagttaggatattgcttatctaatgtcatttatagatggcgaacacaatagctttcttaatcaatgagtaaagaatacctctttgaatagggatataagcaccatatgtcaagtactatagtaggctatatgtataaattactgtatttgtttgcctacacatcacacacacacacacacacacacacacacacacctctagggaaatattttggacttcaactctgggattctatgcaaagt

SEQ ID NO: 29893 - DNA, 1200 bp, Mus musculus
tgggatatagttatatctgttttgttttgtttgagacaagatttcttggtataacagctttggctgtcctgtaacttgctttgtagaccaggctggcctcaaactcaaaggagatcggcctgccattgcctttggaatgctgggattaaatgtgtttacctccatgcccagcatgttttatatactttaaaataaatctttgtgtgatgaactttctgttaacttacagaatttagatgtctttagagatacttaaagcagtgaatattattcatttgttcaacatactatgcagtgtttgatatatatttaattaattgttttttgttcttaaaatttcatggagcattttctccctttgaaacatttctcaaaagggttatttattattttcttactttagatctttttattctacaatttagaaactagactgcttaatttacttaaataggcaattacagtgttcatcatatatttctacttattaagataaagcagactattttaatgtgccacgctttcacttactaaaatgtgctgatatttttacagatctctgggaattctacttgccctatttgtattcttgcatttcgctgatgggatgcttgctgcttctctgtaagtactcttcagtgtgacactgacaggaaagggagtttgtcttggaccctggaaaattgtgccagtttcctaattgaaactccttaatgatgggggctgtttttcgagttggcctttttttattgttctagatagattttattaagcagaactgtgaaataattggatagtttgttcactaagccttttgcactgggttgaagacacacacacacacacacatatacacgcaccacagaactctttaacagtatcccatgtccccctccctccatgtctccaccatgtacacattctttacgtctacttctagtccaaatattaacactagatcactttaaatggcaagaatacaattctacttgatgaatttgtagtctttatttcaaaatctgtttggttttactgaagacgccacactcgatcttagggatagtttaagttgtcaaacagttcaaaggacttgtgactgtagctgtcactcttagatactctctttgggctctcagtcctcacaggtgacatggtctgtgtgctttttctgggtctatttagtttgttttaagcagagag

SEQ ID NO: 29894 - DNA, 1198 bp, Mus musculus
gaggccctcaaaaagaaaggagaaagtgacctattgaagagcaccagtgtgggagcctggggcctttggcagaaagaagataggaccaaagccacacatgggcccagggagccagggttttttcttggatagaggaagatctgcctagatagttgactggcagatcctgtactttgctggccgctttgaccccagtgtagaatgatgggaggtggcctgatcagggaaaggcttcaggaatcttgaaacaaaagtagcatgtatgagtgtggtggcagtggatgtagccttaggagtcagaagtaactttcatgtgatgggagtttgggaaagggaagactggaagggaagatgaccctgcttctgaatagtcaagttggcatctagattaagtcttgacggagggtttgtcatgaaggatacagggtcaccctcataccagggctgggcttgtgggagtggaggagggaaggcccgtggatagtgctaaggtttgagagtctactgttttaaaaactgtatccctgaaagcagtgttgaaggtaacacagactgcctccagctgtcagtgttctcatcattgttgcctctctgcgtagctgagatgtatttcttaccaagctcaatcatcagtgactatcagtgataagtatcggtggatttctttacccttaaggtacggtttatgttggaaacaatgctggctctgaagaacaatgacctgcgtaaaatccctggttataatcctgagcctgtggaaaaactgaagaagttacaaagaactctggtgagtgacaccctattctggtttgtcctgaacctccatgccattatggagccatcatgacaatggttcaggctatgttctgcacaagtgtttgaaactgtaaatctgtccaggtcgtaatggcatatgccttttttttttaatttttttttaatcatttattactttacattccaattttagccccttcttcctcctggtttcccctcacacagctcctcccctgtcccctcatccccttttcctctgagaattaggcctccctgagatcaccccaccctaacacatcaagtcacactgtaggactaagcgtatcctctccactgaggccatacaaggtgtctcaggggaacaggatccacaggtagtcagcagattcagggacagcccctgctccagttattggggacc

SEQ ID NO: 29895 - DNA, 1828 bp, Mus musculus
catttaagctagcatggaggacagacacaagacaaaacatcctttgtgatgggatgtgttggaggaagaaaagcccagcatgctaaggaaagcatactgttaagctcccttcaaattcaacttgagtttgtgttttctccatgttggtgtttgtggttgtctatgtataatatgtttatcgtactgctaaaaatgagatgctttgctcagtttttgatgcttttctaagaaacacataatatgtgtgtgtgttaacctaattttctatgtggagttgtaactaaagagtaactacttcagaggacagaggactccaaccctgggtttggagtgtatataccctatagctatgatccccactgcattgtagctcacagcctaggaaccagcccaccttgccagtagtaagtactctgtcattgccagcagttggttcctgacagccagtgttgtagagagtaagaagggccacaaaccatgtactgaatcagcatggtgatgctttcctaccccctgacccttaggtagttgaattcagtgaattggataaacccagagttcacttcctacggagggtgttgactgcactgttgatggaaactgaagacgacgacttggctgtaattttttcaaggtatgtgcctagtgttccctgattgaacgtaggaagacttcttgctcttgctccttcgcctgcttgctgcgtgagactgagtaactgctagatccttggacttccattcacagctgcgactaaacaattgttgggaattgggctgccgactgtaagtcatcaataaattcctttactatctagagactatccataagttctgtgactctagagaaccctgactaatacagaagttggtaccaggagtggttctagagtaacagaaatacaaggatgaatcttttaaaatactggaattggcttattgatccaccacttctaccactgagtcttatccctagccctcagaaagataaaagtgggcactgtggttcataactttaatcccagagtttaagaaactgaggcaggagaattgctacaagctcagggccagactggcatacccagtgaattttaggccagaataacacagtgagactctgtctcaaaaaaaaaaaaaaaaaaaaaaaaaaaaaaaaaaaaaagaatttttattttgttggtttctatatttttgagacaggttcccactatatatccctggctagtatgaacaggctggccttgaactcacaggtctgcccagcctttgctaggattaaagacctgcaccaccacacctgacaaaaattcttaacaaagaatcctactttgaaagaagctggagctaggtggtagcgcacacctttaatcccagcactcaggaggcgttaagcaggtaaatctctgagttcgaggccagccaaggctacagagcaagtccaggacagccagggcagagaaaccttgtcttagaaaaaagcagaaccacaaattagctagatagctagatatgtaggtgggtggattcgggatggatggatggattctgggtgcaactagttatgcagcctatgctagtaatcctagcacctcagagactgagtcagtagggtcacaaatttagcgccaccctgggttaccctctcctttaaaaacagaagccaggtataatgacattcttgtggttacaccttttctagagactgagccaaggatgattctttgagtccaggtgttcaaggatagcttagacactatagtaaggttctgcctaaaaatacagagattttcttcaataagccacaggattggagtctcagtagcaggaca

SEQ ID NO: 29896 - DNA, 1226 bp, Mus musculus
cagctgcatgtagagggttagccttctgggttggctgtaggttggatgatatctggggagatttctctatttctaatgtgtaaatcttactctacattaagaagcagaaccaaccggggagtggtggcacacccctttaaatcccagcacttgggaggcagaagcaggcagatttctgagttcgaggccagcctggtctacagagtgagttccagagaacctgtctcctggggaaaaagagaaaaaagaaagagagagagagagagaagcagaacccttttcaccacttgatatcactatgtactcctagatccccattcagccttaatgtaggtcaaggaactatggcttggtttatttatgtgtatagtgttctgcttgtatgtgttctgtgagcagcaagtgctctttaattgtttagtcaactcacatgaaactgtcaccatcattaaggtcataacatatcctctatatttcaagtccactcccatcccttattactgtggcttgggttcgggtagtcacttaatgtcggatgtgtttaagtacaggacaccgctcttagctgtggtccccatgctttgaagtacaatgccagaactaccctccattgctgttggtatccttgaacatcactacccccggcccttgacaagcaccatcctttttttgctattgaatatgttttagagatcatggaaaggtgagatctactgtgtttgtgtgtctcacttatttcactcagcatggtgccgtccatcttactcatgtggtcacaaataataggactgttctctgtatcccttcttgcatccttgggcagtcaggcttttgtgagtgctgctgcagtgaacatgggaatgccatgtctctggtactctgacctcagttttagcagtgagcttattgtaccctatggcatttctactgctcacttttggaggaactttcccactgtttgcataatggctgtaccaattttcatccggcccacacaacacaagggctcccttttgttcaaaccctgtcatcacttgttatgttcccgtgttttagcagtagctatagtatatatagtagtagtagacaggtgtgaggtgaagcctcgttgtggctttgattccacactcctgttggccattttatatctacttaggagaaaagcttattcataccctttgcccagcttttgtcagggtcttatatcacagcaacagaaatgaaat

SEQ ID NO: 29897 - DNA, 1116 bp, Mus musculus
gcttgtttgcctacagtagcatcttacttccacccccacctccagggtttttgagaggatttcttagtgtagccctgtgtgtcctggaactagctctgtagaaaaggctggtcttgaactcagaaatcttcctgcctctgcctactgagtctgtgctgtgcccagctacagcacatcttttggagacgtctcacatgattctagctatcatctcagatgattctaactatgtcaaattgacatagtgtgccactcatttctggatataccaggttttcttcctagcccctttacagaacagggaggggattttgtgaatgtcatgtgtatcagtatgtttacacatggcatttatgacttcattaagcctggcttaacacagatgactcaggtacccagacaacactctagcagtcacacccttcccgttctatatctctggttccctttcttctgtgtgagaaacatgcagttgctcagtcacacattgtacgtattgctgttaggttggctgactgaaagactgtagagagttttgtgattagttcaagatgtgtttctgagtcctctgggataggcacaaagcggccagagccaaagcacctgatgttgagttgggggattggttctcgtttccatgctctgaaatgtagataacaccattgttgctgtttgttttccactcgagccttccctccatccttctgatttatggattgtacattacttttaacaaaccattatattcatgaagttttactgtgtgctgtgtccttctgacatattccagacaaggaacctttgaaattccaaatattcctgtttatcagtaaaccagatgtgtgtctctggtgtgccacagctgtgaaagtatggcttattgccagtggcagctgcagtgtgactttttgtggttctgattacatggagatacatgtgccaggaattgtaggttaaagccagctggctatggctctcagaggggccctcccctcaccttctatgcaggcctgccactttgccatctcagtaggctgctgagattgagtgaggcacatatatatgctccagggtctccctgtttccccccctgttctcttgacatatcatgagaaa

SEQ ID NO: 29898 - DNA, 1408 bp, Mus musculus
ctctacaaaaataggtcattcaaaagatcagttgtaccatatgttgctagagttagtaatgatatgtcaaaattgctcaacaatggggctagggaaacagcccagcagttaagagtaaatattactctttcagaggacctgaatttgattcccagccttaatctgaggcaatttacaatcccctgtaactctaaatctagttgatttgatgccctctaaggacactgccataagtaaataagtaaataagtaaataaataaataaacaaataaacaaatacaaggaatcttgctgagcataatggtacattgcctttaatcccagcactcgggatgcaaaggcaagcagatatcgaccaggacagctagggctacatagtgagaccctgcctcaaaaacagaaatgaaatcttttctaaaataaagataatcttggggccatggtggataagcttgatctcgtcttccctgaagtctggttccttggcaggaattatgatggtaaccctcatgacccgtaaagacatccccccgtgggtgaaagttcctgaagacctgaaagatccagaagtattccaggtccagtcgctggtactgaaatctctgtttggcccacagggatctcgaatgtctcacattgagcaggtgagccaggccatgtttgagctgaagaacctggaatctcccgaagaacttatcgaggtcttcctttacggctctcaaaacaacaaggttctggctaaatggatacttcagtccatggctgagaggtaccgcctgcgccagcaaaaaggagtgctgaagctggaggaatccatgaagaccctggagctaggccagtgtatcgagtgaagccagtttccagtcattgtgtctcccacctggacgcgggttaagctgtggccagtgtttggttctggcgggatttttagctttgttacatcctagcaagatattcctggatccctgctgcacattctgatgtgagtgccaaggttaccattctaaataaaaaataaaattgaaatgattaaaaaaaagataatcttaagaaattctgtaatgtattttcctgacaaacataaatgcaaaaatcctccataaaatatttgagaataaaatttaaaaacacattaatatcatacatgatgatcaagttgttttcaccctaggaatgcaggtatgattcaacatgaatcaattcaagtaatacaacaggtatgtgatagaaatcacatgatcatctcacagatgcagaaaggggctttggccaagatccacatcccttcatggtaaaatccttgaagggttccatagcctgctgtatacagttcctgccaggagagagctagtctcccaggagtgctctcactcccaggccaagatttccactttctctccaataact

SEQ ID NO: 29899 - DNA, 1099 bp, Mus musculus
catgaagtacagacctgatgcgttgcaagattccattgggtatattcagttcaggtatttgagaatgtgacttgaggtctgtggctggaagaagacagacagacaggcagagtgctaataattctcaatcattccccccagagtgtgtccataggtgcaggcagagaggcttcactgaagtcatgggaggcacacttcaaagagagctgagatgagtgagtagagcctgtgtgggacagaggctgatgaccacaaggatgatccagaaatagcagcttcacctgggacgtggagaagtctgtgtatcccttgggctagctagcttgcaagctttgttctgccagttctaaaatttgctgagctaaccatggcaatgactccccagagaaacatgggctgtcagtttctatggccactaactagaaagaggcaaaaaatggtgagctgggccagatataacatcacctgtaactctagcacttgggggggtggggggggggagggaaggagggaggaagattgggaattcaaggccagcctgcaatgcatgagacactatatcaagaaataataaaagattgtggattgagatctccaactagatctcaatttgttttatggattagtgtctactgagtaccctctggaacaattggtattaagtgatatatattatctaaaagaaggttaatattctctaaatttatccaatgaattttagaaattattagcaagttatttgtttaaacctgtttgaagaatataatgatgagtctccaaataaagacattgttaaaagtttaaaaaaaaaaaaagaaactaaagaaaaaggaacgaactgtgtgtaaacaaactaaaagcacagacaatgatcacaggatcccatcctaaagtctggactgttgagaaaatcaggaggctggagagacggctcagcagttaaaagcatgcactgctcttgcagaggacctaggtttggttcccagtacctgccatggtggctcacaactatgcataactccagttctagggtatctgactcctgacctctaagagcaccagtacacacattcaggcaaaacacttagacatgttaaaa

SEQ ID NO: 29900 - DNA, 1592 bp, Mus musculus
tgcacagtcacacctacttgtacatatatgtaatttaagataactctttacaagaaagaatacttttgagaaaagcagcttccagagtaactgacaagcaagctctggtaggctcccggctatactagaatcctctaaccatatcctgtgcccttcttctaggagctataccctgcgttttgcattcacaatggaggctctgaccttgagcggctacctacagccagcacctgcatgaacctgctgaagctcccagagttttatgatgaagccctgctgcgaagcaagctgctgtatgccattgagtgtgctgctggctttgagctgagctgaattgagcccagagaacttgatctcacccaaaggcagccagcacctaccagacccaagagagcactcaggcaggaccctcagctctcctcaggccttctatctggcatctctccctttctaattttttttttagatgattttatcgtgacatagtcacatacatagatggacattgcttttcacataacctagctattgttatgtgctatgtggctggtttagtaattttgccaagaagagcacaggttttagaatagtggcaactcagtgaaattaaccaaagatgaagctttggccttgctgacccagtttatatcccttcttgggtcaggcaccagtatctgcatacagaatctggggctgatacacagagccaagccactgcttctcatgtggttgattgtttacaagcctaattgtaaaaactgaaggcatttttcctgctgccttttcccaaagtggttaggtttggaaaatggataacactagtattattttatttgtgctttttaagccatgtcccccaggtgggaatcgcatgcttgtcttcagactcctactgacctgcctcatgaggtttggacatggctgtgtgggttgaggtgactgctgccctcattgctctttgcctgtctctgctttatgcctggaaagctttccaggaggtggaggagaagggtccttacacttcctgaggtaccgtgtcacctgcagtgagttggcaactggggatgtgggcactgcagcttttattaaagtcatttgaaccaaagtggcgggctgcgtctctccgtgatccatatgccctcctagcctggctgtgcccatcatcttgcgcatcttggggggacttatcccaggcctcagcacctctgctttctgccgctgtcttgataagaagacagcatccctggcatctgccagggaagagcatcaggccaggtgattctcacttgggcactttatcagggtcaaacttgttgccagttgacctcagcctctgcaaacaaagcagggaagcatctgagaggctagcatacaaggatcatcatggagctggtgaggactccagactctgcttctcgtctaagtccagcatctgtgcctggaggctctttgtgctgttggagttaggtgaacagaattagcaatatacttttaaatgtgggaaaactgaatgacacttttaagacaatgacaattatcagacaaaatgtataatttcttaatttgaataataaagtatttaaatgctattt

SEQ ID NO: 29901 - DNA, 1246 bp, Mus musculus
atttgagtccacatttacttttggcaggattggaattttaggaagaactcttgagcttagttttcatggatctgttatgtaaatcacaaatattatatatatatattatatatttgtacttctaaggactgagctcaggaccataagtttgttagtaaaactcttgctaaacatcccgattgaacagaggtttctaaatgggtcatttcttacaggattgtggagaacggtcaagaaagagtagaagttgaagaagatgggcagttaaagtccttgacaataaatggtaaggagcacctgctacgcttggataacaagtaactcaacgcacgcatttaacagaaatgttaaaccataacaagcaccatttgaggaataacaggaactttttttttgaagatttgaaacgaactcgactttctgtataactgtacctaaactaaagtatttataaaaaagctcattggagcctccatctatcagatttttgagtttgttgttgggaccacaaaataggaccttattttctatttcttttgtccttaaaattgttgtaatctctgtatgcactttgctttaaaccaatcgtaatctgaggtgagccctgtgacttttgagtagtgctaggaagagactgtctgtaacaccagcatggatctgcttcccattgtggtgaattgtgagtgagtagtgtcagcctgctgtggacttaacattgccagatgaatctacagaaatacttcaattttattttcagtatttagtgatgaaagctattactgcatcaatggtaatacatttctggtttagtgtacactaaggatgttttctagttgtgcatggatgtcggcaacctcgtcagtttgactattgtttaaatatgtaatgttaagcttaggtttaaaaaagctggtaatttgggtttttgtcatttgcttaaaaaaaaaaataaatgcgaatgtgtttggtgcattctttcatgagtggggtctgcagccttcttgtgtctgtgtgattttgtgcctgagcttctaagtgtcacctcattagtgcttccttctgtcatgagggtgaattctgagtggaagttataagatagaccggtcttcagtgtgtacagagagcatatgaatgaaggaagacctgtaaactatgagcaacaacttggtgtgatttgtaagggtgggtatgggagtggagattatatggtgacctgtataaataatgagccgtacttttgtgatat

SEQ ID NO: 29902 - DNA, 1195 bp, Mus musculus
gatctgaaccagccagccaggtgctgcacagcctcaactttgggagcagaggccctgtggggttaacttgggtctgccagaaacagtgcttcccgcagggaaaatctgggtcaagatggaggctgctctggaacactgagtgtttcaagggagaaagagtgggaaccgtggccctttggggccagaccctgcaggagcttgcctcgcctttgaggaggaggcactgctcttcaggtgccctggaggggcttttagtgccatccccacagcagagtaaaggtggcgcgtatgtcatcgggtggctttgcgctggtagaacgctgttctctaccctgctgcagcctttcacactcacacacacacccaaacacacacttctcggccctgtatgttcaggtgagagacaagggaagatggctcatcattttcagccatgtccccaaagtggcctctctttcatgctctgtgggctttggcctgcagctgttccagagttagggatgtgatttttgtctgtgaggtaccccttgccctagtggatcagttacaggcctatgtccagcaccagagtccctgttccgatatcatcacagatagcctgttgttttccacagaggagccagatgtaagtcagacacctccagcctaccagtctcctgccatcagctttggctctaatgggctcttggtggcctccttggtgtgtcactggtacaggacagcaagtggctcagaaaggctgcttgctcctgagctcagccacttattcacatggttcagagcagatctttgtactcttcagactcaagtatggtgatctgtttgacagtagaggtctggcctacccctcaccctcattctccagcacctctaacaagaaccacactcatgcctctggtgtcagttttcttgtctgccttccctggcctacctagatatttatttcttgtgttttatgaatagttaagccctgcccatctgtgcctttcagacggaaacacagaaacctaggctgtgccatttgtcttctcacagttgtttaatgaaacctcaaggaatatggaaataaaggctagaccctggagtggtgaaagagtagggccctgggtgttggctgattctttctgtgaaaggccatgaggaccaaggatgtgtctctaaagcagggaaggactctagaatggtatgtgtagat

SEQ ID NO: 29903 - DNA, 1147 bp, Mus musculus
gcgtacatactctgaagtgacatccactgccactagaacttggaacctcatcgtctctgttatgtacagcacggggtggagggtagttagcttgtctgagtgggaggtatccatctgtaggtaaagagtcttaggctataaacatacaggaggaagggaacctacggctgctagttttgtacacactggtcactctgttacacttggaccccctcctcacccctgccccaagaaaagctttgtcatgcctctgagctttcccggggaaggctttgctactcttaccgggctaaggcattggagtccttagcatggctatacctatgtctaaaatatacattcatttgaagactttactcactcagagcttcctctgctccctgtaggagatggttctctacttctattaccagtcctgaggctcaaactcaggtcctcatgcttggtagcaagcacctttgaccactgagccatctcattagcccctaacaatatttttatttgtatgttttgcctgcatgtatgtaagtgttccacatgtgtgcctggtgcccatgggggtcagaagagggggtcagatctcctagaactgtagttatggataattgtgagccaccacataggttttggtaaccgaacccaggtcctctgaaagagcaacaagtattctcaacaaatgagccatctcttcagctccaccataacagccagccagccaacctacctaccttccttcctttcttttttgtagcactagctgacttggaactcgctttgtagaccagaatgcccttgaacttataataatctgtctctgcttctttttttttttttttaaagatttgtttactttatgtatatgagtacactgtagctgtacaaatggttgtgagccttcatgtggttgttgggaattgaatttaggacctctgctcgctccagtcggccctactttctcagtccctgactcactccagcccaaagttttttattataagcaagtacactgaagctgtcttcagaaacaccagaagaggacgccagatctcattacaggtggttgtgagccaccatgtggttgctgggatttgaactcaggaccttcggaagagtagtcagtgctcttacccgctgagccatcttgcca

SEQ ID NO: 29904 - DNA, 1360 bp, Mus musculus
ttgggagatcgctagaccaccctaacaaccctgaaccagggaacagatggctgtccaatcatactatactaaccagaacaagcaagaagtcatatatttgtctccaaaaaatacaatatatgcacagtgctggctgtcagacccagagcctcacaccttagacaagcgctgtgtcattgagaactcttagcaaaccctgtaaccagttctaatcagaccaaggggtgccagggaggggactaggaaagagttgaacattttctttactgtttcttaaaaatgaaatgtctcagctgtaataaaccttctcaagtacaattttgcctgcttgtttttcccccctcctttacttttagtattcaataatcctgctacataagaatgtataggaaaccccaagtgggtggtcattaaccccgtagtgtgtgacatatactgagagtcagcccctgccacttagcaggttgatggtggaggacagaaactgctgttctgttacccgccatacccaccagcttcccagggatactggggccagttttgtttccccagacattgaacactaaaagagtattgtgcacgacgacgaggtgacggtcacagaggataagatcaatgccctcattaaatcagctggtgtcagcgttgaacctttctggcctggctcgtttgccaaggctttggccaatgtcaacactgggagcctcatctgcaatgtcggggctggtgggcccgctccagcagctggagctgtgcctgttggtggtcctgctccgtccgctgccgccgccccagctgaggagaagaaagtggaggcaaagaaggaagagtccgaggagtctgaagatgacatggactttggactttttgactaaactgcttttgttaagttggccaataaagagctgaacctgtttaaaaaaaaaaaaaaaagagtattgtgagtaaccattcaaataaaagacaggcaacgtgacagttcaaagggaggcagaggcccaggttgatatagttaggtgtcaattggttgagggccctttacccagatagaggcagatgaagagaaacacctctacagttcttggcacctctcctagtttgaagcagcgatgagctgcaaggagatggcctcaagcagcagtaggtaatagtctttgttcctggcttttgtgcagggagccttaggtactgtgacctttagcttacaatagccaaggtaagctttggtgtgggtctaaaaagttcatggggatttctagccactaatggtgcctttttaacagctttaaggtttaaggcattgagtcatggtctcaccaagtagctcaggctagcctcggggagggggtcaccatgtagt

SEQ ID NO: 29905 - DNA, 1191 bp, Mus musculus
tggcagaggccgtacctcccagcactccggaggccaggaggcagaagcaggcagatctcttgagtttcaggccacactgatctatagagtgagttctaggacagccaggcttatacagagaaaccctgtctcaaaaaaccaaaccaaaccaaacaaacaagaaccacaaacattaaaaacaaattttttaataaaaattaaaaaaggagaaatggtgtgtgcttaaaagttttcttttcctggaaggaggactggggtggagatgtcacgcagtactagagcacctgcctggcatgtgcagggctagaggctctgtccccagcatcattgactccgaactacacaaaactaaacatgacaagaaaccctcactgtatttagccttagctttgccagttcccagcacatggcctctagcttcatatatgttgtgtgttttcttaagtctttgacgggaaatgtgattaagtgctttgtcatgtatctttaagtgaaaagagctttaaaagtatcatattacaatgccattattacattaaaatttaataacttagtgctattaaacatgatttatttggaggaaggtgcgcacatctgatgaactgttggcttttgtctcccttgccagcctccgtgagtagagagagctgtctctttgtccagctctgggttactctcccagcccttgggtctcagcctctgctgtggtcatttctccatttgccatgagactccaatgaaggactcagaggctggagtgtgtgtgctaatggaggttggttaggtgagcaaatccagtcgtcctatgacttaaccagtttgtggactgctgttgaaaggttccatatgctaactagttacctgcgatgccttgtagtagctatttgatggcagtattggaggggaaagtctcttacaggcaggaaggtttgccatatagcaaacttcagctcatttttagtaatcactttgatgagacttagtgaacatagaacatcgctggctccctggatttcagttgttaatgcctgtgttctgtctgtttcccttccagactatttcttttgtctacatagtgactgcggttgtgggagttgaggcctggtatgaacctttcctgtttaatttcttatatagagacctattcactgcaatgattattggtaagaagccccacgtggaagcctgttg

SEQ ID NO: 29906 - DNA, 1097 bp, Mus musculus
actaaaacggaaatcagagatggtagtgaggccaaggactgtccagtgctatgggtcttttctatcacgttggctaagctcttttaagcagtttctctgggtaacagaattcctggtaagcacgtagggatggcctgttgagattgctgtttctcagcagcagggagcatcagagccgcctgccatctcgactgtcgtgttatcagttggatatcctcatcagagcagccatcctccagacaaagactcagttgtgtatatggttagttcattcagaatgtcccaagaaagcagaattcagcactgaactcagaatttcagttaaacaacaaaatctccccacttttgggcagagtggaagacaataatggccaaggtactcaggaacccaggtttcctctcccttcctgcctaacggtggtaactgaatggtaactgaagaaaattaaagtgctgcttttgtgagtgaggcttcatgttctatgctgagaacaggtaacaggggctgtgtggctaggggtttaatttggtgcctttatgggtagacttctgaagcaagagtataatttcttcccagatacttaaaaaacaccacgagaacaggtggggtatgtttgccacaaagaatgaaaaagatagcagagatgaagaaaaagaggacataaaatgtctccccttccaggtacttttagttgtagttggcctgcctagggctttggtgttagtgtagcgtttgtttactctgcttccgtgtgctctgcatatgtacatgtttactatgcatacctgttctctatgtatatatgatatggtatctaatggacttgactcttgattatcagccgggtggcaaccctcattagtctgttgctttgtgtggatttggcgtgcccatggcccacatggaaagccacttccccacctttcccctccagggcatctcagccctgagaaagccctcacagtagatgatatttcacttccctttcaccaggggacttcgagccagaaagactggtttccagaatgctggctattacttcggggttgaggtttctgggtcggcccggccctcttttggctgggaggcagctttg

SEQ ID NO: 29907 - DNA, 1220 bp, Mus musculus
cattggtttatctggatgtcgctccacgctggctttccagaaccagccactgagagtcacaaagttgggatttaaaagatgcggtgggaggggcgggtgattttttgaactgctggcgaccgagttctggcggtcctgacgcgcaccttgggcttgctcgcgttcggtttcggcagcaggaccaagaaggcttagggaaggcggcgggacccggcccctcgaggccagccatgggcccgcgtcgcaaaccgcagaccccaaggaggagaccctccagcccggcgcctggaccctcgcgacagagctccagtgtaggtaagcgagcctgccctgcacctccgaggccggtgcggtcatcctgtggggccgggcctgtagagggacggttcctggtcacggcttgccgctaacctcgcgtaggggtaatggtttttttgtttatttgtttgtttgtttgcttgtttgttcctgaccggtttacagcagggagaaaaacgaaatgcagacaagacaaggagttggagcaaagacaaactcattctgacggacacggggtctttttttgcatttatttactttgcatgtattttgcatttattttgtgttcgtgctctggcgacggccagaagagagcgtcggaaccccggggccggagttacagttgtgagctgcccttttttttagagtgctaggaagagaactcggcccccctggaagagcagcctgggctattaacagctgaaccagctttctaactcctactctttattatttatttgcagcactagagatggaacccaggactccgtgtatgttaggcaagggttctactacagaactatatccccaaccctctccccgacccttttttttttaagacgggaactcggtatgtatcggtgtgtagccttggcttgctgacctgaaacgtgctatgtagactaggctagcctagagctcacagatctctgcctgtgttggggatggttgtatgcagtgtgtattcaggaactatttctgagatctggttacaatccagacactgcctcaatgtgatgtaaaaactgttttccatcacctctgattggttaatgagctgatcaaccaattggctgggcagaagaaagaagagtgggacttctgttcccaatcagagggtcctgaagagaccaggtgagaagaagagatggagagaccatgtgggtgaagaaggattactc

SEQ ID NO: 29908 - DNA, 3398 bp, Mus musculus
ttttcattttaagtagtctaatatcagttaagtttcttcttcaacattttagagagttagaagtgtgttttctgtctgtgttgtgggggattgaacccatggcttcgtgcatgttagcaagcacatcacggcagagccacagctccagagcaaaatggtttggtttggtttttaattttgtatttttgttttctaatgagaatttgaatttttaccaaaccttgtggcttcaccatccacattccagacagtagcactgagttacaccctttccaaggtcccaacttggtctctaatgaatgctagccaactgtttccacttcccaaggctccagggtaatcaagacaagggatttgtactagatactcctaattccttccagctaatgagaagaaagacaaggacctaaaaactgaaattgctaactttccagtctggtgggaaggacatgagatccatgaatcctgtgggccctgacaggttgggtctgtagggatggaactgcagtctgggaaaggctttgtggaaggtaatgtacaaaccccaaagctcagagcaaattcatttcccaggcatttcttaagcccctgtcagcttgctctgaggatgtagttccatgctgaagtctgttgccttcgtgggaaggtttgtgtctgctgtgctgccacatacttccactgcctctgccttcatgacctacctcttctgctcaggctctcagacactgcgcagaagacagaaattcatgtggcttaaggaaatcaagaccctgcagaagagcacagacctcttgttcaggaagaagcctttcagcatggttgtaagttctagaggcctttactcagtcctgggccaccttttctataattctcccaaatgtgcaggatgcttgtgcatctcactgatgtggctggaggttgtctccaaccctctgagtcactgcacaccctcagtttttatgatactgatttcttctccttacccctgactataatagaacctctcacccggtttacctccctaccctgaggttgccttgtttcctcaccacccgtaagccatgccagttcctaagctcctgggagtccgtgcctactgagccaggccctgaggtcaagggccaagacataatggtagacatggatgcattagatacttgagaaagtccctcgtccacttttcagtcactgttctgtggctctctgctcatccccgtcccactcctccacaggttagagaaatatgtgagaagttcagccgtggtgtggatttttggtggcaagcccaggccttgttggcccttcaggaggtaagaaggggcagagatgagtgaaggcagaaaggaagtacaccccagagctccacaggagcttatggcctaccacaggctgtgtctggcctcctgaaaagaacagccaatgtgtaacacgtgagggtgtggaagcgggtctgatgggtggctcctggatccaccttgttctttgcttcagtcctttgagtctgtctgtcccctcagccacgtcagtgttctcttctgcccaggcagcagaagctttcctcatccacctctttgaggacgcctacctcctctccttacatgctggtcgggtcacgcttttccccaaagacattcagttgaccaggagaatccgaggcttcgagggcggactcccctaagctgccagtggaatgtgtaagtcctccctgatcctcagagtgctgcttgtggctgggaaaagactgctctgaaggaggagtggcagccatgcccatccttagtccctcgccctctcacctgtgctccctaaggaaggcctgagccctgtccctttgtgcagtattaagataagagtggagcttcacgcttgtaagccaacactcgggaagcccaagaccaatgtgagcatctcacgcgtgcggatgggtgcctgccagcactatagactgagatctttttaaaaacaagtgaacggatgagttgtgctccgtatttctgatggtacttcttaccattttacaaagcctagacccccctgccccacccctccatcgccactttagtaagggtcttattatgtaattctggctgtcttggaactgtatagagcaaggtggcctcagactcacaaaaatctcctccctctgcctcccgagtgctgggattaaagttgtgtgccactatgcccagctttgggtcctcgaattttaagaagaagggggtgtttgtttgtttgtttgtttgtttttaaatgccttgttagtaaataatgattcctaaatttcacagacattacctggaagcttttggagttgcagcttgacagtggtgtcggaggagctggctgggttttgctgtttttaaatactggctacacggtgcccttaaaactgtctctgaaggagaagactgtggccttcccccgacacagaggtctgcccactcgctcccatggactcgagtgtttgcagaccaaaggtcaatttggtttgtgaattgctcagccctatggctgaaggtttcagacacccgatacctgccatggtatggttatttcactcttactgctctgtttgcatcttttactattagtttttgtacttttatttaaaatataaggaagaaaaacctgaataaagcgcttgaatctgttgtatgtgagccgtggcagtcccgccatataaatgcctgccttccagagtgacctcatcctgtcatccatgtttgtctgtcagtcagcaaacatgcagctcttctttaaaacctaagtagaattacatacaaaatcttttcttctcttcaagactggggctcgaattcaaagatttgtacatgccaagcatggactataatgctgaactacatccacagcctgaagtagatgtctttctggttcctaccagtgaattcctatcaaaaacgtccagagtctcttatctttagctctaaatcatataaaatgtctcatatcagtctggaattttaaaatgtgttttcagaatttttacagattaattttagcttatttggggagaaataataaaaaataaataaaaataaaaataattccttaatgaaagaattgaagtaaagttactgtaatagatgttcatgcttttttagtaaatattaagctcatcattttataccctttgaagcagttataacggaaacaagagaagtgagatgtgcagatttcccactgatgaaaggaacacacagaaaacctgccctctgtactctcgataagagcaatgtaagaggtttgcagtaacgggacacgccacctcctggcttgaggtgctgtggtgagaccgcagtgagcacaaactcctgatgaagacatggctgctgactgaaccgctccataaacttaccctttacaaacacttaccgacg

SEQ ID NO: 29909 - DNA, 1204 bp, Mus musculus
catagagcttgcaggcatatgtccccacgcctgttgtagagcttgcttttctcacacacctggacattgttccttttcctctgtaccatcaggacagatgtaaaatggaagctcatcttgatttgcatttctttgaatattaataaaggtgaacatgctttcatttcttactagccatatgcatcccctctcccaatatcttggctgctcacattcttcacctcttttctcaattggagtttttctgtctctgaagatttacaagcagtcctataaattgcaaatgttagtccttgattacgtgttggaaacctgtcagggccagctttgattcatttttatggaaagtaatttgttgtatcttttgcagtattacagcttcccagtatcctatagtcttagctaaaccaatcttatttttctgtttttgggttatgcagtgaaaaatctcaattaagtttataaataatacactctgtggtttacttctggttcactttattttttatgtaaaatgtaaatataatgatgtcacttctttgctcaagacacggattggcaaaccttcctgatgctctcagagccttgactcccctctcaagccgtgtctgaagcggcagaggaagtgatcgccgccctttacattcccatacatggcatgtgccagctggtgaaagcatggggccaaatggcctcggggctcctgtgtggaattccattccatagcctcgcccacgtcctgggaagctgaacacccaccaaggttcaactcagaagcatttctgagaggggtctttccctccagtcagagctaagtgtgtgcccacctttctcagtgctggcatggctcttctggctcccatctcaataggaaatgtctgactataaacttctgtcagtgttatctgtcaccttgtcagtgacatcatgggctatacagctaccttgggtgttgctttttgttctactatgataaaaatacccaaaagaagcaagggaaaggaaaatttattgggctcacatatgttctggtattagggcaagggcatggtggagtgtggggcactggagcaccaggctgcatgctctcaactcacacatcaggaagccaactgctcaggcaggacactgttggctatcaccttcaaggcccatctcacagtgacccagttctctagaatttccacctcctaaaggttccaaa

SEQ ID NO: 29910 - DNA, 2253 bp, Mus musculus
cctaacaaggcactttgagctgtccctcctgccctgctccttccttccttggccctggggtttctctgggccccagaagcccacactatgcacagcacccaatgcatagcacctggccctaaaccctcctctcaccatgacctcctgtgctggctctgggaaggcccagactttagtgctctgccctgctgcccacccacacaggtgtccagagcactttagcaaatgtgttttataagtaagggccttcccccttcatcccttaggccccatggtgacattttcccaagtcagacaggtgtcaactccacagccatgcccaaggtgtcccatctctcctgactcatcccagctgtacccttgtgggtacagtcaggacaccccgggtgtggctgtgcttgggacaccctgtgctttctgctagcctctttcattccctacccacgccctctgggagtcccaggccccggaagggtagctgggtgggcatgtggctggtgccaggcgcgtgtaaatggttttgttttgcacgtttggtttgcgcagtggtttggtttgacttgtttgtgcaccctgtggaaaataacggtgctttgtgtcactagcatagcatagaatctggaatagatttggtttgtaggagatgctgcactcaccaccaaccagacagtacagggcagaggcgggggcaggctggacccctggccccttcctcccaacccagggtccttttgcttcctgtaccgtgcctcccctatcccacacctcctgccaccccctcctacttccctacattcaaacaatgctggatgctgaccctggaaaccttcaggccgcatctctgctccgggttaccccagcgctaaccccacatccacaccctcatagcccaacacagcttcctataacttgcccctgctgggcaaggcctagctactcctcctgggtgactagtaagaggcctcatactggctgagaaagagggactggggggtggggaggttgcctaggcaaccgccagggaaggggcttcaacccacaaggcctagctgtagcatccacccccactgcacaggtgctatggaatcctcggcactaagctctccttgaggactggtcggacccgccctgttttagaagctccttagaggttctcgtaggtggctacacagtctgcagagtggctcagctgtctgcctttgataagcctcatccccgcccctctttggcaagtgatctcacttttgttggagctccacaaacctgtcagaggctccacagagcttgtcagtcacccctgcacgcttttgtcctgctttgggtccatcaaagagctcagctctcactgagtgacaggtaaactccaaggggcttctgagatggggtggggcttaccactgtcccccatcttgcagataaaaactgaggcccccaagagtttaggcaccagaaatgtctgtccatgactgctctcatggcctcggcagtctaacctagctgtgggaaacagttgtggattgatgtcaggcccaccaggagtttaaccagacagagtgctttcttcctgggggcgtgttctgctttgctttgcacaagccgattttatctttgtcatgaactgactcatgttcgagcctggactagaaaagtgttaggaacctgcgtgcggttttagttgcacccaatgtcctcacttaggagctgaagagacagataacccagaggactgagatagccctgggaacagtaggtaatgaccctagaggtcacaggtatcataaacagtgacgctgacggtgtctatctctctttctctcctactctccttctcctaccttctcctcctcttctcttttctcctccccctcctcctctttcccctttttcttcttcttgagacaaaatcttgcttaggtagcctggccttgaacttacagaaatcctgccttcgtttccccaagtactggaattatacacacaagctaccacacctagctatacatcatctttgtctatttctgcccttgctgggtcatgggccttgggcagatgccaaagatccaaggggtggtagggccagctaggcaggccacctggagtgggccaggagcgctttaccctctctaatcgcctccacctgagaagtgcatcacctgaagtggtaggagagtgcgcgtacaaggggccactgtgggccttctacttcatccaccccgcccttccacagacccaagcccaccctttcatagcctg

SEQ ID NO: 29911 - DNA, 1300 bp, Mus musculus
ctccctcctccaggagggatttgcaccccctgaggatgatgagattgaagaacaccaacaggaagaccaggacgagtactgagggaggcgccagccctggctgaccacagcttccctgcccacctccactctgcccaccccaactatgcccaccccacattatagtcctttcctttcagccagtcagccagctgggtgctttgtgtcagtgccacagcattagggagccggacgagtggggttcagggtggtgggggaggcttgggcaggtgagaggacgaggccctgtctgggtcccccgagtggcactggcccaggggacgtccaggacccctgtccactccccactcctatttatttccgttgtctctatgctgtgttggccaacactttccagggtgccgctgtaccccacaagccagccacctgctccctggcagccagcagctgtatatttgacaaagtcattggtatatttttacttactggattgcccttgcactttacctgttcttttccagggctgacagcagggcttggggtagtctttctggcttggctccccttccctagagccgagactgggacaggactcacccattcttatttattttgtcttttgacttctctctcagtagatgagggaaaggctgatatgaggaaagggaagggaagctgaggaggcagtgctctgggtccagggagcatgcgagagtagacatgacctccaggcactgggctcccccaccaagcccctgcctcagcaccaacacccagcactgccccaggcttcctagccactccctcctgcagcctagttagaccacacagactctgcctggcccccattgtctgtctgtcccccattctctcacccccacctttgccccttgggcaccagcctgcatatctgttcagttttatttaaataaatttgtgtggcaagccatgatttcctcaattgacccacagcaaggggtcagaacatagcaccttctctgtcttttgtaagaggatagccatgcagcacaccttcatgagcagaagccaccactgacaaccaggctctgacctagactcaactcccacgactgaggactctttgtgaggcaggtagtatgtgtatttctctgggagatgtaagactgtccctgaaaatgggatgataccaacagcccaaaaaaggacttgttcaagttggtcttggtgagtaacaagggtttgttagggatgagttacaggccagtggatcacgaaaatacctctctataaagacccctagctagctggtttatacagt

SEQ ID NO: 29912 - DNA, 1195 bp, Mus musculus
tcgaccataaaagcgaggttataagcgactagggcaggacctgggactgcacccagccagtgggctcggagagtaggagtccgggccgccgctgcatcccagcgtccagggcataggggtccctcgctcccgtggctcggtcttcccttctggcctgggtctcggtgaatggaccccgacacttcagctgacggagcgaatgtctttcgcatcatcagaacaacatgctttatatactttcatcacgccgaaaaccaaaggaaacctggagcagaagcagcattcgtagtcccaaacaccgaaactaatgtctgcttagcgagaggaaggccgccccagctttagcctcaatccggctcacggcgagctcctgccgcagggtgcgagcctgcaagcccgcctttcttctggcccgggatcctttagtttacgcagaaacacattagggaaaaaaaaaaaatcttggtaagcattagagggaaaactgcagcagcccgacgcagcggggccttcgatagctcagttggtagagcggaggactgtagtcagtacaatatggtaatccttaggtcgctggttcgattccggctcgaaggacttcgtgcactacttttagtttacctacaccctaggtcaattgctccgtgggggaaacgcttacttgaggataggcagtgtattttcctggctacgttgaaaaccccttgagtacatatagcagttaagtagtcgaagtacaacgtaccttgttcgcatattaggtgttaaagctatagtgacatgtacttcaagaaaagtccttattgcttatgtatgtattacatggctctgtttcaaaatcttgctgagggctccatcctactttatattgtgaactacattagaaaactgagtctcaggaaaccttgtaaaggttacaggaaggtacagcactacagctgggggattagctcaaatggtagagcgctcgcttagcatgcgagaggtagcgggatcgatgcccgcatcctccacttccttttacacaccatcaggctcatgatctgttgtgtccacgtttcgttacacagtagagctaggagcacggtaaacaaagatcggcttcacatgctattttcttattcacaggtaagtcttttcctgtttcctgctcactgctctgtctttcccgcctcggggaggcgggccgttaacc

SEQ ID NO: 29913 - DNA, 1193 bp, Mus musculus
gagatgatcgggagccccgactagagcagctatttcctgatctcggcactccccgaccattccgtttcacaggcaaaagggtaagtaagtgggaagaacatgaaagccgtattcttgggtggaagagagggctcagttttaagaatacttaatactctgttacaaaggatccttgtttggttcccagcacccacactgtgccgtggcctgtaactcctgctccaggggatagaatgacttcttgtggcttccacaggcccccacatatatcagttgacatacacagaagtaaaacagtaatctaacctcatcctatctccggccactgtggatagcttacagctgttacctctacacattctggacccggtttatcttgtaccccagggtagaggattaacaatcctgtacctctggtaaacagccatctagaaaaggctctttctgcctcaactactcttgcccacccttgtcagggtggaagtatagcgccactgacctcctgtctgcttccttctccacctcagatattcttcttaagcagtagggtacaccctggagagactccatctagctttgtgttcaatggctttctggacttcatccttcgacctgatgatccccgggcacaaactctccgtcgactctttgtttttaagttgattcccatgttaaaccctgatggtgtggtccggggccactaccggtaagtagccaaaacagcctttctgccttttctccagtctcatgtctcacttggctgtgcaggtcagccagccttctgactggtttgtatttccaggcctcttgtaccctaaccagggcaagcccctctaatcttccactgagctgagaggggtgtaatcatgtgaacacatcctgggtgggagcaaatgtcggtgaagactagctgggtggagggaactgtccgtggactatggtggcatgaccgcacatgaaggaaggctctgtccttctttccagcatgacttaagcctttcactttacaagtcttcagtgtccttgtcacctaccctaatgtctcctttggtggcccagacatctagagcctgttgagtcctgtcttcctacagcacggactcccgtggagtgaatctgaaccgtcagtacttgaagcctgatgccgtcctgcacccggccatctatggcgccaaagctgtgctgctttatca

SEQ ID NO: 29914 - DNA, 3198 bp, Mus musculus
agtcctaatgcaagggatccgagcaccagcccctagtaggcttttcccaatcaccatgacagcctctggcttgtcccctgaagacgagaatgagcagctgctccctagagaacagaggggactgatcatcaaggtaggactacgagggatggtaacttcccttgtatcagtttcttggccttgttgtgttccctttatggtgctggggattaaacctagtatttcatgctaagctggagcccgtgctcaacctctgagctctatcagtagcccttgatcctcagcatcattgaaaaccaatcatttatctttggtgatttagtacatgcagggtgtttagtgccatccttccttaaactactgtgtgctccttacccctaggtccttcccgtggcaacaaccgagtcctctctagatgttgtcatatgtgagaaggtctttttgttgttgttttgttttgtttcgttttttcaagacagggtttctctgtgtagccctggctgtcctggaattcactttgtagaccagcctggcctggaactcagaaatccgcctgcctctgcctcccaagtgctgggattaaaggcatgcgccaccacgcccggcttatgtgagaagttctaatctcatccaaggagtgaagctgcaacttcaaaccctcaggcttagctcaatctgtaaagtttagagcttacaccaatcctgtttaggagtaaagtccagctgggcatagtggcacgcctttaatcccagcattccagagacaggcaggcaggtgtctttgagctcaaggccaactaactggtctacataatgagttctaggacatccagagctacacagaccgtgtctcaaaaggagaaagaaaacaaaaacccaagtccattctgtacaacaactgattaaaaatggataggttggtgcagtatacgttggattcaattctaggaaacaatcctgcctggcatggtggtgatgcttttaattccagcactctggaggcagaggctgctgggtttgagaccagcctgatctacaaagagaaaccctgtttcaaaaaaaaaaaaggaaaaatgattccatttagttccttttatcactgggtttctaaaagaggactgggtgtggctttgagtttagagtataggatgccatctgtagtaatgacaggtgaaaggcctgcgactttatcctagctcttggagttggggcacctgggtaagtagcactttgcaggtagaaaagtcctcgggccttgaactgtagtgtgaggactgacagtctagagcagcgcctgtgcagagtagtcatccagggtatggtaactgttactttattttacagttcatgtcattgagtcccagcctcctgtacaaaggcacgtgctaggagtgtgaggtaccaggagaacagcgcctggtctgacgtggcctgaatatatatatatatagggcagttcaaaaaagaagtccaggctaagcagcaggatggctgaagaagtttcttctcgaggcttagataggagcctgtctaagccctgggtggtaggaaagggaagaaagtgggcaactcaggtttcaggggcagtgggtaccgacctgataagctgagtgaattgggtaggaggcaggagcccatgtttcgtgaggaggttgggccagaactagccagagttggggatggggccaggctgcttgtggtagagcgatggttcagtggctgctgtcgccgccttctgtctgagcatcggggctctgagtggaaaggacacaagcagggaaaagatcaagaaatgagacagtgtaaggtaggcttcactgtcgtgcttcccctggccaggcacggccagaagcctgttttcaagctctcaacaaatcagctgcccactcagtgagacatctggtattccagtcgtccatacctcatccaaccagtttgataagttcctgaacttggcttctaaaacatggctttgcagggcttttttcttctaaccgatcctcttctcattgatgttcctaccgcttagccatctgacctcgctctgtctcctcttaaatttttaaatctctaaggcccttttctcccagaatgtcttctgtcagacacttcgacctgttaagtccttggctgccaaactcaatctgtcttctccccagtccattccttgtccctgtctgctaaaaagcttgcttcagttttcagttccctcccttgaatttctttagtcaaatcctaatggttcttcaattgcagtggtctctagatacaagtcttttcactcactttactttctctcagctggattaaaaaaacaaacaaacaaatatatatatatatatattcacccttggtgccaacaattatcatcctaaaatagaagtctggttaaaaaaaaaatcaccgtgtcttgggtgagagagaaacaatacagattcactgactttcctctctatagagctgaggctagacctgaacttttggtcttcctgccagagcatccctccatgcttggattcctccatgcttggatttgtatgcaggcattgcgatgtgtggtctgaagggttttgtttgtttagatttatatatttttatatgagtacactgtagctctccacagagacaccaagatgaggtcatcagatcccattacagatggtcatgagccaccatgtctgtggttgctggaatttgaacttaggacctctggaagagcagccagtgctctgaactgctgagtcacgagccatctcagattctggaagtcttttaaagatatagtctacatgaaccctttcagcacagaacagccagagtccagtctgctgtgtccaggccttctgccattaaggtgctggtttgagagctgggcgtggtggtgcacgcctttaatcccagcactcaggaggcagaggcaggcagatttctgagttcgaggccagcctggtctacaaagtgagttcaaggacagccagggctacatagagaaaccctgtctccaaaaaacagaacaaaacaaaaatactgatttgatcactcaacacctcagccactgttgctaggagctctgtgggtcctttgaaatctcagtttctctctctcttttttttttttttttttatcttccatgttccatctcaaatgccagctccctgtaaatgttgccttggccattttcaggcagaattagttctt

SEQ ID NO: 29915 - DNA, 1202 bp, Mus musculus
cttctcacataagccgggcgtggtggcgcatgcctttaatcccagcacttgggaggcagaggcaggcggatttctgagttccaggccaggctggtctacaaagtgaattccaggacagccagggctacacagagaaaccctgtcttgaaaaaacgaaacaaaacaaaacaacaacaaaaagaccttctcacatatgacaacatctagagaggactcggttgttgccacgggaaggacctaggggtaaggagcacacagtagtttaaggaaggatggcactaaacaccctgcatgtactaaatcaccaaagataaatgattggttttcaatgatgctgaggatcaagggctactgatagagctcagaggttgagcacgggctccagcttagcatgaaatactaggtttaatccccagcaccataaagggaacacaacaaggccaagaaactgatacaagggaagttaccatccctcgtagtcctaccttgatgatcagtcccctctgttctctagggagcagctgctcattctcgtcttcaggggacaagccagaggctgtcatggtgattgggaaaagcctactaggggctggtgctcggatcccttgcattaggactcgattgcaggtaaaatttttggggtctttccgtgtttttagcattagcagaacccatcaagacactcttgtgaacactgggggttgggctggggtaggggaatgctccttcctgatttacagccttttatatccagtctgtcaagagttgctgtgatatctgtgtgttaaccttcccagtggtaatcagctaggttttttgcttgcttcagactccattgtccctgccagatgcaccccaaccacagcctactagctttggctttcctacccgtccttagcttctcctctctttctgaccagacctgccagaggagagtttccgccaggaggggtcccggattccccaggtaacacatctggttactgctcctaataacaccctaccatcacctccaactcagacaagcttcccttcctagtttgactgtagctagaggcagaagctgactggacggatgaagcttaagctgctctggcaggggcggaggctgagaaagctgagggctatccaccagtccactcccatttttcttcatagtgcttctctacccagccatctcttagccatgggatacccatgga

SEQ ID NO: 29916 - DNA, 1483 bp, Mus musculus
gggagaatgctgtcccacacccagccactggagtgccaactgcaccctgcatgagtggctgcaacagcgtggcatccccggcctgcaaggtacgagagcaagcactggggtgtctgggtaaagtacacagtacctagaccgagagaatcagggaggtttctgggatctgttacttttgtgtagtctgctctttttttttggtttgggattttcaagacagggtgggttatcatatagccaaggatggcctcctgtagcttcccaaagtgccttcctactaccttgcccagcttatgttcttactcctatagtattgtttgccatgtttgttttcttctagaagttatttccagtaattggggctatgtagattgtggttcagtttggatgtcatatttagggcaagaccacttcatggcagtgttctttcatcagagtggtccagaattttgatgcgtgtagaacagttgcgattgatcgggtctgaggaggaggaggagtgttcctggacaccctcactggtgactgagtttgggtccatcatctgaggctgcgctgttttgacaggagtggacactcgggagctgactaagaagttgcgggagcaagggtctcttttggggaagctggtccagaaagggacagagccgtcagccctgccattcgtggaccccaatgccaggcccctggcaccagaggtctctattaaggtacagaggaagagaataggacatgtttgcaggtggaagaccagtggttacttttctggccacaattggggcaaactcaaggacttcaaagatggggtttggtgtgagcgtgagttacacgtgctgatcacagctgccaactgtcggtcttgtctcctcagactccacgggtattcaatgcagggggtgcccctcggatctgtgctctggattgtggcctcaagtataatcagatccgatgtctctgccagcttggggctgaagttaccgtggtaccctgggaccacgagttagacagtcagagtgagtatctgggacctgtgcagatgagtggcttgggtctgagcggaagagctatccctcaggacaactgataaaagtcagggtgggttgcaggaaggaaggcagagaccagggatttcacttcctcggtctggggtgggtgtgtgcttttattttacaagtttatttattgtagtaacgggtgtaagtgcgtgccccagctcagctttcaggagtctgatctctcctaccacgggttctggggacggagctcgggccaccaggcttcgcaggtggtgctttggttgtcaaccttctctgcccattccagaatatgacggtctcttcctaagtaatggacccggtgaccctgcctcttacccgggtgtggtgtccacactgagccgagtcttgtctgaacctaacccccgacctgtgtttggaatctgccttggacaccagctgttggctttagccatcggggccaaaac

SEQ ID NO: 29917 - DNA, 1099 bp, Mus musculus
gacctgccccattgagtcttgagcaggaggaggagatggattaggtctacgggtatatagatgttgagggcaggaaggatagaggtcacttactgaggacagagtacagagaggggaagaagtgcctaagtcctgtcttctgtagaagaggctgaccagccatttttgtcctgttaggcaattaaagccctaaaggaggaaaacatccagacattactaatcaaccccaacattgccacagtgcagacttctcaggggctggcagacaaggtctatttccttcccataacacttcactacgtaacccaggtacgggtcagataaggatggcctgggggctgggggcggggggtgggtgtcgcgggctcttgatgggcaaaggggtttgctgatgtcactctgggcacttataagctgctttgatctactgtcccctaatgcctttgactcctacctcctgcctcaggtaattcgtaatgaacgcccagatggtgtgttactgacttttgggggtcaaacagccctgaactgcggtgtggagctgaccaaagctggggtactggctcgatatggggtccgggtcttgggtacacccgtggagaccattgaactgactgaggaccgacgagccttcgctgccaggatggctgagatcggagagcatgtcgcccccagtgaagcggcaaattctcttgaacaggtttgttaggtgtttgggtagaagtggaatgatgtcatttcctctgaatcttatttcttttgggtccagaaatgacttgttggttcatgtctcccactcactgcaggctcaggcagctgccgagcgactaggctaccctgtgctggtgcgagcagcctttgccctgggtggtctcggttctggctttgcttccaccaaagaggaactctcagctcttgtggctccagcttttgcccataccagtcaggtgctgatagacaagtctctgaagggctggaaggagattgaatatgaggtggtgagagacgcctatggcaactgcgtaacggtgagtgccgaaacacttcagatatagcagggcctggggatgtagcctcctgggccttttgacccccttta

SEQ ID NO: 29918 - DNA, 1153 bp, Mus musculus
cttggctggttgacagtaatggcagcatcgttcacatgatttactattccttatttccctggctgtatttttttccaccccggcactgccctgcatccagccgtctgtgctcttcccccaacaggagctggagactccgacggataagcggatctttgtggtggctgccgctctgtgggctggctactctgtggagcgcctctacgagctcacccgcattgattgctggttcctgcaccggatgaagcgcattgtgacccacgcccagttgctggaacaacaccgtggacaagctttaccccaagacctgctgcaccaggccaagtgcctcggcttctcagacaagcagattgccctggcagtcctgaggtcagagatggtggtgtggggagggagcttttgcctcgggaggcccattggaggggagccttggaagttcttctcttcatctgcccataggctgtttccttgctaaccctgccctagcgcttgcctaagtcagtctatactccattcccacatctggtctttcccttcctttagcacagagctggctgttcggaagctgcgtcaggaactggggatctgcccagcggtgaaacagattgacacagttgcagctgagtggccagcccagacaaattacctgtacctgacatactggggcaacacccatgacctcgactttcgggcacctcacgtcctggtccttggctctggtgtctaccggattggctccagtgttgagtttgattggtgtgctgtgggttgcatccagcagctccggaaggtcagaggccctgttctctggtagttctcctgttctctgtggtgtttgcctgtcctcccacaaaagataccggatcttcctgttcattaggaattaatagaagtcctatataaacaacctctctctgtgcctgaatctcatccgtaacatgttatctacctatgtttatagctgtttcacgggaaacaggctggctggccggccgactgcattggggactttggctaagcttctctatgtccttcctctaatgtatgagtgctctatctgcatgtactcctgcaggccagaaaagggcatcagatctcatttcagatggttgtgagccaccacgtggctgctgggaattgaactcaggacctc

SEQ ID NO: 29919 - DNA, 1668 bp, Mus musculus
ctcagtggcgagagctcagtgaccttgaggtgggctggggtctggcaggaagccgcggggcggatgtcgcttgtgggtgagtgtgagcaccccactgaccctcctgtccctgcagtctgctcgccagttctgccacacggtcgggtacccctgcgtagtgcgcccctcctatgtgctcagcggtgctgctatgaatgtggcgtacaccgacggggacctggagcgtttcctgagcagtgcggccgccgtctctaaggagcaccccgtagtcatctccaagttcattcaggaagcaaaggtgagggtctccccgccagccccagaggaggctgtgtactcgctgggtcacaggcacagtggccgggagggatggcttgtgtctgacaacgctgtttcaccaaagggcaaggagaaaatgaccctgtcctacaatcccgctgcccgtgttgcctccaggagatcgacgtggacgcggtggcctgtgacggcatcgtgtcggccattgccatctctgagcacgtggagaatgcaggtgtgcattcaggtgatgccacgctggtgacccccccacaagacatcaccccgaaaactctggagcggatcaaagccattgtgcatgctgtgggccaggagctacaggttacaggacccttcaatctgcagctcattgccaaggtaataagtcaacaggaagggacaaaagcctgtgttctctgctggccccaccgccacaaatccctgcactgtctcctaccctcactcactcaggcagcaaagcttgggaagggctcacgtctagagcccactgcagtgtcagggctggagcccactgcggttttggagctggtcacgatcatccggctgattactcagtcgagagagaggctgacacccaggtcactagagtggttgtcagcccacctgggcttcacaaggcctaacctgaagttcctttcctaggatgaccagctgaaggttattgaatgcaacgtgcgtgtatctcgctctttccccttcgtgtccaagacactgggtgttgatctagtagccttggccacaaggatcatcatgggggagaaagtagagcccgtggggctcatgactggctctggagtcgtgggagtaaaggtaaattgggcgatgggccccttgagcctggtgtacagatcccctaattggtataacaagctcaggtcaaaaactagatgattctgtaagatgtgggacacctggctgctttgtttaattcatttatatttttgagctactggagactcaaacccatggcctcaggcaagagtgctgctgctgagctaaggaagagagctcaatgaacagaactctcacccacacaaggcattattgcccaaccataggatgatatggtggtcatcatcccttaagagtttaccctgtaggaggcaaatgaagtttggttcaaaaatagcttgttatagaacagtctgtgatacacctacataactgagttataaaccaaatgtacaaggagtttggagatgggcggtgttgtttctagagtgtgttttgggagacggggtggtactggaactgaatcgcaagaatggtaaggctgttgggtttgcagagctccttgggcctgggtccagggccagaaaacagccagagtagaggccagcccttctgtgt

SEQ ID NO: 29920 - DNA, 1117 bp, Mus musculus
gttgactgcatgacctcccagaagctagtgcgcctgcccggtgcgtgaggcctttggggtggactgtctgcctggggttacggactgtgcaggccctagaatcgctcttggtgtgagctccctcttccatggtgctcttcattgagaacttgtatcagtggctgtagcttttctcccacgccaactctgatctcgcccccaactttctcctaggattgattgatgtccacgtgcaccttcgggaaccaggtgggacacacaaagaggactttgcctcaggcacagctgctgccttggctgggggtgtcaccatggtttgtgctatgcctaatacccgaccccccatcattgatgctcctgctctcgcccttgcccagaaggtgagccgctataccccagagtgctggtcccttgctgacttacctgggcatagatggcagcaaacctgacctcgtgcgtatgtaccctatctagctggcagaggctggcgcccgctgtgactttaccttattccttggagcctcatctgagaacgcggggactctgggtgctgtggccggctctgcagcaggcctgaagctctacctcaacgagaccttctctgagctgcggctggacagtgtggcccagtggatggaggtgagctgtgtgtcaccacacgctctctctcggcttgaggcctcgtctacctgagctgccagcagagaggattcaggggtttctgaggaccctgggctctgatgagtgcagcaagacaaaggctcagcactttctctcatcaattctttctgtccccagcattttgaaacctggcctgcccacctccccattgtggcccatgcagagcggcagagtgtcgctgcggtcctcatggtggctcagctgacccagcgtccagtgcacatatgtcatgtggctcggaaggaagaggtgagagtgcatcagagctcctggtacccctgtcactttcccaggaagaccagaggttactgactgtccttggaggcaggaaggggtgggagagcccaaggccagtacctttggcacatttggccctcgctgttctgagaaagaatgccaagcatagagacggaagggcagggcatgtcacgtcggg

SEQ ID NO: 29921 - DNA, 1153 bp, Mus musculus
gtggccatccctgaagtctctaatggagtccctacctaccttacagtgctttggtcagttcatcctcactcctcacatcatgacccgggccaagaagaagatggtggtgatgcacccaatgccccgtgtcaatgagataaggtgatgcggcccctctgccctgggatacccttggctggctgtgggaagggtcctttgcctggacgggctctccaggagctgggtggtaatgcttttgcttctctcacagtgtggaggtggactcggacccccgggcagcctacttccgccaagctgagaacggcatgtacatccgcatggccctgcttgccaccgtgcttggccgtttctaggtcccagcttcctttcttgtctcttcaggcccagctgctgggcaaggaatcccgatgccccccccacgggggcagcacacttagcagacaatcctggagcatacagatagcccaagcacatagatgtactaaactgggaccatgctttaggctccagacgagagtcttttctaacttggggatgcagtctcagatactgggggcccctctgcctcatctccattcttacacctcaaatctgtacagttacttttgtactgactgtaataaacagccaaacagttcctggttcgtcatgagtactataggctagcagaggatgcctctggtaggaagacagacagacacacacacacccccacacaccccacactggtctctgtagggttccagctgacacttggtgctcttcatgtgtttctctgacatcaaagctctcctagagactctggcttatgtccaggctgctctgggcgaagcggcaggccatgtcctaagcagtggggcttggccttcctggtagaacacccaggtcctggtgaaagggaggccgtgtactgggtgggggctgctgagattcgttgtccctcttcctttctgatgagctgtgaccttcagtggcctgtgccaacacatcctcgaacccttaccatggtactctccagctgccatccctgggggcccctagggtaggtgctaagggggtgtcactcttggggctgcaggtgagagttgagcagctattctggtccatgaacttgaacaacagaccatgtcctatgctcaaggccgtgtgcact

SEQ ID NO: 29922 - DNA, 1402 bp, Mus musculus
tggttccaagcacccacatcgggtggctcacaactccctatgtctcaagctccaggagatctgatgttctcttctggcctctgaagcacctgcacaaacatgtatatacccacgaatagacacgcatttgtaattaagcacacaatgaaatctttaaaaggaaggagtgtgtcagcttccatgctatggggttgctgatcagaatagggtgaccactctgaagtggcacatttcactttaaccactaagacatttataatattgctgtcactctggcccttagctgatggggacacactataagaattgtgtcctgggggctggagagatggctcagcctgtaagagcactgactgctcttcagaagctcctgagttcaaatcccagcaaccacatggtggctcacaaccatctgtaaagagatctgacgccctcttctggagtgtctgaagacagctacagtgtactcatatttaattaattaattaataattaattaattaatatagaattgtgtcctggaagccaggcatggtggtacatgccttcaatcccagcacttgggaggcagaggcaggcagatttctgagttcaaggtcagcctagtctacagagtgagttccaggacagccagggctatacagagaaaccctgtgtcaggaaaaaaaacaaaaaaacaaaaccaaaaaaaaaaaaatgaaagtctgtgtcagtctcaacctagtgacaatcctgcctcagcttctcagcttctcaaatgctggattagagaattgtgtcttgggctacagatatcgctcagtgattaagagcactgactgctcttccagaggtcctgagttcaagtcccagcaatcacatggtggctcacaaccatctgtaatggggtctgatgccctcttctggtgtgtctgaagacagctacagtgtactcatatacattaaataaataaatctttttttaaaatcaaacaagaattgtgtctttagcagttttgtcactgtgcacacataaggagtatacttatgcagatggtaacaatcagttgctcaacatggcctcttcgtgcacaagcatgtggtgtatttttctgctgccagtctgacatggtatactgttttacagagagctttttcatatgtagaacactgtcattaagatgtatacgctgtacataattgcacaagatatacttccatattactgccagcttggtctgtttccaccagcattattgcagattcatgaataatgcaccaaactgagacataagaactaatgctgctatgtggtagggatatttcagctccgctatgattatctgaagccaccattgtgtgttgccatcactgactaaaaggttgctatgcagcatgactgtctacattcccaccacatagt

SEQ ID NO: 29923 - DNA, 2063 bp, Mus musculus
tgcaggtgcactctgaggctctgtgggttttctgctctctccacaggtacgcttcagcccaaacctggactcctatggatggctggtatctggggggcagtcagggttggttcggatccattttgttcgtggactcacctctccgctggcccaccgtgtacagcttgaaagccgagccaacttcaatgctatgttccaaccgtcctttccaactgaagggcctggtttctctccaagcagccattgccttctccccaatccctagtctgggccacacagaactcttggattgaagtctgccaagaacaaatggcgcccatgcatagagcatagcacctgggcccttcctggacagtgatggtgccaggcctaaatctttaggcctacatgccccaaactccttaaatccctctccttccacagacttctatggtcacagctccctgcaggtaggggggctccccctccacaacaattcctatgcctaaaaccatggctcacaagaaacactcaggccaaacctaggcttgggagtcaaattgctcatattgagcatattgtgaaggaggtaaagctaagtaaaggtactgggtgtttttgagagcacttgtgagtgggtgtttggacagtcggaaaggatatcttcatgaaggctcctgtctatttccagaattcgatgttattgccttccgatctccctcattagaataaccaacacacaggcccgatggtagggacagtaatttattggactgaagctgctcataacttaactttaactgaggaacaacataagcaccctgccagtaggacagcagctagttcgtgtttctgcttatgaaatattcccaatcactgacatatgacactacttgaacactcctagatagtgtttttaaattttttgaagctgagtatagtggtgcatacctgtaatcccagcacttaggaggccgaggtaagaggatcacaagtttgcattcagtctgggctatctcataaaaccaaaaagtaaaaaaaaaaaaagtaaagaaaagaaaaaaaaagatcttctttatatcaagtcagagtatacctctcttaattttactaatgggtgttagaaaatagtcaccccccctgtggctgccctttcagtacttcacagtagctatcatgtgttcccaaggcatttttcctctagattaaatatctttagttatttcaatcattcttttacaagtcatgatttttgatctttatgatatggtcacattgctgacgtattaaacatgtttaaactctgtatagaaagtatttagaacccaataatgtattgttcgctcaatcaagtcctctgtggatagcagcacctcacatgactgatactgtcttgaaaacacaggcaggggacacattggagtatacaggctgaagtgtggaaggaagtagttagaccatcttaggaaataggaaacaggtagcctgtttcctcttggatgggatgcagtttacattagtattgcctgaaacaaaacctagactttagagcactcaagattggtctgttatatctggaaacagttttctacctgagtagtgtagaagatttgtcaaacgccagaagtctttaagaagagagccaagtagtgagtccccttcctatacagaagaggaagcagacctctaggacagtaaggtccttacacagcagaagggcccataactgcattagtgttaggagccaagtgttatagcactctgttgtgatccagctcaggcggtgtcgggcttgctttttgaactaataaagaagtgccttccattgcagaggagcttggcttgtcctgcagagcaacccatccatacagcacatctgtatttccctacttccagcgttagagaaggtggaacctgggggggggactaaaggctgtgccagcgaccctgctcctggtgttgattcacgcttgagctgagaagtaactgtgggggcaatattttctgttctgttctttctcctctcccacaagccttttctcctcagtcctttcttccctatcttccttcccagtgtagctgtt

SEQ ID NO: 29924 - DNA, 1099 bp, Mus musculus
gtcatggcagagtcctgctccaatcacagattcgccagacatacttgttcctagtggaacttttccattttgtcctaacatttttgttattctgacttttctctagatttagctcgatcacagcacatccagagcgctgggatgtgtccttcttcacagggggaccactctgggctctggactggtgcccagtgcctgaagggtcagcagcttcacagtatgtggcccttttctccagccctgacatgaatgagacacacccactgagccaacttcattcaggccctgggctgctgcagctctggggtcttgggacattgcagcaagaaagctggtgaggtggggctgggacactgccactggcaggtgggtgagggagaaacagggcggggcggggtttgcattgggctggcaagtcaaggaagtggagctccgttaatcctagactcttcctacccactgtctcccatttttttttctccagtcctggcaatagggcccactttgtctatgggattgcttgtgacagtggctgtatctgggacctcaagttctgccccagtggggcatgggaacatccagaaacccttcggaaggtacttctaattgacgggactagccctgggggttgttagggttggaggaaggaaggttacatagagtgtggtgggtgggttttccagcaaacccatgtcatgtcttaagggaccagaggctcgggttttctgagaggcacgtgaaagcagcaagcctcaacacaggtctgctctcaccctccaggctcctctcctgcctcgcctgggtctcttggctctggcctgctcagatgggaaggtactgctcttcagcctgccgcatcctgaggccctcctggcacagcagcctccaggcaagtcacatagctgcattcgtggtagccagagagctcaggcctgtctgcctcccgtgacctcctctagtgtagtctctagcataaaagcatgttcagtcacacctttatgatagtactataacttcagttggtgatttttgagcttaaattctcttttttagactacctgcaccttttcagcattttaccagtcatttctccctcttt

SEQ ID NO: 29925 - DNA, 1138 bp, Mus musculus
ggaccccgcatcagcgatccagtgttcatctgctcttctaccacttggtgcatctagcccttcactcaccttcgcgaacagccaccgccaccgcagccatgactgtgggtcctaggctcctcccgccgaggtcactcacactacagcgccacctgggctgctggctcccctgatgcctcccgcggagtcagtccccagcggactacaacttccggcgtgcactgggtcccgcccaggactacgggtcgcggtgaggaccaaaggatgttgggttcccaattaggagcgtctccggcgctcgactacagctcccagcatgccgaggttgctgctcgcagagccgtcatcctacagccttcccacctcggagttcaggcccaccaaaatggcgagctgggctgcggagacgcgctgagtggcagaggcaagcgagcagaggcgctgcgaacctggtagtacggagctctgccttagggaacatgcacttttccattcctgaaacggagtcccgcagtggggacagcggcggctccgcctacgtggtgaggaggtgctagaagctgggccagggcggggataacgggccggagctctcggagcggcctccagccttcgaacctcactggaagccatctcatgtctcagtttcgtacttaagccaccccaagctccaataggttcttctttccccggccaggccgcgactgctctggcggtgggcactattgtcatctccgggagggatactgccgcacaagcgcccgagtgtcctcgggactgggccttctgcttgaaacccggccctgggggaaaaacaggctaaatcccgggaagtctcggagcgttgcgcagacggatatgtcaggcaacttccggacaggtttctggggcaagaggtggtttgcacgtcgatcctgagatgtttgcctgcttttgtgtcctcaggcctataacattcacgtgaatggagtcctgcactgtcgggtgcgctacagccagcttctggggctgcacgagcaggtgggactaacaaccctgtctagatgcagcttcaagcccttccatacccacggacattaatcccctttcattacatcaccctataatcactgctacagtggaaggtggactttgttag

SEQ ID NO: 29926 - DNA, 1270 bp, Mus musculus
aagttaatgtcagctagcaccttggctcccagctcagccttgccttcctgctgcccctaaatctaaccgttctgcctccttccccccaggagtcaccagacgccagccgggagtccatggtgaaactctcagtgagttacagggttggtgaggttgactgtagggcctcacaggctgccaccctctgaccctcctcccacctctgttacagagtaaactgagtgctgtgagcttgcgggggattggcagtcccagcacagatgccagtgccagtgccgtccacggcaatttcgccttcgagggcattggagatgaggatctgtaatctcagctgcctggatgtctgccctctacctgagaggagatttatacacacttgccctgtgcctatgctcccacgttaggggagtctcttcctattccctccccacttctccttgttcctcttggccaggggcctcctaaccataccttcccttttcctgggctggctacacaaaagatcactgtctcttttttagagctggcccttgatgccaaattagcatttagtattttgcacaaagtccaagagactgtggctacttgcctcggagaggaactctaacactccatgggttgtttctggcttttgaggaactccagcactccatgggttgtttctggcttttcagggcctgggcaaagggtgggcagaggtctgtgaatggtctgagcagctccccatcattaaactcagcctgattgccgcctacctttggttccctctcactgcccctgtcagaaggggtaaggcctaaatagttgccattgccaattcagcagagacatggctctgttagtgtttcctttattataaagcactgaaataagttaaaacagtaaaaggctgggcagctcccaaccagttcatccatagcctctgggagcagtggcggtgaatccaaggccctaatcacttagctcatctggtacgtgagctaagacaagtcccctggtctatatggccccctgaccatgggattcaggctggtccatatagtgcctaggttagtctgtgtggagcccctgaccagcgggggagaaagggaaaggtggtttctagttcatttgtataaaatgcaggaggcatagggctaattcctagagccccaggtaaaagaacctagttagttcaaggtgagtctgaatgaagagccctgctaccagtagcacccagggctgctggaccccgagtgctcaaaacagagggtgggctatgaggtggggc

SEQ ID NO: 29927 - DNA, 2323 bp, Mus musculus
ccattggtaaggactaagaaactaggcaatcttggggttttgtcctgtgtcccaaactaccaatagcaaagtttaagccctgtgctcttcagaataagctcatgccttctttgttcttaaatacctctgtaaaatggtaaagttatacttttccctgtgttctggatgttaaaagaggcaaatgagctctttgttctgagagcagatctgaaactagaaaagatgaaacttaaagatttgacccacctctaatacaagtctgggaattagtcaaactactcaccgtccttacttttcaggagaccacttctacaagagaaacaaaaacttgccaccccaggaacagatgatttctgcccttcctgacatcaaggtgctgactctcactgatgaccatgaattcatggtcattgcttgtgacggcatctggtgagcactggtgaaagaaatgcccttaaacacccttgtgcaaccttgctcatctcttaagagcactgactgctcttccagaggtcctgagttcaatttccagcacccacatggtggctcacaaccatctgtaatgagatctgatgcactcttctggagtgtctgaagatagctactgtgtactcatttacttaaaatagataattatttttaaaaatgttttgaaaacgcgcactaagccccaggccaagccgaggagcatttacaggggtgttgaaattggcctgcgtcagtactgatgcctacctgcctctctttggtaggattaaagattgattgtcattttttgacccaggaatgtgatgagcagccaggaggttgtagactttattcaatcaaagatcagtcaacgtgatgaaaacggggagcttcggttattgtcatccattgtggaagaggtgagtctaaagttgggaggcaggcgcctggtttacacagacacatctcttgagatgtgagcagaggctgggagtagaatcactgtacacactagatgactttgattaaaaaggtggctctttcctcatttccctgatgtagccttgggcctcagaaattcacaggtttcttctttgtgataacttgcccattccttctgtcctgccttcttgtattagcaaggacaagccttcttgtggtactttggttcaaaccccatggctaaactgccttaacctttttgtagctgctggatcagtgcctggcgccagacacttctggggatggtacagggtgtgacaacatgacgtgcatcatcatttgcttcaagccccgaaacacagtagagcttcaggcagagagtggcaagaggaaactggaggaggcactgtccacggagggggctgaagacaccggcaacagtgacaaaaagaaggccaagagggactagtggtcaaccggaccctgcccatgtggactgttttctgagcccttggacccgagactgagttttgtccttgtcctttagccttagcagtgggtatgaggtgtgcagggggctgggtggctttcctcagcccattacaaagagggccccccaccccccccacgcggcagcctgggaggctctgctgtcctcttaagcctccttactctccttgggctcatcgactatcggttctgtgcctgtgctctgttgtgttggagggaaggactggtagttctgatttttactctgtgaacactttatttaaggacattcttttttattggcggctctgtgacccctagccgcttgcacccgctctctgttgtacactttcaagcaacactttttcagactaaaggccaaacaaaagctaatcgtgctcatagtgtcctgctttactctcctaccctggccccatatgtggtgggcggctgttgctgcatgcttgtgtgtgtcccgagcctctggagagggggcagtgaatgtggagcaggagctgggagtcttaactcctgagtaagcagcccgctggaggccatcctgcgctgttcgccttcaggcacgacttcctagttcgtatatggagggggcagggtaccaccttcctggttggctggttgggttacgcgtccagcttctgattggttggctagcagcgcatcacaatcacttcctggtcatgctgcgactgcgctccggttgtacagcccatgaactacgcatcccgtgttgctctgcggtggcggaagcggaagcgggtacggaggtaccagctggtcttcggaggggggtagggggctccatgaatggaagcggcggcggcggcgggagcgacctgagctggattccggggccggggccaggggctgcccagggcccgcaccggtgtatgggggcggttcgtgg

SEQ ID NO: 29928 - DNA, 2323 bp, Mus musculus; identical to SEQ ID NO: 29927

SEQ ID NO: 29929 - DNA, 1198 bp, Mus musculus
atactcagctttgctcaagggagtctccttcccattttagatttccttgtttcttcagccccacccttcccttgttccagctcaccttggcagcagtgcccgcttcataaaaggccttgtctgcagggagtaactgggtgtggcgcaagagcgaaacagaaagcctggcagctacggtttcctgtggatttaaggcgaagtttatgatcctgactgagtgaccagaccagtgagcctgtaactaaggcagagccagttctgaaccactctagatctcaggctattccagtctttcatcagcacagtgtaactggccccagattgtgtacaggttccttccacttctagaatttgaccaagtacacgaaatgtatacatagttacaaccaaataagtcaaaactgtgtgtgcttataggaggtacataaaaactatcagacatctgactgtttcaatagattgagggtggtaaggctgtgtgggcatagagccctagggtcagagcagtatgggaagagactggcgagtgttaaagactgattagaccgagaagcacagagggagacgtggcagtttaagggcctaggctcgtagatccagaactgacacttgtgcagcttcatagctgtgaatgtgggtccttgtgactgagggtgctatgaatctccctggctggatcttaccagctgtttgatactctgggctgcagatcgcgtagcgtagtaatgagagatcagcagcatcatctcaaactcctcatgcgctgcagagtttgcctcactggacttcaccaggttttcacactgtgagatagaggggggggggaggggaggggaggggagggaggagagacagcatgagagcacagctaggctgctgtggggtgagagcaaagccatggaggttgtacagtggttactgctgcccatttggactgagaccaggacagggacagaagaaggaaccctgtaatttcattgctgacccttcttcttaccaggttgaagaggacatcccgaagatcagcccagctatggtaggcctcagcattgttggtcccaggagagctaaccatgtcagtgaagatccttttgtagatgttgaaattctagaggttaagggggaagggcacctgagtgagtgagctgtgtgtataggagcgcagcctagattgatggagaaggcagagatgttaaga

SEQ ID NO: 29930 - DNA, 1207 bp, Mus musculus
ttttttttcctggagagtgctatggtcagtcaagaatgtgtggatcagccgctagggctgaggaatttctaaggtggcatcctcaaagtaaaactgaaatgttgtgtctcagggaaagttggttaaccatccatgcccaccctatgccttggcctgggccaccaacagcattgtggccgctggctgtgaccggaggattgtggcctatggaaaggaaggccatgtgctgcagacttttgactatagccgagaccctcaggagcgggagttcaccacagctgctgcaagtcctggaggccagtctgttgtgctgggaagttatgacaggtaggtctcctgtctagtcgtatcttctaccttccttctctgtgaattgtgccaggcaagtcattctaaactgtaatgggagcctgggcagaggcaatgtctgttgaaaaggattctcagattggcacacattggcacgttggcagcttcaaagtgcaggatgcttcctcggcctgcgattcctggcagaattcatcgcattcttcatgtccccatggagcctcctgcagactttaagtttatcctgcagtaccatagttgttgcttctgtttcgaggggaccttgaggagaaggctgagcagtcatcttttttacctccggtgcctacaatggcatctgctttgtgattataaccactgtttggtgagtgagtaaagaatgaatgggcagatgagcaactaggatcttgtcccctgttttgtgtctcagttttgtacatctgtgtgttcctctctgggttgtcccactcttcacttgtctcgctttttctacttctgtccttttgtgtcattttttattttttgaggtggactctcactctatagccctgaatagcctggaactcactaggtagaccaggctggcctcaaacttggcagtgatcctcctgcctctgttcccaaatgtttgcattacagatgtgctctgttttcttttgccttgactttccaaactccctttgaaccatctagctctctcctgctgggctgccttgaggcctgccttgatggattgttgggtggcgttagcttccctttcttgtagaatgagactgctctcctttagttactatcttcactcttttgctccgcccccatctcgtctaaaagccacaaacctttctagacttcgggtgttcaactggagtcctcgaagaag

SEQ ID NO: 29931 - DNA, 1101 bp, Mus musculus
gaaacccacacttcaggcagggagagggaagtctcagttgaaggcacaaggatattgtagacatctcggccagatctgagtagcagcgcttaggacagtgtcattgggagagtttctaagtccttaaactcagtattgccaatgggattctggggttccatggtacctttgccacagtgcaaagcactgttccatggtctctaatgaccctgggcatttgatgatttgtggagaggaatcaagaatgtcaaaagcaaggtgaaaggaagcagagaaggtggaaccacgtggctcaggacatagtggacggagaggcatgacgggctgtgacgtgtgctgtgcgctctggctgtgagagtttgccttagctagattttgtcaaatatattgccattttggactatttcccatgaattctgattaagacattccccgttccttttctcacaatcactgcccaaattctgagatgattctcttttctttctttgaaacagggcaccttcgtggctggaaagtacaagtgtctcctgtgtgagaaagagtttgtgtcagagagcggggtcaagtatcacatcaactctgttcatgccgaggtatgccccccacctcccctagtgtgtgcagtcctgtgtccccatcttgaggctctaagagttgaccttgcccctggcttcatgatctaggactggcaaagaaatttgtgctgagaacttgccagagttaaaatgccatctgaaattacatgagtgtaaatgaaatcttctgtgaagaaaaattagataaagctcactgtggctggcatgtttgagcccctataattctcttacctatgatttaatggaacatttgggaaccaggctgaagttacatgtttgatcttgttttacagcattttcttctgataaacatttagatgttttaatgtttgccaataacctggggtctttaaattatcatcagttctgtgtcattttaaaaacatgcttactctttcttgggagctctccccgagttcccagctatgctccgagaacagccatgttgctggctggtgtttttcctctgctaagcagcccaacaaccatccctcctgagaac

SEQ ID NO: 29932 - DNA, 1184 bp, Mus musculus
ttgttctagacagtatctatcatagctaagagcttttggcctaaccttttctttgtttgagacaaggtctctctgtgtggtcctgactgtcttggaattgctctagattaggccagtcttgaactcacagagatccacttgcctctgtctcctgagccctcggattaaaggtgtttgccaccacgccctggagcgaaacattcttcctggggtactacttggcagttatctttagtcaggaagaaagtgtggaggaagggataagaaaatgctggtaagatacggtggcacttgtacaatctcagcgctcaggagactgaggaaggagagcagctcgggccacctgggaagcgcaaagtcagtccagacaagtgaggtcatgctctaaagtaagccgttctctctttctctctttccccctcagatatccgagacacagtgaaatataaagaagtcatgaagcagtatccttttcctcatctgctgcgagactgactcggtcatggcaaactgctgtctttcattgctttgggggagtggctttgcctgtcaagttgtgacaatacaagtagaaaactcacgtccttttaggtaatcgtattaagaggataagatgagggctggtgagatggctcagcaggtaagaacactgactgctcttccaaaggtcctgagttcaaatcccagcaaccacatggtggctcaaaaccatccgtaaagagatctgacgccctcttctggagtgtctgaagacagctacagtgtacattatttatataataaataaataaatctttaaaaaaaaaaagtaggagagatcagagatttcagcaatgcctcctgttttcttaacatcacctggactgtaagtgctgtcactaaagatcggagacgatgtgtggccagctgttagttactgcctgggcccagtgaagtgatgttaccgtggcgggtgaggcagtcatcagtaaagttactcacaggaatttagatcaggaaacttggacaaataaattgagttgtctgcttatgcattgctttctgcatgacatctaggaaggtcgcttgcttagtgagaagtagaattaagagtgttacatgcagctgtggctggcctgaaactctagctgtctgccttcctcttcctcctgaatgctaggattaaaggtactgagctaccatgc

SEQ ID NO: 29933 - DNA, 1149 bp, Mus musculus
actgagcctggagatgaggacacagggcactgtggtcaggtacagcaaggagtgatggcacgctgatgctttctctctctctctttttttttttttttttttggtttttcgagacagggtttctctgtatagccctggctgtcttggaactcattttgtagaccaggctggcctcgaagtcagaaatctgcctgcctctgtctctgcttcccaagtgctgggattaaaggcgtgcaccaccacgcccggctatgctttttctcttaacaagtatttgtcatcccttatgtttactcgatcacttactcccatgggagggagttatactcataataatcttgattctgccacttgagacattaacatttgaccaaagccaggtcgagtgtgcaaggggaccacactgtatcattgacaggttggctctgggctctgggccatccaggtcgcagtgctgtggctgtggctctgcttccttgcatcaaggagtccattacttggtgtcccaggttgtgctttgagatggtgcctataatacaagccaccctggtaggagcctccagtgttgtgttgtaagtagatcctgttataagtgacacctttttcttctaggtgatgaaatttattgagaaggcccagaacacattcaggtaggtgatttcagttaactactggttattgcctgtcatcagtatattctagtctttagagaggattgggagacctttgaaccctgaagctgttaactgggacaaagtcattagaaattaaaacaaagaaaggtggacaaggaaatcatataacacagaggattctccaattcctgtgacccctccatcacccatggtccattttacatgacgtggagaaactttcagaggaagacttgctcactgtttgaggaagtgcagtctgccatgatggggaagacatgaattgtgtgtgtatataatcctactgtcatttttcaccattaactattattaaatttttaatatgtttactttttctaagggagaaagattttttaaaagatattctcattataaaaaaaattaagattatggctcggtaggcagaggcacttgccaccaagcctgatgacccgagtctgagtcctgggaccatgtggaagtagagagctcctac

SEQ ID NO: 29934 - DNA, 1151 bp, Mus musculus
agggactctggcatttgtttgtttgtttgtttgtttgtttgtagtgcattatcccctggattttagatatacagaaaaattatgtctttagtacaaagaaccactgtaaccactgtaagtcccagaatgttaaatctacattttctttttctccttttcctgctacatgtgactttacatatcacatagtatacgtcacttttcctaaattacttaaaactcatgcagatatagatgcagtgttcttttattttggatctgtgtattctttctaaaaataatgttataattttataaaatcccagtgcagttacgaaaaatgagattaacatgggcacagatttatctaatacgtggtcttaggtgtagccattcccttcagagcagacttggctcatccggtgtgggaccgagcacccttgtccagttctgcctagctggctctggactctgcgtagtctgctgattgctttccttaaatgcctgcacattcctcaaatgtggccgtcttagaaaaggcttcagcgcctgctcaggctgctctccccgtactgtgtcctctccggctgttcttgcattcacggcccacatgcacgtgcacaccagcttaccacgtgcacgtgcacaccagcttacccagcttcctgggaagctttgtgtcgaggtttccttgtgctcctaaattaatccaggaagagctgacatctctgtgctcttgcttcttcctcctcaagagcaggaagaattttcgttttggcaggtcttgagtctttctggaatgttatcttgcgtatgttttgcatatttctaattacattattgagtggattttatcttctttactacatgttgttttactctggtaactggtaggggtttgtgctgttttttgtttagtttttttctcgttatttgtattctgctatcttccctcctcctccctccatccctcccttactcctctttctttccttcattctgttatttttatcattgaccctctgtgagtgtctaggatgtgcttatattaaaaaatatatactcctggggctggagagatgggtcagcagctaagtgcacttgctgctcttgaagagagcccaggtttaattcccagcacctacatgatggctcacaaccacctgtaactg

SEQ ID NO: 29935 - DNA, 1390 bp, Mus musculus
cgtgtgctggtgctaggctgaggctgtgagtgagtggactcttctttctctggcctgcctgagcagacctcagattaggattttttgactttgatgctgcatgttctagaagccatttcattgactgagggtgtaagtatgtaattccttaaaagtcatttcagccaggtgtggaggcgcatacatgcctataacctcagcgttggagagacaggcaggaagactatgggttctaggccagcttgggattcatagcaagtcccagtcttgaaaaagtgaaaaataattttaaaatgtatgtctctctttctctctctgtctctctctgtctctctgtctgtgtgtgtgtgtgtgtgtatgtgtatgacaggagctctgattcattgtctactatgaaggttttaaacacagcacccttgtctcctgcagttacagaggaaagccgtgaagagccagcatttcagaacttcatggaggagtcaatggcacactggaagaggaacaagtaggccctcccacctgctgtacagctctgatgtgctgagtctccatgcagaggacatccttcctgtgaaccagggctgcagtcaagagcagttttctcccaaatggtgacttctctgagggaaactgggcttagatgaagtctggttgaaggcggagctggcaggtggatgcccattcttgggtagctcctcccgatatttatgcaaggatgtattctcaccgctctggaagctgagagatagctgctgagcctataacttcaagtatcatcgtttgaactcaagtatttctgctgctgatggacagagaggacgtctgtcccagagacgctttggaccttgactagctgggtctgtgggcacagcaggatggaaaggagagtgtgtgtgtacagagggcagcacagtgccctgggcagccaggtcggatgtgatctgtgctcacacgaggtagcccattttcaagaatactgttaggatggtgacttggataaagattttgactttaactttgtggtaagctttcctgtcatggtttgatattagaaagtatgtgatcactaatagatttcccactattagttatgaccaagccttaaagacatgtctggtaggatataatgcatagtaggttagtttcccatgtctatccacctaaccatggccaaaatcatgtccttatattgtacttagaacaatacaaagcattgtttgtgaccaggatttggtccattccgtccattcagagctaggatttgccctggttctcaggagtgtagtaaaatcacgagccaggcagttcttatggatacacctccaaatcagctttcctagaaacggggtcgggggtggggacgcagcaggctggctcataagccttccag

SEQ ID NO: 29936 - DNA, 1211 bp, Mus musculus
tcccactccactgacagcctcatggggtcctcccctgtgttcaatcagcgctgcaggaagaggatgaggaagatttaactgcagagcgccagcaggaagcccatgagtagtaattagactgtattcttaagtgtagacctttgctaatgtcagagacagttcctaacctagtaacagttcactttgcgtcgtttctgtacttctttaaaacaactaagccaccgttcgcagctgagttgtgatactgacctggtaatcagaccaaagtactgtcccggctggttttatctcagctcctctcagccgtgtctctggcacgcttgagaggagtcatgccactttgatgctccttgcagaggtgggacactgaggtgctttgcttaaatttcaaagcttgcatatattcatgtaaatatatgcaatatatgacgtctataatagacgtcagcaattcattcgtctattttgtgtcgtcattgggaacccagtagcaagacagacagtaacagctaaacttaagtccatcagtcagagttcaaactattcatgctactcaggcctcttacaaagtgagagccgtggggacagctgttacccttatgcagctgtccccagagttctttcttttctagattattccagccagcctcgtcatttttactttccatatgctcttgtgctgacccagacttttttttttttcgaggcagggtttctctgtgtagccctggctgtcctggaactcactttgtagaccaggctggccttgaactcagaaatctgcctgcctctgcctcccgagtgctgggattaaaggcatgtgccacccacgcctgacttttgacccagacttttaagtatctttcaccatgcacacgctttcaccttttctccttgtgaaggtggcaaacagggcccaccacagctgccgggtacgcagcatctggctttgcttcagaacagctgttggtttgtttcaggtgtttgttttggttgttttgtttaaaaagacatttgaggatccagagagatgggtcagtgggtaaagtcacttgcaatttaagtttgataccggggacacacatggtgtaaggagagaaccaactcctccatcatgacacacacacacacacacacacacacataaaaataaattatttttggaaaaagtcatctgagttattccaattcttttttaaagattctttgac

SEQ ID NO: 29937 - DNA, 1151 bp, Mus musculus
taaacacctctcatggtctagatcacttggggttcagcagggcagagatggcagaatctaggaaaaaaaatcactttagttctagaaatgccaattactgtagtttggggaaattattaccatttaactaaaatgagggagctttacaaaatagcatggccatggctaataaatggaattaattctttctaatataaattttccaaaaggcagtggtggcccatgtctttgatcccagcacttgggaggcagaggcaggcagatctctgagtttgaggccagcctggtctacagagtgagttccaggacaaccagagctacacagagaaatccagtcttgaaaaaataaaacagaaacaaaaagaaagaaagaaaagaaattttcctactgcataggctggctacctgacttaactcactgggggaaacacacagacttaaagatgaaatgtatgccattctgttggaggcatttggatgccgtctaaagtttcagttgggttaagcatcgtctttgttctctaagcctgtccccctttaaaggcaaggtctcactgtgtatccctgctgtctggacttcagactcactcacctgcatcccctgagtgctggaagtgatgtagtttaagggacgttgtcacacccacctgagcttggttttggtcttgtttgtttgttggttggttggtttttcgagatagggtttttctgtatagccctggctgtcctggaacttactctgtagactgggctggccttgaactcagaaatctgcctgcctctgcctcccgagtgctgggattacaggcgtgcgccaccacgcccggcttgttttgttttcacttgaaggagtaagttgggttttactcttacatccgagtatcatttagttttgacctaaggaagttcatcagtcatagaaacaagcgttatcttttacaaacccaatggcctgaaagatcttttgcaacatactttttggttttggccttatctttctgtttctattttagaataagccttcccttcaggaataaaaatctgtattttttctctaaaaatcctttcttaaaaacatttttcctttaattaaaataaaacaacaacaacaaaacttgtataccttcctcatatttagttcatcatttttc

SEQ ID NO: 29938 - DNA, 1197 bp, Mus musculus
ctgcaatactgaagttttcctatgctacctcattgtcaatctgcaccattcctgtttgggtgtgaggccatctctagacagtggaggttctgtggtttgcttcccttctgactgcccagtgcccagctggttcttgtgcacccattatgagattggatccaagtcaatgtttgccatgtttgcctcagtagctcacactgatagaagtaatgacttcgtagcatgtcaaggatattgctgattggctggtgacccctcccttggcttcttacccatttctttttgtcttctctggcctgtgagatggagaggctgggtttgcaaatccgcttatcctcacgtcaaacggaaaaaatgacagaagaggatagagggctcagggtatattttaataaaaatgatgatggttcctatttttctcctacaatccctttttcttgcttcacagtgaacaaaaaagttctctttgtggaacagaaaaaaatccgttccctctgagtagtggattgaaaatgaatttgattcctaaatgagaagctcgagggtgaggcaccgtttcgaactctgcagtgtgcaatgaagacgaggaagttccagcatggcctcgggggatgttggctaagggacagagccgaaagagtccttcacagagaccacatatttatctccctggatgctttataggccttaataaaaaaatatcaaaatagtctatactcttgtctcttagaggtattctgtcatatgaagtgtaaaaaaccaatcacctaaccaagttgttttacataaggaaagccatttccactgcgaggcttgagcaagagttcctcggctgctccttgtgcctccataggacagtgctctagacagtgctgaagaatctgctttcgtggtgacaggctagcaggcagcaggaaagaaagaaaacatctgctttggtttgtgtatatgtgtgtccttgggaacagtggtccatatatatatatatattttttttaatatttattatatataaatacactgtctctgtcttcagacataccagaagagggcatcagatctcattacagatggtcatgagccaccatgtggtttttgggacttgaactcaggacctctggaagagcagtcagtgctcttaaccacggagccatctctccagccctggtccatattcttaaacagctcaccagagcc

SEQ ID NO: 29939 - DNA, 1178 bp, Mus musculus
agtccatcaagccagagtgcctacttgattaccttttgagagacagaatccagtcctcttttttcttcttgttggctaccagtcagcacatcttgttagaggatgaggcaaccatgatccagctatggcagagtagaccactcagttcacacagcacaagtctgtttaacaggaggcctccaaagtgggatcagatctttcttgtataaagtagaaaggcagtacaatcaatagccagactgttgctcactgctgagttattacagcagcagcatagagctgccctctttcccttatgatttttggtactcactcacatctcaaagtcaggggaacttgcgctgggtaagtgtcggacagatgatgtggcctctccttatgccttgttttccaagtctctctgcaacaagtgattggctctctacagtctctgtacctcatgtcacccaggattactagcaaggcctttccctggcactgaatgtgtcaccctcataggaaagaagaatctaaggaacccgaggctggctccttgcattgccgtaaaggcaagaactagaagtggctgcaccatgattgtggtgattcagttggttttgttttgaaatgaagctaggacttctggagtgtttgctgtgcatgtttatttccagagcctgcctgttcctgtggcatactgggaatggttgatatgctgaacaccagctgcgtggttctcagctcttgtgtttatccttggatcactcacttaatgtcttcaataagagtcatagtttccctcctcctgtcttatcaccccaggacttccttattgcagcctgttatttcctatctttgtatgcagcttagtgccaataattttactttacctttgtatagtacttggtattttatttacagagtgcctgctcagttattgtctttgcaagctggataatgtaggctttggcatccctgtctccagtgtaaaaattaatgtgcaggtattcttgaaggctttgcctaccctcattgctttccccaaagacctggagagagagcgaggcttctcaagacagacttctcctggtttctccatgcactatcccacatgcatggctgttgccgttcctcttacttctcttatttcttgatgggtgttgttggctctctttatattctaaattcaatgataaatt

SEQ ID NO: 29940 - DNA, 1125 bp, Mus musculus
tcatctcgacatcacctaatctagcctaagaaggtcttatggttacccctaatttacagatgaagaagaaacagacagacattaactttgttccctaatgaaagcccacaattttagattcaatgtagggaaaagcaaacaaacaaaaaatgtattcttaaatttcgtatgagttaggccccaagccctttataaactatggattgaggttaagtaacatggcagtggagaattattgtccagtgtgcatggtgcatgctctttccacagccactcttgcttggggtctgtgaaccatgcaaacatctgagtcgagttatggataaagttgccagttatagctgaggaggtacatcatgccctcaggaagttggggtgccacctgtgggaatcagcaggaagtaaaaagccaggagactcttagcagggagattacaccttcaggaatgtgggctaatactctcccaggctatgagaacctttcgtaatggagggtagccatatcatttctgagctttagtctgtcttctgggttcttgaagtcagtgatgacagtgagtgtgacccgggctggtgtgctgagcgctgctaaagcccatcaatattccacctgctgctcactctgcttcctgcctagccatgtgccctttggaatatctttcagtctagatgaaggggcatcttttggacatattgctttcagaggttccattagtttctaatgcacacacgaggcaatgctggctttttaattccacgcttacctaactcaagccctgtgtaagactaccattgttctttatcctttcattgctgtttgactccactcttgcaacactccttgactctgtgtacagctgtcaccacagccacccccacgactactacagagagggagagaacagcaggtgacgttccttgagtgtttgtgtgtgccaagccctggcttcagtgccttacacgtggatcttgttttcagctccacattgttcctgggaagtgggtgctgtgacctctcactgagtggcagaagagattgaagcacctttcagactctagatctgaggacttgaccctatatcagtctcttccatgaacacttacagatgagatggctcagaaaac

SEQ ID NO: 29941 - DNA, 1164 bp, Mus musculus
gtctctctctgtcccgtagcttgtttcaagcccagtcttctcctaggaatggacaggtggttctaagggtgagtgtctagtaaatgtggcaggcagaaggccaacataggctctttagacatctatgagaggtagtgcagtagtgaactgcatgtagttcccgtcaaacagtccagagggcttcgcctctgaagaggagagcccaacccagcttgcatgaacaataaataacaactgttctgagttagggggaaagctctgagttgcatttttttgttcaagctgtttatgctaaccacagttctttctcccctctttcccaccagggcttatttcaaaacctttgtccctcagttccaggaggccgcatttgccaatggaaagctctaggaaacaccagtgctgagaggcggccaaccagactgctcagtccacatgcgtgtcagcgctcgggctgcttgctggaaactgctcggaatgtcttcatggcagcccttggctcccacagcagctctgcctgccccgcacagccctgctctgccggagcccaaagctgagctggctggtcataccctgaatcctagcacctcactgctggtcgcccctcctcctccttagatttcctagctgaaagaaataaactgctttacgatggagaacttttccagggaaaataaaatgtcatgaatgcacacacccttctttcaagtctttgtcctgaaggcttcttcaaagttccattgaacacccttggcttctccccaccctctgaaactgttagtgttaagtttgtatatataatttgtaccccaacattcatacttccagctgaggaagtcttccactggagaagaggtgacccagtgattctgaacctgcagggctcagttgcctgctccccaggcccagagccagcgctcggaaatcctttggtcccagcactgtgcacccacggctcctgtgtgggttctgcctttccctctcctcagctcatgggagctccttgggctattctggctctgtgggttattcatgggagacaaagggtaagggtcaagagccatcactggtatgtgtgtgacatctcacctcaggcctggcaactgtgcggccgagcaggatcaaagctggggagccaggtatatgtacatgccaggatggagt

SEQ ID NO: 29942 - DNA, 1190 bp, Mus musculus
aagatgttgacgtgcttggacctaattatatttagtgaaagtcacttagaaacctagtttcatccctgaaaacagttaacaaagtgatcagagcaagaaaaggagccgccctgccagtcttaattaaagtcattaatgtgttcatgtcttcgtgataaatcagtaaagtattgcaatataggctggtgctcagtagtagtgtaatgcaaggagtggataagctgtgtacaggaaatgctagccagaaaggaaataaaggcctccacgtattacatatacttgagtatgccacacacatatttcctgtatgcagaagtcaacagaaagtactaccctaggaagctagagaaagttgtactttaacaaagactggtttagactggagtgcctagggacaagggatgatcattgaagtttaagaaggcaggagagatgtgctgtaaatgtgtgctgtattctgtgcttgcttctatttcactgttggtttgtttgttttttttctgttttctaaaggtttgctttgtgacttactgtggtccgacccagataaggatgtgcaaggctggggagaaaatgaccgtggtgtttcttttacttttggagctgatgtagtcagtaaatttctgaatcgtcatgatttagacttgatttgtcgagctcatcaggtatacagtatacgatattttattgttaatttcacacattttcatttattggtaggtaggtagataatttaccctgatgtcttttagtttctgtgacacttgaccaaggcagcttataaaagaaagaatttaattttgagctcacagattctgtgaccattgtggcatggaaaggggtggcaggcaggtaggcatggctctggagcagtagctgacaatgtccatcttgaggcaactgccatggggcagagagcgagaactaagaatggcttcggcttttgaagtctcaaaaatcccaccctaatacttcctaacagttccaccttctgaggaccaaacattcaaatatatgaactgataacctagggaaggtagtgggggaagggggttagagagttggctcagtgatttaatagcgctggcttttcttctagaggacccaggtttgattctcagcatattatgtgtcagctcaaaactgtctgaaactccagtcccaggagaccagacacctctagcctccaa

SEQ ID NO: 29943 - DNA, 2488 bp, Mus musculus
taataaggtgaactagtagagaagattctttaaaacttaaatttaagcctcagttatgaggctgtctatctaagctgtgtttctagaatctaaagcaaatgttaagcaagtgttcttccttgggggagggcggtgctgcagaccaaatccaggcacttcctattgagctgctcggccaaacttacacttcaatctaagaaatgtttgtgcagaattgctaaggtatttttattttcactggacagttgatggcatttattgaaagaataatattgttaataaacacattatttatttatttatttaaagatattgaaaccatctgaaaagaaagctaagtaccagtatggtgggctgaattctggacgtcctgtcactccgcctcgaacagctaatccaccgaagaaaaggtgaagacaggaattctagaaagagaaaccatcagatttgttaaggacatacttcataatatataagtgtgcactgtaaaaccatccagccattcgacaccctttatgatgtcacacctttaacttaaggagacggtaaaggatcttaaatttttttctaatagaaagatgtgctacactgtattgtaataagtatactctgttataatattcaacaaaattaaatccaaattcaaaagtatccattaaagttctatcttctcatatcacagtttttaaagttgaaaagcatcccagttaaactagccctgttagtgacccagatgaaagcatgaagatccatctgtgtaatgtggttttagtggtgcttggttgtttcattattttgagcttgttttgttttgtttgtttttgctagaataatggcatctacttttcctatttttccctaaacatttttaaaagtgaaaatgggaagagctttaaagacattcaccaactattcttttcctttacttatctacttaagtaactgttggatcttactaagaaaacttacccctcattacagtaaaaaggaactttagaggtcgataggttttaaaaatatacaaactatctgatccattgattttaatcaaacagtttgactgggcaaactttgcagctgataatgagtatttcgctttttacaaaattgccactgatttggatttgtgcactctaatctttaatttattgatgctctattgtgcagtagcatttcatttaagataaggctcatatagtaatatccaaaactagttggtaatgtgattatgtggtactttggctttgggttctaattcgcacgaaacaccttttggcatgcttaactttctggtattaccctcacctgcattggttttgttttttggggtttttgttgtttgtttgtttttagattcacagaacatgagaatcctttttgacaagccttggatagctggctctcttctttccctctctctatgtgaaggatgtatttaaatgaacgctggtcagtgggacatttgtcagctctgaatattgggtgcttcactaataattgccatgtgaatgttgttttgactgtaaggctatgtcactaaagatttttactctgcgttttcataatcaaaggtcatgatgtgtatagacatgctttgtagtgaagtatagtagcaataatttctgtatgtgatcaagagtttattgcattatttctttccctgttctcttttttttttttttaagggttagcattaacaaatgtcaaggagtagcaaagtcaacaaagattttagaaggaggaggaactaagagcatacacagacttatgattctttggatgtgacacttattggatgtgattctaaagtcttttattgaacattgtcaaattcgtacgcttcataggatggacataatgtttatataatgcccttcttatgtgttaccatagatgtgtgaaaccttatagcgtccttgaaagtgttaaattgagaactctgttaacattttatggattgacacattatattactgcaagtaacatttgattttcagcacagtgcaaaagttctttaaaatgcatatgtctttttttttctaattccattttgtttaaagcacattttaaatgtagttttctcatttagtaaaagttgtctaattgatacaacgtctgagtgattattctgtgttgttttgttttacagtgagatatgtaagcacaagttgacatagactgaagcatagacagtctctgagctgtagccatgttctattaggtcacacatgcttttatttaatgcgattggataacttacatactagagtaaacgaacaattgtttactcaaacaattgctaataggattttagatgttatctctgagtaatcaatacttaaggtagctcaagaaaataagccttagtctcaatattagttaatgtacactaatttgtatcttaaactgttttgttttttgtaaatgttcattcaaattaaaactaggggcgaaaagtaagcaaattagtattggttgttaaaggata

SEQ ID NO: 29944 - DNA, 1191 bp, Mus musculus
ggatttctcactgattgaaaagtttgctgctagcaacactctgagatatcctgtgtcttctttcccagtttactagaatgtgctagagtagttgacttttttcatgggtgctggagatcttgtgtcctcatgcacatgggacaagcaacttatcagctgtcttttccctatcctcacagagtgtctctgtgtaccttaagaaggcttcaaacgcatcatcagtttccttcagcctcttgagtactgatctggatatgtgtggcatatccaactatatctcttcttattatgattctccatcccagacataaagagttgattaatatggtgatttttaaatatatttttattagatattttctttatttacatttcaaatgttatcccctttcctagtttctccttcgaaaatctcctatccttcccccaacccctgccctacttaccaacctacccactcctgctttctggccctggcatttccctatacttgggcatagaaccttcacaggcctcttctcccattgatgaccaactaggccatcctcggctacgtatacagctagaaccacaagttccaccatgtattttctttgattggtggtttagttccaaggagctctgggggtactggttagttcctattgatgttcctcctatggggcttaagaccccttcaactccttgggtactttctctagctccttcattggagaccttgtgctccgtccaatggatgattgtgagcatccacttctgtatttgccaggcactggtaaaggccctcaggagacagctatatcaggctcctgtcagcaggctcttgttggcatctgccatagtgtctaggtttggtggttgtttatgggatggatccccaagtggggcagtctctggatggttgttcattcaatctctgctccaaactttgtcactccttccatgggtattttgttcccccttctttttttttttttttttttttttggttttggtttttggttttttggttttttgagacagggtttctctgtatagccctggctgtcctggaactcactctgtgaccaggccggcctcgaactcagaaatccacctgcctcttgttcccccttctaagaaggattctgagctactgggctaatatccacttatcagtgcgtgcatatcatgtgtgttcttttgtaatta

SEQ ID NO: 29945 - DNA, 1164 bp, Mus musculus
tacttcctgcatattcaggtaatatttatcccttctcaagtctctgatggggttaaaaactagctagtctcacaattaaccttaaatagtttaggatttttttaaaaatgtttttagatctaagaagatatttctggatttacaaatacaagttttcatggaaaatgattttaagtacagaactctaaacaagataagatcaataatagagtactttctccaaagttgccaaatacaaatgggcaaggcattgtgaatgtaattcttacctgatgattttcattattgttcttatcgtatataacttactgtatataatttagcattgtaagagaaagagccttttactggattaaaagggaaaatgtaaaaaacaaaaacaaaaacaaaaactctcatacactatgtaaaagcattcacccgtcaattaaaaaaaaaaagcctagggctggagagatggctcagtggttaagagcactgactactcttccaaaagtcctgagttcaattcccagcaaccacatggtggctcacaaccatctgtaatgggatctgatatcaaaagcttctggtatgtacactgaagacagctacagtgtactattataaataaagtaaataaatatttaaaaaaaaaacctatagccaatgagctaagggaagaaataggaggtagaagttctaggagagagaaagaggatttctgggaaagagcaagatgcaagagatttgctgtgaactccaaggaggaagcaagacataaaactgagaagaagtcgggtgtggtggcgcacgcctttaatcccagcactttaatcccagaggcagacagatttctgagtttgaggccagcctggtctacagaatgagttccaggacagctagggctacacagagaaaccctgcctcaataaactggaaaaaaaaaaacctgagaaggtaaccaatcatgtggcatactcagactagaataaactggattattgacatatgagctagtcaaaacatatattcatgaaatattaaatatcagagtcattatttctgggaacaaagtggctgggttgcagccaacagtaacagagacatagtgctggacagtaattgagagttctacatcctgatcttcaggggaaaagagagggagagggggagggagagtgt

SEQ ID NO: 29946 - DNA, 1164 bp, Mus musculus
ggtaacatcgaactcagaaaaataatactttagttcatgctaagtacagctctttgacacttctgttttctctgtaaggtacagcttagacttttacatctgtatatttttatttttgaaaataaatatacatctgtatatttttttgaaaataaatatacatctgtatatttttgaagcagggtctctttcacaactcagtgattgactagacaggtaagttctaaggatccttctgtttcttcttccatattgtacagcagtttcctgagatcaaaaccttccattttggagggaaccttcttaagatacaggatgtaaaaaggaaaatggaacaacaggatgttctaagaggagggaaaacactccagcctgtacagaatctccttagctatgaagtaaatcaaaatagcttttgggagtccctgaaactgaccagattctccaagaatgtataagcagtaaagactgagaattattctcaagacaagccaatacctgaaagactctcagactctcttgaagagactcagaccagcctagctgcctgaaagaagcatagaccagcacagctgtttataagaggtgtagaccaatggactaccaggaaaggacactctgcttgtaggctgtgcaatgtggctctggtttccagccttcatgcttgcatgggctctcggtgatgtagctgtctttaagtcatttatggtcttattacaagtaagccctcacccatattcctataagcaaccctggtaaaacttattcgttcatcaagttgaactttggtagtatctgaacttggtctgtgtcattggttccctgtctggggtgtgtagatatttgttctcatcttcctagggatagtgtcattcatacagtattccccaacattgagattgcaagcatgttctgccactctggttttgatatggatgatggagatcagaactcaggtttttcatgcttagtcagcaaatagtttactaactgagttatttccatagcctcttctttcatctaggcatacttcaccatgaaccctaaatcccagtggggacatttaaatagcaaaataaaatgtacaaaaatggaaaaaaaaaacccactaaagaccacataaagggcactcaagaaagcagtaggtcaccttgttttgtctat

SEQ ID NO: 29947 - DNA, 1159 bp, Mus musculus
ttcagatttcacagtattttgtttcttatactttgtgtgggatcttttttaaaaagagagaccagcttctcttgtgctctaataatttatgctaacacatgcctcttaataaggtctgagtttggaactcagagcaatccataaaaaaaaaaaatctggtgttttgaaaatcttcatttattatgtgtgcacatgtacaccatggtatgcatgtaaaaatcagagaacaactttcaagggtgttctttaaaaaaaaagaaaaaggtcagttatatttggctgaagagatacttcagtggtaaagagcactcttccaaaggacctgggtttgattcccaacatggcagctcacaattcctctaactcaagtcccagggcatctgacacactcttctggcttctgttcgtaccaggcacacacatggtacacaggcatacatgcatacaaaatacccttatacatgaagtgagtgatttaaaccattctctttaactgaaaaaagtcaatccatgcctctttgccactcctgtttctcctgtgttgattatttcatgctagctggctcagaaggtttcagcctgttgtccgtctctgcttcccattttacagtagagtgctgagattacagacacatgctgtcacatctggctttttatgtgagttcctatggaatacaagctctttgctgttgtttttgtttttcaatacaggatttctctgtgtaatagacctggctggcctcctctgcctttgtctccccgagggctgggattaaaggtgtatgctaccacacccagcttgagtggcaagaccttttacccactaaaccagtggttcttaaccttgctaatgctgtgactctacatttcctcatgttgtggtgacccccccccagccataaaattatttttgttgttactgtaattttactactgttattaatcataattaaatattttggagatagaggtttgccaaggaggtcacaacttgtaggttgagaaccattgcactaaatcatctcactcccccacaccaccactaccaccaccaaatatctctaaactcttgtttacacctggtggttacttaaaataaaccacaccttatatttataatatgtgaaatgagatggacatcagtagttgcttctatgtg

SEQ ID NO: 29948 - DNA, 1102 bp, Mus musculus
tttgatttaatattcatatctatttttactttgttatttttatatttattgttatatttaatttacagctattccttgtcatgttttctgtcacactccattcttttttgttttttgttttgacagggttggtcctggctgtcctgtaactcactttgtagaccaggctggctgtcctcgaactcagaaatctgcctgcctctgcttcccaagtgctgggattaaaggcgtgcgccaccaccacacagcttgtttttgttttcaagacagggtttctctgtgtagccttggctgtcttagaactttctctgtagaccaggctggcctcgaactcagagatctacctgttctgcctctcaagtgctggaattaagttgtgcaccccactgccaaacatcatacaccattcttattgatacatgtatgtaatttttttgaccctcatctttccaaatcaaaatatcactaattttttttagatggtattttggcaaaatggggagaaaagatgcggaaagattacttctgaatcctgggaatcagcgaggtattttcttagtaagagaaagtgaaactactaaaggtatgactattatattatcatgtgcctagaataccttccccatagtttggggaagctggagtgacagtgcctatccccctccctccccaggtgcttactccctctcaatccgtgattgggatgaggtgaggggtgacaatgtgaagcattacaagatcagaaaacttgacaatggtggctactacatcacgaccagagctcagtttgatacactgcagaagctggtgaagcactacacaggtaagtgagcacttcagaggaggaattaatccctcatgttctgtttcgtgaagataagcctgtcaagctttaatctcatttatatttacacacatatttaccttgcactatgtggctcctatggatgaaacttaagttgtcaggcttgaccacaagcaccagcttccaaatgaggaacaagacttgcatgttgcccaggcagtatagcaggaccctgactcagaacaataaagaatgataatacctggaaactaaattggattataagattgcatgctc

SEQ ID NO: 29949 - DNA, 1149 bp, Mus musculus
tgttctcatttaccagctgggaccttgggacagttctctagcttttccaatctcaatttatatgaaagatttatattacataataacataggcatacatactcagtaaatattagcataaaatgtatttctaaagtgtttcgtttgtatatacttcatcattcttcttattgaaagattcccatgctatatatctttttagagtaaaactgataggagactgattttaatttaatgacaagctttttaaaagaacaaataataagccaggtatggtggcatatacctttaatcctagaagcaggtgaatctctctctgagtgtagtccaggccagccaaggctacatagtgagatctatctcaaagatcagtcaaataaataaataatcatatgatacacacactaatattctgtttgacttaaaaagtaattcatttacaatataccctgtttatctatctagaacatgctgatggattatgccacaagttaacaactgtgtgtcctactgtgaaaccccagactcaaggtctggcaaaagatgcttgggaaatccctcgagaatcattgcgactagaggtgaaactaggtcaaggatgctttggggaagtgtggatgggtaagaagcctgaactttgttgttacttcattttgttatggaatcataaattaaaatatgtacaatatatattttattatgtagtataacttttactgttgattgaattttggtctaatagtccttgaaatacagattgagaaagtaaaataaattgttttcctaggaacatggaatggaactacaaaagtagcaatcaaaacactaaagccaggtacaatgatgccagaagcattccttcaagaagctcagataatgaaaaagctaagacacgataaacttgttccactctatgcagttgtttctgaagagcccatttatattgtcaccgagtttatgtcaaaaggtacgtgcattgtttgttaaaggattgtgttacgatgaaacaatttaggttgttttttttttcttttagatttatttatttattatatgtaaaagtacactgtagctgtgttcagacaccagaagagggcatcagatctcattacagatggttgtgggccaccatgtggttgctgggatttga

SEQ ID NO: 29950 - DNA, 1200 bp, Mus musculus
gagctataatatgttggtacttcagcaccttagatttgtgttggtttttgttttgtcttatgatgcacttcttctaaccattgaccagaaaataggtcatagtgatatgttgggttttgttttttttttcttgcagtgttaggatataaaaatttagcttttttttgctcttgttcttttggttttttgtttgtctgtttgttttttcgagacagggtttctctgtgtagccctggctgtcctggaactcactttgtagaccaggctggcctcgaactcagaaatctgcctgactctgcctcccgagtgctgggattaaaggcgtgcgccaccacacccagttttgttgctcttgttcttgttgcagagatttttgttgtttttattgttgtgttctagactattactgtcattgtttttgagctacccagtttttcaacagtctctttagtttaacagtaagtgtcttttcccctttgcatcatatattttgcattttttcctctcctaagatcgctgatggcatggcgtatattgaaagaatgaactatattcaccgagatctccgagctgctaatattcttgtaggagaaaatcttatatgcaaaatagcagattttggcttagcaagattaattgaagacaatgaatacacggcaagacaaggtaaagtaacatacatagatgcttataatctaatgtcctatgcttgtcttaatactactttgaatacccagagccttgtggaatacaaaaagttctagtggatagccaggtccctgcctgctcctgcctgtgggctgtcaggtaggatgcagcttcaaaagtcctttgttgtgaggctgcctttttgtcctttttgtccagcatgtaacatgcatgttcatgtagacctgacacaaaactatctgtagactaaatgcctctgagtgggtgtttctcatgtagcaaagcagctctctatgtttgacccctagaatccctgtcatctgtaatcctaacatttctgtaggaggggatggaaggtgaaggtaggagagccattcagaagctggcaggccagctaacctgcagtaagtagattagcatcagaaatgagagaccctgtcttgacaaggtagaaaaaagaaacaactccctaaaatagtcctgtctgccgtacccatgctgtggcatgaatagcctgcactcaaatgcatg

SEQ ID NO: 29951 - DNA, 1096 bp, Mus musculus
tttgtttgggtttttttttttatttcatggtgatcaaggaagcttcctttttttaaaaaatgagtcctatatttatataacatttctccccaatattttctaagtgagcatactgatggaagtcaaaacaaagacatcagtttttgttttcttcaatgttttttttttatttgttttaactgaccaaaggagaaagaagtctaaggaggaatctgtgagaatggagctgataaataaggagactaaactctcattaaatagccaaccttattcagcacctcaaacagtttgtactctgagggttaagaaaggtcacatgagtaaagttctcatgagttcaagctgtgtaaaattcccatagaggcataaagaggatagttttagcatctaattgatttacaaccacaaactaatgaactatctgaagtaaactcaagtcctatgctacacctaggaggagcacaaaaacacattccaataataatttcatgtttttcaagaaacttaggtcacaagacttgttttcttagaatgttctcataagcactcagaattctcctcacatgacactattcctggactatgtttctcaacagtgctctagtagaagaggcaaaattaaacaaaacctgaagccaggtcttgccaaggaagaaccaggtgatttgacagtacatttactgttaaaaccgaatgtcctgtagaaaaacaaatccactgtgtgtaattcagaatgtcaacgttgtcagaaatagtatctgctcaggacccccacaatcaggttctcagcacaaaggagatttgtttgcctccgtgggagagggcagtgaataagagacagacgagagatagaggacaaggagaaggggaggggagagggagagaggcgtatttgccctggaggacaaaggactgcctctggatagagacagatgtggccccttaggcaaatggaggcttataaaggtagagggggaaattccatgtaagaataaggtatttaattttaattgggtgtattcattaggtgagccaaaggaagctttttttttttgttttttttttttttgttttgtggctttttcgagacagggtt

SEQ ID NO: 29952 - DNA, 3357 bp, Mus musculus
cttcctccaacaagaccacacatattccaacaaggccacacctcctaatagtgccacttcccatgggccaagcatattcaaaccaccacagtcatattaaaatacagattattatttaacatttctttatattaattgatatgcctttttacaagataaacttgatgtttcttcagctactagctaggatgtttactctcttttggtatttatggccaagactgttgtttttaatatttgaatcttaacattaggtatggtaaaccgtgaagtattggaacaagtagagcggggatacagaatgccttgcccccagggctgtcccgaatccctccatgaattgatgaatctttgctggaagaaggatcctgatgaaagaccaacatttgaatatattcagtccttcttggaagactacttcactgctacagagccacagtaccaaccaggagaaaatttataatccaagtaacctgtgtgcacagatctgccaaaacagagagaccttgtgtgagttcttcctgcacagaaatgagaagatatgcttcactcggcatgtttcttatggtaaactggaattccagatacggttactcaaaaccactttttttttctccaagcattaaactctaaagtaccaatgatgcatcttacagcatacttcagggtccagagaaagtagagctagagagtgtgattgtgggtgtagcatggtaagaaagagcaacaggactactggtcattgccttttcttccccaaacttgccaagagaaaactacttcttggtatgtataaaacttggctgttactccacaggaaaattctaagatcaaagaacttcatgggaccaaataattccattccagttttttaaattttctagaattttttttctcaaagtttttttttgtttgttttgttctgttttttccctgtttaatagtcaacatgcactcctatcagaggcctccttttgtgtgaaaatgggccaagtcttccaaatgcaaaggaatggattataaacagcatcaaaaacattgatttaaaaagccatggaagttagaagcataatacagtatgctcacactttgtccagagaactggaaagcaaaacaaatttttcatatcagtcatgtcttaaattgttcagctttgaataatgaaggtaaccagaaagtggattaatctttttacaagggtgtattaatttttaaagggttatatacaattgaaattattctatccagtccaagagaaaaatcttttaatatttgcatagcataaaaataaaaaacaaacctaacatttaagcagtcaatttttaaacaataagtggagtactatgaggtgttgctagtatgtttttatgattatgggctccacaaatagaaaacatcactagatcagggacttgaatgcactttgcttatattgagtatagaataggagagaagaaaatgtatttaaagaaatatgagagacgacatgtgaaagttctacaggtattgggatggggtgggatgtctaatgttggtgttgtagagaaacaacatggctttctggcactcaaaactcctcattagctgttttcttataccttaaaagttttaaagtatgattgtaaaactaattttcttatcatatacactgttttatctcctcaaaatagtgaggataaggctctaccctaatttcagtggcccagcttttatacagaacctcttagaacaccaagtttcaaatccctgttggaaactttacttacattacaactatacttgatggttatcatattttccttttataattaatttgaggaaaaatacttactgagtaactgtaatataaaggggggattttgcccatttaaagtacaggtgtaaagcatttaaaatgagagtttttctaactcagaaattatgaaatattaatttgaactgagtagtattaacagtttaaggatctagcaagaggaaaatggagtctgctaaaagtctaatatttatgttttaaaatatattattttatagttatactttaaggcattatatcaagttctttttattttcagaatataattttgaactaccatcagtaaatgtaaaaatgtgtgccatggtaaacatgttcaaattttaaatgtgacaagtgaacttcatgcaaattggcaaaagttctggtactaaaagttgtatttgtttttcttttacttaacctattcagtactgactcctctgccaagagggtctcctgagaagactgggtcctcttgccctgatgtctactctgtgacatgagtgttttaaagggcttcatgtgaactatggtattatagtgtatgtaagcattcattaaagggtaataaaatatgtttatgtactaaagctgatcagaaaaataaggcagaaaaattgatggcattctttagattttaactaaatggagcagctccttataatacaaattgtatagtaaggatacaacactaattaatatgttttcagtttaatttgttatgtattttttaattatcaagaaaaagaaacagttttgtacatttgaggatttttttttcaacagctttcatctgtattgtcttaacgtggaactttaacacaccagaaacgaaagttgttaaaagcagccttctagcacaaacacttttttaagtaaataatggtagcctaaaacttaatatttttataaaatattgtaatattgttttatgaattattaaaataaaattctttgttgaatgcatctatgtattcttttctgttgctctttgtatttcattaactttgtaaattttgacatattctgaatttattcttccattaggggaaaaatgttcagttagaacatccttggaaatccttaacagagttaaaatcgtctcttcttacatttagaatactgttgaatttatttcacatgactaatttcttgtgtctagtaaatgatatgttctaaaattgtatcagcaaatacagttactgtatcacataggaacccttggtgttttgagtgaagctatttaggacatgtaggcagtatggaggctgtaaagtagagcagccactctgggccataggaattcacacacacatctctatgtgttctacaattctcttttcaaaggtttaatgaaaataaaaatttaaatatcaagtcaaaagcccttatcattttcggtactgtaattgtgttgattactttttactactgcttcaagtaagatttttcccctcttcatgatatctttaaaaacatttccaaataacagtaaatcagcacaatgctttcttcagtgcattatttatggagtatatcaacaagcctatggcatacatact

SEQ ID NO: 29953 - DNA, 1615 bp, Mus musculus
ttgctcctaggacctgcacacaaacagccccaggtacagcaagggctcctacaatgacctgagctttgtaacacatgccaacaaggagggcattcccatgcgcaagggtgagcccctgggggagttcaacctgggctccaccatcgtgctcatcttcgaggcacccaaggacttcaacttcaggctgaaggcagggcagaagatccgctttggggaagcactgggctccctctagtcctctcggttgtggctgccaaaggatctttccacacaggagcatgagggtcttcagcggagcctcaggctgtctgggtgaggggcactgcggggctgaccttataagattgcctgtccatgggtgcagaggagaggttctgggtctctcaggacaggacctagaccccttttcagagtatgggtgggtgtgatttgaccccaaagtcactttcaggggtgttttaaatttttgtacaagccagagcctcccacccctaactcctggctgtgtactaccacaccctctagctgtgacccctcccgtcacagggctctctcaatgtgcacagggtgaggtgcctgctgggcacagactgtggatccactgtcttcctagagcaggccacatggccttcataactgctttctgctccccaatttcacccgtctgctttctggaaaagtaaaatcatttatataatgctgaatgtgttatcctgggctctgccagtgtcttctgaggacaatgactaatgatgtagacctttgtaggctctaagaagctggctgaatccttttgctggtaggcaaaaccaattaattactggcttgtctggtagagtctggagtgaaagggcaggtggaggccctgccctgcagaactaggggacatgctgctattggtctagggactgtgttggaggcagagggtatagaggtcagtacctagaaaacaggtatgcaggccatggggaacccagtggtagggacaagaccagagttcatgtcgatcttgggaatgccatgaatttctcctgcaggagaaatcacttaactttttcaactgtatcagtagtaccgtattttgtatgaaaagtaggagacttctgaacagtaattcatttcattgcaagacattttgaaattaaaaaaacaaaacaaaaactaccgtagctttgtattttgttgttgagggtggggcagtgtgtccaaggcctggtgaaggatagcacctgtcccccagggatgggcccactagcacagagcccgtctcaggctgacactgggcctcgagctccttagccagctgctggatctgcagttccacctggggacatgggagagagggagggacaaggcaagctgaaaggaaggacagccaggggcttacctcctccagttcggttttcacctgctcttctagatgaaggtccttagatctcggcacctcctggcttagctccagccacctacgcaggctgttggcttgttgctggcatgacttggagatggggacacctatcaggctgggtccttggcacagcctcaagcgagccctttgaagaggtatattggctaataaagtgctttgagagaatggccaacaatcttctgtctt

SEQ ID NO: 29954 - DNA, 1191 bp, Mus musculus
ggcagcaggctgctatgtagccaaaagtcattattggctacatgcaggccatgtacaggtgctcactgtgggatgaatggcacctggagcttgtccaaaagccaggccttctttctgtcctacccaatagcttcctccagtgactccttcagaaaccagctggtcacccgggaagggaatgagctgtaccactgtgtcatctacctggccccaggagactaccactgcttccactcccccactgactggaccatctcacatcggcgccacttcccaggtctgcccaggggtgggcattagaggccctgggccttttgacttgggaggactgggcttgaggctggtgtcgtcaaggccaggagaggacttcttgaggtggctgactataggcaagggtatctggggtcctgcttagaatttggaacgcttggcctgtgagtccctgtggctctttggccattctgatgtgaacatgtcaggctctgagcagaaagtagcatattctcttgtctcttcaggttccctgatgtcagtgaaccctggcatggcccgatggatcaaagagctcttttgtcacaatgagcgtgtagtcctaactggagactggaaacatgggttcttctcgttgacagcagtgggagccaccaatgtgggctctatccgtatccactttgaccgagtgagcaaagcccacaggccaaacctcttgggtccaaccacttcatttgctgtacagccatatctttgggcttataaattttgtggtggtggggggggggggatgttctagctctgaccaggcttggctctgctgagcagctgctctgcagacacccctgtcagctcagcctccctctctctgttgcccaatctgtggccattcacctgcctgaaccaatcccacatcctatcacactgcttctgccaggagccctgatcagaggcaaggatggagcctgcaggagggtagagttggcttgggtgagaaaatctggtacccactctgcctttttaggtgttaatggttgctgctggcgctaacctttcagcatttatgtctgacccctgccccgccttgtcaaagtcacagctgatactgggagtgttgattagttaggcctttgccctgagagacttgtctctgccacctgggctgggcagggttgagaacaggcaacaggctaattagct

SEQ ID NO: 29955 - DNA, 2034 bp, Mus musculus
cttctcagtcctgcccactgaatacacatattcatttagtgacgtgcataaaagcagatttctctcgtaaccacttaaaaactgttaaggtggagtgtgggtttctctgaaatgttggtatatgatgaagttagcagtggtgtcagaggctgaccaagagtgttttcagctgctagagtgcctggttctgtcaagggccagagccagtgctctctgagagtgcctcgtggactctgctccctcgtcaaacctactggaaaggtttgcatgctacaagtagcacagttcctaggtttgcgcccagaggagtctgcaggcggtaggctgccgtctgtcgtctgagcagcaggccctcagagctcaccctccccagtgtccttactgtgctccttcctctcctgtgtgttctcatcccaccctctctcccattcattcttcacacctaccgctcagaggtcagaagttcaaactgcttggctgatggctaagatgctcaagctagctgctgaacaatgctcatttcttcccattctcctggcttggtccagggacatttctctgttcgtctgtagagaagagtgagcagtgctgtcctggaatgttggccaacgcttctacgattctttcattccccatttgtcagtggctaaggagaaggggcaccaccagttcagggtctttatgtgcctttcctttgcgggttggtggtctgggccaccctgaaacagttaaactggacataagtatggggaaacgtatcatgtccttcacctcctcagctgtttaaataagttaacacacacctgctggtgtatggagacttgaaggtcacagctctatcacagaagagaacaagctagtttgcacgatggtcttcagcagtgtatgcagatcctggtttacacatgatgcccagaccatacacacgtgacctgtgttcacctgaatctctctctccctcgttggggcaggagttttagttactcagtgcttctgaactctgtgttgttacttcagggactgaaatgagttacacattttgcccttctacaagtacatctaagacactgtacattagacagcttgcaagctagtgggcagcaaacagcctttcatcagtttaaccaccatggttactggggcatcagattaccccaaaaaggtgaggtgtccacagctggggtaccaccagtatacagacctttagaatttgtccatgactagtgtggcatgtaagaggctggaaacactggtctggactcttagcatctcggagcacaggacttgtcctgggaatggaagaggaaatctgccatcttggtctgccctccagctcagaactaagagactcagccacacctgtcttaccatcatgtttcacagtggtcagccagcctcagagacaccttagtgtcctcagaaccttggtctttgacaatgactggaggtggtggctgctggcatgtcacctgccaaacctatagagtggttctgtaaaggtagaatttctgaggatggggacttgccactcaagtgatgagaagctgacattaagcacaacatacctagctgtagctcacctccagaagtttagtgttttcatgattatggggaaagaagacaaatttcaggttcagccagatttcagtcgtttccttggccacctttcagtctctcgccagagcagcctcttccctcactagtgcctgtcttcttttcctcccctgctgtcccatcccgcctctccacccatctagttgtacctcatcacctgttaaagcagattgtgtctgtcttcctgctgcccttactataagagctgactgagagaggtgcagtgggaagagatgaagcttttttgccttactggagcctgaagagctcagaaactcatgctgtgaatcctaaactctgtgctcctccaagagctgtgaaaatcatgactttttttttttttttttccacaattttgcctgaaagggtcttctgtgagggctccagagccagcctgaggtcagttctagatcccaccct

SEQ ID NO: 29956 - DNA, 1147 bp, Mus musculus
acaaaaattaattttaaggtaggtgttgggggcacatgcttttaatcctatcactttggaggcagaggtgggtggacttctgtaagttgaggccagcctagtctgcatgagtttcacacctcattcaggcctacatagtgaaaccctgtcttagttagggttttactgctgtgaacagacaccatgaccaaggcaagtcttataaaaacaacatttaattggggctggcttacaggttcagaggttcagtccatcatcatcaaggtgggagcatggcagtatccaggcaggcatggcacaggaggagctgagagttctatgtcttcatccaaaggctgctagtggaagactgacttccaggtaactggagtgaggatcttatacccacacccacagtgacacacccattccaaccaggtcacacctattccaacaaggccacaccttcagatggtgccactccctggtccaaggatatacaaaccatcacagaccctgtttcaaagaaaaagtaaaataaaaaaaagggaaagatttgcaggtgatgttagtgacttgtgcttaaaggtggtgtgtctgggaggcctggcaagcccttcaggatggaggaagccactctgtgttgtgagttggttttctgtatgttctgtctccatttgccagcctgtcgtccatcttgatgctttattctttaggagtctcacgaccataggactgaatatacttgttttctaaatatgtctaggtaagtcacatttgggaggtttggtttttctttgtggtttgtttttgagaataggtcttgtataagatggccttgaacttcctgtctgcacctctgacatactgtgattacagctatgtgccaccaaatccagttttatgccgtgctagagatggaacccagggctttgcgtgcgaagcaagccctctcctgtgtgcgcttactatatcttcagccctgggttttgttttttttttacttttactttcttctgctttcaagttcagtttatagccaatatagttatttcctttgacttatttatttattactaatacttagcacaaggttgcccgtaagagtggattagatcaggcgccaaccttcacagtagttacgccagatcccagtttgtgtggaaac

SEQ ID NO: 29957 - DNA, 2302 bp, Mus musculus
acatgaaggcaggaataccaatggatttacataaccctagtgaaggagatagcacatacatcagtgtcaacaaaaaggtttgcaaaacttgtcactctcttaagaattccattgataaacatttgcctatgacaatggaaacagcaattagaatgaataaagaagaaactgaaaaacatcagactggactactgggtcacatacctgttggaaaagcatctgaggagaccagagaaggtcatggtggtaattctcagacccacttgaaatgccagagagtgcaaaatgttactgaagccccacaaaaccagggacctgtggactctgccttgccaaaggaagcatgtacatatcaaaagggcacacatgcactgctgggacaacacttgtcgtcaggcacagtgtcagatgaggtgcaggataagcaacctgtggctgaccaagatgagtccatcctgataggagcaatcaccctaagaaagccatccaaggacagaattgctagacagcttcagtggttgaaatacccaaaagaagaaagcttatgtcattcattaaagaaagacactgagttatgcacaggtacttgccttcctggtgcctcctggaaagaacatgaccccagctttgctggaggtgaccgaatacacggtgcctttgtgactctgtcacatcagcacagattgctttctgtaaagaagcagccgcatcggacatgtaagagaatttcctgtcaggagccggtcactgtgcggagaaaaataagtaaagtgagaaattctgattgtggaaagagtttctctaacccaatccccacaaaagcacacagacttctcagcccatgtactgtgcctgccaagccattggaacctgaaaccgtagctagcgagaacttgcgcagccacataccaaagccgaaggctactctgtgccattccttgaggagccggagttgtaggaagcctaccaaagaatcagccttactaagcaagctgtctgtccttgcctccagactgacaacggcaacaaagccccaggaacttagatgtcggcgggattcctcttcccttgttccattggctaaaaactacaagcgcctcagatataaaaagctcctagatggattttcacataatgcaatgcagctggacccatatttggcagctactgggtggaatagagggtctaacagtaggcccttggcactttattctcttgaagctgttaaaatgagcttcatagatttgagcaacaagatgccatcactgctgtttggtacggaaaacgtcccattttcctttcatgtgaaatcagtgtccagctgcatggctgagtcctccaggacttttcctgagcactgcgctccatcgaggcttgccttaacagaggcctcccagtgctcagctccagctcccaagtggaccttctcttttttcttgtcccatggttgccctgggatggccacattcagggaagacactggcctcagtagtcagacacacactcaggctcctctccaagaatatggaggcactgccatagttcagaccagggcagaccgctctggccttggccttcacacacttctagcactttgttcacccggatgttaccgaatctggacaaaaagacggaacttctccagtaatatgcctatcatgcagaggctcttcctgacccagtttacacagggcctaaaagggttaaggtctccagcctctatagcagataaggtcttctgttctctgccctactcggtgggccgggtgttgtccctttggagccagcacgggccctcttgtaccttcaaattgccagctcttcattccacccctagcaagcagcaggggagcctgaacgccctgagcaggtaagaacttgtctccttttctttcattctgttccatatctgtctcctgctgcctgggaacggagaggggccagtgctggaaacacaggactgcctgctgggggctacctctattacattgttcaattgtaaagtctctgttgagaatgcggtagtaattcttgcatttagaggccccgatttgccctctgactccttcccccaactcttccacaagactccctgagctcctgatgtttggctgtgggcctctgcatctgtttcagtcagttgctggatggagcatctcagaggacagttatgctaggctcttgtttgtaagcataacagaatatcattaatagtgtcagggattggttccttatttgtttgtttgtttgtttgtttgtttatttatttgagacagggttttcctgtgtagccctggctgtt

SEQ ID NO: 29958 - DNA, 1425 bp, Mus musculus
caactgcagctctgccagaactcacagaagagagacaaggtatgaaagccagaggaaccaagggggtggtagtaaggggacggtaatgaaggatgctaggtggcactgtgagacaacatctgacagctgggagcagtgcacatccaggagtagataggagcatgaccagcaatgagttttgggaaaacatagctttcattaccacagaacctgtaacctttgtggacaaaagcaactcttaaacaaaaataaatggagaattactaatttgtcctttgtttgtcattaccagggacctgtactgtttccagaatgagcaaagggaaagaagagtcatgtgacttagaccctgtctgggaagaagctgacaatcaccagcagagtctcagccactgcaaggaaaagcacagttcagcacacaatagctccatcactaaaggaagcatagatactgtaaagccctccgaagaaaattctaaaatcttatatctcacatcatttttgtctggtccaaaatccttagaaaaatgtggtttcgaatgtagtggattgataaaggcgtgtgctgaaaaaacccagaaggttgatcaaatggaggacttcacttgtggagaagaaagggctgtggaatccagtaaccacagcaactgtcacactgaagctggttgtccctgtacagacagctgtacttccatgcgtaattcttctactgaagccacagaaattatgtttaaaaaaaccgatgtgaaaattactttaaaccttcatggtaatttgataaactctgaggaccatagaaaaactgttgatgtgacccatcctgagaaacgctctgaggaaagcagcttttccttgttggtgcatattgaagaacctgaacaaacaactgtaaagtccagtgcattaaatgggaagatttacagtaaagatgctactaagtctgtagtcagcatccagaggagtctgggtgactctctgccaagtacagcattgtgcaacaactttctgtttgaaagaaagcctcctcagagtttgatgtcagaagacccaggaagttctgaacataatgaaatatcaaaacccaagaaaggtactgcaaaattaccatcatctccaggaaaacctgttcagacctcatgtgacagcatctcacattttgatgaacccatcaccacctgtgagatgagtaaacgttctcctaaccgagccctggttgcacacaaaatagagcatgaatgtgtttcacatcaacaagtgtcccttagttctcaagaccatgtgacaactggctctctaagtataaacagagaaatgccttcagcaacatgcagagatgttcaagagagccaccattctctggagaatggagtaaatgttacccctgatactcaaaccattcctgctgagacaaaaatggaagccatg

SEQ ID NO: 29959 - DNA, 1093 bp, Mus musculus
aaccccctctttaaagttagctccccatcttcttgtgaagggaactagaagcggctgtagacagcggtgtgagctgcatggctgagcacagagaaacttctctcctgcactggcttaagctggcactgtaccaggtgctcctgtacctctaactcttgatttcagaaggcacttacaggagctgcatgccgacacacacctgcagtcccaccactcaagaagctgaggcaggacgactatagctttgtttgcatctgcttcaagttcagactccagagaagtaacctttttatttattaacctaaatctgagcttttcttcagttctcaattcctgtgactactggcagaagtcctggcgttgcacggagctctgaaataataactgcgtttgtgagctcagctacctctgcgtcttctcttgactgtggggttttcttgctgcaggatctcctcccgagacaatccagcaaaggacctgtgtgtgcagacctccctggagagccacaaaacaacggaggtatgctacttttttcttgtttatttttgctttttctgagacaaggtctcactatgtagtcctagctgacctggaactcatatccactgcctctgcctcctgaatacatggaataaaagcatgtgccttatacatgggaaggtgttttgctttgttttgtttttttatgattcacttgtttatgtgtatgtgtgagcttgcttaagtgtgtgtataccacatgtgcaggagccagtggaggtcagagaggatgtcaggtccattggatctaaagttaaaggcagttgtgagtcacagtgtgggtggtgggtacccaaacagggcctattgcaagaacagtaaagcactcttaattgctgagccatgtttccagaccccaaattgaggtttattaggaaaaggtttagttgttttcttttgcgtagctgccagaatacactcctagtgagaatagtgtttctttttagttactgtttgtttgcttgtttgcttgagataggttttctctgtgcagctctggctgtcttggaacttgttttgtagaccagactggcctcagactcagaaatccccc

SEQ ID NO: 29960 - DNA, 1167 bp, Mus musculus
cattgggtgtagcttgaacatttaaaaataatttctgattgttggtgtgggagatttgaaagactcattagaacacttttaagagggatagctcagccaagttggtggcatgtttccttaattccagcactaagaaggcttaggtgggggtgggggggttgggggggtgatgtgagtctgaggctagcctggcctacataggaagtttcaaattcatcaggcctacaaagtgagatcctgcctcaaaaaaaagtggctcataaggccttcgaaccctttcccattttctccatcttagtaagcttggtggtctatgctggctcttataaggggggttatatatatatgcacacacacaaacacacatatgcagacctgtagacctggtggtattttaggatgaggagacatcaggtaggacctagccatagtagaacaaacagtaagtagtggattgaccaagagaaaaaaatataggcttgggtttttgttttttgttttgttttggttttttttctaggtacgtgacttcagcaaaccctttattttgtaaaaaattgaataactctcttgtcctagggtttttgctaacaaaataccatgaccaaaaccaaattggcttctttggcttaaaaatcgtaaatcatagtccattgagggaagctaaggctggagctcaaattgggggaacctaggagcaggaactggggcagggactatggaggaatgctgctgttggcttgtccaggctgttttcttacatagcacaggaccaccagcccagggtggtaattaaggaaacatgacattttctcagtcaaggtgccttccttccagatgactctaacttgtgtcaattgtcataaagttagccaacacactcccctgtccagttcccctatgtcccatctggataaggttgtgtaaataaatcaaatgcaaggtgagaattaaaaggcttgacactgtggtaggcaggtgtcaagtgttagcagcctttccgtaagttactaggtagctaggctatggtctttgccgtggggagtagcacatactgtgttgttctcagaggaatgataaattatctatttaatttttcagtctgcctctgagaaaaccaaaaatggtcgtgatacatgtgagtatttttaacattttttcatcact

SEQ ID NO: 29961 - DNA, 1195 bp, Mus musculus
agggttccaaagttgaggccctgtctcaaaaagacaaacaaataaacaaaaaagcccttttattcttaaaacaagtaagaattcatgggaaatatcaaaaggcatataggaaggttgttgaaccatgttctcttcccagtggtaacattgtatttgaagtgtacatgtgtatgtagtgcagcctctaaaaccagaaacttgacattggtaaaattcacagagcttatttgcttatgctgcactcatatgctttgtgtgtttttatcatgtaaagattcatctttcctcagctgctattaaaacacaacagggagccgggtgtggtgacactccttcaatcccagcactccagagacagaggcagttagatctcttagttttaggctagcctagtctacaaagcaagtcccagggcagccagagctgccatacagagaaaccctgtctcgaaaaacaaagaaacaagaaagacagaacagttgtgaggccaggcctggtggcacaggtccatagcacagctcctggggaggctgaggcgggagggtcacaagttcagtgcctgtctagactgcatgtggttcaagcccagcctgagcaacgaggaaacattctctcaaaaagtaaaaaattaaaaagtgggggtgtttgggaatgcagtccagtgggagagtgttcgccatgcatgcagaagtctgagtcacactgagttcctagtacaccgagaagaactacagagcagtgctgttactgtcctccctcctgcaagcatgcagagccatcccctgctctccattgtcctctataatttcattacttaaggatatgtgggtgggaggcacatctgtcctgattgtgtgtacagcctaaggagtgctgtatactcacagttgtcccttgcagtggaaggagccctaacaggcaggtaggctggacagacagcagaccattatcaagtcaggagaacatccagcagagcacagaggggacctttctctgccacagagccaaggccacaccaagctaggacagtaggacacatgacataaacatgcttgcatcggaaacaagggagggactcctcatctgagtcccagttcaactgcggatttgccaattaaatgtgtatgtcgtactgagattgctttgatagaggacatcactgtgcagtctgaccagtcttttaattagcctcaac

SEQ ID NO: 29962 - DNA, 1152 bp, Mus musculus
cttatctatcacgcttcctctgtgcctgttagtgtctccctctgccagggactctcaggtccctctatttagagtttctctctctcttttctttctctctctcttctctcttctctctctctctctctctctctctctctctctctctctcctccttacaggggatttctgtgtcattctggatggctttgaactcacagtctcctgtctctggctctcaagtattaagattacaggatactccagcataacatgctttaaattgcactttcctcttttaaaaactgtcaatctagagtgctttgtaggacctaggagggcagaagtttaattttccccatccatagtgccagcaaagtgcctttttcagagtagttgttctgctcgtagcttctgtgtgcagtactgggggtgggcccagggccctgtgggtgctgggtcagcagtctcccacggggctacatccctggtcctgcctgtggctttgcatggagtgaaagtccaagtggagatgtgactctgaagtgatggtctacccaaaggtccatctcagaaaacgctagaaaagctaccatacccctaccacataccccacctccagttctgtggtggctcctagctcttcttctaaatactctggataattggagtgagtatagtacatcttctctgaggtggattgcctttgctgcaatcctgggttgccccaagtggaggtttgtttgatttagtttgttttttgttgtttgtttggggttttggggaaaaggggtctcactatgtaaccctggctggcctggaactcggttttgtaaactatgctggccttgagatctgcctgtctggggctaaagtgctggggttgaaggcatgaaccacaatgcctggctaaattgggttcttaaaaaaaataaacatcttggggctggagaaatggccagcaactgagagtatttgctgctccttgtagaggactcaggtttggttcccagcacccaccctgggcagctcaccactgcctgtaactccagctccagaggatccagcacccccttctggcctcctagggcacttgtactcatgtgcacatgcagacaagcaaggacacatacatacacacaataaaataaaggtcttaggctaggggtgtgg

SEQ ID NO: 29963 - DNA, 1142 bp, Mus musculus
taataaagccctccctccctccctccctccctccctctctccctcccccggtgtctgttcccagccttgttggtagccaggccagtcaggtcacctcaggtggccagagggcttcaggacacactggtcttgagtctggctctgagctggcttgataggtttctttttcaaagtccttgggcaagaacaaggatcttctggacaggacaggactactgagcagacagtacagtacagtatagtaagaagctctaggcttgtcatgtcagaaatatgcctcgttaagtggatgggccagctcagggaagcagacatcacggcattccctacacgtccagtgagtgcttttcgctctagactgctcagggaaggcaaagaccgaagaccatgactactgcttcctcctatactagagttaatcacacaccccattgatgtaccttttttttttaaagattttattcatgtatttggtatatatgataaatacactgtagctatcttcagacaccagaacagggcatcggatcccattacagatggttctgagccaccatgtgcttgctgggatttgaactcaggacctctgggagagcagtcagtgctcttaacctctgagccatctctccagccccttgatgtaccttaccttctttacctctcctgggccctatgtacaactccaggtccagccttccttgtttctcttctctccaggaaacctaacttgtctctggttcatcctactgcactctcctgggaaactagggttttgttgggtttttgttttttaaaaaaactactccaagcaggtacagcagcttcctgtaataccagtgtttaggagactgaggtaggctggcctccatagtgtgtacttagcaaagttgagctttacaatgagactgtctcagaaagtctcactttggggctggaaagatgactcagttaagagcatttgactgatcttacagagcacctgagttcagtgccagcgtgaggtcactcacagccatccatacctggagttccaggggactccacaccctcttctgaccttcttttgcatcgggcacacatgtggtacatatacatatatccacatatataatacgtgcaagcaaagcactcacataaaacaa

SEQ ID NO: 29964 - DNA, 1339 bp, Mus musculus
tgtgtatgggtgcatcgttaggtcaaaagagaggacatcagatcccctggaactagagtctagacggtcgtgagccaccatttgggtgctgggttgggaacctgggtcctcccagagctccaagtgctcttactggctgagccatgtccctagctcctgcatgtgaagcttttgagagagtaagctgttaacgtgtgaaagtgtgatccatgggaagtaagcctaaaaaaaacttagcttcacacacacacatacttttcttcccatgaatattgctcctccttgatgtcagccttcttgtcagtgggagctgtctggagtaactggggggttgaggcaggtacagctggactttgtggagtgtacctgtaaccgcagcacttgagaagactaaaggagagggaagaaggttgctgtgattttgaggtcactccaggacacacacagtaagacactgtcccaagcaaataagcacacacaaacaaaaaggatgttttcgtttgaaagagcttagtactgaaaagagagtaaatcaagttctcgttttcccagatgggtatgttcagggttccatgccagcctcctctgtggtcacagcagctgttggccacgccagaccgtgtgatctcgtgtggtcctgttatccatcctatggagccatcaattaccccttcacatacagtttttgtcatattccagaggtaacttggaagacatagaaaattacctggcaggagttcaactgatggaataccaggtcacttgcctatcagctgtcctgagatgctcctggccttgagctccagttcctgcagtctctagcattccagattccaagctcaataaataaaggtgtttgccattggtgatttaagttcagctccccagacctatatggtggaaaggatcaactccagaaagttctctgatggccacacagatgttgtggtactcatgtatccacatatatacatacatgcataaatttaattgaaaaattttaaatattaagatctgttaaagttcactaaagtggatagaaaacagccggagagaagcagaataaaggccaatttattgttctctacagccacctactttctgagcgcttactgtgtgctaggcgtgacacatgcctgagaagaggtaaagggaaggcctctggaggtggaggccaggccatacagctgagaggaatccaggctgactgttttgtgggatagcatgacatgatcatgtgctgtgccaatcctctttgccttgaactgcaaattccatgtattcagacacaggcatcctgtaacagggccatagcttcccacacagaatccctgctaga

SEQ ID NO: 29965 - DNA, 1177 bp, Mus musculus
aatcactatatctagtgctaaacctatctgtattggcagcacagctattcagatctgccctcctgtcccttgggaagcagtttcagataaaccttcatgggcatttgctggactgatggttgctttgagtcacagggcgcttcctttttgaattgtgcagagaagtgtgttctgaacaaggcattttattatgtctgttgatctctagcaaatccaggtgatggtaattgagtgtagaaaggagaattagccaacacaggctatggctgctatttaaaacaagctgatagtgttttgttaagcagtacatcttgtgcatgcaaaaatgaatttgaccctctcacccctcccttcagctaatggaaactgacacagcgacaactcattccttcaccatcagctttataaactgtttcttgtgagctttcagcagcccttgctgtgcctctttaaattatgatgtgcacacaccttcctttcaatgcaatgcatcagaagtttttgatatgtgtaacttttttttgattgtgattaagaatcatggatttattttttgtaactctttggctattgttcttgtgtaccctgacagcatcatgtgtgtcaacctgtgtcaattatgatgggtggttatgaaatgccagactgctaaaataaatgttttggacttaaaagagtaaataaatgctgctttagggatattatctgtgcctggccttgattttttccccctcccccttctcaaacattgcagcattagtcatatacatgaatattcagacttctactgtactctgatttcattacatattttaaagcacacagtagtgttctatcaaataacactttgtccttgttaaccaatgcttataaatgagcaaagtgctgccttctgtggtgggaccctctgtaagttttggtctgtgtcttttgggagggtggtggttgacctacctgagggttggctggtgtttagtacagacagtattcgttccaaagtagataatataaaatgctaattagggggatgcaacctggggccttgaatagttttagccaagtgtggtggtacatgtctttaatcccaaccctaaagagaccagagcaggtgaatgccaccctggtttacgtagtgaactcgggctataatagatcctgtctccaaaaggtatactaa

SEQ ID NO: 29966 - DNA, 1167 bp, Mus musculus
cctgtctcgaaaacaacaacagaaataaagaaagaaagaaagaaagaaagaaagaaagaaagaaagaaagaaagaaagaaagaaagacagacagacatatgggagggagggagggagggagggagggagggagggagggagggagggagggaagaggtgagaggggagagagagagagagagagagagagagagagagagagagaatatagtggagggctggggtgtagcttagttggtaaagtacatgcctagcaaccacacaggcctgcattcagtaccgaccatcacacaaaactgtgcatagtgcagatgcctgtgactccaatactctgaagatggggagagagaatttggagcccaaagttatctcctgctacatagtaattggagtcctgaaacagtagagtccaaagaaatggccaagaaagacacttttagagtttctagaggaataacaatacattttctaaagaaatgacagaacacggctggagaggcagctcagtagttaagcacacatactgctcttttgttagtaatttctttagattatatattttgtctgtggatgtttaacacacgtatggatgtgtctgtgtctgtgtctgtgtgtctgtgtgtctgtgtatctgtgtgtctgtgtctgtgtaccatatgcattcctgctgcccagagaggccagaagagggcctcagattccttgaaactggagttacagatggttgtgagccaccacatgggtgctggcaatcaaatcctggtcagccaaagggcagccagtgctcttcactgctgagccgtctctctggtctgtggacacactgctcttgcagaagactcaagttaggttcccaaaggccacacaacatctcacagctgccttaacgccaggcccaggtttccagtgtactcttctggcctccatgggcacctacctgcacacaggtacacacgtacgtacacacacacacacacacacacacacacacacacacttacataatcttaaaagagtttctcttcaggtgtcaggtgattcagcttccttaagagcagaataagcatttagaaaaaactcacaaccacaaaaccacagcatatagtcgcaggccccaagtccttctggagagttagcagtatcagttagcttggtggaagctacagg

SEQ ID NO: 29967 - DNA, 1191 bp, Mus musculus
gtgtgtgtgtgtattgtacatacgtatatatgtttccatctgtaggtacatttgcatgagtgtgcatgtgtatatacatgtttatatgtgtgtggtgctcatagatgtatagttgtgcatgtaagtaagtgcacatgagtgtggaaacctgaggttgatgctggttccttggccattctccacattgtgtacttaggcaagatctctcatttgaacccagagtccattgatttggctagtcttaagtagtcagcttactccagggtttccctgcctctgcctcccgtgtgttgggattataccacggccatctgccatgttggggatttaaatgtcagctttattcttgcacagcaagtgatttacccactgagtcgtctccccggcccttcatccaattttttttccagacagggtttctctgtgtagccctggctgtcctggaactcactctgtagaccaggctgcctcgaactcagaaatccgcctgcctctgcctcctgagtaaaggcatgctgtgattaaaggcatgtgccaccacgcccagctgccttcatccatttttattgtgtaaataaatccattgtacagatggcttccttgtacattttcctgcttgttataacctttgtgctcaccctttgttactttctcagacatacatgccttttttattttttactttgggagttcttcccggtgctttttcttagtgatttgcaagagttctttgcatggtttgggagcttatacttttacctgtggcacatgttgtacatcatttcctcctgttccttccggctgctctgagaccaaggtcaggaatgccccgtcccctcactcacagcagctgttctgctcttgtattaaactgaaccacatgtcttcacctgagaggaactacctactgagaacccaggctgtcttccctgaggacccaaagtctgctgaggtgaaggaaggatgtgacccataaagaaaaaatagggtgtccaatgggtagcatgcagaacatctaggaggccccaaagtggtcaccaccatatgggcaggctccttaacttgttgaggaacaagggctttggaccaagatagttgatgtctggattaattgggtccagaagcaaaggtttcctacaaggaatgatctaaaactaacagggctgaaagatggtaggtcctagcatttag

SEQ ID NO: 29968 - DNA, 1899 bp, Mus musculus
gcaggcaagggaggggacagtctgcaagacaatgaggcttaaacctggaccttggctagtaggttatgcagtagtgggtcatatgactggggctacacccttatgtaaggcccctgtggatgttagaggattgagctggatgggacagtctacttttcttggggtaagaggtttggcctcctagacaggactgctgggcagaactgttgttgggccagagagtagtaaggagtcagggaatggggcttggggaagacctcatgtgagaagccaggctgtgatgctgcccagcactgaccaagtgcttactgcctccaacttttctggacctcaggggtcattgataaccatacagaaagggctgtgtgcagcaggtgggtctctgtagagctcacacgtctgccctcctctctcagcaggtaccctccaggcgtcgtgagtgtggcccccactggcatcccagctgctgtggaagggattgttcccagtgccatgtccctgtctcatggcctgccccctgtggcccacccaccccacgctccctctcctggccagactgtcaagcctgaggcggatagagaccatacgagtgaccagttgtagcctgtgaggagctgtccagccttggcacctggtggagggtgctgcacgctcttggacccaagtgtgcagaggtggcatccagtgtgggccctagcactccagagactggcccgggcgtgcactaggcggggcaagaggaagcacgtccccaagttgattgtagttgtcccgtcctgtgggctggctcactgtcctgtgtcctttgcgttcctcgtttaagcaaaagaagttagtagctaattctatcacgaatgttcttgtctgtgtacagtttttagaacattacaaaggatttgtttgcttagctgtcaacaaaaagaaaacctgagggagcattcagcaagtcagtttgagattatttttccttttctacgttggaacgtgccccggaatgtggccgtcggcacacttctcaggacaatgaatccttcctgtttttctttttatgccacacagtgcattgtttttctacctgcttgtcttatttttagaataatttagaaaaacaacaaaggctgtttttcctaattttggcatgaaccccttgttccaagtgaaggcggcatcacgagtggctccgaggcgtctgcagtgcccagggtgctcaggaccaccggggtctgtcctgggggaggcaggggttggcagacccttgcctgcgtggtgccgtcctgctcatgtggtaggctagcaatattttggttaaaatcatgtttgtgactgtaaccatttgtatgaattattttaaagaaataaaaatcccagaaagagccggcacgcctggcaccagttttaatggcttcatcaaatgggagcactggtgggtcccttctggtcctagctctcatgacctgctccactcatcttctgtggagcaggcagtcctggggagacccagaagagggcagcagcaggtagggctatagtccccactacatcttaaggggatagagggccctgggttggggaggccatccttacatacagggagggagggctgtggtgggaccaccccttttctccaaacaacagcccctaggccagcagctcttggactggcattttggaaaaacccactgaaggaaattcaacagaaaattactactaaacagaagttttagcttgcatgcaaagtgccaggctgtgtgtgattcggtttcccatttcctccactgcattgtctttagatgcaggctgtgatccactgaactgatttgacagtaattcccaaaaggatctgagcctggcatcaatgtccagcctgcaaatcaaccaaagcaaagaggctctgcctct

SEQ ID NO: 29969 - DNA, 1314 bp, Mus musculus
ccattagttggtttattctatggtagcttactttttggaatgaaccttaattcagatcttagtttgcatggcattttctcattttaatgcgtaactctgctcttgttttccagtctctgctttctattcgtcaagatgataaagttgtttgcccaagaaccaaagaagtcttccacttctcccaagctgagaaagtatacatcatgtaggccccgagttgctatgggcacgcccttggccagaggcggtggtgggtgggagccatgccctcctgccctgacccctgaccccagaccccagcctgcatcgacatttgtttcttgcgaccaaagatcagtgagcaacgacaaatactcttagaaaaagaggaagtgagatttaataagtctgtgcttgagaacagcgtttgattggtaggatttgtaacataagtcgacgatgcctctgcagggtcttgcacctctcaaaggaaactttctctacagtgtgacctggaggttcacccaggaaatccagagcatctcagaagtaggaattggttcatcggttatttccctgtgtttctccgtttccttccttttgctagtgatgggactcaggggagcttgaggagcaggctggccctttgccaactcctgttggtcacagcttgggcaaggtgctggccacaccaggttggctgcagtgacttgtgacgtggtgccgaggcctttcctgacttcactgtctagctgctgccaaagcgccgtgcaccacatgcacctgggctgctacttgaggaggctctgcccacgtggccagtgtctggggctgtgtctgcacaggttcagcatctcaccttccagcaccgccttatctcctgctttgagaatgtattcacgggaaagccactggactgagtttctgcagaggccttgccaggtggttccgtagtcctagagtgtacatgcttttcattacagaaactgatagttcagctaaaataagtactgacgggttttcaaaacaaatgaaccattgtaattcacacacacccatattgtagaggtttgtatctagcgcttatttttgcatgttgatgttgattagctaatgaactgtaaatgtaaagtgtgttaataaaatagctttctatttctcatttgtgtgtgaggtgtttgtaagacctcaggtcccttgctaaccctgccaccccacccagtaggccatgcagcacctctgtgggacatgagtttgtctgtcacaacagtgaagggcactcagcatacctattttggtgcagtatacaaaacattgtctgctaacctccaaagg

SEQ ID NO: 29970 - DNA, 1235 bp, Mus musculus
cagtgtcccacctccaattccctgcctcagcttattggctattagcctttttttttttttattgacaagtgatgtttataagagatcctcctctctacagatcttctatggtaattccttttctattgattaaagggtgtgttttcaaacccggatgagcttaaaaaccccatggaatagccacacaggccactaagctctcctggactctctatcagcccctaacccttgaaggagccttcatgcgtacacctaaccctgtgctcacaccgacacatacagcacatgtctgtccatctgtctcccctacttgttgtcaaagccgccccccaccccccatggatcagccagggctgttaatacagcaggctccacctcatgctttggtgtctggatagggcccttgcatttccagaaatcgcaagcatgctgtctgaccattgcttggatgatgccatgaaccacttgcttctgggcaaaaaatggctgttgccatgttactcagagcagctgtgatcatgcatacaagacttagaggagatggtggggagggttttagactcttatctgagagtccaccccttccctactcttgggagatgctcggctatcctgtataggggatagaagattggcagaatttgggagatcccatcttccatatagtactatggaaggcagtagggctgtctcctcccccttttcagacagggcggctcctaggctgcctggagaagtcccagaggccccaggggtcggtcatgagcactgagcagacaatcacctcttggtcaaagcttttctcctgcacagtggtacacacttgggtaaccagagcctgtttctgggcctgggagatgggagatggcttcagtacccactctggactaaaaaggaggcaagtatgactctgctaggcctttgctcagtgggagtgggacagtgttgtcagcttctgtgtcgggccaagagacgtgaatgatgttaaaaggcttgtttaacattatatatctgtgggcagcacagagatcaccagtcatgggctgtggtgattcctcatgagggctggtgaagggcagatcagaaggcttcttggaggaggtggttcagcgtccctggctttttgcactggcccctgattctgtgtaggaggagagctgtgcctgatatcagggctggaagccttccgggagatcagagtgcattctggcgagtctgagatgcaacgcagcaat

SEQ ID NO: 29971 - DNA, 2041 bp, Mus musculus
cacacagatagggacatacaaactcacacaaacataaataaaacatagtttcaaaaagttttaataagataggctctacagacaaacacgatggaaaacttctcaaggacagaggggactcaggtccctgagaggagatggcgcccttttacagagaagtcacctggctgctctttctgagccacttgagtggatgctggccaagaatgcagcggtaccccatctggtggcacctgcctttaatttgggagggggaggcaggcagaagcctgtgagttcaaggctagcctggtctacatagaaagtttcaggccacacagagatacatggtgagaccctgcctcaaacacatacacacacaaaccaatgaaccagacagagacaaaaagaaggcagccctctgtccataggtgggagtgaatccatgtaatgtcctgaggtagggacagcagggatgttaggaggcaggctcagttgtttggctaagaggacacaggtcactcagtcaggctccaagctggcatggttgctctgtttacattttactttgggccttttttatatttttgttttttctttatatgggcctcacagaagactttggactgaaaacaagcctctgggggagtgggttgcaacctatgggttgccatccctctgggggctcaatgaacctttcacaggggttgcatatcaagtgccctgcctattagatatttacattacaattcataagatagcaaaattacagttatgaagtagcaatcaaaataattttacggttggggtgtaatgtgaggagccatattaaagggtctcggcataggaaggttgagcagcagcactggaggctctccagaagtctgggggatacagaacctcagtgggtgttgggaggagcttggcccctctcctcagccgcctctctagtacggcaacacagagcccgtggcatgcaatatagaccagagacgccattcccccccacccccaggccagtatgttgcaggaaaggaggagctatgtacacgcttaatcactagttaggatacacctgtgccttttgacttggctggagtgtgcacatacttgtacaagtgtgcatatgcatgtgttaacatacatgcttatgagcgcatgtgtgcacatgtaggcaggcagataagacttagcagtgtacaggcccgactggtgcacacagatggacacgtgccctgcggccgtgcatgtgtgcgcttgcgcacatgtgcgtggtttggctttcctgtcatccttctcaagaaactacacacacacatggctgtgatgacttcccttggagtttgggagaccactggggagtgtgttcttctgcttctcgaagtgagcagaattaaccacctgctgggaaaagaatggcctcacactcttggaaatcgcagctgagggccattgctgattgatctgcactctgtccaggggccctaagattcccgctggggcagggacaggcctcctacctctgtgatacaaagcttagcagatctgtcagtgactgccattgaaatgggagatctgtattttatagcttttttttttttttaagtaaaagctaaactgtctctgttgtctacatttggtcccatctcacatgagccactaggagggtcctgagctagggaggagtccttagtaggagttgtgatattgtctcatttcttcatctgtggccatgtgactgtgactgctgacctgcactggatggccatctgctcttggatcacatctctccactgtagagggcacaggcaagtctagcctggttaaataggcatatggtcctccatccgaactatgtcagaagctgggtcctacagttgggggtatccgagagagaagagacatgggaatgatagaaagggacttctgcaagccttggtctgtgttaatgccaccggcatgaaccccaactgtgccccactcccacttcaacttcatgcctgtcacccacccttctatgctggcatcacagcaaggcaggagagacctgactggagctgaa

SEQ ID NO: 29972 - DNA, 1611 bp, Mus musculus
ggcgattctgcatggcttggggcagcaagaagtaaggtgggtagccctaagtgcctgctggttcctcacaggatgcctcctgtgaggaggatttggaagggatgttgccccaggggccacactctgtagagtcttttcttcaggaggagtctgcggtccgctcatcctttcattcaccaggtacttccaaaatatctgctgtgacttctttcaaaatgtcccagtgtcatagggtcttgaggactgactccttctggggcttggccggggccaggggggggaacctcagaagagggatagtcagctcagccattgctggacttgaggttggggtctcctgagggaggcagcattggccccatttctaggggatctgggcttggcttgcattgtccagcttagccgcttcaagactggagagtggtggacagaggggtcgctgaagagcaggcctctctgtcctcttggggtacttcatagggaaagggcctccagaggagtgtcctgcggaagggccagtctctgactagccccatgcctggtgagttcctagggagtgtcagatgtgcagggtctctgaggatcttggcacagtgctagggttctgaatcaactcttcctgccttctaccactgactggaatctccagaacacggagagggagagagtatgaagggaacccagcgtttctctagttcatgcacagcctagcagaccctagcacccattgagattttagtgattagcctcccagtagcagagacctgggactcagtggctgctgtagtggtggaagtcccagactgaatccaagcaccattctggtgtgtaccccagatcatcctgccataacataacctctgactccttctgggtctttattgtaataggttgtgccagccagtgcttatatgtcccctgtgctggggacagtatatcaagctagagtccaagagcaagcgcctcctcaaaaggaggaagctgccacagggacttgaacttggcctcctagtaggtaccagggaactgttctgtggacccttgtccccagagccggggtgtgcagtgtgtggtgcatccagcagatggcgggaggccttggaacctctaccccaccttcacccctccctcctcctgggtcctctcccttcctgtgcctgacaagcgaggaccgcccatggtcacagcacattttaatagtggaatgtaattcctgggcagcagaaaaatgaaagtgagcagtctatgaattattgcaagcgcactcaatctcccagccgagccgagtcctgggctacggagccttttcttcttgtgtttaagttagcgtggaagatgaaatagtcacaggaacacactggccactcgaacctgttattgctagctgtgtgtctcctataaacactgctctgatttataagctcgctctgctttataaatggaaaaaccagaaatgcctccaggagcaactttctggagcccgagatgtccctgaaggcgcgcttgtggccgtgaattccaaccttgtggggagggaactgtggaatgagtgctttctgtgggccgagagctgaagtttggatttgggcactgttggtgcttgtctgaacc

SEQ ID NO: 29973 - DNA, 1183 bp, Mus musculus
cactgtaacaaatactggagataaccaacttatgaaaaagcccaggcttatttgaactcacagttttggaggttttagtccttgattggttgatgttgttgctttgggcttgcaattgtacactgaggagcagagtccaaaactgcttaccttatatttgtggaatgaaaatgagaaagggaccaggattccatagtccatttgaaggaacatcctcagtgaaaagttctcaccaagtctcgcctcttaaaggttctaccaaacagggatcgaacctttaacacatgggggagtgttctagatccaaactacagctctacccttctaccacctgtccgcctaccaacccctccctgcatgagttagccagtcattgttgactcccttgctctcctgtctaaccattatcaccagctctccatgtttcagctccttatccccagaatatctgggtctgcccagtcaaagccagatagtctccatagccacatgtggtccatccttgctgtgtgctgcaagctcaggatgggcgagtggctgagacgtccaggcagtgtccactggacacacagatgggcttgttagtggaacgaactgtcaggcacaacaaggagaaagctcgatttgtaaacactggtcaatatgaattagcgccatcaggatggatttgggactaaattggacaatcacactggctgcacccagagcccagcaacaataggtaaattaggtcatcattaaattatcatggaagaaaaccgcacaatcggcagccacgctggtagaaagatgacagttatttacaaaaaccctgctgtttgcaaatttgtacaaaattatttgttccaagaggaggtttatggagctatctgcacattatctccgcccgagatcctcagccctgcatattaactaatgtctgtggtttaattggaaatagaacaggccaaattgtaaatcgctcttctgccatctgtctctgtctccacgcttgtcctcaagagaggaggacatagaataagcagatggatggctggacagacgtgtctctcctccctcggcagagtcttgacctaaccctcgcttactgccattctctggtattggccagagccacagcagcgtgtggtggtagcttacaactgccatgtaaattggctgtaagtgggcaacaggcagtagg

SEQ ID NO: 29974 - DNA, 1367 bp, Mus musculus
ggttgaggtggtcgcccggagtgtgagaaagcaggatggggcttgctctgcggaaggtcttacggggctgccctgtcatccattactgctaattacgctgggctggtggaggccacacctcatgcccaagcctgggctaggtgggcctctctctccttattgtcctctcccagagatgtctatggccagtgggaagggcctggggtctccctatcgtcccggagcaggagccagacgtcgtggacaccccgtgatagatggagcatggaaattagttccagagtttaactgataacgggagccggcgacactcggttatggcagccctaattgatgagctcgttaagcccattattagagaaattgatttcaaataggcacttagagcgggaggcaggcagggagggagcatcggaggcaaaggaagtcgcgaaaatacataatgaggcaagtaattttataggtttgtttaatgaaaagccgagacagcgcactcgtggccgtgtgggttttaaacactcattttatgtactaataaaactcccggtggaggatccgttccctaggcccaacccactggcctctgcactgccctaattaattaattaacccaggcgaggcgatcaatgagttagtcacgtggaatcgacactcgaggttgtgttcgtgggggtctgggtagtgtgtcctcagccacctcgggaccccagccctgtctggcccagagcttttaacaccagaatagacgtatatacaaagccatgacaggactgtagcatccacagtgagggtctggggctgtgaggaccaaggtggaagctgtactgagagctgcctcaccaggttatagagggggccatttacagccccttatggaaggtaggagtagttatgcgagctctgatgtccagcccctctggtagttgagacagccttgactctgacctgaccacttgctctgtctgtccttgggaccgtgtggagatagcctggaggtatgtcaccctgcacatagaatcccacgtgtacacgtggagtacacaggctcagagatgctgaaatggaaatatgcaggctcccacagggattcacatgaaaacagctggaacacttttctgaagcatgcttgtggccttgaggctcagagcttccaactccattcactgcccgtggctgctccagagtatcagctccttgggcctcttcacgccccactcggttcagccttagggttctgcgcatgcgctgacgcttacctgaaccctggcctgactacccaaaggcctcttaactcttcctagacacccccaggcttctcatgtccaacatggctgaggacagatgtgagctctgtcctcacgactccc

SEQ ID NO: 29975 - DNA, 1674 bp, Mus musculus
ccccagggaaggctgctgggaaaactcaggtattcttagaattcatccagagttggggtaggatcaggacaggggggtatccccgttgcaatcccaaagagccccaccatgccctgctctctcccatcagaagccggaactgcacatatcatcccagagatcttggcacaccttccatgttgaagggctaggctggacacagacctcagattcacagacctcctctctagggagcccttcaccattactcctcagtccagagtccctgcccaaggactgggctgggacagggtgtagggaagggtaggcctgtccaagcttgggacttttgaaagtggggcccttgggggcagcttaagcaacgtggtcagaggctgactccttgttctaatttgctttctgttgctgtgataaaatactgaccaaagcgacttggcggtgggggaagattcctggagaagaaataaaatgaaaaacagggttactatacttcacagttggtctttccagctgctaccagaaaggcttattttagattataagttgcagttcataaccaatggcagccaaggcagggactgaagcaaagataacgatggagtagtgctgcttgctggcttgctctccatgacttgctcagtctgctttacatgacccgcaggcctgaaggcctgtctatggaattaatttctcaagccccctccttcccaggtgatttaatttatgctgagttgacaaaaactaacagtacacccttctactggagactctctcacatggacacctcctttaacgtggtggacattccttcatctggagaccctcccaaacctggggacccccatatccctggaaattcccatatctggactccccttctgggggcgtctcctcctggagactttcccacttagagtctcagcatttagaggccccaccaggtgaagagtcctctcttctggagactcccacacacagagccccccacctctggttcaggtgtcccaacctccccgttcactgtgcttctgccctgaggagcctaatgtatctgctgatgggctgtgctccccttccctgtcacttctctggagagtcaccagccctgctgcatgcagttcttcccccggccattctctctagctatttcccagcagacacgatcctgggtactgcatttctgtcatctcacagaattccaccccgaggcactcacactttatagaaagggcaactgaggcaagggagtgtagacggtctagacagtggctcctctctgtatgagggagcaggtgttccaggccaaaaaaaaaaaaaaagtcccattttgcttaaggatggttggctggcagaaagtgtggggacatatagccagtgcccctgcagagacatcctgccttgctctgcagtcttggacaatttaagtgtggggacatatagccagtgcccctgcagagacatcctgccttgctctgcagtcttggacaatttaagtgcctcctcttctgggggggatctacagcagaaagcacctgatgtccagacaccaacccaacacacctttgctctctatggacactcaagctctgcagatactgctctgtgtgctgaccctagcagtcctccctcccctgcactgtcttcctttgcaggtgctcctcccagacaagtgct

SEQ ID NO: 29976 - DNA, 1149 bp, Mus musculus
cttaaagccaccctgggctactttgtctgtctgtctgtctgtctgtctgtccttactccagacacatttagggtggttctcttttttctgttgttttgtggccctggtttctgatgaggctagggatgagatgagcagagtccaggaaacagttctagggcagtgactggtgtctggtgactggggtgggctagacacccttctaggcaggcacaatgttgtcttgcacatcacctaccagaaatgccttcagtccgtgtgttttctgttgcagactttaaaaaactccaagagcctttgctccctggactatgaagacgatgaggatgacacccaggagaagactcttgtgtcctccccgtgtaactcacagggcctcgtgggcatcatcacaccgagctctagcccaaggattcccaggcctggccctgacagccccagtatctgggcgtcaggggagccagaggccaacccaggcgagggtgggagcagtggggaccccagtgactgggacagtgcaggagaggagggcatcttcccactggaccacggcgacctggacttggagcagattgagaacaactgactttggctgagcaggatgactgtggttgctgtctgtcaccttggtgcctgaccagtggaaataacttgtgtgttattttgaaaattgaggcgtaattttgattcagtttttcctaaagaagtattttgcatttttatggcttctacagtttgagagagcttctctattttgaaatgggtttcagagggcattctattaaacatgattctgcctagagattctgcctagattctttttgtcagagcctactgtgaaaattaagtatggttttctggacaaccttggggctgatggtctgcaggctccctggggagggatcacagcctgagagcttggaatgttcttgtctgacacacttacttggacagttgtgacaggaccgtcagggtttcctttccattgatgtcccagggggctttttttttttttcgtttttttagttgttgctttgtttattgattttcgtttttgtttttttttaatctgggctgcatctgaagagccctccgagacaggccttggcccagctagtttgaccacaccacagcttctagaatttggtt

SEQ ID NO: 29977 - DNA, 1172 bp, Mus musculus
tgcatctgcatgtagtgcacacacacacacaataaaattaaagtaaatcaaggtgtttgagagtccatgtggtggcacgtgggccaggagggaccacttgtcattactcttcttgacagaagaccctgcaaagcccttaccctgttagggcatggctcagaggttgggttggggctttcagtttagatgagcagcgggccagactgcccgtggccctgcgtcccagctggctctgtctggcttacggaggatcagcacttctcctaggacatggctcgttcagattcaggttcctttatttgaaagaaaggaaaacaggctgaccctgctctgtttgctcctcctctagtctaaattggagatggtattcactgtgctggggtagactagactaaatgctgttgtctttaggcatggtagatgagatttcaggtcagagagactaaacaggaatagtatgtgagtggtgtgatataccccgggctgagaacatgtgttagtgggaccttttattgaactgagctcacatgtgggcctgggctgggtacctgcttcctgcatccactaatggaaactcacaagctctaggctagccagtgtgtggttggtatgctgttggtgacatgaggccctgattcctgtgcttgctacgtgtcaaccttgccttgttcagtcacatgctggcttttgagcctcaggtttcaaagtcacagggggaagtatttgttgtttctgttgacagaatgtatatatattttcaagaatgaaaagttggtatttgatcttatttgagatctttctgatctctgtaaaaatatccatatgattttctcctgttgacagagccctaggtttgtaccctctttgtttgccagcatgacccctaccaggcttgtgatgttacttccagcaggtgtggatgttgtggtcatacccagtgatcttgggcaaacactcccaggattgctctcctttggagtgccttactgggtggaaggaggtgacttgaacctcagggtgttttttttgtttttgttttttgggtttttttgctcatggatacaccctgcagaggccctgaggtagttctgttaggctaactcttttgagtaatgtgcttgttctggggtgttgcatgacagtgcatcatgttgaggcacagctgactcctg

SEQ ID NO: 29978 - DNA, 1241 bp, Mus musculus
ggaaagcaaaacggtgagctgcagaaacctcttacatttcattagggaagagttctcatgatgtaataacactgagacggcctgagatatagaagggaccctccaaatagtaacacccgtttaccctcttcctttttttcttttcctcctggtactagggagtgaaacccagatccttgggtgtgctaggcatctgttcctgtggggttttgtttccatctatgtatgtatatttttttaaagatttatttatttattatatctaagtacactgtagctgtcctcagacactccagaagagggcgtcagatcttgttacagatggttgtgagccactatgtggttgctgggatttgaactcaggaccttcagaagagcagtcagtgctcttaaccgctgagccatctcaccagcttctatttatttttttaagatacaatttttctgtgtagctctggctgtcccagaactcattctgtagaccaacctgcctctgtagactcagagatgcctctgcatctcaagtgctgggactaatggagtgcaccaccacctgaccctgcttgtgtgtgtatgtgtgcgcgcgcccctctgtctgtctgtctgtctgtctgtttctctgtctctctgtgtgtgtttattacaaataggttgtctcctgcattttatcaagtgcttcttggcatctcttgatcccaaagtgtggtttattttattttattttatttttgagcttgtgagggagtacatgaattgatgtttactcctctacactttttacatagacaccctgctggccaagtcagctagtcatgggttttcatactatcaagaccttgatttgccttgctgggggaggttttgtccttccctcattttgttttgaaaatgctttccaaaaaaacttgtacagtttatcagtaagaccagctttgtggcacccaaacaaggctttgttccagacactccagaatcagcatgacatctaaatgtaacatttcggccccagctgatcagtgactgccaaagaaggacggtaatctaagttggtagtctgtactgttttcgtttgcaagccttgtgtggcacatgagattccagccctccatcttccctggtttcctgtaggagtggtgactggccccaggagaagaacagggcattgtttgggctactatggcagcataacaaatcacctccacagttggtagctggaaacggtaataatcattgatttttgt

SEQ ID NO: 29979 - DNA, 1128 bp, Mus musculus
agcctcctgggctgagctcgggggctaaggagctaccttcatgaaaagaggtggcaagagacagccagagccatgagaggagggataaatccacgggagaccacagcaagtgaaacagcaagaagagctgttagtgaagagtggcattcaccatgggccttctaaaaattaaaggaccccacccctcacccccagtgtagtaagccacctgtgggctccctgtgtgcagagctgggtagccctgtaataaagacagctctgtcatctggcctctaggtcgccaagatatatcactcctggagggttttgtggggagtcatgggggttatgcctgagggtttttttctggcaagaactgcagtgtgggctgagaaccccagaccctctatccagtgtttactaaggcccagagactgacagcatccagggatcctctgagttaagtgggatgagctggggcggagcaggattacagaaaagttgtgggagccccccaccccacccccaccccgagaaaactctctgagcctaactgtggtaattccagagctgaacccatgaggccagcactgcatatgttttaggtggggtctgaagcctgataggactagccctctgcctgggatatctggcccagccttggggctattcttccacacaatatcaacagcgtctcccacccagccctagaacaacttactcacagtcacataaggttggggaatgaggggactcaatgacaacgactgttgggtcttccagtcttccagctcctgtccaccagagacatatcagcccatttaccattgtgctaagtcttactaactaccctggcctagaggacctgggtctagagtcttcagaaagtctcctcacactcctcaagctccagggtgaatgtccagacagcaaggctggctagagatcagaaaatgtcaatccttgtccagggctggaatcagccagggccaggcatagaccctcaccagaaacccagtgttctcgtcataaatgagggctggaccccaagcctctatgtatcctgacatgtttgacctttgttcctgtgtcacttgtgagcaccccctctcttccaggctgagaaagaagagaaaagcagacaccttt

SEQ ID NO: 29980 - DNA, 1506 bp, Mus musculus
gcagggaactgaaactgggtcctctgcaaaacacggtaagtgttcttagcactgagccgccactttagcccacaggttaaactcttaagtcaggcatcctgccatgttggttggtggtgatatacctgtcccgactactttcccttttacaaatgattccttgtcttttcagctgtattattttgtgatattaaaattactttgtacagactaaattattgtataaaacattgtaaattgtctcaaaagacaacactgaataaaactcaacatcttcagaactagagatactgacatacctatactaggtataaaatgtaatatgttgccttttttcttccttttatttattttttatttttatttattttttaatgctgtagtgttctaagaaccaaaggatctaggctggatggaatttagcatcagaaaaagtcctctttctgttcagaaagttgtaaagtgcatgaagatgaagcagacaccagaaatccttggcagtgcaaatggaaagactcagaactgtgaagtgaatcatgaatgttctgtattcctcagcaaagctcaactttctaacagcctacaggagggggtcatgcagaaatttaatggccatgatgcgctcccctttcttccagcagagaagttgaaagatcttacttcttgtgtttttaatggagaacctggtgctcatgatactaaattgtgttttgaggcccaggaagtaaaaggaattgggacaccacccaatactacacctatcaaaaatggctctccagaaattaaactgaaaatcaccaaaacatacatgaatgggaaacctctctttgaatcttcaatttgtggtgacggtgctgctgatgtgtctcagtcagaagaaaacgaacaaaaatctgataataagactaggaggaacaggaagaggagcataaaatatgactctttactggagcagggccttgtggaagcagctttagtgtccaagatctcaagtcctgcagataaaaaggtatttgtgaaggattctgttggattatatgacaattaatggtgtgcatgagacctatgtagaatacataaatgtttgacagtaggtggaagggatgggaaacaaccctgatggtggcagttgccgtcttgccttggtcctgtgcaggtgatactgattaaggcttggctcctggttggttgttgggcttccaaatatctggacattaagtaccacagccacaagttgtgccacttgagaaggctagtgaggttaaccattcaggattaaagtggctaagaaggctttgatcccagcactcaagagacagaggtaggcagacctctgagtacaaagccagtcagggttgccaataagactgtctaaaaacaacaagaataataatttctgaatgtaggtctgtcagttttcatgaccttattaggtctactgtttttatgggttccatctctcaggtatttttaggctaactgctcagtggagatatattaatttca

SEQ ID NO: 29981 - DNA, 1223 bp, Mus musculus
ggagaaactgagcttaagagagctttgagcacttacagcacatgctcacgcataggtgcaaacacttgtttctacactaatggtagggctagggcctctgcttatgcataggaggtcaatatgttgactgaggtgtatgttctcaaagactatcagataatgtatgtggccagggtagggggcaaaatgttttgagggttctgtgaataaagcaccaacttagtaatattgagaacttgttatttgtcaggacttatgataatgctttaggtgagaatgagagaagcaattgtgagaagcgattgatattgaaggtgaaatctaaaatacgaaagggaaacattctctgaagatcaggcccttaaacatgaagacaagtgctcttccagtgaattataccccagtcctctcctacgttttgaacccttagactttttattttaaatttctgattaatacttgttcttttatagatagaagattgaatttaagggtaattactgaatgttaatatttatcttttgttgttcacttatagattccagttaagaaggagtcctgtccaaatactggcagagacagagacctcttgttaaaatacaacgttggtgatttggtgtggtccaaagtgtcaggttacccttggtggccttgcatggtttctgctgacccactccttcacaatcataccaaacttaaaggtactaaatttggactctttttttcaatcttcctcttctgcaccaaacctttctaatttgtttgtttctttcccatgctttgctaagtggtcttactagctacttttacagctttgcttaaggtgtgtgattggttcagatatgacatatccatttccgaaatacagggtttatctgattgggctggtactaacaggtgaataacttttaagaatagttttttagatttatttatgttttatgtgtgtttttcctgcatgcatgtacatcaaccacatgcatacctagtgcctgtggaggtcagaagaggtggaattgtatccttttaaactggaattacatatggttgtaagctaccatgtgggtactaagaactgaacctgggtcctctgtaagaacaagtgctctaaaccactgagccatctctctagctggggaaacactctttaccttgtatttgcctcaagttttatgacaaaaattattacttaaatattaactttgaattataaaaaatctcca

SEQ ID NO: 29982 - DNA, 1107 bp, Mus musculus
agccatgatggctagagactgttttctttatgctgcacaacatgatcaagtttttaaaaatcagctatttttaaaagcatttgtaacatttgtgaatgattggaaatttgagcatatgagtgctattttaaaatatgaaattagtaatgttttacttaatttttttagaagtatactctaggctttttatgcatgaaattatagtgtttgtgtcaaataatcctgtagtgggtcggggatccggtgtgcaggaaactgcattggcctgggttgttggttttggggcgggcaggtaggatggggatgtgggattcgttctatagtttgccttttttttaaagtcagttttccatgataaaaagttagtgacagctaaaggatctttaggactttacttgcttgagggagttattcaaaacagtaaggaggtgggaagtttaagattttaaactttataaaataaacttactttacagcaacgaaaaatttgtctgatgcttgcaaaccactgaagaagcgaaatcgggcttctgcaacagcgtcttcagcacttgggtttaacaaaagttcatctccttctgcatccttaactgagcatgaggtaaaataatgatgattgtgatacggtggcgttcatgggaaggccattatttactcaagtggcaatgtgagtgataatcctgctttaaagaattacgttgttctccacaggcataggtgaggttcaggtattcttagccatctaaaaagtgttcttagccatctaaaattcacagaattgacaaaatggtgcactattttagactgagcactttgaatatgagtacatacatgcacatggtgaatgtgtaggtgcacatgcatacatctggttgcagagtaatcgttgttgcagtctgttttaaactggtatgttctgtaaacctaactctgttttctcacatgaaaggaaattcacactggctctaccaggacatgctatcttggccacactgacatgctactgtgcacccaccctggtggaatggaggggctcatagcctgtgggaaaaccaaaggtttcttggtcctcatgcgttgcgtgtttctggttctttgttctggcat

SEQ ID NO: 29983 - DNA, 1136 bp, Mus musculus
aaaatccaagttgtcttttgctagaataaagcagaagggctttcctaacatgctttagagcttttattgcttcttactgatactgacttagaaagctttctgggttttgtatttgttttaagaaacattggttcctatgtattttagcatttttggtgatttcaattgactttgtttcttttaggtactgtttttattgttttacttagaatattaggattttttttcactaatttttctgccagtgaaggaaaatggtcatccttagtacacagaaaagtatgttttcacttttccttgttcgggaatgataagggcaatgctttttgaggtttaactaacaaggatttacttccagtaacctgacatatctcatcttgtcagagccctatgtgctatatccacatttatatatattttttctagcctatgtagttgttcagcttttaacaaataactctggcagtattttaaacatgctagcatttcaggggtattctacttaaaaacaaaacaaaactgggatcagatggcatcctagttttggtaccggggcattgccagtcacctgagctaaggaagcaggcaggctggtggttcttctgttctcaagcctttcaggtgaggacacatggcctggtgatgcagctggctggaccaggctcccccacagcctactcccaagggctggctgcttctgaggacacaactgggacatggttgagtcagtagactatttagagactcatgtaacttggggtatgggcatgcctttatgggagcagccactctctgactaagtggccactgctctcacttagactttgctgtcctctatgctaactatgtagaagctggctttagattaaatgactatgaagcacaatgacattctgtggactaaaagtttttttgtattttgatttttttcccccctttttcatgtcctcagtaactcatacctggctttgaattaggagtggctaggagggttctagtctgtgcaaacattaataaaaattattttgaattttaggattttaaaatggttgaattaatttaaaattgtcttaattctactcttaatacttcactgtgatgttaacttggaagacctgctgaagattagtctttta

SEQ ID NO: 29984 - DNA, 1173 bp, Mus musculus
gaaaataatgttggttatagaaatatttactgttcaaggtctgtaattgtattttaaaatgatgtagtattcaacttgtgaagggatttgttttgtcaaaaaaaaaaaaaaattaaaactcaatgtgtatcagcccacagaagggcaggggtctgctttgtggccacagtagggtaaaccccagttgcatttatcgagcctttctgatggccacatagctcctggcagtgggttggaagatttctactgggtcacatgatgtctggtaatgccatcttgaactccctgtaatagttggagactgcacttcctgtccctaaaggaatgtgcgtctatggcaggtaggcaactcggtcctatcacataccaagtagtgagtggagaaagtattttcagattcaagaaaactttggaaagtcaggaactaagctgcttggaaatcagtgccacaagcatgaccttggtggacacaggaagccacaggaaaattcttgacagtctgtgtcccatcagtcactgcatttttctttttccaaatacatcctgttggatactgaatagatcatagatattgtagactgagatctgggactgtgttgggaccattcaggtgatatgtcacttccacaaatggcatctccaagtaagctgtcacctggtacacatggaggtggagcctgcagctggagtgaggcgcacacttgactctacttgcaggtggtttgctgagcagagagctgagggaccctcttgactgggtaggggtcttgtccatttgtgggggaggatgtggtgaaggtggaccttctacaatctgtcatgaactgtgatattgtaaggtctatattctgtatgtggataacagacccaatcaggaaacgagccttatgtgtgtcgttaacatttatattttcattcaaaatatgtattcagtgtttatttccttaaacagactttgttaatttaggaaatatctccaagtggaaacgtgctaactttctgtaaatcttaaataaaaggtgctgttccttcctctgacccaggactggtttgtgttttctgtctttctttccattccttctcttttatagtttcaaaatttgttttatctacactaagggaagaagtgggttggtggacagaacatgggctctctcatggatgatgtgctaa

SEQ ID NO: 29985 - DNA, 1118 bp, Mus musculus
ttgggtttgtggcagttacaggctgagggacagggcctagccaggcagtggtggtgcatgcctttgatccctgtactcagcagcccaggcagaggcaggcagatgcacaggaaaaccctgcctggaaaaaacaaggaaaaaaaaggcctaatttgagctggagagacaagctcaggctggcctgttctctcttttagggggaagccttctgtgctgtgaggcctgcccagcagcctttcaccccgattgtctaaacatcgagatgcccgatggtagctggttctgcaacgattgccgggctggaaagaagctccactttcaagacatcatctgggtcaaacttggtaactacaggtatgcagtacaagccttcttgttcaaatgtgtttgttctactttatagtaataagtattgaaaattttgtcactctgaagaatatgtgaatcctgtttttaatatttataatagatggtggccggcagaagtttgccatcccaaaaatgttcccccaaatattcagaaaatgaagcacgagattggagaattccctgtatttttctttgggtctaaagattattactggacgcatcaggcacgagtgttcccatacatggagggggaccggggcagccgctaccagggggtcagagggatcggaagagtcttcaagaacggtacggagatttcccaatggagcatagatggcactctcttatggcttgttaatcctaacttctgttcttttgaaatttgctattttaaaaaattcttggactaaatattttatctctacctttatactagaaaaaaagaaggtttgtaggctgacgtatttatttaagtatacttaagcttttaacttttacagtattagcttgtagttaattttattaaatggcataataattatttatttttgttttgagacaaggtttctttgtgtactccttgctaccctagaactcattttgtagaccaggctggccttgaactcgcagagatccacttgcctctgcctcctgagtactgggattaaaggcgtgcgccaccactgcctggcataaaagctcttacacgtgttcgcgaccggccaggaagaacgcagcaaaccggaatc

SEQ ID NO: 29986 - DNA, 1088 bp, Mus musculus
agagtgtgtgtgtgtgtgtgtgtgtgtgtgtgtgtgtgtgtgtgtgtgtgttttctcaacagagcagtgaacgtggcatttgggctgctgactttttatatccaggttgtagctattagaaggtctgtcagaaactaagtctttgagtgcaatgatggttagtaggatgcatgtctccaagtgggtccttgaggggcagtatgagtgtgcagcgtccagggctctctgtttacaaagtagagccatgacatcttgcttttcccctacaggtgaataaaccttatggtaaagtccagatctacacagctgacatttctgaaatcccgaagtgcaactgtaagcccacagatgagaacccctgtggctctgattcagagtgtctgaacaggatgctaatgtttgagtgccacccgcaggtgtgtcctgcaggggaatactgccagaaccagtgtttcactaagcgccagtaccctgagaccaagatcatcaagacagatggcaaagggtggggcctggttgccaaaagggacatcagaaaagtatgtaatgtgtcgtcttcttcttgtagtgtgtagtgattcttaattgtgtgtgtactagactgtatgtggatgtgcatgtgctgtggcgcgtgtgtgtgtgtgtgtgtgtgtgtgtgtgtgtgtgtgtgtgtgtgtgtgtgtgtatgatgagaggacagtgtttgggagtcagttttctccttccagttgggtcccagggattgaactcaggtccatcctcaggcttggtggcaaggtctttacctactggatcatcccactagccctcccttccccccacaagaattaatggcccactgcttattgtgtgtgtgggggggttgttttgcatttatataaaatattttaaaatagtattcagattgaattattatagttaaaagttgtaagccaagtatgatggtacatacctggtatgtggcaaagactggcaaatgtttcttgagttcaaggccagtatagtctacgtcatgagttccaggccaggcagggctacacagtggagacaccccaccccccaaaaagaaaaaaaaaaacaacaaaagt

SEQ ID NO: 29987 - DNA, 1380 bp, Mus musculus
agcacttagtacctgcctggcctttgagcaccaattacaagcttctctctggcaacggaaatgaaaagcaggctcttgtgttaatttgtatttatttgactagccaaataaaaaagtgattttaagttaggtatgctgatatgtcccagttggcccaccaactcaaggctgaagcaggaggatggctagttataaagatcccggtcaccttgaggaacatattgagatgggtatctcttgtaagaaaaataagactatggatggatatcagctcaatgctacagcacatgcttgtggccctgggttcagtccctagtacccctcaaaaaacattcttctccaccctgaatatactgaaactttgaatctgttacttccatttgctgatagtgtgctttattgcagggaagtgggaatgtccttggcatcactgtgatgtatgtggcaaaccttctacctcattttgccacctctgccccaactcattctgtaaggaacaccaagatgggactgctttccgttccacccaggatgggcagtcctactgctgtgagcatgacttgagggcagactcttcaagtagcaccaagactgagaaaccctttccagaatcactgaagtcaaaaggaaagaggaagaaaaggcggtgctggcgaagggtcacagatggcaaatagcgcttggtcagatcctggggtggtgtggggcagccagccctgcagacagtgggaaggcaagcacggcacccaccccaaggacccagctcctagcgctgtgtataggcctgcttgggtgggaggcagctcctcccaccactgagccatcctcagcagctgcgctgcgtctgcactgatgcctgtcagctgcaggcaggcttggtgggccaggataaacaagccttactacacagcgccacctctacacttgaatctgagacccagcgtcaaggtgccctcccatttctattttagattaaagttatgattgaagattaactggcatgtgaaatgcttttatcttacctgaaacaaagaattttctaaaggtcaccattagctctgtcctgatggtgcaggcttctattcacatactgcccacctactcagggcagactgggcctccagccctgggctccttccgatcaggattggtaattcttctgtttgaaatagcctatgttctttgtattaatgtgaatttttcctcaaagtgctttgtttccactttgagtggttgtggtgttgtaagattcctctcgtggcttccctgtttgtggacatgaccagtgacagcagtgtggcctgtggagcagagcagctgcctttgttttgcctgtttttctctaatgtcttctgaaaaccttgtacattttcgtcactt

SEQ ID NO: 29988 - DNA, 1178 bp, Mus musculus
aggtcactcggccggagaaggccctcatcctgggcttcatggctggctctcgaggtacggtctgtgctaatgctaagcttgggaggtgcccctcatgggttgggggatgggttgcttggccctaggcacctgcccagcagtccctgctccctacagagaacccatgcccggagcagggggatgtgatccagatcaagctcagtgaacacacagaggatctgcccaaggcagacggccagggcagtaccaccatgctagtggacacagtgttcgagatgaactacgccacaggccagtggacacgcttcaagaagtacaagcctatgaccaatgtgtcctaagtgccatctctgctgctgaccctcatcagaccagaggacaaggtttgctggttgtgctgagtgacctgagcagataccgaaggatgtgctccacccagcacctgtgatccacaggctcctgggcccagccatttctctggagagtttaggcttattttttatattctaatgagttagttttctgtgtgattaagatacttttttttattcaatattatgttttgaatgcaaaccaaaagttacttcaaaattttagtgcctgttcgacttttaccttttttatttcttctttaaaaaaaaaaaaaaagtactggctgagagggctttctttctctctccttgtgcatgccctccctcatgaggttgaggggaccaaaggtgacagctggaaagtctagggtgtgaggggggctatgaccagccttgatgccactatttaccagggatttgtatgtcttttgtacagttgtaaacatttcaaacctgtgtctgggttcttattttcattgtaaaatgacctgagtattaaagtttagtttttctaaagaaagcccacagagctgtgtttcaggcgagcttgactccctgctctgagaccaaacccctgcatatacagctgtcagaacctgggagaggagaggcagggttggaggtaaggctacctgaaaataaaggttggtaaatgggtagagcaactgtgggcacccaggaagttgtggagtcagacacagttacatattaaataagtgtaagaaaaaggcctttaaagttttttaataaaaaaatactcattacagttttccaaacacgattttccactttaaatgctattcttcc

SEQ ID NO: 29989 - DNA, 1175 bp, Mus musculus
ctcccacacaggctgcagcaaagacttcctaagacttcctggccccctctaactctctggtaggtgtccatagctcataagctgcatgcatcattccatgtgcccagctttctaaggtttctcctatgcacactgtaacttcaagcatctatctattactagcagtggcagttgctcatggtataagctcttgtccctgtccctcctttgcaccaaagaaatgatgggttacccacttgccttggtgctccatgttactgaacctgagcccaattctgcctgccaaaagaatgcccattaaaggcacatattccgtaagtataggcatggcagccctgtttccttgaatcttatgttttgttatatctgcccaccagagagagttaggaagcataggcacagtctgaaaagccatcccagcctacagtcacggcaggggacattttaagctgtcactgttccgaaggccaagtggggctgctgacatgtacttggtgtcttctttcttggcagatgaaggcggctctgatggatatcatccagctggccacgctggactcagacccctgggtcctcatggttgctgacattctgaagtccttccctgacacgggctccttgaatctggaccttgaggaacagaaccccaatgttcaagacatcttaggagaacttagagaaaaaggtaagtagccaactttattttgcagtggcaagaaggtgctctagttttagaaattatgttgtcattattatacccttgatgtagtatgccatggctccttatacacatgactgcttcggtctgacttgccacaaccctgtccccactgcatgtgctgtgtctgcagctctgactcatcatgatttacttgaccattgctctctctccccaaaagttccttgagggtgaaaaccctacaggttatgtttcctgagcctaaaaaacattctctgtcctttagtagatactcattaaaaaataccaacaaatcagtttctagactatgagatgaaaactgtggttttagagaggtgagagtaggaatatctgtgcctctgacgctctctcccttgatggagaatgaagacctatgcctcagaaagatggagttggaggctcgaggtcacacactcctacaggcctgcttgtgaggccctaggaggtttggggg

SEQ ID NO: 29990 - DNA, 1204 bp, Mus musculus
tatcaattttcagtgccttcatcgggagcatctcccattttacagcttgtctctgaagttgaaggagtgtaaatctgtgtttcccactgttatctctttcctataaattcatggcaatatctgctacacatagtcttaattcttatctggttttttgaacctatacatttagtccattttagagttggttttatctgagacagtgtcccaatccctaggagatatatagatatctttcagagtgaccaggttagagtttaagaatcttgtgaagttattgggggtttttttggttttgttgttgttgttgttttggttttggttttgtttgtttgtttttttggtttttcgagacagggtttctctttatagccctggctgttctggaactcactttgtagatctggctggccttgaactcagaaatctgcctgcctctgcctccctagtggtgaagttattgttttatctgctccagtatctactaggccttcaatcctctccctatctaagtctaatcctgtgaattctgaggaggataaggaatttctcttcccttctttattctgatccttcttagggtgtagaagatcattactgaccatattataattagctccatgatgataactaaatgaaactgtatggggcccaggtaccctctgctgtagtggtgtccattttttttaacaggtaacattttttctgtaccagctccagcctccagttctttactctgcaaaagcctcactccttacttacttagtgccgatcagcagcaggacaatgcctaatccatctttctgtattgccttttgggattgagggctacttggccttcgtgatggcagcttgatatttaacatgataattctagagaatcatcttttggtcaggtaatacataagtatgcgttttcatctagaaagcaggtaatggaccatagaaatggcaataccaaatatcttgccagcacttagctctggggcacacctacatagccatttgatacaatatgtgcagatgcaggtcttccctacaaaaatgccttagagctggatcttatggaggcatttccttgattgaggttctgtcaggtttacataaggcacacactattccctcctcctggatttgttggatgggtgccatggccttgactgcagctagatgcaggataggatgcttgtcttacatgtacctt

SEQ ID NO: 29991 - DNA, 1953 bp, Mus musculus
tcagagtggctcatcatgccttgaagagcagcattgtggaccatctgaactatccacaaagctgcccagcctgcctccatcagggaaggactagccttgcccatcaagcacagaacctctacaacaacccccccccccccaaggagcagaaccctggcccccagccaggctaaggctcaactattggcctctggaagagtggtctgctgggctggccagccactgccccatgggaggctgagctggtcccaggccctgctttgccctgtgcatgctaaggacatggcctggctgcagcatgccgcatgccacagccccctgccccactatcctgcccagcctggacctcaggcctgagctggtgagctcccttgtcctgtcctgagctggcctctggagggcctacctgcctgaccctgtctactctctggtgaggcctggcctggcctaacctggctctatccactcctgctttgcttcgaaatcatcttacctctttccctttttggtccccgtgcctccttgctctggctgacttggctggtcacccgggtttggttcctgtagcaatccactgcacagcatggtggggatttcatgggggtgggggggacacctcccccaacacctgttagaccaggtggccacctcccagctgcctgaggtcctgtggcctcatgctgtttgtggggtctgccctgtgaatgtaactagcccaggctgttgttggcaatgcctgccacagcttctcccagcctgaaacaacccattctctaataagttacgtagacagaatagcactctgcatgactttaattactgggacaaaatggtagtttgagcctccagacacacatctgtgtggtgctagcatacgcatggtctctggccccatttgatgggggtgggtggccgggtaggtggaagatttcagtttgaagtatggaaggagactctaatttagtgtaaacacccctaaagtgccctcacaacacagtctgtgaggctcaggttgccccttgattccttgtatgcaggattgaggggactggagggtcctaaagcctcataggaagggctgggcactgcctcgggggaagaagctggtggttggggtgggtccaggtatcacccactacagactactctgctaggtcaactgttcctggcctctcctttttgaggttctacttcagatccagcctagatgggggtgggtatggcctaggacagggaaaggcagtagctggcagtggtcatgaggccagctgaaacttggacttagctttagtgcagggggtgcataaaggcccgtccacattcctctgtgtggggcttggggtgaggagtggcaggctaggtagaccatagagctgggcccctggcaccaaggctacattattagaaaggctctttagagttaatgagttggtggaacaagcccagcttcctgaggggccttttgtcctgttagcaattgaggcatttgcagaacactgtacagaccccgctctcccctgtacattcctccctggtggtgcccggtccccgcttggggatgggagttttgtagactgtacagaaattggcaccctattttcttgcagctctcagattttgttaatctggattatacagacagatgtaaagtgttttagcaaaatggaaaacaaacagttgtgccttttttctcttttctgtttggattggtctcggctcggggctagtcttagttgttgtgggggtatagggactgctggtgtctgaggcctgtggggtcagagactgctggtgggtctgaggcctgggtaggcctaagtgggagccaggtctactggacaccaccagctgccaagacttctctgatcctgtgcctttggggcctgcagtctggggttggaaggtgtggcagggcactgggatcacttgggccagggctgagcttggggatcc

SEQ ID NO: 29992 - DNA, 1213 bp, Mus musculus
tagttactacaacagaaacattttgaaataacaagtctggtaaatctgtgtgctataatcagctcatggactaagaaaatactatataattttaagaaaattaaaatattcatttgttataatgagtagtatacttattaaagttatgataacgatgagatcttctagtttgttagccattattgtttgtttgtatgtatgtatgtatgtgtgtgtgtgtgtgtatatatatatatatatatatatatatagtgtactgaaattcagtagttcatgctggcctttctcttgacttagtccttattttcctttaaagttagttttggcttataccaataagttagtttttattcattgcatatattatctgaccatctaaaacaaacaatgaaaatagttagaaaataaaagtttaaacctacattttaaaatgttactgctttctttgtgtaggttattgataaagaaaatttggatgcagaaatttctagcttaaacagtgagattctaaaacttgaagaacaaatcactcatataaaagacaaagttttgcctgctgtggtaaaagaatatgctcagctattgaacatgccagttgtaaagggcgattttgaactgcagattgctaaacaagattattatacggcaagacaagagttagtgttaaatgagttgataaaacagaaggcatcttttgagcttgtccagttatcatatgagattgagttgagaaaacattgggatacatatcggcaactagagagtttggttcaacaactcagtcaaagaaacacggtgctctgccagcacttggcagtgttatcagacataccagcatctgagcagttaacctcaaggactcccatcgacaccaaagatcattccactcataggtatgtatgtcattgcttccttagcatttttttcttttatttttgtgaaatactagagagttggaacagaaattttaaaggtttaaaaattacttgtattcagatttggcctttctgcttttcttttttcttttatcctttaagttttttgttccctttctgttcatgttaggtctgaatgtagccactttagagctgaagtcaatgagttgagggagtaaagtgataaaatagtttactcccacttagatacctagatttgggttaggaaatttaaatacagctttgtatcataggtattgctgggcatgatactgatt

SEQ ID NO: 29993 - DNA, 1115 bp, Mus musculus
tcacctagccaagcgtctcagccttccaatcctcccttgactgaagccagcctcgtcatgggcctactgctgtgccattctcgaagctacagctgctgtctggtctgcctgcctctgcctgcctacccttcggtcaggactcaagttgcctgccccttctccgcagggctagaccccatgcagggaagcagtgtcaggctcttacatcctggagtccagcgtagccacccacaatctgttctcagattcctaatcattccagaagtattaaatatcatttctacaaatctcggcaggatccgtgtaggggccttaatgaccaccatagggagcttgaaccccaacatcggatcccaagagaaaggagtggactgaagaagaaaggaaggaaggaaagaagggagggagggagggaagggaaggagggagggagggagggagggaggaaggaaggaaggaaggaaggaaggaaggaaggaaggaaggaaggaaggaaagagctgctgtctgtctatccatctatccatctacttgttggtccacatagtgtggacagagggatctgtgaggggcaggacttggatgagcatctagtgggtggcccccttttccatggtgtcagcagccatggggatgctcctggggtctggctggaccacctcaaaccaagttgggtggcttctgctcttttaggaccatcagacgtatgcacacacgcctaggctcacacccacaagcacaaatacacatggacatcagagaatgtatgtgttgagatagttggtctgaggtcacttggaaatggtggcccctaacctgtgcctgactctcactcaggccctggatcacctgggccagtccagacagctctgcctggtctgcacaggaaatagacagggcttttcttcctggcagaggactggaataagctgggtggcaagctgaaaccactgggtcctccaagctttctcaacttcctttcttaagaaaagaaaaaaaaaaaaaagaaaaaaaaaaagtgcgacagggagctcccagaaggggcctcgcgaaccctgcccagggcagcctcagctggcagaggctttacccaaaacacaaaacagaaacatttt

SEQ ID NO: 29994 - DNA, 1217 bp, Mus musculus
taagatcccatgccgtcttctggtgtgtctgaagacagctacagtgctaacaaccatgtggttgctgggaattgaactcatgacctctggaagagcagttactgttcttaaccatacagccatctctccagccccgtgatccatagtttaagaagctatgtaaagaaggatgtgtaaaggtcttttgcttacagagcacacatttcaagattgcacatatgatccaaacttagaatacgtgttttgaaacaaaagtttcttatgagatgtaaaaatagcattctgacttgggcaaagtgacacagacctttaatcctagctctttgctccctgtgctccggaagtgtcacagattttgtggtgatagagtgcacatcctctgggtgagcgtttgtgcttgcatgcacacgcaggcacagacaagtatgacgacaaccaagttgaaccattacccaacctgtgtacttttttactcttgaaaccctgtcaaatctggaactcatacaaccccttctttctcccttgatgaccttagagaaatcctcaaagaaagcggcgtggtggaactgtgaattctagacaaacccagaagcgaactcgggaaacaacttcgacccctgaggtttccttggaaacagaacccatagaacttgtggaaactggtaagagagctagaaatacttgactgtaatgttgacaagtggacatagtgcagtattttatgcttgtgaattggatccagtttatgcatattaatttgccaacttgaggccttagagaaagttacaccttttttcttcccaatttatgtatatgagcattgggcttctgtgtatgtctgtgccccacatgtgtacctggtgcctacagaggtcagaagatgattgtattccctggaactgtagttacagatggttgtgagttgccccgtgggtgctgggaactgaacttgagtcttttacaagagcagcaagtattttgtagcccctgaactgtctctctagccccaggccacaccttcctgaggctgtcttcctgttttagggaatgatgttagtataaagggcaagttgaatttgtgccgtaatgcccttgggaccatgtatggcaagcagattgtaccctacaaatgttaagtgttggaagttcttgtactttatattttatatgcacgtgtaatcttaaaacttactattcacagcttacagcaacaatga

SEQ ID NO: 29995 - DNA, 2745 bp, Mus musculus
tgtgtcaaagtggattgtgccagttggtggtgggccctgtacattttatctttaacccttgtgcaaatcgatgttttccaacccagccctatctagaagctgctgatttttttctgaggttccccatagccactttgtactgctgcacctggggaagtcctgtctgtcacctgtcacacagacagcgttcaaaactcttgagtgtactgctttttctgatacaacccaggcccttctttgtttcacttgtctctttggtgatgggtgggttcgggtctttgtagaaaaagggatactttaaggctgttcttttaatgtcttctagattgtgcagaatgggcgtctcattgtttctacagaatgtggccacgtcttctgtagccagtgcctccgtgattcccttaagaatgctaacacttgcccaacttgtaggaaaaagatcaaccataagcggtaccaccccatttatatatgaaatgttcacaactgctcaggatagaccaatggacagacagccaggctggccttttctgcatggtatctgcctccagtttcctgagctcaaaaagactttcaaaaatcaatgtctgatgtaaactggtcttttgttttccaaccccttagatccttttgttatctcgtttgatgctatggagcacggtccagggatcctcctagatcagctcagcatcactgcccctttgggtggtctgagcccagagtagggaaaaaaggagtcgggcatattggggttgagcatcatggctccagcctctttatggagcttacatgttggccaagtagtttccctgttgggaaagtttgccccagctcttgtgtgtgcagaaccttcccaaggcacctgtcagttagctgttctgcctgccagacagtgacctggccagacagcccaaatagcccaaggataccagtgcatgagctgcccacgaaaagccacgaaaaggtggacttttagtttccttcccacgagagcagaggtgacctatgattccgcctgaaactcatcattggtgtgcagtgttttctgcaaatccagtgactctgcaggacgatcctgttccctaagaatgagaaagtgcaataaaacccgttcttcacctgctcttcagcaatctggaagctgtagcactgctggtatcctcagcccagtgtcgcctatgggagcagtgctcatcccaccccatgtctgttcaccagctgttctcaggaaccctacccatgctccaaagttcttttactggcacagaacattgaaggctaataggacaagtgtttgagtgtcctctctttaatgctaagatgggtcctgtgttgtctacagtgccctccaaccctcagtttttcagttcccactgcctaatgtctgctcaagcatagtataataggaggtggtagcagtagcaatggccttatcagctgttcacttacatgcttttgcccaagtcaccgttgcccatttgtcagaggtgttgccctactcaacctccactgccctagcttttcccacaccccttgaatagataggtatttccaaagctgcttgctcttctagccagttgagctttgatcctctggacttttgactgctcagtgggttttggtcagcaaagcatggtgcctcttccagtgggaccacataacaatgtctgctccaccgtatatgtgtgggagactctggtgctcacggagacaggtggaaaattgcccctggggacaccaggcacagggcggcttgtagaggataggccttgaatgccagcctgcctccacctccacactacttcctcagagggcttcaagccaaaccaatagcctttttgtgtgaaacatctttgaggtgggaaagggaccactggagctttgctagcaataactgactttcagtgtaatgttctgaaggagcagggactcagcacagaattcactttaaatggagctgaaggagtggccctcctctatgtgaaaagaaaatagttttattcttcattctgactttctagctgtttgacttcagttagtttgaatgagagtaataggttttttttttctacatggactcagagggtaagagcattagctctcatcattgtgatgtgtgtgctctcctctcccccttggatgtcacagccattgatttctttgtgggcctcatggacttggtcttgttagtctaatgaaagccagacttcaaagagacaaggcaaccatgcagccagttcaccagtaaatgtggtaacacccacttaaaaatttgttttctcctcaaggacggtgtatgaagttgatcataaaagttctattactttatcctaaattaaattgagaaaaagatgtgttcttctaatcagacactgcattaatagggaaagattggtatagaaaagattttctttcctttttacttaatgtatatagtttaactcttttctttgttacatttaaactatgctcatgggtatcagtctgttttggactagtattaaagatggaaataaaacaatttgaactaagtatctttcatttattcagttattctttggaaccttttagctaaggtgtgtgctgttcattcagtgtgacttgtactgtgtgtgggttggagaatttcagctcatccaaatggtagcatagaaccacatctcaggcctggcaatgtccagtaacaagaaaaactagaatagtttactctgagaagtgttgctggctggaaatgaaagttccaga

SEQ ID NO: 29996 - DNA, 1186 bp, Mus musculus
ttatgcctgggaatttgggtcttgggtatgcagctgccatatccaagagattgttttctggagtttaggccatggatggccctcttcagagatactgctgccttggtgcaagaccttgtgtgctgatgcatctggtatgatgtttcatgcctatttgagatctgaagatccatgctgatgagttttcctggacaaagtaatacaaaagtctaggtgaagggggaagtgcttctttatgatattcttattttatttaaaatatccagtttttagagtatgaggttcagcttcatatgtttttagttactatttttctatataaatatacatatgtataatatatatatatatttttaacaatcttggcttcctggctcaggttttgaacatagaattttttttctattccagactccttttagttttggcatgaatcataggacaccaccctaccccgctggggattattgtcttctatgcagaagtgaacgaaaagactcttcattcttagagagtggagttaagactgcgagcaaattggccctttccatggctcccaagggcaacagcgtgctgcacctgccgctgtgggtatgcccagactgccggaggactgtggagaaggaagagaggcacagcggtcttgaccagccggtgagtggctgcagcttcagtgggcttcttgcttctctcttgtgggtggtgggctaactggcaatgaaaggatttccgtctgtcatcagaatgcttccttccacactatcttttgacccgtgccaacagggatgtctctcctggcctttgctggccacaccagcagtaggtggagactatctgcttccttatctgcacagtcagcaacttggccactagtttgttacattctgacttttccatctgacatcagggtttctttaatgataaagtttcctgaaaagttagtaaggcattcatgtgtttagttctagacaatcctgtgtactggtaaatatctgaaaattatttctgtagcacattttggaagcctgaccttccgcacccctgattccaggccttcccttactggagactattattaggcttgatctaatctttgacatagtttaaatcttagtggccactgttccctttaggctttcttatctctttattggtattctatgagatggctttttcaaccattccc

SEQ ID NO: 29997 - DNA, 1111 bp, Mus musculus
cagttggtatgcagggaaatgtctccgcagttctggtctcatcttctcagtctgtctgaggtggccagtggctgttcatcctcttcattgtcagcccagagtcatgctcgttccatgtcttgctaagaattcagatcactttagcaagcaattgaaagtttgtgttttctgtactcccacattataaagaagtgcatttcatattagcaaaggggctgaaaactcagttgtgaccctgttgcttgcagaggcttcatacactaatttgcacatgtgtataactttttttcttcctttcctgtcctttccttaccttctttttttctctccttccttccttccttccttccttccttccttccttccttccttccttccttccttccttccttccttcctctttttttctcttcctttttgtttgtttttttcaagacaggatttttctaagttattctggctgtcctagaactcactctgtagactagactaacctcaaactagagatccacctgtctctgtcttctgagtgcatattccaccacattgggctgtgtgaagtttctcttcccctccccccttcatccaaatgttgccccgtcccttccagtctccccctgtattctgtttcttaagtgaagtcagttgaatatgcaaccatcactagtcctttgtaggtgctcatgagggattgctgactgtatctggctgcacttgatcctcagagtcttccaacaatagagatgctcatcacacatttcagttggatttgtcatggtgctgcttaggttttcctctttcagagttattcctagtctttcaggtctcaatttttatggtactggggatagaattcagggattcatacatgctgaacaactattttaccactgagtcttttccccaactccaaatctaaaataattctaaaggccttgggttgaagtccatggttgactcttcattcggcagagttctgctgcttctgctctcaggccttaggcattttaaggagttttgtctcctagctattgtagcttctaactgaggcatatggaagtttaccagacagatgaatccattgaaaattgaagttagataaatgcaaatg

SEQ ID NO: 29998 - DNA, 1102 bp, Mus musculus
gattacatttgagattggaactccaggcctgtgaacactggtgtgcacagtggaaaaacacagattatctataaaactctccagtctcaagagctcaagctagaacacagcttactctagatggcaggaccagatctagtgtgtgtagaaaacaaagtaaatgtgaccagtcatatgggtggccttcaaagtttctccaggtgtgaacacccccagtccccccccccaaattaaaagaaagcggggggggggggagtaattaaaggcaacaaaaatgtttgttttcttcagccaatggcagtctctcttgtatctctacatgtaggtgatgtttttcatggcctcaacaaagaggatcacagacattcagcacctgctgctccaaggaacagccccacaggcctagcccccctcccagccttgtctccttctgcgctctctccagcctctacacctcaccttccaaaccttgctgccccatcatttcccaaaactgcaaccacggcccctgggttcgtggatacacgcaagagcttctgtcctacccctgtggcacccccgccctccacaacagatggctccataagtgcccctcccagtgtctgcaggtgagccacagaacccaggtccctgagtggagggttgggagccatgctgcactaacatagctacagactgtgctctgggtccaggcaggtaaccagtccagtgcagaagaaagagacctcaccaacagaggccaaggccgtggagttggagaggctccagtctcactctcagcctctagttcttcagaggaaagaacaatggcccgactgccaagaccagggtcagggatgctgactatctccactggtggcattaagggtgtgctgtgccttgcttgtatttttttttttttaattgtatctgctatacattgggtagaatctgcagaaattttccaagatgtacatactaaaactaataccacacacagtgatttttataaaagatcatttctgttacctttgaacttgcctgttagaaacatgtcctttgtaatctccattgtggaaccagtggtctcaaggaagtcagaagagtcctgtgtccatccagt

SEQ ID NO: 29999 - DNA, 1093 bp, Mus musculus
aaaccacagaggtacagctcaaaccccgggcccagccagagttgaaacctaaagtagttgaccttgctcttctcacagagcagaagagggaggagaggaaaaccaacagcaacaacaacaacaaaaagcagctgagccacatcaaagaggagaagctgagcactgtcactcctgagccaccctcccccagccagctcctgcagaatggcaggctgattctggccagttctcctcagcccaagggcaagaataagaaaaataaaaagaagaaaggagacagaaccagcagttcacttggtaaataaagatcacaagggaactgttcccagccttggctggtgtggtctgtgtgtgtgagttctcgacaggcccctgcaggcgggatgttgctcatctgtgacttttccaacaataataatttgtagctgctatattatgattttgaaataattttagacatataaagtgcactttttttttaaaaaatttgatttgtggttagttgaaaacataggtacagaactggagagggtaaggagagtggctgctgtaacatccctcctatcctgggtcatctttgggtgaggttatgttcacctgtttctaataccgttgtgttgattgttcctatctcataattagtaagtttccatgtctgtgtcacagtgagtttccatgatatccagtgcatgacttgtgttctcagacatccttgattactaagaacttgttccgatagtgacttacacaggtctagaacattcttgaagtagttgcaaaggtttttgtcttatactctagagaagtctgaacttcctgttttgtacataaaggtgacatgctgcttactggcttactcctcatggcttactgaacttgctttcttacagtctccaagaccactatcccaaaggtagtaccacccatgcagtgaacttgaccctcccacaacaataagcaatcaagaaaatgcactacaggcttacccataggccagtctgatgggatcattttctccacagtgagattccctcttccaaaaattactctagcctatatcaagctgatataaaactatccaacagaccttttg

SEQ ID NO: 30000 - DNA, 1213 bp, Mus musculus
tgtgcatggtttttttcttccttttaccaggtagcatatttgcagcttgagtttctaggtgggtaggcctattgttgctcatttttaggtcgtgtcccacccacccgcctctccccgccccccatcatggttagtgtgtgggcatttctttctctggaaatgttcagatctccacttataacctaacatagagctttctactattagaacagaatacttgagataatcagtgtctaaagagggaaggcttgttttgctctcagttcttaagattttagtctctagtcagccccattgctttgggctttgggtgaagcaacacataatgacagaagaagtcagttcaccttaaaatgactgggaggcaagagatgagggcgcggccgcaaattgccactcttccttcaagaatgtcccccagtgacttaacttcttccctaaagtccccactggggaactcttcccatagtcccttgacctttgtgggacccctgcagtcctaactattgtgtgtcagcttttgtgaaggtctcatgtgaacttaaggtacagatgtatgtctgccttctgttatttgtgatacataaattacttttactgaaagtactttgtcactaagatgcatctccatttttttggcgggaggcaaggtggaatgggatggataaaaacgttgtccaggctagcagtcctcctgcctgcctgccctcctgagtaactagaattacaggatgcactaccacataactccaaggttagcacagaatatataatggggccctgtcagagttgggagtcagaggaaaaaagaaaggttttctttggtgagttaaagccattcacattgttataataactttatagttggccttagtgttatcactatcttgataattactttgagtgtcttgtctgtattggttttttctttgtggtattttgttcaatgcttttatttctaaacatatttggtacttaggaaaaattgaggttttgaacacatatgtatgtcttaatttttttttctgttgctataataaacacctgggataaacttgacaaaaagatttagtttctctcacagttctagagaatgagaagtgcaagacccaacagcacttatctgttgtaggccttgtgctacttccagagagagcagaaaagtcccaagaaaaccagatgtgttcttaggaagatgggataatggcccact

SEQ ID NO: 30001 - DNA, 1196 bp, Mus musculus
ctcctacagtaaatgctgcttttcttatactttcctggctgtctcctaatcacagtatcaaacgacaccagaagatacacaagccacttaacttggccagtatcctgaaggtgggaccactcttccaagcatggagacttttgagctcaaacctcactgagcctccatagtgaattgctagcaagaatcataggttggctcggtggttgccaatctgggttaagactctgtcctgtgacaatttgcctttttgttttggcagattctgcttggactctgcaagacagaaccgacaaagactatccatcaactggtccaactttagcttgaagaaagccacctttgctgcccactgaatgaggactgcctggagagggatgtgtgggaggcagctgggctgcgccactcaagagccaagcccctcactggctcccctaagcttcagtacccacccagggtgtgtagggcgggatgctgtggcctgataccccgagaccgagaacttgctgctcgacctgcgttgttagcttgtgtgcgtgtagtctgtgagtgagacttctttgattgtagctctgtgctgtcggaatggaacagtagttcccgccaattcctccaccaccacggcctcagaggcctgggccgtggccagagacgagtttgcatcatccacgtggctctgtcacctctgcatctcgacctgtcctgtcatctgtccccgccagggtgtcagtcatccctcagctcccatgtgccctgtgtcccacccaaggcgggctgggcgggcaggcctcctttgtcctctttcacaatctactgtttctgagtgtacacgttgcgctgtttgtgtttgaccccctgacttgtagccagcttgtgtaagaccccttgcagaatgagaacgttaaaaacaagaaacccacccagtactcacaccatcaagtctgttctagagcgtacaaccgtattaacacggaggcctgcctggctacttttttaacatattgttaagtaatattaaaatcatgtctttctttttgaaagatggaatacattagtacagcaggagacccagtctggttgctttctgctggggatgatgggtgtggtgggaggtatcaaatgggtgatatttgttcccagggagccacggccaccaaccccaaaggtgttcctaggtctccaggttcctggttccc

SEQ ID NO: 30002 - DNA, 1205 bp, Mus musculus
tgtccaagtttgtatcactgtaaccttccccttgaagatctcaaagtagcctcagaaggctactgggtgggtgctggcttatggcgcagaggcatgtcatgtcagtatcatttctcagccttggacttggctgattcatctggggcttctcagcagtctgggttaggacatgtacttcctgtcattcaaggggatttcttaaaaccagtgtctgtgcgttaccagtccctctgtagtgttgaatgtctgggatttctgagatatcgagtatactccagaaaagtttatgctgctttccctttgggtcagccaactgctattaggggttagtttggggtgtggcttctgggattgaatgccctggttctgaccctgtgtgaagcacaagttaggttgcctcatccagaaagttctcttgtctataggcaggatttctgtcttggtgactctgcaggaggtaagatggatctgtggccaggcctacaccaaggacctgaaaaagcctcctggatgctgggtatgtgtctgctagagtaacactatgttgctgtcttccctattgcctgtgatgataaataagttctggtgctgtgaaggttttactacagctcatgtacttatccctgtagacttgatgacaattgaatgtttagtccagatttaaaatacagacagctcatgttggtaggtaagaaggaacaaggacagtatcaagagtgataaacctcgagaccctccgccaaggctgtgtcctggcctcagctggcagtgggtagggtaggagctggatctgcaaagtttatttgtttgttttttgatatctgttttgcttcttcactaagtgaacagtcatcacctcctacagtgcagctgcagtgacggtctgtgacctcagcctctggctccagcttcctctctatttctgtatgttatactcacacagtggcatggcttccctttgtctcttccttatgtagctagagcaaacaagcagcgatgcttctggccagagtgttattaagaagttacaggaagaaaatcgactgttaaaacagaaggtgactcatgtgagtatctaacatctcattgaagaggaacattaaccctgacaaatggtaaatggaggcttttttttttttaaagctggtgtctagaggtgacttctgcccccctggctgctttaacttgattcacagtctccagag

SEQ ID NO: 30003 - DNA, 1158 bp, Mus musculus
gggtctgaggctgtccaacctcattacagaggaggggtggtagacaagggcactgacagagaccaccactgaagaaatctgctctgaaatccttctttcatttaatgtctgaattctgtgtgtaataccttttgctttagactaagttggatattttaagtgttttctgttaaaacatgtaaacatgttacgcttacaattagaattgtatattgttatcttttgagaaagggttgcactccatagctctggctgacttggaacttgctatataggtcaggctggcctcaagaaaaaaagaataaaaatggaaaaaaatcaatataaaatgaacaaaatacaaaaaaataactttatctttacagaaatatggactattttatagcatgaaacttgtccacctattagtaaccaggaaatcaagtctccccattgtctcctctccccttccactccctttcactccctctataaacactgtacccaagcttagcagatgtgtaccatgcttatgtctccttcctgagcctctctctctctcttgctgtgtctgtctctgtctctctctctctctcttagacagtcttacctagggggctcctagacttaggatcattctattttagcttcctgagtgctgagatcacaggcatgtttcagcatgccttccttgtagaagcatacttaagtctatctgaaaaccctttcttatcaaaatgagatctctttttttcttttcctttatttttttaactggggaagatctcttcttttttactgccatattcctgctgttttgatatacgctgggtatattgttcctttctgtgctgaatgagttggagagagagaaagagagagagagagagagagagagagatacatacatacactgtgaatgatgcagagaaaccagaaggttatgatattttggtatcgggactttcagaactgtatcaaacattgaggaaagattgtactcatatgtgaatgttcttctgtcttcccattgttctccaggtttgtgtattatcagaaatttctatctattatatgtgtgtgtgcctgcttgtctgtgtgtacaccatatgtgtgcaggtatccacagagtccaaactggggttggagctcctgaaactagagttagaggttgttggg

SEQ ID NO: 30004 - DNA, 1185 bp, Mus musculus
atcatattttattatggtttagcctactaactataaactggtagttcgttaagactttttagtaagacagcactcagatacacatgaagacagccattttgactgctatgaaaaacatttgagctttagaacaataaacaacattctcaccagattatcgagcatccgcataagagcttcaaattcctgctccccaatctgccacttgggaggtgatccagagccttcccctgctggagtccctggagaacgggatttggctttgtacttcccaggatccagcagaactaagttgtctggtcctccagcacttgccagagtccgaaccttttcaaaaaagaacaaacaatctggcttgattccacagagataaagagaagcagatgagcgcagagaatgcagagcagtgcagcgctccacagaaagcagtgaagcacatggagcattttcagagatttcctttgcaatgacaaaatatggacagtagtaagaaatgggaacgttcccttattccatgacaaatgtcaggactgaaggcagggccagcagggactggaggccaagtagagcagtatgaggaatactgacactgagaagcaaaacacctctaggtttctgctctagctttttcaaaggatagtgactgtcagatgcagtaatagagagagaatatgcacaaagctatagcacacaccaaacctccataagtaatgcatgcatgtgtgcatgaaaaattagaaatgaaaatcccagcaatctttcctaagttccaaaccacgagctcaccatggctaaaggactgctcaaagcttcactcttgcaagacaagtattagaaaacccacaggaacaccagagacatccataaaccattagctaaatggaatggcctacctggatctcacatgcaaccacaaggttatggatgtaatagaaggcctcctccacgctctctccaactgacacgagtccgtgattccgcagaatgaggacctaagggaaggcacgggagctgtgtaacaaggcaccaagacttagccttccaggctctacaactgaataccacaagatgacactcaccttgcttttagggcccagatttttctgaatcaaaattttttcctcttcatcaaccagaatgccatgatagtcatgataagcaacatctccaagggaaagtgcctcc

SEQ ID NO: 30005 - DNA, 1936 bp, Mus musculus
caccttcaagccgacgccccctgacctctcccctgatgagccttcagaagcacttgccttcccagcagtggaggaggaagcccatgcttccccagaccccactcagccccctgctgaggctgaccctgagccagcctcagccccaactccaggagctgaagaggtagcctcccctgccacggaggaggggtctcccatggaccctggcagtgatgggtctccaggcaagtccccatccaaaaagaagaagaagttccgtaccccgtccttcctgaagaagagcaagaagaagagtgactcctgaaggcccaccctgcatactctcatgtctacaggcctggctctgtcaggattccctcttcttgtcttgtgttctatcctcctgtgtaatggaatgcaaacaaccaaaacctccatgtaactagagccccctcccatgtatagtcagcccctgcaccagtgctaacccagtgtgtgctcagcctccctaccctgggccttgggttctgtggggagctgggcttagcctgcacctgtgagttgtgcccccctgcaggagggggacactgatcctggtcctggctggaaggcattggaggcttctgccagctctggttacagcgtcaccctcctgagccttgcctctcactctcctttctgtcgtgagtatcgaattgtctgctcagtttccctccactctgtggagtctcaggtggctgatttggactcggcttttgctggcatcctctgcttggtgatgtcagttatcccatacacaggtatccacataccccagccatggtctgagaaaacactctcatgtccatcagcggcccagggcactgtggctgccttaaagaaatgggttgcagctgctgcgctagcagtgagcaaccctgtgtatacccagcacaacgctatgcatggtctaactggtgaccctatgaccaaaaccacattcaggcgctcatagttgatcttactggggtcttggattcccatcttagggaacagataccaggagggtgaagagtccgttctaaaactttctttcagcaggtttgcaatttagcttacattttaactgtgaatttgaataggccactctttgcgttagtttttgttgtagagcctgtgacagactgcagcagaacactcttgacttgtgtggggaggttttacataaagggtaactcatggtagaagccagccttggaggtaccatctaatgtgttgcatcattcatagagcccatgacctcttgatccatcctttatgaatttttacttaactttcatccctggaaaagggcttagtggggagcgccgagtgtcaggtggaatcctaatggggccttgttcaggagctgccactgccagcctggctagagtgaggaagcctgctggagccctgctggagccctcgacacccctgctgcagttgggcctgcagagcaggtgctcaggtgtggacagagccctgtgatcctcccatggggcaccaagcagggccccacagcctcttgcactgctagtctcaccagtcaccacggtggcctgagctcttacctggtccccagtcccctcatccggactcttcctcatccttccttttggcccttcctttatcccacatatgcaatgactcttctcacttttgtagtctaattctttgtattacacatgaaatatcgttgcatatatggacagacttggaggacaggtcctgtgtgtcctctcctcattgtaacaggttttactcacaaataaaagtctttaagcagtttccttgtctaaggttgggggcaactttgcatttttatgcctttgttcccttagtttatttagctgtgcataggtctgaggtacgcatgtctgttctatgttgtgtgcatgtatgtcagaggaaaagctgagcagtatgttttctaccatat

SEQ ID NO: 30006 - DNA, 1191 bp, Mus musculus
gggtgcttcctggcctgaagtgaccgatcctgccacttggcctccacccattggcagacaggtttggccatctcctatgcagtgtgggctacctctcggagctttaaggccttcttggcctccagggtgatcggaggcatcagcaaggggaacgttaacctctccacagccattgtcgctgacctgggctcacctccaacccgcagccaaggcatggtgagtgaacagacctagggaacggggattgatgtctgggcttcagactccatgcctagctcaggtcttttccctaggcagtcatcggggtagccttctccttggcctttactctgggtcccatgctgggagcattcctgtctgtggaaatggtgccctggatcagcctactttttgccatctccgacatgttgttcatcttctgtttcttgccagagacactgccccaggaaaagcgggtaggcccgggtccccggaggggtgagggctcctgagggttggaaggggtttcctttcttatctgtaccattggcaggggagactggcctgccctcaagctgctaacatcacaacacctcttgggtttctgggatctgacaggtcctggtccctaagctgccaggctgtgtgctcccagcctcctggccagccctcgctttctcccacaggcatcttctgtcaccctgggcttccacactgctgcccacctgctcagccccctggccctgcttcgctttgcggctgtcactcacagtcaggacccgcctgctgagcacagtaaggaggcttaccccggactgagctctcagagtcttgaccaaccagcatgaacaacgatcaacctgtggtctgtgttgacttgcaggactcagaaacttacgccgtttgggtcttgtctacttcctctacctcttcctgttctcaggcctggagtacacactcagcttcctggcacatcagcgcttccagttcagcaggtaggtctccatattagtggcttcgaggttctcagaccccaggtccaggaagcctttgtggtacccctcccagcactctggctggtggccttgcccatcccccaggcagttggtggcctagggggctgggcgctcaccctccacctcctagcctgcagcagggcaagatgtttttcttcatcggcctcaccatggccaccatacagggcacctacgc

SEQ ID NO: 30007 - DNA, 1208 bp, Mus musculus
gaatggccctgtgttggttgtcggagtcttactaagttcttcctcaagtgtagtgcattgtgatctgtccttgtttcctgttagtagttacttccttttcttagatacgtttccattgtttggctattgcttttgtttatctttcagcaggtggatgaggagcgcttgctagatttccattctagcattgctgcagtgagcttcttatgaggatgggaggtgtgggagcctgtgcttctgaagatgataaagggacccacgatgctgccgtgctgctctgcactcttcttattgtctttatttatataattgacactcgagtgttgggcatgtttgttctgattggaggaagatagcttggacattcagatacaataggaattctgtatatcacttgcattcccaatacatttatgggaggaagttatgtgcttgtgttaggcaaattttggtgggtgaccagcagtttacgtgaccggtcagaaaaagtctctttctgggaagacataagctacttttttttcacatgtctgacttttctgagtgtcgtgtgaggaagctcttagtagacctcatctgtcgtcatcccttcctcatgctgccctcttcccagcatggagtttatgattcactagtagtagccaaaacgtacttaggaatgaatgaaatatagaaacaaacgaagtagtcacctcagtggatgctcatttcttttcctcttgtttttttgtagaaagaaggaactctcagccaccaagaaagaccgtgtgaatcattgtctaacaatatgtgaaaacattgtggcacagtctctcaggtaattggctttttaaaaaaaagatttatatatttatgtatatgagtattctgcttgcatgcatgcctccatgacagaagagggcatcagatccctttatagatgggttgctgggtagccagtgctgagccatctccccagcctcttcttttctttttgtttttggttatttttgttgttgtttttctttttttgtttaaaagatctctctggtaattactgagttgggtggtggtggatatacctgtaacctggcattcaggaggcagaggcaggcagatcttggtgagttcagggatagcctggactacagagccagtaccaggacctacacaaagaaacctttaactcataaaaaacagaaaacaaagaagaagaagaagaagaagaa

SEQ ID NO: 30008 - DNA, 1194 bp, Mus musculus
catgcctataaagttgcaggcttccactcacagaggcaccagtctagggaggatgttttagtacagcagcacttctgcagaaaagtcttaggccagattatcactgtatttgtctagtgctttttccttattattgtcaagttttttaaaaactttatatagtgttcttactacctctgttctggtataccacgagtagcctatagacactgagactgacacagtgaacaagttcctgatgaatgtgtgtgtgtgtatttcttattcatgtgggttctgaggatggaacttaggccatcaaccttggctacaaattcctttatcatttgacctagcacacagccttcctaatgcgattaataaggaagtaaatatactgctaataaatacttggtgactattgaaaatttggtattttttgctccatctatgaaaaatgtgtcatcttgtcacagtttttgtcctataagttttagaattctgtgaaatgtgtaataagctccatgggagcttcagttttcatcatcttggttttgtttgttctcaggttctgttgaaagctttcatagcaaatctgaagtcaagctctcccaccgtgcggcggacagcagccggctcagccgtgagcatctgccaacattctaggaggacacagtacttctacaactggctccttaatgtcctcctaggtaagagagaaagggcctgctggcccagtcttagcatctgctcaatcttctaaactacactgacccttgccatcatgattagaccatttgcagctgctgactgctaaatgtgaagtgtgtaggggatgttgcaagcccataaatggtctcggagacttttcagctgcggctgtgtctctaggacacccagctggtacacaacctcatccaccttcctgtccttctgtatcagaggcctgaggctatgcttcagcacgctgtgggtactctagggaaactgacattcccctaccccctctctcctgtcaaaatcaacatgaacaagtcttgctggaatgagcatatggacatttgatacaactctctgaattccacatggacatttgatacaactctctgaattccacatacagttccactccctataaggtcctgccaagctaaggatatattttatgctgcaaggctgcttttgatctgagtgtgcacagcctgtgtttctcag

SEQ ID NO: 30009 - DNA, 1116 bp, Mus musculus
atggcttgccacagtatatacattgaggagccatatttattatagctacacattagagacagtctgcctgggaaatactattgtgaccttgtgcgcttaaaaatttgcctggactatgagcagaaactgttttactgctgtccttgttaaagaatttttatttttgtggaaagtatgtcatacaccctggtaactgtttccaatgaaagcttatgtctggcctatgcttgtccaataatgtgagatcttacagttttaatttggcttttaaagagcagtttatatgagcttttttgacattctagtcatatctttaaaactgtgtatttgaacatgagtgtaattttcacctttaaagtgtgacactgtggtgtttaaacatgtcctatggaaatatgtccacattgtctgttttaggatttgagttaagctttttgaggatttttgaatttcttgcagattttagcagcttgtaatcttactttcttgttactttctatgatttacagctggagggggttcctcgtgcagccctgtcctctcaagaaagcagaaaggtgattatctcaaaatctgagtcttgtgttgagttgaactgctgtttctgtgtttgcataatgcactagattctgcttatatttcctctcaggagatgaagtgtatggatattgctggaatctgacattttctgctgtttaaaaattgtttatatcacattatgtctaatgttcgaggtcaaaggtcagcaaactctataagggaccagagaacaaatattttaaacatgcaggctatagactctttttttgttttgttttttgtttttttggatttttgagacagggtttctctgtgtagccctggccgtcctggaactcactctgtagaccaggctggcatcgaactcagaaatccacctgcctctgcctcccaagtgctgggattaaaggcgtgctccaccaccacccagccatgctatagactcttgcagctgtttccctggcttgtgactgctgaagaacaatggtatagaaactgctgtgtctagctgttttccactaaaatcttaaagatgcagctgggctcagcatcactttagagagtgcaccactatac

SEQ ID NO: 30010 - DNA, 1149 bp, Mus musculus
aataatttaggccagatgaaatggttttctgtgaaatgaccatttctaatggaatgaattgtgtcattattggggattaaatggagtttgtgcacttggatcttaaaatttatctgttttgcacacattacaaatacgatggctaggattatgtaattcagtggtaaagcacttgtctagtgtgcacaagtccctaggttcaatctctaatattgccaagaaaagaaagagtagaatagaatagctttgttagcggttatatagttcattgcctaatggaatgttgagcataaatgaaacttctggaaaatatcagtgaggtataaattttggtaatttaaagtaactagggcgtaaatgtgcatcatgactttagaatgttgaagggaaagtccaaaacctgttgccctgtcttaagaagctcctagtgctccttggtattacatgtttctagaactcatctgtgcaaaaactgagatttcaaaccaaagaacaaactactctggcttttttattccagacaccaaaggctctattcactgctggacagattccgactctctactgtgcaggactcacttagccccttgcccccagtcacttcccacccactggatggggatgggcacacatctctggaaacagtgagtccagacaaagtaagtgtcccgaatgtctaagtgtgatgaccaggaaccctgtggagacaatgacagcctctgtctacaatgaggatagtggtggctgtcagtatacatgggacctgacactcagctcaggtcattagatgccctgcttgggattagagtgcaggatggaggccaagaggtcctactgagaacaggagtgctgatgtgaggcttttgtggaggactgtgggggcaagtcaggtggctagtcagcaagtcaggaaaagttggttgtggtccaggacctatgactgcagacattgtccagcacatgctgacaaaacttggcctgcctccccctctgaaccttctatctcctataaattgatgcacctactgccaccagctatataatgtattgtcatctgtaccctttctcattcacacttgagaattagaaactgttagggcctttgccttttaggcaaggagatgagattttagaagcctgcagcccatg

SEQ ID NO: 30011 - DNA, 1149 bp, Mus musculus
aacctcatccctggttgtggctgacctgcactgtagcctgcccacacaccagctgaccattgtggatgctgtctgtccctttgtatcttctgcatggttgggacctgagaagtgctgacctgattaccccaaaggtgtctctgagctatggtttgttggtttgtctcagtttctcatagtcaagggaaagcttggtgtcctagcaacagttaagaatggacccagagcctcttttgccccttcccatcttgccttctgtcagcccagtagagtacagacctatgcctgtcagagcccagggaggactcagctgacaagatgaggcaccaaagggaaggttcaaaatcaggtcagcctctggcctcagacagcttcccatgctggtcagagccacctcttcccaaagcccaagcccagagtaaccaggtcatgttaatgaaaatgagctaccttcatttcctggcttggtttgggaactctgtttgctgtttgactatatgaccaagcagattttctgctgttccgctaagtcatatctgtatttctcagctgtagagtaggggagtggaatagtttggagatgtttctaggctacacaggaggaaagagcttgcagcctgtgattaactaactgtgcttcagtccatggattgctttcttgagacccttgaatttccctctatctttccatcatgacaagtagccttgctgctgggatgcaaggttccctaccaaacacaggttgtggggagcctcacacttggcctgactctcctcctatctgccctggcaaaaaccaccccaaggcgtggtaacaggaacagtggacatggattaggtctttcaagaggacgttaagggaagctactgaattttaatgaaagaaattcaccaatgcccctttgctgatttagggcttcttcttgtcaccctcaatttcccgcctagaagtgctcggggaccatgtgaaagttcttacagtgctgctgccacactctgaggttggtccaaccgctctgagatgagcatggtgcaggcctgattactcctcatggtagatgttcataaggaaactcaatataaaatctagagccattcaccaggggattatatcagtgagctcaacctcaagtttagttggcctcttgt

SEQ ID NO: 30012 - DNA, 1050 bp, Mus musculus
gcacctgggtacaggcaggtatgtatttgtgtacacacataaacacacacacaatcctcaaagacatatgcaaggcctctaaaaatgcctgcctgttttttctgaaagcagacttttcttgcaactgccacatacagtcagctttgtgagtctagcatctgagaatgggactcaatttttaaaagtccatagctcattaaagtctcactggagacattgccccacctgtctaactgcaggagggactaaaactttttatcaaattcctcaaaaatctaaagatttccaagctttatttaaaaacaaaagttattttgactatgaggttttaggggtaggaggtgggatgttgtttctgtttccatggtggtactgtcaggaaagattttaataaaaccagggtagaacttttggcaatgcacttcagcatgtttcttctccaaaatgtgcctccctccctcccactgatggcccccttgacatgtaggtgacttagccactgccaagtgccctttatggttctctcattttgtctgcacatgtacccttcaggagggaagaactggagtggaaccacctcctgccctgtagaatgcagtgccagggaagggaccaatcctaacaggtgccttccctggcaggaagtaccttcccgtgagtgagtgaagcagctctgcttccggctcatgggacaggttttatacagcaatagcttgtctcacagccacgtcacaaggagtcttgcctcccattgtggggctgcagaattggtctccttgccacctgtgagcatccttccccacacagtctccttccctccctccttccctccctccctccctccctccctccgtccctccctccctccctcagcattgagcactaggatcatggctgctaccaggacaggcatgaagctgtcctccagggattggtatgtgggagtcgaagacactgagctgctgatgctgggtgtgggctcaggatatcatggttgggaaaagaattgttcctcagtgggtctggagcctccaggaaagaagaaccaat

SEQ ID NO: 30013 - DNA, 1151 bp, Mus musculus
atgtgtaggccatgtgtgtctatgggtgccacaggaggccagaaaagggtatgtagcccctggaaccagagtcatagacggttgtgatccacttgacatggatgctaggattcaaaatcgggtcctctggaagagtaggaagtgctcctaactgctgggccatctctccagaccataggcctgcttctatttgcttcccaagtcatactcattttgttagagcctaaggaggctcttctgagcctctcaggagcaggtgtttgaattgagaggaaatagcagcatgacattgtcatttcctggaggaagaaacccaggccttttgctgaaatgatcctcagacactggctagggcgtccttggcttcttaaagtgagctaagctgacacaaaagtacgggcaggtgaagacagccttcatgggctggttcttcacacactatcagtccgttcctagaacaggctgtctgcatgcggtgggaaagcagggtgggccttatcatctagggcacacagttggtagctaacaacagatagctaaagatcctggggggactcttgcaattgtttgcatattttgtggtaaatattttaattaaagtatactgaacaatgacttcaagtgaccctcccacagtgctgctgggcttggctcttccttcagtggagcacaaaggacagaacagatagtgtcttcccaggagggtaacctaacacatctttttctttgtttttagagttcaaaattggggcggggagttgccctggcccagacgtctcagcgcacctcagctcgcaggtcctttggaagatctaggagattcagcatcacgcgctcccttgatgatcttgaggtaggtgcaatggccttgctgaccatgtgtgctactgccactatttcccctctcttcccttccaaagatttgtccccaccctcttgggatcccgttggactctgcctctcagcaggagcttccagggcacatggctggaggtttcctatatctcaaagtgcctgagtctggacccccacactggggagccctgatcagaagggagtatgtttaatcctttgggacagttgaggtaggactgacccctacccttcctaaagacctgatcatcccacatcaaaggccattttaagaatag

SEQ ID NO: 30014 - DNA, 1146 bp, Mus musculus
ccctgcctcagcccagagcccctgctcagcctacagtccaggctccgcccacagccccggctccgcccacagcacccctgggcctcctgggaccacccaacctggagagaagcctacaaagccctcctgtgtctccatggtgcaagagggcactacacaggcctggaggaggctatcaccagaaatggaggctgggggcatccagactgtggaggatgagcaggtggctgatctgaccctgatgggggagggggacatcagcagccccaacagcacgctgctaccaccaccccccacaccccaagacacaccaggacctccaagaccaggtacctccaggttctgactctacacctttgacctgtccatgattaataaagggaacactgaggcaggccgcccctgctctacagattctgtggattgaaatggcctgaggaatggcctccttctcttatatttgtggggcctcctttgccttttctgaaaggaaagcaggtggcagccaaggctcagtctcccagggagggtcactgaggctcagacagatattccacgttgagctggtcctgtgaatgtgccatgggaatggtgagccacgcccagtgaccccttgtgaaggctcaggtctctgagtgtggatcttacctttaaaacctgcttgctgccactttagcgttttagcctcaagatggaaaaaagtagtatttgttttgagccagtcagcaagggtcccgtgctgacatggatcaggttctcagcgtcagcctctctgtccagccaggactcgctgactgccctccacactcggtagtgctcactggctggcctcacgcgcgtccaggcatttctcttagtggaagcatgaagtcccgtgggtgtgaatggggacagtgtgaccgagtgttagggatgctactctagtcccacccaaaacattcatgatcccacacaggtgacagggctccggctgtgttcagtgtcctcacagtgacagtgatgggccttccagtgcatgttgcttattgttcctgtctgacgccttggctgtgatgcagcaggcaatgtggccgcccatctgggtccagcttcctgggcctggtcttttcaggcctcatgcatgtttcatgtgctctcacacaccat

SEQ ID NO: 30015 - DNA, 2142 bp, Mus musculus
gggtcagaagtagagttctctgtgaccgcccctgtaggcatccaccactgtgaggaagagtcacctccttcaggagccaccatagagtctccacagtgtcattgtcttttggggtgatctgcttccagctgtttgttttttagcattccttctgtttttgagtctgcgctgagctctgtccttacttatgacatggtctgggtggctatgtagtggaagatgagccagagtgtgtagtactggatttcagctgtctcatgtgatctcgtgatagcaggcttgccatggtgtccccactgacaggtgtccccttatacaggtgaagaagcatctacaggacctgtctagcagggtctcaagggctcggcacaatgagctctgaggaccagaagccaccagcagcagcctagagagaacacttgaagacaccgggagctgtcagcatgtcatcggcttgcatagacctgaggtgactggtgtggctgaccaccgtggcaaggaggatcccttgaaataccaagctgatcctacagtggctggcaaggacttattttctttcaagcaagtgtagttgtcaccaccctggacgagggccttgggtaccgctaccagtgagataggactggactccgagctgcagcacaacagtttatattgaaatcacataaacctgcctgccactggaaacattctgtacagagtccttaaatacatggcagagttttgagccctcgagtccttgcctggtatctcgaaggatgggtccattgagccatggcaaattaagttacagatgaagggggaaggcgaagactagtctacccactggaagcatttccctccctgcttcacgcaccctctccctctctggggatctggccccagacagttttaaatcaagagatttcaggacaaagatggcagaggtgaaagcctgcaggtcttgcagggcgaacgttttctggccccctccacccccaaagaccctgatcagcttccagatccagtctctgttccctcacacagaatagccaaaattttgtctgaccccagcagctgatcctggaagatcaggccattgagtttgttagccgctgaatctcagcccagaaattggaatctgcctatcaggggtgcgcagttaaccatgtttaagaatatcacagccggaaagaggctcagtgagtaaaatgttcatacagcaagcttgaggtctacagtttggatctgcagagccttgctgtgtttacttacctgcagtcccagcacttgagaggcagagaaagtttatcccagccaaataaacaaaggtggagtatatgggagaaggcactctcccactctctgatgtgtgcatacacttacatgtgtacctgtacacaggtgaccactcatagatactcatatatgggtgaaactcccagggcatcatcgtgcaagaagcccatgggttaaggacagcagccgcaaggaacagtaggcagtgtggttccctcacccatgctgtgtctgccaccatccaggccagctgggatgtgtccctctgagcactagtagatatcttcccagaaccctcagcagtgtctgaggctcagagaaattcttgttgctagggtctcagctctgcctttctggttcagcccaacaccaaagcctcctgtgcctcacagcccaggggactcaggctcagagtcaactgctgggggagtgcctggctgtcagatgcaccttcactaatgtttgtctccatccctagagccagaggccatggctgcatgctaaggcttagaaatgggcacgttgaagtaacatagcagtatacagcccagtgaaccatctcagagtgagtgatagagagcccacagctatgttagggagaggtgtgacctgtgtgggagctgcctgcttctggagcagatctctagtcaggaggccactcctgactaagctctcagatatcagatcctgcaaacttccctgggtgagtgtgactcccaccgcaagggaacctcaagctacaaacttagatgcggttctggctagcaggctctgccacctagcaacagtgactgaaagtcctcaggctgacaggtcaccagtcacattatggtaaaggagaacaggttcatgcaagttgtcctc

SEQ ID NO: 30016 - DNA, 1196 bp, Mus musculus
tctgattggccaattaggtgatgccgatttgatgtctgtgttggtgtccacctctgatgatgcctgcttcagctgtttgactgagctgaggaagaagtggccaagtcgagctctgaagaattgcatggggattcacttggcaaagggtttgggttctctgggcagaaatagcagcctctgtacagaggctctgctgtagtaaaaacatggctgacatgagggactgaagatgtgggtgagatggcctgaggtgtggaagggacaagcagaagtctgctcaccagactgtcctgtgatcacctatggcaagtgaagcccactgctggatcttggaggtgctgggtaccctggattgccagtctctgttcctcttgacctggctaacagcatcattatgcccatcactctgctgaccactgtcctctcttcacagaaggccagcaacatgcccagctcttggccttgaggccactgtgcgtcatgaggagcttcagggaggaggaggaggaggcgacttctgaggagctgttcaccatggggcggggccctgaggagcctcggggaagctgtagccctgaagaccagattcagagtgtatccatgggcttgcccactggccaggagagaacagggtctgcggaggctgaggcaacagtgagaggtggtgagtgaaggagctgaagcccaccgtattctcatgtccacctgtctgtccatccagtacatatccgaatcctccatgccaacagggctgacatgggtaccctggcactgctcactgggcccactgggttagccacactgtgggctaagcacagagggccagcctctggcatacagatactgccctcccccgccacaacagatgatcagtcctgaagtaatccaggcttctaggtggagtaccctgcagctagccctagggagttctcagctgcccggggcctctttaggaacctcagtgatagcaaagttgcccctgggcaacttgctcctctggatggctgagcctgcccagtgctatctcaccttgtcctcattgatttctccattcctcagcgtggagtgcaggcccaccaggcaaacagggcccagactctttagtgatcccgggccacaccaggattggagtcttttcctaaggcctgggtggtgacacctgctatgtgactctccaggcaagcagcaatgatgtg

SEQ ID NO: 30017 - DNA, 1217 bp, Mus musculus
aggtcttcaaagcttgtcccttttccgggctcaaagattggctggaacagtggaattgcaggaagaaatgccttcctggagggcctgggacaggggtggggaccgtagcagaacaatccccgtggctccaacttcacacgacgatgactctcccctctgaagggtaggcccacaaggctcatttgtgcttggagtcctctgcctccctgacccgaccggtcccctcacagggtccagcctcatcagcagtccacacctttgttcctggctccatggcagatgacaggtgcctctctgagtttaggttccactctgtagagttggagctctatggaacctctggtactagagctggtgccttccttgacttccagattgtcacattatcctgtatagtgcctcctaccttttcctcaggccactgtgtgctgaggcacacagcgcagggggagagccatgacccacaccccttctcatgttccagagttctggctgtgaactccttgcagcagccccaccccacaccttcgtcctttaggctaacttgactgggctcggtatttgcagggaagaactaagacatggaacatctgcctacgatgaccggctcggtggagcttgacttcatttaagacatggatctgttgcacaagtcctaaagctgctcttagcctaaagagcatatgagattactggtacttaaaataaagccaagagctgggtgggtgcatgcctttaaaaaaaaaagatttatttatttatgtatatgagtacactgtagctgtacagatggttgtgagccttcatgtggtggttgggctccggtcaaccctgattgctctggtcagccctgctccagcccaaagatttatttattattataaataaatacactgtagctgtcttcagatgcaccagaagagggcaccaagtctcactaaggatggttgtgagccttggttctgggatttgaactcaggaccttcggaggagcagtcagtgctcttacctgctgagccatctcgccaaccccaggggtgcatgcttttaatcccagcacggcagaggcagaggcagaggcagaggcagaggcagaggcagaggcagaggcagaggcagaggcagaggcagaggcagaggcagaggcagaggcagaggcagaggcagaggcagaggcagaggcagaggcagaggcagaggcagaggcagaggcagag

SEQ ID NO: 30018 - DNA, 1150 bp, Mus musculus
tgccaggccttggacttccagagtctgctatccacttgaaggtggcagtcattatatccagatctcttctcattcccactgtcctgccctgccagggtctcccttagggcaagttattgtctcttcttgtgactttgtgtacttgcgtgcaatagcagagtcaccttggagtatgtgatcctgcctaaccgtgacatctgtttctgaggctgatatcatttcgagtaaatgtgctgccagcattcctcatctgacatctttaccatgtcaccttctggggaagtgtgttggatctcatgctttggttaggattaggatctggaagtggggggattctacagcctgacatggaggaggcacctgagttgcatgcacagtaactgcctttttggctccaggggaaggattcgggcaggtgtggggtgggctttcattctgagaccctcacttctgctgtctggctgatcacgggggctggtcctagatgctttccatttgggggcttttggctggtggtgaactggtatgtcccaagcaggtactgtgtggatgctatatcaggggtctcatgatacctgcccgatggctgaagagttcccagtctgtgagggcagtctgtgctctatggagagcataggggccccttggcacagtgggactccagccctactgttagatatgcttctccaactgcccttggccacagttcgcctacctgtgagacagaggtagcacctgctttgggggattcttcaagacctggcaggtacttggaagcaggagaataggaacatctggaacaccctgcaccactagggaaacacccaaatttgtcctctgcgtgaggtcagcttatctcctcagccatttttgcaacatgcctgtctttttactgcttcttggtccagaaccaccccagacttgtttacatctctgatctctagggagctcccagtcagtgcatcagcttatcctcagagggagaggcacggtatactgtattgagtcatggctcctgaattgagctttctaggccttggggtcttgatacccagcagcagggagaggcagtgaggcagcatgctggcagagagcttgcaggagtctggcctcaggacacagaggacctcagaatccttctcagagcctc

SEQ ID NO: 30019 - DNA, 1197 bp, Mus musculus
gtcaccttgatgaaagtgggaagaagggtgttaggagggaggggcgtgctgcagagatataaccagtttccagccttatcctgctgtggacatccagtcaatatgaattcatgaagctggactggaataaggcagccccatctagtctgattgttgtccttagaagagggaaggcagatggtagacagagccaggaggccatgtgggtggaacaatcacagaccaatgacagcctggtggcctgtgaccaacaaacaaggcaggatggaggtggggtcctccttgggtcccaggggaaatgtggtcctggcgttcattgccatggggcctctgctctctgtgactgtgtgagaatcaatgcctgttattcatgggattttgcaccagttggtctggatattgtcagaaattggcagggaaagcctgtcctgagggccagccctgccctagcatatcttctcctcaacctcctgcagcctaggtgggccacatccccgatttacagatggtcagacaggccccaaggcaaggtctctggaccaaggtcacagggcgctgggtaaatgactaaggcagctgggcaaggacaaagctgtggtgactgagaatacaacagtgagctgtttcctggctgtgacagagtgtgggtctcccagggaggcatccagcacgcagctgagctgggggcccagtacttaggactgacattccttaccaacaactaggcaaggtctcttgcccctcaaatggtgagttttcttatccttgaaggggcatggatgtcttgttcactttaaagtcacactgaaagtctccctgtttctggtgaaagaacctagtgggaaaacccccactcacctcccgatttggtgtgcacccaagaataatgaacaaacagactgtcttgatgtaaaaacatgaggtagtttaatggcggagctctgggtcgaaaagtatctcacgcaggagacagtggatttgaccaagaggcttggaagctaggggtttttatagaaaaggggctgggactgggggaggaattgatgcagtttcacatgattggtccatttaaacatcagccaactgtacatgcagataagatttaacttaggtcagaagagcaggagatagggaggcgcagggccagtccagcatgtcattctctttatctttatggccaagcagcctcaggaatgt

SEQ ID NO: 30020 - DNA, 1184 bp, Mus musculus
gggaagaagggaggaagggagggagggagggagagagggaggaaggaaggaagggaagaagggaggaagggaagaagggaggaaggaaggaaggaagaagggaggaagggaaggagggagggagggaggaaggaagggagggaggaagggagaaagggaggaagggaggaaggaagggagggagggagggaggaaggaaggaaggaaggggagaaggaaggaagaagggagggagggaggaaagaagggaagaagggagggagggagggagagagggaggaaggaaggaagggaagaagggaggaaggaaggaagggaacaagggaagaagggagggaggaaaagaaggaaggaaggaaggaaggaaggaaggaaggaaggaagggagggagggaggaagggagggaggaagggagggaggaagggagggagggcgggccacattcttaacccttcattctttgacccctggagagttcatgttgagaaagagttgtctcttgttgccatgtctatggttatgtcctcctggcctgtcagtcatacctgggagtactgagggtggcagccaagcaagcacctggtggtagagctgtgaccaagagccctatgtgacagaatctgcaggtatcacaagtggaagatctttggcatttccagtactgattggggttcagacaagcaggagcagtccagtcacctattccacaggccttgaacaccttctgtgtcccagccctgttctaggcatgggaccagagctgggcctgacctgtggagctgcagtgagatggggccagtcaggtggtatgtgaagattggcagctggagcattctgggaagggtgccatggagatataagaagtctccatggaagccagtgcctagcaggactcaagatgtggtcctggaagcaagcggttcttgggaagggatgaaccagccgaaggcagattcagggctagcaaactgtgtggccaagttactgttaccagtcccccccaccctaccctgtgcaatgacagccctagaggacttaaggtgtctcccatgggaccaagttggctggaaggtgacaggatgtggctgccagcgtctgtgttagagaggtactctggccaatgcacagtacgcatgagcatttgtagattggcatctgcagagcctgagggaaggagacacag

SEQ ID NO: 30021 - DNA, 2021 bp, Mus musculus
cagtgacctggaagttaggcatctctgcagacttgtacaggaccagttatacatgggtgagaacctggtgatgctgtaccaagggcacgccttcccatcacagcccagaatgtccttagcacacacataaggagtctcccaggctctccgtagtggtgcctttagggtcttctctgggcagccttcatggccatgattgatgctctgtgcttgagccctgaagcagctaccttggagtcaccaaagagcagcaaggtggccaccagggtatagggacatcacagtgtacatggaagctgcttagctgaaagtctgtcccagactagcccagtgtaagacacttgccagctgtctaatggtgctttgctctagtgccttcctccaaagggcagttaggattcctcataccagcatctgtgtgggctagtttctgccaggaaactgtgtaggaccaggatgagggatgcagcctccacacacgccagcctgttcatggagccccttgggtcatcacagggagctgtgaccattccatgctctgaaagggaagagacgttaatgtgccgtagacttctgctgctttgggtctcagagcagtgcttttggccactctgatagcagcctgctttgccaggaaagctgttccaggctttgattgttaccaaaacaaggagaaaatgtccagtttaacagccaaccctggccagcatagagggacacagtgaagtatcatgtccagcaaataagcctcagatgagtttatcctgatgaagacacagcaggttctaggctcctggtgttcctaatttgtgctgaaaaacccagccttgtcatccattcaactgtggaggaactgtaagttcctcagcgccatataaagtaggtcccggggaaggtaaggctcccaacacagggctccaacatcctgggctcccattaatgttcttagatttggtcagaaagctagttgagagagcatttgtttcaaaataagttatttatttgtatatgttcaataaatagagttttaatttatatatgtacatattaggcacccatgatcctgtcaggattctcagtgttctcattctatgaccctcccaaagccactagcatgaccccagccatcgatgacacaggtttgccttgtgtggagcccggtaagcagagggctgaaccctttttgtgagcaatcaggtcctctggatcatgggagttgctcctcctctctttgtctgaggccacaatgtttctaggggtctactttttgttacaatttggcaagttgtcatcagctttcacaaacccctctactttttttttatttatttatccccccaccccacacacacacaaagggtttctctgtgtagtcccggctgtcctggaactcactctgtagaccaagctagcctcaaactcaaaaatccgcctgcctctgcctcccaagtgctgggattaaaggcgtgcaccaccaccgtcaggcaaacccctctacttttatgcccgtttactaactaaccatttgcttacaaatatcctgctggcctggggacttgctatggtccctatcttgggcatgggggtgggaccctcagtgtcacacaatctcatttaccagtgttcttgcaatgatgagcttgggtcacatggactcttccagaatgcttgctgctcccctgcctcgtgtgtcagtgtccagtcccttccccatgcatgccttggtcctgcctcacccacccttcctcctcatctgtccactaccccaattttggctgtttctgtgtccgcatgtccatgctgatgggacttttagaaaatctgctttggaaagcaatgtcccaggccctgaggccatggaggaaggtttctgctatgtgggggactgcagttcccaggtagaattcaccagcaggcagcagcaggggtgtctctggcctctcctcccaaaggccagggacagcctcccctgtcactgacctccaccctgtgctctggggatacttgagccaagtcattta

SEQ ID NO: 30022 - DNA, 1195 bp, Mus musculus
cagtctctgctcccccaaagcttctctcttaatgcaggagaactatatcaatctctcctctcttcacagtgtaaagttggtggctcccccaggatgcagggaaaggcatgacatctccccaggcatcgacacacagacttccctctgccatcgtgaggatgggatggcagtatctttagggagcttggagctagagttttctcatttccgctgattttaatgctgctgccatcccaggggccctgtgcttgagaccagcaggcacttctcgagacggtattttgttcttttataaacacacagactcactatagaatatacaggaaacactgaagggggggatgctcacctgcaatccccctcacagaggggaatataacttgctccttacagcagctatgtacttgaagtgacattggtgcgctctttgcagacctggtggatgcaggtcataaagaagtgaagcgctcagctgctggagctggtaagtccccagatgcaccctcaggccatgtcccaggaaggccactggggctcctcccaccctcagatgagagcttcaaagagcagaacggtcaatgctgtccaactttcagaaccctctttggagagtccgctagggatgtccacctgaatggaaatgatgtaaatgtcatggatgcctgggacagcgtccttatgacccaagctcagcactatcctttggggacagagcaccagcttgtgatctccactgaccaagtaaaagcttcaccccacctctcctcttcctcctctccttcctcctcttcctcctcctccttcttcctctcctccccctcctttttcccctccccttcctcctcctcttcttcctcttctcctcctcttcctcctgtcctcctcctccttcttcttaatttatttattcactttacatcccaatcgtagtcctccaccccatcccacattctcttaagtcccttgctgccatggcactgggagcctgtcttcccatgcaggtttctactctgtggggccagagatgtttcctgcactgcagatggaacaaggctatcttcaagcttcagcttcccagagctgttctagccccgtgactccaggatccaagtctgagccccaaggcctgcaggtccaccccagtgtgagcacacagctgtgctccccagatggcccgcctcacgtctgtgtccat

SEQ ID NO: 30023 - DNA, 1117 bp, Mus musculus
atggggatatgagttgtgggaccagggagtggtggaccctagctaggccaaggttgcagcataagcctaggggtgggggtaggctctgggtgtttgatcctggtctagcctggccaggaagccatagggaggtctctggtgttctttcaacttataaacttatattttaattaattaattaattagttaatgtttgtgtatgtaggtcatagagagtctcttctactttggggcttctaggcatggaactcaggtcattgggcttggtgacaagtgatttcactgaagccacctcactggcctggtctctgggcttttaagactcgcagaatgtgttcattaacatgtgtcagtgtgtgtatgaacacacgtgcacaggctgggggagctggaggcctttgaggatcatggaagtaattctaggtaactttggatgggccctgttgtcctaggtaacttgcttaggtccttcatcctggtcactgaagtctatctagaaagcctctgccctcattaccagctatagtgacaagtgtgtcacagctaggcgaggacagaggccagcaataaaagaggtatagtcttgccttgcctcctttgacttccaaagactggatttcatctgcactgaaaccctcagatgtaccttgaaaccaccattatgcgattgccattgagaactggcactgattaaaaggcatattctcgctttctgagatgataaaacaggaaataacacaggtccaagaatcaattgtctatgagaataatgggctgcacagacaccgcctggcatgcggcttctttgtaaacgtgctgtttgtagtttacattctgcagagcctggaggacctcggctcgtgcgtgcagaggccaccacagaggccagacctctgtgtttgtggagagagctggccctgagatggagcttgggacttccagctgatagacgctccaagaagtcatgccatctggggcccccagcctgggataatggcaatcagatcctgtgtttcaggcataagctgaactcccgcagaggtgggaaggaatgtaccctcaagtagaagcctgcaaaagtttccagagtattccagagtgcttccgctccagtttc

SEQ ID NO: 30024 - DNA, 1182 bp, Mus musculus
agtatgcccttccatggctgtctgtccgtcctcgatagaggcctcaggcccctctttgctcctggccaccacactgcatgttaattaatggtggagcaggaggcctgccaggccctttcaggggcttgcattcccaggggtgagtagggagaaggcaatgtgggtgttgggcctggcccccacatcgctggctctgagccccagggccgcattgaagcactggggagctcctagctcttcagaccccctctgagctgttgctgggaccacccccctcctcagcctacccactacccaccctcttgttaaacactcaaggaaatcctttggagcaattagggaagtgtggagccaacacaggctgccccagcaggcttcattcttggtggtggtggtgtgggggctggcagtgttgggaagggaactgggcactttaatatgcaagacagaaccactagggtggcagggccaggctgcccagtcagccttctgcccctccttggccaactgggtgggaagccaggggaggaggggaaacagtcatgggaacccaggtggctgcatgctctggccctgtgaactcagcagctgtagacaggtgctgatggccacagcgggtctgaatcctgtcccctggatgacctgatgagctctatctactgtgaagaaggcatggaagctgagccgcctctttttttttttttttaaacctcacttagaaccctagaggcacctagaggcaactcccttcctgtttgccatttgacccctgccccagggtttcccagcggggctttcctttctgagaagggaacagaatcacagcagcgaccctggtcccactgaggtgggaggagggtgtttggctccaaactcctgacttctgagagtacatttcaaggtcctgcagctctctggtaacttcataccatatggttggcatccttggtaaatttggtaaacactgtcaaaagctacagctgggcacagatgccaggaggacatgccagctccttcagtggccaggctctctgtgacccagtacaggcctctcaggtctgatttctgagcagtgggtcagaactcttcaccaccacctatctctttccttggtggaacctgcattcctgcctctatccagaggcgccgggatctgtggctgccatcatgtgacactataga

SEQ ID NO: 30025 - DNA, 1233 bp, Mus musculus
tttaaattattaaagtactgtggtatacttaatgatttcaccaggaatcatgaacatccctgtgtaaggagcccatgcaattgagacttacgtgcagaccatcttttcctccatgcaggcatccagggtttctgcaaggacttgctggaggttgcagacatcctggagaaggcaacccagagtgttccaaaggaggagatcagcaacaacaaccctcacctgaagagtctttatgaagggctcgtgatgactgaagtccagattcagaaggtgttcacaaaacacggcttgctcaggcttgacccaattggggccaagttcgacccttacgaacatgaggccttgttccacacccctgtggaggggaaagaaccaggcactgtggcactagttagtaaggtgggctacaagctgcacggacgcaccctgaggccagctttggtgggggtggtgaaggacgcttagctccctccctcaggctctggactttgtaggtcacttgctagaactcgaagggcgggcttgtaatttctcatctgtgaattcatctgacccttgcccagccttgttggaaatcttaagtaagctaagcagaacatgaagctgcttgcacagtcagggactctgggagtctggtcactgaatttagcattacctacttcagaagagggccatcaggacctcgggagtagtatgctaacattgtatctgttccacctggtgattagtactttacacaaataaaaggtctttggctatatctatgctgcacagtctacctctgagtaccaaggcactggaagggaagagccagagcaggaacacttgttgccagcgaaaataagaccttcaagagtgcatattcctttacaagtcagtgtaaaagtcctgagatttggacacctgccctggctctgaaatgacacggagtcctggtatacttagtgatgagctgcttgcactatacctgggcagggttctttcttatctcttctaacccgaccatgctgcctaccacccagtcatgtgcccagttacctgctatcttagtcttgccctggctgctcctgctccgttcaacctcatagtgacactctgcccactttctggccagccattggctgatcaggtgacagaaagcgattttacacaacacagacgggagatgcttgatgatgccagcatctgggctacaaccagatctccagcacagtagtcagcatctgaacacag

SEQ ID NO: 30026 - DNA, 1600 bp, Mus musculus
tcctggcacattcctgtaccctttaaatgggaaagcagttaacggaagggccacagggtcagatgagggctgcctttcgctgctgtgaacacttacagtacacctgacttggaagacccttttgagttcaaggcagagtgtgcaatgttgaaatggagcagtaggtgctgaggacttccactaccattgtagatcccctttcactaaatataagacatgctagctagcctggctcagtgagctgattagcgtatggcagggggcctaggaagtacagagcatcctgcctgtgccttggagcctgtgcactgcttttgtatgtgatcttgcaacaaactcagaaatggctccttcccagccctactgaaaagcttgtttctggggcctccttcacggattcatatggtaccttccttctaaacttgaggaaggcatttgtcttccggctgctcagggctctcacgcccagaccctgctttagagtcctggagtgaccacagcccctgccccctgtccctgagaggtacaagagcctgtttacctcatagagtgtttgggctcggaagtaaaagtgaagttattttgaagaaaacaactcatttccaaggacgacatgacgacgtgccttttcattttacatcctctgtcccctagggtaagtttttcagcattaaataaaacatttcaaatatactgtaaatggctttagttgtaaagtgcattgtgggccagcaggcccagatttctcttgacaccagaagatgctgagcaatggtgtcaaaggaccagctccacactgccccctgcagttgaatagtggacagtagctggtgtgactgaacagcaatggggtggttggtactcaatgcctaggtgagccagtggttctcaaagtagggttccccaggcactgtcagaaatacagtcataccccaggttaaatctcgaagcagagatttgggggcttcattaacagggactagcagggtgtttttcaaaccatcccggtggctgggatgcaagctcaagtttgagaaccactggttttgtcctggtgtttccagcaccagaatcccagcttggtgaggtttgaagtttcagtgtgtcttctacaaaatgacagccacatctacattagcttgagaagcagaggattctgtcaacatgtggccaagggctgttggacaaaaagctgtgcttaagcaggcatatagtgtgtgtacatctttcgatgatataaatttatttgggcgtgactgttttaaaacaccataatgaatgtataattaatttatgttcaagtattaatattgttacaagggaaaagtaatattaggattgtttgctctcctgtctgccccagctgtttctggcatattattttttgttagctgagacattgacatgtttgtatttaattctcttgataaattagctactacaaccccatggaaccaagtcttttcaaatttcaacaaattgtctttgagtcagaaaagttagataattcttcaactgtttgaaataatgctctctgggaggccaacattccaagaatgtatgaagaactgaaaccctaccatttttattcttcttttac

SEQ ID NO: 30027 - DNA, 2452 bp, Mus musculus
aagaacaggggctctttccatgttggatttctgatgctgaagttggccttacaacaaaacagaattacatccaggtttagccttaagcagctcagtgggcccatgcactggcattggtcatggctagccactgcattttctacatgggttcaagaaagggcaggctgtctccttgaacctttattccagcagcagttaattaaattgtgatgctattatgccaactactggaaggtacattacaatctttcttagccaggatgcatgagaaatgttattaggaaacctcagagttgtttttggcccatatgcttgtaagaaaggaattacttagttactgagataatctttccagagatgaaaggtgtgttttaaatctccctatcaaggacattgtaaggaagatgggcccttgcagggtagttgctggtgaatctcataggctcctgggaacgcacctgacttttgtgctgacattgacccattgttgccttgacacttgatagcaagaaggctgagagttcatatcaggatcctactctgcaaaggagcactcattgcatcttgggagctagagtggttggagcagggaagccatatgctgtgaagggacagagacaggctctgtaaagagataggaaggacgagactgcagagtttgctcctctttaacctgcttgcttctggggaggctgggcatggcagcctctgaaaacaccattgtgtaggagatggcttccttgctttagctgaatgtccctttttgcctttgtcacctgagtagctggatcccttctaagtgccagtgattctcccctgtccccgtctggctttagaaatgagttccacgcactgctataaggacaagagtaaggcagccttccaccctctgtgtcctgagcccttccccattgcagctgattcctctcagttcattggtgaggtgcttgttgccctagcttttccttgacttgagaactttgtataagaaattttattttccagattcacagaaatgaacagtttctacgtagagtagaacagtccagtatctgtggaaactggttaccttctgatatccattggcattctggttcctgagggtgcaggaaggccagggttgagaatgtattttccagcaaatccctgtgtggtctgtagtccacagccctccacagccgtacctcccacccccagaactcaccctttccatctctgtgtttctgagagctgtgggggagcccttgactgattacagcatgtggcagggaggcttggggtcagcctcatggcgctgtgtttgcatgggttcccttcatctgctatgcctgttggtgaccgtccagtgtatctgcgggctgtcgtatttgtgctcttcaccccatgctctcactttcctcttttcttggagtctcatttgtagtctgtgacttcttcagggaggccacagagcaccctccatggagctctctgccttagtgtgaaaggctgatgtctgacctcttggaggaggatgtcttcacagccatccatggcctccaaacccagccattcctgacatcagacactgaatgtagcccaggcccagctggccataagatgcgcactacccagccctgtctgctgtccttccttgcagatgtgtactgagttttctcccacaacatgggcatctgttctctcaagatgtatatattttcttactgtacataaagacattccttacgtcatacagaaagtgttgtgacaaggggacttgggcaccttgttgtgaatgccattgtgggattctctgtgttcacaacccagcccttaccttttcttgtttgacataaatctgtgggcatgcatgaagttctccaacaagactccatgccagccgagcactgactgcatctctagtccaaacaaggtctttatagactgactgggacttgtgtgagcctgatgtaccctccttcgaggctatacagttccacgttcctctactttgagggcgtctctcatacttctctcatactcctgttttggcaaactggaaactgaccctgcagaggtctgtacctcccacctcaattgccattgactttcagtcccaaacttgagggtgctgggcagctggcactctggagggagcttgcaggagagttcctgtcaccttgggagcagtgcttacttcagaggtacttctaactgctcagtttgccaataggaaactcctgataacacttgctacatatcatgttttaattgcttgtacagttaacctttaattttgtttagtaaagtgtatcaaactaggactttttgaattgtaaatatgtggttttattaaaataaagtcatgtaaaattgttacttatgttcactgtgtactttggtttaactgacatttttgctttgaagtgtagcagaaaatattttagaatatactcagggcttgtgagacaca

SEQ ID NO: 30028 - DNA, 1186 bp, Mus musculus
atgcatatacctgtagtctcagcactctggggtaagaggaaaatactaagtttgaggccaaactgaactacatagcaagaccccaagttcccacagtaaatccataggttatgaagtgagtgtcaagagcagacatttgctgcctactcacaccatccatctgtctctatctatcactctccctctctccctgctcccaaccccctgtgtatgtgtactctcacaaacatgcactcaggctagagggggcatccatcaggtgtcctgtcgctgtccatcttactcttgctgaccttgaacctggtggattttgctggactggcagtccgcaatcctcctgtctaccctgctcagtgttgggggcttacaggcaagcactcatactcagcctttacgggggtgctgagatctgaaccccagccccatgcttttgcagcaaacactcaactactaagtcccatctccaactcgtccttctctgctatttttctggcatggtgagtactggctgctcagcgttttctttcttttaatcacaatttacagagcttaaagaagcccagcgtcggaggaagcagctggaggaaaggtgcaaggttgaagagagcattgggaacgctgtcctcacctggaacaatgagatcttgcctaactgggaaaccatgtaagcactgcctcactggagctacttagtgtgaccactccgttctggagtctgtgggcagaagctggagttgctggatatggtgatagcctcttccagtttatattttgagggcctgagccatgtttgtaaagcttatgcctgtgtcactccatacttaaaattttggtagcttgttgtgagtctccatatgaaactgagtgtgagatggcctgccctgtctctgcagactgttcccaggattacccagtaggaactgctaatctgtaacctctggacctttgcctgccttctccctgtctacagtgtcctgaacctcttcagccttctagatcctgtttcctctggcttagtcttcacagggaagaatttcctgcccccacctgtggaagactcccttgagtctcatggcactgtctgtttgagcatctgtctctttctgagggtgggaaccacttgtctttgatgtcaacctgcagtgtcagtacaaagtggcaccccacagtgcctggcagctgtggc

SEQ ID NO: 30029 - DNA, 1350 bp, Mus musculus
catggtgactcatctgcaggctcattcagaagatctcatggacattgctgtaggaacacaagggtgtgctttagagacttacagaatactgtgctttctcttaggattcccctaaagtaccatggaagttactgtggcttgtgactttcttgctagctgaagaagccaaggatttgaggcctgggttagatgggtgagttctgctactgcagtgtgtccatagcaggcatagtggggttctctgagctgcctctccagtgcatagttgaggaccttacttgtaaattgttatctggtgacgacactgaacttaattctccaagtgaacttcaaaacattggacatgcagtgaggccacctcttaccccaaagaaatctttggctgctgcagctagctgctctcgtggctgtgatgtagtgtagcttgtatctcattttgtgtttgagagaatgctctgggcaagttctgcttgtgggctggggttggtagaggaacttcccacacacttccctgtgtgattgctgttctgattatcgactcgtgggacttggtgcagcaggcaggcagcaggcctcacacagttgcatctaagcgtgctgatcacctcggatctctctcgcagcactgccacaggtgctagtagggccaattgtgtaaaacctaaacatccaaaatgatttttctcttttaactaacttgttgtttttaaaaacaccttgtctgtgacatgagctcagcatgtccagaacatcaggagtagcggagaggtcttaagtagttgaactggcctcaccagcaagtgggacggcactgggcatgcgtgtggcttcttagctgggagtggagctgcccctcgggccttgctggtagtacttgagtttgttgcctgtttctcaggaacacaggaaacaccgtggagcctgtgcaggcactgtcgttctggcttgctggctggggcctcttgccatcttagggtctgtttcatacagcacatcctgacactgacagtggtgcgtgtgcgtgtgtgcatgtagaagggttcatgttgctcttatttatttacaggtatcagatacattttatgtatttttttcttctggagcttcctaaaatctgattaacatctgcactgaaatataacctatcatcaaaggcaaaaaggattggaagttgtaaattcctaaaatcaatgccatcaagattaccctagaaattgttgctatgaccaaatggatttcatactcagccatgagcttgggtgacctggacagccaatgtttatcaggaaaaggctccaggtggcaaagaagcctccctcctcagctgtggttgtggggagaggcccccca

SEQ ID NO: 30030 - DNA, 1914 bp, Mus musculus
ctgcagggtgccggcggcgccgagccccgcggcccccgggcggagaaggccgacgagaaggcgcaggagatggcgaagatggccgagatgctggtgcagctcgtgcggcggatagagaagagcgagtcttcgtgaggagccggccgcggtaagggcgggagcctggcggggcgtgggcgacggtgggggaggaggctggcttgtcgcctcgggagtaaactaggccccccctggggaaggagtaatagcaaatcgtcggcggggagaccgtggaagtttccagatggtgctggagagcatggggccctaagtgagacagcgtccagaagggggccgggtatttgctttgctgtccggacagcgtgattaacctctcggtgatgaatctctcccgcccgtgccttaggtttccagccaatggattctggttgagtgatggcgattggctgacatgacaccctggagaagctgaaaccagagagccttttgttttcctttttttttttttttatctccttcttatttttttttcttttcccctctgtcttccctctgtttctcactgacactacgtttctgctatggtctgcggttgacgacctcgatatgagtttttgattattcggtggttccttttttttgtttgtttgggggaaataactttgatttggaaaatgcgctcacatacgggaattagggcctagattgtaagccctgtggcagttgaataacgttcattcctggcctttggttgttgttcctaaattttgaggtgctttgctctttcttgggtgacctgatagctccctgaactttgaatctctgtgacacttgagactcagagttgaagctcaccgcctctgaaagttctgaaggagctgtgttaattctcgaagactccatgcagcaatggcagaagagaccagacttcatccgggacagtggatgggccttacatggctaggactgatgacctgggagaagggtcggaggatagtattgtttctattgggggactttaatttctgtgtgagaccaaaggaggagagatgtattttgtgcaaaatttaaattttatgtgctacactatctattgtaacctgcctggtgagtttgttgggacagcctaactcatttctaaaagaaatggaacctcggatgggagaagaggtcttgttagtctgtacaagttggtatccccatatattcgaggagatcctggccataaaatgaaagatccttgcaataccctgtgtggcctaggaaggaaaacctgcaatggacccaaaacttaaaagaagaggcgtcttaaaggttcatatgtagtcgaactataaatgtatgagtggcagacctgataagcgtttgaggtcaaaacccttaccatgttgaaaacaaaatcttacatgttaataaaagtattcgtttgcttgaaaagatcagcccggagagttactaagaaatattaagtgaagtcttccttcagtggcctgtgtttagtttaaatgaacattctccagttttgggagtctgggtaagcagaaggggatttcgactgctgtaggaaacgtgagaataggaaagtcttgattcctagtagcaagtccacagtcttagcctctgagaccagtccttttacttgccttttacttgactcctgttctttaccagtcttgatgatacaacagcaacaatgtattgactcccttcagacaagaagggctgggtccccaactgctgggattgaccctgtgtggccatcatctcattcctaggtggccaaagtctagggccctcccttttaaggacaccccaccctagacatcttagaattcttgtgtctgctgagggaactgcagcccagcctaacttctgactgctctgcatgttcctatccgggagtgaccattgaac

SEQ ID NO: 30031 - DNA, 1119 bp, Mus musculus
ttagatcccatgtccctagcaactcatgcctcctctattatcacatcccattttatggggatcaaagagattaaacatctgccccagctcaccatccaagaccccagatttgattctgaacctaccaaccctgaccctttcgtcgctgtgtctgtaaaaagccagtttcgcttccttaaaatgaactaaaaaatttcaagtcaagccaccctgaggctagaggtctgcgtcggagagcgtgttatcctggaaggtttccctctgtgtagacaacagcggtctccaagtctggaggtagtggccttgagctgcaagaccaccatatagggacgaaagctgcaatacacactctagccgacaaggggcgccgtaccacacaaagctcgtgccctgcccgtggctggcagcgctcgcgcattcctgccgacaggcggcgccgcgggtcccggacccggaagtggaccgctctacccaggacccgctgccctggcagcgtcccactgcccagcaatggggccgctgcgctggctgccgctactcggccagctgttgctgttgtggccgcgggcagctcagcccgccggcccgatccgggccttcgtggtgccccacagtcacatggacgtgggctgggtcttcacggtccaggtaagttggagcgttcctgagctccttgcacagtaactgcctcctgcggagtgcacccgacccagccgggaagagaggcgacctgggctgcagcaccccaccccaccccccagcctgatcccctgcagtctgagcctcagcctcgggctggccacttcctgcctcggagtcctgatggcatctatcttattagacggtccctgcaaaagttaaggcagaggagtgtgtccccaaagtgtggattgacaggtagccagtctcaggaataagcctggagtaccttgggtggggtaggtttccaagcaggtggatgtcagctgactacaggcaactgggctggccctctgtggtgctgacatgagggctagccagttcagcttcctcttcacactcctacccagccagataagcttggtatggggcctgtaacctcgaggttctttctgttcaagaccttggacagagcgggca

SEQ ID NO: 30032 - DNA, 1099 bp, Mus musculus
cttatgtgtactgatatggagaaggatgtgaggcccatgcctgcaactggctgggactctcttaagtggtttcatgatccatattttaaactgccaacctgctgaaggcactcggtatggccttgttaggatcacagtgtcacctccatgggtccatgccaaatggtgagaagtctggctcaaccccaactggttcagacttgctcagtagctaaagggaaggccacacttggtgaccacatggaagatggagggagagtggtatggatgacttccctttgaggtgtggcaggtgctgtgtggggtgacacataggacagcccggcagagcccagcacagagggaatgagccatcttttcccccagggtgagagcggcaaaaggactagcccatactcacctgtgtatgctcctgttgctgctgagcggccttcaccccagcactcgtcagtgggtggggaaccagcactctctgggagcagagggtgggctgtcatctagaatgtggtaatgccatacttgacaccagttccatagaagccccagacccagtggctgagtgtcgtacctgcctgtatgataaatcattctgacagcaactcaagggagacagggtttatttggggggctcagttcaaagtacagcccaccacggtggggaaatcagggctacaggagcttgacgtagctggttacctcgtgtccgcagtcggaaaaaggaaggtaaatgatggcgcctcattcggtccttttaagccaatgtctgtgcctcattcagtccacaaccccgcccatggaatgatccaaccccaggtcttccgatcttcagttagcccaactgagaagatctctcctaggattattcagagaccaggacaccaggtgattctagactctgtgttaatggcagttaatcatcacagatgtggccagcccggtggtgggcagcattatgggggaccagacccttccacctgtcagctttctcctcccaaatgttctttgagatgctgtgtggatgtagctcactggcctcccagacactttggctcacaagtggtacctttcactgcccccgtggtacctttcactgcccccg

SEQ ID NO: 30033 - DNA, 1201 bp, Mus musculus
gaagcagttgtgtggcagggcagaagggaggtggtggtggcggatttgcaggcaggagagtggcagcacagttagtgagactcagtggtcaggatcacctggtatattcagtgttgtggagccattgctagttggtcttggaggttctaggcaggcatggtggatcctagagggctgggatggatgcttcttgcaagaggccagaaagtcacagtgaggtggtcagagctggtggtggaaaggatgtggaatgccgatctgtgctagtcagtgggaaccctggatgtgggggagaagaaaggctgaactgcctggcctgattcttgtcaaacaggaggcccggggctgggaagttggatgctgcagaggagggtggtgtagttgttacttttggctgtgactaagtatctgagaaaagcaacttaagcaagggtttatttgggcttacagttagaggttgtagagaggcggctggtcaagtggtgtgtaaggtctggaagtggagagagaagaatgctggaactcagctcaatttctcctctcgctttagtgtgggatgggaccacccacattcagggcggagttgtgtcccccccccccccccccagtctgctagacctctgtggaatacacagccacatgcaagaatgcttccctggtgatttggaatcctatcagtttgaccagatttaactgtcactgatggagacagcctctcccctgcctttgaagccctcttatccagcttttgctgtcttagattaattgctgctgagcattgtgggctatgctgagcatcatgggaaggtctgttggcctgcatcccaggctatcttgatgttgccactctaggaatttcgagtctttttaaaagtgttgggtgttctttatgagggcttgaataaaattgaacatcatgttgcctgccaagctaaacttcactggccacaagatcttgttctgggtatatttctgggtaggcctttttaacaactactgtaggagttacctagagaacctagctgcgcacctctcaaggtttctctgcttgatcaaaaaaggatcaactcttagttctgctacgtgggccctgtggttcatgctcactttgtcttctgaggtggggctggggctgtgcccttggtgaattagggtgtaactaacttgcccatacacagaggagctaatttgtctttgtagc

SEQ ID NO: 30034 - DNA, 1171 bp, Mus musculus
ccatgcgcctagtaacttccaccacttgctggccttattgttacccactcctagaaaatggcttacctccacccaggcaggcacagaggagctgcatagcacttgcccagccccaggtcctgcctgggtggtgagcaagaaacacagcaagaaacaacagtccattagagagggcctctaaggggtagatcagcacagtgattgttaagatgctaggggcccaggctggcacagaggaaacattcttgaggacttgaagcaccgaggaggctctctgagaggagagggcagaaggatgggtggtgaactggcccaggtcaagggacagaagggagaggacacacagttggaaagacagtggctggttttacagagtaaggatgaaagcctgtgttaacatctgatccttgggctggcgagatagctcagcaggtaagagcactgactgctcttctgaaggtcatgagttcaaatcccagcaaccacatggtggctcacaatcactggtaatgagatctgatgccctcttctgtcaactacagtgtacttatgtataataaataaataaatctttgggagtgagcaagcggagttgactggagtgagcagagaggccctaaaaatttagttcccaacaaccacatgaaagctcacaaccatctgtatagctacagtgtactcacatatgtaaaataaataaataaatcttttttaaaaatttgatctgggggctggagagatggctcagtggttaagagcatggactgctcttccagaagtcctgagttcaaatcccagcaaccacatggtggctcacaaccatctgtaatgggatctgatgccctcttctggtgtgtctgaagacagcaacagtgtactcacatacataaaataaaatggactatttgtttaaaaaaacaaaacaaaacatttgatccttaaaagtcttccaaacaattcgttggggaggggcagaggtgcataggaatgttttgatagaacccctagagtgtatcagagcagccccagattctttgggcaacccaacaaatacacatcagggcctctgcagagggctacccatgggggtccccttggggtcagcagactcagctgcaggtcataccttaggacagataatgacttgaccctgcctggaagtgggccatca

SEQ ID NO: 30035 - DNA, 1225 bp, Mus musculus
gtcaagcatggatcttcaacgtgtgtgtgtgtgtgtgtgtgtgtgtgtgtgtgtgtgtgagagagagagagagagagagagagagagagttctgggcacttcagttcacacgacgtgggttgggtttacctcctgagccccttatacaggttgggacactttgaaaacctcacagttaagcagccatgtccaggattcttcatgagcagggcaggtgagggacgtttaccagctatggctgctcatttcataccctgctttgaatgttgcagtctcccattgagatttgtgtcctgtgcccctccccatcccctgcccttgtgctgctgaccgcctcttctctgcaggtgcctgtgctgaagcccatggacctgatggtggaggtgagcccaagaaggacctttgccaatggccacacctaccacatcaactccatctccgtcaacagcgactgtgagacgtacatgtcagcggacgacctacgcatcaacctctggcatctggccatcactgatcggagcttcagtatccttggccttgacctgggggcgaggggaagtggcttcagggtgttatgtaagcacactggcttgggggggggggtgtttgtcctcgactgctcccttactgaagaacctgtctcatctccggtgtaaaagaggatgagtgtgtgatcgcaaattgtctatttatgatcaccctaaagacacagtggcagtgatctccatcaccttgaactctctaagaaaccaggaaggagcaagagagctagcaacaatgcgccctggaggaaaaaggaaggctgaccaacccccaggacagtgacctggaggttacatccctgtgtgttggtccagtgttgtgtcactcaagatgtaaagtgacaactgcagtgtcagaagctagggtttcagaagccaggcagaaatggggtcttggtgtcagaataagtcaaggactgggcactgcctctcctccagcctgcttaggaaggagctacttccaggacattgagcatagtgagctggggaaggtcagggccgacccagggtgggcaggctgctactgtgtcactgtacagctgtactgagtgaagtttcatgtgttgggctctcagtgaggtaggcactgtcactgaaagaaactagtggggaaacccccactcaactcctgattcggcgtgcacccaggaatcaggaacagaacagaacaccttgaagtagtt

SEQ ID NO: 30036 - DNA, 2977 bp, Mus musculus
tcaccaagaagatcctgcacacggcctggcacccagctgagaatatcattgccattgcagccaccaacaacctgtacatcttccaggataaggtcaactctgacatgcactagctggcctcagtggccctcccggccacctctgtaagaggacaggatgagtgtggtggccatttgtggggacatgagtcccaaggctggagttggcttggatggtaattgccagtttaaacaaaggaaagggggaagccccagttacaggcggataaagcagatgtgcccggtccagggctcctttgtttacggccctcctgtctctggctgggcctttcattattatcaggactttattcatgtccagggtgggtcagttcctatcagggaaagtcaagctggtccatgatggggctccagagaaagttcatagggcagtcaggatctgcagatcctcaagggagccagccagccatgtgcgctggctcagagctgctgcttcatgttggattttggacagaattctcactgagtgctggttgtggcagcttgtcacttgggtgtttggaatgtctttcggtattctaggtgccaggcctgggcaggttctgagaagcagagccaaagtcgtagggttaatcgtgaggcagggccgggtccctcgggtgggtttttccaggctaaggcaagtcctgagaagcaggactggggaccctgtgtggctgtggccctcacctcactgccgtccgtttgtgagcccactgcacgctggacatggtgctcagcccatggtggctgtggctggatccccgcagcccactttgtgatggctttgctgtcacccttccatgctagccagtcatcttccccatggccgacagccggtcctgtccctgactgtagaatcctcatgcccacgagacaggtgtccgctcatttccataactcccagctgagatccaggctctgctggagctggggttagtaaccgtcccctctgaatacaggagggaaccaaggctctgagcagagaagtggggtgcctagggagtcataccccgagggctgagctggtgtcccatttccaacccgccacacacgggtgactggttttcaagcagcattccaagggaaggttttagaagggaaacatttccacgccaggcattcagtgcaggcgagctggtgacaagatgtcacaagagagagaagatggagaagagtggcatccttgcttgcctctcaagatgcacgtcaccgacactgtacctgcagctttctcctcacccttccggctgctccccaaggaggttgcatgcagccaggcagccccagaggacgttttctcagacctcctcagggccacaggtgagtggccattcatttcatagtgacccctactccatcctcattcctgaaatcccagaactgcagggcttggcgttttgaccctggaagcagagagcagaggggctttggtttttacaacatggactgccacccaggaaacagatgtgatggagttttttttctctctctctctctctcagtggatcaaggtatccttgtgtgtgtcaaagcacaaaccgcatgcacactcacttctggccatgtatttacacagaaactgggtccattacattttttggctttttttttcctaagtcaacgtgaatgaagaatgtttatcactgtaaaattcaggcgctctggacagtattatatgtacatattgaccctgattcaagctagcaattaaaagatcggcgactttcccctcttgtaaagaagttgaagaatgtggccagtcgtatttaatcccattgaagccaaaatcctggtgagagggccttacacactggcctggatctctggcacacccatctgcctttgcggtttggcgttagagaagattcgccttggaggctggaggctgctatgaggtcataggtttcacacataatgtcttcaaagtcaaatcttacacggtcttcaaaaggaggggtcttgcacatggccctagtttccagacttctgtttgaaatgtcgggtatcaaagtagaaaggaaaaagagagacagaaaaagatctcagaagaaaaaaaaataagtctttgggacccgaagaaatcacccaggttcagagcggactgctaataataatgtgtgtattgatcgaggaaaaagtgcggaggggggaggggcggtgtgaaaaatggcagaaggaccagagccttgcaagccacagactttgccactttactctgcttaagttctctggtcttgagtacgtggcatttcccataatcattacgacattgttggggttttgagtttgttttcttctgctttgattcttctctgagggtgacgcccttggagggtgttgggtatctacgtgctggtaacatagtcaggcccagtcacttggggttctgtggctcataggtgcattcttttttttcttcggtgtctcacaaattatccaactgttgaataaaattataaatatgttaataccagctttttccaataaaataacaaatgttacatctaagatgaggctcgcaaggctgctgattagtgaattgaccagggtggggagcagcctcggggagccagtggggtgggcagggcagggagcagctcccatcaagattgggctgtgtctggctgtgtcttcgactccaaccctaacccagatgaaggaggaaatagagtcagtggggacaccaagcttggcatctgcctggaggagggggtccccagatggtacctgcagagcccactgcctggcacttgtttcatgatgggtggcctgtctccctttgcagcaggtgtgtttaactcaccacaaacccaggtaaggacactaaggctcacacacaagcatccacagagtatcctagtttaatgcgctatctgggggcagcctccactctagtgccccctggtgggctcaccctgcagaggctgcaagttctt

SEQ ID NO: 30037 - DNA, 1234 bp, Mus musculus
gtgcacggtgccctcaagtttgccttcgacttcttcttcttcccattcctgtctgccgcctgaggagcgtccgccgctggaggaggctttggtgcatgttgctgtgaagtccttccgtgtggccacccagccagctggagcagcactgtgccgtgtgtgtgtgtgtgtgtgtgtgtgtgtgtgtgtgtatgtgtattctgctctcgtgtggttagatcccaggctctctgctcacctgtagatcgcagatcctgctggagggtggttctctttagcactgtccactttgaatgccgagtgtcataagaaattgcatgctatcttcactcacaatcctgcccttccctcacagagctggaactccaagcctggccccaaagaccctccatcacgaagagcactttacagataagaatcttcctccccagttcttcatgcctccttcctgccctttccttactttgtgttggatttgttttccaaatatgtgtgtatgtagacttcatggtagtgtttcttatttatttggttgctgctaagccttgacagtggttcaccttcctgggctgtccccagtggtcacgtcctgcctggcttcctacttgggtatagcatgtccaaactgggctctgaacactacagcctgccttggagctggcctatctctgggggtgttagagagtttgtggggatctcttctgagtaccccaggacttgggaaataatgcaagagtatccctttcagtacataggtaagcttggctatgttcaatatggcagagccaaaagccaagttctaaggcagccgaaataaaaagctttgaaacctatagccttgccttctggtttgattacagggagccttgtctggttgtgtgtgtgtgtgtgtgtatgtgtgtgtgtgtgtgtgtgtgtgtgtgtgtgtgtgtgtgtgtgttcacacgcgcgctcgagcaacatagtatgtatgaacccagattcagtgaaaatgtgccagttgggtgactgaggatagaactgatatcccgcacagttgacaccatctgctatatagctgattggcaccatccaggtgtgagggtccccgaggtcgcagcagtaacagcacatggctgttgaccctggccttggggtgaaaagtgctttctttgtgtcgaggatcactgaaacccaggtcaccaattgggtcgtctgcatgagtcacagtctggggtttgtgctgctctcttcagtc

SEQ ID NO: 30038 - DNA, 1221 bp, Mus musculus
gatgcaataggcttgtgcaagtccctagtcaccttagcagaaggtgggtgtcttagttactgccattgctatgagggacaccataagtaaagcaacttataacagaaagcatctaattgggggcttgcttacagtttcagagtgttggtccatttctactacgatgtcaggcaggcatggcgctggagcagaacagaagctgagagcacccatctagatctgcaagttgcaggtttagaaagagaacacgactgggcctggtgtgtgctttcaaaaccttaaattccacctccagtgctccgcctcttaaccctgcctaaacagtccacaaactgggaaccaaaccttcaaatatgggagcctctgagggaacattctcatttaaaccagcacagtgggaatctcaggatggaggtgtagggcttaggggaaggcaggtctctagggactgtggagtatggggaacactggagtggaggggggttgctcctggaggacggatctgttaggatgaggcccaggagtgggaaagtctagggtgtggctttgtacagaaccagggaactagaggcagtcatgttagatgccaaggggctcctgtcccagttggtttccgctctctgtcccccactaggtggtgaagtaccctttacacgccatcatggagatcaaagagtacctgattgacgtagcctccaaggccggcatgcactggctctccaccattgtacccacccatcacatcaacgccctcatcttcttcttcatcatcagcaacctaaccatcgacttcttcgccttcttcatccccctggtggtcttctatctgtcctttgtgtccatggtcatctgcacgctcaaggtgttccaggacagcaaggcctgggagaacttccgtactctcaccgacctgctgctgcgcttcgagcccaacctagacgtggagcaggccgaagtgaacttcggctggaaccacctggagccctacatccacttcctactgtcagtcgtctttgtcatcttctccttcccgctggccagcaaggactgcatcccctgctcggagctggccgtcatctccaccttcttcacggtgaccagctacatgagcctgagcagctctgctgagccctataccaggcgtgccctggtcaccgaggtggctgccggcttgctgtcccttctgcccaccgtgcctgtggactggcgcttcctgaaagt

SEQ ID NO: 30039 - DNA, 1187 bp, Mus musculus
cctcatctcttccaggttctggtggcagctacctgttcttgaagctccttggagtgtggctgactccatcgaatctctgccttcacccctacatctccccatatctctgccctgccttgtcttaaagacaccagtccttgtatttggtgcccatcctaacctgtgggtgtcattttcatgtctatcattgtatctgcacagatccgatagccaaggaaagccatgctctgactcagcaggctagcatagcatttgggggacactgttcacctgtgagaggtgccgagggtgacagtgataatggctgtagtagtagtggcttctgtctctgacttttgaatcttccaaactttgtagagcagtggagcccacagagcttcaaaagacagaggtaggttgctgcccaactgtgatttccactgccttgcacatccttggctctgccttccagaaccaggcttgcagtgtgaggaggaggagagggctgggaggagccaccagtgttctgccaatcagggcacacttgcctctctctctgagattgggtttgtgggtcatggatggaccaggtctattccacaggattctgctggtggtcacaggctgatgacctgctagtaagaacccaggttctatctgtggtcaagaggaaactccccaacgattggacccgaaagctttaaagccttcttggtctcctggggctggggctgtgagctcactaagtgctcttagttccagagcgagccttaggatgccaaacctgaggtgttaccaggaccatgtggtttgaaggctctggaggagggtcctttccatcttccctagttcttgggttgcccatagttctttgttccatggctgtgtgacagctgtctttgttaaaaaaaaaaaaacaacaaaacaaatcaatcaaacaaacaaacaaaaacaaccaccaacaacaacacatccagagatcctagagaaggtgtagattctgggtgacactctaaccaggaccgtgtcctcacagaaatacttccctaatggttggtttcccatgagtatgttgaaggatggtctggggttcctctgcaaacctctttcagtgtggttccctgctctatctggcctgccaggctaagctctgtcccctgtttggtgtgctgtcccagggaaggctggatttgactggactggagaaa

SEQ ID NO: 30040 - DNA, 1529 bp, Mus musculus
agatactgcagaaaggaagcaatctgtagctccagctgagatgggtctgcacgcacctcacttcctcttgggaccgggggacagaagaaaaggccagtcttgagagaggggatgccacctgccttagagagcgagacaatagcatcaagtgcctgggatcattggagatggtggggacatgccttgagaatgtaacatctccactgtcacctctttttggtcctcttgccttggtctcttgctccctcagaacggccctcttacccacaccctccagtttcacacagtatcttgatgctgtctagcagtctgattggagattgaagacccctgattccagcatgcatgaagttctgcccatctgggtcttagcatcactggtattttcctggcctgaggccactggttcacctccactgctccacagtcatctcctgtccctggttctggctgtcagggtcccaaccaggaccaacttttggccttggtatttctatctgttggctctgatagaaggatgtgtgagtcccaaggccaatgttcttggcatagccatggagttcccctggctatgttctgaaccactcagaacatggggaccacacttgcctgtcacataccacaagaggtcctctgtgggcagggagggcatagaaggatgctgttcctaccatcaggcttcactgaggagaggaaactttcatctgaggagatgcccacaggtcacctgccccttctgagggatgataagggcttccgtaagctttcaaaccagccgtacttccataggccagagatcattcccactcaggctatctcttccaggagcagcatcaaggattccccgtcatcactgtcaacatttgggtatgatcactcattgttcaggtgtgaacgttgctgatggcaaggatggagtctatcatgtcagaggcagacccatttggagatgggaggttgtaggtggcacacactgtttcacttgagatgagagctgtcactcagtgaaaacacaccttcaggttagctgttcttaggaaacacctctcgaggaacaccatcgtgtctaggagtgacgtttgaggcttttgagagctcctgactaaggacttggctggggcagcaaccaactttccttcttcctcccctacttccatcccccagcctcctgtgccttaacctcctgcacgtgagccaaccctggctcagcctgaataaagagttctactccaggagttgttcttgcctgtttcgggcatgtgggaacccaggctgtcctgtgcattgaaggacaatgggagcaaccctgggctctacccagtagatgccaactgtacccaaccattcatctcagtgacaggtcaatgtgtgcctactctggcaagcccagaacagcacagcccactggtttctgtcacttaggagtcctctcagaaatcttctggacttcctgggaattttaggaaaatgacaactggctaattagaaagcagctgtgtgtgtgtgtgtgtgtgtgtgtgtgtgtgtgt

SEQ ID NO: 30041 - DNA, 1240 bp, Mus musculus
accaattgactaatccatccatgcattactatacctatctacttactcacctcccacttttctgtctgtacacccaaccacacatattcctttctgtctacatccatccatctatctgcccttcctgcctcccacctgtctgctcatctacacttttactaattcactcatctatccacacacttttatacccctatctattcacctatgctatttcactcggatttatgggtaacttactgcctctttcctttaggctagaaactacagatactgagttgaattcaacctcttaccttcaagaagctcatgttctcttgaatcgacctcatatttgaaaacctgtgacacaagtcagccatgttgtgctacattcccattcgtggtgccatagtggtcatgaagagggtagaaaggcttcattggcaaaggacatgtccagttcatgatgggttgtgacatcagagtacatgtgtccgcttggggactaccttttgctaaatcacagctccgtcttgaacaggtctggagccaggcaagcctagacagttgtgcgacttcctgtgcaggcctgaacaaatgtctactcccgtcaaacagggtaccaatgatagataccccctccagaaaaatctaccagtcgagtttgttgaagttattatgggagtatgggagcatcagaagcatctacatcaccattaaaaactcacagcagtatgactgatgactcccaatagcatcccttgggctccatgctcaacttgcaggcaattccatggaagagccccctctcccaaacaattgttactgcttatgtaactttggggaggagccttgtgagtttcatttactctctgagcttagctgcttttgtttacttcttgagtcttacgagcctctctcctccctctaggagggagtgttcatttggaagacattgttacacagttatcttgattctccacatggtgcccttatatcctaagtcctctgagcacctcctcagagtgggaagagaaaagtagtcagggcaccggttgccaacctgagagatgtggtctgccaggcacagccaagcaagtctaaattgtcttcccagtgaaagatggttgtctagaccatgtgacctatgcccgcacacatctgaacacctgtgtcctctacaggccccgcagcctagagagagtgtctgactgctgcctccagactccacctgccatgcaaacacaggctatctcct

SEQ ID NO: 30042 - DNA, 1190 bp, Mus musculus
aacaagttcagtgtggctgagctatgaaagggggctctggcctaaaagctgaggactgacagccatctttagtcataccccttctgtgtgttcatcctccagagccctgtggaccaacacaggatagacctgacccaaggctacagctctgcttggcctgtccacatctgtcctggtggtgtgttctgtttagcccattccttagacctccttaggacctttgtgtctcccagcctaggttcagcctctgcttctagggagccaaacacaagatgaagcccttgcatccctgcttcctctgcctgcaacatgttttgtagtctagtcaagtgtcagctctatgtggcctctgcagaaatccacttcttatgcagcacctgtcacaaaactgtgtgtctctctaccaccatggcctagggttgaaatttgccgttctagccatgcacacacatcccttttggcttggaaagaagccagcatctcctctgacctgtctcttcccacagtccaaggcaagaaagctgcgttccaagggcagaggcaaggccgatcttctgaagaagaacctggaggataagatccgactattcgaggagcgggcccctgtagaactggctgaccaggtagggctgggctcgcttacccctcctccacacctttctcatcctaacacccagcacactgtccatcctcttctcaaatatgctgtgcaggcatgctggcattccacagccaggaccatgtgcaggagcattcacagggtaccctatcgctgtacccacagggcacacaggttggagtgatggatggattctgcatacttagctaaggccacagactgattggggccattgaggcagtggaagaaatgtacgtttccagcaccagtgcccccagtctgtagttctctaggagaaggaggacccaccagagtgaggtcagatgctttcaagagagttgtggctagagaagggagactctgtggaagaaaatgggtagccctggcttgactaaaggctactactgcactggtacagaggcagcccaggggatgtgggacccctcagaaaggatgctctatgggtgtgctgagccatgaggggtgtgtgtgtgtgtgtgtgtgtgtgtgtgtgtgtgtgtgtgttgggggtgtgctgagacaggaacttggtggagcttgtcagatagta

SEQ ID NO: 30043 - DNA, 1109 bp, Mus musculus
ggttttgtgaaagaagcccctgagagccaccactgaagacccacagcaggtcccttctataccccattctactgctgcccagtgaacacagagcctggagccagagcctcgttatcgggaaagaaatgaagacaataaatgtaaagcattcaggaatagtgtccaagctcctttgtgtgttgggactgtcgataaagggcgtgtagctttacatgagcgtgcggtaatgctgtcatctactttaagggtagaatttgcttttaaacgttatggcttgaaaacgatgccccgctggatgtagtgtttaagagaggagtctttaagtcaggggaaaaaaataccatcaggataaagatggtcctggttacactagcattgccaagctcgagctcagatctggagatgtcacaaaaggaacaaagaggaatcagcacacacccagtgaggcaagtggagctgaaacccccgcacaaggaaagcataaggaccagctagctccctaagatcactcctgaccccccataccaacaagcaacgctctcacaagactcccccaaatcaagagggggacttccactgaggagtcttgccgagacaaaggtgtcatctaaggcgggggaggggggtctccagcatcaccaaacccataatcacgagggtacattgtgctctccctgccttcctcctcctggctgagcccgcctccacctctccacgcgcacaaggcgtttcttttgtttcagttgcagccgaagatttaggggtgcacactcagcagcgcgggaatgtcgcggggggctcataccttatctgggggtgggaactgcagctggttgacatcgaggggcgtcatcaaaggaatggtgtcgaagccatcctccagcagtggctgcttggtgcccttctctgcgaaattattccccaacttcaccatggttgcgaaagacacgaggctgcggcctgcggagggagggccgcgcgggggtcagggcgagccgtggcccgaccgggcggggcacagccagaaggactccgcacacccacccgctgtctccgcggtcgctgtccccgccttatctccccagagaggtagcagggacgcggcgatc

SEQ ID NO: 30044 - DNA, 1241 bp, Mus musculus
ctcagaagggaaagctgtggtggtagctgcagtttaaagagttggggctgggtcagcacacacatccccagtgcattagaaggcgctgctattgtgagtgggagatctcacagcacgttctcttttctccactcatactgggtcttgacgttcctagtggtccacagtgagcttgcctgcagccgcactgtttgctgggctcggttcaagccaaatatttgctctctttgtgcctataggcaggttattaggcaagagaagaccaaaccattgttgttgtccactttgacgacatcctttgagctgacttttgggcatatggagttagctcatatttattgtgccttgccgtagcaagtactttgttggcacttggagacgtcccctccacagaaggtgcccagcatcataatctggctctgagcagttgctgtttcctctaaaataggactagcgtatccctctgttcacggtcacgttcaggggtgggactcttcaggggaaccagccaacactgctctcctactcagagcagtagctccatagtggtgcactgtgagattctgctcagacaggacatggctttgggctggtccatcatagtgcaggggctgatgaggcggggattaggaaggaagtcccacggagcatggaagcagtgagtgccattttgttacacacccttcccggctcttccagggtccagtgagggtgtcagttccctcttctggtgcacccacccccactatctagtttactcattcactcttacttctccatcacttcctgcatcttcttgtgggtggccccttcttccctggatgatgactttgggacagtctcttgtctgtcacaatactaacaggagcccccagccgagtgtacatctgtcagtctgtctgttgcatggggttacctaggagctagtagcccaccctcctacttctgggaatgactggagcgaatggtggtgttcacagtggattgtgatgtccttcctgatcttccagagtacactggactactaagttcctaagggctttttctttggagaatttgaaagtctgaaaaagtctcccagtaggaatctctgatcctatttcctaaggatgtagaagggttagcctgtctgtcctagccacagctttactaacgagccagatgactctgtagcagtcagccagcatcatctgggactgtggtgatgatatgctcagctgttcatagcgttacattctcta

SEQ ID NO: 30045 - DNA, 1147 bp, Mus musculus
taactgtccagtgcccagttccttcaccgagttggttatggttctttatgttgtgctgcagatggaattctcctaatgttcacgtctgaattggtttttttgttgtttggttggttggttggtttttgtttttgttttttggtgtataaaaaagcagcttgttctttaagaggtgagtgtgtgtcctgcagctctgctgaatgcgttgttaattctaactggctgtgtcctgtagcactttctacatgcaagaccacattccctcaaatactgcctgtacacgtgtgacctgattttgttctttctgttaggggggctttggcttctttttcttgcttaaccactttggccaggactccagtgctgtgctgaataggagaatgtttgtcactatgcatagatgtaaatatagagtcttagtttaaaatgtgagagccctttggccatgccaaggacttgagtttggcttcatgtaattatgtcacgtgtttattttcttctatcttaaatagaaaattaatgagttaataaagaaacccaacgtcagccccaaggtgcgagaacttttgcagcaaatcagtgcttttgataatgttcccagaaaaaaggcgaagtttcaggtatggatttaaatgactttcctaaaccatggtgtgacccatctgtggcctgcagaggaacagtggctctttgtcttgtgtccacagaactggatgaaaaacagcctgaaagtgcacagcgactccgttctagagcaggtgtgggatatcttctccgaagcatccagcagtgtgagtcaactccactttgccactgcaatatggcagagaactgggaataaggaaatggggtgccatgtgtggggatcaagatggcatttccagggaagctctgtgctctctccctgatgggcaggaatgatctgggagcgcctgtggtgcagagacagccattcaccctacatgcttggcaatggggcctgtgtttgtggaatgattggcacagcagtcaggctgaatgcaggggagtggtccaggattccatggctggctgacctgtttctggcccctgtgtgttaggtcatggtcacatcatttagcctctgagcctcagcttcccgatctgaaacacgaaggctacattgcac

SEQ ID NO: 30046 - DNA, 1265 bp, Mus musculus
atcctgttagcaagccgggtggctttctgactttggacctgagtgaagactgcattgcctacaattggctgtactggaaatgatggaaagtgatctttccatgcaccttgctctcctgctgatgtcaatgactgctgatgctttttccagaaaagttttattgcatttatttacgtgtgtgtgtgttctgtacacacacatggacacatagaggtcagagaacagcttgtatgagtctgttctttcttctagtatgtagccctagggaatgaacttgagtcttcagccttgcaaggcaagtcccttcacaactgagccatcttgccagcccttttctctttgaggctgtagctctgtgtggcatacagttgtgtgcacactgaggcagctgcttatcttcatgagcattagcagagctcacttgtgtgactggcatctgaatgtcttttattttgtaatgttggtccacatctgggcctttccccatgtacttcatccccttgacgtgtgtttctttttgtcaaggttatagctcagtaccatgcggtgatgaacgaccatcacacatcggaggaggagctcctggccatcttcaacaggaagatcagcaggaaccccacctttaaggtgctgaaggacagagtaaagcttctgaagtgaggctctgtggcttcacactctgtcatcctattggctgcttccctctactatttgtaaaatgtgtagtgaattataacaacctgaagattgctttctgaaactgtttttaagttaagggaaaaagtatatttttgttaaaactttcatgaaaaaataaaatatatccttgtcgaattctgtatctatgataacaaattcttgtactttaagaaaatactgcagggaaactttacacagtattgtaatgataaatgaaaatagatttccatttgatgaggttggggtgttgtttaggcctctggccagatgctgcctgctggagatccagtgcagatccctgaatggtggtggctgggattttacctgtggtgatccttgattaggcaggggtgacaacctgtagaggaggccttactgtgacaggatgcagatgcagccaagttgtcaggacgacagagagaagggtgactataagcacaagaaagctggtctgcgtgtctactgacaccctgtgccacctcgtactgacagttgacattttacccacaaatcccttaccttcagcaagaattatcccttggccagtgtcattattcactcatccc

SEQ ID NO: 30047 - DNA, 1228 bp, Mus musculus
ttctcccccctcccccttccctgtggctggcgatcttgggttctgactgtttggctgtttctaggtgtttgggtgccttggacttccatgagcctggtgtgtggctggcggtgagagcagcatggtgctgggagccaagcatgtcctcttttccttttgaaatacatatctgtgtgcatgagtgtttgcttgtatatatgcttgtttgtatatgtatatatagatatagatatgcatcacagaggtcagaagaagccatagcatcccttagaactaggttaaagaggttgtgagctttcatgtgagtgcagggaattgaatcccagccccctgcaagaacagccagtgcccttcaccactacaccatctctccaggcacaccactttgtttttaatgggaatccatgagcctaaggtgtttcacttggcacataaatgctgttttcttccagacttcagaacatgaccatttaaagtgaacaaagcgtccagcttgtcggctgacgtgaaggagaagctcagtgtgcactgctgtctccgcagtgagttgttccatggagaaactgtgactctctagatctgctgtcgaaatcagaataaatgatctttctctctgctgttcaaaacaagtgattgcttctcagcagtttgtgttagaactagcgagtgttaacctgtcagcttttagagacagtagtagctcatcacaggagcacagtgccaacagttttacagattctggcctgttctacttgaaggctagctgcccttgtataggtgactggacacaagcatgacagaatcgtgttgtcaccgttagtagtcactggatagctcgtatttgtcatagttttttaagaagaggaccaaacggaagtatcttatggtttcttgttactctgggttttatcattatataagttattgggtttttaacatttttcaacttatgttcttttaataatgtttaagtatatataatttttttctgtaacatcaataaaatatttttataattttcttgtgcatttggttaatgcaaatttggggcttgtttctgttttttgctgttcatatttagttaaccagaaataatgtagcctctttttaggtaggttaactctgttcttaagtggcttagtagcaactgctgtttgtgccctgtaggctcccatgatgcctgtcataaacactgtgactcagagatacctgtgcatttgtttacctg

SEQ ID NO: 30048 - DNA, 1208 bp, Mus musculus
tccagaggttttggggttacagacacatgcttcccagccaggctttccatgtggtgctggcccagcgggcactctctggttgacagtcgccccagtcctcagtattttaaaccaaccagtcttgtccttccctttccctccacaagcatggagactgtgatacaaataagaaattcccccatatctggcaaatgagtggaaatggatcacttgggtagagtgaaaaaaggaaagccagcagggggatagcctggctgggtgcaagtggagactcacagaaggactggggcgtctccctggggattgagtggtggagtgatgtgggagaggccgagggaagacacaggtaatgcttggagctcgggatgatgcatgtgggcggaaggcaatgctggtaaggggggaaatgggaaaggcagggtaaattgagatgtgcaccagttgagtggccagtgggaaatatgtgcagggctccagagtgggacaggttaggtggaagtcaaaggtggtgacagctctagagggcatatacaggaagaagagaccgactcataaagagtctgagcaaacaaagagccagaaaaggagcagatggtcagaaaaggtttgagatggaagaatgaaatcctgtgaagtctaagaagccagagaaaaaagtgggacagggaatacaccagagagagttctgagtagagatggaaatggagtcagggtgtattagtcacttgctgctgggtaacaaataaccccaaacagagcgacctgaaaccacagggatttatcttgtagcttctctacggtctgctcatgatcctagtctgactgtaggctgttggctgaaagacattcctttgggatttgtctccagctcctttgtgggttgctgggtggaaaacaggagttccttctggctgctggcctgagacctccctctgttcttgtctatgtaagctcttcatagggcagctaagctagaaggtgccggcgctagcccaggaggcagcgagatagaaaccatgcacgaagtaggagaaaggacccaggaccagagagggggcccaggtatcccagagtggtcagtaggaaggaagaaaggaagctgctgaggaggggagggcagtgtgtaggatctttgagtggcaagagcatctgctcattgttttaagttttgttgacttcctttgctggttgctctcatcagcgccctc

SEQ ID NO: 30049 - DNA, 1311 bp, Mus musculus
tgtatacatgtgcttatatatgtgtatatatgtccatgtgtgtttatatgcatgcatgtgcatgcatgcatgtgtgtgtgtatttgtgtgcacactcacacatgtctgtgtccatgaatgtacatgtcttcctaaggttcagaaaaagactcatttcagtgcagctcagatttcccagttttttttgttctcaacatcattctggcatataatacaaacaagaggaaaacagatagtttcccaaggatagtagtatttaaaaagtggtgtgcctgctgggtctcatgacctcataggatctgcacatcatcttggctattttaacattcttattcgcagatgaagaaagatggagcattgtttattatatagtttattcccccttggtgggtattggtctgttgctatgtatacaaatgctaaattctgaaccccaagatctggtagccttttagataagcacaaccttacaaacacaggcctttgttgtgtaaaccttgctctccaaattaaaactattggttctgggaaatggccccaaattcttgaagtctggtgatgctgccattgttgatatggtccctagcaagcccatgtgtgttgagagtttctctgactatcctctacttggtcattttgctgtttgtgatatgaggcagatagttgctgtgggtgtcatcaaagctgtggacaagaaggctgctggagctgacaaagtcaccaagtctgcccagaaagctcagaaggctaaatgaatattacccctaacacctgccaccccagtcttaatcagtggcagaagaacggtctcagaactgtttgtctcaattggccatttaagtttaatagcagaagactggttaatgataacagtgcattgtaaaaccttcagaaggaaagaatattttgcagaccattttgtgcgtgcgtggcagttttaagttattagttttcaaaatcagtaatttttaatggaaacaacatgaccaaaatctgccacagaattttgagatccattaaaacaagtttaatgagaaaacaaacaaacaaaactattggttaatgaaaggctagagcctgtgattgggcagaagagagagaaaggtggggcctgagaattgagtgatgcatctggaaagagaacacagggaagaaagagaaagagcctgaggtctcaactggacggatggacagacaggatggagcaacaacagcccaggcgggactgtgagtaacaagggacaaatggtttggatataggtgagaagagcacagaacctggccaatgtaggcttacagcttgtaaataaa

SEQ ID NO: 30050 - DNA, 1499 bp, Mus musculus
ctgtgaaggagtggacaatcacctactgaggacgccgctcaccccaaggaccgaatcagggactagagtttaactgcctcagagcacccttctcttaactatttctctaacgctccccttcctgcctgctctgggagtagggagggcctacgagtaccctcctctcttcagggtgtccgtgtctgtacgcgtccttctgagagctttagacagttacagtttgcacatgagaaataaagcaagcacttaaacagcatgtggagcgtacctaaaaccttacagcccaccagaccatgagagcgtggaacattccagaggcagcagcctccaaagcacagacccaagcccctgtggctcttgcagcttctcaggaggctgggtagggagcaggccagggctccccttccccatgcaggatgcatttgcactggagaggaggagccgctctacagccgccagcattctgtgtagagcaggtctgtttctcggtgtaagtcatgtcacatggctgcctccctggacccatccccagatcccatggggacatgtgaaccttgatctcattgtcagattttgtgcttgatttttaagaatggaatcatgggaatttttttctttttttttttttaatgtatcttgactgttgtctgtcttgttcctgacctggcacgctgacagtaccttgtccagataagtagagcccttgttagccagactgaggtgtcctggtcacgtgattaccatgcttcagtgtttccctgtctcttcccaactctggccccaagagcagagattaaggacaagaagatgttactgtaatttgtcatgtttttacctttttttttctttttcagtgcagaaattaaagtaagtataaagccccgtgattggcagtttctttgcgtgtgtcggaatcactggtaaatgttggctgagaacaatccctccccttgcacttgtgaaaacactttgaacgctttaagagattagactgagaaataattaaatatcttttctcttgattgtggatcactggctctatgtggcggtgcatgtgggaggatggggcggggtttggggaacccaccagccagcttctctggtggggtctttatgaacccacattgtggccatgacatggaaggacagcccaagagaaaccaagactcctagtcatgttcccatccctgcttccagaccccacatggtcttgtccacccactttcttagagcccaatttcatctgtaacagcgttgggcctgatgctgtccggatcctagctcaccctcctgccaggaactgggtctaggttgtttgagaaaacttgtgcagccaaaacaactcaaaacactgtgcttgggtacaggttttagtccccataaaaactttcctctctggttcttaatactgattctgccatacatgtgtaaaaggataacagaagtcaagaaagttagttacaccgtgggagatgcagaccacagagcaaggtcagaaa

SEQ ID NO: 30051 - DNA, 1160 bp, Mus musculus
tccactttgattttgctttactcttccagaatagttgctgcgtaatagaaattacatttttctacttgatgggtcatcttaaatctggttagagagctgtacttggcccctcccactgtgagttctagctgtgctctgcggagccgtgagctttgctttaattgggcgtgtatcagcaacagtttttaggagaagaaaagacagatttccagtatttagcttttgcttgcttttaaaatataattggttgataatagttgggtaggggatacataattggttttttggttttgttttggataaagaaggaaaaaatatatatataaaatcaagtctgtcctttgcatctaatactccaccaaacataaatggccattttaaattgtgaaggagcagattcattaaaaaacagattggcctcaatggtgccattccaggtagacttgaaagcaggctgtgtagggtctgctgtgactggttcttcacctggggactcagtgcaaagcctgagagtgtgccagcacacacttgagcataggatcatagggctgctccccgggccagatctgttctccttttgcctgttcctgagcaggccttcctggggaagagcctagtctccgtgcacatttttcctcatgaacactagcaactgcaggagtcaacaacatggaaagaaaaccacaattgtctgtgggggctttaagaacactacccctgttttcagtgataggaacaggctactcctagctcagccacagatgttcctctcttgcttacattttctaataggactgcccctccaccaagaggtgttaagactcagcgatctacaaggcacctttgcacattaggagaaagtttatctcctacatgggtagggcttcctgggcaagagcagctcaggcaaagggcactaaccagtgaccagccagtgaccttgagagtgtacatacatccttggggggacttagtgatggatgctgtgaggggagcagggggaggggtggttagatctgaaaatggtaccagtgacttcttatctctgggtgacttccggactttgccttttcacgtggcaagtcttagttcatcctctcacagttgggatactccttttaagctcgttttcattatacatacttggcttttcttgggta

SEQ ID NO: 30052 - DNA, 1150 bp, Mus musculus
atggaacagtggttaagagcgtctactgatttggcagacgagctgagttccgttcccaacacccacatggcaactcacaaacacctgtaactctagcttctggatatctgatgcccttctggcctcctgggcacctgcacttatgtgtgtatacacacagctacccctacccacagataattaaaaattaatattataaaaggcttttaatatagtggttggcagatacctattcactgcatttaagagataaggccactgggtctcatcattggaccccattttgcaaacccatgcaccttccacacattctccattgtccttctgatatatactatggtgttggcttggatgttcctaaacaattttagctgtcaaatgttttgggacctggcatatttattttagttggatgcttagaatatagttccctacaattaatctatggaaccatgactccttttcccccctcaatagacattagaaaaagttgattcctttgccattccccaaatctaaacttaaagggatgctcagggctggatggcgcagtgggtaagagcacttgctactcttgcagaggccctaggttctgttcccagcacccacatctgatggcttacaaacccagttccaggtgatccaatgccctctgctggcctctgtgggcagctgaatgcatgtggtacgcatacatgtactcaggtacacatgcacacatacaagtaaaagaaataaaatttaaatgatgcttagtagagaatagtaacacttgagtgcaattgtgaaagtgacctcataaccattattatagcaaccatggtgcgaaacaagccaaatggttacaatctgattatgttgctacatcagctaacagattttatgaatttgtttcagaacaatcggtcactgtttgtgaacatagctaaatgcagacattagcatttcccgttaggtccattactgtatttcgagtagctaagtgcccttgcttatgttttctaagggttaaagagagtggaaaccaggcttcagaacacttggtgacagtgggtcactattcttctctagtgtcattctgattgaggctgtgatagggtgccagtgacaaggtctaatctggacccaatctccccatgggaatggagtg

SEQ ID NO: 30053 - DNA, 1687 bp, Mus musculus
tgcatgaatgatttaacttgtactaaaattataaccagggtttgaatattcatgttgagttgagagtttttaataaaatttgtgataacttcagtaactattaaaattcataactgaatggcttccttaaaaaaaaggagacgacaaacaagaaaatcccaaacctatttaataaattctggccaattatttttaataccaactcctgtttcatctgtgatgtttgtttttagacattcaccagagctcagaaaacaattgctcagggccttttctgatgtcttgataataactcttttcttttatggcagagagtggtgaaggcagatattgtaaactacaaccaggagcccttgtcaagaactgttaaccctcctcggagctccatgtgtgcagtgcagtgagcacacactgtattgatagttctggctgctcttcccctgaattgggccccagctgcctaggaacgtgttttatcagtgactgtctccgtagccagctcacacttcctcctgctctgctccttcatcctttagttgcctgagggatcaggcagctccctggaccggaaggagtgcgatttggaaccacacgttttgaaatccgaatggagagtccattctctggattgagactgcctcctcactccagaagaaccatgttgcttccttctctcttcacttctttgtttcccagatataaaaaatttaaccagatatgaagctgctccaagctttgatgatcattttctatctgaacttgtgtatgtgaaagtgtacttcagagcgctgatggtgaaagcctctcaagaaggtgttcctttgctggctattgagagtacaatatacaaagctgtatctaattgaaagtgcttcaaatgaggctgtaatagaaatattttttcatttttaaaggagcctaatgtgtttatattgtagtttataactcacaagtagtgagtatttgatattgtatttttattactgtatcatggtcattgcatattttatcatatttggcttagatggctttatggattttgataaatggttcagctgatcctccacatggaatttctcctacagactgtatgagagtgcttccagatgagtcatgatctccttggatcattggggatcgatcacactggacctgttgtgcagatggttttctcagataaataaatttatttaaaatatgttttttgggattttcatttattcatcttccttttgttacagaaaaacaaagtatatttgaacacatggctagcaatcctgtgaagtcttgtgtgccgctagtttcttaagcattcctaggcattctgttggcttgtttatagttgagcctgtagcctgccatttctaggcctctatcagccccagcccatttttttccctaacccatgccactcttggttctgtgcacataaaactgtgaattcattcctatctattggctgcacacgtcccttagccaggaatcctcctttcttgtcctctcctctcccctcccataccctcttctttccctctcccttcttccacattgtctgcttcctgctctgtcttggtcataattgttctgtgttttgtgcaaaggcccagtgctcagtgcatacttgttactaaagtaggaatgacccccctacatccccacagtccacacatatgtgaagctcttctaa

SEQ ID NO: 30054 - DNA, 1177 bp, Mus musculus
aaatctgatttttctgttttaaggactgagatgatgatcaaagttctttatataccagaagccaaaactcctaaagtttcttttgcattttgttgttttgttttcatatcagctttccagatatttctatataacactgaaagtcaaatccagtaataattatgatagtaagaacaaagataaagtagttagttgtttttatgtttaattgtgtcaataatatttgggttagaggatagctacgttagtgaatgaagtttatttatttttatgagtctaaaagaatcttttgactgagagatatggggacacattggtctaaaatagggattggcaggctttcttataaagagttagatgtaaatatttcagggaagacttgaggttattatctcctttgcagtgaatcaggtctgcagttgtaatgctaaagcaaccactgataattcttaagtaaaacggcattaaatagaagcttatgaaatatccatggactggaacctttcttggagatccacatgcctataccttctgaatccttggcttaaagacatgtaccactgtgctagccatcagtacatggtggcatatgtgttctacttgcatgtgttctgtctgactcagctattgttctaccttgagtaaagattttcatgcattaatcaaaaggttccataatctcaaggattagttatcacatattggcctttgtttaatgagtattaaacacttcaaagttaccatgagtatgtgattgacattgaataataaaaatcatgtacagtgatgctaagaagatgacttagcatgtaaaaccagtggatattgttccagaggacctggcttcaattcccagcacccacagggcagctcacaactgtctatatcttctgttccagggatgtgacatactcatacagacatacatataatattggtgtacatacaaataaaataaattactaaaaagtcatgtacagttagcaaattgctaatttcacattagctatttggtgtgtgttcttagtctcttaattatatagctgtattaaacattcttaaatggagatcacaaagaataattaaaggtgtgtccaggcttagaatccaagggtagaactctttcagcagtaccatcactccctacagagagaggtcaaatcagtaagttggggag

SEQ ID NO: 30055 - DNA, 1190 bp, Mus musculus
gttttcacttaggtttgactcttaacattttcttctttgtcttttgtacattatcttgtttcttttgcaaagtctttctgcttatggttcatagttatatatatgattatatgacctaatagcatagatgtattaactttctaaagctgtatgtagctcatatttttttggttcttttttacaattgtttagagctttttcttctatggtgctggaacattaattccacagctttatacataccagactaaagctataccactgagctacatccccagcccttgttgtctcttattaaactgattatgtttaaaatagatattaggcagaagagaaatggctgggcagaaagatgcagagagccacagtccttgttttgcttatgagagtgggtagattggatttgaaaataacagatctttttctccttgtcacataaaatatatctacaggccacatatcagttttgatttttgtttgtaaataaaaattgagatggtctctcttctagtaatatatgactcactgtagcttactgttttaaatttaattgtgtttatgtatgcacaacatgtgccatggtgcacttgtagaggtctgagaacagcttcatggagtctgtttttgccttccacctttgtgtaggattatctgttgagctgtattgtctgctcagaataggtttattggtagacaaatagaagtaatttatgcattattggacagataatactaaagttgattcttctttgttttaaaattatacaatatactgtatgagttggattttgttagttttgctttactttaaattatgtaaaatgtatcatttaaattatttaaacatttattacttttacatgaaagtaaatattgtagtgaaagctacaaaatatgctatctcaggtgtctaatttactatattcataatattatgcaactatatccttaagccagtatatattttatattgttatatcagtgcttaaaatgtgaagtgtatagaacttccttcaggtttttgtttgcttgtttgcttttgattacttttttcttttttcttttctgagatatgatttttttgtttgttttttggtgtagttgggttgtcctggagctcactctttacaccaggctggccttgaactaagagatttgtctgcttcccaaggctgggattaaaggcgtgc

SEQ ID NO: 30056 - DNA, 1134 bp, Mus musculus
tgcaggcctctgtgtgcttcccccagagccctgtctgctctattcaaggttgctggtgaagaaccagacgttcaagaacttctggtattaaagaccgtggggatttccctccagggtactgggttaaaaactcccaagttgtttgaagcaactgacttttaactctcctcattaccttggcttttgctcaatacagatcaaaggcacagctctccccttctgtcaagcgcaagagagaagtcagccctcctggagctcgaacgagaggccagcagaaagtagacgaaaaccctctgaaaaaggcaaagcggtaatggtggctctagctttctgactaacaacccagtggaaagaaaatggacaagccttgccccatggcctttttctttttttaaaacaagagaaggatctgcatgtgctgtaagttcctaggtgcaagcttgttcattttatgttttaaacagctttacaaaccattgttcatggacggtattatgtacattcacttcagataaaggaagataagtttactttgtatcagaactcagcaaagtagttgtatattttaacagcagaaattggggtttccaatgtgacacatcaagaatggaatccttccagcccatcagacaccaggctgcccatggggatctgtgtatagtatataaacatgtaaaaacaggctgtattttactcaatgtatgatgctaatcaatgaacactttatttattttacagagaaatcttatctgtgaactttactatatatctgtttattttattttattaattttttttaataaaaagagggttttaaatgctatgcagtcattaatagaagagttctaggactccgagtgccctgtaactattagcatatggcctggcaggagacagaaattcacgcatgcatccgagtaaagtaggttagctaaagaacggactctgctgcttccgtccaaggccgcgactgttttgtctttcgattacccttgcccctgtggctctacctgccagccccattaacgtaagttacctggcccaggtaaagccacatctttcactgcaggcagcaagctctgtgggttcattgttttcatctgtgttcaccccaagcctcagccaccatctcca

SEQ ID NO: 30057 - DNA, 1301 bp, Mus musculus
ggacagcttagcaggtagtaaaagtcagggcaatggcttgatgatttctactagtacaaatgcttgcacccctcagataagtgcagtcatagatgtgagaggagggcatttgagcactctgagcactgaagaaattagggacggcgtcagagtacacagggaaggattcgaggctcctatgcccagtgcagtttcaggtgagaatagccagctcactgctagcagaagtgaagaaaaggatgagtgtgctatgatttccacaagcataggggaagaattcgaacttcctatttctagcgctgttacagtcacatgtgctgaaaggcagcaaccagttgcagcagttgaggaaagcactacaggtccagccttggtaagcaccgaggactttgaggtacctatgcccagtgctcccactgaagctgaaagccctcttgcctccaccagcaaagaagagaaggatgaatgtgctctcatttcgaccagcatagctgaagagtgtgaagcttctgtctttggtgtaagtagaaatgcaccatctgttacagatgggaatgcagtcatctcaacaagttcagtggaagactgtgaaggctctgtgtccagtgctgtccctcaggagtccgtctgtccctcagtcataccagtagaggaaacaggtgacactgccatgatttccacaagcacttctgaaggacgcgaagctgtcatggttggtactatccctacagatgatgaccaggccaccactgtgagaggggaagatttgagtgatgctgccattatttccaccagcacagcagagtgtgtgttgacgtgcactagcctaagcaggcatgaagagaatcagcaagccacgcacaacccagaaggaaatggtggacatttagctacaaagcaaagtaagtgtgaattacccatgcccagcctcgtggctgagcgtaattgtaagtgccctgggccattcaggatgggcaaaggagtaggtcctttaatggcagtaggcaccaggggggagcatgacaggctgccagtctgtgagccctcagtgggacaaggccagccaggcactgctttgtgcttaggagaggaagaaagtcatggcatggactgccctggtcaagacctcaatgcaaaagaaagaaatacattgctgagctctgttcagagggagagcaaaagtgcagaggcagaggcagcaggggacagtagcacagccaggagaacagtgagaaaggactcagagaggaatgccaactcactgtctgagacaaactgtctgagagaaccagaacagaagc

SEQ ID NO: 30058 - DNA, 1824 bp, Mus musculus
ccaggaagtaagtgtagactctgaagtgagtcggaaagcactctctagggccccatcagaaaacgagaaggggcagaagaatttgaaaggcatgtccaaaactaccgaggaatgtggcactcacagaaatgcttctcttgaatactctacagactcagacctcttgtcatcctcaggctctgtgactgttgttcctcagaaagaatctcacaattctaatacaattcctgtaattgacagagaagccatatcagaaggcggcagagccagtacctcccttgcaaatcattctgatgtccctaaccaatattcgactgttaagaagtcagaagtacataaaacaaatggcagcaaagaaggtaatgatggcttcacagtggatatgccaacaaaagcaaatggcggtagcaaaaggcatctttctgaagatagccaggccacattgctgtacagtaaagaaagcaaaataagcatacctcttgctgacaagtcaatgagtgtgactggggacaataagaacattaacaaacaaaggagcctgatgggcacagccaagagagagagtgatctgaaagtaaatcctgatataaagcaagacagtgctgcaggcgagcatgtcgtagacctgagtacaagaaaggaggctgagacagtcagacgtaagcataataaagaaataccaactgatgttgaaaggaagactgaaaacagtgaagtagacaccagtgctaggcgcgattctgctcctgtgccacagcaaaggcacgggaaaatggagaggggggcagctggatctggtagacgagacaaagcttttattgctactagtactgaagggacggacaaaggcatcatgttaaacacagtcaagactggagatgccaccaccacttcatcagaagtgggagagaaggggacagccttaccttgcaccagtattgaggcggacgaaggcttcatgatgggtgcttgccctaaaaaacatcccctccaggttggggcagaagccagtgaatgcactgtttttgctgcagctgaagagggtaagggtgttgtcacagaaggatttgctgaaagtgagattttgcttacaagctccaaggaaggagaaagtggagaatgtgctgtggctgagtcagaagacagagtagcaggtcccttggctgctcatacagttcaagctgaagccaatgtgaacagtattacaacagaggaaaaagacgatgcagtaaccagtgcaggctctgaggaaaagtgtggtggatctgcatgtacagttgaggggacggctacttttattggtgaagttgaaagtgatggagctgttacaagtgctggaacggaaataagagcaggatctctgagcagtgaagatgttgatgggtcccaagaaaataggatacaagttggtcctaaaaaagaaacagaaggcactgtgacatgtactgaaaccaaaggaagaaatgataacttcatttgcttggtaactagagtagaaacccaagagcaacgtgtagttacaggtgcagatgtggtccaagtaaatgctgctaaaccccaagaggcaaatgccaatcaaggagatggttctggaactgatggtgcagaaggtgagagtgcagtcaccagcacaggcattactgaagaagatggggaagcatcagcaaattgcacaggctcagaagacaacagggaaggctgtgccataagttctgaaacagaagaaagtgcagagagtgccatggacagcacagaagccaaggacattactaatgcacctttggtggctgctggtccctgtgatgatgaaggcattgtgaccag

SEQ ID NO: 30059 - DNA, 1178 bp, Mus musculus
acttactctgggctacctcatccatggagcagaagtgcctcagatgttctagagctcacatagtagctatacccaaatgttaagtttgtatctaaaatgtgttttctaagtatcctttgttttccaacagtactgtgaaaaagaaaaggcctcttccaaggacctcaggcacactcatggaaaaggtgaaccaagtagacctgccaggaggctgtcagagtctctgcattcagcagatgaaaacaagactgaatcaaaagtagaaagagaatataagcgacggacatccactcctgttatattggaaggagctcaggaagaaacagataccagagatggaaaaaaacaaccagaacgctcagaaactaatgtggaagaaacccagaagcagaaaagcacccttaaaaatgaaaagtatcaaaagaaagatgatcctgaaacacatgggaaaggcctacctaaaaaagaggcaaagtctgccaaggagaggcctgagaaagagaaagctcaatcagaagacaagccatcgtcaaaacacaaacacaaaggtgacagtgtgcataaaatgagcgacgagactgaacttcactcttctgagaagggcgaaacagaggaaagtgttcggaagcaaggtcaacaaacgaaactttcttcagatgatagaactgaacgtaaaagtaaacacaagagtgaaaggagactgtcagtattgggtagagatgggaagccagtttctgaatacactataaaaacagatgagcatgcacgtaaagataacaaaaaggagaagcacctgtcgtctgaaaaatccaaggctgagcacaaatcaagaaggtcaagtgactctaaacttcagaaagatgctctaagctccaagcagcacagtgtaacctcgcagaaaagaagcgagagctgttctgaagataagtgtgagacagactccactaacgccgatagcagcttcaaaccagaagagcttcctcataaggagaggcgacgaacgaagagcttgttagaagataaggttgtgtcaaaatctaaatcaaaaggtcaaagcaaacaaaccaaggctgctgaaacagaagcacaggaaggtgtcacaagacaggtgacaactccaaagcctgataaagagaaaaacacagaagacaatgacacagaaaggcagcgcaagttca

SEQ ID NO: 30060 - DNA, 1455 bp, Mus musculus
gtatcttcattatatttagcaattctttcatgtgtgtgctgcctcccctttaactgcttacttagtgtacaggaaactaaatctctcctattcatttttttctgctttcttttttccttctttaattactcgtcttagtatttttttcttatccttagcacttaacatattccctgatgattgaaattccagaaatgttaaagtatcgattttgtacttacagtaatgctcttacccatctatctgtatgtatagtttaatgcttttcaggaatttaatagtcttcttccctcttgtagttggtcttggctcggttgctgccagagtcttcggcatcttgatctgtctggatgtgaaaaaatcacagacatggctctagagaagatttctagagctcttggagttctgacatctcatcagagtggctttctgaaaagtgcaggcaaggctgcttcaactccatggacaagtaaagacattaccatgccatccaccacgcagtatgcctgtttgcacaatttaactgacaaaggcattggtgaagaaatagacaacgagcactcttggactgaacctgtgtcttctgaaagtttgacttctccttatgtgtggatgctagatgctgaagatttggctgatattgaagatgctgtagagtggagacacagaaatgttgagagtctctgtgtgatggaaacagcctccaactttggttgttcctcatctggttgttacagtaaggacattgtgggattaaggactagtgtctgttggcagcagcattgtgcttctccagcctttgcatattgtggtcattcattctgttgtacagggacagctttaagaactatgactacactcccagcgacttctgcaatgtgtagaaaagcattaaggactacattgcccagggggaaagacttaatttattttgggagtgaaaagtctgaccaagagactggacgagtacttttgttcctcagtctgtctggatgttaccagatcacagaccatggtctcaggtgggtgatcagccctagttgttaggaaatggatgtatttgcacatgaaatattacattactgatctaagtttttcacttggcttttttaagcaagaaagttaaccaaggtttgctacaagtattggagtaatagtgcttctgataccaacatgaagtttcattttagtcagttcaaatacattgtggaatatagaggaatatacatttagaagtttaattgcttagtaattggccacattacatttttataatacagtttggtagataaatgtataggttataatctcaaggatatgttacagaagtaaattttatattgaggactttgtcaaccatgtctgttgtggtttggtgtgatttttataccgtgaagtacctataaaccaaattgctgttgatctgtgtccattcgttgctgctgttgttgagac

SEQ ID NO: 30061 - DNA, 1106 bp, Mus musculus
tcctacctactgtacattgctgactaatcactatagagaagctagctgttctcagaatggggctatttctggacccaaagtgaagtcacagcagggaaaaaagattaggttatttctagtaatttaaaaaattgtacctataaatactgataattacttcttaaaaatcacattatgcttagaaacctcattatactatgctttttataacctgtataaagagtaacacagatacatggcaggtatacagcagactgtaagcttctcaagttcttttttagttttaaagaaagattactttgggaaatactgttggttagtaattagaactattaattaaactcatatagtcatagttattttttatgttttaaattgaatcctttgcctatatatgtgtaggttttttttttttaattacaggtatttccaaaaatagctattgcctgaagttcaaatgtgaataggagattataatgatctatctaatttgactttgttcctctcgtccattcatggtataggtgactggtatagtggtcctgccactgaacttgatactgagcctgatgaggaatgggtgagaaataggaaagatgaaagtcgtgctttccaggagtgggatgaagatgccgatatagatgaatctggtatttcacgcttggaataaaaattattacatggtgtttaaataataggcattctgcttaataattattaggccttaaagttcatgtatcttatgatttctaaagactttaaaagcctacttctctgaagaacttgaaggaacaataaatttagaatttcttgttagaaatatttttaaaagagaatgttttcttttttaatattaaaataacaaaatcagaaactgatggctatttttgtgtggaaatgaactattttcattaaagtctttagtttacaatatgtgattaggagtatttcggttaatcagttcatcagcatttattgaatcatctgggttgagaattgggaggcaggatgatggtatgtgtgtaaagtcatgtcacttgcctcaaggttgttacacagttaagaggtaatgtgtatgagagactttgggtgggtgtagcttaggg

SEQ ID NO: 30062 - DNA, 1132 bp, Mus musculus
tagtgcatgaatcgaaaatgtgagcatgtgtgtcatttaataatgcgttgtagagctcataatctggctgagtatacgcttgctgatttaaagcagtgtaacctgtttggttcctttttcaaatgatgctgcttatgctacaaagtgagtattgttctgtctatgatgcctctgtaagaggaagtcagttctgtgttcattattgtcgctcccactgatgaagtatgatctgggctgtgatagtttaactcacgggttcttaacaagttcaacatccccatgttccctctaataggtgttatttccttttcacatgttgcaagcaggaaggaatcgacttcaggcactggcttttactcgtgattgtaatttcttaatgcatttatttgctcatgtagcctaactgttaaaggttttcttttttatttcagaagcggaagtgtcagaacactccacaggtataacccatcttcctcctgaggtaatgctgtccattttcagttaccttaatcctcaagaattgtgtcggtgtagtcaagtcagtactaagtggtctcagctggcaaaaacaggatctttgtggaaacatctttaccctgttcattgggcaagaggtaggtaaatgggactttgagtttgtttaaaaagtattccagtctgcctttttagacaaatagtgacagccattactatgtaatgccagggaaaggaaggaaactttgagggtttgaccaaaacatagattttttatagttgatttggttttagtatacagtttagaagagcaagtcaatggtgaagtatttgtgagtaaattattaatggctgctactacctttagaataatggggaaaatacgtcagagagattgtaaaaactactggtaaaatgttgataattgttgaagataaaaaaaatgggtacacagaaattcattgtactgtatctttatacatatgtcagttgtaggaatttttcatagcaaaagtttaagatgaatataagtgattttttttaaaaaagaactgttaaataattatattttttgagtattttaaacatagaatcagttctgtaaaatataaaggtgagatatatacagtttccttttggtcatggcttaaagtaaccg

SEQ ID NO: 30063 - DNA, 1214 bp, Mus musculus
gatttgagaccagtctggttaaccaggactatataataagaccctgtctccaaaaacagtgttttccaacgtttaaactgtagaagcagtaagtttcttctcatgtatgtgcctttagtgtatctttttttctttatgacacccagagagtaatggaatttcaggcttgcagggaactgggtctgataggttttatttaaataaagtatgttattctccccccaccccctgttttctgtattaccaagtactcgagaatgcagccttcagcttcctggtctagggtacttttaaatcttacaactataagttgttattgtatgattttcttttatttgtagtttaatgtaatcataaaggaaatatcttgttatgagcaaaaatttaggtgtacatttgaattgtatcttgttacatcatttcatgtttacatctattaactatatcttttaaaatttttattcagctttctaaaaccaacttttccaacaacaatgacttccgtgctcttctccagtctttatatgctactttcaaggagtttaaaatgcatgaacaaattgaaaatgaatacattatcggtttacttcagcagcgcagtcagaccatatataatgtacactctgacaataagctctccgagatgctgagtctctttgaaaaggggctgaagaatgtcaaggtaagtcgcagaaattgatatgtactgattctctaatttttattagccacagtaataagtgatgttatttatggaaagatacttcatttatttgagacggctacgaaggctgttcatgaggattggttacagtgaaggcttatagcaagttgaacgtaagagagaacatcaggaccaggagggttcttgttgaatcagctctaccggatttttgctgaagataggtcagggaattaatcccgggtactctggacgcagaagaaggggaatctttgtgagttcaaagtcagcctggtctacgtactgagttccaggccagccagggttatatagggagacctgttttcaaacagaataaaactatcaaaatagaattggaagtggaaaatgtaattcagtggtagaattcttgcctagtatgagtaaggccttaacttcggtctgtagcagtggaaaaaaaaatggaatggcagctatagtgttcacggtattttatttttccctattgtaggaaattgactggttaaagaag

SEQ ID NO: 30064 - DNA, 1148 bp, Mus musculus
tgtaggagtcagtgcttcgttcaagcacgtgaactctggggatcaaactctcaggtcactgggtacggcagtgagcacctttgccccatgacccatcttgccagccctcatccagtccctgacttcctttctttcttctctcccacaggcctgccaggtttcttcagtgtgtgaagaaccctgagcacccatcgtgtagacttaatacgtgaaggatctggatcttagatcacctgtagcctggactgagatgaaggggctcagaagcaacactggtggaaagctgaaactgtcagggagaagcctctactacagtgttaacaccagagatggaagaacttcccaattctctgtgtactaccaacattcaagaaaaattactccataaaccagagttaaacttctatattgttatattagtctaactttctcatgtggtgcttctgtattgtttatatattgcttacatccttttattcctcttttaatgatctctcttttctctctctctctctctctctctctctctcaatgaggctgagaatccaacctgagaactttcatacatggtggataagcctatataccactgagctaaatcctcagcacagctgataacatcatttttgctgaaaaatggccaatcaaacttcccattagacaaagaaagtcaaatgtcaagtatatcgaaatgaatgacccttttttttttttatgttttttcattcttcccacagatattcacatggtaaacctgaggtcatagggtcattatagggaaggtgctgtgtgggaactacccacgtgccctgtgctttaatctttaactcaacacatccctgataactttgagcattcttttcttttcttttctttccttttcttttcttttcttttctttttcttttttttaaacagaagaaaatggagtttagagagataattgattttcctaaagtcacattcttaagatcatggttacatctagaattaaatcagttctgtcaaagtccacaacatatgatagtttttttcttttccgagcttttattgccaaattggtagtagcctgtgttgtcgtctagcaaatgctattgcattagattgaatataatagaatctgaaatgtgatctttatggaagatcac

SEQ ID NO: 30065 - DNA, 1194 bp, Mus musculus
cagttaaactcttaaatgagaaagtcccagaaaatctttttctagatatctatctcgaaataaactcagccgcctttcgtctggcggcagccatccatcagatgagccaagatgggtgcatacaaatacatccaggagctatggaggaagaagcagtccgacatgatgcgctctcttctgagggtctgctgctggcaataccgccagctctctgtgctgcacagggctccccgccccacccggcctgataaagctcgaagactggggtacaagactaagcaagactatgtcatttgcaggattcgtgtccacggtggtggtcgcaaacgcccagttcctaagggtgcaacttatggcaagcctgtccaccatggtggacagctgaactttgcccgaagccttcagtctgttgctgaggagagagctgggcgccattgtgggactttgagagtcctgaattcctactgggttggtgaagattccacatataaattttttgaggctatcctcattgatccgttccataaagctatcagaagaaatcctgacacccagtggatcaccaaaccagtccacaaacacagagagatgcgtggccttggaaagggccacaagttccaccacactattggtggttcccgccttgcagcctggagaaggcgcaatactctccagttccaccgttaccactaatacacgtgatatttgtaaaattcatatccaatgaacaatttaggacagaaaaagaaagagagagagagagagagagagagagagaggaagagaagagaagagaagagaagaaaagaaaagaaaagaaaagaaaagaaaagaaaagaaaagaaaagaaaagaaaagaactcagccataaaagcaacatccatacatacttggctatacagtttttgtgacagtgaaatctggaaacaacttcaaataacatttactactgaagcagtaagttagtctcatccagccagccaggtcttgccattgagaaaagttatataatcagccttatgtgctcctataagaccaaatccaaggggaaaactaaaaactcaaatggtttgtacaacaaaatggtcgcatttgtctaaaaatcagtgaatgtcttcttttgtaaggagtggcacaggggtactttcaaagggggtcgcttttgagacagggtttctctgtgtagccctggat

SEQ ID NO: 30066 - DNA, 1192 bp, Mus musculus
agagtgtttgggacactgtaactagcaaccaaaaggtgctctggggttttcatctgagataaagatgttattcctgcttcattactacctattagcatcccaggacaaattctcgacaccctactttatcttaagagtctgttctgcacttctcttagacagaaagttgaccatttctgatctgaactgtctaaaagatggtactcttaacttcatttcctatgctgtcttctgaaactcagctctcatgcaaatatttgggcacagatggcaaattttaaatggtttgctgtatcctggataagtataaaactagtttggatgctttggcttatgcatttgagattcaggagggtttctaatgttttgcactaacagaatctaaagatagctgttggagatactatatatttatgccttgtaaagccaggaagcaattttaagtttaaaatgaacatttttattcttttgtgtatgttttagtggggccccacttttaaactattctttttaccgaaagagagtgtccatggaaaccaggagccgtgtggaaaaagctttgccaaacgcagccctggtcagaacaagagcacgacctaggtgtatctttctgttccgcttgagttttctgtttccgcgctgttctctgaagattgcatttcctttgcagatgctcttgggagtgtggatgatactcacttctgtcataatggcattcagtactaattttataagtgcatcttgtgtgaaactcaataaattcaattttataatcttttttaaaaaggtcactgaatttcttgtggcaacgattactattatatttgttggaatggatatctcattgagagatttcttatttaagcagaacttatttctagtttacaaataatagggttgtgttaagtatgtttagttactcttgccctaaatgataaaaaaaaaattgctcttttgtctttgaaagaatagcctgcatgttggtcatagaccatttagtatctcttatcacatgacaacatttgcattctatggtgcatcttgatgtcacagtgtcttcttgtcataatatgggagtcacagtcaagacaatactttggtttttaaatagtcttagtatggtgcacggtacatcagacccattttagcttttcctacaggtcaaagtaccaaatgctattgatgaatgtat

SEQ ID NO: 30067 - DNA, 1238 bp, Mus musculus
ggtggatggttgatatgggaggacttaggtgacactatggctaggaaggagctggacaggagccagggagtcagccagtaagcattgttcctccttggcctctgtattgagtcggatatgctaatttacatgatttgccgggattctgttccctctcctccctggcaccctagggagggctgggtggagctgattttgtattattccccatggtttgtggtttacaagtaatgagtgctgagtgaggctgtaattgctcttaaaggtagacactgacatctgggtcttcagtctgaaggacctggaggtttctgaggtaaatctctgccatggaggattgagcatccacatcattttgttcatactgaccctgttaatcagtcacccactttgtatggtggaaaagattgccacgttaatacctcagtcggacgtccgcactgaaggctcatttgccactgctggagggcaggggtcttccataggccggccatcatctctacgagcccaagcgttgtgaattgcgaagggttttacatttttaaatggctttataacatgagaagagtaacaatatgtggcacatatagtttctatttccgcgtctgtcattctcagggtggcccatccctgcccctccaactccatattgtttgtagctgtctcccatgggagcaggtttaagtattggtggcagagatcaggtgtctctagatacagataaggtttggccttcagagtccagcagggaaggggaaggaagtgttcagagcaccctgggctgcagttagtggtccctgaaggatgtctgggaggtcggttgttattacctttctctagtgggtttttgtttacatggtaaatatccaaagatctgaaatgtttctaaatcttgcgcttttaaagggctatatgataccccagatgggaagtttcatgccatgaatgaaacctgttgcatgttcaagattattaacgtactatgtaaaattacttttagattgagtatacagattatatcaaacatgtgaattttgtgtttagactttagtcccatccccaagataagtatatgcgaacatttcataataccaaattgcaaactggaaacgtttctggtcttgtgtagttcagtttaagtctctccactaaattttctttgctcccatttctgggggttgctctttagagaagtcacaagccaccaattcttgaacaaagctgtttttcttgctcca

SEQ ID NO: 30068 - DNA, 1130 bp, Mus musculus
gagcgtgtgacagaaatgtggagccacaccattaagtgcttggcagaaggccctgcttcttctgccctctctgcaaagtcacacactttccctgattgacagggtactaaacaatgtggacatccctgatctgaaatttgaagcactccaaaaactgagtgttcactcacttctgaatgtctgtaggaagtcctgcagctaacccttgagtggacagagtcaaaacacaagtattttaaacgaccgaaccctgagacagtagatctgaaacaagtgattttcaggtttagggttggcccaagatgtctcacataacccagttccagtcttgccctggtagggattttagctgctgcggtggaggctgctgctctgctcttggcctctgcggaaaaagacagttttaatgggattgcttgccccttctgcatctggacagccaatgctttctgggggatctactctgattgtatttatctttcttgattttttttttttttcagggccttgttttaggaatttatgccaaagacaaagatgatgacctgccacaatttacaagtgcgggagagagttttaataagttggtgtctggaaagctgagggaaatgttgaacatgtaagtgttactataattggggttcctttttgtttgtgtgtgtattttgcattgtgagacagggtctctgctgtgtagctctggctgtcctggaactatgtagatcaggctggccggcttcaaactcatagacatccacctgcctcattccctggagttctggatttaaatgtatttgccataaaacagggcggggttgtagttcttaaaggccccaagatttaaagagagtattctccttgtatcaggtaaacttaatggaaccctgaccagcaggttctctggaaatgaaagtatgttcttgaagaagctgggcagttgtttgagtgtgggtgggtctgcagttctgggaagtcatgtggtttctagccagtcacaaacctattgtgaaggattgacgcggatccagaaaggaatagatttcctcagcccactcccaaggctcaggttcacaactcctactctcctgtctggcaccagcctctaaatgcactttaactgagtaatttaa

SEQ ID NO: 30069 - DNA, 1502 bp, Mus musculus
cccaaagatttattattatacataagtacactgtagctgacttcagatgcaccagaagagggtgtcagatctcattacggtaggttgtgagccaccatgtggttgctggaatttgaactcaggatcttcggaagagcagtcagcattcttacctgctgagccatcttgccagccctacaaaaatgatgaatctttaacagtatgtttctttctatttttttattttagtttaactatatctcctcccctttttcttcttcttcctcctccttctcctcttcctcttcttgtttgatttttgagacaaggtctccctgcattacccaagctgttattgaactcactctggccttaaaattcacgattctgcccccacctctggagtagctgggcttacaggcgtgcgcccccagggtcctccttagtgctcctgtctaaggggggcctttcctcatttgctcgtgttggggatggctgacctcactttctctctccccgttaccactttcgtctgtaggatgtctcggaactaaggagtgaactgcagcggaaggatgcgctggtccagaagcacttgacaaagctgaggcattggcagcaggtgctggaggacatcaatgtgcagcacaagaagccggctgacatgcctcagggatccttggccttcctcgagcaggcgtctgccaacattcctgcacctctgaagcagacctaagcactcctgcctgtcttgcagccttgcagtcttgccagacacgtttccttacagacctggtgtgttggaaggactctgttggataatgagtttgtatcagtttctgtccctatttataaggtagggtttcattatgaagccgggaagggccttgaatctatgatcccctgcctcagctcctctagtactctaaactcctgaatactttataaaaaacctctgtctttgataaagtaaagtttggctttgtttgttgttgttgtttgtattcatctttagcactgtttactccttagactgttagagtactcacacacattcttatttggcctttgccatttgttttgacaacattctgtgtcttcatctccctttttttcttaagctatgaatttggtgaaaaacctgaaggaaacaatgtttagtagtttgagaagccacgggatgtacagtttggttatcagccttaataggctacactagtggtaggtagtgtagacagagatgtaaatgtgctgttccaaaactgtgagctgcctcgtgaggaatctggcacggcagtgtgatgcttctagggcggcacagggcgagtgtatttcacaggtagctcagaagaggttagaatatgctgctaatggaagatacttaccttcatgctgggtgggtttttgtctgggctacgttccattctctgagtccttattcactctgccttgagggcacacacatgaggactatggcatgctgagtgctcttgggctgtgctgtgctggtcagggtaaggaat

SEQ ID NO: 30070 - DNA, 1197 bp, Mus musculus
cattatcaaatctctttatatacatgttttagatacacatgtaggcttcgtttttgaaaatatagcatattgtatatatgctcttttctggtttttaaaatttttgaactctgtaaagtcctctgttggtatatggtgttgcatgatattgtagtggctcatgtgtgctatgttaagtgctcgtcctccgatttacatctgctttattctgtttgctttagttacattcagggcttcccagtagttaatgaagagcagaaaggtgattttaccttcattggagatttgatgaaaagagaattcataggtcagcaattaattctaattatgaaatctttggacactagtgaagaaggaggaaggtatgtctaaatgttaatatttgattgattccctttagttttatatatttaggaacctaccttggttgaatttttaaaagataatgattctgattttaattttagtgtaactaccaacaatgaaagtgatgttatatcctttggtaaatcaggtttttaaaacaatcatttttatttgataattttatacatatatacaatatatcttgatcatatctacctcaagactcttcccactcctttgatactcaacatgttcctccttctaccttaagctcccccttcacttttttccattacctgagcccaattacagttgtctgaaagggccagggtatgtggccttccaccagagcatgggcagcctactgccagctacaccccagaagaaaaaggattctctctcttctagtagctattaactgtcaaaaccttctcagctggggtatctggcctcaggagtcacattcccatccgtactggaatgttgactggcagctcttatgcagttaaccatacttgctgtaagttcttgagttgtgtggagggtggtattattattcctcctcatttggctaatttcttatatttaaatacagttttgttatgatatgacgagatgtaattttcctagctctccaaaactgtatataattgtttttagtatacttgtatacatatgccaacgtgtgtttgtttatgccagcattaccagagaaatgcactgaagtacagcattactagggctactatatcattacatattttctagctccattatgattttctaggacctccatcagattcgtggtctaatgtttactgaaacatcata

SEQ ID NO: 30071 - DNA, 1158 bp, Mus musculus
aggctggccttgaactcagaaatctgcttgcctctgcctcccaagtgctgggattaaaggtgtgtgccaccacttctgagcagaactttaattttctgtgttttctaaataattacatggaaatgtatatgattatatatactgctttgctgtccatgccttaattagctagttctactacttttaataatttataaatcgcatgtattgtttttgtggtgaacacctaaagtttatacagaggaactaagtcttaaagggactgtttttttgtttgtttttgttttgttttgttttttggagacagggtttctctgtgtagccctggctgtcctggaactcagaaatccgcctgcctctgcctcccaaatactgggatcaaaggcgtgcgccaccactgcccggtttagagaatgcagtttttttttttgtgtgtgtgtgtgtttgagttctagacaggaaaccggtcaaccctgaggacatgtgtaaaaccagcacctactagtcctgactctacttctgatgaagtaattactttgtaaacgtacttggtcatcttagaatctgaatcccagaagtaattgtgcttacctcctttgtgaaataaatgccagtgaacagatggtgaataatgatgacagctttttaagctgacctctcctagatagatggttgtctgccttcaggagacctttctagggaatgaatcaggaaaaagggatgggaggatcatgtgacacttatggatgcctttgtgtttggcaggggaagttctagtggagatgcatttcagacgctgtggtttgttatttggagccggcctgcagaagatgcagttggccaattcaaggtcccagagaggaggctccttgcttgtcactcagtctttctggctttggatattgctaatattgaattttaaacgaaaaggggtttgtttttacaatagatattaagtattcctcagaattctttactggccctgtgtgtcctactttatattttagtataatagtactaaattatgctatcattaaggtttattattgggtagagagatggctcagcacttgttgcttttgccgagaacctgggttcagttctctgtactcactgattcacaacctccagttaagcggacatgacgctctcttgatg

SEQ ID NO: 30072 - DNA, 1140 bp, Mus musculus
tgctgaggacctgaatttggtctctgcagctcacaagagaaaggaaagaagcaactcttgaaagttgtcctctaccctccacatgggtgctgtggcatgctccttcctcacaacagccatacaccgaaagaattaacttaaaatttcaaagaaaaacaacaacaacaacaacaacgaaatcaaacaacaacacaaaaaacccaccaaagaccaacgtaatgttccataggctgctgcactacatttgtgtttttatggtgacacaaataaaacatgttttaaaagaactatgtctggacaagattaaagggtttttattattatgtatgtatgtttgtgtgtatgtgtgtaggtatgtgaacacaagcatgtgtggacctgcaaagtccagaagagggtgtcagattccttggagttgaaggtacaggccattgtgggaatcctgatttgtgtctggggaagaaaacttcaggtgagcagcaagcactcttaaacaccaagccacctgtccagcaccagaaactgtcattttaatctatgtggttttgcgcgtcagtctgtaatgattcctccctaaaggttttcagaaacaaagggagtgcacaagtaaattttgacatcagtattatgtgctattagactggatgtgtacataaatccgattgttttcaagtaagaagcctgtctcattagcttatacacttgatttttatttttcccaatttatattggctaataggctgtgctcacttggagctgatgctaacaaaaaggatagttgttcttacttactttttggcaactttcaatgaactcatctatggtaacgacaccatctttatttttgtccatcttctgttgagaaagaaaagaataaagcattgtattgagtcgccttttgacagcctccccatacccagtagattcaaagagataagaatgaaactcattattttgtgttacatgggacagtttcactctaggaggaactactgaattcctacaatggggaagcccaatcattttaggttgtgtgttttcccccctgtgtaatgccacctaaattgttttctaaatttgacagtactcgcagagtttcctgagatgtagagccttggatttttcatctataaaatagaa

SEQ ID NO: 30073 - DNA, 1170 bp, Mus musculus
cgcataccctctccccgactcccctacccacccattcccactctttggccctggcgttcccctgtactggggcatataaagtttgcatgtccaatgggcctctctttccagtgatggccgactaggccatcttttgatacatgtgcagctagagtcaagagctctggggtactggttagttcataatgttgttgcacctacagggttgcagatctctttagctctgagtatattagagtattattttgaaaatgggtagacactacacttgacaatgccattttaggcaggcagacaagttcagtatcaacagtcataaatcattttgacagtgtactcattctatgtgataaaatgcccccccccctgcactcttcatttcccaaactcataatcccaatttaatcatgagagacccatcatacaaatctgaactgaaaggtattctaccaaatacctgaacaatacttcttcaaactgtcaagatggttacaagtaaaagaagcctaagacagtcagtgctaacaagggtctaaggggacgttatgactaaatgaactgtggacagggctaaatgaaattctatcctacatggggtactgggtcagaaaaaaggacatccagtaaaacccaaagaaatcggaatttagcatgaaagttaatagtatggtatctgtgttagctccttaactggagcaagcatgccctattaacccatggggtgagttacagacgaaactgcatcccacatgagagctctgctctctgcatctgtttgtaagtataaagcatggcgaatcctaaaaaaattattataacatgatttaaaaagaggagactggtcttcagaacacgggaacaattaaagatatttgttgtctgcctatttctcttgtcctgcttgtttctgagatgtctgtgcatacgaaggcttttgccataggaagtcacaggacttgcacttggagagtatgggaagtggaaaaggagcgcatttgagtcaggggtgctggacccctgatgatagaagaggtgcaggctcccatgacagggtgacaagaaaagctagggagcatggtgcaggagtccagtcctgggaaatccaaaggatttgtttgaggctcaggtgaggaagccttacgatgagaacatgtgtgatctatagaaatt

SEQ ID NO: 30074 - DNA, 1196 bp, Mus musculus
acagtctgaccgaacactcgatggacaacgatattaaaatgcatgtggctcctttagacgtgcagtttcgaacaaacgtgcacccaagccgccaccacaaaaaccgaagtaaaggacaccgggccagcaggctcacagtcctgcgagagtatgcctatgacgtcccaacaagtgtggaaggaagcgtgcagaatggcttacctaaaagccggccaggcagcaatgaaggacattcaaggagtaggagagcttatttagcctacagagagagacagtacaacccaccccaacaagacagcagtgatgcttgtagcacacttcccaaaagtagccgaaatgttgaaaagcctgtttcaactagtagtaagaaagatgcaccaaggaagccagctgcagccgaccttgaaagtcagcagaaatcttacggcctgaacttggctgttcagaatggaccagttaaaagcaatgggcaggaaggacccttgctagctaccgacgtcactggtaatgttaggactgggttatggaaacacgaaacaactgtgtagcattgcaggggcttccaagacaaggtgaaactgtggtactcacattcctttaagctatgaactcttagaaacaaactgtttacagccaccttggggatacaaagccgttctgagtattcttgtgagctttgggatttacttattttatattcccaaattgtcccccactccccccaagagttaaaaatgttttaaaacattgttttacttgtcaaagcaccaataagatattttggaagttgaaaatataatttcttagaatctgttatatctgcgtaacatctgagacttgtatttaataaactaaatagaagtttgtcattgtgctggtggcttatgtttacactgcagaacacatgttaggagctggggagatggcgccatgggataaaggtgccgactgccacggctcctggtgtgtgagttgtaatcctagcatccatagggtggaaggagacacctctcataagtggtcctctggcctgcatatggcttccaccacacatatatacaaacatgcatgcattttgagagcattttagctacattttaataaagtttgtgatggtgattttcaaggtgatcaggcataaataatcagatgtactgttggcttaactatactgatggtaacatttgtatcaaaag

SEQ ID NO: 30075 - DNA, 1165 bp, Mus musculus
tccaaatcaacaatttactcccattcagcaatttaataatgattatcagtttacgacctctcctcattagtatatgctgtcacatcacgtacacatttgaagtgtcacttggaagtcagtgacagacagcaagtcactgtcgcctctgagaagtgtttaatagcattgtgtgagatccacgttcttaacactgtctggcttggtgaggagctgggtggcttttgaggctttctctagctgactgatccttgtataggtaggtacaggttgttaaggtactgtctcagctttgctttattgttgtatccattcatctgcctatgcacaaaccctctgtagattgggcatctcatctccctaaggtacagtagcgtatgctcttgcaggactcgatgttggggacagaaaccagtggctctattgtgccagagaggctttctgccagggactgcatgcctttctagactcactgcagaatatggccacagtagatgaaagtgggaaggcttgagtgtgggggagacagacagggtcagggtctcagggaactttgccagttgctctaaagactgccttcttttttcctcttcaactgatgggaacttttggaggttttaacagaaagacgtgatcaaaattctgctcaggaagatgagtagcagtagagaatagctgaggagataggatacatgtgcaaactgtgttaaaatcctcgcccagataatgccatgggggttgaacaggacccaggtgacttgagacattattatcatatacaataatttatttttcaacttcattttcaaacatccagagaggttgaaagaatattacctccagcaccttgatttaatgatgaccaacttcatggcgtgtttggttatcaatttttcaattgctctaggtataaatttatttagttcctttaatgaattcctactgcatgaaaaatgtgcttaaatcctgacatcaagaacctgaccacattttcttcgtttttgtgcatgagggtttgtatggaggaaagattgatttttgccccatttcaatccaggtgaaagttgggtgggtgtgcaaaagtgactcacagcttggcagataggaagcagagaaaggaggggctggtggctcactgcttgccttccaagcccctcccttagccctg

SEQ ID NO: 30076 - DNA, 1146 bp, Mus musculus
tcaattcgcattcttctatatgataactgccagttgtgccagcaccatttgttgaaaatggtgtcttttttccagtggatggttttagctcccttgtcaaagatcaagtgactataagtgtggtcttttctgggtcttcaattctattccattggtctacttgtctgtcactatagcagtaccaagcagtttttatcacaattgctctgtagtacagctttaggtcaggcatggtgattccaccagaggttcttttatccttgagaagaatttttgcatcctaggttttttgttattccagatgaatttgcagattgccctttctaattcattgaagaattgagttggaattttgatggggattgcattgagtctgtagattgcttttggcaagatagccatttttactatattgatcctccccatccatgagcatagatctttccatcttctgagatcttctttaatttctttcttcagagacttgaagtttttaccataaagatctttcacttccttagttatagtcacgccaaggtattatatattatttgtgactattaagaagggtgctatttccctaatttctctctgagcctgtttatcctttgtgtagataaaggccattgacttgtttgagttaattttatatccagctacttcactgaagctgtttatcaggtttaggagttctctggtggaatttttagggtcatttatatatactatcatatcatctgcaaaatgtgacattttgacttcttcctttccaatttgtatccccttgatctccttttgttgtctaattgctctggttaggacttcaagtacaatgttgaataggtaggaagaaagtgggcagccttgtctagtccctgattttagtgtggttgcttccagcttctcaccatttactttgatgttggctactggtttgctgtagattgctttttatcatgtttaggtatgggccttgaattcctgatctttccaagacttttatcatgaatgggttttggattttgtcaaatgctttctcagcatctaacgagatgatcatgtggtttttgtctttgagtttgtttatataatgtattacattgatgaatttccgtatattaaaccattcctgcatccctggattga

SEQ ID NO: 30077 - DNA, 1198 bp, Mus musculus
gatttctatgaataatgtcatggatttatgggtctttatgtggacattttttttatttctcttgagtgaagcttaatcgaggtttttggattatgcaataagtcatgtgtaactttgaaagcttccagttttaaattgctacacgattttgctactgggttgcctgatttcacaattacccattttcttaaaattccagtaggcaaaaacaaaaagtacaacattttagcaagtgcctatcacaaaacagactactgtagtgaaggctgtgagttagaactgctttggacttaagtgtttggttttatgctaaccagctaatttaggtttgagattgagtcaacaggcaggtagccaagggattcagatgtcgactacccatgtgtgtatgaccctcatgagatatttttagacaaataatcattttaatatccaggaggaaacaaatttttctaaacatgcacaggttaatcatctgatctctacaaagtccagcatgtgagagtgggcttatgcctgcagaaataatggacataaagaagaaattttgttttactcaaatctgaatagagcagaatgaattaagatgtggctgtttaaggggtaagatgtggctgtttaaggggatgactgagactgtcagtcaacagaaatgtaatgcctaatattagctgcatgtcagtttaaattgtacaactgttagcaagatgagtagctaaaacatactttcgggtatttggatatcagtgttcagtgtcttaacaaagaacctggtatttcatccaggggactattgatgagtgttaatagccacagtctcataaagggaaacatgtttatttttgtgtagtcagtccgtttcagaatgttttataacttctggttcttgatagtgagaatactgttatgttacttttagtgtactttcaatgtgtgatctgtactaatgcgtattgaagcctacttggtctaaataagattgttaaaactttgtgttttatataacttagatcctgtgtttaatcatttctaatgaaactttggacttgaaataagtatattttattattattatttttaatcttcttatacctgcaaggagctgactttgaaggaactcactaaactttagacaggtgcacctgcgtctcttagggcctttgtacaggaattctattttcttgtgtaaaagatttca

SEQ ID NO: 30078 - DNA, 1324 bp, Mus musculus
taaatagcttttgtcttttcatattaatgtaaataaagtattagaaaaattaatcccgatcctgtttccaaggtggtaagtttacagaaggtttatacttttgctaagctgatatttcttaaactgtgttaataaagatatgattttaaatcttttatcattgatttgtatttgaacatttgtcgtcattcagcagcagtataattattagcaactctagtacttaaatcttgatttcataactttccccctcccccattctggacaggttggtgaaaattgcccctcaatattatgacatgagcaatttcccacagtgtgaagcaaagagacagttggaccgcattattgccaaacttcaatccaaggaatattcacagtactgaattcaatgcttagaactgaagttattcagaggacagctttaaaagatgaatgaagtcaagttcaagttgtgctcttcatgttggttcaataatggcctttatttgaaagctttttaatttttctttacagtaaatattccattctgatttcataaattaaacatttatgcctcccttttgtgttgacactgtagctcatactggaaaagtcgatcaatgttttgcagtttattgaaagtagttctatatataacaatgttataagcatttctttagaaatggttgaaaatgcttctaaaatgtgattatcgaccatggtatgcatgatcgttgtaattgttgacattccttttagaagttgtgaaatgttacaacttgtgcttctgtagacacaatcttctgtctccatacagaggcactgacttcaataaagtctatttatactaatcttggcccaagtccttctgtatcttttattctaagagtctctatagtgagtggctgcttttcttttttcattgtaattatactgttactacgtatttagcgttttttaaaaggagtactccttaggtacagtagccattaaacctgggttttaaagagcataaatgtagcactttcttaggttaatcagtatgtaatctaatgggataacgtgtgtaatatttttttttgaaattggatccccagagacagaataatggaagaatggctttgtcctcattcttaaagctcatttcataaggctgatagtttattaccttattaaatgcgttgtgtcaggtcttactgtactgaggcgaacagtttaatcactctagcccctagcatgtgtttgtattggataggagggaacagtgttctggatcaccgtcagtttttactaagtattgactgttggcagcttttataatgtaatttgtatagtgtgttaa

SEQ ID NO: 30079 - DNA, 2037 bp, Mus musculus
actcaaagccatattgttgtattttaaaatttctccattaagaatatatgtagtagatatcagaaatgacttcttaaaataacttcagaaaagtgaattacttagtttttaaaacaattctgtattttgtgaatgtttttaatttgactacatttcatttcaattggtctaggtattcacagagacccccttgcctctgtgtccaaatgcagggtttttaaaggtgtatgccactatacccattttcaggtgtccttttcattgttgttttgtttttttaattaccttgtattttgtgttgaggatgtgtcttgtgtattcagttaagactgtcagacttgggagctgagctattgtggtggcctgtggttcagtggctatcatgcttaaggttttagaaggatggaactagagacttggtagtaaagagtgtttatgctgttatgtaaagaatctggtcgtaatttttaataactaattgatgtttttgaaatcactctgatttctaaatttttgcattatttctaggaaagaccgggaacgagatcgggatagagaggaccgatctaaagatcgtgaccgagaacgtgatagaggagacagagaacgggagagggaaaaagaaaaggaaaaagaattgagagcttccaccaatgctatgcttatcagtgctggattgccacctttaaaagcttctcattcagctcactcaacccactcggctcattcaacacattctacacattctgcccactcaacacacactggacacacaggacacacatcacttccacagtgcattaatccattcaccaacctgccccatactcctcgatactatgatattctaaagaaacgacttcagctccctgtatgggaatacaaggatagatttacagatattcttgttagacatcagtcatttgtacttgttggtgagactgggtctggtaaaacaacacaggtgagttgttaaataccatggtaaatgtgttatgtgcatgtttaaacttaagatgctgattgggtcttggtagttcttttccattgtctgtcaactcatttccagttgtcttgtagagtaccttgaagaatagtactttgatgagtactttttaatgactttaagagtgtgattcaagtagagagtgtttagttttttctgagtccacataggaaaaaaactggtatattctcatcttgtaagtatgacagaaataatttccaacacattttaccctgggacaatacagacttagaaatacaaagtttgttttctagagcttgagtagagaaatctgaacaattggagcagttgcttctactcccaagtatttgttagaatattttgaattatgtgaatagtgtttaaaaaaaaaaacttgaacttgccagtcatgataatgcataccttttaattccagcatttagggatcaggtaggcaagtctctgaattcaaggtcggttttatctatataatgagatcctttcttaaaagaagaaaatgattagaaacgctacaaggtacaaagtgtggttgtgacctgcatccatctgcctctagcatacagtactaaacactgttaaatgtgtctcaccaggtgcccagtttttaaacatgaacaagtcgatcttgttgatagacatgcagcctgttttatattttgtatattattgcatctatttatgtgtgtatgtttgtgtatggatgcacccatgccgtagcacatgtgtggcaatcagaataacttagagttattgttcatcctatgggtattgagaattgaactcaagttgttagccttaatggccagtgcctttaactccctcagctgacataccaacctcaggctttgtttaatgacttcagggataagtatgtttgtagattttgaaatggctagatttattacagttgtactccatgtagctaaatcttctttcctcatggagcatagcaaattactcttgaaacatctataaactttttggttatatccctgaactgttaatctgatggttgaatgaagtacttg

SEQ ID NO: 30080 - DNA, 1143 bp, Mus musculus
attgcaaattagattaataatggatatctagccagatgtggtggcatacacctataatcccacactcagaaggtagaggcaggagaaacaaggctagccttatctacatagtgagcttgatttcatcctgggcttcatgacactctgcctaaaaacatcaaataaaaatacccccactaattgtgaggcattatattacacccatgagattaaaaacattcaaaagactattactattgcagtgtttgtgaagctgtggactgttactgtctatggagagaaaatgtcttaaaaacatctattaaagaatccacacaacctttgacccaatgattcaacccctgggcatgtagaaataattaacaagccaatatggaaggctttgtgcaaaatggtagtagcaaagaattaaaagcaaagtgaatgcataaccatgagggaacagtttaataaatctctctttttgctgaatttgcaaatatggctgaatagtgtctctgcttcataaaatactaggcttctacttccaaggtagaattggaacttcttgtgaactaggattctcacgagcgtagagtgagaagggaaagccactggagccatacggctcctggagatagactgatgtacactggtgtgtgtgtgtgtgtgtgtgtgtgtgtgtgtgtgtgtgtgtgtgtgtttacatttgtaagcagacttctatctgtgtgtggtcacatgagcttaaggacaatgtaagatatgaacgacatagggttaacagtgtctctgcctctctggggtaagatttgggttgatgcagtagtgatttatgcctttaagcactcatgaggcctcgaggtcaccctgttctacagagagagtttcaagacagtcaggactccacagtgaaaccatgtctcaaaaataaacaaaacaaaagaacaagaacctattgtgataagctatccatgcatctgcgtcttaatgtgtttatcatttgcctttcttatccctgtgaccaaagtcaggacaagaagcaactaaggaaggaagggtttggtttgaattgcacttggggtggggcgggggcggggtgcattatggcagggaagtcatggtgggagaagcagctttcagttttgatgacaggatctcttg

SEQ ID NO: 30081 - DNA, 2686 bp, Mus musculus
taggccagcctggaatgtgcccaagatgaagggatttccctgtgtgtgtgtgtgtgtgtgtgtgtgtgtgtgtgtgtgtgtgtggtttaaaggtaaccctcgaggtggctggagcaatcatgtgtgtttgatgttatccgttgagcgctcaaatctctgagccgttccttttagtttgtgggtaactggcaggcaggccaaaggctgactggtgcttttcatctgtcccttagagggatggaacaggtgttcccatctcctgggcattgggtagggtttttgaagtgagattttacggagtcagagggcacttaactcagatctccatgtgctttgagacccagagggggtcctttgattgttgcatgtctttgccctctggacaacttaatatttcaagtaattgattcaatagcagtctgcctacctgcccacctgcctcccttcctcctggaacagtcctttgttaagttgtaggtgtgcacagtggctggctcgtgcggccctgcagaagtttctgaacatacaaaagtcaaaatcacgggaacacacctccctcctccagcacgctagcaataggaggcaggtcgtgcgctagtgctggggtatctgatagagcttcaggcgagaccagctggaaccagatgagcgtaatctcataggccaggtctgtgtgtgggaccaggtggcttatttcaaaataggcctcctgtggggacagcagggaaatgcttggggtctggttgtgtagatggttgcacagtggatattctgtctaagcagctgctttaggggagtgttttgcagagtcccactgcagcacgatgtcgttttaatggtcatcctcgctgtagctaggtagagggtaccccacaaatgcgaatgagtctgttgtctcctgactgtaagcagcaggggatgattggtacgccatactggagagctatgcattgatggtaatcagcactcctggctgatgcttccagcctagggggaatcaaggactttaatgaactctggctctatagtgtggttgcttagactgctggtgctaaatgccaagcaaatagaaagagcggtctgttttaatgctctaagcgtaaatgacacgtatgcgttcttcgccttcttttgtcttcttggttcatttggcttgcccatgagttcctggctctccctattggaggctggaagtgtgatggttgcttttcctttctctgaagaactggtgagccatgttcctccatacatgggtcctgcagacaggcacgtagcactaatgtcaggcagagagaacacctttgcttctcaccgcttgtagaggaacccacaggggcatctctcagagtgccacctctacagagcctggtaccagcttctctgtgcttcctcacagggtgaagccatggccattgcttagagttcaaaaagccaagatatgtggggtttgacttgggggtggggcaggctgtcagacccggatgaagcatttggggagtgaaaaagaccctggtgggtggtgcagcaggggtatgagaggaccagcaatcgagttttctttttaagacaagtttataccagactggagtctgcagccttctgagtcctgcgctatgggaggagatatttgttctggccaacttaacgaaggaacatagatgttcttggcataaggtgggaagctctgcttcattaatcttactgctctctcccaagaatccctgaagttttaagcagtttctgcaaaatgctttcttccagtaaaataacaaaacccacccacacagctataacaagagcccaaggcagagaaatgcataggactgtccagctgagggggactggtctctccttccccctccttcctgctctcccccttcctccctccctcccccctccctctcttccttcctccctcctcatttcttctttctttccttcccaacacccatgcactgacatctgctcagcccgccctttgtccgtctctgcagctggcttcagaagatgatccctccaatcagtcctgcggctttaaggccataacctaaagcaagggttagtcctcagactctgtaggatccgcagtagatttctataaagactaaaaataaaccttagggctgacaagcactttgttcctgggctgtggataagatcagctcgcatcccggaagcttcctgtcattcccgcctgtgcatctgtgttctgctcacgtgtcacatgtagctctttggtttacggagggcaggtgttattctaatttcatagagaaggaaatagacacagaaccgaagtagatggcctgcctgagattatccggttttaagcagcaaagctagaactttcccgtggacgacaggtgctgcattttctctttctaatgctctgctgtgcccacccaaagtcagactctgttaccatgacagtgaagacagcagcagttcttgtagattacgtacaagcagaatgaagagccaggggtgaaagtcatgcctgacacacaccgttcaatcgtcaatgccatcgaacaactagcaagcacctcagaactgtggggcatgcctagccaggcttgagaaagccttccagaagtggtggatggcttcagttgtctagcgaggatttctagccggcatgactgtgtcttctcacatatagccatggagggaatactgaggctag

SEQ ID NO: 30082 - DNA, 1097 bp, Mus musculus
aatatttttctaataacttggcccagcacttaattattcactgattctatttctttacccacaagacaagaagaactgtcactgaggccgtagagacagacaatgtctatgctctggcttccatagtaaaactttgacaaattctcatgttttaaacaggtggtgatactgagtaagtgccctcatcctgacaagctcagctttgagtcttttcactaaagtaggcaatcaacaatcgaaaataacagtaatgaaaaccagtgctgagactcattcatattgttctcagagaaaaatttgaaatacacacacatttggtgcagataaaaattggatttacgttgcctcccaatctagggcgcactagtttttgccaagctggaaaatggttttgttttacgttgatgagatcgactttatatattgagttggaagaaacccagttttacatgcgcagaagttggttaatttcagatatttttataatctttgaataatttggtaaccaattggccatgcaagtagcagaagtgcatgtatgtatgcatgggcatgcgtgtctgcgtcgaggactcgtcggacaggtgctaggtgcctccttgtctgtttttgttggttctgctctttggccaaccttagtctgcaggtctgatttgatgccttctttatgccttacattttacttttattttggcttcatggtctgtgtgacataaaatgatgattttacagctaatgaatattactttgtaactaaccagctaatattctgcagttcaagctaaggccacagacaaagtcagattctgtttataccatagttttgttttgttttgttttaaatcaaatatgccaacaggagcctttggggaagaggtgaaggaaggctaagtctaaccgtgtaagtgggtgtgggggttaagctatgagactgtgatgtggacatcaatctcctgacctgtatattaccaaagggagaaacaattccagaaatatttttggtatagactgtttaaaataaaaacaaattgtataatttattacatgaaataaatttttaataaatcattgactacagatgaaatctggaagtgcaa

SEQ ID NO: 30083 - DNA, 1364 bp, Mus musculus
tgggcaactgcaaactttattccacatactgtctgggctttaagcagcctttgtgactacatatatatgaatgactgaaattctaggccccatacctctgtgttttttgttagttatacacaacaaaacaaacaaaaaaacaaacaaacagaagaacaaaacaaaaaaacaactagactgggggcttagtgaagcctcttgggaacagccatgccaaagctatgtttcttaggcctgctctgtggagcgtcactctacccaaaacatagccatggggaaagggcccatggaggaatcattcggggaaatgcctttgtaaatttgctcatggtgtattaaatgctacaagaggatttctttagtaaaattggcctgcttttccaaagaggagccggttctctgaaatgaaacactctttgtacatactctcccaacacaatgggtcaaatgtgttaacttctggattctactcttgtattggtatgacactgagctgtatatgaaaagggagtcttccttgcctacgatcttagaaggtttgtacacatgagcttagccagaagctgttttgagtgcgtaagttgggccatgtgagccactgatgcacctgcaagtcgaggctggataaagaactcactggtaaatgtattctacctttggggaccagacactaaaatggctcttaggtagctgtagtaactcgttacatgggagtaaacctggattgaaaggctctgtgctgttttctgtgtggattggggactgcaccataaatgagatgtagccacaaaggccccgtctctgtggggcctgtgagggtcagatgctgctgccgatggaattgctggcagtgcagcttcctacgcatcaggccaaaatgattttctagaacaagtgatctatattgtgtgatcatcattttgcttaagaaaggccagagtccagagactggagatgcttcctcatctgccgagtatcagcagttcttggcttcagctgctgaatagataataattctaattgaagataaattacatgaacccacatgtgaatgatagatatggtacaacattttattgctggtgcataaaatccgctgcagttttggttattaaccctttcctttttaagcacttttaaattccagctctgttcttcctagctccggcttgagcctaaggtcaggtttttctcccccaaccctgtatgacttacctaagtctctctcctgttcacatctgcatgttagaaggactgttcctatctctgcgggaagcacggacagtccttgggatgcttcctgatgttcccgtgttgccctcaggctgtggcagtggagggtaccgggcaggcattgcctaagg

SEQ ID NO: 30084 - DNA, 1301 bp, Mus musculus
ggacccagtgggtagagcggacagtgatagtaaagcaactataccttcagtttaaaagctgctgttttaaaactggaatcaagtgcccaaaggtggtcattaccgggaacctgaaagttaagttctgcctaagtgacagatgactatagtaagttttgaattttgatatatttgttgatgaattattctgttttagtgaagggggaaaaaatctaaagacatctcccctcctttttgaaaacaagaaataactgaaaattgaatggaataatatgaaattaaggtagatgtccagtattttaaaattacaatattgcccaaaaaaaattcttggtttttttttttttctcatatgggatcaaataatttaaaattagtacttcaaaacactaatcttaatcagttctgtactctagtcagtatggaacatcacttcaaagcaagccattccctgaagcttatactgaagtcaggaacacggtgctcagacacgcctggggcgactggaagctgatctcaccattcactttaggttgctgtcttaggggttttttaatgagctatttttgtatgagaaggtagttacatccaggtggttaaattaaggtgtggtagtcaccgtcttggtgcaggtaaggagtgagataccactgccctgaggagtcagttggaaactcgtcctcctacctcttctgacccacctcccattagctggggtttgagataatggcaacctgactggagtatcaaactataccaccagctgttggtaaatactagtcattgatttgtgcctttcttctgcagtagagcgcatacttgcctctgctgtggtacggctttcacaaaggattttcttttcattgttttgaaaattgctatattaatttttataacagagaacctagtaaattgctactgtttatagtctaaaattgaaatagttaaagactattttaaacatctgaccatgttagaatagttggggtatttaaaaattacaagtaaaagtacttacgctgtactttgtaagcattcatgaacttaattcttatttaaatagtgaggagttttttaatgagcatatttatattgtcaaatatgataaacaaaaggaataaaaatcattgtcttgaagctccattgttctgtgtattgaatgtttagaatgcttctagttatgttctaaacgagaggtaactcagggtgaaagggctgttctgacttacctgtggggtgggaaggcatggacaccagaaatggaggcacttggtcacactacacccacaagaaggaggcaa

SEQ ID NO: 30085 - DNA, 1201 bp, Mus musculus
aggcgtccaaggcctttctttgtgtcattttatgattcatagtttctgctaattataagcatggagtagcctcaactgtattagtttcttattctgacaaagcttactaaataggtaaaaataactctggattttgctaatcttataaattgttttacttagaggttattttacagaaagtgaaagctgagctgtgagtggctttgtgataaatgatcaggaactcctgtgaagccatcctttaatttaagcttctgattttaattcctcaatatgtgatgtgtttgttaagccgtgcatttaaacagtattcctctgtccttgttttcgttagttaagttcaaacctccggcatgtgagggtgtttgaaatggacatcgatgatgagtgggagattgacgagtcttcagacgatgaggaggaggctggcgggaagcctgtgaagatcaaggaggaagtgttgtcagagtcagagacagaggctcaccaagacgctgctgccctagacccggacgtagtcatcaaagtggagaaacttgaccctgagttggactcgtgacccagcttgacagcattgtgttagttaatgtggcaaaaagacgtagtggatggactaagaatgtatcggtcacactgagttgtctgtgtatcaaagaaataaatggtaaattttattttttcatactctgttccatccttgtggaggagtgtcactgtggcagacccctttcttgctggggttttttcctcatattgtgcagagccaatgtttaaagaaaacaaacacagctttgatctgaagagccaggcaagccattcctgtcaaaagggattctccttattcctgttgcaggagcggtacacttgaatagaggacacacgcttgtgattcagcactttggaacctcggggaggaggctggcaaagttcaaggcgagcctgaactaagtttaaatagctatttgggtgcatttcgggtactttttaaaaatacttaaataattacttgtctcagtgtgtgtatgtgtgtcctagctttgtagttttatttccttccaatcgtagtcttgaaaattttatactcatcacatgctaaaatattccatcttttaaaatcagaatagttgagtaaatccaaagggacaccatgaagtattaccttgggtctatggttacatataaaaagctgagtttatgtatg

SEQ ID NO: 30086 - DNA, 1151 bp, Mus musculus
ggttccctttagaaaaatcccagttctgaagaagacaggggtgtggttctcagccactgtgctatctggaggtgttttgcttgtcacagctaaggaagaaaaggggaggtgagagtaagccattgtactagataggatccaggataaatttcccacagtgcacagaagcatcacactgtgaaggctaccctgctcttagtcagccggttaccctgcatgtcttccaggaatactccccagtctttggctgaccatgttgctttaggcgggcaggtcaggctctaagactgtctacacctgcttgccttttagcttattttaattaattcgaccaactttaaccaaaggttataactaaaattttttaaaaagtaaataatactgaacagctaatttttatcagaagttttggttttggtgggttttttttgttttgttttgtttttttcatccttccaagtgcttcaactctgctaagacatttagtgctcgtcataaccctttgtggtggctgttagctggataacatgtaggcaggtatttcctcactctgagccttgcctgttccccccgctgtggtgatggtgtttactgaactgaatttgtaagtttagggtgaattaagtgaagtatagtctcatattaggaattgtaccaaaaaaaaaaaaaaaaacaaaaaaaaacacttttaaaaggaggtcttggtgaggagtgagatacaagcaggtgtgtgccttaggccggcaggaagcatgcccagctagctcagtgtgtgctcaggagctgggagcccattccgtttccagtatttatagtatttaaccgctttccttccttatactcagagcctgcattttagctgtcacttgtgcctggtgcagtttagatgtggggcagccctgggctggcctgggcctcgtcccctgccacctcattctgtcctggccctgtgcattttgggtagtgttttagcccgtgcgtcccctgcacctgtagtcactaacatcactgtttttctttatttgcctgctcttcatctttcccatatgccccccatgcttctcttgtgtgcattttttttctaaagcttagaagaaatgtgtgttgttgaggggtgcacatacggcagcttatgtgtggtgagatcagag

SEQ ID NO: 30087 - DNA, 1197 bp, Mus musculus
ggatacctcatagctgccatggctgcctcgttgcagggttccagtggctgcactcacccatttcaatgtctcagccacatggaaattgcatggctcaatttccacatcatcttgtttgtttgggatcaagggggtgtgttcagtcatttagcaatgaatcctgatagggtatttgtgtttctttccatagggttgaaagtgtggtctgatccatttggcaggaaatgaggctgtcagcaagtctgatgaggaaagtggacgtctttatcctgtgcactccgcagtggggacaatagatgcctcactgtggcagcatggcatggagagggaactctcatgctgctagccagaccccttgtgatagagactgtgtgcaaagacagtgcttcccttaactccctggagaacctgaacagatgccaccattaggaagtgccttgcggctccattgactttgcaggagcagagccagcctgcaaggctgtttgtggaagatctgctgctcctgcagtctttatcacttccaagctgtgatgtgaacacaagcaacctgtgggctcaaggtccgtggctgctctgacaccttctgaataagcgatttcagtgcaaatggccttgccaagctgcctcgcagggctcttggaggatgtttcagttgataaaactgtttgaagacaggatccttggcactgtttaagaatatacactgctcagcttaaccatctcattgaaagtcactgtgtgtggaagtgaatagggagcgagtcacactagactataccacacacagtagactcctgcgtgaggctgcaggtattaaaatggtttctcttagtttgctggtgtgtactgtttttatattttgtgtgtgtatatgtttgttttatttggatgggtggtgtttgttggctttggattttgttttttgagacagggtctgtcagaccagtcaagccttgaactcccagagatccacctgtcactgcccagtagaatttttttgtaaattgaattctgatgtgaagaagtagaagtagtgctattgtctagattctatttgagtagatatccgtgtagtaatagctatttgtagacaaggtgagcggcacacttcttgtggcagctgtggcattaggttctccagagaaacagaactgatgagatgaatatgatttacatcagtgacttacaggctgt

SEQ ID NO: 30088 - DNA, 1113 bp, Mus musculus
gggtgagagaaggccatcagctgggcaccccttgtgcaggctatagagaaaggctggggtgggacccagcattcaaactggaactctccggaaccatttgtgtgagtttaggaaagttacttcatttctctgggtcatgacttcctttctaatttctccgagccataacttccttaaaaggggacacagactttataggaataaaggagccacaaagattatgtcctataaaaccacttaagttaatgcttaataattcccacccattaattttttttttctttttaaagataagctggggaaatggttcagtcaagaaagcacttgccaagaaagctggaggactttaattctctcccaagcagctacataagaaaccaggtgccatggtgcttggcccacacctgtaattccacagctgggaggcagatgagggtggatgcctggggtttgaagaccagcaggtctatcccaaccagtgagctccaggttcagtgagagactgtctgagaaaatgagatagagaatgactgagaaagatgcctgaggtcaacctccagctccacctacctgtgcgtgcatgtccaggcacacacaccactaaggtcacaccacataagaaatgttaaagagcaatctcaattttagtgtgagcatcagggatggatcaacaaagtgatgactgttcatgggttttctgtggagttcattcctttatttctatctatctatctatctatctatctatctatctatctatctatctatctatctatctatctatctatcgtaccattgaggcaaacttcatatcaacatttttaaatcatttaactgaatgaagtataactattccctctttcctttcttcttcttcttcttcttcttcttcttcttcttcttcttcttcttcttcttcttcttcttcttcttcttcttcttcttcttcttcttctcctcctcttgctcctcctcctcctcctcctcctcctcctcctcctcctcctcctcctctgcctgtctgtcttcttaacaactttagtgagttctgttccccaagctatataatttaatgatttaaagtgaatgttcagggctagggtatagctcact

SEQ ID NO: 30089 - DNA, 1141 bp, Mus musculus
cgggaagccacttggaaaacacccactcgaggaggcgtctcctctaggcctgtgagacgctcgcattttcccaggacccctcctcccggccccggggccccgcctcctgacccctccagtcccggtccccgtagtaatgccctccggttttcctcagtctccacgtacgtccccgagggcgcgtcccaaaacccggataaccggagcgctccccatggactactcggagggcttgtccgcggaggagcggcctgcgcatgctccatcggcggggtaggtttctagggaaaggcagtgagcagatcccttagtccgcgggcggcgcgaggcggctggctcccggcggcggcggcggcgaagcggggaaagacggcgcgggggccgggtggcagcgatcggcgaggccgagggaaggggcgggggagaggagcagggaaaggcggcggggggaatctcgcgagggttggagttttggcgagagtttgtggaagatggcgcctgttgtgacagggtaagtctgagggggcagcgagtgctgggaaccgggaaagttgcgggcgtctgaccgccggcggcaggcggcgggccggggccgcgcggcgcgccggggcctcgggaggcggcgcggggcggcgacgcgatggcgcgggccggtgcggggctcgcccgtgcgccgcggtggagcgggctccgggcgcgtgagggcgggcggtggcgaggccggcggctgcgggcggagtgcggccggcgcgcggggccgtaggcaccgtgcccggcgcgcgcccccctcggcgggcctggcggggatcccggcgcagctttgttccccgtgcgtggcccgcgtcgcctgtcctcccagccgctgccctgggcgccggagcgctttgtctgtgtgcgctgccccccgcgattctgcccccagccctttgtttcgccgccttaggctctctgtgggagccgctgcgcgccccgcatcccgtctgcacctccactccgcccgctgtccctcctcccgtgcccctttgttgtatccctctcttcagtagctgggtgacctgccatagccctggcaccagattactgccgttctctttcttccattgtctttctcgtgtgtatcccctctcacctttttctcttt

SEQ ID NO: 30090 - DNA, 3054 bp, Mus musculus
catctctgcaggatgatttattgtatgttttcctttttttttagcctagccagaacatcattataattttaaagaccataagatggcttttattagatgataactaaataaactgaactaagtagccagaagacagtaccttagagactgatagttgtaagtttataaaaatacaaatgtaacttatatttccattttcctctttgcccctttgtttattttccccagtagaaatgttctgtccagatttttttccccctttttagttaagccttgcttgcattcaggcttgtgtgtcagccctgtgtgccaatatgccagattcattttgtttccatccctgcactttggttattccttgttcagtttcttgggaattgaagcagactcattgggctacatttagtacaagaaccacatgtgtgatgttaaaggacacagtctagtgatgccatcatccttgagtaaaaactacctctagattgtggtaagcttttactgtcccttaaaacaggagccactagtaccttatgaatgcagactgtaacttctatggcattttctggtgtctttctggctctctgggcttctgaaagttttcacgtagacccttagactcctctgtcaggaccattgctttccagcgttgctgctttcactcgctgtctcgaagactgtaccactgtaagtgccactgcgaacatctttaaacggctcctccttggcttgtcaaggggaaggccacctgtaagatgtggtggtgacagccttcctgtccaccccaggctgctccttaccagctgttctagccgattctcttcagatcagctacagcccacctcctccccgccccgcctcacccctccaggctgtctcagtggtccagggcagagctcactgtggccttactgatctatctctgcagtaactgttctccctcagttgcgatggaagcaggcccctgcgatctgttcagagcctgagcagtttgcagttccgttgtgctttctgaggtcctagattcaggatgtagttaagtcgataactgagaacagatgagatgcttttaaagaacaaactcttccttacccagctttgtagcttaaagtaagttttcaagttcatggctttattaaaatgaactttgactttttaaaatgcttatatctcatttcggttcttttgtttattttagtaagaattgaaacagactataagtagttttcctgtttgtttgtttgtttgtttgttttttacaaagttcaagaatgtaacaataaaggcattttgctatggttctatgtcagactcctaccacagaatagtgtgaacagatatgtctgtctgctttaccatgttattgatagttcttttgtcagctgcttttattaaaagtcctcttttgtgaatttgtaaatcaatttcaatatatgatgtacaggagtcttgtcccccgttactgtggaatgttcccccctgttgatgctggtccctttatcctcttatcttcttagaaccgggaattcttcagttgtggtgtgtggctgtatttttctattctgtttacagtgcgtctacacagcttcttaaaacatgtcgaaatgcagaatccaagatccaccatgaatttgtcaagagattggaaggcaggccaaaacctgaaaatgtggggtgccctttgtacaattgcagagtcaagcactagtgggagtttgaactggctactgaccgctcttaaactgtggcagtgtccttgggtacagttaactagcagaacctgctgtcactcttcctgccaccatcttaaccttgacagttttgtttcttttctgtgtggtgctggggtcaaatccagagccttaggcttgctaaggctttttgtttgtttgatttttccttgagacaagtgtctcacccatggagcccctcagcattcttgaaagtctctgccttagcctccaggtcctgtggtaccaggtgtggcaggatgcttttgtcattagagaaactggtctgtgtccaaccacagaaaaattccaatgcagtttttaataattaatccactagttatttaatcaaaatctttttgtagggagagattcctgtttgaaagaaaatgctatttgattattaaccaaggtaacagacactgctttccaaagcagctgtgtttctggtgagtactgaacaaatgtgtggttttctgtgccacctttgattcatttttcaagcactgttactcgggatggatggttagaaacatgatattttagtgtttctacttaaccctttcaggaccgagctgtattgcctttctattaatttccccctgtgttgtgataaatgtttgctcgtgttcagtcctgtgtcagtccagacgtaggtttgtgtaaaagctcagttgtagcttatttcttgtaccttgcagcatgttctacgcatccagtccttaaggggtttactctacaaactgtgcacctgcgtgtaagggtcattagcaataagatagaaaattgagcaagtttataccataattttgtagaaaaaggaatctgctcaattccatatttcatccatgaaaactctgcaatacgggcagtttctaggaataaataaaaaggagatgcaaaccattgtagatgtcttctgtgggatgtgcccgatgcgtgcatcatcgtctttgattccaggtacttcataaagataaaattaaattctatattacagtttgtgggctaggattttaccttgtgttttacaggacattgaagtaataatgatgctaaattagtttccttttgagtgtttttaaaaatgattttcttttcttgacagtgttaatgattgggagttgttactaaaagggtttatccccctagccaaccccagcaaacctggagactgctttttagcaaaggcttccttgtctagtacaccaaagaataaacataacagcagtttatgcctttaggggactccccaaaatagggctcatgatacttcatgtaatattaagacaaatataaaggaaggaattacacggtttcaaatctc

SEQ ID NO: 30091 - DNA, 1563 bp, Mus musculus
caaaatcaaaagccttttcaagaagaagtctaagtgactcggctgacgtgatggaattccattcaagtggcatctgtaaactgttatctcccaccctccactccgtttttattttacttttaggaatgtaactccactggggctttccagacttgatgccatagtggaaatgtccgtaagggcagctgtctactgtctgcttatatctaactgactacgcaatcaattcatcaagtcagataccaccaccggagccatcggcaggaggcagtttacagttctttccgcctatttatttctgcattgatgttagtgatgtacacacagcattctgtcgaaagccgccatggacttacaagctttaatggactgtaagccagcatgggcttgcaaaattttcttgtttaccagaatatcttcttatctttccacagagctgtttccatcatggactaaataacttaaaagaagtaaaactgattgcactactgttttccagactggaaaaaaaaatctctgcaagtaaaactgtatagagtttataaactgactgtggatagggaattgttttcacttttagataaaatggatttttaagtagaaactagggtttctaattgacttgatttctgaaaatgaaaacccacacttttattatgggacgcttcctcaaatgcatttattattataaagtttcaagtcctgctgtaaagaccatgttgttttgttttccccagggctttcactgtgatttactgcactgcaggctgtatgataaaatataaataatgtaaaggcagaaggctcttgattccttatccaagtggaagagtaaaacttgatcgaaggacttaaaacattcacatgcttaaactgcggtctggggcgtggggacccaggcacttgtttacagactttgaataaatgcaaagaatttatggtttgtgaaaaatttgtactgtggaaaagataataaattggagacattattgtgtggggttgtgctgatttttgttgataacactccactgaaaacactgttttctggagagccatgtaagctgtcttgctgctgaattgcagtataagaaatagcgatgttttggaactaagttgtcaacaaatttctttgttttatattgtttgtcatatttttatgtagtttgaaatctttaaatgttctcatatcaagattaacaaatataaattgctggtgcatttagattgtgttgaatgagtttgtaaagtttggaactggttagctgctgggcaggtcagagagaagcctgagagtagcctcgcataggacagcagtgcacatttcgtttccaccttctcagctcttaagacctcaggcagaactatctggaaatacaggaagatgggtggttgggtgaacacggatatgttaactagaatttttttttggtgctggctatctgggaatgctgatggataagtaagaagtccccttgagatttgcataaaaggagtgctttattaaggatccaaatctcaaagcctcctgtgagttgtgattatttacttccattgctctggttg

SEQ ID NO: 30092 - DNA, 1238 bp, Mus musculus
ctaaccagtaccccccagagctcgtgtctctagctgcatatgtagcagaagatggcctagttggccatcattgggaagagaggccccttggtcttacaaactttgtatgacccagtacaggggaataccagggccaaaaagtgggagtacgtgggtaggggagcagggcggggggagaggggagggtatagggaactttctggatagcatttgaaatttaaataaagaaaatataaaaaaaaaagaaaagaaaaaaagaaaagaaagaaattagtcatactagtgacttaatagcacacctgaaatctctagaaccaaaggaagcaaacacacccaagaggagtagacagcaagaattaatcaaactccggattgaaataaaaaaaaaaaaatagagagaagttccgggtgcagggctgccactggaggagagcaagttgctgctctagcaagctttggaggcagagccgccgcaatgttccggatcgagggtctcgcgcccaagttggacccggaagagatgaagcagaagatgcgtgaggatgtggtctcctccattcggaacttcctcatctacgtggccctgctgcgagtcactccatatatcttaaagaagctggatagcatctgaggacaggcagtcaggtggatgcatggcatgaagacctggtgacggcttctcctcctgtctgcagctgaattggcccagaaaggtgtaaggctgattaaacggacatataaactacttgttgagaacaagtaggactttgagaactgacctccatagctgaaatataaagccacttgggaagtgcaaaaagatgtcttgtgttcatggtgcctttaggcccatgaactccatccctgtgagtgttgatggagtggttaataatgtcaggctctaaggggagtcatttctgtttaccacttctgttcaaagtgttatttgtgaagtctgtttggaagtcagcatacacccacaatgacatttaagcacagtctatatttttaataaacattctgatgaagaaaaaaaaaatagagaaacaaaacaattcattgagaaaatcaacaacatagataaactcttatcctgatacaataaacaggataaagacaatctccaaattattaaaatcagaaatgaaaagaaggaataacagcagacaacaaggaaattcaaaatgaagtattacttcaaagttaggaaatttaagtgaaatggacagtttccttaa

SEQ ID NO: 30093 - DNA, 1263 bp, Mus musculus
ttgtagcaagtaatgtttttggtgttgatttttaaagagaatggattgtttacactgttaaaattggattttgcttcccaaaattgtggttgtattctcgtgctacaagagaaattgaaggcttctcctgaattggagccaccagctctcctaccctttttgctcttcagggttagaaacacccctagacagtttagacagaccccctatgaattactctaaggggggccccctccactggtaaaaatagcctctgtacatagtgctgacatgctgctttctcagcctttgttctctaggctcaaggcactgaagtgagtgagacagtgagcgtggaagcagctccagatggcctactaaagaggagacctgcaagccccacatcgcttccaagtttgagatttggtctacattagatgcaactgctcagaaaaccttcagactccctggaaaggcccttatcttgtgctcttgaccaagctactttctacccttatgggaccccttttgattttgcttctgctttttaactataggtccatgtgtgttagatagttgcctttattagagcaagacttagtacagtgaagcttttagttttgagacaacagtaccatgccctaaaggatcaagtgtgtcagggacaagatagtgtctagttctaagattagaactactaacaaatagaagtggggaatgaaaaagtgaaacataaaaacataaaaattaggcctttaggcccaggcttgagaatgtgacctttgtgtctcaatgccccaagatatgctaatcataaaacagatagtgacattcctccacccacctgcttcctgggttctgggagtgtttgctcaaaaaggaccaccctgaccattcatggaaccttctatgcaaatgtgtgtatgtgtgtgtgtgtgtgtgtgtgtgtaagccaaatattgacttttatttgctgcagatggaccttacttgggtcctctatccacgggcaaaactcagggttcaggttacaggcaggcaagaagttggcaagaaatgacaaatatgaacacaagggagtgtggtatctgaatgtaatttgtcaaattgagcaccagtcttatattgcagacgaataacaagaaggctaggcaaatacatttgccaaggtacactggttcttacataaaacaaagagaatgcatacataaaaagatagtgggagccaggccatgtttacaactgagaataggaacaacccttaattaagatcagctaaacaca

SEQ ID NO: 30094 - DNA, 1169 bp, Mus musculus
taaataaggctgctatgaacatagtggagcatgtgtccttctcaccagttggggcatcttctggatatatgcccaggagaggtattgcaggatcctccggtagtactatgtccaattttctgaggaaccaccagactgatttccagaggggttgtacaagcctagtttgccataatttactacatttttaccatttagctgtatttttctgattaattcatgaattgagaattcaattttttaggattggtatcattatgtaacaaacaaattttgtaaatttattcattaatttatttgggtgttctctttgtaatttccatttaaatatcccagtaaaaatgaacacctaaagggggggaggggacagtggggagtggagaggggaacatcatctggtactgggtaagagaaaagggctgatgcactgagggccaggagaaagaatggaggtaagaggttgggggggaccctaaagaatgtaccagctggtagtggtggcgcttaccagtaggatttgctgaaggaggcaaaggctggaggatcacgagttcggggccagcctgggctacacatttgctgggtatggtggcacacacctttaatcacagcactagggaggcagtcaggtagacttctgggtttgaggccagcctggtctacaaagtgagttccaggacagccagggctacacagagaaaccctgtctctaaaaacaaacaaaaaacaacaaaaacaaacaaacaaacaaaaagaatgtaccagagacatgggaggtgagagactcagttaaaatgccctactttggggagagggaacttgtacagccaacctccagcagaaagacatggcattaagtgaagggtgggggtcccaacccacagtaaaaaaactggcccatcttcttgagtttcatgtgttttgcaaattgtatcttgggtatgtcgagcttctgggctaatatccacttatcagtgaatgcatatcatgtgcgttgttttgtgattgggttacctcacttagtatgatatccttcagatctatccatttgtctaaaattttcataaattcattgtttttaatagctgcatagtattccattgcataaatgtaccacattatctctatccattcctctgttgaaggatatctgggttctttccatgttc

SEQ ID NO: 30095 - DNA, 2091 bp, Mus musculus
tagtgtttcttggtgacaaggaggaggtccttaggtgttcttagactgaattctagccggatggtgtaatgagggcagggatgagcgggtgggtccactggggtctggagggattgcagctttcctgtgtcattaactcaggcagatgagcacgtggtatgtctccttttgtcacagctttcctcttttttgttgtttttctcttgtagcagctgctggctttcttgaagagttctaagagactccgaacttgcgagataatgaagtcgcctagggaatatttttatatgttttatacagtttctatcatgaagtcaatgggcatgcggatcaaacccaaaagggcatatttttgctacgctggacacagaattcagcttgctttgaaagaagctttgggcttaaaaggtgtgatgaaagttttagttccgtttctaaaagggaaagagctcttccttttagacaaccgtccccaggtgcacattcctggctgtccatacccaggcagctactcccttggaatcatggcattatgaacaaacagaggagccatttccagcctgagcttgtgttggcatgctgacatctgttcctgaaccccagattccatgttgactttggccctaagatcttaatacacacagttgggctgttacagaagactcttgcctgcaaaaggtccctggaaaacatctagtgcttagaaaatgatccgctaggacgtcatgggatccaatggaaccacaggcgccctgcactaaagattcctggaccaacaagaattcagcactgactcctgctcccgtcagcctgccccctgtcattctctggtcacttagaagacacagagactatgactgttgttatggacttaatctaaacagctggcttttagtctgattgagtaaaagggaaaatggtttaaaggcaaccaaaggccaaaacaaaacactcctcttatgcaaacacgcccttgagacttccgctgttttactcaggatcctgctgtagctgatgcttagtaaaggcttcctaggaagatcgcaagttgaaggctccccgtgttatagagtgttcaggggatagcctgggtgactgagccagatcctgtcttccaacaaaaaaagtgaagagagggctgggctatcactcagtggtagagcatgtgctctaccagtcttaggggcttcttgcctggtagggctctctcttggccttgttttataaaacgcctcaaagtacataggtctgggatggggagggtggcggggcggcaagctttatgccctacttccattggtgtgatgcattaactactgggtgtggttttggggttttttgtttgtttgtttcttttttgttttttgcttttaatttggctgtacaaaaataaaatagaaaaaagtggggtggggttttaaaaaaatataccccagggcattttctgttaaaaaaatttctgcttctggacacaaactaacttttttttttcaaacattttatgcgtgtggtagatgcagtttgatgtgaacccacactggcagctagtgacttggtatgtgtgttgtgtctactaagcagagatgccagtgtggatgccaggttcactgtggtccaggaagcagagtgagtgctcatgggagtaatgtttgtgcagctaagccagtatttttacttaaacaaacaaacaaaaaaagtatacattttgcaaaaaaaaaaaaaaaatgacgtcctttaaatggtgatgggctaatatgtaatattcttcagttttaattattttttaattttattcaatgtagagcactttctatagcaataaaaaaaaacaaaacaaaaaaaaataagcaaagatatttaagattgtatttatatacccagagtacattttaaacattttctaatacttgagcagatgggtgactggcttccagagatgccaaaaattaaacattcaatacattcaacacataagctttgtcctggtttgcacagcctggtgagaatcctgagggttcccagcatagttggcgtttagggtccctcctcctccctcctccctcagaagttctgaggatcctcgacaaggtc

SEQ ID NO: 30096 - DNA, 1215 bp, Mus musculus
gagtgcgggccctgctgaaagagctaagacacatcttcctggaccacgggtcactgagacagagtagggcaaaaccacagacgagggggatactgcatggtactgaaatgggacacaagatgctgagtggcctggcatgatagtagggtgatacaggaggatgaatggctccaaacaacgtacggtgggcatttccgttctgcctaatctttcttaagaaccgtctcctgctcggtttagccgtacaccgtgtcgcacctgaaactctgcgcaggcatcatgatcactgcctcgcacaatccaaagcaggacaatggctataaggtaaccccccccccagcctcccccaacccccacacacgctctctcctcacacagtggaaccccagcccctcccagccccccccccaacccccacacacgctctctcctctcacagtggaaccccagcccctcccagcccccccccaacccccacacacgctctctcctcacacagtggaaccccagccctgtgttcttcgggagtgggtgctctgcatcctgaacctgctaaatgcattcctggcttctctaggtctactgggacaacggagctcagatcatctctccccacgatcgcggcatttctcaggccattgaggaaaatctagagccctggcctcaggcttgggaggagtctttggttgacagtagtccccttcttcacaaccccagcgcgtccatcggtaatgactactttgaagaccttaaaaaatactgttttcacaggtaactgggccgtggcttcacttcagctaatgtgattcagccgaattctatcaatgtctgggttttgatttgatcccctctgcctggtgcatacatggttagctgcatttgtatggggcggcagcagagctggccaccttttcttaaagaaaccggtaacaaatcctcacggcattgctggctacacagagcctgacttcatctcctcagatgtgctattctagtgtacaagcggcacaagtgaccagtcaggcaagccacactgagatggctttatttaccgaagcaggtggccaacccacggtgggctaagtttgaagtgttgtaaatatatatatatatatatatatatatatatatatatatatatatatatacagttgtagctgtgtctatatatatgcttgtatggatacaactatatgtatatatgtgtatttaaaa

SEQ ID NO: 30097 - DNA, 1179 bp, Mus musculus
ggagccagttctgtctcactgtttctaaatgtcagtaaaaatggataaatagttttccttcaggctacttagcatttagctacttagtatagaacaattcctgagccagattaccactcaagcacgattcatcaacgccacctcattgcatttgtgggtagagaagaccgcagttgcctgttctgtttcttcttttcatttacaattgcgaccatcattattctctaatggtggtgggacttgaacctagggccctgtggatgccaggcaagcactctacctgtgagctacagtctcagcttttcctctccttaaacatgaggaaaatggagcccttcatggctgaggtgattccagctaggatgtcttaggggccagggagatggctcagtgggtaggaacacttgctattctagtgtgaggacatgagttcaaatctcccaacacccatgtgaaaatccaggtataccatgtgtacacctgcagccacagcacagcgtggggtggagataggagcattccctgggaatgcagctctgggttcagtgagagtccacatcagaagcagagggtggagaatggcagaacagaacatggcacctggcgtcctctaacacccgcctggcttctgcatgcatgcactcactgtaggtgctcccacactcgcacttgcacacgcgcccattccctcatccacgcactggcagctgagtcccgaccagtgctgtctgtgtctttctgtgcttgctgctgtcctgcttaggtgctgtctgtctgtcgcttcgtcaggcggttctggggttaaacataagctctgtaggaccgaacaggaacacgatgctccggtcaggcatcagctcattcagatgagataagaggaacatggggggaacgtggggcagagaaattacactgctctctgcctcctggagcctgaatgtcgtcgtccaaggtcacaactctgggccttcccccttttgctgaaccaggcagagtacgctacagtttctgccctttttcctctccatatgccgtgaagaattttttgttgtcaagatttttaaacaagaaaaagttggccaaccaaagacataggcacaccaattttggaaaactataaaaataggaagtttatttgttgggtgaagtttactattgtaggcctgctaaaggcagaga

SEQ ID NO: 30098 - DNA, 1117 bp, Mus musculus
tcagtgttctttggggaccatttacagagtagcctgtcagatgcttggagatgggctagcatggtctagcatgggctagcggggctgccctgcttgtctcctctcagctccgtgcctggtccctatctcagctccttgttgtgtcagatgtgttatggtcactgtggagctgtgagggggcagcattgcacagctcctcagagctcaggcctcccacacaaggcagaagtgggagtcttcagaaaagaacggggaactttccacacacatccacacggagatgctgagctctggactgctgtgatgtcaaagtgatgggacctttgggaggccgcgggcttacagaagtcttcctcatgccgggcctcttcctctcatgccctcctccccttcccagctgtggtgctccagaggggaatctgtaggctctttccactgccccgttccagcctgcaagcctttgttttcaaagcaaagcaaaactctaggcctggtgtgagagggcactcccatagtctctggaggctgaggcaggaggagcagagagttcaagggcagattgtaccacattgcaagacttgtttaaaaggaaaaaaactaaaaagtaagattccatgctggttactaagacccgctgtgataataatttgcttctggccatttgagagaaagtgggtgaccttggaggtacttgggtgaccttggaggtacttgtgtgaccttggaggtacttgggtgaccttggaggtacttggtgaccttggaggtacttgcgtgaccttggaggtactcgcagatcagagtagtgccctggcattggtttgtgtgtaaaacacacacttacacctcgaagcggctgagatgctcagctttggttgtgagtttcctcttgtaaaagtgaaacccttaaagccattagcaccctcccctgtccccagcccacactaacctttgttctactttctatttctatgaatgtggctactttacatggttcctgtgaaaggcagcctttgtcttcttgtttcaagtttatttaagtagtttcctcttgctagctcatagcaggttttccctttcaaggtcaaattatacctgcagtgttttgtgtgccacg

SEQ ID NO: 30099 - DNA, 1151 bp, Mus musculus
gggctggctttgaatgtcatcctcagaactgtcctgactgtagcttctccgcccacaggccaagcccacccttcctaacccacactctttctccctggtactcaactactgcagtgattattattattattattattattattgctgttattgtttaatgctaacacttaactttaccttgagttgaatgttgtatgaaatttactcaatccatttcttttcattttcacaacagtacacatagacaagtgcagagaggttacataacttgttcatgatctcataactaatttgcatgagaactgtgttcatcccctcctagcccctacctctgctcagcaggatggtgccctccatgggctgcacttgggctgtattagagtgtactctcaactccaaggacagtgcccgacacatagtaggtactcaatgtatctttgccatgttgatggcgaggcactgagcagtcaagtggcatggccatcagcgcagaggtgcagggacctatccaccatcattctgacagcctaagacttccaagccctacaggctccatggtgctaagagatgccagtactgggcaggtgaagggggaggctgactggcatggccaatcgatctccagccaaagcccatctggcctggtgaccctgtggaggatatttgtacattatcagcagctgaatttgttagtgtggtaacagaacagtggcatcgtgttcctgttctgtgaggtgaactgaaaactgacctgggggtaggggtgtggaaaggagtggcaggtctctctcctgccttctccactcccccatggcacaggaggagaggaaacacaagaaattttgctccctgttttgcattttcttcctttggcttcttgtctgcattccccttactcttcctggacaggtcagccctctgcctctgactgcttgaatgtcatcccttttctgcagaaagagaatgaagtccagattggccacactcccctgcccctgccccctccctccccagccagccctctccctaggaagcactgtttgtctgagccccagctcactggcctttcccctagaaaacagcgcctgattcacatcctctctgcccctgttcagccccaccctctcccttctgcttccaaggccagctgc

SEQ ID NO: 30100 - DNA, 1879 bp, Mus musculus
aggaaactggctgaccagcctgcagatccttttgagctcagaacttgggattggaggacaaaagtctcagagttattgttgtttttggttctaatccgtcccctttccagtcctggttgttgtagctttagatggcatggacatgaataaattacatttatggttcctcctccttcttgcagagacacagtgtgtggaaagagcattcatgactgcagtgttccaaaaacaagatgggtctgaaataattcctcaggcagaagaaacgtgaccctttgtcagtctgcaagaaaggttcctgggagggtgcccttgatgtcacctgaggtgcagtgggcccttgtccatttttattatgggacctaaggtgaccatgaggaaggaagaaaggggtttatttaaatcagatatattggttgttcctgaatccacggtcactcccattggtactgaagagagctcatcttttacaaactcagtgttttagtatggtttttgcttaccctttcaagtcacaggtaaatgtttcataaggaaatcacagtttttagattccctgttattgctagtgtgggacctgtagctgtggggtctgacatatttatttctttttgattgtttcatatccacactatagggtcacatatttatttttgtctgttgataaatgatgtaccactgccacatcttcctttgagccttgaaccccttggaaatctgatttctcatagaaggaacaaaacataccaagatttccaggggctcctaagatgctgaaacattgcaaaagaaaccagattgcaatcaggtgtatggcagctgacagcttttcagaagtaggaagtgtgttttgaaagtactcaaacacacgcacgccttccttgggatggcgaggaccctgtgccttcaagcagagtgcagctcacactcaccctgcttctagctggtcctgtgtagagcatcacccatgtgtgcaacagcttttttttttcttttaacatacacacaaaggcttaggttagggaagaccaccagccaggagccctggctatcggaattggtcctgccttgggctctgttggccctcctgttcctggaggtctgctgcagcgctgttggtaggaaaggagccttgtaagtctgggctgtaaggagagaccatcaccgttggggtcatttgggatctcctagccctatcaaagggacactaaatggccaggagggatgtaagactcccacatggtcttgggtcagaggagaggtctctccataaaccaacatgcccagtcccagttggttggagcaggggttgtcagaggagggtgacagtggacagcttctttccacattgtattttattatttgaatgttttaatgttgaattttggacatgttattactgttcaaaaaacactgactctacagtaagaaaagagcaataaaacagattattcacacctgtgtcttcgtgttgtctgtttttcaaactctgaattttggctttacagctaggagtgcaggaggctttggtatgcatgtcatcccatttgcaagggcatgtttgagctatcagttctgcttccagtatcagtgccagagtattgatgatgtcgggacacctttccacagagatgtgaatattagtatcaatgacactggcttctcccattgtatgcacaccattcatcagcacaagattccattgggccagagtagcatgcttacatactcctataggtaccgcaccatgtacctatagtaaacctataggattggttggaaatggtcacaactggtgacctagcaactctgtgacttcatgtacacttgggggttgtcctcctttgccactgtttgtcttgtacacttgagtcagtcc

SEQ ID NO: 30101 - DNA, 1182 bp, Mus musculus
tttgttggatggaggtgttaagcacaagctggggaaacaggaagaaggtggaggggatgtggagtatgagaagcaggctttctgaaaaccaggagagagcttatagcttcaaataagctccaaagatcaggtagagctcactccctaccttctgctctaacaaaaccctccattctgggcgacttaaggccacagaggttgggaagatggctctgtggctaagagcacgtgtcccgtgagtataaggacctgagtttgaacccctagcccctactgaaaagccaggcaatggctacacatgccagggcagagacaggcagatcctgtgagctcgctggccagcaagtctctctgaagtgaggagtttctggttcagtgagagaccctgtctcaaggaagtaagatgaagtgatagagcagagatttgaccttcttctttgacctctggatgtgcataaataggggcatgcagaactgcacatacatggtgcacgcacatataccacatactacacaaagcaacacaagtgcattgcttcagagttctggaggctgagatgcaaaaatcaaggtatgtgccgggccgggctgtgctctctctgaaacctccgtgaggttcctcctgccatttcgcagccactggtggtttgctggtgatactcggagtctgctggcctgcagccactcagatcctctgtctgctcttactgacacaggcattcctcctgtgcgtctccgttttcagatgccattttcttgtaggggtgccagtcatattagctgaggggccctctctactccagaatgactgaaacctaattaataacatctgcaacaaccctattttcaattaaggttctatattaagagaccaaggggttaggacctcaacatatcttttgggcagtaaaacagttcaatttgtaacagtgacatttaaaaattcacagcatttgttgttgttgttttgtttgtttgtttgttttgttcaaaaagaacaagtgttgatgaggatgcaaaaaagtggaactcttgtgctttgctgaggagaatgtaaaatggtcctctaaagtgaagtgtagaattgccactggacccagcacttccacttctgctgtatcatatcatacaatatcataccatgccttataatatcatatcatttatctatataacatgtgt

SEQ ID NO: 30102 - DNA, 3039 bp, Mus musculus
ccgagagggaacttctgtttttagaacatagagccttgaagcactgtccgccatggcatcactcacagggatgaaataagaaagtgggttattgaattctttaaccgatggcaaagtgtaagagaggcccacaagctttcagtgcacaggaaggcttaaggcttacacacctacacatgcagaatccacaagctccatgcttgtccctcagaatggctcttgctgcttttaatagttctttgttgattttccatggacaatatgtttgtttcatgcagcaccatgttcattgagagttgtgtatgatgttatcccgaagtctgtattttccgagggcatcagttcaagtatcgtagcttctctttttattcccaacaaagacaacaattaaactctgccttgcctttttgcaggagaaaagccgtacaaatgcacctgggaaggctgcacgtggaagttcgctcggtctgatgaactgacgagacatttccgaaaacacactgggatcaaacctttccagtgtccagactgtgaccgaagcttctctcgctctgaccaccttgccctacacaggaaacgccacatgctagtctgaaaacctgtctccagctcagtgtgattccccgctcttcctggcctctctctctttctctctctctctctcctatctctttctcttctccttctgcccgttatctaactcatttttatatgtacattttaatttcgattcagctggtctggatctctgaatttatatcattcaagacttccatatggtcagtagttgatactctaaccctcccctccttaccacgggtcagacctaaagaatgtgaacattattttttccggggatgctaagcaaaccctccttacagatacatttaatgtaacgagaacaagggaacatgtaaactaacgaccaatttgtcggtttctccatgtattcctcaaaagaatgtcaaagtaaatgtattagaaatgcagtatccagcctattagtccttgccagagaccttcgactttctgccacattttgtgtttgacgacagaaagaattctgtccctgttaccagctagcgagacctacaagatgtcaagctggacccaccgtctcgccttcgccctccccacgattcgcctgttgacctggctcacctgctcagctaaatcagctcctttgtcctctgtggcacctgaagctcatgtggagggctttgacatccctgggagctgagcaggagctgttgccttaggtgggccatgtgctcccatagtgtgaggaagaaggagaagatattggaaatggaggagggagtcagcgattcctggctaggaccggctggaccatcaacatctgggaaattcacattagctgtgcagtgcatttgttaaatgtccatccccaggcacaacttggccgagcacacctttgctgcaaagctggataccgagagggttatccatctgtgccaccaccacctccgttcctgcaggatccttcattgtcgatcatgaagccttgagagtaaggaatccacagaaatatttgttcagtcatgtaaaaaaaaaacaaaaaacaaaaacttttgaggcagtataaaatggtctcttctccccccaccccccaacctactaagagtgtttttgcaaacaggaaaacattgagtggtactaatactcccatatccaatgagccacatagctttcatatggagcttttctgtgtgagctgtatggtgccaaaccagcaatcatttgtgtctatgacacatagtataaaagagcatccactaagcttgagcagagtcactcaattaagacctgagtgacactatttgtaaatatacctagtgtgaagcacatagatctttattttggtgacttttttttttttttgaaaaatagagaaaaccacaattcagggatttatatatgtagcttgaagattcccacaagtttctgccagagctagcaatttcctgtcaggtaccctgttaggacaaaccagaagcaatgactcgtgttgatgttgcagataaatagcaccattatttggggggaaggttttttttgtttcgttttgtttttcaaaagcaggcttttgaacaccacagtctaaatgccaatgaaaacagttcatagattgcagaaatgtcactggttccaaatctgagaaataaaatgggcacaatggtcagatatggctgcctctgaccagtagtcccttcatcccctcacaaaggatggaggagaagggggggaggggaatcctgaagagttatcccagccacaactcaggatccaacactacctgaactgggaggaacaccctaccggattgttcttggatgtcggggagtgagaggtcttggagccctgcacttgcagggaacttgatttgatggcactatgttcatagttgtgggggctgcactcgggaggccctgctcagccctgtgaaccaactgaggggggaatgtgggtaaaaactgcaaagaaatgttatcttagctcttgggttccttttctttccctttttagcactgaaaaaaaaagtctgtttgggctattaaagcatgctaattaggctcttgcctttctttttgtttgcaacgatgacatgaattgaggagtgagtgtctcttgggaaagcagggtctcccttgtcagtgttccttagcgttcatgccaccaccatcgtgtcttgaagtggttcttctgcagggcactgaagagtcccgtttgtttagtgtttgttccaatttgtatgctccgacccagtgagcagcggggtagggtgcaaggaaggacccttagctttgcttcaaaccaagaatagttaatagcaccatggcgtatttaaattttgttcaaaagtctttattatattactctttagcttgcttagatcatgttaacagaaagatccattttaactctgaaagaaaagtaacccagagaagccattctctagtcccatgctagtctgatataattttagttaattggcccttaccaaatttcctatatata

SEQ ID NO: 30103 - DNA, 1133 bp, Mus musculus
caatctcagagatcaaaggttttataatttggtttgaaattagaattgtcttgaaggagttgctaacgtacatgaagtcacttgagttctctttattctcttcttggtcaaggttaacagtttctaaacgattgcaaattcacttaagtaatacatttacaaagccattttacatgcattaaaagagggctacaatgtgttttacaaatactagcacttttttttcctgttatgtacctagtgttagagggtcagaataatctttctgcttggcatctcttaaaacctacctgcaagcatagcaggcttattgcatttacagttctttaatacttgtataaactatgcagaaatttttaataaagtgtaatatattttataagctaataagactgaatgggtaaaggtttttagcatgcattagtatacttgcaaatactgaaacattttggtaatctttcttactaaagatgtgaatgtttaatgtaccttctgtttctaccctgtagtccaatgggaattcagtaatgacattttgtcatgtcaaactgtgaacataaatttgtactgtacagtcctcatatactatatacagtatgcaatatatgtattatatacttgttaataaaaccatctgaatattacacataatcatgtgattactataggtagtatttaccaggaacaaagacgtgagagatgtaaagtttcaaagtaagtcactgatgagcaataatttttaatggttagaaaaggaagcccatctagccagtaggtacaccacaggagtgaagagtcttaaagcaatgacccagtaatgtccaggaagaggaaggctcagtttaagccatagaactgcagacattcatctgtaaatacatccagtgcattttagaagagctttgtttctccatcctatccagaatgcctccttgctgtgtgtgatgttcccaaggaaactcttcccagaagagtctgcctctgtaattctgctcccttttcttattcacagctgattctccagctccattagcccagcaaagcagacttttcactccagtgatactggatcttgctaatcacagctaattctggttaagaattaaccagagaccacagattcataaaatatc

SEQ ID NO: 30104 - DNA, 1160 bp, Mus musculus
taaggtgtatcagggaaagtccttgtgattgaacctagtgtcttctatatgcccagccagtgatcaactcctgagcccttcctccagcctagtgagtgcttctctccagacctggatgtttggtcgaaacagtcttatgttgtggagtaaaagccgatgggtcagaaacaaaagtattattcacagaaatgcttgccagctgggtgtaatggtgcacacctttaatcccagcactaagggggacatggagctcagggggttagaagccagcctggtctacatactgagttcctcgtcatcgagggctacatagtgagaccctgtctcatgaacaaacaaatgctgatttttcatggcctagtaacagtagtgctcagcctatcataaagggaatatgagagatgtaatagcttccacaaagaggggagatgagttaagatgggaagaatacagaggaagagaccttaaacatccattttgatatctgaaaaataaattaaaatgaaaagccactcaccgttactcataatcaaatgtaatgtaaaaacaaaactctatatatcccacaaaaaaagaccaagagtaaaaggcctgatggactggagatgtggctcaggggtaacctgtgtgcagtgttctttagagaacctgagttcaattcccaggacccatggcaggcttcttaccagcaccttaactccagctccaaggagtctgacaccctcttctgttctctgcagacactgcacgcacatacatattcacacagttaaaaaaaaaataaatcttaaaaaaaaagactgatattgccagtgttgactggatagaaggagttttcaggcactgctttaggtgtgtgaactgatggcaaaggccagagtggagcacatgtgttcctataaagtaatagcccccagatacccacataactgtgatgatatacaagagtgtacatagcagcagtattgacaaatgtttaaaaccaggaacaactcaatggtcttgtcaccaacagaagggattttagtggccatacacacgtatgtatgtaacatatattgcatatgcacattatatatataatatgtatgtatatgtatgtgtgtttggaatatcatagttcatatattcatcaagtggctcagacaactgactgtttt

SEQ ID NO: 30105 - DNA, 1202 bp, Mus musculus
tctttgtttcatggtgttcatgttatcacttacagatagagggaggaaggaaggttgaattgtgatataagggaaatggtgggtagagtggccacggattcttaattcaaaggcagaggcagaacacttgagtttgaagcaaggctggtctatataatgggttctaagactctttcagaggctacatagtaagaccctggctcataaaaacaaaaaaagaaaaaagaaaaatagaaagtaatttctgcctaagctcttatttcctcaggcccacgtgctaagtcctttgtgttagtgtttgttgtaaaggcctgatcgacacagacgtggaaattgttttagatagctatagcaggtatcgttccatcttctatcctagtgccatcagcatgctacatcaccaatggcatttaaagtcagcgaactgtcacagcaatagcctgttgaccccagcactgtgccttctttgtcacctcttttgttcctttttccagactctatgcagttggtggtcgcgatgggagctcttgcctcaagtcagtagaatgctttgaccctcataccaataaatggacactgtgtgcccagatgtcaaaacgaagaggcggagtaggagtcacaacctggaacgggctgctgtatgccattgggggacacgacgctcccacatccaatttgacctccaggctctcagactgtgtggagaggtaatttcctgtggaggaaagcgaagagcaaaccaaaacaaaatagtttcccacccttccagccaaagtcataagactagtgagtgtccatcagtgtggtctccacacagtcctgccaacactgggctgtcttctctggctggctctctcccggactgccagccgtgcactgagattcctggatctcacatattccctcgggatggagcctggaatgcatgcactggacaagtatttagtgttctgctgtttagtactggattctgccttcccggaaatgtaaaggagcttggtgaatctcagaaagaaggcattggggctggaagcaaaggacagggccatggctggcccattttgatatacaatgaaataatagaaaatgataaagaaaaatgacaagttcctacacggcttaaaggcttaaccaagtcgtacttactggtcgtaagaaatgcagcttttaggccaagtagaggacctaacagcagtgaggat

SEQ ID NO: 30106 - DNA, 1173 bp, Mus musculus
gaggtccctttctgtgtttgctaaaggactgtagctaccctgtgaacttgactatctggaagataaaactgctttaaagggatcatgacgcacaggcggtgacattaagtgagtgacctcacaccacaccgtggcattgttgaggcacacctaagcggacagtgcataactgacagtagccattccttcctggttttgttctttgaacaatgctgttaacatataaggggaacgtggtctttcttctccccaactctgggtcagataaaaagcccaagaagtgacacatcaagtagaaaactctcctagcttcttttcatgtaagcatgatttgttttgcttgtgaaacaaatatgttactgttttgttcctcttgggccactagggaaccccagagagtaaacttatttggcagctaaaagaggccttgtctttagagttgctgaaagaaggttcaggcgatccttgctgaatatacattgaacaatcatctgcagatgcatagatgaagtatttttgcctataatttaatgtgtctaaatgtttttgaaattgctacagttgtcaaaaagttaaaagatgtggaatatctgggaaccgtggccagcatctgccttcattctgactacgccgctgcactctttgaaggcaaaatccagttacatttggtaagtatcacccccgtatcctggaagcctaaatttgatgtcccattaccaagacccttggccaggggtcaaggggtaaaacgccctggctgatgatctgcgtctagatagaactacagatgagctgtgagtacttaaagagaacgcactcactgttataactggccatgttgcacgtagggatccaccaaactatgcctccagagctgttccagagaccggcacctgtgaggacaggattctggaccagggtatctgtgcatacaccgatttcttgactttatattcgagaagccaaggaaatcggctactggacagcagttgagctgctgcacataaacctcccactaaataaaggatgctcgtgggccaactgttttgtgcagctggcctaagggagtagttgaacttgagaaaaagacactttccctagctgtacacctgatttacttagataaatcaatgaacccctaaatgaaacatctttatgttttagatagaaaat

SEQ ID NO: 30107 - DNA, 1331 bp, Mus musculus
gacgggacgcagtgggcatcttttgtagcttaagtttatcctaatggcctttagaggaacaatgctcaattttttttttttaaacatggtagttattttatggtgaaattctgtaaataaatcttaatccaaagcagctaccacctggagccgagtattcttggtgtattatcaggtattttgcaaagcgtgcatcaggaatcagatatccacgtagcgcatgggtcactgtcaccttgagtagcagactgttatgctgtatattactttccttattaatttggttggattacagtattcagcagttcttactaactctgtgaattgcagttctgcaggtgaagggtcagagctcaaattcccagcatccccttgtcctgaccacattgctgctataggtagtctgagagaagccacttggctagtcagggtgtgcacacatgggactgctacacattcctgtccccatgcagtcttagccatcaggttgaaaccagtagtggagtgtaggctgggtcagacccacaggctcattctggccgggagatgctgtcctgtgatggagtctataagccctactggaattccagattgtatctagaactgtgcttgttgagggaccctgggccttggctgtaacctggcctttaggtgtttagttctttttaaatcagaaagtgctcagaggtctatgctgcctctgagaggtatatgccaaaaagattataaaggaagggccaagctctgtctttttgagttctcatggccttgttgggagaagaaacagaagtcctggagacattgaaagtgtattaaccagcatgaaagatgtgtttcgtggaggtcagtcggttattatggaaataaaacactgccttaaacctgagcgtactgagtcttgcccctctcttctgtgttgaaacttgcctgctgcagtgaaggcttcctcacccagaggagatagatggttttttagtgcatatttttccatttctgttactttgggacaaaaaagtcatgtttcccgctgttggatatgcattccaggaaagggctggtaatctgcttgctttcagaacaaaacacagtgctcctcacagttcacttatgatttaaatggtgaatgctgggaaaacgttttaaaataataaagtttagaaactgtaaatatgctgtttaatacaggaggacagcaacaggagtctgctgggtttctccttgaagcccctaaacatgaagtaagggtgcaggggaagggtgggagcagaagggggacccacacgtctgcattggtattgaacctcctagcagctcctgaaatggcctgtgga

SEQ ID NO: 30108 - DNA, 1155 bp, Mus musculus
agcctggagctctttatgtagaccaaactggccttggactgacagctcttcctgtcacttctttcgagtgctggttttaaagcatgcaccatcatacttggctgaaatttttttttatatttcagtccattgattgagtggtgcgaatgtgtctatttcagtgactcattttgaagtcagtattctgcttgtgtttctcactgtgtgtgttcacgtgcgtgctacagagtgcttgtgaaggtccatttgtgggataggcatgcaactcaggtcacgaggcttgcaggacaagtaccttacccctgagccatttggctgccctaagagctgttctcctaggataaaatactattcattaaaaggacctgtgaaataacttacatggtataaaatgactacatgcttaaaagataaaaacttgagctgtgcctgattcactggtgttgatgatctaatgtggggaattgggagatagggtgccattcacatgatttaaaaaataaagatttgtgtccttctgtttcagaacttactccagcaaaaggacagtgaacatggattacctgtcacacatcagagacgcacttgtacgacccttgacctcacaaggggtagaaggggctcagcatgtcatcaaacttatggacacatactatctgatgaaagaagattttgagaacatcatggaagttagcagctgggggggcaagcccagtgccttttccaagctggatcccaaggtaagatgcactgcccactgtccacggtccttggaaatggccatgctgtgctagcagcgctcgagggatgtgctggggactgtagacagtttgttcctccccccgagtgtttgctactgtcctggacagtggccagagaaggctgagaccccacactgcctttgtggttttatcttggcctcaaattgagtgcaaaggcgagaggataagtgtgggcagtggggcgagcctgagtgtgagcgcgaggcagggctagagggctaaaaggaagaatgtgttcacagcctgagggtgtttataagtttttctcttaccaggctggccttgcgcgcctaattctcctgcttgtaggactgtaactgtgtgccacatttcctgtcttagtctacctgctgacctagtgtgtgttcctggt

SEQ ID NO: 30109 - DNA, 1213 bp, Mus musculus
gaagagagacgcctggtcagctcttagattagctgtcatctttccgcgggtgggcgggtgatgccttcctatctttatgtttccagcagttctcagcgttactctcagggaatggggagctcacacttgataagctttctagagccaaagctgccctttagcagcagcaggcgtttcagtgggcaattgcatcaaggtatgaaagctaattgctggtttaagtatggaaagtggagactagcacaagcgggtaattttaacgtttgcgaacggtatgtttctctttgttcttttggtagctgtgagatgttagcgtgtaaggcattcatcaggatttgcaccggggttcactgaggctctgctgtgattccctagccaggtttcacgctggggttatttatgatgttgggagagaaaagtcagtttgttgcagcttggctgccaaatatttctttggaaagctaccatataatttcttctctgcttgaacactgtggttttgtagggagctgaaaattgcttggaaggcctgacgtttgtgatcacaggagtgctggagtccattgaacgagacgaagccaagtctctaattgaacgttatggggggaaagtaacaggaaacgtgagcaagaaaaccaactacctcgtcatgggccgcgacagtgggcagtccaagagtgacaaggtgggttctgctacctcttctcacagtgctgcctgtctgcagcggcatgcgcattgtggctgtttgtggtaatgcccctggctgcatttcagggaactaagacttgtcctgcagatttgtcttctctgcgtaccatatgctgtgttgtctgctgggactgactacaagattttggttattcagttggaaacatagttgctgtttacttgactttctttatatattctaatttaaaacttaaaaaaaatttaaacatacatagtttcattttttgtttttgtttttttttttgtttttgtttttagtttgaagttttctgatacaagccactctagatcccatcttaatttttcattattggaagtgtgtgaggaagaagcagaggtcagtgggaaagtaacacgatacctgactgatgggtttaacttgccctaagaagacagtagtcactaggatgtttcagcagctcaggagcttaacccagagagtcccagccaccaattctgtcagccttataggcatcaaacc

SEQ ID NO: 30110 - DNA, 1814 bp, Mus musculus
gtgtgtcctggttccttggcacaggactgtgccacgtttacattgatttgccaatgtcttagactactttgacaaccaaagcactaacctatatatacggtgcgtgtgcacatgtatgtgcacacttcttttgaacatttcaatagaacaaaatgagagttatctgtctgtagagtatctagtctttatgagattggatgtaccagaacagccacaaacgactttgggtcgactttgggcttgtatggattgtgacctatctctcagtaatgtgtttagttagtgttgccagaaaaacaaaccaaccaaaactttaattttagccagatttctgcttatcttgcttgattttctttggaatacagtcttctcaaaacacagaggattccagattaaatgatgaggccatcgccaagcagctgcagctggatgaagatgcagaggtactgccattccacttagttatcactgttggcttgatggtctgactttggacttctgttagccaggcaaacagtcaagatggttttaatccttttctctttttaaataagttctgcctgcctccctgtcttgtctctgtatctgcctgtctctgtgtatgtgtgtccatccacccatccatccatccatccatcactccaagacaggaccagaactcactgtataggccaggttggccttgaactcacaattttgccttagttttctgagtgttgggattatagtggtgcacagccatgattagctcaaaatgagcctcatcaggagtatggtgtaaaataaattaaaataaagtatatgagaatataagtttctgtaaaatataaatgatgagactaacagataattatttatgtaaacattttgaagttctgtgaataggaggctctgtagtgtatttgaaagaacttcattttctcctgtcttctttttgctttcattctgagcatatacactctttccctggccctttactgtatacactgatgtcttagaaatctgcctttggttcaggattctctcttgagctgtaaacccatatctgacagggatttattgatcacttaccgagttcctagcatggctgttggtagtaggtgattatggtttaaagagaaaaccaagaaagaaaacaagatgctgggaagcgacagacgtgcagaatgcaagtagagttctggggcaggtagggagcgcgtggtgtcggagagtgacgcacaggcagccactgctgaagactcagatccacactgagcccaggatcgcaagggtaagcatctgagaaagtatgcgcaggagatcagtatggccacacagatgaatgagaaggcagttaggggatttggaggagtagccatcagcaggtcttgtaggtcacaatgagtctttggtacctaggaaaaggacattgattggtcaggacttcagatttagcctctgtgagatggactcaattggagtccttagtaaagtggcatgacttggtgggtcctggaagtatactggcttctgtagtgtacacaggataacttgaagtctttccctgtagttgggcatgagcagactggcgtggagattgttaaggtgtggcaagtggcaaatgttagctcgcgtcaggttggaagtgagaggtgacctcagcagctggatgaacagtggtgctgttacgaagatcagaacacaggatgcagagcctgttggtacaaagaagttagttctgttctggcggctacagggtggtgccggcaggtccagtctagaggagagagaacctggtccctctggggtctctctggagctgagcaggatgg

SEQ ID NO: 30111 - DNA, 1243 bp, Mus musculus
aacttgattggttgcttggggttttaaatggagttgtattggtgagatgtctctcctgttaacgctgttgaatacacacctctttcaggtgtggcttgttctgtctctcaagcccagaaggatgagttaatccttgaaggaaatgacattgaacttgtttcaaattcaggtgtgtatatttgtcataacagacagtaacattttatctgagccttgaggttgaatgtgtgtctgatttctgtttccaaacttctgagaaacaggaagaaatccattgtggatctgttgtgtaggtatttgtatgctgtgctttgtatcatgagtacaaaatggttgtgtgtgctctgctcgtagatgttcaaattgggtggcacatggctggcttggttgggaaagtattattcgtttttatgtctatattggggtgtgtatgccactgctcagatgagatccaaggacagtgaaggagcccctcctgtgtaggcttgagggattgagttctagttagttgggcttgtatgagatgaatttggctatgtacttttttgtgtcctgtgtagctgccctgattcagcaagccacaacagttaaaaacaaggatatcaggaagtttttggacggcatctatgtgtctgagaagggaactgtgcagcaggctgacgagtgaggaggcctcaggtgggtgcccatgtctgcagctgactgcttcggatgagcacagtgtgattaaaaaggattaaaagaactttctgagcaggaatattggcagaagattttacatgtgtgtttgttttacagttcctggccccagaaacgagatcctgaccacatgaacaatttgggctcttttgggagaataaaagacttatatattgatttgtgtgtccttgtcttttctgattacttaatgggtcagcgatactcaagcaacaacgttacttggggtttttttcccccgtggaaacaattggcttaaaatagcaatgacaggcaactttcctagtggatgttgagtgagtgtgtcactttgggtaggtcctagaggtgcttgactttgacctaggcatgatactgactgttgggtgggcaggtgtgtctcagtagtctttatagagttgtaattctagcacaagcaatgaacctgtggtatagtataggattctagatgtaacagacttggtacttgtgtgaattacttccctacccacctgggagtgacttgtgaatgctaggcaaacacatt

SEQ ID NO: 30112 - DNA, 1158 bp, Mus musculus
aaaaggatatctggaacaatttccctagttttgaacttaggataagcaatggcgttcccgccgctcacccgggaccccaggctgcgagctgtatcccagcagcgtagagccatccccctcttttaggtctcaggagtgtcaagggatcgagggaacagcacccccggcaccggacgcgtccaacaactcgtcgcttgagtcatgacgcgatacgtcgtcgccgaccggcgcgactcgactagctcggcaatcgagtagttccgccttaaagccgtcgctcgggtcgtgacgcgacacgcagggccctgacggattacaagaacgtgatgacgaaagacgttctctctttgccccatctactgcgaggtgaggagcttagggaccgggtgccccgggaatctgaacccatcctctgtttggggaccccggcggcatggagccgatgccccaaggctttgtcccgactgtcccccagcacgacgtgcgtccttgggacttggtggcgcgagctggaagtggcgttcgggctttcaggcccatctcggtcgtagcccttccgccatggcgcaccgagccgggcttccttactcttctccggggcccccggtccagtccttgtcccggacacacctgggtccttgttgccggctttcgtagctggcgattcccgttgggagcggaacgctgccgggtctcgggtgtagagcgtcccccgccccagccgtctcacccgggtgtctgtgtttcaggatgaagaccattctcagcaatcagactgtggacattccagagaatggtgagtagatggctccccgccggccgctgacggctttcctgcatgctctaaaccccggcctatggtctcaccagttcactttctcgtttagtcgaaatcactctgaaggggcgcacagtcattgtgaagggccccagggggactctgcggagggacttcaatcacatcaacgtggagctgagtcttcttgggaagaagaagaaaagggtaagaacttgtgtcttccgatgcttcgggtgcttgcttgtaacaaaacccggtaaccgatgttaatcccccaccccatgcgtggccgagtgggttactcggactcagttcttttatgagtgaacttgggtgtgtgtgtgtcgtccctctggtgt

SEQ ID NO: 30113 - DNA, 1172 bp, Mus musculus
ctttgtgacagataataaagatgccactccaaagaaaagtcagaaaaattataagaatcttagaggaaaagaagggcctgtgtaggttaccccacgtgtgtgctggggtcacttccgtgtgtggaggatagtctgtggtttttttttttttttttttttaattttttttttttttttaaagatttatttatttattatatgtaagtacactgtagctgtcttcagacactccagaagagggcatcagatctcgttacgggtggttatgagccaccatgtggttgctgggatttgaactctggaccttcggaagagcagtcgggtgctcttacccactgagccatctcaccagccctagtctgtggttttaattgctcttttagtaagtacgtttttactactgaggaataaaaatgatgagtccacaaactatttaaacaaaatacctgtatttggagttattcgtaatttttttgtttgtttttgttttttcgagacagggtttctctatagcgctggctgtctatccttgaactcactctgtagaccaggctggcctcgaactcagaagtccgctcgcctcagcctctcaagtgctggaattaaaggcatgcgccaccactgcctggctaattgcttttctttacacttcagtattgccatatgagttaaacatcttgttcaactcctgtatcatttgatagcagggacttaaccaaaaaagaattgtatggcagaaagaattgtaatcagaaagctgttgaaggatgagtataatagtgcattcctgtaatcccagcacttagaaagttaaggcaggggagttaagtttttaaagccaccctgggctagagagtgagactttgggatgtgtaagggaggggaggtagttgttgttgaaagagcctaggtgaaatgttcttttttttatttatttttttgagatccaaatgcataccttcacaacagaggggtatggtaaatttggaagggcccctgatatactgacaatgttcgatgatgttcaatgatggtagtgtcactagcacatttcttctatgtctcttcacacatgcgtatgaaaaaaatgatataatgaaccctttaatgaatgaaatgagacctctagcttaaataactcagtcaataatgtgacaagttgcttttcatct

SEQ ID NO: 30114 - DNA, 1190 bp, Mus musculus
tgcacacatggtaggtatcactgaatatttactattttgttcttgaagcccttggctggtttgaactgtctatgtaaaccaggctggcctccaattctcatagaaatctgcttctggattcccagccttaggattaaagatgtgggctcctatagccaccttgagtttagttctttaaactctaaactgaagtttctcagtagtgtttgacacattgaagtatctctgcaaatattttttgaattatctggaaatgttagagaataatttttatagaaaaactaggaccattataaacctttggtatatacatacccatttttctttgaagcctggtttgcaccttactatcatttaatgtttcttaataatatcataaaagtgtgtcatgtaatttatcttgggataccattttcttcaaggtatattttacctttatatgttgggttttttgtttgtttgtttgttttctgtcctccttattacttaaaaactcaagtgtgctttatattctaggtccggtttatcactaaaatatggcaccctaatattagttccgtcacaggggctatttgtttggatatcctgaaagatcaatggtaagagatctctgaatttgctctttcttctctgtcttataggagtattaagactacaaatgttgtgttaatttccccaaaccataagttttaccttaggcactaatttataaattctcttaattacaatggaaagtatatattaattgagatcatgataagtctttaaatggacacatttttgtaataatatcaaatgctaattttatatttaaaaaatcttatttcatttttattttgttatatttccttctttgttagaaagctatttataatggactaaaaatgtaagttgaaacaattatctttgagataaaatataagcaagagatgtccaaagttgttttgttcttaggtgttacaggtacttttgcaagtaatattttcttttatatgagacttcttcacttcacttgcctggttctttattttatttacatattttggttttgtcctgcatgcgtgtgcgtgtgtgtatgcgcgtgcaggcatggtgcagtacattatggagaccagattacaacatgcaggagtctaggagctgccctttgtagttctcaggagtgatctcaaggtagcagtgggaatcag

SEQ ID NO: 30115 - DNA, 1422 bp, Mus musculus
caccaaaaaaatagaaaacctctgtgctatgggttttgatagggtaagtaccgaaaagaccaccctgctaagcattaggacactctcgagttacgagatttatccccatttaaaggtggtgacctaatcagagctttctgtccctgtcaccatccagaggaattgatttcactccccattttaaacccgggctcccagtccttgggagaaggggactagccattttgaaaatgtagttttggttaatcctgtatagacgctgcaatcagtggtgactgtgcagtcattggtagagggaagaacgtgtgactctggcgaggaggatttggtttccgtgggatgtgattgctcttgtcctcctctttacagaacgcagtaatagtggccttgtcttcaaaatcatgggatgtagagactgcaacagaactgcttctgagtaactgaggcacaggagctgcgccagcatcgctctcgcctcttgaggagcatcaacacctgttatttttaggattctgcataaagttcttttaaactggcattcttgcctaatgatgttacctaggcaccattggagactgcaaaaaaaaaaattccctgctctgtaaataaagctaattaaacgtctgtgtaaatttaaaaaggggaaatacttttaattttttttcttaatagtgtaaaaattctttgagctaagctaaaaccatgggaaaacatgctactttagtgtttagcagtgtaacagactcgagagtttgcttcagggttctgttgactaactaggataacactcgagtgtcggcccttcacattgtggtgtagaatcacagctcccttaagtctgaacacagatcctctgtgcctgtgaatttacttgcatgcttgtacttgacttcttagaacgggtagccgaaaagaccacccttttaagcattaggacattcttgaattatgagatttatcctgatttaaaggtggtgacctaatcagagctttttagtccctgtcaccatccagagcggagattctcatggtcaatttattttgtgtcttgtgggaaacgtgctgaggaacagtgtcccttgttccacttttagctcataggtttggaatgttttgtccgagttcttcactttgtaagtagtaatgtaaaaaggggctgccaattttatttctctcacaaaaggaataaatacttgatgttgcagtatttctagatttaataaaaggacactgcttagtttttcagtgaatttgacattaatttttaaaatgataaagtctttggaaacttgaagggtgcagtacctgttccctagtgctcagcctgacagtttcctttgtcagacacttgacttactcctcctgctccccatggtgacccatgaaagctgtgctgtctcactgtatataccagatgcacat

SEQ ID NO: 30116 - DNA, 2046 bp, Mus musculus
tatgtttttctccatgtttgcggatgcacacatttcctgttgcagctacatccttttattgctgtaggttattttataaagatgccaaaggaaacaagtttttctttatttattttaagtagctaaaactttgtactgttctttatattctcagataagaaggaaatgtgtgaaataaccatgagtttacctccatagttcattagaacttttaatggagggtggcttggtaacactaatatttaggtattggaaagtataacacatgttcttggagtttactctctgcctgtattgtcagggtacattgtctagtagatgagagctcagacaacaaaagtcaggcagtacctactttgtcttggtggcagctgtgttctttttttgttttttgtttttttgtttttttgtttttttgcatattggcttcagactggctccactgaatacttactggagatgtatatataacatgtggtttcatagatttgacgtgattatgccatcgcctcctgtcagaaccgtgtgctcaagactgtgtgggattcataagcaagactgcttggggtttctcatgttcatttaatgtgctaatcacccttttggggtattttccctcacacttctcgtttgttttttatttttcttttgtttcccaactcgtaggtttagaaagaagcagcttggtccttatcctggtgtttcatacagttaggaaaacaatgcgaaaaattaagatttagtcaaaagtaccctgatggaaattattttttttagtctgcgtttgacagtttttcattttaacaagtactacacaggttctgttttggtgtaggtgtgatggcgcttttactaccaggttcttgaaagagaaaggcaggcagagtctgtgagaggtgtatgcccagtcttagccccctgttcccataattttagtgaaatcgcgtttagagcaggctgactccctcatcctcgctgatcctctgatcagcttttctttctgagcctaggcctgacttttagtataaaacttagagagcatgttgggaacttgggattcaaaaaacatgtcagtgtttggaattgaatattttacctttgagaagtgtaactaacctatcatatgaattaaaccatcctttttgaaatttttttttatatttctgattgttggtggcatttaacactatgcaaaaaacttaagtatctgcagaaaggaactgacagtaggttttgctcacgcggttagacattttgcacagcgtgttatacgttactggttaggctgttgggccagtttacagaggttaggatgttgggtaagtggagcccggatgtgattgtaggtctcatacagcttttaaaactgcaggagaagtagatgttcttgcagcctactgtagcagcaccggaaatgacgttttggtggggtaagggtttgaaatgaatttgggaattgagcagtggagtcaggtatattgtataaagatgggatcagtgtttagataagaaaaaggtaggaaggtgtctggtcatagttactttatttcatggactttgataagatagttctgtattaatcactttttctagtttcaaggagttgatgttggaagttacattttcatctttcagtacctgtcttagtgtgtacccatcagcctgttggtgtcactaagggatagccttttctcaagcaagacttccagtgtctacacatgttgtgacaaacctacatacagcataaggtagcgggtgatgttggtgtctccttacctatcttgtgactgcttccttagactgctagaaactccggcgcctgcagtcatcactggaaggtgtcatgattgtgtcgcctttggcgtagttatccccccaccccacccctagccgtctatgatgaggtgtggccaggtctgtttggttctgaggcaagtggatcaggtcatagcactgctttttctgatcgtgtctcctattgtcacctactttttacaggcatcataacaaaagctagacaatttctttgggggaaaaaaaagactt

SEQ ID NO: 30117 - DNA, 3208 bp, Mus musculus
ttgtttaggtctgcctagcacattgagtgtaggtctttgaggagctcaaggatctggactgccttttttgtgtttgtttgtttgttttgttgttgtttttttttctttttctcccccccccatcaaaatatacccttgttttttgtaaatttactgtctaatgtgtagtattttgtcctataatttcatttttgaaagaattgattgaaaatctgtagttttttgagatgaacggtgttagcattttaaacagattagtcttgaccacagaacttggctatcgaatagaaacttgcatattgttctttagttttatgtagcttaatgaagttttatttcacaaacttagatggttctaactttgtgttcttctgttcccaaggtaaaaggagaaaacgaaggccaaacagaagcagagtccaggttctgtaaaaacttggattccaatgtccccaaacagaaaacgaagctcacttcaaatacacactttctgccttgaaaactgaacgaagctagccttcctttttacacagcctaagtcctctggtgaaatgtacagcagactctagagaggctaagagcatctctgttcttcccctcccccagacttttcctgggaaaagtcaataattaagcaaattgcttaacacttggttccaggtcctgcatatctggaacttaaaggcatagtaaccattttttccatgctgcagatttcattttagagaggaacagggcgtccattcactgatgctgagaactggtccatcctagagcccagaaccccgtgccacacaggcgagcaggtgtctactgaactgaggctttacaagcgagagagcagatgacatatttcttcgttttccttttggaaacttatgtattattctttctgcctgtctacttttctgcaaaaaatgagatgtacagatttctgttccctgctatgaaaagtaatgtggcaattttataaatgttgctttctgatttttatcagaatgagaaaataattaaaattattgatctgcaagtagtaaacacttcatattatgatttctcccattttagtttaatataatttgcaataaatgtacatattgtttcataaggcatatcagtttagaatggtttttactcctgtgattatgatggaataattgggttttcagggagtaaagactgtccaggatttggttttataattgtcaccagatttttattattaatgtaaaaaaaggttggttttgtttttagggtttgttttgtttttttggaactatcagtagatggacactggcagctttgtgagggacagagatatgctctcgacgtctggcaccgtgctgttgggaaataggccttttatttttgtctgataattggggctcagtttttatttttattttacagacaactgttacaatattgtattccttggcattcattgttcagcatagatactgtgtacagtatttctgtgcacataatcctatttaatttttgcataaaataaatgcttttagatgtcttatgtaagtcttatctttttatcatgctttgctttcttaggaatttttatgtgaaagggctaaagtcacagaaggacatgactacagccaactctcccttatctatgtaaaatagtgactgtgcctcaggtgctcggtttgtaggactatggacatgtgcaagaatgaggagacgtttgaaattaattttctcttatcctcctcaggtgttttgcctgtctccactgtttctgcttggcttgtacccaaaatcctagtgggacgagctgctctgtttgcattatgacttggtcttgctgggatgtgtaaaatcactgaagtatcaaaactctccagaatgaaattctttgatagtatgtcaattaggttctcatagataagtgagagttggctataaattgattctgggtgaaaggtgggcttcttttaagtattttacatgtacatgtttaggtgtcagaagatggctagagaacagtgaataccaatgatagaaacaatatttcttgaaagggcgtaaaagccctgctcttcctgttgcctccaatctgctgacagagcatctatgcataccgtcagtcaggtccctcattcagtcagtgctatattctatttacaagtttgacttagggccaccagtttgtcactaccaaaacttctttgctggaacccagtgaactctatgttgagcagttagtcacacagtgtaaggaagaaggttcctaaatgttaagggcactggtcagaatacagcagaagcgttcacatctgttacagctctttggagttttgcattgaaacagttactgtcagggtctgttcctcatgagtgcctggtctctggcaccaagagtaaactggttggggattaagcaaattgagagggacttgtttactggaaatgtgtcaggttttctttgaaaaagaaaatgttaaaatctcttaggaatttggtatttacatctcagagaaatacaacacaaaagtgcagacttaaaattgagaattaatgttaaccctttgtgtctagtttgaagcttcttgtatttgtctaaaactacaagccagaattttgtatctcctttgataaaaagtgtgtatactgtaaagtagttttgcatattcttgtgctgcacatgggctggatttttagaatttttttaaagactttaagccgaaccttgtaatttgtgtaaatgacaagtgtaaaatccttccataaaatgcttaaaatatgcactgtttcaaataaaaccaagaaatgcagcattatgtagaagtgtggaaacgtgaatattcatgtgcccatgtgaagggctgatgaagggaccatcgtgcactttccatttttcaagcctctgatgtagctcacagtgacagtacagggggatcaattctgatggatctttgccaaagtttcttaaagatgatcattgtttcctactattctctgtgtcacaaatggtggacattatatactaggttttttgtttttgttttttttgagacagggtttccctgcctcccgagtgctgagattaaaggtgtgcaccaccaccgcctgaccattatatactagtttaataactttaatcggagtgaaccgatgtctaagattcggatagaataagaggttaagagaggccatcagcctatctatgtctgatgcctcccatagt

SEQ ID NO: 30118 - DNA, 1135 bp, Mus musculus
tattgttgattttatcagctgaaaagtagattttataatatattagagggtggtaattgtactttggacaatatgaaaaactaggaatgaagtttatttaagtgatttctcaggcacaataaacgcatggtgcacttaacacaggtggaggcaaaatactcatatacataaaaataaaataggtgttgctggtttggaggcccattcctttattcccagcacattgaaggcacaacagtgagtttgaggcctatctgatctacatagtcaattccaggacagccagggctatagaaaaaaaccatgtctcaaaacgaataaactaatgaattaaaaatgtgaaaagtcaaggatatcatgtctccagaaagttcttgccaaggctgtgcagttctctgtatagaagttgcaccatggagtggaaagcacacctcctgcctttgtctagtctcagcagtgtgtgagcagagtgcatggccgtgcagcgccgagctggagacactgagatgataacactgctccctttgcttggctttgttctttttttttttaataggacttctgtaatgacaaaagctatatttcagaagagacaagagttcttctgttaacaggaaaggtactgtatacgtaattgcttggggtttttgtttaatgtgtgttctttctgctttctgccccagggttgtggggatgcattgtgtgttggtattctcagatcttttctgcaattaaccactgttcagaattgccacttaatcttaaagtagtgagaagctcaaatttatttaaaattcatctagggcagattttcataagtaatagaagtagatgagaatgacaaacaagccaggcgttggtgactcatgaatttaatcccagcactcaggaaggtagatttatctctgtcagtctggtctacagagtcagcgagggctacatggagagactcagggaaggagaataaagagattaatatgaaaggctaaaatgataggaagattgtatttcataaaagtaaggtgatataaaagtatatattcagtagtctactaagttaagtgtgtcattaatttctatgttttggaggtatattttgtttcaattaagaaataacagataaaaaaagagatag

SEQ ID NO: 30119 - DNA, 1164 bp, Mus musculus
tggcatgaaagtctcatctatccatctgcctcgtagcctgccacatactgtgattacagatgcctggtaacatgtttgtaaactatcttgggaaagagactggaacgtacccctcaggattcttgttaaagtctctgagtaaaagtaactgtagttggggctaaatgatgtaatttatattccaagtgttacagctagcgtttgcacaccagaagtttacattctatttattgaaagaaaactcttttttaaatagaatagagctgttgtctgtattcctaaaggtgtatctattcctccaggttctgtctttcacacatcctacctcgttccactctgcagagacatatgagtccttgttacagtgcctaagaatggaggatgacaaggtagcagaagctgcaatacaaatttttagaaacacaggccacaaaatagaaactgaccttccccagatacggtcgtgagtattttttttttacatggttaatgtaaaggtttctgtgtgggggagtgatgatttctctgtctcctgccccatcctatcacaggtaggatagatgcagtcggaccaactgtagagatgcaagggacttgaaagtctagtaatcaaaagccatcacagaatagtatggttcatgtatctttctaatttttgtaggctataaatgaagtagcgaccaacttcctgtcccaaccaaatatatatatatatgaattaaatggtagtgttcataaaatattaattagttgctttgtaattaacagtgatcataagagtaaaatacagtttcatagtttcatttaacattttgggattatacttgtggtaaggatgggaaacgtgaaagaacacattgatatgtccattgcatcatatgttcattggtaacataaacatgaaaaattcatggtaaacctaataggaacaatatttgtctcataatgtaataaaaatagaacaaatggacttgtgtaggttttattaaatggaatttatgtggaacaaagggattatccagttagtctctgtcttcaaggaactttgtggtctaaaaatttaattgtttatatagcaatacatacaaatcaaaaagattattagggccaggcttggtggaacaggtcagaaaccaggcaagaatgactttgtctcaaaattgt

SEQ ID NO: 30120 - DNA, 1195 bp, Mus musculus
tctgtgatgtactccagtttccatatacctcctcccagttatatactctctacctggctttttcattcctttgattttcctgttttatctttcattacaccagaactctgtagcttcccttgtttaggattaaatagtctttaagtcaatttttgacctccccagaaagatcatattgatcctttggaacttaaccattccttctcattgataaaatgccctcctaacatgcttaaaattccagattttatctctagcattacaaaaatattagttcctattatgataagccttatattaaactcccttaagtgctaataaactgttatatacatttttcatatatgaatatagaaataacacataagaaaatttataaagtcaggtgtggtggctcacgcctttaatcccaacagttgggaggtagaggccagatggacctctagtgggtggccaccctggtctacaaagtgagttcgaggacagccagactacatagcgaaaccctgtctcaaacaaataaacaaaaagtttaaaaaagttgaacagtttgtaatgttattaaataatgtaccttttcatatttatacagagctctcaatgaaatgtggaaatgtcagaacatgcttcgaagtcatgtgcgtgaactattggacttacacaagcagcctacagtaggtttatgatttttatttaaaatcatagattgtaaatcaatgtttaatttttttgtggtataatgtaattaaattatctcaaggggttttaatttttaatgtcagttaagctgttttcagagctaaatttccttttttgttagtttcttaagcatttcttgtttgtttgattggttggttttgaggtttgtttttttttttagctcaaactggtctagaaatcactgttacccaggttaataatctgcggcaaattccttgacagccttcctttctcagcattgctaggtgagattttagtcatatactagtcactttccttactatggtgacagagtactcgacaagatccagagaacttacagaaggacggtgtgttttggctcacaatattagggacagtccaccacagcagaaaggcatggtggcgagagtttcaacaagcttgctggtcatgcagcctaggctgactgacttctgcctttaagcagtgggcctacctcagcagatgaatgaca

SEQ ID NO: 30121 - DNA, 1225 bp, Mus musculus
aatctttttcttattatggaagagaattttttaatagcatttctatataaaagaaaaatggatgccgggcattggtggctcatgccacattatctgcaagtctgcaagggaagaaagttcacctaagaggacaagaaggctctcaccaacatttctttttctagattcctgatcctgagctttgttatctacacagtacagtgaaggatgtgtagttaactaaggcaccgtagccgccttctgtacagggcaaattatataattcataatcttcacttatgccttttattcatcaatatctatttaaagaattgaactgaatgaaatctgtactatattttgtttaaagggaactaagaagttggtaggtcatttagcagtacggcactgaaaagtgtatacagtaatctactgtcttaccagaaataggtgcaaaatggttattagtaaaacagtttggcaaagctgcttgtgagaagatccaatgtgctgcctgtgcatgcacacagtgactactgcacagctacttgcaggttgtagatttgaatagagttttggtgtcttgccccactcacagtgctatattttctagtggcgagtaagaaaagaagccatgatgggtctggctcagctctataagaaatactgtcttcatggggaagcaggaaaggaagccgcggagaaagtcagctggataaaggacaagctgctgcatatctactatcagaacagcattgatgacaagtgagtctaatattttcctaaaactgcttatcatttttaaagattctatttaatttttacacagttcattttaaatatagaaataattttctgcacacatgcttacatatgattctttgagagatgatagcatatcagtcgtgaaagaaacatgggcgtgagagtgaggcaggagagacaaatcatttttacatatgtatacttcagcttcataaaataaggaggagtaataatggcattgtcatgtgcacataggtatgaagtgtgtagcactcatgcccagagtaaagcactgtttggtagtccttctcatcactggggtgtttgtttgtttgtttgttttggtaatactgttgcaaccagtacagaaattgttctcattttcttaatggcaataccagtgctcacactataatcccagcactaaggagagctgagtcagtaggagctccatcattccaggctagccttgctacagggt

SEQ ID NO: 30122 - DNA, 1109 bp, Mus musculus
aattttaatttaacaatttcggggttggggatttagctcagtggtagagcgcttgcctagcaagcccaaggccctgggttcggtcctcagctccggaaaaaggaaaaaaaaaaatttctcacacacacacacacacacacacacacacacacacacacacacagaccatctttaccctcaggatacccaccttatgtccttccttttcataccccccaccctcaccccagcaatccagagtcctgtagtccttcctgctagaatactgaatgttactgttggcttgatcttgtgtaggtaaccatagagcatcgaactatagttcatcagcagggtgggtgctccatgttcagaagatagcatccacagtgcttccccctgcgccccccacccccatgcgttctatccctcttccttgatggtcctcaagccttggtttgggagggcagtggatgctgcaggtatatttcacttagaactgggcatgcagccatcacttattgtcaggactttgactggttatgagtctgcagtaactggagcctaatttagaaacttcccaggtcagggtgtaaagcagcgctgatctgtgggtataaacataaagtctgaggccacagtttagcaaaacaacaagaatgggttcttaccacctatcatcctcagggcttatgaatttctgagccatgtgctgcaaaccagatttattatattgcatatgtattctctccttggaacaggcctcagatccaaccagaaagcagttgaccaccctcataatttttatgacaccattgcagcctttaggattcaccactgtataataacactggtgacttttctctcccagctgtctgcactatgaaagctagctatggaggagggaagttttcacatcaattccaacttggatttttccccccccttcaaccaaggtatattgagtggtagagttttaccctctagttgtcgtgggcagtcaggagcagtggaaatgctctgttgttagacatgactctagggcttctgaaaccctaactcagaaggaggtatctcaccccttgtttgggaggaacaactggtataagcaatagtgttgttgtagtgta

SEQ ID NO: 30123 - DNA, 3672 bp, Mus musculus
atgctaaagtgaaacctagagccctggactttgaagcgtgaggtttgtgggctgacgttggtttttacttgtagaaattcagtcagttctattttcaaatgtattttattaggaatgtaaaacaagaaaagtgttttacagaatccaaggaaagttgtttgttttttacttgatcaaatgccagtccgttacttgttgaaacattaaagggaatttttattaattacaaaatgtctaaaaaaattaaaaaatgatcacctgcagtttaaaatctttttttttttttggtttctctgtgtagtcttggctgtcctggaactcactttgtagaccaggctggcctcgaactcagaaatcagcctgcctctgcctccccagtgctgggattaaaggtgtgtgccactacgcccagttgcagtttaaaatcttaagtgctctatcgtagttaggaaacaaccaaccaaccaacaaacactgcctttgtgttatggttcacatttagaaagtcctaagggcggctgtgagggcagcgggcctagagcctctcaaagaattggttaaacagtagaggaagagggcgagcagcaaaaaccgagttcttcctgctttcagagcttagcacaaaatcacttgattttgttgttagacaggaggacacttgattgtatttcctctgtatcgcccatcccttcccttccgagctggtctgtatgtttttctgggaggaaagttgggtctgagagtaacttgtagtctcataggtacaataggtaacgttcagagaaggagagccagctctgggtgtctcctgtgagtcctagactgtctgcagtgacacggagcctcaatggctggtttagactcagacatcatttctaagctgcagggagtcagttctactgacttaagtgcaaaaccatttttgctataactgtaaaagaaacccttgtaattagaaagaattttttacctttattttgaaaaggagccaactttctgaaagaaaagtctcattgatgtttttgagctagtgtcctgtttgtgtgtaaattcttgtttcctttctacagacttagtgtggcaaagtataatttttctagaatgactcagtagttaaaataaatctaactttggacatacagagtattttcaacatatacggtgttcacaaacaattgtgttgcatttataaccttcatcaggaatgcggcagtgccctcctctgaaagattctgacggacagaatgagctcccaaagagcattttaatgggaataaaacttagaaccacatttttacgtcttgtgaattatgcttttaaaaaagagccttaccattgaattttatttccataaaaacaaaaatctatgtttgttacctacaaatagttagtgattactgatactcaagtatttatatttttagacttgtaataatttgttttaaaaatttcggtagtatagcataccatttttggtaatgcttagaagtgttttatatacatatatatatatattacaaataaagcagttcccttttacaacttagtacaaaaaccataatcagtagttaataaagtaagcatattcctgtgttcaagttaacatgatacaaaaaccgagacagtttacaacccggagtgtgtgcagctgcatactcattttctgtgttttatattttttcatgttttaaaaacacatttgaatatttcagacagatttatattatgactgtgattctaattaataagagagcagtgagacgaagtcctagtatgcctgccgctggaggctgtggctagaagcccccagaaagcagaagtctggcactggctctttatgacagagcaaacccagcgagcgcagacctcagaattgctatgaagacccagttggcctcaaactcacaatccttctgcctcaccttcctaaatattgagactatagctatgttttgccatgcttggtttcatatcctttaattattaactataaatacacaaagtttgaacatcatatatatttatagtcccaaatttccttccccaccctcctatctggtatcattgaagcagttacaattataaaagatcattttctgaactttcacttactgatctctaaatcttgtgtcctagccagaggtagagatactttgtcaatcaaagatttttcttttgatcacttctgaattttgtatgtctattttgtatgtcagaggtaaagatggtttagagatgacccaggttagaagagctctttgtaaaccaagtattttaaaacattttaaaggtatagtatttcttccccaaaacttggaagagcttagtagcagttatatacatttaaaatctgttactggagacaggaaacagaaaattgttaggaatcacatggcagtcagtgtgagggccaggcctcacagccattttcagtctttttgcttatcccgtgaaacagttggagcttgctttctgacatttattagctgttgatctattggtgttatttttgagttgaagttttcttctgtttgttagtatttccatactgcttctatactgtgacattttaggtatcacccatattatatagtggaagctgtgactgaatggtgtgcattaaaacagatttgagaagcaacagcttccagttctttgcggtggtttcctgtcctttgttttggtctttttctttataaattcaagtgttctgtttgctttagaagggcatgtgtaaggacatgttagttagttctgagctggcagttggaaacttttgaaactcaagaaattgctctgacaatgttttaactgctttcaattaagaaaatgtaagaaatggacaaaaataatgtgtgctgttttttctgagtgctttaccattgtgcaatgaggtgacactgatgatgtcctgtgctgtgcttaagtgtcgcttatttttaaatacttgtaaagaaaacagacttaaatgtctgcgtggccaaaaccaagtgccatttaaaagcaaaagtaagttgatgtagaatgtatgttaatggtgctgatttttaaagtgtgatttaagtttacagtattacttgatgcctccttacagaagcgaatagagaaacgaggctcgaacacacctgtgtcctgaagccttcgtaacctcagttagatgatgccggagttcattcactgtcctcacatttgagcttgacttccgtggtcaggtgatgaacctgctttgttgaattccccctctgtctcattaaagtgccacattgcagctagcagttgaagaatagactataagattttcagatggtatatcagaaacaaaatgtttttatttgtactataaaaatgtgatttttttgctgtcaactctgtacttttttattgaaaatgtttataacgttgcttttaaaatttcttatgaaaccatttacaaattacacaattaatttaataaaatgctttcatcacagtccagtgtgaagaaatcctttgtttgatgtggtcggtttagtggcttaaatatttaaagatgtgtctttgtgattctctgggaacagtgtcataaaatctacacttctggacaaccgtgccagcttgtgttgcttatgcaagtgggttcacttttggacaagaaaggtgggctagcttctctcttcacacccttgcatcttt

SEQ ID NO: 30124 - DNA, 1170 bp, Mus musculus
actctagctggtcttgagtttgctacatacctaagactggtcttaaacttatggatccccttgccttagccttcctgagatctgggtttagaggcatgctccacctctggcttatttagtgttgacatagtgggattttaggagctgggctatgtgttgctcaatagaaaattacctccacccccccaaccttaaaggcttaatgggacaaacactaagtgttttctaacagtttctgcaggtcagggatggatgtgcaacttgcctcctgcccctgcccctgcccctgcccctgcccctgcccctgcccctgcccctgcccctgcccctgcctctgcccctgcctctgcctctgcctctcggtcacagtgggctgcagcctcggaaggatgaagacccactttcaagcttcctgccctacatcagtctgaggacctttattctttgctggttgttggctggcagccttcaggtgtttactacacagcatttccaggagacttactggtctctgctcttaaaaatctagaatctgccaggccgtggtggtgcacacctttaatcccagcactcgggaggcagagacgggcgggtttctgagtttgaggccagcctggtctacaaaatgagttccaggaaagccagggctacacagagaaaccctgtctcgaaaaacaaaaacaaaaacaaaaaatctaaaatctattcttaacccaacagtgtgagagctgctggctgtggtgagctcaattgggcccccacccaccaacgtgactatactcagaggtagaagctttaaagaggaaggctcgataatgtcattagctgtgtgattctaatctactactgctatgtctttataaaaagggataacaggctggatatagtgtcgtatacagttgatcctaacacttgggaggcagaggcaggcgatctctgtgagttcaaggccagcctggtctacagagtgagttccaggacagccaaacctacatagtgagaccctgtctcaaaacaaaacaaaacaagacaagacaagacaagacaagacaagacaagacaagacaagacaagacaagacaaaacaaaacaaaacaaaacaacaaaaagcccaaaacccaaccaaccaaccaatcagtcaaaatccccaaaaggtgtgcatttgtgtga

SEQ ID NO: 30125 - DNA, 2029 bp, Mus musculus
ttcttaagccaacatggaaaagactcctcacatccagagtcccaacactggaaagctctgacctgccctcactaccttgggctctctctcctgagtccttagtaactgtgccccgcccccgccccgccgtgccccgccccgcccttctccttccctagctccagtgcaactttggcatatctaagaaaaatggataattccaatagagaagacaactgatgccttttatacttcttcctgggattgtgttggggtctttttaattatttttggtttgtttagggcgtctttttaattatctttgttaattatatttggtttgttctatgtgtatcttcagtagcagaatacacattaaggacaagattttaccatctttgcctaaggcatctctgcatagctatttaattgttcagtatgaaacctgacctttctaattctttgactttttttttttgaagtctgggtttttagagaccaagaatgtatgtgattatagacaagacttgtcagtgggaagttaagcttctcgctgcctttctttctcctgtgtttcctacagaatgcctggtgccatcagggatgtcggaagccctgtgtttgtttagcagggcttcccgccgttgctctgcatttggtaggtgaacacgggcaggtgaacacgggcatacacatccaggagaagtctctgtaggagtttaagggtagattgtaaataacttctgacgcttgctcgccaaagttgccaagttcatggcctgtagtgtaatgcgaaatgcagccattttatttcaatgttattcaaagtgtttgccttttttttttttttttcttttttggaagtaaatgcacagatgctgggttttgtgcctgttttaaggcttttctttggcagagtgaatgtaaaatacagtagaaaagataatatcgtcatctcttttatgaattatatcaacttacatctttttaagaaggctcagtccaggatgtgaggtgtgcaataagggtagcagatgcacagttgtgtttcatggcatgacagagtccatccaatctcccttcccatcagagttttgctaataggcttaactcttatttgtggactaatagtaggatcttgccctcagcaaacgctttctgcttttaaattaagagagtcccaattgtcttttttttttctgcctcccccccactttatcttgacgggatggattttatatatataagaaatatttatttaactattctatagaattatcgagtgcctgctaagacctttaagcatccctccttccttattgcgtggtatagagcagctgggagagtgagaggcgtcactcgggaagctgcagccacacgggcctgttggaatgagtgacctccttaaaggtatcaggtcctcatcccttgactggtgaggaaaaagtgccttcctgccggccacggactgacatggaggtcttcggatgagcccggatgcccatgttcttactgtattttacaagtgcctggggaaatattttcaaaaataatattaataatttaaaaaaaaggaaaaactatgcactaacttaacgtggcgactaccttaacggcaggcgttggtggcagccagttaagcaccagtgtctctgcagtctgtggccttagctgtccctcttgtttctcaaccatttcacgtacactactgaggtaagtttataacttgaaatgtgaacttttttttttttttaggattaagaacaaactaatataaatgtttttaaaagttttagtgtttgggttttagtcatgctactagtttagtttttagcttcgtatttgaaaagctttttagatctcgctgcatttacatacagtacattcttaagatgtatgtggtaaataaagctttctttaaagcagtttcaagactttcttttcctttaaaaaataaaatcaggaagtttttgcaacagtggggggatggcacaaattcagtctttgcagttgggaaaatggccatgtggaaatgcagaggaaggcagtt

SEQ ID NO: 30126 - DNA, 1194 bp, Mus musculus
tctccttctcttccctttcctcagaagtaaacaaagcaagtcatttgttcctaatatcatgctcatttcaccttcaagacttgtttgtagataaatgaacatttcagtttttcataaccaggctccccacccccacccccttcccgatcatgagccctatatagccgcactggaggaaattatttaaacaagctctaagagcaagtagcaatcagattgtcacatagcttgactcccatttcttactgtgggtaatcattaaccaaggcgattacagttgggagtcggagagagaggatgagaggaaagtgcattaacaaggaaaggaaagcagggacgaatgaggaaggaagacagtgggcctcggaaggaactggctcttccagcctgtgttccctcagcttagccctgagtgttgtctcctgtatggaccgaaggccatgtgactgatgggtggccagggacttggggtttgtgtgctcgaacacagagacctatgtgagcgtctgagtcacgtgattggtatcagacctgatagtgtgagagctcctttaggcaggatcccccaccatgtggcagagacctccccaggagcagcctttgttccccaggggaggttggaatgtggaccccctgcctggacactcccattgtctttcactagaccattcttttcctttctttccttttcttttctttttttcttttttttacagagactatagttgtagtgctctataatagtgatagcattcaaaagtagatattttagacttactttattttttctttttaagatttatttatttattatgttgtaagtacactgtagctgacttcagacactccagaagagggcgtcagatctcagagccaccatgtgagtgaactcaggaccttcagaagatcagtgctcttaaccactgagccatctctccagcccctagatttactttatgtatatgagtgttttgccttcgtgtgtgtgtgtgtgtgtgtgtgtgtgtgtgtgtgtgtgtgtgtgtgatgcccatgtctgactggtgcccatagagatcatgagggtgttgggtctcctgaactggagtcatagatgggtgttgggtaccaaacctagaaactctacatagtggtgggtgctcttattccttgagccatctctctagccccttcaaaaaatgcttttaattttta

SEQ ID NO: 30127 - DNA, 1139 bp, Mus musculus
tgattaagcagcattgtgccctccacggtgttagatgtgagttggtgcactgttttgcttgaattaaaaaagcctttggagagaaacttgagaatctttctctcctgggccctcaaggtttgcctagacaaagagatcttgagccactgggtgacctgcattggacggtttgtagaagtctgtgtgacagcgagcccatagtgaaggggatgtgggatatgctagatggacacacatccccttccccaacagcagtgtcactcacaatgagaccagataccaggagacaccaatgcccgtggtggcttctctggccacttaagccacgattcacctttctgctaagatgcaggtcctaccaggctgggctctgtgaggtgtctgaggtgtgaagtgtttgctgtcagctgtctggcttcccagtgctgaacaatgtctctcacagaatgaagaggaggtcttggtggagtgtcgagtgcggttcctgtccttcatgggtgtcgggaaggatgtccacacattcgccttcatcatggacactgggaaccagcgctttgagtgccatgtgttctggtgtgagcctaacgcagccaatgtgtcagaagctgtccaggctgcctgcatggtgagtggtcccatcctgtatgtccaaacccaccctaccctgcctgttccacatgctgtaaattagagcagaaaccctcatttaggaggataaagtataactcctaaagccttttatagcactttatgcactatatagactttatagcactctaatttctgtgggcagaactcctaatgaccagcagaatgcatctcaggaggcagggtcctgtaaaaaaccagtaagatttaagggtcaccaattctagacttcgaattaattttagtatgtgaccaagaaatgctggtcatgtgtgagttatcaaagcctaccttcaactcaggatttaaaaaataataatttaacaagttgattttcatttcctgtggttgttttcagcacgtcgatattattttctattcaatttattatttaccccttactttttacagcaacactatccagtagttggttttgctttatttgtgacgtaagagattagacataacatcagtaggaggcagatggggtc

SEQ ID NO: 30128 - DNA, 1117 bp, Mus musculus
aacaaaggagcccattgaacagcatgtagtgtgtctgtaaagggaccgtcgacctcgacctggctaaatgtcaaatgtgatgctgaaggcactctggtagatgctggcttctgttgactgttcatccctgggctttcaaaggcaacaccctgaagtgggggagtctttggagcaggtttcaggttggagtgtcatggtctcgtagacaggacccactgaaacactcacacacccgtgccccgtgccctgccccccacatatatgcacatacatacatacatacatactcatgcactggatccctggagatgctcctaactctctactagaaaagctggctttcttcttctgagcaaacgagaatagagtgataaggtggcccggtaccagggacaccaacctactgagcgacgggacatgtagagacttgacctgtattagagagtggattttcaatcatccttttatctgtaggcatggacaccctgaacagtgccatagaaaatctcatgacgtcatccagcaaggaggactggccttcggtgaacatgaacgtggccgacgccactgtgactgtcatcagtgaaaaggtggggagctggggcagggacaggctcacctgggctgcagggaggttttggatacaatgccttttcataagactcgaaaactgagccaaagcttgacctcttggggtttgtactgccacatgattaaagtggcctatgttaaagaagactcgaggctttgtctgtatctaattgtgccttcctcgggcccaggatccttccatcctgatgccccaatcctgccttcctcatttgccccagaggctgaaactgttcaaggtaatgatgtagcgccagccatggcttactgtggatttgcattttgttattagggctccggtgtagattggaccgtatgctgtctggggctggggtgcaaatgttgctcctggtagggaacccagtgatttttaagttatggagaagaggccattggtcatcctgacaggccaacattagcctcaacccagattagcccatcgtggtgactggacaaattcacctgcctaacatcagatcagaggcccaggaccaggctttaaagccag

SEQ ID NO: 30129 - DNA, 1196 bp, Mus musculus
gggcaggaactcaaaccggacaggaaggaacctagaggtaggagctgatgcagaggccatggagaggtgctgcttattggcttgctttccacggcttgctcagcctgcttttttatagaatccaggatcacaggccagggatagcaaatgagctaggccccccctcatcaatcactaattaagaaaatgccctataggcttgcctatatatagctccatcttttggaggcattttctcaactgaggctgcctcctctccaacgactctagctagctggtgtcaagttgacataaaaccagccagcacagctagtatgcagtgtttaacctggggattttaactgcttaaaatagctgcaagcaggccaagacaaagaccatttaaaggagagagatcacagtcaagtacatataatggtaatagcagttaacagaagcagacggtgctcttgcacagctgtgcttttgtctgttcaacatgtgaatttacatccatttcctggtgcgattgcacaaatgcttctgatagcagagattcggagggaccattctgaaggtgatcagagagtaggacctgacccatacataatgtcggctcagaagacaaatgccgggcgactgaatggccaccttctgaactcacacagccataggaaggggggcttgtcctgtgtgcccctccttcccccacatccttcagggccttgggttccacagcctcacttgtgttcaggggtcagcctgatttatcatctctctcctgatcatttcccagatgtccttctgtgcacaccagaaggtcatccacatgtcccgttgtgtgtttttttggggttttctttatagcgctcaaggctgtatcacaaaagcccccttttctgctcttttgtttctttctgctgctctcccaaaattgctgcacacttaatgacataaaacaacaagcgatattctcttacagttttggagactagaagtttgcaagggccacggggttcaacatgttgcatatcactctttgttattgccaaacaattagcctttaatagacatgaggcattcgttactcgtttactggtcacaggcatttgagtcacttctactttttgtcacaatgaataatctaactgtgacatttctatatggtgtttcgtggaacacatgttttcatttctcttgggctttatctgagaatg

SEQ ID NO: 30130 - DNA, 1341 bp, Mus musculus
attgaaagctccctcaaataggctgcttcatgcgctcaaggaacacccaccaacaaaacccatctccacaaccaccagattagctcaccggcgagtgagactgcaaggtttgggggcttggcttgtaccattctgtgcggtgcatgggggagttcgagccctcttggccttcctcctctgcttgtttctgctcccgtctcccctgctcaggctttcccagtgagcgaggccggcgctttataacagcagcctgggcggctccaccggctgttttttcggctcctcgggtttgtgtctgcaggtgccatccgcgaagatgcagctgaagccgatggagattaaccccgaggtaagcatagctgctgggtcgcttcgggagaaataaggctgacccttagctacagctcggtagctgaatcatttagttttattatcattttcctctttgcttttggctttcagatgctgaacaaagtgagtggcgcggcgcgcagtctctgtccctatcctccaagagcatcgttggagacgcccagccggccgcgccctgtgcaatggaggtggctgggctggggcgcccagctgggtgtcgtctctgccctgagttatctaggggtttgggagtgactgagagatcgatcacggggaggtggcggaggatggacccggacagcaacgagcgcggggagcagctctcgagggcgtggcgacggcccgcggactctagtccgagggcttcgcgcgagccacgtgtgggctgagctttgtgctgtgtcactgcgcggcacgcagggtgggacggcgcggaggctcctcccagactcgggtggggacccgtgtgtgtgtgtttggtggggggttggggagtgggagggccgcacgagggatgctcgtgctggccccgccccctagcaggtgcccattatttgtctggctttttcggtctggctgccctgtctttttcttgcaggtgttggccaagctgggggtcgccggccagtggcgcttcgccgacgtgctagggctggaggaggagactctgggctcagtgccatcccctgcctgcgccctgctgctcctgtttcccctcacggcccaggtagggagaggtctgtgatgggcgggtctcagtggatacgcagtgttgtggaatgagttcctacctcacgctgtccccttttcctgtagggtccctgataaggatcccacttcttagggtgggaggtgcttgcattttcatcggggctctattgtgatgtccattattgcctcaatttggaagagaaggagcccattgcgtctaagtctttttttcagttatccaaagaaagatctccaact

SEQ ID NO: 30131 - DNA, 1197 bp, Mus musculus
catggttcttggccagtgtacattgagaccttctttataaaggacacagccttggaacatcaaagatctggtcacctcatagcactggtgaaccaaggtataccaacccaggcacttggcaaagaaacatggagtctttgtagagagggagtccaggttaaaatggagcctgaggtgtaggtctcagaggcaggtttttcccttgcctccgtcctctattaaagccagtgagggtaaagcggaaatatttccctttggagtttctctctctgtacaggttctattcgggtattaataccacctctccttttcaggatgctgccaaggtctgcagagaattcactgagcgcgagcagggggaggtccgcttctctgccgtggctctctgcaaagcagcttaagtctggggagagagaaccagccgatccccccttccctgggcaggtgcgcgcggcccgcccttggtttgcagctttagcacttagaaccacagctgtcttcttgcgttctacagccccatcccctccaccccacccaggccaccagggggctctgtcacagccacaccaggctgagcactttccctcctgtgtgtctcgtaccttgctctctacggtctctttggtttctgtctgtaagttacggccctggatgtggtttgtctagtccttaagaggaagaataaaactttgctggtgagagtatcagctggtttttattttctctttccccaccccaacccctcccacagacaaatgtcttccatctaatgcaggtaagaagattcccatacaatagtattggtttagtgtttaatccagactttatttctgtacactgacatgtctctacatacctgtagaaactaattgtttgaaagttcggtgtaggctgggtgttgtgactcaagcttgtaattctagcactagggggctgaagcaggaggattgacacaagtttcaggttggcctgggctacttgtgtccagagagagagaggggggggggggagggagggagagagggagaggggggatatgaataggcaatttatgaacagtttccataaagtgcacacccagtgttctatatcattgatgttttatgttggtttcatattacaatcagtcctggcaacaccgttagctggagatttccttgttcactgaatgacctctttcaggtcagaatcacatgg

SEQ ID NO: 30132 - DNA, 2278 bp, Mus musculus
gcgtagtttaacatctagttaagctgtgtttagaagattaacattattagctggtaattctgataggggtcccaaattacaggtctaacactgacctcagtccaatttacatgatttacataaatgcatctcagtgcaaaaataataattttcctggcatgttaaatcaagcctttaacactttctgagaaaattttactgtacattactgtttgtggttatgtaagtttgtatttagtgataaatgttactaaattgttttagatgctgctgtgcctacatcatgaaatacatttatttcttttaaaaagaattctgaaatttgttttaccctaactattaacccacgttatgtctgttgtgagttatggtactagatgagttgagtatgtttggagacagtggttttccattctgtaagttgggttgagattttagcagaagcacacctcctgcagtttcagttcacacgctactatgctgctttctagggcaggtgtgtttagcctgcaccataacagagaagtctgtctgcgtcttatgacctgtgaagctgttgttcccatagtgcatctgtggctatgaatgatgtttgaaaaatggattgcctgtacacctattttgaattagatctttggggccatgtaatcatttactgtagaagacagtagtgacacagagacctactgactaacttttataaatgtcaaccagtagattatcagtgttcctatagtttgtaggattacatagttccagaatcttgactttagttttcttggtttcttaggcttgaaatttcctagccatgtgcagcagcagttcagatgcctttgaaaggatatgattgaagacagcatgtgatacacttgtatgttctgaaataatgaagaatattctgtagatgcatgtttacccagcaaatgtggttcagagggtttaatggaaagggctatgggtaaggcaactcatggggaatgggcctggggagtagttgagggcagcgatgggtgtttcagcctggtaacgcatagatgagttggggggattggatgtataatgcatctgtgattgaggctgtgtaatatgttcaattcttttcactcaattctattcctttataaaaggcattctgatccttactactcactgttgcatgattggaagtacttaaaacactgcacaagtttaatatagagtaatggaatgtggcttttttttttaatacccagttctatctgcatgtaatttggatttttcaaatacattcattagtaacttaaaacatcagttttctttttgtttaagttactaatctatagaaaggtgatagtcttggggtagatttccagaaaatactacttgatagcttagctttaaccagctacttttatatttttgtaatatttatccaccaagttggagaagcaacctcataatatccagttgatttttttatgtgtgtgcctagcctccttatcactatgttttaagaatacaactttgtagagcaataaagtgactatcttgttatgtaaacatactgatttctaatgatgttttaaaacattgtcttgaatgacatcaagttctggcagctaaaggcatatttattttgaaatgtgttttctcctacattttcccccctaatcttggaacattttagatttataagaacttcaaaaatagtgctgagagtgcctatgcacctcttacttgtctatttttatattagcgtcttcttttaattggtaggacatttatgcaaagtaaaatactaactttggatcagctaaagtacaagatgtgtttgtatttcaccaactctttcatttgtgtcgtgtgtgcgctgtgttggtacctggattgccttttatgtttcaaggcctataagtgagtttgttctttatggtattggtacagaaactttccttagaagagctaattcatgctgactttaacatgaatttttttcttaaaattgtaatttcaaatgcttagtgatataattaagactctttaatggcattgcagaatttcattatttctgataacttgtgcatgagtgaaaatgtatatttgttccttaagggaaggtgtaatataattctcaagcccatgagaaggcaaattttataatttgaacattaatagatgttagtttgcatgaagttgcagttagaaatattatactctgtgtgaatatgtacaatcaactgatctcaaatctgaaattagtgtttccatgtacacatgtcaaaagtgaggacatgactag

SEQ ID NO: 30133 - DNA, 1142 bp, Mus musculus
gctcagcggtggcttctcagttgacgaaggctactgctgtaattatggctaaccattatagttttgagataggcgatgcattttgttctaatggttaatttgagtcatgatggtgactggtaatacagagcctttcttattgctaactttggtgctaatgtggtggcttacttatttatctttgaaatgccatctttatagtttgtagacacggagttccttccttgctgatcggatgcttttctttcagcaacacttctcgttgccataaatgaacttcgcaggagcgcgcaggccaagggcacgacattttataagtatggtatgtagtttatgtatgtttataagtatggtatgtagtttagagccaggtgcttattctttttatctgtttaaaatatttcctgctgctgctttgttactaagagatagcataaaacgtgcctcactgtccgcgctgtgtggctctcagaagacagatcagtctgttaaaaagagaactttgagcataggaatgttttctctctggacttgacttaagtcagctgtcatatttctgcatatgcctgcataatttggaaaaactgcttaagttatcagcacttaaggtaaaaaatagggttttaatactatggtctctcatacattctcatgttaattagcaaatggatacttattgaaatgacttctaatgagtcaaattaagatttcagaaatatttttttcttgtctattgccccaatggttaagtcatggaaagtcgtgatccgagtacaaatgttattctattggaggacactgcagctgtcttaggagtgataatagcggctacctgcatgggccttacctccataacaggtaaatatatcttaacctacgcatgattttcttctactacctaattctctaatatacgggaagttggtcatatcattgaatacttttaagccaatacattattacatattaattccatactgattttttatttatttgtatggaaccagctatcatcatgtttagtgaaataagcctggttcaggcaaatactgcctattttctttcatccacagactctaggaatgtgtgtgtgtgtgtatatgttgttgttgttgttgttgttgttgttgaaagcagaaaaa

SEQ ID NO: 30134 - DNA, 1330 bp, Mus musculus
agtttggtccaccaaaggtctcatcttgagcattctggttaaatcgcactgcgtggttttggaacaggcagtgttttgagggctgtctttcctgcccacttgggaaaatatttctgtctactttgtggttttgacccgaacactaagaggtgcgtctcctaacgtcattctctagaagcagacgtgcattccagaagcaacacacttactgaatggagtggagacatttccacatcttttagatcatagtagttgccactttgtaaaacttcttttctctcttttacctttttttccatatttggtttaatttttgtaatgttaaagacataatcctagatgtatgactttttttaaactggcttcagtgccatagtgtttatttactggaaatatttgtaaatgttttaccattctgtaatatggactagaaatatttataactttacaggcaggataacattttgttttaatttatttaagagaaggcactgcttgtataagtgtgaaccgtgggttcctttggcgttgagagaagtaaatctccaaccccgaagcgtgggctgtgctgtgtgtgcgaccgatgccctgcggctcaagtgggcattagcatagcacgctggctggaacacaggacgaaagcacagagctcgctggtgaccaacgtgccggtgccgagggcaagaacattcactttagtagctgaagactctgaaaagctgtagctgtctgcccaacagctcatgagctgtgctgcagttggtggctgccctgctggagagagtgctcggcgcacagccctcacacctctgggaacccagggtccccagattttctgagacggaagttcgtgtattatagaaaactgtaatgtggaaacaaaaataaatctccaattaaaggatttgttacggtagttttcaatccagaaatgacacttggtggaaaatcatgagaatttgtaacgtgctttgtgctccctagggagcatgcttgttaccctttgttcgagcctaaggagggtctgtctgtggaggtcaagctggcctggaactcactacatagagcctaggctctctgaagataggaaattggagccagtgggatagataggtcattgggtagagtattggccaccaagccttccaacctgaatttgatctccaggaaccacatgtgggtacagaaaactgactgctccacttgtgtggtatggtatgctcccttccccaaatatatgtaataaaattggacttcttcttaagaaatagccagtaacagtttccagtgtgcatgggtaacacctagaactgatttctcttttcttaca

SEQ ID NO: 30135 - DNA, 1230 bp, Mus musculus
tgttgaaaggggtgtttcttgtgtgtgatccaaggtctgggaagtctggcctaggaaatctccagtgtcgggaacctagctgttgtgcatatgtggaaactaaggactacaatgctgacctccgccgtagcagttctcacatgtaattacatgagggcctagaattagcctagtcaagtgtcccttttttctgcctgcttatgtgattgctgttttcttcagcttagtttaccacctgataccagcagtcaaacacttaggattgtttcagccttctgctggctctttccctgtgtgggcatccatttaaggctggggtgctactcaagtcatagtggtttcctgtgtggtcccctgactattaagtcagcctgcaaaaggtgccgcttctggcagaactccctgttaaagctgactaccctgatttccccacatgccttgagtttgttgtctagaggtctgaagatgttgtcaaattgacttggtttgcttttccacgtcattctggcagtcagacacattgttttcgtgatgcaaaacctagtcctctgtcaacttttagaattaccctgagccgttcagcgttggttggaagtagacttgagttaaaaatatctcaggatgcagctgtgccctgtcattggtgaggaaaatgtggttgccgggctggtgtaactgaatgtggcgttttcgtcagtgattgggtaggtccggagtcccagtgtccaaggctcgatagttcacagtggtgctttcctggtgtatccttcattttcgaaattaaaatgcctgcttctcacaagtgtttaacctcaggcacagatcttgccaagagaatgatggccctggaatgagctgtcaggggactgagaccagggacctgtggaggggagcagagttttacatttgataaggccccatttctcatcagcccatttgtgggtgttgagcctctcgtggtatcaagaaaagtgtagctgtttctacaagtccttagccctgttcctcgtcggtcacagcatttaggggactgtcaccatgtgtttcctaaggcttccctatggtagagagtggaggagtaaaagcatgctgatctcttggtcaggtggtgagggaagcgcgtgcctctgccagtcgctagtgggctgttcctgtagactgccccttacccttcagtgatctgcaccgaggccatgccttcgtcaggatgacaaggagacaggttactgc

SEQ ID NO: 30136 - DNA, 1057 bp, Mus musculus
agcaaagacacaagctaggtgacactgtaagcctccatccgttttaaacgctgacgggaagaatccagaacagaggccatgtctatagagagcgcgtaggtgtggacgtcggctactttttctgttaccttacagacagaactcactgtgtccatcagaagggcaacctcctcgctgtggttgacaagcaggagattctctttatatctttaggaaacatccaaagattgaaaaccattttccaatgcctcgtttcataagttcctaacgcacagcttccgtagccttaagtcatacttcgttgacacagtgccggggtggtgggttcagcgagaactcccacaagctggctgttgagtaagatcaaacgcagggcatgaacgacggcatctgctgttgatcaggggtctggtattgtagacgtggagcgtcaaggccgttctgacaactatgcaatggctggtgggtgatttctctgaaatttgaggcctttgctgggctgagtgaaggtttagcatatataaaacttctgtttcccattgtcatggatgaaaacgccccatccagctgtgcacatcctcctcggtctaagctctgagttacccttctgcttccctgcttaatttgtggaatccgtatgtgaggttagtgatgccctgggaaccacttcctagtaaaggctacagaggtgctataattgttactgatggagattacgctttggacctgcggagaacactggctttattaaacaaatcaagattactatgttctttgtggaaccaaaagctaaatgggcagcgtttgtgaaaattatgagtgtcatctacaaacacagcaaagagctttgaaaatggggtagaaattcagactgtgagtatccgtttagaaaggacttttggggaggccagttttgtcagaataatcacgcatcctttagattcaatatttagcaaatattgaacaaatcagctgaacagtttagaagtaaaagaaattaaatgggtaaatgagctgtcatttacagtggacccaagaccagtgtctttggctgtcc

SEQ ID NO: 30137 - DNA, 1212 bp, Mus musculus
gcagggagctatgcgtcatttctcgggtggcttcactgcgccttttgtgttatgaggttaagttgaaaatggaggcccttgctccttccacgcctggctgttggtcactgatatctctcttcttccattccagagagccggatgatcctggatgcctttgcccaacagtgcagtcgtgttcttagtctcttaaactgtggaggaaaacttctggactccaaccactctcaatccatgatttcttgcgtcaagcaggaaggctctagttataatgaaagacaggaccagtgtcacattgtgaaaggggtccagagtcagacctctgacaacatagacatagaaatgcaatatatgcaaagaaagcaacaaacttctgcctttttgagagtgttcactgactctctccaaaattatctgctctcggggagcttcccgactccaaacacctcatcagccagtgagtatggccacctggctgatgtggaccctctctcagcctccccggtgcacaccttaggtggctggacctctccggcaacatctgagtctcacggtcacccatcctcctctacgctgccggaggaggaagaggaagaggaagaagaaggctactgccctcgatgccaggagctggagcaggaggttatctcgttgcaacaagaaaatgaagagctcagaagaaaattagagagcatcccaggtatgtgttcacactgtatgaagacagcggcaactccaatccgtacctctgtgcgtacgtgggtttggctttagtgatggcggtggagccaggatgttgaaaacttgaaaaagcgtaaaacgtgtaagatgtccttggcttgcccggtccaggcaggaattccagggcaagagctaacttgtctgtgttagcttcctgttcttgggttaagccctgaaggccacagtcctcatgcaggatgtctctattggtgtgtaagtaattcctatgtgtgatgccttacattgatgtgcatttactgttacgaggctgagagccctttacaagtggcctgtatttaaatatggcatctgtgtccccaggtacaaatgcgaacaaatccatctttgcattagcaggattcagcgctgagcaaaagaacatgatctattctgtccacgcctctccttggcctcctttgctaagtttcagcatggaattgattcagcatgtaagcccctccgtgtagagtt

SEQ ID NO: 30138 - DNA, 1514 bp, Mus musculus
ctgggggtgaccattgaggtcattccccccaaaatgactggttatccaagaaaggcttgcttcccttggccccgccatcagaggtatctgtctccagattcctcgcctcagaacattgtcaatgagaatgggatcttctgacctctgcctggaaatctaaagtcatctttttatcctgaatcataaattattttgatggaactcttccacatgagcacactcagttatacaacataccctgaaaacgagactctatatgccttttgaccatggatcctgtgtttgaatgacaggcattaatttggtctctctgttcttaagttgggaagaacacagagagtggccatttgggtaaaacttgaaatagggacttgctatagcagtgagtttacagagacttaatactctcaagtttctaacctttgtcagctggggaaaaggcacatggttttaccatggatttgaatgggtgcagtcaaagtgactttaagcctatgttttctgaaataaacaacacagaactccaatttaaaagtcccctgtaggggactctggtaaatgctgacatgagtgctttgtaacgtttacaatccagaaaagcggggcggtgaatcgttggtgttgggttgggatatcgcacagtagtggagagcatagactttctgtgtgttagatatacacctaacaattcactgctgtatcacgcctataagatgcactattggtgaaggtattagcaggaaagcagtgttcttgggaacgtaggccttttaacatggtaaatgtgcctcttggctggttctccactcagtgctccctgggagccgggagaacttgctggattgcttctttgtcaccctggcaagtgaagggatactgccaaataagggagccacggactgtgttgtcattaaagagagtcagtgagttggtttcctttccatcaggaaaaatggattctgtaaagagtcagggcgttgtctcagcatttgatgatatattttaatttttcagttcagtatcccagatagctggtgtgatgctcacaataggttagtctgttctatactcagtgtcacactcataacctgtgattgaaagctgccctttcagaaaacgaatgctagtcagaaggcaatgggttggcgtcctttttaatcagtgtgtaactattataaagctacctgttcatcatacacttggttttttttttttttctgatgtttcctggtcttaaaacttgtatcataaaatgaatctctagtctaataattaagctacaaaatttattaaggaaatgccccactcattcacaccatggtgagcaagtatgtggagtcccttctgtctgttgcttacaataacactgtgtggctccgtgcctcataaatgctttgtaattgtgagtatttctggattgtttcttaaacatatcatagtctgatttttctcacattaaaataaaacaacttgtgaaacttagttatactttgctgtgttttaattaaccttca

SEQ ID NO: 30139 - DNA, 1146 bp, Mus musculus
accatctgcatgcttgacttttcaaacatgagcgtgacttaaaattttgagcatttccaggcgtttgctactaaaatctgtgatgttgcacctttggccttacaactgcttttctgtcgtttgtcttcttttatttgttccagttggagggacgtgtgtccgtgtgaccgttgttatgatgctgactttttttttccttttttaattgtactgtctctcatttctgatgaacgttagactcctttagatgttcctttaaaaaaaaaaatctggcttttgccgtgtattgagtggctacgtcttcagtctttcccctcctaaggaaattacccttacatatttatgtgggatttccaaagacctttgggataatccgtgagatagtgcatgggctttttgtcatgtacataggctcagcttttgtcctgtgctgtttgttcttcactgtgcgctcccactggcgatgatctgtgcagtacagttggtctcatggcgactacccgtatgcttaagcctgaaaattatttcacagttcactcagccgacaactcccaaactgagttgcatactgcttatcgacacgagagagataaggggcacacttccctcgttttaaggaaatacctattttactctagcctaacacctcccagtcaatgaatacttaccatcataagtagggttcactgatacgtttttcaaacatgtgttcgcgctgatcagtttggcatctccatgaattcgcctgaaaaaaaaaaaaagcctattttgctacctacagtaaatggtgaaggggctgtttaaaaaccacacccagttttctacagtttttatggtatttttttcatcttaaaagataaaaaaaaaggggggagttctagttttcagatacacttcagagatcgaaacaaactcttctgccttctattcaaaagcctgtttgcctttttgtggattaccagcaaaatagaccttcaaacgtgtgcaaggactagctttgagaaggggtgttttctccatattaccccattaaatcatttcatttccccttccccccttttcttggtctgaatttaaaattaggctgtgtcttccttctctaaagctgtagctagtttccatcgtgtctccatactccctgcaaag

SEQ ID NO: 30140 - DNA, 1236 bp, Mus musculus
acttatttaaagacaagtggtcatgtaaactagatgccattctctaataaagcagaggtcagttcttcagaggttgacctgctagctaggaacttcaccctggcattgtgagtggagtcccaatttgaccagtgttatccaggtgtctcttcttgtagccattccttacaaaaggtaagcaatgacaattggtagttcttccatagttccagaacactggcccctagtcatccgcagtcagtagccttggtggccattagatggcttcttggaggccagggcagtgggacactggacacatatctcacaggacattatcttactggggcaacaaaagtgttgcctgctgccaattcatttatgctccgttgaagtccatgtatgcagttctccttggtgattgtgtatggtcaccttctgtcagtgaagggatagtgtctcttctcaaataaaaaaaaattatttgttgatttttttttttaatcactagctagactaagaactgacatctcctcttctagaaatgtgggaattcacagctctctgctttctggtctttgacatgagagtaataaggaggaaaatcccttcattgtgctggattctgtagcagtcggctctgtttcacaagagtcgagtagaaaaccgaacagccaaagtctttcaggaatgccatgcttttatgtgttcatcagctactcatggatttaaacatttgacagagaagacagatgggatagattcagatacaatgaagtgaatttaggtgcattgcattacaagggttgtctgtatagttgacagacattgatatgtcaggtcgtcgtcgtcttcttcttcttcttcttcttcttcttcttcttcttcttcttcttcttcttcttcttcttcttccttctcctcctcctcctcctcctcctcctcctcctcctcctcctcctcctcctcctcctcctccttcttcttcttcttcttcttcttcttcttcttcttcttcctcttcctccctagacttcttgctcgggtagtatacaaaatgaagaagtaactctcctttgctccactgtgaacttaaccttcaccttttcctcgtgacaaccattgtcttgaggttgtgccgttgtgcatagattattgtagctcccattttaaaatatttaatagacaaaggtagcaaatcaccaactgtggtcacttatgttgatagcctggttagtcattcttaaggtcaaggtc

SEQ ID NO: 30141 - DNA, 1152 bp, Mus musculus
actacataaagtggtggcaccttcatttaatcccagcagccaggaggcaaagcaggcaggtctgaattcaaggtcagcctagcctacttagaaggttctgggtcagcccacattgtataatgagagcctgtttccagaatgataaaaggggacagtgggatggttcagtaggtaaggtgcttgccaccaaaccggaggacctgagttcaatacccagaactacaaggtgaaatgagagagccaactctcataaggtgacctctgacctccactcaagggacgtacatacacataagagttaatgtaatgattttttaaaaacgaaggagagggaagatacaatgtcattgaccagcactgcatttaaacctttttaggtatgtaaatttctttcagtcctccatattttccaattacctcctcagtcataaagcaacaggaaacatttgtgtggagagaatgtacctgcggtctctggttgtcagaggcagagattcctggtgattagagcgagggagcaggcttagggtctggagacaggagtagggttggaagaccactctggaaggcagttgggacagtagctgtgtttactggaaccagaagagtggccgcgcgctatttttacatgtgaagtagcaaacatctgctacagtggcgtcaattcaagaggaccagattagatggcagagccggaggggtagccccaagctgacatcagagaacagagggtgttacttcatctcgtgttacataacacttttaatctttttagcaacttacaaaactgagaaatctattttaagcaaatgtctaaatagctcattgcatccttatgtggctattcttattcagttatcacttgccttgccatcctagaatgggcacctgggggcctcccatgattcaggagattgtgtatcacaccataccacccagttccagtccatgaagaaacccccgtatgggagtagtcagcagctgctgtcacagtctctgagccctggcaacacctaatctccatcctgtctccatggatttgtctattttaaatgctttatataagtgtggttgtacaatccgtggtggcctgtctgtctgcagtctttcacttggcatgtcttcagggttcacccacgtcacccttgtctt

SEQ ID NO: 30142 - DNA, 1744 bp, Mus musculus
gctctcaggaactggctcccgttcttcctggtcacctccctggctgccatcattctagatccccctgcccttttaagccgcaataaccatcaccttcttcctagtctgcctagttgctcatgttttaattttgccttcatgattgaccctcatgtccggtaaccgtacttgtagtcgaagcctggtggccttcggagaggtgggtgtggcagagcctggactgggtgtgagtgaccgagcacagatctctgcagccaggagccataagccctgtccccatttgccagttgctcttcatatcgctcttcagaggtcatctagcacatagcagcttccgtctagtctatgctgacatggcttctccctgtttgtgtttcaaggtggtcctgcagttaaaataactggaaatggtgaccatcaacacctcagatttcagtgctgcaccgtggcagagggagtgctgtccatattcagcgggtggatgctccatcaggctgagcaggcagcagctctgagatcacagagatggaaatccgtcagaaaccctaagggacaggaaattgcatgactgataggaagtgcataggatgaaagaagaaagagctgaagtcacagcccgtgttttcacagtgatcgctttgtctcatttattaaacatctgagaaactttgtagataacgttttatcaagaggtaaaaataagttctgaagtaatgtaaacacacagagcacagacacgctggactgttcttaaatgcaaacagcaagacatgtattcttaatatgtaatttgtgatatttgaaaataatgttttaaggtgtatccaagctacatatgtaatgtaggaggtttcatatctttctcatgtttcaaagaaaagatttttaagttgtaaatttttaaagaaaatctgttatcagacatgaacaagaaaacatttaaaatttgtatgcatagtttgggaataatttgaataacaaaattcctaagaaatttatgaactaaaacaaaaacttcaaaaaaatgcaaataacattgttattttcacatcctcacttcttgggagaccatggtctgaggaaataagaaaactgtcaaagatggtatagttacatattgttactcacatcaagggtgtttttataaggtctgaatatgaaatttgagcttttggatggtgacaaagtaattgtaatacaaaccacttatcaccctagctaactgaaaataagcattctgaacaaatacaagctggtcgtctcttcctgtgttgcttgatttcagtgacttcccaaatagctcacttgttggtacagaattaactggtcgctgccgtgtgcagttctgtggctccataaggctccagtctgacagccgggagcggtgatgactactgttctcctcctacggctgcaggcagcctcagacaaggctgctctatgggctgcgacatagcagtgattaggaaaggagcttgggccagcgggttctcagtgtgctgcttttctcatcaagaaattcgggtgtggaaagtggacctatgcggtatgttcacgcagttactgatttccttgttaggcaagtttattaagtcagcacggagcattggcagcttgtggaacaatgtatcaggcctggtccagcagtctctattgcttccttcctttcagggcagcccttcataggagaataccttgttctcttccacccccaacagcctgttgcacagcttttctgattggc

SEQ ID NO: 30143 - DNA, 1996 bp, Mus musculus
gactggatcctcagcaagctaaacatgcaggacaccctgcttagagttgctggcaatccttcaagtttggaaggatgtagaagagcacctctcagaagttaggattacttgtggctttgtacaagggatgtcagcattttgcttggcatggaaaaaccaagaacctctctatcattgtatacctgtgagcacatttgtaaacaaaggatagtgtttgaccagagcagagtttaggaactggaatatttaattcaggagaatgtgttgtttttttgaaactttgatttttgtaaaggaattttaattgtcttctcgatgcaaacattatcaaagaagcttatttgaaatatatttattttacagattagcctcaccatgcatttgaaaaatgctttaggtatttaagtattctccatgggtcccctgatgcaatgggagtgaacataattctatgatgttctttgtaacctaggtttctttaccgagttcttcagggatccgtgaattctccttatgaaaatccaacctgaattctccttatgaaaaaaaaaagtactttaaaaaattgttcattaggaaaacattaatttttgaggacaaattcccaagagccttttatttcccatgagagaaggttttggttcccgactgaaggtgtttgacgtcactctctgtcatttcagctttctgctgaagtagcctttgtagggaagggcaaagaagaaggctagtgttttcaacaatcccaggctgccttctgctctgtttactttgtttactgtttaccctgttactgagtagacgcagagactccctatgtgccgatgttgtcaaccaggaaacggacaaatggccatgaaacacaatcacctgagcctacaggccgtgtgtgagcagctcctgggttctaaaattgatgacactcatgttaaaaatgagacaatcattttgaaagtcttccagagtccgcttgagagttcatagttgtaacagtgctcaagagtttgtctgtgttgtgccctccacagaatgagatatgggttgaaattgatacaggttattctcagtgggaatctccgaggctcttagaaaaatcaacatattgaagggtagagatgtctgtagcaaggtttctgctgtgacaaatcacggatggatgctgtctccatttagtgcctagaaattaacttacactagtcaagtcaatttgctactgtgaaatcatgcactcttgttgaagtctttcaaagcttccatatccacctgacagctgccacctccctgtcatctagaattctcttcatgaacctctatgctaaagatcagtgtctacatcaaagtcttataaactgttactctcagggcctgttacccgctgggtaccatcccagtcactttctgtaccttcctggtatcgttgttaaatggtcttttcacatagactgatttctggaactgtcacaaaaccatgtgtctaaacgaagctgccttctgcttccttgagatttttttttttaaataaattatttaataaatgatgttcactggaaactgtcattactcctgtaactattctctgaatctagctgtaattgatgctagccctgaggaggaaaacaccaacgcgtgcctttgtcagaatgcggttcaggcctttttgtctatgggggaaaaaaaatcacttgataccagatcattcatcatcgccatagcaacgggaattcagtccttgagatcatcacttcccagataaaccttaaagcgaatctcatatgcaacaaaaggttttaatataaagattaaaggaatatgacaaaagggaggaagaaacaggtcgtttccaaaatgtgaattatctgtacataagaatataggaaagcattaatgtgtatgtcatggggctgtaatcttatacctacagctccaaaaatcctcataactttgctcataaattaattccaaacttaatgtgttggataaatctgaagctatttat

SEQ ID NO: 30144 - DNA, 1148 bp, Mus musculus
ttgtctggctgtaggtaggacagaatgcttagtgtcatctgagtcagtacagtccccagcagtgagacgctgtctagagtcagcacgactgcagctgtagagcaggcagcattgccctgtgtgtatgaagtccgtctttctcatcagatatgtccatgttcaaagacaaaactgagccatatgtgcagcagcaggggtatttctctggtcacttggtacttttctcgatcatgtaactttctacttttttaaagaaatgattctataaaggaatcttaaattctaacaggaagctttgtaattagatttcaggttagtttatcagagaggaatttttattggtcattgaagcaaattttacactgcatattcttgagaaaatataaacaagggccagactaggttcctcctaggaggttggtttgtttctttttttggtgcaagaagctttaactgatgttggcatgttttgtaaaacttgtgtgtatcttttttatgataataataaaggaaaactaatatttatgagcaatatgtgccgagcacagggctcgggggctttatgtacttgattccattttttttactgtaattcttgatatgttatagctgaaaataatccgttttgtgaaatcaaactgatagagaaataataagccaaattacatagatttgtaagtcatttaaagtagttttgcaatttaattttatgattgttttcattaaaaattttcataccaaatttgtgataaaggatatttattattattatttaagacacccaggagttcctgattttaggtaagacattagtattaatgggcaaaactctagtgaggatgcagaacacagaaccactacatgtgatggatgcacaatttaagcatcactccagaggaaaagataaatctgcataggagagcaagcaaagagtagactcacagaaaacaagtgtggcttcatgtggtaagtggtattgaaaaaagtaagaaatggggctggcaagacagtcacaggtcaaagcactgtctgcccttccagagagctcagctgtgtcctggcacgcacctgaacgttctccagctcccccagcatcagaatacatacaactggtatacagacaaaacacgtgcacacataaaacaaaa

SEQ ID NO: 30145 - DNA, 1232 bp, Mus musculus
gttgtacctcagggatgggcagactggtcttctccatagttgtacctcagagatgggcagacttctccatagttgtacctcagggatgggcagactggtcttctccatagttgtacctcagggatgggcagactggtcttctccatagttgtccaagctgcagtgtgggaggccgagggtgactgagtgcagcacagtttgttctatctaccaaaattctcttgaattattctgatttgttcttttgacaaatgtcattttatattaaattaatccactgagagatggtctttgagtgtagcctatgactacaataaatgggtatgttaatgaaaatttctattttcttcaatccaactattttgtgtaggtaggacatgtttactttagtcaattactgtgccctgtggtgcattatcatatcatcattgtataggaacttagggcttaccaaaggataaaagatgacatttgacagtgactcacactccaggttattctcttttacagtcagtttttattcttcctaaagcaatcacttacattaaagcgtgaagcattttccccttaaagaatctttactgtatcttataaagggacttgtgcagaagagggtggtcatattgatacagaaaagacgctagttgaggcagctttttttctttactcatttggatttctgtgctataagccactgattcttatttcctgcattataataaggctaaaattgtatggggggcatctttgcatttgcaagaaggtgctcttggcatataaaatagtgttgaattcaaagctgttgtctattacatgttcagtatcaaagacaggctgacagtaggaaaggatgacttcctgtactcagatctgtttgctcacctaactacactctagcattcgttagatctagtcagtaatggatgaggggctttttgttgtctaaatcaaattcataatttattatactgttagcatcaaaacctttctcaaattgtcttatttctacttaaatagagagctgcagatccgtgttttctttgacgtaatactaatgaaacttttgcttcaggctgaactggaggcttttgaaaacagactgaagggccgtcggaagaagagcaggaaacgcgatgaagtggccgtggagctctcgccttggcagaagtataagtcctacctccttcccgtgtgtgcagttgtggtggcagtgcttatgtggtacatcttcc

SEQ ID NO: 30146 - DNA, 1207 bp, Mus musculus
ccagaacacacaagtgactgaagcatggaacaaggtggctcgctcatttaactgcacaccaatagaaggtaggctgttgcaccaaccgaagcagcatgtgattgatggagagaagacgattgaccaggagaagaaggaccatgaaaaggcagaattagaggtgcgtgaggtttatgctgtgatgtcctcgtcagctcaggagaaggcaaggccaaagatgcaggacagagaaccaccatctacaagtgagacccctctaagcaatatggcctgaaaatgaaagcttcacgtgaggtggaacggcgttttgatgccatgccgtttactttaagagcatttgaagacgagaagaaggctcgaatgggtgtggtagagtgtgccaaacatgagttactgcagccatcgaacgttctctatgagaaggagggtgagtttgttgcccagtttaaatttacagttctactcatgcccaatggccccatgctgataaccagtgatccctttgagcctgacctgtacaagtctgagatggagattcaagatgcagagctgaaggctcttctccagagttctgcaagtagaacaacccagaaaaagaagaaaaagaaggcctctaagactgcagagaatgccaccagtggagaaacctcagaagagaatggagctggggactgaggtgggtcccctccccagcttgtcattcctgcctcaccccctcccaccgcaccccaggctctgtcaagtgcagtttgtcttctccacccaagactagcagcagagcaggggtcttcagtcctcatcccggtccccagcccacccacccactcctttcaacaaaaaaccagctccaactgactctggtgttgggaggccaggcttcccagccactgaagactacttttagtaggaaaagaaattgaacaataaaatcaggagtcaaaattcaaaaaaaaaaaaaatgccttctgtgcgtccactaagatgatcgtatgacttttgtccttgttagtaacaaagataaaacaaggtaattctagccttctagaaagtgggaaaattccttcctctttggttttttaataacttaaagaaacctgacaccatttcttcattaaataattgatcttattcatttgctctagacttttctctgatgggagtctttttaatattgattacacatcagtacttgatagtaatatgttta

SEQ ID NO: 30147 - DNA, 2266 bp, Mus musculus
ttctgactaattaaattgttttattagtccttcaggatacagtaaattataaagattgggagagaggaaagaagggcctgagctaaagacttcaaacatgcttctacctatgtttagggaagttttatacagtacttttgcaggctcattgggaaaactatcttatgttttaaacatagctcacacgtagccatgtccaactggtgtcacagggcacgcccacaccttgcatcaacatcacagacttgtgtgtacttgtttttgattgccagaagggctcactgtcagttacagtctttctaactgtctagttcctggctcaggaaagacggcctttgctgttgaagccaccttactcacatgctgtttctgtcacacaactaaaagatctcgtttccattcccaggtttctatgatatgatgtgtctttgttcttgacaaaataacacctcagcacttacaacctggaataaaaccatgtcacaggaggaggggaaatctatgcactgaactataaaatctctggtgatgacagttgtattgttgctcgtgatcggcagaatgctctattatgtgggagtcgatccactttaaactgaattactgtatgaagtatctttttaaaatactgtcccctttaacttagattctgccttacatcagcgttttcatggtttgtaacaagtcatccgactctactttgctgagtacttgctttctaatggcatatgtgtgtatataccccttgaaatcagctggtttatttctatcggattattagcaaactataactctagctgacttctcattttttataatgaggtctgttttttaaatacttaatctagacagttttaaatattggcagttgggtcacataaaggtggggatttgaactcatttcctgtaagtagaggtgttctgtaaggtgcaagtagaaatgcagagagaaagggaaggaaagtttcccgctcaggaaagcatgagttaataacagagacccagtctgccactgctgacgctggaccagcagcagggagacatagagctcgctagcacaaacagcgccagtgccagtgccggaactagagtgtagagtgaaagaccttgtgtccttgcattggaagggatgagagggaaaggaggggctcacggttatccataatgatgaactaaaaaactgttgtttttccaagaaagatggaacgtatactttggtgcggtgtgtctcataaatgacaaaggagtagccgctgtctctgtagagtcacatgtgcacacagcaagcaggtctctgttcagtgtaacagttgaaaagaaataataaatgctgcaatctaataatttaaaagaactttaatgaaccatctattacattttttaagttagataatcagtttcaaaaggaatattcaggttatttaacattgtttttaaatggctgtatcagaaaaaatatctatttttttttaattaaactatttcatcacttgtttaaaaatgtattttggatctgagtttggtgatattatttcagctgctgctgtactaccacagattattggcttttagtttcctaaagagaaaaattgccttcttactagaaagcctttgtgtattgccggtttttctgtttgggaaaatctaaggatttactgtggttagtagtacagaagaaatgtggatttgatgaactagtgcctatgattttaacttatgtttgatatatagtagtagggttataaatgttgattattttgtgccaacagcccagaattgtcacttgtatgtcagcagaagctatgacctctgcttccaaagttatttaattttctcagtgtttggatgttattttttgtaagtgtgttaataaaagtgtaaagaattggaaaaatataaatattcttaactcaagcatttgctgaatcatttttctacaaaacttgtttgtataaaactctctgaagagttgacttttctcagttttcataccctggaaatcacattttgtaaaactggggaccattcataaatgtcagatacttttttaaattatctcagaacatcacttttatatatagatataaaaaatttttttgaaagcaaagaagattaaatacatatgtggcccagatgtttgtatacctctaggatgatctagactatgtatgttcagattgacgtaactcactgtacaggtgtccggttttgacagtatgatgcatggtccttttagatcacatgaagtttgatttgcaaacatttc

SEQ ID NO: 30148 - DNA, 1434 bp, Mus musculus
gaagatgatcaagactgctagccaagcaccttttaggaacccttgtgcttcattgataactttgggggcagcacttttaactgtagtctactaacttcaaaaacaaacaaacaaaactgaagaaaaatatctaactgcttaactgctgccgagacctccacagcaactgtatgaagaaggaatttttttttatttttattaacctatgtgaataagaataagggctaaaagtgacacgtacaaactacattactctggagaaaagaagaaattccaaggatgtttgcaataatggccccaagatgttgcagggcagggtgaagtgaggctgggatgggaccaactccttttagctgaagacctgcgcctgcagagccacttggatttccagccaccatcaacacagagttgacacttaatgatcaacttgaccacccagtcagacagataacacagactttttgcaaaaaacaattgggtctggggtttttgttttttgcgactgacgggataagggtttggggtgtttgggtttttgattgttttgtttttgctttttggtttattttggtctgtataaggaattatgtgtgtgtgagttggagtgtgtgtgtatgtgtgtgacagtcctattttcaaggtgtggatgtctggtgacagcttctcagagcatgcctaaaagagcactgcaagattatttttgaagaaattttattttattagatctaactcttcatagtgtgtaaatgttagaacactttaataatattttaaaactgggtttttcccagtgtctcaagaaaaaaaaaagaaataatatatctgttaacgttagtggactctgctgctcagctctctgatcagtgcttgtgtcgatgttgataactaaccaaagcagatgcctgcagagactttaaaattgtaaaataaagatggacgctgcccgccggcgcctctcattacacaagttaacttatttcactcggtaactactatagacaccgcctagactaaaacctgtattttcttgtacgttcgcgccacacgctgttacatcagagaacatgtccaaagctaaaggaaaagttgtggtcactgatggagtgtatgttctgcgggccctgaagggctgcggacttcaagagaagagatgcaaatgaacttgtgtgtttacgcaggactcaaacttgtttcaggctaaaggaaccttggggatatgggggacacagacaggaagcctgaagaccgactcccagaccacacaatgtccttctccactgtctaagtctgtaacataacaaacgggatcctgtcttcttcttttctaatagaattttgtaaaggaaatgaatgtagcctcccaacgcctctgatttgaaaggaacaccttgtatttttttatatgcatctcttctccactgtgacttttgtttg

SEQ ID NO: 30149 - DNA, 1167 bp, Mus musculus
gtcaggtagagacagcgaagatttccaataaaactcaccaagccaaggagctcacgatatggggccccacgggtcccgagaccactggttgtgtctttgttaataaactcacggcagcgtctgcatcttgttgtattgatccttgttcatttgtttacatggctggccctaggtgtgattgcgtctacagccagtcctagcctttctgcctttatacagacaggcttgttacagcgctgttttccttcttagtgtaatgactatggaaatttacccttgctcatttctgcagtggctagacaactgcaagaggacattcggtgccaacgaagacatatacaggatgaacaccaacgcgcatgtaagtctctgtgtctttcccactgagcacctgcatcagatatcataaaacaatgtatgcgtgcagctgtccttactcgatatccctagaaagaatatgtgggcaagcctttttcattttggttatcaaaacgatctccctgaaagttaggttcagtaaaatattggcttagtaatgaaaacttcactttaataaaagcgaacaaccagcttgcgaccggagcttaataacattgagtagataagcctgatgagtatccaggcagtccaggtctatggatatattctctggtgataaaagccagccccagggcagtgtactctgtagtccttactctaaatgtgaaaaatgtgggtttgttgtgtcttcgtctagtcactttaagcagtagcaacacattttcttaagagaaaggcatagccataatgctgcttgtgggaatagtatgttaagacccgtgcgttattccatagaagaacttgcccatctcacacctgataatggatttcagcttcagtaacatttataataatagatatctcacaaaaggtattctataataaaaatctgaagtctggataagaatgaaatcttgaaagagtcataaattaactgttaggcctttcagacccagtgccagtacatttttcacggccatattctctccttacgactcaattgaatggtcccttagttattcccattttaaacaggagaactgaggttcagtggggccaatttgtccaataataaataagtagtagaaaccaagataggtaattctaagccctatgctctttgagagg

SEQ ID NO: 30150 - DNA, 1186 bp, Mus musculus
aatgctaagtttaaaagtacacgccaccacgcccagccctgatccataactccagctatagcatattgtagacttggggttaagaacaatcacttgaaattcgagagttttcaaataggaagaacatgaatttacttatactatcctagggtgtttagtctgcattctctaaattagtggctctcaaccttcctagtgctgtgaccctttaatacagttcctcatgttgtagtgaccccaaccataaaattattttgttgatacttcataactgtaattttgttactattatgaatcataatgtaaatatctgatatgcaacctccagaggggttgcgagccacaggttgtgagaactcctgctcaaattcagtgtatatctgtgaacaagaatagtttccattcagtggcctaaagtcctaggagtctgttcctttgagatagcctgaggattgctatggattttgtgttcacagtcaagaggaagatgaacaagacggctttccagaagtgcaaacctcgcctctcccgaccccctttctgtctgccataatagcagctttccagccaatggcttacgaggacgaggaagaagcgtggcgttgccatgtcaatcagacgctgtcggacacagacgggtcctgtgcggtgtttactttccacgtgttttcaagactgtttcaggtcagtggacattaaggcctctgaactcacatcgcactaatctggtaaaactaggcttctctacttggtgtctcaggctttagtatccctgcagattccctttaagaagcatgcttgcttctaggaatgtaacattcccttcatttgcaattgactggcaatattcctggtatatcaatcacttactagtacagatgtgaaaccctacagtgaaacggctacaaaactgccactcggggcctgatggatttcctgtgggatgctgggtaccatcctgggtaccagagaaataaagggactccattgtgcctgccctcccccagccactacagggagggacacagtgttgatgaggaggtactaaatgtccctttcgtcactgtgagaactcagtaacaaaggtcactttcctccatgagggaacagtagcaataagcactgtcatttttttaagtgcccaccctgtgccatgcactttccagtgaatattctcagacagcac

SEQ ID NO: 30151 - DNA, 1202 bp, Mus musculus
atgtaaaggatataaattaatcatttttttttaccagcttagtataatttgtcaccccagggcttcagacagttaagacttatattcttcagaattatggctcagcacaaacatagcataaatcctgtccagagtggagctgaactgtatcatctctcttgtggcctcttttgaagctggcaacagtagtgttttgatagctatgatcttgattttaaatcctattgataaacgaccactgcttttcactgcagctgtcctgcagacaaagtaaccgtaaccccatatcgtcgtcagttgaatgtgggtactttgagtcagttattgcattgtaccgagtattggccgtgtaaaagttgaagatttttgtgaattccgtgttgccgaagtgtaccacggaagcgtcgttctacgtgtctgtctccagctcttccctggttcgaatcacatgttggcttcccgcaaaaaaagctaaatccggagctcgcatccgtctctgggtttgagaattcacagagttcttctcccaaaaagcgtagcatatatttgaatgtgtgtcttcgttctttctaactctgtgtgttttcctttttgctaaccaggaactgcaggtaagttgtagccgtttgtgtctctgttgccggtatccgtcctctgtgtggtctcatctgtgcttgtgtattagagtagaaatgatttagagtgtagatctaattggtccatcagcagtgcaagatgaattatcaaggcttattaaaaataaccaaatgatttttttaatctctataaatatgaacatttgatgacgggttaaacgttaaaagaaacagacaggctgattgaatctctgcttttgagaatgcattcagtaattttttttttcaccttggtatatgttcccgggtgtcttaatcgctgcagcattgataagcatgtggctgacttcttagaaaccgtgtcttgcttttctagggggagagcatggacaatttcaactggggagtccgccggcgctcgctggacagcattgacaaaggagacacaccatccctccaggagtacccgtgttccagcagcacccccagcctgaccctgacgaaccaggaggataccgacgagtcctcagaggaagaagccgccctcaccgcaagccagatcctgtcacgcacccagatggtattaatctcacctctccacaaagt

SEQ ID NO: 30152 - DNA, 1174 bp, Mus musculus
gaatacacacccacgtctgtgcgtatgcggaaatgtgtctccttaacaaacgcaacgagtcataaagtatttctgaagcatccgaagagttttaaagtgcatgtgctgacgccatggctagttcttattgccattaaaaaataagttggtcttggtaaatttttagtctttccctaagacatttcccttaaatgtgatgtcacccgactgtgacctgatgcttactggttatgcaaagtcatgcaaagaaatactctttaaatcaaggggcttggggagggaaatcttggatttctttgctttattcagtgaatattttcatttgctttttgaagttaaatagtatgataacacgtagagaaacattttgtcagcaaacacattacaaaaaaaaaaaatgatggtataaatttctttatttctcctctccgtcttcttctatcctttctatctcctcggtttggaatagaatccagggacatatccagcgtaaggcatgcaaacttcttttagttttatggagtgtgggtgggaaggggaggggagtcaggagtccgaggttggaacgggaccaacggtgacagtcacggcttggatggttaattctcccattttggattatgtggatgaaagagttatttatttctgcccaacacctggttcttataactcatttgttctacacaacataaagcagataataataaagttttataagcctaatacatgatttaaaatgcacacagttaaaagaatcgtggtttaggtcactatctatgtattatggtaacaaatagaataataagtggcttatttttggtttggtttggtttttttgagacagaatttcctctgtgtagccctggctgtcctggaactcactttgtagaccaggctggcctcgaactcagaaatcacctgcctccgcctcccaagtgctgggattaaaggggtgcaacaccactgctcagcaataagtggcttaataatgccttaaagagtgcttaatgaatgaaatgtaaaaaagatggatcttaatttctttaagaatctgaatgttaaggaacaaatatttaatgatgcgcacctctggcgacagctcacattatagaatgcgccatttcgttgggacaaaagttaatgggttttgttctatttctgaagagttccgtgg

SEQ ID NO: 30153 - DNA, 1188 bp, Mus musculus
gaggcttgaacccaggccttcttgaatgctaagcaagcacaggaccactgagcccaacactcaacttcccctatccccactggaaaacaacaaaattgtttctgagcaagattataccagtaaacaaaaagtggttttcagataaatctatcttagctgcaatattccttgttggtgtataaaattgtgacttaagtctataatacctgttggacagctatcttcagcaatggcattcacttattacaactgttagaactagacttgatctaccatcggcgtctgttaagtacctgcgtgtttaagtataggaaatagagtagaaatagctgacaatctaattcagaactttattggaggggattaaaatgactctccatgggagaaagacagggaggaggtttgccagagcagtaatagtgactctggaatcatgggtagagaaacattgaatgggagaaacctagatgatgtgggaaatgtcactgtgttcagtaaagtatttcacataggatatttttagatgcggattgggtatgaatgctactgttttaactacaaatctctgaactattttgggggcatcggagcttgagctgtgagttcaggtgttgttagcttcagaatgggcaggttccatccaaccagactaagctcatcaccctgtctgcaagccggccctctgtcctcttcatcagaagtgatttctctcctcttgggcccgtacagagcaagccttgttcttgtttgttggttcggtatgagtgcctgtgtatttctgtcactagattgtggagcttggctgaagttggaaccctaacctgtttactgctgcctcaagtacctgggcagttttattggttccccagtattctataaaccaagaagtattaagaagctccaatacttgcttgtatttggaggaaagcatttatgtaagtttaaaggaaacacttttccttatcactaaagttcacatgctcattgataaggaaggcctgttcagaccttaagtctgtcccagaacattgctcactcctgtagcccttgctagtgggttactgtctactttttgacttttgttcctttattacaacctcagaactgacttaaatgagttttcttgaaaatcttagcaagttgtgattattgtgaatggagggaaataataatatttatgtaagtctt

SEQ ID NO: 30154 - DNA, 1101 bp, Mus musculus
ggcatttgcaaaatttagtcactttagatttatccatttcttatgaccacttattaactgtttgttgttttaggacctgagcccaaccttgaagaaagtcccaaaagaaaaggtgttacatatgaggaattaaggagtaagaacagagagtcctatggagtaactttaccccacaagactgacccctcagtcaggcccatgcaggaaagagtgcccaaaaaagaaggtatgatgacagttgagtctactcatgactctagattggaaactgaagttttagcttaagatgttattatgttaatatgtctaactcttcaagatatttaccaaagtaaattatttttagaagaatagtcacttaagagtgggtgagatgactcagcaggtagagccacttgccaccaagcctgatgacctgcgtttagtccctggggatctgatggatgctagagagaaataaccaacttcagaaaattgaactctgacatgatgcaacacacaacatttgacataaataataacaaacttttttttttttttaaagacaaggtttttttcctgtagccctgactatcctaaaacttactctctagaccaggctgacctcaaactcacagagatctgcctgtctctgcctcttgagtgctgggattaaatgcacgtgccaccactgccaactaataattttttaagttacttatttcacagtttccactttaaggtatttcaaagaatgttgtgtgcaagaaaacaaaccttagttagagagacacagaacaaggaaagcagctcttagtacagtgttcttccttacagagaatcaccttgggaacgtataccttctccctaatgattgagtgtgtctgctgcctaaccagggttagcgacagaggctgatgactgtccagtaatggtattcgagcaaaattatggagtcacaattgagcagtaagatgctttattgtacgtttgtgtaattgaaaggcttatacatcttacaggcaggcttttatggcttttccagaggaggaattttactttttctctataattaataaactttaagttataatttaattttgttggacagcaatatgttca

SEQ ID NO: 30155 - DNA, 1116 bp, Mus musculus
ttacagctgcttctgcagccttgaggcatctcagtgttgctgtaaaactctgtacctttggagtagatatgagacctggaatgccgctgtggccccactgtaggttgtgctggctgacagaggctgcgtgtaatcctgacgcacacacgagggcaggaagctttctgcctctttttatgcttctttactccgtgtctcacagatacatctgcactcatgagtcagacaagaactactgtgttttttttttttttttttttaaagatttatttatttattatatgtaagtacactgtagctgtcttcagacacaccagaagagggagtcagatctcgttacggatggttgtgagccaccatgtggttgctgggatttgaactctggaccttcggaagagcagtcaggtgctcttacccactgagccatctcaccagcccactgtgttttattttattttactcaggttttagtgtaagaggctagggaaagctttgtgtacttgtggcatttgctccatttggcatgtggagcttgagctgggcgttcttaggttgctgttccgtgacacagtaataaggctcaggaaaacagctcttttccttctaggagaaaaattgaggattttcttgtgctttaaaaatattacaatttaaagaaaagacctgttatgaaattgtgatttttattcttctaaaatgttcttaaatctagatagaaatttggacattggtacagtgtagactcagaatcattgaaagtattaatactttgagcttttatctgggcaatggtggctcacgctgtgagtctcagcactggggaggcagaggcagtggcagatagagctctggagtttgagaccagcctggttgatagagtgagttccaggacagccagggctgttacacagacaagaagctctgttgtctcaaaaaacaatgcaaaacaaaaactgagctttatttggattatttatattagtatttatttcactagaaatgaagatagaaagcgtattaacagagcaatacaccacacatcataggtatggttctagaaaaataccgtatgcttataaagaacaaagcaaactgatagaacactggggcaatgga

SEQ ID NO: 30156 - DNA, 1241 bp, Mus musculus
tatgaaaagcaaaattctagtttattagttgttcttttttttttttttaagtaacttcttggtaactgtgttttggtatgtaccccatattcatttaggtaaatttctaaaggcaaacattcggacattggacttaaaacagatctttaaatctcagttcttgttaaggcttacaccttgggcaagttactaatcagctttctcacctgtaaaatgggggttgcacggttctgtagtctgataataggtcctttgtagtcagccccactacagatggctctcagagggtcttactcatccagtgcaaacacagcgtctcatcatcatagcagagttcacgtggtgtctgtgattgtttggaatcatcagttctttgtgcttttttcctagtcaaagtaaacaaatatggagatacttgggatgagtgaaagactcccatcattggacctactgaaggccttccttccatatccagcttcatccaggtgtcgtttgtacctacatgcttggactcagcagcagatttcataaatacagttaaaacgaaatcctggtttgtgtaatttaacatacgatgctttacagactcagattttatgtttgctattgtgtaaatgtaccagcctgggcactgagaacggtgggtttatgccatagttgtgtgcacttggtgaaattgttttcagttacagggagagactcatgaaactcaactgtgactctcgatcagcccagcccatgtgacgataactgatagtgcatgttgagggggggaggggggagcaagcacacgcctagggctcagcttcgcatcagttattaaaaggcctttctccagcatttctcgagcatcttaatgtttgtgatgaataaaatgtaaaaacacggagcaactgtcattcacatttttatggctttgtttgaaatttgctaatgcgttttaatgtaaaggtcttatgtaagtggtattttaagcaaaagaaatttgtgatgcaaatagactccaatacacagtaatagctgtcttttttttaaagattttatttatttatttatttatttatttttaaaatatatgatgagtacactagctgtcttcaggcacattagaagaaggcatcagatcccattacagatggttgtgagccaccatgtcgttgctgggatttgaaccaagacctttggaacagcagtcagtgcttttaccctctgagccatctctccagccctaatgattactt

SEQ ID NO: 30157 - DNA, 2960 bp, Mus musculus
gttcgttttcacactacagattggtgaatttgccaacgtcctcactgtgattatgtgtatattgctgtttaaattttgtatatgtgtataaaatgaaaagcttcacctagagattatttctgcaaaaatgtattgtaaaaataattttgtggcatatttttggtccccccctttttttttcaaatgaaccagttatactttatttggtctcaaatttcagaaaacataactgtccccgtaagcaagtattgccagaattaacctcattgcttaagaggccaacttctggaagaagtaggagccatgacttactgtggcataagccaaatatgacttggtttccttgacaactttggtattttaaagtgacaaaagttatttatttgagtgcacaaacagctgacacgctacaaagcatttctaacacaaaacgtacaggtttatggtgttttttcccttcctcttcctcctctcctccttaaattgctccttattttaaatcgaagcttacgtttccataaaccttcctctgtttccctgctttgtgttcctctagcagtgcttggtctgctgaagctctctgtgccactgtgcaaaccgtcctttgccacccaccctcatgagcctcctggtttgctggcggcatgactgcaaagcactttgaactatgcttgagattttagttactctttcatggtgtctgtaataccctagggctttggagttgtttgtttgtttttgtttttaaaccacaagtgagagctgtttgtttcctgtctttgtttcacccgtgctgggcttctcctggccacgcgtccattgcaggcagtggactgaaaccaccagcatcgagctaaccctgttcacactgggacctttctcggaggggccgcttgccattccctgagtcacaggtacagaagggtggtagtagccattatgtggatgagaaaccagagccaacacagcagtagttgtgagtttgtaccttatgtcttacgtttaaggtttgcatctgcttgcttgcttgccttgcccctcgtgcagaagtacacagttaacaggtttccccaaccatgtggtgctatgactcactcggtccctgaagtctgtgaaaacacatctaagatttaacccaggaaagagctaatggctggtttgctgggtaaatggtatagagggatccgtgcctgcccaggcaggtgatggctacaagatggtggggttattggccaaaaaagaaaagagtcttctccattcagtgtgaacctttaaatggcattaaatgagcagagcacagagacagtgctaccctgaccgctgtttcacagttccttttcaaagtgttgctattttcatatatttctttccctgattgaaccaccaaagacagaaatgttatatgtatatatcgtgtgcgtgcatatgcaaaatcatgatgtggtggaatgcaaatacttgcctttttctaccaaataatgaggtttggtttgctgtgaaataaatcagaagtttaaaaagaccaacaacccgatattgctttagcataaccatcctttgtctgtagtctcacttatgaattagtatatgaacacaatgtaaacttcttggaaaaaaccacagcttttgagactgctctatgaaaggcattccagtgcatacaggtgtgtggcgctggggactgctaagacaggcacagctctgcagaggaggatcccttttcaggtggtcccacggttaaagaatcattctctcagggtgactgttgttgaggtaggtcagctgtcgattgtctcgatgcaaagaaggatcatagatgggattgttttaaatgctgtgtgagaatctagagagtgtttgaaacactaagcacagtgaacctgcgagtaaaggtggttaccaacatgagaaattccattttatcttccgtgaacattttgataatagagactcaagtaaaaaccaccgtgatgactaggatggaagtcggcattccagaggggatgaccaatatttacaactccagataatctctgaactgcctcaagaaacaaaccaccgtgactgtggcttgcctttggatttctcgattttacagagctattattaaggggaccccttttcttgaagaatcgccaagttacgcaagttgaacgatcatcaagagcacttatggctaccattggaagaagcccgggcgccttcggttctccagtacctgagccccagccacccttcctcccttcacttgtgtttcagggtgcggcaacatcctcttgttggggaatgcagcttgcagccgtttacactgcactgggtagaagttatctagcaagatgtgctggatagccatggtagcctttggcgtgccccttttgaagcatgaactcttgtgttcagtctttctaactgattagacaaacctctagattctggtttaacagatttctgctgcctctgtctccatcctaaccatacttttgaagtttatacagaaagctttaagagtttagtttgtgcccttggtttttatttttacaactgctaaaatacctctgtaagccttatcctttatcctttcatagttgtataaaattgtatagaattcattcaccaactgaaatgttggatatctgtaaatgagaccaaaatgtgggttgctttttttcataaaataatttctattgggcgttgctgtgacatgaacagcagccagcctattaactgtgaatgccttgtgtcgtcagtatttgcattacattcataaaagtgtgcaagtcctgtgactcccagcttaactaaatactgttatgccacttaacgagcacagcaaactggtttaagtttcaatgaaattgatgtaaaatgatagcccataaataaacagatatttgtgtttggtttcagaactgatttgtggggtctttgtactctgggtttctctgccaaaaccattttta

SEQ ID NO: 30158 - DNA, 1103 bp, Mus musculus
tgtgaaccatgtttgtacagcgtttgccataacttgtaattattttacctggggagcaccactgtgtctattatgtactctccatatttaagggatcttgagtgcctacattctaatacattttagtaagttgcactgatactcaacagttctctaaaacaatgatgagaaattaataaaataaaattaatctttgaagtgtttttaacattctactatatcttgtcctagaggacaaagggctgaagtggttgagacactccatcagtaagccttggtcattctaagggagagatccactagagatgtttggagagacagggacactgtgctctgtctttggtttttaaaagggaaggcacagatttttaatgcattaacccaaagctacattttcacaaacaagtcattaaggagctttccatatataagcttgtaagaaactatgtttccttagttttgcactaaagaaaatactgtcatggtatgtttacttgaaataatgatacatgtatttacggtgtgtggacgttaaacgcaatcacagttctcactctcgtgagcaacagaagccatcatcatcaggcctcttcttgctgagcactgtcctgggtgcgatacacttgatctctctgactcccactgcacctctctaagcaagggcttcgatcccagctttacccatcaggaaactgaaggtcagcgaggttcaggatgctgccccatactatacagggttgggagtcaagtacaattccaacccaggtaaacctgattccaaatgtgtttctgccttttttactatctacactgaattttcaactatttaaaactctcaaagaatgggaaaaacctaatcctaattcacctaacaggtaaaaaaacaagcatgtgtgctactctagttaaaatgccaatgctagaaaaacatgaccaatcactgtcagactttaaactctcttgagccagttctaagatgtcattcaatagacagaccagcttggtctgcttgtcatgtgggagtacctgaatgagttatagagaagctggcatacttttccctaaaccctggggaagctcagtggaaaggggggaagctaggc

SEQ ID NO: 30159 - DNA, 1515 bp, Mus musculus
tgcagacctctcctcccccacaatggcccgctgatgtcatcactatgatgggcactggtccggcagtgttaaacttccttcctttgtgttttttacatgcagcactactcctgactctgttttggtctgaggtagagttaactgcagtcggattatatagtcagatttacatgaataactgttgctaattttaagattggagttgaatggttaatgccgcttgtcacgtctggctaaactagagtgatatttcctgtaaatgtcacggtccatactgagtgtttggtaggcttcctgaatggtttctgggggcccccttcccatgcattcctttgacaggtccctggaagcattgctacccgttgttagcatgcctgcctcctctgatgggaggagttgggtagatagatattcatctgttagggctgcaaccatagctttaagtttgtgcaagtgaaaatgtttaaaagtgagtggcctagatgccaaaatcctcctccacattggagcaaggtgaggtaaggctgtcattggtagatggcgtttgcacccaactgtgcttacctagctggtagaatcccaggggctaagacattttggagctcagggcaggcaaagccaaaaggaagatgtttttgtggtcagtgagaagttacttacctttctaccaaaagccacgtttctggaaaatagctcgatgctgttcattttttaggaatgattttcttccatcaggtcctgtagttgtcttcttctcatgtttggtaccgctaagcttttcaaactgtcttttcaaccctgctgatggtttttagtcagtggcaccagggctgagacggtagctgaccgcctctggcagggttctcgatagccagtcaacatcagcatcgttcctagatgaggaagacgaggaatcaagaactctgttcacctggacaaccatcagcagattgaacagcttcttcttcttcttcttcttcttcttcttcttcttcttcttcttcttcttctaacattcagtctatttatggaggcactggtgagttttgctggagttagtgcagtgtgaggtgggtcacaggaagtgttaggaggtgggtggagaggtaagatggtggctcagattcctagaatgcttgacaagacagtttccaggaagaaccttatctcaccgtttcccccttttgttttgtgtgtatttattagagcatttgcatactggtaccttttattaaaagggttgatttggtgttttaccattgaatgggtcttggttttcctacaaatactatgggtcatagtccttggcttccttttgggatgtcagttgacttctacacacgttaatatactgtgaatgtgttacgttgcgacgtactacgtcagcgaatgaacatgcaaactcgtggtgtaatgtgaactcaaactgcagttgaaatcatcagtggccatcgtgcagcagtgaagaggatagcactttatctaggtgaaaactggactccttatttctgaaat

SEQ ID NO: 30160 - DNA, 1202 bp, Mus musculus
acacagccctccttcgcctgggaggtgggggcggggcgtgcccattggtgatttattggcagggagagttaggttcagtgttgcttaggagccctgaagcgctatggtggtgtttgcgtgctcataaccgggatggccattcataacactcagggagatgcccagtccgcagccagaaaacactcctggccgtctgcctgctccctccactcacagctcaggaattactaaaaatgtgaacgaagcattctctggcctgactcgttcgtagtcagcagctgattccggagacagacgtgtgagtccctggctctgccctcactggctcagtgagcttggcagctttgcctcaacatttccttgtgtaggatgcaaggactctctgccttgggtttgtgggggagatcaaaggagcatacagatgtgcggttcttggagcactgagtacacaccattccccatccttcctcattttcccaagtttattcagtgagcagatgtgtcaagttctttctatggaaagcactgctagggggaggcatacgaatcagacataatcacttcctgaggagagactggatcttctgtagagctggcgggcttctctgtagagagctagtcgtagagtttagattttgtgggtcatagtatctctgcagcaagtccgtgatccgattgttctctcagaacgtagttgccacgattacctgactggtcacagcggtattataacagttaaagtttatataagcatctggaagcacaggcagagtaggtctgtgagcggcacataggcatctagtagggtgacgtgtcaactaataagttactctgttacaaattgggataagtgccgaaaggaaacagataggaaaggtctgtgtcttaggagaagactggcttccaggcagctaggatgaaggtcttaaagcccatgcccacagtgactcacctactccaaccaggccacacccactccagccaggccacacccactccagccaggccacacccactccaaccaggccacacccactccaacaaggctgcacctactccaacaaggtcacacttccaaatagggccactccttgcgacaagcatattcaaaccatgacagtctgtaagaaggaaggtcaaggactatgggacattgcagccacaggatgagttggagacagctggagagggagagacagggt

SEQ ID NO: 30161 - DNA, 1558 bp, Mus musculus
gggctgaggaggtagctctgtggtagagctctgttgagaactaactgcctcacatctccagcaacatttctccttgatattactctccaggaacacagaaaaaggcagctcctctcagggttaaggaggggccctgggagtgaactagctgaacaagaagggatctaagtcggaacacacctagcaccggcatagcttcaggaaaggaaggtttccactgagcacagcctcaacgcttccaacaccgcagtgggtggagaacctgctgctggaagtcaacggccccaccctaccgggtccgaaacgtcccgacgattggcttcccataccagccacgcctacaatccttctgacgattggctgctctccttttcctgttctgccccctccaagcggccctctgattggttgcaggtctcggggggggggggcagctccgcccctctcccggatggctgtattaacgcagcgcgcagcggctcggtctttcggtcccggccttggtggtgagtgtcctcgtgggagggtgtcaggatgtccccgtgtcccctcgagctttgcccgccccgagctcagctgctcccggcggccagaacggaggggtagagcagttctcagcggcccgcggggcgggcggcagtgtccagcccggggctgcgcgagacacaaagtcctctgtgccgtccgacccgggcaccctgaccaccgccctttccctctgcaggccgatccacccgagccggtccccactgcccagccgtgctgctgcctcggacacaagcgcaggtacgtcccggcattgatcggaggcaggccctggccacgtggccgagaagacggaggttccaggcctgtctttgttgagctgcgccgggcctccccagtcgccctttcctgtgcccttttaaggttgtcgcagtactttaagaggctaacacagaagggtaaaggaactctccataaaacccagagaggaaaactacacctcctctttggatcctgtctggagtcacaaatgaaccaaaagcttcatttaaaacttgaatgtgcgcattttaggttctggcgattgctaggtagtgatataggattttaaagaaaagaaaacgtagcctacctggtttaatttggttggaggagaaagttcagaagacaagaatacatttgcttttctagaagtgagattttaggtcagctggaaaggatatagttgagtatgttccacttatgtgaaacatttttattctttcataggttgaaaactacaagaaacccgtgactgaatggctccaaggtgaagtactcttgcatgtagtgaccaggtttgcctgtattccactttaggattagtatcgaagctgaaataggtgaagtgagggccatgtgagtttccttgaatggccttgtaactgattaccctgaaggtagtttgctaaagattttaatcaatgtactaggatcctgccccaccccttcttcatgtcccactgccctagaatcagatctgcatggctatgacatgctcgccgttttaaagatgcaaagatttcatgctaga

SEQ ID NO: 30162 - DNA, 1558 bp, Mus musculus; identical to SEQ ID NO: 30161

SEQ ID NO: 30163 - DNA, 1213 bp, Mus musculus
agagaacgcatcctttatatattaaatttttcttttgttggttgttaaaatttcgacgaattgacaattgtggttcagtcaaacccgtgcgggatgctggccttcaggattttaaaatagactagtggagggagaaaggcaacagggacagaaaagaacaatggtgtagcaaagggaactggggagtgggaggaaggttgggggaagggaacttcaaagaagaccagaagccccagagaaagccactcttgagaagctaagctagaatccttggggtggggcggggagggggaggagccaatcgcgcggcgcttgcgcaatgagaggcccaggtgcccgccgccgcggaagcgtaaccacctagagacgccgcgccgcttgggtgcctgcggcgcatgcgcagacggatcggtcgctgactcttcagggtcgccgcctccaccgaggttggccccagatttgagtctcgcgctcttcgttcgcttaccggcggcttccctcccattctcgcgccctgggacggcgaggctggaaaaaggggttgagagagctgttggccgccgcctttaacttgtgcgtggggcggccatgtcggccggcgaggtggagcgcctggtggagctgagcggcgggaccggaggggatgaggaggaagagtggctgtatggcggtacggaacttcctgtctgtctccccggttctctctggccttcctcccagcgtttcaggcccaggcgtccgaggcctctcgtattggccctaaccggccttggttaggccgagtgcggcctgctcccggccttcgcccggacccgcaggcactcaccgcgcggtggacgcgggccaaggaggccgggcagccctgcgtcgccctcctccgcaccgcccgggcctcctcgcttctgcgctctctattcatgctctttatcgattctgagccgctttggtgtctctcttgctcagtggctatggggtgcccctcctcgtccctttctttcagaaaccgtcattctgtaatagcagctaaataaagtcagtgcaatgaaactaacgtcttgtttcttgatggtcagtttgtatgggatgcacctgcaagggtacctccttgtctgaaagtcgtgctttaaaagtattaattaaaagaaacagatgaaatacactgtggtccataaagaaaaccctgaattgtggcctgtattaaggtgaagtgttt

SEQ ID NO: 30164 - DNA, 2123 bp, Mus musculus
tgtggccctggctgtcctggaactcactttgtagaccaggctggcctcgaactcagaaatccacctgcctctgcctctgcctcccaagtgctgggattaaaggcatgtgccaccacgcctggcaattattgtttattttttttaatgtgataactttcagacaaaccttctagtatgttgtaggggcatctttctagctgttttaagtgggcatcatcggatagttttcagaactcctgctgagcaggcagttgtcctgagaaaagtgctttcctgcctgagcatttggctaactgaagcatgcaaggaaggctggtagcagtcttcaaagttgacaaagtacaaaggtgaatttcaaaagcatatatatatatattctactattcctaacaaattaaagccattgctaaacaaaacacggtctgttttccttaagtagctttctttttggttagttaagactttgatccatacttaagaaggtacgtagatgggttatgttgctggattatagttatggtggcatggtttgtgatctcttgtaggttatagtaaaatgtatacaaattttaataaaattaaacatcataaactgtaaacttttcttataactcttcaaatcagatgtaggaatgcgcccctgtcatacccacattggaaaggttaaggcatgaggatttgagttcaaagctagcccgggcttgggctacagagtgagttctggacttaaacattcaaacagaaatctagtatggactggagaattacaagtttatgctgtgttagtttgcttgctctgacccgtcatctgaagacaggctcactttagtctaaactggccttcactaaatcatgctcttcccgcctcagcctcctaagtgagggttgtggaggtgtactgccacacctggtgtaaaagtgccgtttttagtagaatcaattgtagcatgtggtttcaacccgtaaggctgtggccaaattaaactaaaacacagcttttatccttgcagaacttaacataggagatgaagtaaaactacggaaataccaggtccgtggagtcctccagtcagctgtgggtctcagatgctgtctgttgacattcttagccttttagttggtggaagccagtggtgtgttaatacacacgaaaggttgtacctgttaaaagggtgtgagagatggccactaagtggctaatgatatagggagcccaggagaaattgtaattaggctgacaccctcctgcgcccccccaccccccaccccaccaagtcagttatcctccataagaaagtcagtttttgtcttcagctgtgcatttgtgtctacataccacatagaggtaggattctgacaaaaatacccaactctatttgcttcaagattttgtagtatgcactgaagattttttttacctccattgctggaattgttttacataagatacaaaatgaaaatggtacatgaaacaatttaagagagaagcttaatttttgaattttttgtttgttttgctgaatcatctctattagagggacttggggggcttttttttttctgataccttattttctgaatttctgttctttttactgtttttatccaaacaaaaatgagagcattctcagaattgtattctgcttctttttttctcaaatagagactgcagcaaaatgccatcgctgcccacagtatagttagtattttagactccattgcagaaagcctaagagagcccaacctttgtacctacagccttagatattgttaaatagccattcagttttcttcacattgtgtgtgagatgaatatttcttaagacgttttgtttgctctcccaaagaaatcaaccaaggaaaaaaaaaaaaaaaacctcaaaaaacaaaacaaacaaaaaacaccctgtaactcatgtgaagcatgcagggtgttgtaatttcagtttgcaaagcgctgagatacaatgttgctgagccaaaagcacacgatagatttaatgtagccaattgtggacttttgaaaaaaagagtaactgttccctgtgagttaattttggattttttcaaaatctctcttttaggctttgtgctggattcttccagacaaatgcgtcttccat

SEQ ID NO: 30165 - DNA, 1213 bp, Mus musculus
ttattttgttctgagctctgggaggtgctacgaataactgggggagggctggagagatggctcagtgtttaagagcactgactgctcttccaaaggtcctgaattcaattcccagaaaccacatggtggctcacaaccatctgtaatgggatttgatgccctctcctggtgtgtctgaagacagcgacagtaacagtgtacttacatacataaaatagataaatcttaaaaaaaattaaaaagaataactgagaggcacagaaaagaagttacagccaggggcacggagactttcagtggcttgaaagagtgcagccacagtcatacagcccaggcatgtggtgttcaggttaaaagagactgagctttaccatcgttgttattttgtatttctgttatatcctaagttgtgtaagactcaaagtccaggctccgtagacggtccggcttttgcctccattacactggtttggacatgattttttcatcatttttaacggccctgattcagctacaggttttactttgagatcccgactgtactgtattttctttgtcatctcatcacagcaacgtcagaactgaatctggagatggacgcacgccagactgtgtataaggcaggagaaacgatcgtggtgacctgtgccgtctttaacaacgaggtcgttgacctgcagtggacttaccctggagaagtggtgggtaccccgggataaggagctcacggaacccccacaacaggacttgtaactctacacaccagaggtgtttctcttggatgggcacatccctgagcttctctgggcctcagcttcccatctgggcaatgggcacatttgactccaggacttttaatttttctcaatcaggcagagtttggcatgaccacaagggacatgctccccttgagaaggcagagacaagcaggaaggttctgtggctagaacacaagcattaaagcattagaaaggcaagaaatgcctggattgtaaatattagccgattgcacagtcatgtatcctcactgtcttgggtcacacgccttggggttgtgaggtgtctgatagtgttgctaagtgtgtgtgttattgtggcctgtagtcacccagctgcacaacagcacaccagacttattccttccatctgactggaactttatataaagccttattcactctgatagctgtagagagtatataggagctgtgta

SEQ ID NO: 30166 - DNA, 1162 bp, Mus musculus
ttgagtaccttccatgtccagccccaaatctttaaggagaaccctttatctttaccccttgtgttctaagtatttgattctgggtcccgggtttttcaaaataatgtttatattatatcctaattatctttaagttttatctatttttactttgtgtgtatgtgtaagggcatgtgtatgccatgacacacgtgcatggaggtcacacgctaactttaaggagtcggttctttccttctctcttgtggatcccagaattgaattcagatcaggctttccagaaaatgccttatctgctgggcagacttgctagctctggaattttaagcagacaccctagagccatcacctaagtttcctgtagtggtagaagaagcttagagacaggtctcagctagcccagctgggccaggagttgatggatgtcagggatgaccttgaactcctgagactcctggaggggctgggattgcaggcccaggggccccaccgcagtataggaagtgctccggagttgaaggcagggcctttggtggctgagatggactctaaccactgggctacaccatcagcaggtcctggactggcatagctcttgagacttttggactttaattcttgggtgaagagacttctgtcagtagaattcagaccgtctgtgtatctgtctccacctggggcagcccttcctttgctagttgcttgaaaacaaacgcaggtcgttatgggttttatttaaaatgtacaactattaaatcatagtcgaaccaagcatttcacattttcaccctgtccctcaatcagcgcgtagctctgcttgaaagctggtgtgtaaagccctcagagtccttttcagtcccttagcagcggcagaacatgacatctctttgatcttgggtatgcttttcaaaaggcacaggcagcctggggcgtcttctttgccaccagatagatagtgtttaagattttggggtggggttagagcacaccccactaagatgagagctcagagaattggagaatcgagttgttcttaacagcagagtgagattggcgaggggttggaggtggggtggggtacaaaagccaggagctgggtgcagctgggcccgcagctggtggccctccagagacagagatgggagatcacctcagctcaggc

SEQ ID NO: 30167 - DNA, 1144 bp, Mus musculus
gactccagttccaggagatctgacgccccttcttccgctctttggtccgcgtgcatctggattagctagcagagtcatatatgtaaagtaaaatatcagactttgaaatccattgtgttattcaagcttgtaatcttttaaatcttttaaacttgttttcagagagcaggttgtggtggtgcacacccatgcctttaatcccagctgaggcgggtggatctctgagttagaagctaacattcaagttccagaccagccagggctacatctcgagaccctgtctaaacaaacaagctcacaaaatgttttcagtgtctccacatccagctttttgttcttctccacagatcctgccaaacttttcctggttggccttcccttgtttggcaaagaagacagcgacgcgctggtccgctgccctctgacagacccacaggtgtccaattattccctcatcgagtgtgatgggaaatctctccccacggacctgacgtttgtcccaaaccccaaggctggcatcaccatcaaaaacgtgaagcgcgcctaccaccggctctgtgtccgctgtgctgctcagcgtgacggtacatggctgcattctgacaaattcaccctcaaagtgcgggcaggtacggcctctttcttccatcctgtgggcgatggagaccctattcatggggctgatttctctccttccacttagcctagggcatcaggacacagctactagtaagatgaccaccttccagataatggtagacatttgtaaattcttccagagagacaggtccaccgctgttgctagctaagatggtcattaaacctcctggtttagggcatcccaaggtgacatccttgccgcaagtgttcctactcaatgcaaagatttaatttgaggacataagtctacaagtgatttatgcttgaatttgggtggacctgtttgtttgtttgttttttcctgtagctgattggttcccaagctactcaggctctgggaaagaaagtgctcacaacccatgaagctggtttccatggcatcacctcgaccattcagtggccaggagataaactaggctttatacttgaggttatctaattcagcatcactttgggattcaactgatgagaacttttaatctgc

SEQ ID NO: 30168 - DNA, 1187 bp, Mus musculus
gccaggagtgttcatgatctcttcctgggctctcctgtccttttcactcagcatgaatgagtttacttgtggatgaatgacttcataggtctatatttaggtatgcaaacaatacagattggttagtattgtgctttgtattttatttaatgatgtatggcacaagctgtgtgtagtcgagaaaaagcaacgttgggtctggagaagtagctcaggagctaggagtgcttgctgcttgctcttctaacagatcagctcagattccagctcccacctcgggtgacccgtgtcagccaacaactccagccccaggatagtctacaccctctgctttggctttctcagacaccctacatgcgtggcatacacatacaaagatacacactaatagataaagctaaaataaattttaaaaagaaaaaaaaaggtgtgttaaaaataagacaagttgaaattcccactgtgaaggaaggactgacgtcagggccgtattccttttctttgtagccatcaaggctatccctgttgtgtctgtgcctgaaacaagtcacctccttaagaaaggggacacatttacggtggtgtgcaccataaaagatgtgtctacatccgtgaactccatgtggctaaagatgaaccctcaggtgagtgctgtttaagtcctatcacgggctgtggtctctgtgtggctgattgtacaggttgtctccaaaactggcccaagggtggtgaccctgctggcagtcatagctgttagggactggcctagagtacgttcatgtgctgtctcaactacgtacactgcagcatgtgtgttcattatgagtgataaatagctgccacattgttactatcttttgagaaaagaaagggcacctgtctcaggttgttacttaacgctggctttgtttaaatggctttagtaaggaaatttaaaaaaagcaaacagaacaaagtaaatgaatagctgtatactatccagataatgtatacttaaggtctgcttaggccacgtgacagaaagagtcatcaacacctccccacccccttcttcttcttctgaggaaatgccagcatgtatgacccacaaagctcttctgatcccgcagaatggccacatcatctgggatatggggttctctttgtgcggcttggatttccccctttgaggctggttccctgagatt

SEQ ID NO: 30169 - DNA, 2349 bp, Mus musculus
acaggctttgctgctgtctccgaccccgtccttctggcttctgtgatggttacttggtttccctttgacttgcatcctattccagggtagcgagttccccaccccacctccaaccccactgtgattccgcctttacgagcacacactttagtggccgatggccttttcttttctgccatcagccaccgtcccgctgcgaaggtccgaactgtatgtatatattttcccaatagcaaagtagctcctactgtaaacagaaggactcctcctgctttagaggagaagggaagggcggggtgaaactggatgcccagagttcttcccccagtgctcccctgagtgtatttgaaaagtatggccagtagttcacttgaagaatagatgtagtcccatttggccctgagagccatccttaatgatgggagatatatgtagcaagactagaaaaggaaagccaagccctttgtgtagaaagcagaccattcttagaacagagggcaacggggcatcggaagtctggtcacgctaagaagaccgaggctgagaaggaacaagccaggggaagcgtgaacaatgatgctctgctctgggctgccgctcgggcttctgtacaactgacctggtttctcagtactttgctgtctgggagtagcattggaatcaaggcctcctccctagtcagcctttgtatatactcatctatacgttgtatgcgttcatactttggaggagggatttcccacaagctttcgtttctgtgtacagccctggcattagacctactgtgtgtaagaatagattaagagccatacatatttgaaggaaacagttaaatgttttttggttgtggttgttgttgttgttgttttaaagaaaaaaatgtatatgctaagcacaatctttataagacctcttagccaacatacttgctctgtctacacttcggaacaagccttccatgtcagagtggctttgcaggcaggagaactgaggctgtttgaaaaggttaccacaggatggagaaaacagtgcagtcctggtttggattctcacatagcagggagcacaagttaaactcagccttttataggcacgtcccggacatcgggccagtatctattcaagtgtgtatgtgtgtgcatgcgtgtgtctatgcgtgtgggtgagttgtgttgggaaacttgccctgcatccctgagggtcctccttcaggacccaagacgtaacagcttctgtcaccgctcctgtctctccagtttccctgcatgtcgctcactgtctagaatttactcaaagccgccacagaggcttagcggagtgaagtgccgaaggacctctttatttggagtcctcctgtatttaacaacactcttatcgtagacccattcattagaccttatgtaatgctgccaatccagggaaacagatttaaagtgtaccccgtagacagggcccagaggttcccttgtccttgccctcccccacaccacccatgatcactgtccaacataaagggttcagtgtgtacgtggtcatgtgttgtccttacaggattcaggtatgttgccttcacggttttccccaccccctcctgccctttatcctttaggccgtgtggccatgaacctggaagaagtgatcgtttgcacttgagtgctacactcttgcacctttccaaagtaagctggtttggaggtcctgttgtcatgtacgagactgtcaccagttaccgcgctctgtttgaaacatgtctttgtattcctaatgacttcagttagagtaaggagaatagctgttaatatggatgtcaggtacttaaggggccacaccattgagaattttgtcttggatattcttgaaagtttatatttttataattttttttacatcagatgtcagatgtttctttcagttgcttgatgtttggaattattatgtggctttttttgtaaatattgaaatgtagcaataatgtcttttgaatattcctgagcccatgagtccctgaaaatattttttatatatacagtaactttatgtgtaaataatacgctgtgcaagtttaaacatgtcacgttacatgtgggttttttctgatatgttgtccaactgttgacagttctgaagaattctaataaaaatgtaaatatataaatcaaataaatttttctgtttgttttttaaaggtacatttattcactcaatcagaaagtgttgtgtacaacatttgtgtaaatacatgcaggattctcattgtcacattagggtttagatccttgaaaattcaatagagatttattagtaattttagtgtgtgctattttgggttcttttaaaatttatcctcac

SEQ ID NO: 30170 - DNA, 1158 bp, Mus musculus
tctctcccttgatgtggtcccaccagataggactgatccaacattactatgagtctgtccctgaccgactacattcaggagtcggttcaggaactaaagacccacggactctgagccctgagcacctcgagccttcatggtgatgcccatgtaccccagaaggcttttaaatgagggcatcagagatgagtgctgtccccctccccagcaccctgccactaatttaccacgtgactcattcagcctgtgtcctcacactttgaaggaggaagctttagtttaaatggtctctgtagccctttgactctggtcttaggttgcacagtgagtaaactcaacccttgacccgatcctggaggagagactgagactgaccatgtccccttctctcctgcattgcagcggctgagctggctctgtctgccttcttggtcttggtgttcctctgggtccacagccttcggagactctttgagtgcttctacgtcagtgtcttctctaatgcagccattcacgttgtgcagtactgtttcgggcttgtctactatgtgcttgttggcctgactgtactgagccaagtgcccatggatgataagaatggtaagtggccctgccagtaggttctaaagtcatcataagtggccctggcagtaggttctaaagtcatcatgtcaacaggtagatacttaaccatcgtgaccactaaaacctaggaacagcacctaggatccgtagcagatccttcagtgacaataggacagtacaaatcattcctggggccgtttaaggaatgaagttaaactgtgggaggtggaaggagagctgagatctgaacagcaggtgggagcctccgaagaaagggccaccaaaggaagaggcctccccacagccccgttgtctagaagtcactctgtgggattaaatcccagaccaggagacagaggtgcttgaggtaagtagcttggatttgaagaaggaatgcaaactgttctcttgactttctttcttgggatggctgccttctcgacaaagcccttcttcatgtggggcagcctgagggaagaggaaaaccgagtgttgtgctaaatggagattgccttaaggtttccaagtgctctctagccaggaagagggaagcaaacgtttgtgtgtgagaag

SEQ ID NO: 30171 - DNA, 1214 bp, Mus musculus
cttgacatttaatagaagtggaggtggcggcggcttaggccttaaagacctaaggctcttgaggaagtactggtaggagcctggcagcctgacctctccagggccaataagggggtctctggtgggacccgagaggacgcagggagagtccatcaagcagctccagctacctggcccggcgcgccgggtccaataggaccagtgagcgagccgcacctcaacctgccggaaacgtcacgacgccgggctgacgtcgggccaatgggaggtcgtgttggccagggggcgggccggaggagttgggccgcggaggcagttggaggagtgtgtggcttctgctgcccagctgctccggagctcccgccgccggtccgtcccggtccggtccccgcgtcccgcgtgctgcagggctgccccctgagcggcagccaggcctgacggaggcgcctgccggcacgccgggctcgacgcttcccttcgcctgcacttcttcctgccgcagcgcggtgccggctgggcgggcgggatggcggccgcggcccgggggagcggccgggcgccgacgcgaaggctgctcgtgctcttgctgcttcagttgctctgggccccggccggggtccgcgccggcccggaggaagacctgagccatcggaaccaggagccgccggcgcccgcccagcagctgcagccgcagcccgcggcggtgcagggcctcgagccggcccgggccgaggtgagagcccgggctggtggggatggggcgggctgaggccgcggagcccgcagtcgggtaccaggctcccgcgctggcggcgccgccctctttccgaagaggctgggggaggggagccggcccctgctccgctcgctgggaggagggtgacaagacggctttcttaggcgcggcctggcctggcctggctgcttgggggaagggaaagtgagggccccaaccggggctccccagaggtcctctagatccctggtaccgacaggcttgctctggattctgccttctgctgatcacatgggccatactgaaaagactggaaatcatcatcccaagtagaaagtttttagtacagagccgctgggagacttgtctctctcgaagtagcatcacattgttggaagtatcagccattgttgaagcaacccaaccagagatgctcacccgaattcagctcggcacaccctgtggttcttgccagata

SEQ ID NO: 30172 - DNA, 1139 bp, Mus musculus
ttaaaaaggaggagtgtgaattatgttgtcccccttgatcttttgatatctgtgacaaagaaacatctacttatggagtagagtgtggcttccagtttataaaatgttggcattcttagaggacatcacagtctgtctagctcaagtgttgtgcctagcacagatgtaagggaagccagccattagttgagtttgagtggagaaccagtcagcatattaagaaatgtcctatagcagatgcatataccatggaaatgaggccatgcctgtcttggaatgccattctaaagttggtgtggaaagaaagagccagaagtatttcaggtcattacatatttgatgtgtctaatatgaaccagttttccttcaacactgtaaattatgatttcttactgtaactctctttggtctgtggtagaagcactgttaacactgttggcatttccttacagttttgtttggctatgccacaacagtcatccccagggtgtatacatactatgtttcaactgcactcttcgccatttttggcattagaatgcttcgggaaggtttgaagatgagcccagatgagggtcaggaggagctagaagaagtccaagcagagttaaagaagaaggatgaagaagtaagttgtaaagtgttgtgtgcatgcggatagcttagttactttccactcctactgtactgtggctgagtgtgggttactgtgactggcagggagggaggtgtccaccagatagtcagctttttaggttgatggcagatgttggaatcgtgggaactattctgcatgtttctgaagcatccaaatactatttgccgatgagtgggaaaattgacagtgtatgaggctggtggctaaagggcagtcggaggatacagtgtattttctttggagaatatgccatatgttttaaaagtgactttatgctatattcataggcttacttgggttaatggtatttttcatttgtttcagttccaacgaaccaaactcttaaatgggccagatgttgaaactggtacaagcacagcaatacctcagaaaaagtggttacattttatttcacccatttttgttcaagcgctcacattaacgttcttggcagaatggggcgatcgctctcaactcacta

SEQ ID NO: 30173 - DNA, 1099 bp, Mus musculus
gggtcctgtaggtagacattgaaccttggcctctggcacaggagttaagtggcagcctacagccctacacctccatcccgggctcctacctttcctgacttactactcttcaaggactcctctccagggcctccttgtctctctgtagaaactttgaaacgttctgttgttcttccttcccaaatatacgtggggtcttagctacccttaagggtcatcttcttctgtgaaggctccttgtttattttagcagtatttagtcctcaccctcagctaaaagctcgagggtcaagggttaggattcctgctctcaggaagcacagcagttctgtgccacacgagacttataactcaggtccatcctgtgctgtccacattccctgaagcagccatcttctgtgtaataaactcaacagtatgcctggatggttcagagcccatagctagttctatttaacactggccattctcaaacaccatctccaacttaacaagctaacacaagctacatctgcttccaggacccttatggtgtagcagtgggtggcacagtgggacactgcttatgtactggattggcagtaattggaggaaggatgatagcgcaaaagatctctgtccgaactggtaaggtctcatttttttttcccatgaaaatgcaagtatcatctgttctaatgcttgaaaatcatggagggtaatagaatgctagctcttatcatttttccagagaccacttgatctctgtgcctgatctaggccttgtcaatatttgacacattgttactgtgcactgacttcttttcctatgtgtacaaatgagaaaatcacaagcttatctaaaatatggtcacacttgtttgttttgtaagccagtgaaaaacttgtagaagtttggcctgaagtatttgataagcagaccctgtgtgaggcttgaacattttcaacatttaaaatgggctggggtccgagcttgtgggcactgatagcaggcttggccacagcactttttccatgctgtgccatctccgggccctcgagagaccggggtgggggggttaaggtgatgactgctacagtccaactgctgcttgccaac

SEQ ID NO: 30174 - DNA, 1668 bp, Mus musculus
ggatatagaatatcaagtattactgagaaaagggaggataagtgtggcacattagaattgaccttaaaaggaaagtatgtgatggtgaggtgctaaactggtttcagcagtgcagataacctaaggcagagttgctagatcagggcttggggaactcggagtcagctatctgtctctagctttgctctcatcatcagtaagtgtgtctttgttttcctgtttacctgactgcaattaagttagcaagttagtgataaaaagaaaacaaccaaagaaaattggtacctactcttctgcataagaagtgtgtctagataccagtcagtaactcacatatcacagagttcttctagctgacattcatacgaataccagaaatagttgtgagaatacacatttatgcaagtttgtgcacacgtgacgaaatcaatgtaagtcgagcacccacattgcttttctcccttccacattgccttcttctctttggccattccatgtcctcggagtcggagctgtgcctcgtttatctttttgcatcacatagcgataagaatttagctacaggagatacaacatgctagttatgtaatgcctgctgttcttcacagttcatctccctgcttaaaagtagcagttgataagaaactctagctgctaaggctgctgtccacacggagatgcatgctgggcaacagttgtcagcactagctgcctcttagctccttaattcttggttcctttggatggcaaactgtctttgtctgctccccacacgactccagtattctgaagaaagttcatcttttgcctgttcatttctgtagccaaagctgactgaaaccccaaatctaaatcatgaaaagataccaaaaagaaacacttctcagcttcttagaaaccttaacttctcttgctgtatttcatggatttgattttctttgaaatttttgattctgggcagcgccttttaattaagaaattgttaggatgaaggtcaaacaggttctcattgccctgcaggtaccttgctctggactgcttctgtatggggtgacttggggttgctgaacacacaggattagaacagtaaacacaaagctgcccttgaggctggcgttaaaccagagcctcaatattgaaaatatcaagtcctctttccttccttagagacgagactgtgagaggaaagcaactgtggtaggtgggcttgcttgcacatgagcaccaagaccattccccaagctctatcctcagggtagcatttagagtgctgtgttctgctgtcacatagacatggcttagggatgtagcactaataaaagaatgcccgtgcttttgaatagttgtgatagcaaactctaggctaactagcaagtgtttgaattctgtgtgctgtatagtagttggtcattgccttaaagcagtctcttggaagttgggagcactgaagcagtccaaccatatatgggcatcacgttgagggagatgagccttgttcaagccttagaaaggacccttagtctacacaggtagattcttttcacttggatattactgtgtttaaaatgtttccactatgttgaggcagttttttaaagtggaacacagataggatttttagtatttctttttttgtttctttggtgattaaaggtttgttggtagaca

SEQ ID NO: 30175 - DNA, 1151 bp, Mus musculus
tagggacacagccaattctgacagtttctttgcccaggtattttttgatagaaagagtatattgccaaatgctaacaagctcagctatcaaccagatctttactgaatccgaagagcactaacagtgttggtagctttagtgggtctgtgcctgcatcaaatattacagagggcacaccactgccaggggtttgcttagaatgccatgaagatagtccagtagttaatagtccccaccccaaactcctctccctgttcagacaatgatggaaccgtgatgactttgagaatgttgtgcaggtttgaattcactgtgtacagatgctgtagtgtctctgtgtctggatggaggagagaaagccactttgatacagaaagcattatctgtccctcacaggtatgagtgcatttcattaggtttgacaccatgtacaaactgataacaacctctcttttttcattttgtttacaacacagtagtgttctcgttacttttccagggcacaagtctttttgtccgtgctttggctgtgatgtcacagtttgttcagtgaggtaacaatgtgctgctgggaatggattttttttaaggttaaattattgctacatttccacttactcagaaatatcccttatttcattatttttcaattatgtttgagagaattgcactgctttattattttagatggttggttgagagtttaatcacatattttgatatatttcatagttggaatatttatgtaaatggttttcaacaagcctgaaagtaatttcaagaatgtttcagttgtaagagtaaagtttgcacacaaaacattttaggcacttttttaacattctcagaggtgggaattttaacttttaggatttgttggaatctttttattatctttaaaaatttcaatgcttcttttagtcagaaatgattcagggttatttgaggggaaaaaacccatagtgccttgattttaattcaggtgataactcaccatcttgaattcattgtctggtttcagtagcagttttgaaaccttagtacatttttagcagcagtgtcattctcaagtccccatgaggactgctgcgtctcttgggctgcctgacagcgtcacagctgggaatgggatcccaaaatcgtttcctgt

SEQ ID NO: 30176 - DNA, 1173 bp, Mus musculus
ttgtttgcatttaatggacacagtcttagaaacattacagaataaaagcccaggcatcttcatctttggtgattacatgcacattagcaaatctgtcttgtcctgattcactgttgtaaagcatgagcagaggctagaagtaccatcctggttgctgagagatgctgagaagcaggactctctgctttgactccttccccatcatggttaaagtacaaggcactgtgaatgaaggtagttgtcagggttagctgccaggggtatgggtgttattttatttttagggggaaagtagttttattttaattttatggcccccttccccctcccccctcttaaaggatctaattgcagtggttaaatgcagctaaccagtttttttagaatatgctctctagccaagtctaactttagacgctgtagatggacaagcttgattgtctgaaccaaaatgggaacattaaataaacatcacagccctcactaataacattgtgactttgctgtcaagtgtagattctccacccccacccccacccccaccccgaaaagacgaagaaaaagcttgtgaccattttgtatggcttgtctggaaacttctgtaaatcttatgttttagtaaaatattttttgttattctaaaaaaaaaaaaaaaaaaaaaaaaaaaggaagggggtaaaaactgaaaatgtgagaacaaccactaatgtaagtcagagggaggacacgtgtaccaggaggggctcacctggctagaaactgctagtcactgcagtgccatagacaggaagatacccactggcacttgtggtggaagagaggcgagcaccttcctttgcagttcgcccagtggcctctgcgctgttgccgtgggtctgcaggcagagactggttctgagagcagagatggagtgtggggaggagctctcgcctgactccgctgctcgtttctcacaccgcacagctaaagtgtgttgtactctctttccatgtgctgcttcagtttcagttttcagctcagttaggagccatgcagcatctaaaagaccagctagagcagcggacacggatgatagaggcaaatattcatcggcagcaagaagaactaaggaaaattcaagagcaacttcagatggtccatggtcaagggctacaggtaacttattctgtctg

SEQ ID NO: 30177 - DNA, 1200 bp, Mus musculus
aatgtttagttttaaaagagccttatatgtatattttcatatgtgaaaaaacaaaatatgtattaatagcttaactgatgtgatatgtgaatttttattattcccaactaaaattactccttacaatgtgtttatactgtgaattgctttaacatgctcacattatgctttaataatctgtgccttagtgaaccataatatatgcatggaaggattcttgcactatttaggtttcgtgcctgtgtttatagcccatagcatgatgaattcagaaaatgatccatttgatgctgttccgtaagtgtgacatcagtccacgtgtgctgtctatcacacaggggagtctatctaaatctagtctaatagaactctttttattttaaaagtaaagaaagagtttatgtgagcttctgtttccagagagttaggactccctcagggaagccgagcggctgacagcgagctcaccacacagagcctagagtggccaggaagtaggggaagctgtgtactccgaaagccctccccccagggacgcacttgctccagtaaatctgcacctcttagacctcctcaaacagcacccccacacacctggggccaagtgttcaagtctctgggtctgtctgtgggatacatttctcattcagactacattttctaaaaccaaaaattcaactgataccaattttcccccctgaggtgttttttgctatttctgaaagttcagacctactggaggtcaataaactcagctatctgtttgcaaattacttacattttcatcaactttgaaaaacattttcctggctatagaggaaataaatgtgcctagtgatctcatctggataaaatagttatcgccgtgtgtgatagtgcaagcaggaagggcggcagtgggagacacttttatctatgtgggccttatttgggctgtcctatgcgctctccacatgacacattttttttaagaattaagttaaaataattcagagttttgtaaaataatcaaatgaaaattttttttactaactaaattcttcagtgtactagtctaaaatttcagaatatgaaagtatataaagtaaatatagaaaagtgttttgttaaaagtccaatatgcatctgataatacctatttgtggctccaaatcctatctaatatccccagtctttccgaatagtatgtcaacaccatcc

SEQ ID NO: 30178 - DNA, 1187 bp, Mus musculus
gaacccagtcttttttcatgtcaatatgcaatgcaagttttgttcctaaacaagacagtttgtcttttggaataaagaggtaccttatattaaattctttagcaaaatttttatattagaaggctctctctagatttctttatttttaaaccataaataaagatagcaatacgttgaaactatctgcctcaccgttagaatgacatgtgaaggtccttcgaaaggaagtgaagtaatttaatatacatttagtaagtggttgtgggggttggcttcacaattgtgagcttgggtatcattgccaataagctttttaaaggaccacttcagatgaaatacaattagtggttactttgtggagatcaggagtatgcatctacagcatgaatggaaataaaaccatccttattttaagcaaatggacatttgtggcttgagatttttcccccgtgagagcatcgaatacagatcttgaacttcccgttctggacataatgcagcaaagctgtgttcacttcttcctctgccttagactcttctaaataatagagagcagggaccgaaacagaaactttgtcttaagtgagcccaggagatgtgtgccactctgaactagaatctatgggttaaaaactatcaaaggaactgtgcctgagcacaagtcatgcctagtttttacagcaccccaagaacccctaaaaacccccaggaatgagagcacaagaaacacaggggcccaggctgggtgggaggctgtggatgagcgtttggggtttccgtccaaagtgaagttgggcccgattttcagccccatttcacccaggtggctaaccagactcagtaccatgtgaattgtgaagcctgttctctggagaaacagaatcagggggcaaccaaactgagactcaaacataggaggctgaggataagcagccctaatgagaatcagcgtagatgaaagagtacccagcacagtgactaccaataccctagcaagtggggtaaaacggtgggaaaccgccatcaaaaacctgggaaacctgggggtgctgacatttgaaaatgccaacgttagagaaggctccaaagctctcccatgtctagtctccctttattcttttttgacttctcaaattccctcacatctggcaaggagcacagttgcctagatagagactctcttttcc

SEQ ID NO: 30179 - DNA, 1152 bp, Mus musculus
gacaaaggacagtaaaatatcaaggcttttcaaatacattggtgagaattaggtggattccagcaaatcaagggaagttttcttataggtttggggtgggatcagatgatgtttgtagctctgggcgtggtgggagctaaggtgcttatcctcacagatgcttcaggtgacagccacaaggacattgggtggacacaggtaggcagtaagcctgctttcaggagaatccaaggtagttgatctttgagtatgcaatatccccaatacctagtctcccgcactttcaccagtcagctgtgcagaaccttaaatagacagctcttatctgggcacttcctttcagttcattgttttgcaatgctggggactggactcgggtacactggcaaacgatctgtcactgacctagttacccagctgatggtcatttttgctagtagacaagttccctcctcacctcctgacaactcccctaacgtttgacttttctttctgtgtagatttctcagccaccaatgtttagacaaacctcaataaaatgactcttcaggagttggtgcttcggactgcctctgtctatatggatagaacagctgtatgttttgacgaaggcaataaccagcctccagtgtgctattcctacaaggctctgttgagcgcggcttcagaattatcccattttctgatagcacactgtgactttggaggaattcgggaaattggtctctattgtcaacctgggataaacttaccctcctggattttagggtaatatttctagtataaactgatattactctaaaccaatttaatagttttaatatgtagtatactttgtaagctattgttttatttgctgtacacatttcctatggtattaatttttgatcatgtacattagttaatttgagcttattaaggacagactaaaagtttttagtaatacaatatttaaatatgtcaaaagtataaaggccttatttgtctgtcaaagaaaacaggtaaagcattttataattgtcttcaggtaaaacaaaacaaaaaccaaaaaccaaacaaaccattgagctgtcattccagaacttgttaactctcttaaaatgttatctttctgtatattaagtgctaagagctctttctttttttcaatac

SEQ ID NO: 30180 - DNA, 1037 bp, Mus musculus
ttttttttttttttttttttgagacagggtttctctgtgtagccctggctgtcctggaactcactctgtagaccaggctggcctcgaactcagaaatccgcctgcctctgcctcccgagtgcttagtcttgtgggaggggggcacatatgcactaagttataggtgatttttgagctttctggtacagcaagtgccttctcattgagctgtcttgtctccttaagttgcccgggttaagttgtctcagttgtcaggggccaggctgggctccagctctgagaaaggagagaacaaaacagccccgaaatgaaaatattgtgtctttgagagcagatggtgaggaaagaggccatgtccctgaacagagctgagggtgagttactccccaaagtgaagcccagggagtatcccataatatgaaaatggcctctggtgggataggcttaggaagtctggcctgggatcctcttttgtcccctgttggacttctctgattgtctcactctctctgctgcctgtgttgggctcctgcttgtgataggattaacctactcactagaaacccggagcttggctgtcttggattgttttccatacaggaaaaaacattttccaaattgttttcagagtaagcagcgctgctcacttctgagtgagcagtgacagattgggggggggggggagtgggagagaggaggagaatctgtgaaaaggggggagtatgagtgtgactatgcagagggcttctgacagctggctgcaactgggacaatacttactgtttaatactgggacatagacttggacataatataactgtgaaggttacataagaattataaggttgggctggtgagatggctcagtgggttagagcacccgactgctcttccgaaggtccagagttcaaatcccagcaaccacatggtggctcacaaccatccgtaacaagatctgactccctcttctggagtgtctgaagacagctacaatgtacttacatataataaataaataaatctttaaaaaaaaaaaa

SEQ ID NO: 30181 - DNA, 1752 bp, Mus musculus
cgtcttcttgcctcagctgacaaagcagcaggtactgcaggctatgtcatcatgtcgggcttccttttttttaggaaggctaagagaagttttcatcctgacttagacgatgtagctgtgttgtggtgagacatgttttcccttcctcctgcaggagcaaacagcgttgtgtatctgtcagtggaaggactggtttcatctgtgcaacaagaaataaaatttaagaagcagaaagtgaaaaaacatgatattgcaattcaagaaaatggaaatggtttggaatattttgaaaagacgggacactgtacagcttgcctcactgggcagtaccctgtggagctggaatggtagctgcctggacagatgtgttgcttccagactgtagggtcatcaagaagtggtctacatactgttgttactcaggtggtaccaagtggataccacatgcttatgtatgtatactttaagctttgagattttctgaggttattattaaattgctatattgaacctgaagattacatggaatgcagcatctgaggattcattttgtacaaggactgacttttcactcgagagaaggcagggggttagtggcagttcccagaaccatgcttgaggggtttaaaagaggctagagtatagggctgttatgtacaggggctttataaagtttcatgaagaatttgagttcattgtgccccataggtatctagtctgtacagtcaagcctgtaattatggccttgaccttaagattcttccaccccatacacgtgtggctctgaggaccagtgtacaattcttaaaaaatgaaaacctacgtcggaagctgaggcagaatcctgagttcaaggcgaacctgggctttcctgtctcaagataaaaagcctctcctgtgccgggaccccccatccatctgtcgttcatacacttagtacatagtaggaatgtgcgtgcctgtcataggtcgtttagagctgccgtctcacccctgtgcatggccattagcatctcagaagctagtgataattaccttttgctaaattacttttcggtttcattgtgatggagggaaatggacagctttgcagtcctttcccatctctcttggggatgtaccagaatgactaaaaatatatctggagcctttttgttttcctacacttgaggagaaaatacttagtctagcaaataacttagtacattggaaagagaaagttttaatttcaaataagactttatcctaggttgattaaacctggctttttgaattgagtgcttgatcattcacagaaatgtatacttgtatacatattatacatatgatttaaacagagcaaatagatgcataatcgggctgattttcttaaaggccagtgttttgggaattagattgcctgtacccaagtgttagctcgcaatcatgtttgttctgctttatgttgttaggcaggcctggtgacattttatttttagtttttttatgatgcagatttagtggattgagatgatttactaactcctgtttgtgtaagattttttcacatggaaaaataactatttctatattgttgccaaaatttgctatatactttccaaacccacttagaaatataatatttattaataactgaaattattagtctacatttggtctatagtatcatgtgttacataatggcaggtcaagataaaatgttaatactttaaggtcatgtgctgcagtgcctgaggttatcgtatggcatag

SEQ ID NO: 30182 - DNA, 1134 bp, Mus musculus
ccagacttagcctagaagttgtccttttgcagagtcttatttgacattctacatactccgcatacatttatttaaaaaaaagcatctggggccaccctgtggtggcgcatgcctttaatcccagcaactggaaggcaggggcaggtggatttctgagttctgaggccaaccaggtctaaagagtgagttacaggacagcccgggctatatatacagagaaaccctgtcttgaacccccctccccccaaaaaaattgttttgagaatgtgtgtatgtatatggtgtaggggactatgttttttgttgttttgttttgttttttaaattagttacaacttgctgggtgcagtgactagctcaaagcactggagaggtctgcagaggcaaactgatctggagcttttgaggctacatagcaaatcctaggcctgccatagctacaatgaggccctgtctcgataaacaaacaaactacaacttattcttagtgacttgtcactatgttattatgtttcctatacttactttttttgttttgtttgtttttttgagacagtttctctgtgactggctgtcctggaactgagttggccttgaactcagaaatccgcctgcctctgcctccccagtgctgggattaaaggcgtgcgccaccactgaccaaccctatacttgcttttatatgagaaagctataagattagataaggtaaggacaataaagataagatgtgttagtgaatggattgtattttatagtagagttcataatatcagccctggcaaacatagcaagactagtctaccaaaagagattgactttattaggataacttaactaaaccaagcaagcctttggtaggagactagtgttgaaaatatgactgtgggttgttttgtttttttctttttctctttttgtttgtttgtttctttttttgttgttgttgtttttgtttattgagacagggtttctctgtgtagccctagctttcctggaactcactctgtagaccaggctggccttgtgctcagaaatccacccgcctctgcctcccaaactctaggattaaagccgtgtgccacccctgctgggattgtatttttcttttgaatagcagtgataagctagttt

SEQ ID NO: 30183 - DNA, 1215 bp, Mus musculus
cccgcttccgggcggcccctccccgcaggcagccaaaaagtggcgcgcatgctgcaaggcccccgctggccggagaggtttctgggttggagcggaccaagtcctgacggccgggggacggcgtgagaccagggggcacgaacggctcaggttttctgagggacccacgcgatcagctgcgccactctcatcacctactccttgggcgcgggaaaataacggagcctcccacgtgcagagaaagtagcgatcctgacctcggcctcctccccacctctttgactccgtagccccgcccctctctttgccctagctgattggcggagagcgggaggcagaactggtcacgccccttctatgaagcgcgccgccgcagtagcgagaacctagcccgcccgggaaggaggcagtcagtagcgcgagcctcttgaggcgttcgatagcggagcggacagctggttggtgcttggaccacgccgcggcagcaggtccctccacgtgctttccgaggcgccatggagctggaggagttggggatccgcgaggaatgtggtgtgtttgggtgcatcgcttctggagactggcccacgcagctagatgtgccgcatgtgatcactctgggactcgtggggctacagcaccggtgagcaacaggatggaggggtgggggtggaatggcaagtatttgcacagttccacgagccgcttcccagctctgtgctacggggaacgcaagacaatgagggtggatcatgactgggaaggggggatcagggctaggagggtgaatctcgagaatcaagtcaagtacctactcaggatattgaccaagtgggggtggggtacactttgcctgcatagactttaacttaggctgtcgcgttgctcccgagtgctctttacaggttagctcccaagaatgtgcatctctcgtcgcgggttagttactctggagtttgctttcactagccaggttgggaagggaccgttcagatctccttgaaactagaactgttctagagataagcttctgtagggtggtggtgctgaaggtcctgcaacacttgaaggtttttctatttgttgttgttttgcacggggcctcctgcttgcaagagctttgtttgcaagggcagagctactgagcagatttgtcagcctgaaagcagttagaggtttggagatcgtgagtttaaaagtagttatagctatgag

SEQ ID NO: 30184 - DNA, 1471 bp, Mus musculus
ctcaatgtctgactatatattttaactacagcctactattttaaatcagatcttatgtttttaaattattttatacttagatgcttaagtacgcatctctaagaaataagatttgggtttattatcatcttttttaatttttaagctgccaactcatttttctgtctttttcttttctgatccaataggtattggctgttcaactatactttctccagaaggatcagctcagtttgctgctcagatatttgggttaaacaatcatttggtgtgggccaaacttcgagcgagcatattaaacacgtggatatccttaaagcaggctgataagaaggtcagacaatgcaatttgtaaagaagcaatttaatttttaggagaaaagttacgtagtcctagtttggatttaaagaaaaaagtcaagcaaaatgatttcacataagagaaaacaatttagttactaatgaacaaatgttactcagtgtttatgagttggcacattgtcagtggatattactaatatttctagctctacaaagtgatatgtccctgtaaccttagcactccagaggctgaggcagcagcaggacctcttaagttcagggccaccctgagctgtgtattgagactcaacttgccgtggagggaatctttctagctagtaaaattggcatgacactactaaatttattctcacgctctgtatagtcactgttgggtaaatatgtaactatggaactggaacaatgtgtctgctgtctgaaccactatgaagaaccagtgtggctctcttgcagacgacctgaatttgcttcccagcatctctgtagactgtttcacaataaataccctttaaatcaggggatctgaccccatggcttcctcatgcacctgctttcaaatactattacattcccccacccaacacacacaattttaaaaagtaaactttttaaaaagagtaatagcattttttgttgttgttaatcagtagataatgcttgaactgagttgatacattgaaaattaaaatacttgtgtataacaatatattctcgctgtgtggtctatacattctaagtcattatctaagttgatggatgtatttgtgctttgttggggtttgtttttacagtgttgaggagaccttgcccatgctttaaccctggtttttttgttttcaaaaggttgagattagaggtagaagaaaggtgctcgccaggtctctttcctgaggtctttgggcagtagggcagtcgtacgtgggataaagccattccagggaaggatggagtaaacactgcttagctaggattggtaggtgcctctctggtaagacatttgccacacctgcagtcaccatcctgccaccattttaagaaattgagtctctagtttgtaatcatagttaaggagtgggtgagtgtgatgggctgattggtttgctagtgtatatccgaacaatgggccaga

SEQ ID NO: 30185 - DNA, 1882 bp, Mus musculus
caacagaagaagaagaaaggagggaaaagtggctggtgatgacagtgtacttgttgcaggctgttcttaatccagtgtcagtgacattaggaacataataaaggtaacacagcaggaagcacagagctccctcctccatccccatagtcctgaaatgatttcttacacttcagatgcgaagacatcctcctcagactgcctcatcgaattggcctgcttataccaaatagctttacagagagaggcctgaagatggcagcatacgacacattatctaaggtttcccgggatttaaatagacagggtttctcctgtttcaactagtgtgaagatacatgttcctatcaagtctcaccttaaattatgtcttacaaggctaaaagtagaatcttctgagcattccaagtatgtgtttagagctatcatgtgatgaaaagggatcttaataactgagtggccagaaactcaccgtctaaaataatcttagccataaattgtcctgtgatactggaattgggactctctctcgtgtgtgtgtatttgtgcacatctgactcctttgtacctttgttgtttccattttcagattatgttaacatactgatttagttccactgaagacctcaaaaaatgtatcagtgttccaagtagttgactcttgccccagtgttctgagggcaaatgggtttgggcttctcagtcagaacacttaatggccactatcaagaacataaactttgacctctttatcttaaagaggaaacaatatcaggcggtattgaaagccacaagagcatttggccccattaataatcagatggctcccctttctggttatgggacatgaccttcattacctttttcgaagtaacgtggtctgcattcattttgtggtgtaaatgttgctcttgtctttcattgctagcaggtcactttcacactcagcagttgtgagacacacatgggtgcctccccatgcttagtattcatttctgtcacccgagagatcatcatatttctcacctagatttcctgtgaccaggctactctgttcttgttaataaaagcgctgctgtgtttgagcatttctgttgaaacttctccagtgggttcacaaggctttcctgctctggggagttagaataggggctacttttctgttcagcatagtcagtgtctgcagtgtctaagaggggtcgacattgctctccagaggactaaatactctgtgacaggaataattgattccgttccatctcctttgcttaaggacttttttttatgttgaccaacagaatcttcatattctaaactttgagaattttggtctaagacatcatggtgaaatacacacgtagccctcttagttgacattgatacagtcattgctaagccacagaaacctcacttcaaataagttatttatctaaacttcatctgtattaacatctagtaactatttgggggaggtctttaactggctcagtgtgtgtgtgtgtgtacacacgtgcgcatgcacattaataaacaatgtggaaaacatccattcactgtgttacattttgaaataaattttaaaataaactagcagtgaatgtgactaacaatgtttcggtattggcattttatgaaggacttccttattaatacatctaagatctttcttttaaggtgactatctaaaattgcctcctgccgctcctaacagaactacaaatctaatgggattgggagaactcggtttaaaaaagtcaaaattcagaggctggagagatggctcagcagttaaaagcattcactgcacttccagaggccctgagttcagttctcagcgcttacacggcagttcacctgtctgtcactccagttccagggaatctga

SEQ ID NO: 30186 - DNA, 1204 bp, Mus musculus
ccccaattctcgtgcacgcccgggtaaggctggggctaacttctgctatttgtttataaaagaaagaagctcagggagtaggttccgcccctttaatgagcctaaggcgggagtcgggggccgggcggattaggtaagtttcccccgaggcgcgcccccaggcaggccaggagtccacttcgagcctcgggaccgaggggcggggcgcgctcggcggccacgcgcgcgggcggggaagggggcgtgtcggcgggcgcgcgcggacggcgagggggcgtgtccggcgggcgggcgggcggcgacggcgcgggccgggtgcgcggcgcagcgtcctgtgctggaatgtgcggctcccgcgagctcgcggcgcagcagcagaagaccgaggagcgccgccgaggccgcgggccccagacccgggcggccgggaccgcagcgacggcagaaccagggccggcggtctgatcccgctccgcgatcgcaccccgggatctcgagggcctcgacgcccaacttttccccgctctccctcccctcccctcccccgaaagtccagcaacaaagaaaaggagttggagcggcggcgacgcgggggtggcggaccgtgggcgcacagttcagagggtaggacgcggcggagcgaggagagcgacgggggagggcggcgggcaggcgcggagcggcgcgaggcgctgtccagggctgatttgcagatactgtggctcgggcggcgcggcggccgggcgggggcgggatcgagttacggagcgagtcacgggctgggccgggggctggtgcggagcggcgtgggcatcggcccccagcggagcacggggaggcccttccgcacggcgctgagatccggggccacggaggccggagcgccgctgctggtgaccgcggtcctgaaacttcccccctccgccctccctccgcctcgggcccaacgcccccggccccgccggcgtcccaggctcgccgccccctcccccccagtcgtagcagggccggaaggcggccgccccgcttgactcagcccggggcacgggcggcgccggcggcaggctggacagcgatttctgcggcccgcgctggctctgcgcagcgggggagcgaagttcgcaaacttccgggccacgggggcggcggtggcggcccgcgtggggcccctcgcagcgaccgggggccgacagcctcgggaggg

SEQ ID NO: 30187 - DNA, 1572 bp, Mus musculus
gacaacaatagttaactattcagtgatttggttattaaaattttagttaacattaaaaatattagccaccaaaaagaagacttgcatgccggtgtagacccaatgggtcaaagaattcgctttttttttttttttttttcttctggctatagaggaaacagttcctcatctgtttttgtgattgcaataaagagaattgaaaattcacagcacccttgcccaggcctatctagtgctaggattacatgcgagtactgccatacccaaccagaaaaaaaagtatttgaatgttgttgttagaagttaacgaagcttgttgaattttaaaggttgcattggaaagatgcttgctttgggtaatgagggctttatttatttatttatttatttatttattttggggggttttgctttatccagagtacagttatggccacccaggtgatggggcagtcttctggaggaggcagtctcttcaacaacagtgccaacatgggcatggccttaaccaacgacatgtacgacctgcacgagctctcgaaagctgaactggcagcccctcagctcatcatgttagccaacgtggccctgacgggggaggcaagcggcagctgctgcgattacctggtcggtgaagagaggcagatggccgaattgatgcccgtgggagacaaccacttctcagaaagtgaaggagaaggcctggaagagtcggctgacctcaaagggctggaaaacatggaactgggaagtttggagctaagtgctgtagaaccccagcccgtatttgaagcctcagctgccccagaaatatacagcgccaataaagatcccgctccagaaacacccgtggcggaagacaaatgcaggagttctaaggccaagcccttccggtgtaagccttgccagtacgaagccgaatctgaagagcagtttgtgcatcacatccggattcacagcgctaagaagttctttgtggaggaaagtgcagagaaacaggccaaagcctgggagtcggggtcgtctccggccgaagagggcgagttctccaaaggccccatccgctgtgaccgctgtggctacaataccaaccggtatgaccactacatggcacacctgaagcaccacctgcgagctggcgagaacgagcgcatctacaagtgcatcatctgcacgtacacgacggtcagcgagtaccactggaggaaacacctgagaaaccatttccccaggaaagtctacacctgcagcaagtgcaactacttctcagacagaaaaaataactacgttcagcacgtgcgaactcacacaggtaagggagcctaagttgtagtttccaaactgtgacttcgtttaaacttggattatataaactgaacccatctaagatatgctacggtttcccaagggaattgagggcgtagaaaagaaaacttactgattaaccttgtgttgttgtgtattgaaaatggcgttagccccatctttttttttttgaaacagactctagccttgctgtcctgaaattcatggttggcctcaaattcagatccacctgcccttcctccctga

SEQ ID NO: 30188 - DNA, 1195 bp, Mus musculus
atgctgcacaacagcttgtaactgagaatgtctcccgaccccctccccagtgtgtgggtctgggggtgggtgcacactaccactcagatctaatttatactctcaaaatgggagtagttgactgattctgccagtaattgagaggaatcgttttgctcttaagttgctgagccatgggtgtgttggctcatacctgccttgtagtcctagctcttgggaggcaaagggaggagggtcaggacagggtcgttcgtgctaggcagggcacaggtgtgtattgggagtctgagacagtataaccccaagttcatagcttgttgcacactgactcaaaataaaaaacggaaaccaactggagacacataaacctgtatccagacagagacaggaagatggagtgttttggctagcctggcctacctaggagaacctgttccaaaaaccgaaataaaaccctggcagaccaaaccccaaaggctgacatgcctaaaaagtatgtgtgagggaatagttaacacagattagaatgattttgagtttgtttttacatattaagcatctgaaacactgtccttatttatgactttgcaggagaacgcccgtataaatgtgaactttgtccttactcaagctctcagaagactcatctaacgcgacacatgcggactcattcaggttggtaagatggtgactgccagcatttcagtaaattgtcacttttatttcactgtggaaaactacctttaggaagaatttcttttagaattgaagttgagttgtttttaactcactggttttggaggtttttgttttttctgttgtctggaactcacagatccacctgcccctgcctggaagtgttgggagtagaagcctgtgccactgtgccaggcaggccctgccttaaaaaagcaaaaccgtaatgggagtggggagggtaaatatgggttctcttagatcagactctagaacaaaacagatgtcaacttacttgcatgctttttctggaagggctttctttgtttttctttttgaagttgtattaatagtgtaagtattttgcttgtaagtgcaccatgtgggtgcaggtcctgtgaagggcagaagaggatggcagatccccacgaaccggagtgcagatggttaggagacactgtggatgctggaactaaacttgggtcctctacaagatctt

SEQ ID NO: 30189 - DNA, 1145 bp, Mus musculus
tggggaaggagcgagaaccagctcccgtaaggttgacctctgacttctgtcttcatgttaacgtggtgcccttttgccccaacacaaacatacataaaaacctcaaatgatgctggtgtgcagggacacagctgtaatcctgcctcttgagggctgaaaactcaggccagcctaagccatgatactgaacgatcccaggcagtgtggtgaggttagccttaaaatctaaaggaccaaaaataaatgaaggttagcctagcctctctctctccttttttaaagatttgtttgtttcatgtaagtacactgtagctgtcttcagacacaccagaagagggcatcagattccattacagatggttgtgagccaccaggtggttgctgggaattgaactaaagacctctggaagagcagtcagtgttcttaaccattgagcccctcgtgccctcctccccgcttttctggctgtgactgacatgaatctctatccagattcagaacacagcctgtagggcacatgcgctatctggccctgaagaacatgattttaccttagtctctcaaaatgaggagttagaatttaattcccaatttgccccaacatcccatcttcccctttctgtgatgttctctgagctttggatggtgtaacatagatgtctccgttagggccgaacatgtcaccatcattctctggccaatggaagtctgaactagcctttctagctgcagtaagactcttggctaactctggatatagacacaaatatgtagaaggagattggaacatgactattaggtgaaacaggagtaatgtgtgcatgcctagggcctacgacctatgacctccccaggcactggcccttggtcagatttacattacttacgttttttcaagacagagtttctctgtgtatccctggctgtcctggaacaaacttagactggaacaaacttagaccagtctggcctcgaactcagaaatccacctgcctctgcctcccaagtgctgggattaaaggcatgcaccaccactgcccggcagtaccaaattttaaaatcaactttaatttattgtgtatgtgtggctgtgtatgaagataacttgtgtatagaggctgtatagggacagctctgcctccac

SEQ ID NO: 30190 - DNA, 3051 bp, Mus musculus
ttgtttttgtttctttaacctatgcagttaatctcccttcccctgaaacagcgttgtgttaaatagtaacactatacagatatatgcatggtttttttttttgtttgtttgtttgtttgtttttcctttttggagggatgcttttaggcttgtttgcaaagggccattttccttttctttgctgcagttgtcttttttgcagaacaatagtgtgtgaaagtttataagcaatggaacatgcaggttcaatccattgttttgggttttgttttgttttatttttttattttaaatttcaccacttatctatgccagaattagtttcatataagttattttgaatggtgaggatatgtgtaattccacagctttccagtctgatttttttttttccccccagtaagtcactagatgcatattgaacaaatatttgtctcaaaaatcagccaccagtgttcttttgctgtttctagctcattacagagcgatcatcctttgaggagttgtcttcaggagatggttgatggttactccactgagtagagacctccaagtggtattggaagcagcaaacctggagtgagacataattatccttcagactggagactgtcagttgtgagaaagccactgtggtcacatggctaggctagttgaaagtgccgagttccagcaggcggctgctgctgtttccagtgagtactgaaaaggctgatgttagaactgagtatagtccggagtttaagcatcatattttctcagggatctccacaaactagcgggtgtcctcgctgtccctgtgagacagcctctgtacaggagaggccttaagtgaattgtcactgtcctggaggtcctctggagacactgagaagctgcatgtatgtactccagagcctggtttctgtgctctccagaacatgaaagcgcccagcatggacgttgcttactgggagtagtaaattaagtatgagcccagtagggagttgtgacgttttgatggaataacctcgtgtatttcatttattttcctggcgatctctgagcaggcttcagattttgacagttatgaaagatccaagcattaatgtgtgggtgaaaagcttggtgaaattctgagtgaagtcttagttaaagttggttgaacttggaattgactgggaggccaaagatttaaaaagcagattttctcaagacacagttgtgtgataatggtgtgtgcttcgtgtgtgtgcgtgagactttgtaaatgttgaattctaggctccgacaatcattgtagtgcagatcagactgcagaatatttatgttttaaatttaaattataaagctagttaagtcttctaacaactagttttaatgttcatgagcaaattttgcctacattaccttttcaagatgttgaaaaagatgcttccgcaagcccaggttggaagctgggaggtgggtggttctaggagagatctttgtggattcattcttactcaatgccttctgggattgagtaagttttaatctattctgtaagattaaaaggaaaaaaacaaaaacacaatggaaattaaaacctcattaaattagtctttaaaaacattgttacctgagattgagtgggacttttgagggctttgttccagaaaacaaggaccgggtcctcgggcctacattaggcctgaccccggagccatgtgtttgtgcctaaaatcatctcagtgggaagtatcttagtgactctagagactcccgggacagtgggggggtcttccatttgaaaactgtgatacttgcatgggattgtttgaatcttgtttcctagtctccctttccccatcactaccctcatagtctgaaggtagatttttctcttgataaaggaacacaaaaatgaacatcttacttgtaaattgatatctagtaactagtggtaaacttgaaatggtagcattctttacagcttaatcctaggtagccttagagaaatgtgtctttattatttctgaacctgcatccatcttgtctgcccaagctgtcttaagttatgtttccttttttcagagctgctttttattttggggctacttttttttttttttaattgaggcgtaaatcataaaagactacattgctttgatgagagactttttacaccgtcaggttgtctttgtctagtcttccaagaagggtcattgtgcttttttagataaatcctgacatgggctacttcagatgcaaagtaaaacccaagctctcacctcacgtgtttcactctgaatgtggccagcggaagacacgacttgcctgttagcacactgttacttgtaaacggaaatgctgaagacactcagctttctttacagaaaatcaaggtttcctgatgactgggcacatgaggtgagctgacagtcttggttcagggtgatcggattgtgtagactgacagtctgtgtactgctggctaagtgtgatagcatctgcagttctctccctcccggtagttactgaactctttaaaactggtattgtgacgttacaacaatgttttgcgccaattttataaacctttacagtgcaatatgtgttacttttctgaggcaaaccaaaggtatatttctcaaggttctgctgccatcagcagcatttgatggaggattttttttatacatttgtaataggtagagatgaaacagattgcagtttgttttttgttatttttttttttttaaattgtaaaccatgtaccaggtttctggtcaagattgtgtaggataagttaaacataattgcattctattaaccaatatgagtgtatttcttatgcatatagttacattgaaataaagttctaaaaactatcggacctttgtttattattggtgtgtcaaagaagccgatatcacctcttttgtgtaactgggagtatattccgctataccttggtctttgttttttagtgctgaggagccagcccagatcttgctcattgtaggcaagagctccatcactgagctgtgtctccagcagtgtatttaaagtttctcatagctgtcaaga

SEQ ID NO: 30191 - DNA, 1198 bp, Mus musculus
gttttgagatatatcaagaaaagctaaaaatcaggtgttgtcattttcttttctaggtatatggttcataggttgcttctagcagccctaggcagaagagaactagacgacagagatcactatggcaacaagagattggatcttgctgggcctctgcttgcattcttattcagagggtaaggattacagagtgacacagaagagaatccatgacttcctctgcgggtgggtcttcctagtgacccgagtggccgctgtggccgcttatgcacacacaggctcttgtccttatggtttcacggcaggtattttatgctgtgcgatctcctcagctccctacattagttcatcttagccttctttaagtactttatcgcagttgttctccctgctacattcgtttataggatatagatgctaaagagagtggtaatataacatcactgtgtggccttgttagtggatggtatcatctctgctgaagatgcatatttctatagacttttcatgtttatattatagtaacaccatcttatttgacagcatgtttaagaatttgctgaaagaagtacgaatctatgcgcagaagtttattgatcgcgggaaggattttaacttagagctggcaatcaagacaaggatcatatctgatgggctaaaatactctttagccactgggaactggggtgaccagaagaaagctcatcaagccagagctggagtatcccaggtgaggtgcccactgttcctgggctgcattcatgtgaaagttacagggctagcagagtttttcatttcattgaatatgagtggtttggtttggttttgcttgaccagatgtaaaaatcattaggagtttttgaataatgaaacaaagtttctcttaaattacccattagtaataagagagtcaagtttttggtttataatttagaaactcaagatagcaaacaatcttctactactactactactactgctgctgctgctgttgctgctactactactatgtgatgtgagaatgtctgaatccagagacagttcatagggaagggtaaataacaagatcttgatatatagcctaagctggccttgaactagtgttcctcttccctcaacctccagaatcttgtggttatagcttgtgcctgtaatttttttgtttcaaaagctccattttagaaactaacccagaaaa

SEQ ID NO: 30192 - DNA, 1113 bp, Mus musculus
cacagagatacatacatacacagagatacatatacacacacacagatacatatacacacacacacagatacatacacacacacacatagacacatacacacacacacagatatacacacacacagatacatacatacacacacagagatacatacacacacacagatacacacacacatacacacacacacacgcacacgtacacgcacacctggtattagagtgcagagtttctggggtttggaataaggacagtaatgaacaatattgtggtgctagagacttgctatgagttaatcactggtttgtacagagttatacatgcatttctcatgcttgttggaggagctgtgtggcgtgttaaatacttcccgttagtgtcacttaggaaagtcccctgtctttctgctccaggaatgaggcatgccatctatgaaaagttggacgatgacggtttgatagctccgggggtccgagtctccggagatgacgttattatcggcaagacagtcaccttacccgagaacgaggatgagctggagagcaccaacaggcgctacaccaagagggactgcagcactttcctcagaactagtgagacgggcatcgtggaccaggtcatggtcactctcaaccaggaaggatataaattttgtaaaataagggtgagtatagttttattcatgtagaccattttagaaattaattgcgtttcagtttctaactcatttttatgtgaaaccaggtgcgctctgttagaattccgcagattggagacaaatttgctagccgacatggtcagaagggaacttgtggtattcagtatagacaagaggtaggtgtctccagtctttctcttgcctaacccagagttgtattgaaagattaattaaaatttcctgtagcttttttttttttaattttagtgtttgttagcctattatgttgaaaagaattaggacattcaagttttcccttgggaagtgtcaggtctgtctagctttgtctctaagagattcccatgtctttatgttgtttacaattttctctgtaggacatgccgttcacttgcgaaggcataactcctgacatcatcataaacccccacgccat

SEQ ID NO: 30193 - DNA, 1303 bp, Mus musculus
gtctgtgctcacaatctagagtgtccaagagtttctaagaaaagcactatcttcaagaacaaaacaggaaaccctgataaactcaaccaataaactaactgcggtagtcacgttaaagctaccttttataaagctcataagtttccagtgtcatgattgatcagtaccttatgatcaactataaaaatatatattcaaataacatacagactttgtaggttgtacttacatatttagcagcacataaacacacacacacacacacacatgtatttaaacacaaataataaaaaatattacaccttaaattttaaaaaagaggactatatgaaaaaatcaaagaaaggaaggggataaatgatgcacttacactataatatcaaaaaaaaagaattataaaatttaatagggtttagttcagtgaagaaggggactgactgttcacatctcttattttcagttctgtggcaaaggaggatgaatgaagacttctgaggactcttcaggaagctggataacagaacaagagcaatgtgctagaatagaagaccagaaaatgaaatggtggagtttgaggctcgatagacagtttgaaaaatacaaatgatggtttgaataaagaaaggtattgcgcatgggccaccccaagtgagcgcactgcaaacacaatgattggtcattttgaatttctgctccttcattctgaatttcaaaggctcctgtgacaagtggacatgcagtgactgtaccttttgtatctttctgtttctgacgtgcctggatggaggctcaaatagaagatggtgtcagataaacattgtgttgtcaaaattttaccattaaagtgtattataacatgaaaaaataaaaatgttttttaaaaaatataatgatctataaggttaatgacattactgtagttatcatgctatggaaatgtaatctttatttaggaaatatattcatttttattttgttaatagttagaaccagaacttttattttggaaaactgaaagcaatcttgacgaaaatgaagaagtcaagaatgatctgcataccatatttccagcaattttcctaatgatacctttaaaaaacagtggggtaataaaacttaaacagactgtagatgaaaggaacaaagataaagaagaatttgaatgcacataactagcatctcctgatatttgacagaaatcccaaaatacacagtggagaaaagatgccatcttcaaacaatgacactaaaacaactgggtgttcacatgtagaataaggtcaggcccatatctattactctg

SEQ ID NO: 30194 - DNA, 1201 bp, Mus musculus
tccgagccaataacccacaggtgactcttctgcaatatgtagatgatctgctcctagctgcagaaacacgcgaggactgtgaaattgggacccaaaacctcctgggcgagttaggtaagctggggtatcgggcctctgctaaaaaggctcagttatgccagatagaagtgacctacctaggatatgtcttgagagatggacaacggtggctcacagaagccagaaaacaagctgttatgcagatcccggccccaaccactgctcgccaggtaagagagttcctggggaccgccgggttttgcagactctggattcccggatttgccacactggcagctcccttatatccactaaccaaagagaaaggggaattcacctggaccagagaacatcagctagcctttgaaactctcaaaaaggcactgctgcaggctccggcattggccctgccagatttaaacaaacctttcaccctatacattgatgaaagaaatggagtggcaaggggagtccttacccaggttttgggaccatggaagcgcccggtagcctacttatcaaagaaactggacgctgtggccagtggatggccctcctgcctgagcgatagcagccacggctgtgctagtaaaagatgctgacaaactgactatgggccagaatgttactatagtggccccacactctcttgagagcatcatcaggcaaccaccggaccgctggatgaccaacgcccgaatgacgcactaccagagcctattgctgacagagcgagtaagttttgcacccccagccattctcaaccccgcctccttactacctgaggctgacgaggcccctgcacataagtgtgaagaaatactggcagaagagactggaatccggccagacctcacagaccaaccttggccaggggcgatgacttggttcacggacggaagcagctttgtggtagaaggtaagcggaaggctggggcggcagtagtggatggaaaggctgtcatatgggccagcagtctgccggagggtacatcagctcaaaaagcggaactaatcgcattaattcaagccttaaggctggcagaaggaagggctcttaatgtctataccgacagccggtacgcttttgccacggctcatgtacacggagcaatataccgacaccgtggactgctgacgtctgccggcaaagatatcaaaa

SEQ ID NO: 30195 - DNA, 1175 bp, Mus musculus
cccttaagaaaaaggttcctgctgggcaaaaatctctcaagaaaaaggttcccgctgtgccagaaaccctcaagaaaaagcgaaggaatttcacagagttgaaggtgaagcgcctgaggaagaagtttgccctgaagacacttcgaaaggcaaggaggaagctcatctatgagaaggcacagcactatcacaaggagtacaggcagatgtactgcactgagattcggatggccaggatggcaagggaagctgggcacttctatgtgcccgcagaaccaaagctggcctttgtcatcagaatccgaggcatcaatggagtgagcccaaaggttcgtaaggttctgcagctcctttgtcttcgacagatcttcaatggcacctttgttaagctcaacaaggcttcaattaacatgctgcggattgtggaaccatacattgcatgggggtaccccaacctgaagtcagtaaacgagctcatctacaagcgcggctacggcaaaatcaacaagaagcagattgccttgacagataattccttgattgctcggtctcttggtaagtttggcatcatctgcatggaggatctaattcatgagatctatacagtcgggaaacgcttcaaggaagcaaataacttcctgtggcccttcaagttatcttccccacgaggtgggatgaagaaaaagacaactcactttgtagaaggtggaggtgctggcaacagggaagaccagataaacaggcttattagacggatgaactaaggtgtcacccattgtatttttgtaatctggtcagttaataaacagtcacagcttggcaaattgaaaaaaaaaaaagaaattacatagaatctacatccgtgcaatctcaaaactattgctgcctaaacaagacttgactatgacaatagcagtagacatactattgtgcaatatagaaatatcacatagtccttcttttagacaaaagtctttgagaactaatgcctgctgagagaggaagaaatttgtctttctcaagatggagaaccctaattagttatccaatacaaaccagtgaatccttatatcatatacctataggcaaatctaaagtctctcagtaggatacatttatatatttatgcaggatgtatttatatatttgtgcatatgtaatttttatattagatg

SEQ ID NO: 30196 - DNA, 1195 bp, Mus musculus
ggctatggaggaacagtaataacacaggcgtgcagctgttctttgatgctaaacactgccaaggcatctgtacatcacttctcagggcaagtctaagacctgggagagtgtattgcaatgtacaacagattccacgttgttctcaaggttgtttaatagcttaactttggccagctttctgaattccaccatcagcaagagggcctttctcggggtctttgttttccatttctccagtttcgtctgttcttgttttctgttctaaagtcggatatttgtcatccaccatcttggcctgcttcaagagcttcttctcattccctttctgacatggtgtcttctactccttctccagaccctgatccttgacacagggactatttttagtatcagttttccgggggtgggacctcacaactagtttatggtacagctgggtagcttgactccagagtgtacactgttactcatgatgctattctgttgctaataacacaatgatatgaataaacaagtgaacagatgcccagtggctttttgtattttccatatcatgatttatacttttaaatatcacatatcagattctccatgtccctcttccccccctccttcttcccttggaagtctctttttcttggactttttattattaatttgggctgcaaaaccacacacacacacacacacacacacacacacaacttcatttcaaatatttttgctggcttgcaaacccaaggacaaggccgatgggatgcttgctagttttctgtcttgcttgcatgttagaaggtgtggtggaatgaaggctttcttttggtcttgtttcgtaaggaaactaatccctttcatgcagtcttctccctgttaatcactacttacacccccacctcctggcaccatcactttgggtgatttcagcacatgaattttgaaggaacacagccatcacaacctcagcagacacctaagtgtattcttagtttggctgccggatgatttaacagtagggtccagtaaaagttttcaacaccaagaatgcctattataaaaatctaatatgaaaggctatttaggagaaagagaatatgctatattatttggctacaaagcataaagaaaactgaatgattctcaagtctctccacatctttctagcactttaaatttcttacaattatacaaaaacaga

SEQ ID NO: 30197 - DNA, 2166 bp, Mus musculus
atttaaaactgtagttacagttagtgtcctgctacctgtgctaacagtgtgatatattactcccttccctaagtcaggattgtccctgatctgatcagtgttgtaaacagtgaggtaacatgacatgttaacttggactaaatgttaacagtattacatgcactctgatagagaatccataaatgtgagcagataaatatggttaatcatttgattgttaatatacctttattttatttatctggaagtctaaactagtcatagtatttaagaccaaaaattttttataaagggaatattcttagaaatagatgaaagttacaaattaatttggttgtctttttttccctttccagcaatgtaatggagaaaaaaaaaaaatatatatatatagtatttttttttaaaggaggcatgttatttcactcttcattcccaaattggggattgactgaaatagaaaaaattatatttttttagatttttctttactgaaagaaatactccattgcctgatgtgaacagttgctacttatgatataattgggtccattaaaatatataaacaatacttgactgtaaaatcactgaaaacagccagtaagtcttttttacaagggttatcacgcattctaaacaagtgcttacagcctctggaagttacttgcctggagttcctattcttaagaccattactaaatactttgatgaattaaaatttagattgcatcagtattaactccaatggtatctctttatactctatactttctttccatttacaaacaatttatgatctctgtggtaaccagctttttgtttcctccttttacgaagtgtccagttgggaaatggggtgagtttgtacaataaaatgatctgttcattcagaggtggagaaaagtggacagggtttgttttaaagaactggctacctttaaaataaactatagtttttatcatatcctacctttcccattgttcataaattgaatccatgaatatcaaaggctctgtggcttagaacttaatgacaaaaagaagtcctattttccagttttcactttgttttctcttctttggtagtaacgtattctgtaggtaatcattcaggaatcctcaaacatgaagcaatagcttggctctgtttacttaagtctacacgtatctttgaaagtaaatgagagccatgctttgtagagtgctttagtaaataaaatcaaccaggtttggtttgtttctaattaaatccacaaccattttgtcattgggttttgtttttgtttttctgtaggtagtgattattactgtcctactaaattatactgaactggaaagccataatgaagttaatgactttttttttttgttcattttgtactttaagattcttggtactaaaatatagctattgaatactgagtgcaaaaaaaaaaaaaaaagaaggaaagttgtgttattccatttggtttgttttctgtttgtatgtttgttttaatactaaaagtaagagaaattttaggtgtcattctcaaccatgccccgtggttcatcgcagagaatttaattatacctctttttctgtgtttaatgctgctactgtctcctcacttttatgctttgcaagcagactagtaagggccttgtaaaccaaagagggagtgtgtttttagcaagtgtaaagccctcactgtaatatacaggtgcaaaaataaataagaaaaaagggcagaaatagtcactccaacagaaacttagtttgaggtttctaaagtcagttctttataggatttggagcaattgtgttatgtgtcttattccttatatactgttcaagaagtagaaattggaatcactatattttgcttttacagtttgtcttccatggcacattgttggggagagcatcaacatacaaaaaaaaaaaaaaaaaaaaaaaactatagctggagttgtaactctgtagtacacaagatacatgcacaaggctctgggtttgagttccaactcattaaaaaaaactcaaagtttagattttaggagtcagatgaaatatcaacaggcaatttatgtttgcttttctcttactgtatcttgaaatggtatgtgtgtgtatgatttgttttgcctgcatttaaatgtgccacatgtatgcagtgtgtgtat

SEQ ID NO: 30198 - DNA, 1132 bp, Mus musculus
tactactaaattttatctaagagaataaaataattacattttttgtggtatttacccaagctacttacttgtgttaaaacttcatgttgtaccaaccaagtttgtatatttttgtaactttttttatgttttaactaaagtatatgaaaagaaaagaaagaaagaaaaacatctttgaagttctttttaaaatacattgatggggttggggacttagctcagtggtagagtgcttgcccctgggttcagtcctcagctctggtagaaaaaaaaaaagacaaaataaaatacattgaatgttccttagaatttaaaaatataatagtaaattactaaaatgaaaattatgaaaaaataaaaaaataaactttactaaaaatatacaggtcagttaaataagaaatgtatgttgttgcaatcatacatttacatactatttacagagaaatgcttgaaccttggaaaacagcaagaccaattacgttcccaagtagtttagactcttcagataatcagatcacctctcttatctaggttgctttggagatgatcaaggtagctggtggctatcccttcgacgcttacaaaaactgtttccttaatttagccattccaataatagtgtttacagagacatctgaagtaagaaaaactgaaatcaggtatgtatgaaagtttgttttgctgaaataacaagaaagaaagaaagtattctgcctttaaaaaggaaacatactgggtttcatctctatttcttcttgtctttgctaatccttcctactatttcaggacccagccaaacctcatgttgataaattatctccaagtagactagccaaagaattctcagagcagttgatttgccacaccacttagcattatacttggttcctaacttagataattttaaaaccattcttgtctggttatagtcctgtctaactgtgaaacttacaatgtaatcctatacatttattacaacagaaaacaattccttgaggttttgtttttgacatttcaggttgaacacagccagaaatgccagtagaagaatcttatcaggaagagctaatccatattatgctcatacattacttacaagaacagaaaatactgttatccattcaaagta

SEQ ID NO: 30199 - DNA, 1123 bp, Mus musculus
attagaggagggagagcatatatgctatttcccataaatctgttctgtagaagtatgtttaggatcatttcagacattgtaggaaaccatttcctaatcctaagtcaagcttcacttaacatttgttggtgtgaaactcaaatcaattcaaacagcaactttcttttaattgaatattttatttacatttcccctccacaacccccctattccatcccctcccctccttcctgcttctatgagggtgctcctccacccacccagccattcccacctcactgccctgggttccttccccttcactggggcattgagccttctcaggaccaaggacctctcctcccattgatggcagacaaggccatcctctgctacatatacagctggagccatgggtccctccatgtgtactctttggttgttgtactggctagttttgtgtcagcttgacacaggcttgagttatcacagagaaaggagcttcagttggggaagcgcctccataaggcattttctcaattagtgatcaagggggaaaggccctttgtgggtgggaccatctctgggctggcagtcttgggttctataagaaagcaagctgagcaagccaggggaatcaagccagtaagtaacatccctccatggcctctgcatcagctcctgcttcctgacctgcttgagttccagtcctgacttctttcagtgatgcacagcaatctggaaatgtaagctcaataaaccctttcctccccaacttgcttcttggtcatgatgtttgtgcaggaatagaaaccctgactaagacacttggtggtttagtctgggggagttctggtcagacagcaacttttaaaatcaaatattataatacaatctaacgatatttttgatgttcacatgcagaggaatgaatgcatgaaaaatcgccattttccacaagaaaataagtatctttatataagaacataaaacatttgagtgtacactgagaaacctcagttcatttgtgttgcaggatgatgggctcagtgtagagtatatatgttgtatgtttagaactaaggtctcacggggtggaacatagtgctgtgagaaacatttcagattcattttgattttgagt

SEQ ID NO: 30200 - DNA, 1153 bp, Mus musculus
aaataaacttgatatcattttggagagtgatggtaaacacttggcttgttatccaagtgtaaaagttttcagttagtgtgttgtttgttgagattaaagaaggggtatgtttaaattacagtcatggacacacctgtaaaactctagagtttggttctggttagcattataactctagtattttataacagtggttttacagaagtatgttttttttctagggaaggcaattgtgttccatttagacaaatactttccctagtaacagagccagtcagacatttttgtatattagtttgctggaccctctctaaaggaaactagggggtggagtagatacttgttttgttacttgattcttagaatatacatatactcatttttgcagctttttgcaaatttttgtcctttggagtcttcatggtttaaaacttagctgtagctgtaagctctcaaggtgaaacattgtttaaaggccattctgctgcagtgtcctcaagcaagttcacatgtaacactcaagttagttctctgtccttaagacaggatgcatgtgaaaatctctgtagtagttgaatgataacatcctttaagtatattcctgggaagagttgaaacaagggtaaggaaggtttaattataatgccctagtaaaaatataaagtttgatttattaaaatgcttgatgtttgaacagggtatgtaaaggatccccgataccaggaagtggacaggtaagttgggctcactcttgcttagctttgaattacattcttggaactagtttatgaattacctgaatttagttttacaaatcttattcccaacagacgattttcaggagttcgccgagatgtgtttttaaatggggtaagcattaaattttacataattaaagatagggtctgattgttttttgtttttgtctttttttaatttccccaattttaacattgttgacaatgtcatcttctattttagtcctacaatgattatgtgagggaatttcataacatgggaccaccgcctccttggcaaggaatggtttgtattgctctgttttttttatctgttttgtattattctaacttcattttgcagtgtctagtatttaaatacttactcagaatgtgatacctgtccactaagagac

SEQ ID NO: 30201 - DNA, 1213 bp, Mus musculus
aatttcttacagctcacaagtacattttcttatagttcaccagatttctgaatttttttttaaatttcttaaattactattaacaataatttgtaagaaacttttgagcctaagatttcctagtttcacagtttgcagttttgttttgtaaaatagcaggacatgaaagggtgtgttgcacaaaggatggtatttagtgtatttgctagtatataggttgtagggatggagtgagtgaacaaggatagttatgactgagttgtttattatatcttactaaggaatcaaatggaaagtctctacaagtggaataggaaattacaggaatacatggtgctctagttagtgctggtagtgtatatcaccattaagttccatccatgacttcatggttgcgttttctgatttcttctttaccagacaactgataaaagggtttttaactttcatataaagttttgctttgctgatctgttttctcctttttcctagcatgactatgatatgagggtcgatgatttccttcgccgcacgcaagctgtggtcagtggtcggagaagtagacctcgagaaagagatcgggagcgagagcgagaccgccccagagataacagaagagatagagagcgagacagaggtcgtgatcgagaaagagagagagaaagaatatgtgatcgggacagagaccgaggggagagaggtcgttatcgaagataatgtgcttttggaagcactgactgaagataaagaaaatattgtattttttttgtgtgtgtttacaagtagtaaatttattttcagctgtcgacttaaagctcattgtgtagaaggatttattatcacctttgttccaagcatgcagtagaataagaactggaaaactcagatccgccaaaaaaatgcacagttgacagttgggttgactcttttattggggcagaatggaacagtccaagaatgtagatattgattcattctccataaatgttctttttacagtgtattcatcctagagttattttgtttgtttgttctccttttggaccttggtcaataactgccatagaatttcgctttgtgtttctataggtagctgctcacggttcagtaaaaatactgctgctatcaagtatgcaaatatggaagtatgatggtttgactatatggcagtgttgtagcagcctctcggtttttcctctttcctccttttttt

SEQ ID NO: 30202 - DNA, 1554 bp, Mus musculus
aaccatcgaaaagtttgagaaggaggctgctgagatgggaaagggctccttcaagtacgcctgggtgttagacaaactgaaagctgagcatgagtgtggtatcactattgacatctccctgtggaaattcgagaccagcaaatactatgtgaccatcattgatgccccaggacacagagtcttcttcaaaaacatgattacaggcacatcccaggctgaccttgctgtcctgattgttgctgctggtgttggtgaatttgaagctggtatctccaagaacgggcagacccgcgagcatgctcttctggcttacaccctgggtgtgaaacagctgattgttggtgtcaacaaaatggattccaccgagccaccatacagtcagaaaagctacaaggaaatcgttaaggaagtcagcacctacattaagaaaattggctacaaccctgacacagtaccatttgtgccaatttctggttggaattgtgacaacatgctggagctaagcgctaatatgccttgattcaaaggatggaaagtcacccgcaaagatggcagtgccagtggcaccatgctgctggaaactttggattgtatcctaccaccaactcgtccaactgacaagcctctgcgactgcccctccaggatgtctataaaatgggaggcattggcactgtccccgtgggccaagtggagactggtgttctcaaacctgggatggtggttacctttgctccagtcaatgtaacaactgaagtcaagtctgttgaaatgcaccatgaagctttgagtgaagcttttcctggggacaatgtgggcttcaatgtaaagaacgtgtaggtcaaagatgttagacgaggcaatgttgctggtgacagcaaaaacgacccaccaatggaagcagctggcttcactgctcaggtgattatcctgaaccatccaggccaaatcagtgctggctatgctcttgttctggattgtcacacagcccacatagtatgcaagtgtgctgagcttaaagaaaagatcgatcgtcgttctagtaagaagctggaagatggccccaaattcctgaagtctggtgatgctgccattgttgatatggttcctggcaagcccatgtgtgttgagagcttatctgacgatccttctaagcttatggcctaggcatttatttgtaagtaattcagtatccaagtaattatttgtgaactgtggcatggatggaaaattctatggtgaactatgttcaggatatgtatatcctttcctccccaaatagctttgtttctgtttgatcaaagctcaagaaatacaatttgttgttttttataaaatctcaagtggtcatttttaccattaaagacttagaagccaaaagcctgagcctgtcttcctcctctcttcctctctcttttttccccctacgttcactccctgtaactagttgcttgctctgcctcttgacctatggtttgactatatttaatcttgtttaaaataaatgaaaagctcttggattaaatttgtttgttaggattgcgtggcaccacaac

SEQ ID NO: 30203 - DNA, 2013 bp, Mus musculus
tgactaacttccactctggcaaacggagaacacgaaaccgtgagctgggcaactatctagcgtggcccagtgggcgccctgccgacgcgtgggaacgtagatgccccgcgccctctgtcggccgcgggctgtctcgcggcgtccctggcgggattccggcttcacgccggaagtcaccagagagagagagagctcggaagtagccacaaaaggatccgcggaacggaaatatccttggcctagcgttcctacccggaagttttcattcgccggaaccgactggtttttaaaaagacacggcggcgggattacgctgggggggggggggggagcggaagtttaggcgcgcgcgctgcgcggagagcaccctgggagcggaaggaaacaggcctttcccagactctctgctccggtggtcaccgacttgggttcgcggagcgtgctggtgctgaaagcctccgcttgccggcatcattctgggcggaggtcagaagtggcggaaatcgcggcgtcgcttgggaacccgggaccgctggtgagccatggtgaagaaatcacggcggcgtggagcggctcagtgggccgccgtgcgggcccaggcaggtctcaccgccacggacgaaaatgaggacgacttggggttgccgccctctccaggggactccagctactaccaagaccaggtagatgagttccatgaagcgcgatctcgggcagtcctggccaagggctggaacgaagtcgagagtggggaggaggatggcgatgaggaggaagaggtgctacctctagatattgatgatggagatgacgaagatggagagagttcggaggaggaggaggttggagaggatgatgacggcggaagctccgtgcagagtgaggctgaggcctctgtggaccctagcttgtcctggggtcagagaaaaaagctttattacgatacggactatggttccaaatcccgaggccgtcagagtcagcaagaagtagaagaggaggaaagagaagaagaggaggaggcacagataattcagcggcgcttggcccaagccctgcaagaggatgattttggagtcgcttgggtggaggcctttgcaaagccggtgccccaggtagacgaagctgagacaagggttgtgaaggatttggctaaagtctcggtaaaagagaagctgaaaatgttgaagaaagaatcaccagagctcttagagctcatagaagacctccaagccaagttgacagaggtgaaggatgagttagaacccttgttacagttggtggagaaaggggtcattccaactggaagaggaagcgaatacctgaagactaagtataatctctacttgaactattgcgccaacattagcttttatttgatcttaaaagcccggagagtccctgcacatggacatcctgttatagaaaggcttgttacctacagaaatctgatcaacaagctgtcggttgtggatcagaaactgtcctctgaaatccgtcacctcctcacagccaaggatggtgctgtaaagaaagaaatgactccaaaagcaaaattaaccaaaaccaagcccaagtctgtaaagcaggctgctgctgttgccctgactgatgagcctgattttgatggggctgctctcaagtactataaggaaatggaagacaggcaagagttgaagagaaagaaggaagaaaacagtgctgaagaacaggctctcgaagaacaaaatgcaaagagagccattacctaccagattgctaaaaataggggacttacacccaggagaaagaagattgatagaaatcccagagtgaaacatagggaaaagttcagaaaagccaaaatccgacgacgaggccaggttcgtgaagttcgcagagaagaacagcggtacagtggtgaactctctggcattcgtgctggagttaagaagagcattaagcttaagtaaagttgctctttggcctagcttttggcaattattttaggtcaataaaaagtgttttgaagta

SEQ ID NO: 30204 - DNA, 1530 bp, Mus musculus
ctgtgtttacacacagaaagattcggtttgggattatgaaataagctacaaatttaaaattctgttcaaacagtccaggttgagattgagaaagtctggtctgtgtgacttagttttccgtcctgaggctctgctacagactaagatgatgtttccacccagtgccgctcctcagatccttgctcccgcctgttgttgcctgtgattgagagctctgatacaaactcatggaacacattcacggtgtatttttaccaaacactcaccaaagcaacagaaggtttcagaactttaataagccagtctgatttggtcaaatagcttttcattttatctgtatttgattacttagggatagaagttttaaaaaatagcaaaccacaggttagtgaatgtaagtggccactcagcagttaacgtctttagaaacttggcctccctaagccttgacctgaaggcatttgacattggtgcctgtctgtcagtgtcatggaagtctaggcaaccttcacttttttttcttggacagacaaatcttaaggctattaggtttgaaatcgtaatgtgacatatcaaagcagtccagactggtaaggacattaatagcttcacttgaattgaaccagctctagatagggaaaacaatctaagtcccctcgtttgcttttccagtggggtagccatcccatacttagaacaggtaggggtgccttgcttaaatcaaactagcatttcatgtataattgtgtgaaagatctgtggataaagctgtatttctgtcacattgtggcagcacctctgctttaatactaaatagcttgttatttaaatattggacaaaatggctggcttcaaaaatagtcattaataaacttaactttatgtatacctgtgtagaagaatcaaagttctgtatattttctttaccttgttcctattctcagggtgacagctaccaccaagagatgataaatctcacgcttcagactgaattttctgagctttcacaggtggtaacctggaagagacgtgcattgcttagtacatagccacatgtgattaccagctaaggggcaaaattactgttctgtagacaataaatgaaagtttgttttaagttggagattacctaacagtatttgttactagaatgtaggagtcatcttattttttatttatcaagtcctgatatattaatatgagaagagatggtttcgaggtgtgttaaaaaaaaatcagtaaaaaagtgtcttagagggctggtgagatggctcagcggttaagagcaccgactgctcttccaaaggtcctgagttcaaatcccagcaaccacatggtggctcacaaccatccataacgaaatctgatgccctattctggagtctctgaagacagctacagtgcacttacattaaataaataaataaattaattaattaaaaaaaaaaagtgtcttagagttggatgtggtagcaggtaagcttttaatccccacacaacagaggcagaattgggcaaatcccagtaact

SEQ ID NO: 30205 - DNA, 1214 bp, Mus musculus
agaataaaagtattgcttaagtctatcttaaagttttgagaattaaatagcttatgcctggatcacagtatatattcaatgagtgttacttgttaaattcttgacagaaattcacaaatattaaaactctcgtggtggcacatacctttaatcccagcactcgggaggcagaggcaggcggatttctgagttcgaggccagcctggtctacagagtgagttccaggacagccaggactacacagagaaaccctgacttgtaaaacaaacaaaaaaaaaagattaaaactatgatgtttggccgggtagtagtggcgcacacctttaatcccagcactcgggaggcagaggcaggtgaatctctgagttcgaggccaccctggtctacaaagtgagttccaggacagccagggctatacagagaaaccctgtctcgaaaaaccaaaaaaaaaaaaaaccaaaaaccaaaaaacaaaaaaaaacctatgatgtttgaattcaagtagcagtgtatttatctttgtgtgtgtgtgtgtgtgtgtgtgtgtgtgtgtgctttcctttgtagtgtatgaaataaacaacgaagatgtggatgccttaatgaagagcctgcaggtcaagccttcgcctgtgctcagtgatggtgtggtccgcctgagaggacttccttacagctgcaatgaaaaggacattgtggacttctttgcaggtaggtgacagtgacgtcgtgtttggacgtttcttcctatcatcattcttccttttgtgcctttgaagtgtttcagtctttgaggcagatccttcggaatgtcagctttcagatatttgttaaactgtgaagaaactgtttctccaagacagtaatcagtcgtgtttggacttttcttcctatcatcattcttccttttgtgcctttgaagtgtttcagtctttgaggcagatccttcggaatgtcagctttcagatatttgttaaactgtgaagaaactgtttctccaagacagtaatcatttacatgacttaaaaccgtctgggctggggatgtagctcagttggtggaatgcttgtttatcattcacaaagccctgtattagatcccagtaccacataaactgtgtggcagttcacacctataatcccagcaccgggggtggggtaggggatatgaggttaaagatttttcaacacatacggcttttatgcggatactgg

SEQ ID NO: 30206 - DNA, 1202 bp, Mus musculus
attttatataatatatgataaatattatatacatatctcacatatactataaaatcagtgcttccgttcaaaacaaagttggccttctgcacgaattttgaggttggggtatcaacgccccctcagcgtcgtcccaaaacgttttagagctaggtaacccattccttccggaaacttcgccgggcctcggtgacccgcagacctcagctctaacctgagcaggagagcctgggacaacttccactctggaggcgctcaggtcaccccacccacacccttaccggcgggaaagccccgccccgagggcggagcctgggcggggccgctcgctcacctccgcctccgagcctcgtctcagccccgggtgcgcgcggcgcatgtgcccggtgccccctcccccgccctggattccacttcccctccgctcgcgccacagcggccacctccaggccccgcgccgcctccggagccgatggccgggacgcgctgggtgctaggcgcgttgctccggggctgcggctgcaactgcagcagctgccggcggaccggcgccgcctgcctgcctttctactccgccgccggcaccttcccgtcgggcgtctctggccgccgccgcctgctgctactcctcggggccgccgcggccgccgcttcgcagacgcggggcctgcagctcgggcctgcggccgccgggaggctggcgggtcccatccctgcccgtccctccgccgccgcggccgccgccgcgtcctactcggccctgcgcgccccgctgtttccgcgatcgctggcagccgccgcgggcccggcgcggggttacagtcaggtacgtggcgccgcgcgcgggaccctcggcggccgcgcgcccgcgtcggtctgtccgcgagcgccccgcgtgcgcgcccggggatccgcggcacgcaccgcacccccgcctccctcccgctccgtcctcctattgggcacgggaacaagggacgctctcacggccccggctcttcttgttttgttccctccgagtctgggcggttgggcagtgtaagtgtggctggggtgaatgtagaggccttgtttcccgccgggcccatggtaggttttgggggcgccgccgacgccccccaccccgactcccccctagccttatgcccgctggaggtgaagctgagcggccagagcccgcggagggtcggggccggccgtgc

SEQ ID NO: 30207 - DNA, 1099 bp, Mus musculus
atgcaaataatgttttgctatttttaggagttcaaccttattgacagacgagagttggcaccactgcaagagctgattgaaaaactcacctcaaaggacagataaaaggatgcaagctgtgcaaactcttcttcagatggagctgtgtacagtgtccttggctttgttatagttcatctttatctacattgtttctgttttaggttttggggcttgcttgggttcccttttctcttctgaatatataaaatcatattctcttgctagaggaagccgagaccgttctctacatttgaaaagggcaaattttgtcatagtggtatacagtatttttttttttctattttatttttatcaatctggttttggttacttgaggaatttttatgatattgatgctggaaacaaatgcgacaaatgcgaactgactgaagtgctgatggactgggtactttgctgtgtaaactgtggtccactttgaagtccttaaaaaagacttatatatatgtttttaagtgccttgataggctcacttctgaggtgcaaagcacagatataggactgaacaaagcttgaaacaatattagaatttctatctagggcacttacttgtgcatgttatgaagttatctgttataaaagccatagtttactcaaattgttgatctccagcttttactatgttgaaaaaaacccataatttgtaaagttgtgcatgtagaacacaaatataaaacaacaaattatttcttaattatttttgacataatttgtaaaggtgtgcatgtagaacataaatgtaaaactacaaaattcttaattatttttgatattgactaatataatctgttcaacagccgtttaaagttctacaagcaggtctttttccatctcttaatatctgtgatattgaaatttaaggatgttgaaatgtaatagatactgcatttcagcttctttctacatgtaagtgcactgtaagtgtaaaacttcaggttatatatagaattgccatcttcagaaaggatgttgaactgtgaggtttcctagcaattgccaaatgagccgtaagtgcagaatccctttgtacttcaaagag

SEQ ID NO: 30208 - DNA, 1319 bp, Mus musculus
tttaataaaaatttggtttgagagtaaaatcccccttggccccccccccccttttttttttttgagacaaggtctttttgtagctctggctgttctggaactcacactgtagatgaggctggccttgaactcacagagatcggcttgcctctgcctcccaagtgctgggattacaggcatgcaaaatgctgttttataaagtaaggatcaaaacttgattttataggagagcttgcttataaatgtctcttaggttcttttcagaactgttaatttataaataagaaaattatccccttttatttctttccttattttttgagactgggtcttactatgtagccctggcttatagagcaggtctcaaactgtaagagatctgcttgcccctctaccccaaatgctgggattaatggtatgccccaccatacctggctaccccattttttatacagttataaaagtacaagctggttttccttatttcataagctcatcccatacaatcgaatgtagtaagttatcattatagttgttattcacattgctttggttaaatgtggacatgatgaagcaagatttaggaattacttcgttgtcagagtggtggtggtgaagagaaactgagtggagtgtttgccattagcagtaggtcgtacagctggccttgttcatttgctgaccttttcttccatgtgccatagaagccatgctattagactgccccagacagaaagcatgtgtgtggtggtggctgtgaagctctgtctaccttaaaatgaaagatttttaaattgtcgcctctttttaactctgttttgcttgtcattgtaaactctaaatggtcaacataaagttcgcagagtatattttaacatgtatttcagaggtactacctggattatcaggatagatgaagcactacaatctcttatcggaaaatggaaatatggatatttatattttgcatatttcatcactagtttccattttatgtaatgggtattttccttgcttatggggaaagaagcaaaacaacagatttcttttatagctttgtctacatcctctctgagagagaatttgataaccactaaaatggtagattatgtaagatgcaaatactaagttgtctgtcacattgccttttaagatgagcatgatatatcttaacacccaaatgagagttgaccttcaaagcagttctctttggaacattgtttatttcagctccgttacaaagtatgtttctggaactttgtcctatgtcataggtgctttgagggttgacttacgaccgtgtaagaagaatcagtttc

SEQ ID NO: 30209 - DNA, 1227 bp, Mus musculus
cagacaaccaggaagcgaaatcactggcctttaagatttgtgttttcccactcatgtctgtgtcatgtgcacatacatacctgctcacaggcactcaaggctgagtttacagttcaccattgttagagattcatacaggtttttgtttgtttgtttgacagtttctttgtcaccagagctgcagttattagtgacataatgtgacaatttcttaatttctccttcataattattcctttatggaatttcttctacttttgcacaaatttgagttttagttttgattttgaaataattgtataagttgtaaaataggttagtgtattttcgtttaagaacactctcctccttaaattgtcctgcagaaatgactatattttagggaaaatagttttttacagctattaaactgtatttgttatttttgtatatgcataaccagggtggtgagatcactaatattttaggaaatacctttgttatatttgatttttttctatacatttaagttattacttaaaattattggtagaaataatgttgtgaagacagcatataaggaatacttaacgtcagaatagaaatcatttctgaagatagaaatcagaaatgctgcaggtgccaggtaatgggagcagcagggcagcattctcactgtgcaactgcttaagacatgcacggagacaagagtccgcagtcacgggggacaggttctctagtaagatagttagatgggcaaaaatatctaaaatatgaaatgcaacgtaggcgccatattgtaagttgtgccaagattatgcaaattagttattgatcaaagttgtttcactgttgttattttaaaggaaacactgaatgtcagaaaatctgtaatatgttttatttgatagatgtaaataatgtatacagtcttatgtggcagaatgggaggtatttacattttaggttttttttctttagaagaaaatgtttataaggaaaaaaaccctaataaatacttttgtttggccatgaatcctgccttcgcattagtttatttttactgtaggtagttttacaatgaaaacatttcaaagaaaagtaaaggtatttagaacaaattgatcatttcaaaatttgttaggcagcactttcagtaattcttacaacactggtagttaccatctatgtaccacacatactaaaattcagaaattgtagaagtcattggctctcagacttgaaggt

SEQ ID NO: 30210 - DNA, 1198 bp, Mus musculus
ttctcacttgtcatcctgagtgggttaacatgttttcattgtgtctttgcttcagaggttgaccaatttcgtcccgggacacttgaccattccgtgtagaggatgtgtgtcttctgtgagttggtatacttaggacaggctgagaagtggggagtccctgggagagggatgctgaagtgtttgcttggtttccttcctggtccctttggtagtgttggagattgaagccagggtctctcgagctggggaacctctacagaactgtccccagcccttttgttctaatcaagtgcctctcctgctctacttagtgttgataagaccatgttagcgtcaccacagtaatgtttactactgtgtccgtgctgtgtttgtagaggaggaggctaaactcttcccagtttggtaatggtataattacttcataaatcttttcatctttaatctgtctgggataagaactctgtatttatgtgaaattttggaccagaagaaatctttaagaggtagctaagaagtttattacatgagtataaagcttcattaagatagctactgcttttctcggactactgcagttaaaatgcttgtttatgtttctttttttaagacagggtctctctacatacccctagctgtcctggaactcaccatgtaggccattctggcctggccttgaactcacagagatccacccacctctgcctccctccccactcccactgctcagataaggtgtgcagcatcacgcctgactcggaggtttttgaaatcacttgaagtgcaagtacagatttttccatttttcttttagtttcctaactaaatttcttttagttttcatgtaaaatgaggatagaacatgccaaggttttccatttttccccatgggccctgagttgataatgagtggtctctctttagctttgtatgaggtgagacactgagaagcctaggcgggctgttcagccccgcccagccccgcctccatcacctggcagacactctcccttttctgtctgaagttagaaggcagtctgctgacttgggatttaagtcacatttctgctgagagtgctgtggtcacactgtgcttcatagtttgcttgctttgtagaatgtttcttaacgtttttgtagttaaatacaaattcctgataaaacattttttcattgcatatattgtatcatgggaatg

SEQ ID NO: 30211 - DNA, 1144 bp, Mus musculus
attgttgagtgtttaccagttgcaaacttgtgtcttagtaagtattcctccatttccttaagatatttgtctcaggatagtacatatcatcaagtatgaagaaagggttttatcttgacattttaggttttgcaaacattggtttagtggcattgtcatgaacctaaagaaaatggtttaatggtggtggggtgtctttcaagactgtctatagagttaatacattatatacattttcttcatatctaatgatattttaggtttaagtcacaaacaacttcaaaaacaccacgtaggggctgagagatgaataacgatcataaaaaaaaaagctaagactttatggacacttaccatgtatcaggccgttttctgagcactttacattacatatcaactctctatcctttcataatcaccatagaagagaagcatgaaaagtcagtgaaataaaacctagaaacaggaaagtacattgcccagaaagtattcagcagggcaagtcaagcacttggctgtagaaatataccaggcagatgcggaagcgagatgataaaccgtcctgttagaactgtgggttaggatgagcaagaagtaaatcccataactcctaaaatgaggaaaggaggaaaaagaaagcttttattaaagagatgcttcagttttgaaggtgtttggagaaagacagcagtcatgacctgtgcacagtatgtggctccttcctgaagctgctgggaaggtagggtaaggtatctagggtgttgagagcctttgcgtggttcttcacttcattggcacagagggtggtcaggaggaaagcatcctggacagttgctgaaatactatggtggcaatgggggaagagatacgggatgctgtgatttccagcgtattcagtgattcagagagatagaatgaggacaggcttgtatttcagtagaagggaagttatggaagcctgagactaaccattgtatactcccactgaatgctgaaagcccgaaagcagaacaggaactcaagttggtcactgatacaaaacaacgcgctgatcttggactatccttagggaaactattgaaacttacattaaaatgtctgtatatgtatcacatgttgtgtgttaatgtgtgtgcaccttatg

SEQ ID NO: 30212 - DNA, 1120 bp, Mus musculus
ttgtattatcctgctagatgttacttccatggcatttgttcatcttgaaactttagattttagagtatttaggcatgaacgaccccaagggttttttgttgttgttattgaagtcatagcagcaaattacatgtcatttgttaccatctcaaatgatacatttttacattgcatttgttctgagggttatcctgaaaatggttgttgtgcattttctggttttctattaaaccgtgtaaggaatcttacctttttagggataaacacatcagtaaaatgttaaaagcatgcattgtaaatgcagtccaatcttgatgttgaatcaaagacacttggtttacttttataaaatctctggatatatataatatatataaataatttttaattatgaatcaagtctatatagggactcatgaccctcctcttacttttcagagagctcctggagttagtcacgtcagtccttgagtagatcctgaagttatctcaccccatgtatggtccctagtctgtgactggggtggatgttagtattcatggactgaacatagagccatacctgacatttgcttgaggagtaggtaacaacgagtgttctcattaccacctgagttcccacactaacaagcagaactccaaatctccatggatgccccgcagtatctgaatctggctgaatttgctcattggccgataactaagcagatttcatggtggtttgtttctatgcaaactggacacaaatacagcaatgaattctttataatgcctttctacccttcctccctggatgtgaatttggagataagtgtttcttgaagcaaagactcagagttgttggccaggagtactgtggtagtgcaaactggctgggagagagatgtgcaggctgagcctgcttgtcgaagcatcaaggcctccagtttgccgagatgctgagatgctggtcctgtcctactgtgtgcagaaactactaatggttttgtatatcagaggcggtattgtttcagcctctcctgataaagccgtggggtggggctgggaagtactcttttgagaagacacaaaccagaccttccttcttgtcccccacctaagagaaagggctgtctgttgt

SEQ ID NO: 30213 - DNA, 1174 bp, Mus musculus
ggactgtaagcagaccttgggggccagtgttcagcatgtgaatgcacagcagcactaggccaactccaacataatctttggaggctctgcattatttgaccagagttgaagtgacagaatttgaagacattaaatcaggttacagaatagatttttattttgatgaaaatccttactttgaaaataaagttctctccaaagaatttcatctgaatgagagtggtgacccgtcttcaaagtccaccgaaatcaaatggaaatctggaaaggatttgacaaaacgctcaagtcaaacgcaaaataaggcaggaagaggcagcacgaagagccagagagcttctttacctggtttaccgaccattctgacacaggtggtgacgagttaggagaggtcatcaaagatgacatctggccaaatcccgtgcagtactatctggttcccgtcatggatgatgaagaaggagaggcagaaaatgatgatgacgacgatgaagaggaggaggggctggaagatattgatgaagaaggagatgaggatgaaggtgaagaagatgacgatgaggatgaaggggaggaaggagaggaggacgaaggcgaggatgattagcacagaagactgacggattccaaccttcttttttattttctttttattttttaattttctccagtccctgggagcaagttgcagtcctttcctccctgtccctctgtgctcagtcgccctgttttgaggtctcaacatcatggttctcaattaatttggggggaaatatcttgagcaaaatacaacaggaaaagaatctccgtttctgttcttaattcattttttatcctttcttgtctaaatttgtggattccacaccaccatgctctgtgggaaaaaaagaaaagctctccagttcccttggctctgctggagggcgctaggcccctgtgtagtagtttatagaattttagcttttcttcttttctctgtatattgggctcagagattacactgtgtctctatgtgaatacagacagttagcatttaccaacatgtatctgtctactttctcttgtttaataaaaagaaaaagaaaaaaaaagaaaaaaagggggggtatagacggtgagcaagggtgggtttgaggtgtctggggtaggtgggcatctgataacatggcttctc

SEQ ID NO: 30214 - DNA, 1411 bp, Mus musculus
tttcagttccccttctacttttaggtcttttttttttttttttttcttttttccatacctggcttttgtctggttaattttgttcactgtcctcctataggatccatactcccggaacaaggtttcattacttatgacttaataatactctgttgggaactatgtgggggttggggaggggggcagaagggagctgcgcgagttggaatcgaagcctcttaaaatggcagatgatttggacttcgagacaggagatgcagggccctcagccaccttcccaatgcagtgctcagcattacgcaagaatggttttgtggtgctcaaaggcgggccatgtaagatcgtcgagatgtctacttcgaagactggcaagcatggccatgccaaggtccatctggttggcactgacatttttactgggaagaaatatgaagatatctgcccgtcgactcataatatggatgtccccaacatcaaaaggaataacttccagctggttggcatccagaatgggtacctatccctgctccagaacagcgaggaggtacgagaggaccttcgtctgcctgaaggagaccttggcaaggagattgagcagaagtatgactgtggagaagagatcctgatcacagtgctgtctgccatgacagaggaggccatggcaaaataacccgcttccagggtggcggtggtggcagcagtgatctatgagcctacagaggcctctcccccagccaggttctgctctggctgggcccttggctagactcctattcaaatttatttgacgtttttattttggctttcctcaccccctcggggagaccctgcccttcacctagctcccttggccaggaatgagggagccatggccttggtgaaactccctgcctcttctctcgcagccctgatgggggagagggagttgggtactgcttgtggtttaggttcccctctccttttttttctttttaattcagtttggaatcagaaagctggattctggcaaatggtcttgtgctctttctcctactcatccctgatctagtcccctgttctccatagtccttcacaggcaagcaccactgtagagtggggaccagcctccttccctgcctgtgtctcttcccaaacccttgtaggggtggtgagaagaagagtggggaggggacacgatccctcctcaggcatctgggaaggccttgcccccacaggctttaccctttcctgtggggtctctccctgacacatttgttaaaaatcaaacctgaataaaactacaagtttaataaaaatgaaaataataataacactctgttatgtacaataccatacttcttttacccattcaccagctgatggacatagactaatgtcactactgtgagttactgcagtgaatgtgaacgtg

SEQ ID NO: 30215 - DNA, 1909 bp, Mus musculus
atccagtgttcagaaattgtagtttttttaagtgatatttttttccagtttgtgagtgtgtacctgtgtttatgtctgtatcacatgcatgttttgtgcctttggagcccagaagagtatcttggaactagaattatagcccgttaaaaggtaccatgtaaccctagggaccaagcctatgtctgctacaagagcatcctgtgctcttagcaattgagccatctctgcaggccccgccttttattcttctgtttgagttctttgacaagaggtctcaagtaacccaagctgtccctactgtacagataaggatgaccttgaactccagagtatttccttttctttattaggactaaatgtgttgccaaatccagctatatgttgacgattgaatgagattatgttgtcttagtccataaatgtttcattgtttgtcctagtattctaagtatctgcctgacttgtatttggtgacacgaatgctctgtttgtaggtatggactggaccctgggcacctcacatgaacagtgtgcacatgaaccagcttggctgatgaggagaagcctggtagcctgcagattcctttcattcagaggaaatcacaagtggccgagaaacatttttatgctcccaaatcattctactgatgtgcttgactgaagtgtgtaggctttttgcagaagaacttactaactgacctattttctgtgaacatttgtgacagccaattctccatcatcatccgtttttaccttagttagaattttttcttatcatttttcttctttctttccctcttctcctttggacataactttctgttgacgctgttctttggctggttggttttagtactgtaaactgcttctgagcaaacacggaaatttagcaaaattatgtaaacttgatcctgaagttttagaatggcaaataaatgtacaattgtttacataacagaaaaggctaagcagaaagtaaatttcagtgtgtcagtctagaggctctactttatgtagacttaaattcatgtgagatatgtaccttcatattcagaaatctggatgtctccttcatacattaaactattaataagcaccacttttctacttgtatattttaagcatagagtaaaatgatgggcattatcaactgatgttccctgcgttagctctgaaacacccatcttattccctgttgggtttgattgtagcaaggcagatagaagaaatttctgatttttccgtgtctttattaaatttgtcacacttttcaaactcatgcacacacatctcttcagtttggactctctctttgccactattgctacttagtaagattctcttgctcaatagtgagaaccttcttgtaaagttttttcccatagtggctgtgacacagatgtggagcatcttcagtggcaccagtggttttttctaaccagaaagcttgagacttttgagcaacttaaaagccaccacagctctcagtcagcatatattgtttatttttaaagatttcagcatattttatattggatgatattgattcttaacattggcccttcctggtcagcaagagtcaacatgcagttttcccttttcaagcatctatgtcttagtttgaaaggctcctctctctgtagttgttggtagaaatgaaaaggatgaacagctaacttgggccaactcaaaaaggagtgtttgggttcctttttaaaatgaatacacggattataaattaaagtctccatttaacttgtttatatgtgattcagggccacactaaactactcagtgggaattatatattccaaccacttgaaacaataaacaataatgtatacaagaagaatatgtgtcctgccctgtctcctatggaaaagtaactcacatgattgaaatataaaac

SEQ ID NO: 30216 - DNA, 1099 bp, Mus musculus
tttataacaaatcttaaaaaacttgaattaaaaataaattagctgggtggcacacacctttaatcccagcacttgggaggcagaggcaggcagatttctgagttcaaagccagcctggtctacagagtgagatctaggacagccagggctacacagagaaaccctggaaaaaccaatcaatcaagaatagaatagaatagaatagaatagaatagaatagaatagaatagaatagaatagaatagaatagaatagaatagaggtgattaagagaccagcaccactaaagtgaaatcttctgggaagtgttttctgagagcacaaagaagttgtgatccagagattgtcaaggtattttcccctgttgcagctgtcttttggtaatgtgtaagagtcacccaggcgctactggttttgaaggcatgaagagatcatgatgagcagctgaggcctggcactgagagagtccatggaaggccactggtgaaggttcagccctaaatgcagtttggcccaggactgaaggggtcatgcaaaagagttgagctttgacactaaaaggagagcctgtgagaggcttttggtgaaacctagttgtagtggaagaccccagccagcttattggagatgccagtaccacaggatgatcatcaagaacagcagcaacagtgggagtggatcagctggaggttatagtgctacagagcacagagatagtgacgccagccctttggaggagcccagaagatcatgtgtggatcccagacactgaaacaagaagctgtgatacttggagaccccaaaatgtttgagatgtcagagccataagatatctcctgagacatgctgctaacaggatgtggaaccagtccaggaaaagagaaagggcctggagatgtgaagaccactttgacatcagacatagagatgcagagtctggagtttgcccagctgttttcctgtcttgatttgggtattacagttaagcgattgggtggatctcagaagagactttttaaattttttattatgctgtggctaggtatggccccccccccatagattcatgtgtttgaataagtctatggggaccagggaa

SEQ ID NO: 30217 - DNA, 1195 bp, Mus musculus
tgtttggtctgcagagtgagtggcccagtggcacaacttgattagattgtctcagaatgccaggaaagtagtgctggatctgtctctggtctgctcagttgtttttacttaagtatttgatgaccacaggttataaatgtagttgtctcattttgtttactcacttattccccgactttatattaacttacattctaaaaaccttttttgttgtcgttgtttttttttgtttttgtttttgtttttttcgagacagggattctctgtatagccctggaactcactgtgtagaccaggctgaccttgaactcagaaatccacctacctctgcctcccaagtgctgggattaaaggcctgcgccaccaccaccttgcttataaaaacctcttaatggacattttcttccattcttgatttgtaaaacctttgggttcatgtctttctcccctttttttgaatttatataaccacatataattgaccacttgagtattttcccataagtgatttattcccaactgtttccaaatattttctcttgctgtcatatcagtctcatcagtgaatgactaactcactattgctgcttttacagaagaacctgaagtcttgacagagcctccaagtgccactaccaccactaccataggaatatctgctacatggactactttggcaggttcccatggtaaaagaaataataccataactacaaccagctcaaagaggaaaaacaggaaaaataaaattactccagaaaatgttcaaattatatttgatgatccactaccaatctcgtacagtcagccagagaaggtgaatggagagtccaagagcagcagcaccagcgagagtggggacagtgacaacatgaggatttccagctgcagtgacgagagcagcaacagcaacagcagcagaaagagtaacaatcatgcgtcggctgtggtcacgaccactatggccagcaagaagcagccgtctgttcttgttacatttccaaaagaggagagaaaatccgtttcgggcaaggcttctataaagttagttccaagttctgcttttactggtgctgtgttaaacaccttgtgagacaagtaaattaccaaatacttttgtatggtaaagaatactaagatgttgtttagattttatgctgagaaaataaataattttcactatgtaatttttcgt

SEQ ID NO: 30218 - DNA, 1194 bp, Mus musculus
tagtaaagaggcagaggataaaggaaggaatgataaaagttcaaaaccaacctagtacagtgatgttccatctcaaaaatttaaacaatgttatttaaaaatagtgaatataatgttttagtagcctttgtactatgtaagtcactgaagctagcatatggaagaggcttctaatttcagcactccagtggtgatgatcgcaatgaaaaagagttcaaggtcatcctgaactaaggcaaatctgagctatgaagtttcagaatcaccaccctaaaagaaaaacaaaccatagtttggctagtcattgatagaagagttgttagtaaaccacatagcatcctagtacttgaggaggcctgaggcaggatattgtacattccaacctagcatggaccacagattttgatgtcctcacataatagagtggtacatatgtatctttgtgcttctcattaacactggaaagtattcagataaactaaactgatctcttttttttttttttaacagactgagagtaatcatgatactgcactaacacttgcctgtgctggtggccatgaggaactggtacaaacactactagagagaggagctagtattgaacatcgagacaagaaaggtagcccttatttttgtcagtttttctttatggaatgtttatagaaactatgtatttatcaacagcttatagccaagtattggtgcttaggtgtattggaaaagagttgttactggttctttgcttaacatatagtaagatgatctttttctttccccaggttttactccactcatcttggctgctacagctggtcatgttggtgttgtagagatattgctggacaatggtgcagacattgaagcccagtcagaaagaaccaaggacacaccactgtccttggcttgttctgggggcaggcaggaggtaacttttctctttagcaaatatgaactcatatatttgttttccatataggaaaatatttgcctgatttattgaaattactgtataggaatacggttaatacaatgttccgagaaaagtcatatattgtataggggaaacaggttaaatacaccagttatactatctttttggagtcacaactttccagttttagatttagaaattgccctgtcatccatgtagtttcctgttcagtgtaaaaggcttgttgagcccgcctgagg

SEQ ID NO: 30219 - DNA, 1153 bp, Mus musculus
agcatatttattctacaaacattgcgcacacacctctgaaatatatgccaataattgatgtcctttacctcagggagagttagttcaagtctacacaagggaaattagtggcccccctaagtagatccaaacaattgtgccccatcatggataggactggctggaatgctttggagagaaagtcagagcaaaaaagagaactggagcctcttctccatggactgcaaatggtcaaagaatggtaggcaactatgctttcttttcccatggccctgatgggcccctatcttccctacacagctgtgtcttcatttataaaatgggggtgacgctttcatagtggctttaccccttcctacctcacagatgtgttgtgaggattaatgaaattgtgtatacagtgttttcagtttctggagaaaaactatttatggacatttcgagtattatatagatatataagtgatctcagtttcttactcactgttatactggtgtgctgtttttacttactctgtaaaactacagttaatgtcacggccacctcagatggctatcagagctctgaaacttccctcccgcacacctgactgatgttgagttagctgttttggggaccacagaggatgtctccctccagctgaaaaggtggtccaggacacaggtctcacaaacctgcatcaggatccaggttagcatgccacacctggatgcctcagcacttccagaagaaggcctctgactttcacaccccgaggtctcggaggagtagattatgatctgatgtcatctgcccttcgtcttgcttgcaagggtgcatggttcgatcctatgcatcttgaaaatgaattttgtgattggtccagatgctaatttgcacgtcgattcaccttcattgcctttaaccttcttttgagggcaaatggatgtaccatttcaactttgatctcagaagcgttagtttgtattgactcattgtcacgttgctctcttggagtaaagttagctgacatcgtttaaagatgggaaggtgtgcaacttctttgatatttgatgacatcatatctacatttgttgtaagacatattgcataccaattataactatgccaattaaagtggttaaaagcttgtgtctagctgtggtgattcac

SEQ ID NO: 30220 - DNA, 1254 bp, Mus musculus
gtgtgttattttgttttttaaatattaagtgtttgcctaatgataagtataagatctgaatatatccatgttaatttgcttgcttgtattatgtatacttttaggagctattttaagttgagtgttctgagctcagattcacattttcattttatgaattcaaagccatcctaataacctttaaaatactcactggagaaaagacattttcacttcaaaaatgcttagacatacgtgtattttcacatctttcatatgactttcaagtgattgttaatcaggcagtgtcacttgtagttacaaggcttaaaacttttcctcttcatttttcagattctctgcaatgactgtaatggacgatccacagtccagttccatatcttaggcatgaaatgtaagctttgtgactcctacaatactgcccaagctggaggccgtagagtgccagtggatcagcagtgagaagcctgtccttggctagagaacagctctgtgatggagatgaagctctgtaaaagatcccagtgttcgttcatctgcatcagagatgtttcataccactgtcacaacagggggtcacagcgtgaacacctgaggattcaagatctctggatggaaatgtaatagagcttactgggtgattgtaatagcgattactgggtgaagcctctgagcgtgtgtagattggaaattcctttagtgtcaagttttgaagccaatgatgttagtcccagatatagtcacattcatcgaaatattttatattttcatggaactttaagtgatactatgcacgcagagttaatttcttgttcttgatagaactacattcaattttaactagtctttgattttaagggctgtactgtgatttttaagttcttattaaaatctaattacgtgtgcttcttaattttcttttcttttctctctctctctctctctctctctctctctctctctctctctctcttttggttcttccagacagggtctctctgtgtagccctggctgacctggagctcactctgtagaccaggctggcctcgaactcagaaatctgcctgcctctgcctctcaagtgctaggattaaaggcatgtgccaccacgcccggctgctttttaattttctaagacagtcctttgaatactataatacaattttatgtaataaattactaatgaaattgtactgaaatactgttttacagactttttttccctctaggttgttaatttttggctcttgtga

SEQ ID NO: 30221 - DNA, 1192 bp, Mus musculus
tctggtacacactaactcctgctggcgtactgtttgccattcaactttcagctcgagcgtctccttccccagggacaccacacaggactgtccttccagtgtggaagttgtgacctcatctaatgccgtggcgttctccccctccccatttgtgagttccacgggggcgtggcgtggctacttgtttttcactttgcgttcttaagtcctgggtgggtgacagcacaatattttctaaagggggcgcagggaaaaaaggagaccgggacagccgccggcactcggacctgcgcgcgcagccgccgagccccgccccctttcggagcagccgcgggaggggccgctcctcaccggcgccggcggctcgcagcagcgcccgccagacgacgcagcggtccccttcgcccgcaatcagggctggcagcgatgccggggcggggaaaaagagccaacctaagacttactaccattagcagtgacgacagcgactaacgtggacgacggactaagcgtctcacttggcttccaccccttacaccagggaccggaaatccggatgctgcagatcacgtgattggacccccccttcctgactctggtggccgctgctccgaggaggagcgggtgtccgaccgactctgcttccttaaggcgtggcttccaagctgggggaaaggttcagtggctggtgagggggaggtggtggaggaggaggaggaggagatggcggcgacggcgcgggaagatggcgtccgcaacctggcgcaggggccgcggggctgcgagcactatgacagagcttgtctcctcaaggtgacgactttagagggtacctcctcgatgagctgcggtcgggtctggcaagggcaggttgggcagaagcttcagaccgagctgcttgtcaggatacctgccatctggagttgggctctccttgcaggaaacgttttggcaaggcgagcaggagctctgtactcgatcgccgctgcaagccaagttcttgtttgtaaagacttggcccttgcttaaattcacctcccttgtgggtttatccgtcatttgcggttgacagtagaatgaggaagtgaaagggccttggcatttctgtcaagtgcgtatgatgcagtgatgaaagcataagcaagggaagaatcagaatataatttctgtacgtgtaggaagtttatagtat

SEQ ID NO: 30222 - DNA, 2851 bp, Mus musculus
aaattaatatctgtctatttttgtgtaacccactcatgtcatttttctgttttaaagccaattatgtttcgaggagaagtacgtttaaatgtggaagagaaaaaaacaagagctgccagagagcgagaaaccagaggtggtggcgatgaccgcagggatatcaggcgcaatgatcggggtcctggtggtccacgtggaattgtgggtggtggaatgatgcgtgatcgtgacggaagagggccacctccacgaggtggcatgacacagaaacttggttctggaagaggaaccgggcaaatggaaggtcgcttcacaggacagcgtcgttgaagtcccactgttggcagttttggcagtggtacctaactcatcgtgtttgcattcttgttaagtttttttggctttggaatgtgacacagcctttttgatcatttctttgatgtgaaaagcatcttttggttatcagttaaattgaggtggacattatttccccaatttcacaacaggattcatattgttaatttataaagctagacttggagaattaaggactgagaaatgaccatatcttaaactgtctacaacaaaatgaactttaaaaaaaaaaaaaaggacatgcccactgagttcaggtcatttgagttaaaacaaaaaaaaaaatcctctgctgcacattttgtttaagtgttaactgtttctgctattaatgttggaaacacaaatagtgcaatttgtgcaattggagaatcttgccttttttcttgtctccctcccaccccccaacacaaacaaacagaagcttgtacgtattcattagaatgcactatcgggtactctgaagtcattaacattgaaatctgcaccaggaggcaacaggggaaaaaaaagtttgatcttcttttccagtagagaatagtttgtgaaatgataagggcattctatctgcttgctgtgaccagcgtgtgcacacaaaccttaacaagactgcaaatactccagaaggaagtcatttagttatgaacgaaataagaaaagtgagaacttcaaaagctgtggtcttaaatactagaccaggtttagtagctctgttttgtcagttttctatttgccctcttgagtacagggatggatggatggctgctcaacacactcctcccctctctcctttaagctgtgtccagtgaaagctgtccttcctgtattctgttctctggtaatgtaataagcatgatggtgccttctattacatcattccagtcttgctggtgatcctgtacggtgtggtctatgaattgctgcactgcaaagccacacagctgcaaaacgttgaagaaaatcattgatgtataaaaattgcagtatctttcaaatcagtaaaatggatgcttattatttatcttgttcttcagttaacatctgtgttctgtgggggagggagggagtcatgtgtgtttgaagggagaagtccattgagtctctaattgacttttctttcagctccagtgtgaactataaaaccataatcactcagttcttggaaaagtcaaacaacgtggtggacattttgtcacattttagaagcagtcagattcccccaaacggcacgtgaacctgagtgcggatactgcaattttcagagggaagaatggcagctcttatgggtgggggacgggaactgtcactcattttgcacaactcttgaactgatgtcagcacccaaatggctcctgaatttaagtctgggaggacatctttttatttttacatgaatctttaaacaattctgtgagcagagtttctagctgctggattgttgtctgtctttatagcaggtcccagtgaaccacaagaatggcgagggttatctggttacagttggatcaatcagtatatatcagatttctggtgtttcaagcaagaagcgggcggagtaaacgcgtgtgaccacttaaagctgcttgttaacatggaagacttctccactctcccttagtgagaacaaatacacacttgacatgggagcaaactggttctgaactttgtgactgtttgctagtgacgcaactattggttttttgtcaactgggcaatatgggtaaaatttccttttttccctaagaatgaggtcttccatgtttgaggaaatgtcttgcactattgcatatattttgtggacacagatttttgtagtttccattttggaaggctaaagtgttttgtttgtttgaaacagttttacactttctaatgtacagtacttgaagttcgtactagagaattcctttgtagttttgaagcttttatccaaactactttgaaataggtggctttcttgtcagtggtttgccccccaggtgtaatttttcttttgttattattcctcctcctattgtgtataggtgtgtatatgtgtgtaaatatttcacacaacaacatctgtacaagcatatatatttcaaatccaagatcttgccctgtaacccatatctactgttctggcgacaaaagacagatgttaagtgtaacagataattggagctacgagccattcagcttcagcctttccagaccacacacgagacattaaccatcccatggagaagtttacatggtgactgttcacctgcagtactgtggactttgaacattttgtcccctttccagtgaaaaactaaaaagtagtcatctgccattactgttatttgctgattttattttattttgatggtaatattctatccttatgacactattgcaaccaaattggctttaccatcttggctttagtaggtatagaagaaagtggattaccatctttattttgtaatgtgttaaataagcattatatgct

SEQ ID NO: 30223 - DNA, 1183 bp, Mus musculus
tatttgagacaaggtctcgttgtgtagctccaggctgatctggaactcggagctcttcccgactgttgggatttatagggtatgtaccactctgcctgcctggcactaatactgatttagggtatgtaccactctgcctggcactgatactgatttagggtatgtaccactctgcctggcagtaatactgatttagggtatgtaccactctgcctggctggcactaatactgatttttctttctagttcatttctttttttttcctcttgagtctagttcatttctttgtactgtttttatatgttgttataggctttagtgtttcctttcttcctgtctttcaggcagaggagatatggaacagaatgactctgacaaccggagaataattcgctatccggacagtcatcagcttttcgttggtaacttgcctcatgatattgatgaaaatgaactgaaagaattctttatgagtaagtggtttagtttgcatttatgttctacttttaagttgaagtttaatggttaccctacattagatcaacatagctgctcattagggctcagtcttcctcttgtggtcctgacctgcctgccctccatgagcaagagaatctggactggttgggggtgtcctgtccaagtggacaacaggactccacggttttcagtacaacaactctaccatctgacaacatgaaggcttccctttaaagaaaatattcttgaatttagtaaaaagccctaaaggaagaaacatcctttttgtcataataaaagccaggattttgaattactttattgtatcttaacctgcttccagtctcactttaattggttagaagggaagaaatgataaagctatcacaattgtcagggactgttgagtgttgtttggtcaggttcaggagatgaggaagaaggttggaatcaacagtcttagatttaaaactccgaggactctactggtaaaatggggtggggaaaatgtttgtcttccaacacttgacaatttttttttctcctgtggagacaagcgtctgctaaggttgttaggggtacagaggtggtggccctctgagcagcagatgtcctatagcaaccatcctgcatagcagctttgctgtgtttattttcagacggatcagaaacatgacagttgctcattctgaacaattaaag

SEQ ID NO: 30224 - DNA, 1377 bp, Mus musculus
cagttaagagcaccagctgatccagtacccacgtgactggttggaaccctagacatgggaatctgaccccctcctatggcctccaagggcagtgtacatgcatggtgcaccgacatacacgtaagcgaagcaccattatgtgcaagatactaaaacccattttttaaaatgtgatggtgcactctaatcctggcactcgaaggaggcaaaaggagaagctcactgactctgaggtctgtgtggtctacagagttgagttccaggccagccaaggatacatagtaaaatcctgtctcaacaacaaaaaccagaaagatgggtatagactggaggtgagtctctggtagagcaatttcactggtatgtgcctggcagtcaggactagggtttcacccatacccaacaccacatgtgtatgaccagagaatacttgctcacaaacgcagaacagtttacccacaggaatgtaactagtttcaactgttagtttggagaaaccgttttatttcatctgaatacctagtgacctaggtgtttcgttgtagtaatggcatagaggagcctttagaagaatcctctcatgaacctgagcctgagccagaatctgaaacaaagactgaagagctgaaaccacaagtggaggagaaacacttggaagagctggaggagaagtcggccactcctcctcctgctgagcctgcttctctgcctcaggaaccgccaaaggtgagatcaaaggaacttttcagatctgggacctcacattttcatgcttggtgccattaataaagcatggttttggttctgttatttgaaatagtaagctatacttatatgtatatgaaagaaacttgagttcttgttctgaggagattttatggtttctctctacccccaaaatattcctaagagtgaaatttataacctagattcctcttgtctgtatgcagtgttgaatgacttacatgaaagtccatgtgtgaggttttcagttgctcatctcttctgatgctctaggagtcatgcagtgtccctactgaagttgatctgtgagagacacctgtttgcgatataaatgggatcagtttccttactctactaattctcttgaacagatgtgtggcacccatagtatagcatgtgaactctctctctgtcaagtagacggttagtagatctgggcaggagaagcgagtagtgcaggagtccttgctcactttggtaacgtctgctgagtctccaaccgcactctggtcttcctgtgcttctccctaacaccatcactcacatcctgtctccccatggggagagcagtcagtctctgcttcagattttatagcatgtttagttgacagtggtttgccacttgcttatgta

SEQ ID NO: 30225 - DNA, 1180 bp, Mus musculus
aaactgcattttaatgctccgataacgcagcaaccaggaccattactaaatttgctccctcttatcacgaataaaggctccaggaataaccgtttgtaaaagccactggttagcggcgagccatcttttttgttcgcgccacctgagaggacagggaggcttcagcatcactgcaagagaaaggcagcttccttgtgacgtcaaatcagcgggctctcgccccgactttaggccggttccggttccctggctttccggacgcccgagcgagcgagcgagcgagcgcggcgccgttctgcgcgtgctccgcagtgggacgcgagaaggttgggtctagctctccaaactgatgcctgattggctggcgctgtgctggggggttccctagccctttccgcaggggtaaaacaataagagggggcggcggcaaagggggcgggacgtccgtgttcttggagctcgttgcagctctaggctctcgggaagaggtggctgtgaggggccccgagctcgcggctctccggattccgaagcctcgggttgcttcgagggaggagaatctgctgcggccgatcccgcgacactactgacctccgcgcgacgtgcccgccgccgctgttggttggaggtgtgtacgggggccgagaggggcggtcggtgtggtggtcggcaggggacatttccctccgctccgcggctcgcggcaaccgtccggtgtgtgcgcttggtgtcggggttggtgcggcggaaacattgttctcgccggctgcctacgccagcaagagtgcgtgcgtgcgtgcagagccgagcctttcctgcaaggtgagcggaaggctgcgtggggaggaggatgacctgcgcgcgtggtgcagaggagggcacaggtggggctggggattgctaggatgaagcagcccgggggtaccctgtccgccgccagctcccagagcgcgccaacgggcgccaagccgcgaagcggggcagtgggctcctgcagaggcggtttcagggtaggaagcccacccgcctggttcctccgctcgccggcggccctagttcccggtcgtcgccccgcccgtgggggaggggaaggaggccgtgtcggcggaggcagaagcaacgcagatgcgaaagtagcggcctccgggcaccatttctgtgcccggaaactgaatccggg

SEQ ID NO: 30226 - DNA, 1184 bp, Mus musculus
agaatgcagagccattctgaagacgatacaatttaactttgcagcactgtaagaacctaggtcgtgctttcccctcggccgttctcctgtataggaggcagccatggcgcccagccggaatggcatgatactgaagccccacttccacaaggattggcagcagcgagtggacacttggttcaaccagccggcgcgcaagatccgcaggcgcaaggcccggcaggcgaaagcgcgtcgcatcgcccctcgccccgcgtccggccccatcaggcccatcgtgaggtgccctacagtgagataccacaccaaggtccgggctggcaggggcttcagcctggaggagctcagggtggctggcatccacaagaaagtggctcgcaccatcggcatctctgtggacccgaggaggcgaaacaagtccacggagtcactgcaggccaacgtgcagcgcctgaaggagtaccgctccaagctcatcctgttccccaggaagccttctgctccgaagaagggagacagttctgctgaagaacttaagctggccacccagctgacaggacctgtgatgcccatccggaatgtgtacaaaaaggaaaaggccagagttatcacagaagaagaaaagaactttaaggcttttgccagtctccgaatggcccgtgccaatgcccgactctttggcatccgagcaaaaagggcgaaggaagctgcagagcaagatgttgaaaagaaaaaataattctgtgttggagagttgcaataaattttccataaagcaaaaaaaaaaaaaaaaaaaaaaaaaagaacctaggtcgtggatgattatatagtagatgctcaaagccttggctagtcaagcacgtaggccaaatcaaatatggacaattaaagcacctaatagtacaccatgcactccactgaggctctataaatccatgtcaactagtggcccgtgagccctgctggacttcccgacagactcagaactaactttgatcatacagtaactcagtgacctcggtcctcaaaagacagactactgattcagttctcagagccagtgaagtaaaagggcatccctctcgtctctctttacatgttcaccacggtgacactgggcatcagtataaagtcatgatgtaaaactatgatactgatccatgcacactgaaccaagcatccca

SEQ ID NO: 30227 - DNA, 1537 bp, Mus musculus
acctggagcatagagaacagctgttgtcactgctcctaggtattaagcgtcactgtccagggtgagttgggtggtcatgtttttaccaccatgtattcagactcctgggtagaaaggtgtgagcatttaccgtgaccgttaactgattagcataacccacagaaatgcagagagccacagggagccccgagcgctatgaagtcaaggaaatctgatttcaccataggacagactgataatatttattagcaggcgttttacatgtatatgtttcccagtgtgttattctgtgtgtgtgaacaaatctgtattctccccttaggttgaagaagaagatgaatctggagaccaagaagacgatgatgatgaaattgatgatggtgacaaggaccaggacatctagctttaaaccctaggaatgatagagattacgtcattatgtggaagaagtcttaacagtgctttggtttgcctccacacaaaaaataaagacagaaccaggtggaaacattgactagtaaaactattgatatatgttttttaatattgccacccatgtggaaaactgacttcatgtggaacttttatttatgttcatctgaactctcccaaaataaaatttgcacagggcaccaagctccaaaagtaccccctttgaaggcatgtggtggcaatgcagtttgccatgttggttcactgatggctttcagacactctgtgacttcagtactcacacatttgattaatgtgtattcaatgggagtcatcatttctaagtcagcgtttgagttctcggctgattaatccttgtaaagaaaggactgtacttagggtagcctggggctcctgtatgtcatcccctcaaacccccactgtgcctcccgagatcaggatgggacagttccgagtgagtgcttgccgtccagcggggccacattctgcctactgagaggaaagattgtcccagagtgtggagggcgttctgaggaactggaacagtgtactaatgtggctggttttctctctgtttaagctaaagatggaaaacagattatagtcagcagttcatatagctgggatttagaattgtttgattatcataaaacatgttcttagttttaaaaaatcccacactatgatttatgtaatttattggcatttttgctgaataggtgtaagtcagataatagatttttaaaaagcaaatgaagcaatgtgtcaaagtctaatgttttcataataaaaatagatattatgttcacttaatctctgtcattgttccctttgtttagattttaacaaagtattctgttcactgtaagaagtaaggcaaatggaaatgctaaggaggcttcttgtagtcggtgttctactgcccagaagagcactcatgaccaaggcagctcttcagaaacaaaacgttaaatggagaaattggttactttttcaggggtggagtccatgatcacggtgggagcaagggtagcacgtgtggcactggaggagtggaggagagcgacatcctgattggcaggca

SEQ ID NO: 30228 - DNA, 2631 bp, Mus musculus
atttggtattcttaattgggaggtggggctggtgggaatgtgaaatgtaaatagtagcaatgttaagaagtgctgagtacctactgattgctgctgcctatgtagctgaatgagccagagcccttgactgagggcagatgtacatacggtgtttatagtaagctgtacatagttccctggtggcagctagtccgtcttcctggggtcactgggctcctggactaactgtgcggggatgggagttattcatgctctgcaatcaggacagtgttacaagagtaagaggttcttacttgtaaataggcttgcctgctcaaacaggctcctgctgtacagattcaggtagacagttgagctccactcttttatttttttagtataaagagtttttgctaagctctcattttttttaattgccttaagtctaaatagtgattttgaaatgcctagcagggtgtggtggcacacacccataatcccagcacttgggaagtcaaggcaggaggctcgtgagtttagaaccaacttgacatcctgagttagttcagggcagcctgagctacgtaattgagaagcaaagctatctttgagctatcgttgggtggctggttctctgctgcctgttgctgttggggtttgttttcctttctttcctgtgcgggaggcgagccctgggccctcttgctcaccctgagcaggttctccctgggcttcaccccacccctgagtgcctactcttcacatggtttgatcagttcccgtgccttgttctcaaccaaagctacaggtggttagtagtcagatgggtgtgtaccgcggtgtgtgctgctgttgccacacgtgaatgcattgcaggacccagtctgcatgcaggctgctggctttagaagcagtttgatgccttttgcctcagacttcctaggtgctattgtcatgagaacaggtttgatgttcacgttagaggaagggcagtctctgcccctgggctggagagcaactgctgctggttgccttcctctccatcgatggctctgttcagcttctgaggtcgacttgggtttatttgtcccttgctttccccaacggtgcccaggtcactgtaggggactgcccgtcagcctcacccagcactgctgtggaggaagtttctggtgcctatctgtgtgtgtgagacctgaagccgtcccttggccttcttcctgtgttcctcacgggtgtgtgctcaggaaccagctctgagcagccggagctctgaaagcagctggagctcccagcccctgggacttcaggcacacagtaccaaggccagttctaggctgctgggtcatacccagggattggcatagaaatccagaatgccagcatgccacatgcatggcattagcaaagttcacaggacgctctcgcctgttccctgcagcatctctggtgctagctaagggtctcctatgatgtagagggcacagcagctgtttgaacatgaggattaaccccagcctgccacggtttccatctgtaaatgttagaccacctacctctcttttagtaaattgtgttttgggagggtttttgttgttgttgttttccttatagttgctatgtttattttaaccatccaacccaatgtttaggcagctagtgtaaagcccatattgaatatccattgtgtataaagcactgctagatgtttgtgtcatgttgaaacttattcccaatgcgtgtggtaggcaggaccgcactgtagaaaacagttcctaagtccggtggctactggaatagtttttaaatgttacagttaatgcaaattttgttttttgaaaatgtataatgtatatagagtattacattgaaatttcagtttaaaatgtataatgtttgtagagtattacgttgaaatttcagtttaaaacgtttaattgttctgagtgtcctgtttaagctcttctaggtgacatatttttaaactctctctagatgatgttttctcccaaatagtaccctctcgttccttacatggtttggagtgtatttctcgagatttagggaggctttaccaggtatggggacacacacctgtaaccccagcacttgggagaatgaggcaggcagtggggtgctctgggttgagaccacatagcaagagagcaaaaccctgtctgggggcttgggggtggggtgaggatatgaaatgggggaagagtagagagagcttgaccaaaagaagaaagcttgcagcagctggaactctgggtcaggtcagagctccgggattaagcctttcctgtcgtctctgcttctcacccatgtgaagatacaaaggaaagcggagagcacagcagcttcagccacagtcaacagcacaactcctcttcctataaggctgtctgtgtcattttctcctgcagattctgcttgtgtgttttgaccatctcatctcagtgtataagtagctaaagtttgaaaaggatttgtagcataattcagtgtacatgtaggtaattataaaaaaatccagaaaatgtgccaaatattagggggtgggagttggtgctgggatcatgtgtaaggtgtattttctttctactttctgagtctttcacggtgtatatgtttttacttaatgtcattgtg

SEQ ID NO: 30229 - DNA, 1144 bp, Mus musculus
ttgttgggtttacctggcttcagggtgtgtcttgtaggggtgcacagagctggctcgctgtgcacgtttcagttcctaagtcctgtattgggagtagcttgcaatttaacagaacagtacactgttttatttttcttaattcattctagcatttgaaacaacaacaggaaggccttagccacttgattagcatcataaaagatgacctagaagacataaaactggtagaacatggattgaatgagaccatccatagcagaggcggtgtctttagctgaccgtttacagacttgttgcagagattgataaaatgcgtctccttgctacatcgagccttcttcacgatgaccacatggccggggaaaaggatgcttctcctcactgggatgtctgcgatcctcagaggttactgtacgttaaatctgaaatggtcaccacaaagcccttcaaagagaatctttgaaaagtttatatctaaaagctgtatttacttttaaagaagtgttacccaaagcatacactgttgttcattttataacagcgttaagcgtagtcacggagcctgatggttattctccgttctcctctccatagcacagagcgccacagagctacttcctacatgacacaacaaactgggattccatgcctgttggaggctgtgcttcagggtataaatgcatttcagcttttatatctgtgaaatcagctgtggagagtaaagaaaatcccaaagtatttaatgatttgtgtggttttccttttgttctagaaagacttgaaaatatatttttatattattttacttatttagaacttacagaaaatacctaaccggttaggatatgacaaaatcaccacttttgcaagctgttttgttttgttttgtttttttatttctaaaaatgaaatccttaaaataaattgttaatttgtaattttatgtaattctgtctggtgttttatttaaagacttgtcagtgctgacatattttgactaggggttaagaaatggaagttgtcgtctagagtgaagacttcccccatttcttagcatctgaaaacactggccaagtcctacagcatcatgagattctcccacagtgccagttttacatacaacttctgactgcaaaatgtacct

SEQ ID NO: 30230 - DNA, 1206 bp, Mus musculus
tgtaatagctagtctaaaagtggatatatatcattttagacttaggacagtctaattttttttcaatcacgttacccatttagttaacgggatttgtattgtgttgtattatttctgtctaaagcacttggtcatttatttcttgcaatgcattgaccttctgattagtaagtaattaggatttttttaacctatgttgaaaaaagaaaagaaaaatttagatcaatatgtcctttatatttagcaactacttacaaaacaatttgaaatgaaaacgcaatccccgctgtgtgcacaaaaggacccttacgttttatccgtttttaattaggtgggtttggaggatttggaacaacaactacaactgcaggctctgccttcagcttttcagccccaacaaacacaggcagtacaggtaagaggttatcctaagtcctaagacataaatgtggcacaggttgatgtttttagcttactcaattctgatttctcattgaaaggccttctcggtggcactcagaacaaaggttttggctttggtactggttttggcacaacgacgggaactggcactggtttaggcactggcttgggaaccggacttggatttggaggatttaatacccagcagcagcagcagcagcagcagacttgtaagtgggattttaccttcagctataaaattgtggcagtaacagcaatgttgcttcggatacagattgccttagttttaaggactgtaactgtatcccaaagagttccgaaagcataatatttattccagaaagttattccaagatgcataatatttatgcattcttggaattaggaaaaagactgactggtatgattgggactgtaagggccctacgtttgaagtcagtccatgaaagctgtagtgatttctgtgtcggggtatagtttactagattatacatacgggctcacccttgtcatgttgaggcagaacctgagcacactccatatcttcccttatagcactgatccatgggacgagctgtgtcccggctttcacagcctcttcccttcctttgtagttctgctgtttacaagtgtgaacatcatgagtgtgaacgtcacgagtgtgaactgaacagatcattttgccattcttagatctctgcaggctccttttatatcattaattcacagatgaagtcagatctttgtctttcaggttttcta

SEQ ID NO: 30231 - DNA, 1165 bp, Mus musculus
cggtgcaggtcaggtttgttcacgctgtgaaacctcttgctgattcttgtaattcttacctttctttcttctccttttctctttccctcctctcaccttttcaaatttttgtttctcttgcctccacgactatcaggatttggtgggcttgagactgccaactccaccgccggtgggtttaattttgggggtttcggattaaccgctaaccctgcagtgaactttaatattgggaatttcggtgtttctactacctcggcgactccgttcaattttggtaacagtctggcgagtgcaggtagatactggggtcatgtgtgtaacgagtatgggggctggagtccaagaatgttccgatgtccctagagtttgggggaagaaatggcacttgtctaataaagaaaggggtttatttcctaagatcaaatcaaatatatttaaagttttggctgctttaaaagatgtgggttttggaaagccttaaagaattagaatgcaccttggttggattttcatttaatgatacagagcacagcttccaaatgataagttgggaaccgaatattttttaaaacattagctttagcagaaggtaagcgtttccctgggattcttggactcctgcagtcatttttcattttttaatacatatttcattgggatttcatcttattgtccttgtgtttccaagagaaacaagtcttatacgaacagcagcgacctgtcttgtttttcaaactgtaacgatgtttttctagcattaactcaatatattaggatgtatttctatatataattgtagaaagaatcccggattctttgctgggtttttgggaaattttccatgagtagttttaatttaccaattaacactgagttctaaaaagtaggctcggcatcttttactttcaaaaagaggatgatgaaggtttttggttttttggtttttttaatctgtggcttgtttgaagatcactgaaatttttcagaacacaaattaatggatgtgtacgacccaatttaagttaggcttatgtgagctcgacatccgtatgactcttagaaaactctccatcctcagctgctcgtatatgaatgtactgtccatagtttatgttccgtcaagccactgctgcccgtgccaattatatgcatttggtaagcc

SEQ ID NO: 30232 - DNA, 3697 bp, Mus musculus
ctgtcctggaactcactctgtagaccaggctggcctcaaactcagaaatccacctgcctctgcctcccaagtgctgggattaaaggcatgcgccaccacgcccggcccgggttagagtcttaaagagcaatgacagccaagaggaagagaaaagtgggggaactgcctccccatcagcttctcttttcacctctgccacctcgcctcaacccttcacatcaggacagaagttcctgacatgaacgtttaacctctctgtgtcttctctgtctgtctcagggaactgcagatgaaagagcacccctcatacgaacctaatgggacttacctgttgcctgagcttggtgagagaatgtgagagctgccctgacctggaccaggacagggggaaccctgcatcctcatgggctcctggcctgtcaagaaggaaacatagcactggcaagcgagaagcccctcctggtcagagggaaatgagcagggtgacatggctggcaattctgctttataaaatcgtgtctctaaaactgtgttcatgtgtctaggaagtatttaataaacttgtgtagaaactttttgtggttgggccctgggagctgaggggacttcgtgaccccctgttgtagatacaatgtctgaatcgcttgttaatgttccgtggcctgacccgattcagtgtgcttcattctccaaactttgtgttcagagtacgtatgtgtttctgttgttgttccctgttcacctccttacacagaaagatgtggtacccagggtagaatcacagctccatacagtgtaccaagcaaatggggctgctttccttctgtaaaacattacattttgtgtctcgctctaatcttcaggaaaataactcaagtcttttgattggtttatagtgtgttaggaatcaagtaggggaagggatggggtggggtggggtggtgtctgtaagtagacagcattgagctcctgaggatttttagttgtgcttttgtgaagcaagaggttgcactgggaatgttggtgagggtaaggcagatatttcatttagaatagagttcaatgttagttatggcatctagaggctaactgtcaattttagtcagagatgtctgggtgtagaatatgctgctgagaggacagaatcaatgacttctaaccccctcccttcaggcttctctgccacataggacagtgacacggaatgacagtgtctgcaaatattgaggggttatttgtaaaatgacgaatgatggaagtccatctgcccgtagcttacattacagatagatccaggaagtgtgcacaggttagagaggcatttcttctggacccagccggtgcttcgtggctccctgtcactaagtgctctctgcttcctgtgacaatcacttttctgacagagcgagaaatgttagactgctagtcagaggcacttcagataaggagtcgagcagccaggctgcttctctttggaaggcaatggcttccgtgtaggactaaggacattagtgtcacagccgtcagacctcagctatcctggagggcagagtccatgattctcagagtccactattttggggttgtttgtttgttttagtttttatttttttattttttatcttttggtggcttagtttttaagacagggtttctctgtgtagccctggctgtcatggaactcgctctatagaccagactggcctcgaattcacagagatctgacagcctctgcctcctaagtgctgggattaaaggcttacaccattgattttttttttttcaatgaaccctatacattatctggctagctgtttatagaattccctgaaaactgaatttcagtatatttaaatttttttaaaaactgagatgtcacatacatattagaagtaaaacattgctttaatatacaggcccaaattttcctctattgacacaaagcaatacacaatgtttcccttttttaaaaaaattttggtagtttttgagaccgggttggtgtagtcttggctgttctggaagtcactatgtaaactaggctggccttgaactcagagatcgcctgccttgtgtcatgagtgctgggatccataagccaccatgcttggctgatgtttcccttctagagagacagctctttaaattttcacctttcctactaatcaaagtaaaaaaattagacaccccaaatcaccaatatgtgaaactaaactgaaaatatctgacctttagtaatgacaaatatttttagactttgtcaatatttaactcggtagttggcacatcttagtcttcatgcttcatgacagggtctcactctgtagctcaggctatcttgaaactcactatgtagcataggttgaccttgaatttatagtgagccggtctcagcctcccaagtgctgctattacaggcacgcactacacctgtctgtgtttatgcaactacttatccacactaataaattgataagctagtgcatactaattggttcattcctattttcaggatataatcatctctaaggagatttttaaacacagaaactatagcatttagtgatgtacatagtagatagacatgatcgcacatagaaaaggagaccaaaaacagattgatcctttattagtgccatggttgtgaatagcagtggttcatttggtgttttctttctaaaaggtccatggcaaacccacaaggcacagtcagaattgtaggttgattaacaacaaatctacccattcagtgcggggctgaaaatagcaagctgttccctgtgttcgttcttctgagggcattctcctggacgggccccaaaggctgtggccatcatccttctcatgacacagagtggcagggcactgggagtgcacagggtgggggatgggcaggggataggcatttccacataggctctaggctctgcccagtagatttcacttccttgtgctttacaaagatcactaacggtcaaatgggacaagcactacacaactaacccctattggggtttttgcttaagggggataacttttaacttgttgtttgcggtgtgaattcttcaaaaggccctctgagcattgttactggtgtaaattgcttgtgcctgcctggctttaaaaagactgaccagaatgctcttcatgtggcttacagagttggttcgttgttgtgcttcttgacctggttttatttctacccataatacaatgaaatgtttcactaattaaagaaagtttctataaagtttcactgtgaactgtctctcattggatggcatttcagttgagacattttcctcctcagtgttttctttggaggcttggaagcctttgatggtggaaggagcattagtaacaaacaccgaagcaagcctaaactaaggggacagctgttgtctgattagctgctcagcctcggggttaggaggctccttggtctagaactgctctctagctggacttaggaggccctctccatctcctccctttcttcccctcctctctctctctctctgcctctttccccagctgggaactgctttccacaagccctttcctcatctccttatctttccagtcagcccctcagtgttttttttcccaagtcctatcatatcccttcactgccatccttaccttgggctgcctctaaccacatcaaccgaaatgctcacagcccaccaagaagaag

SEQ ID NO: 30233 - DNA, 1197 bp, Mus musculus
caagactttttcttgcaacttgaccttattcccctagttattcccattcaacgttacaaattagtgcttgctgtgtctccaaaacaccaagctggggctatgctgctatgactcagtagtagaatgcttcatcgcccgtggtaaatgtcctatgtttaatccttcggatcaggaaggaggagagagatcatgactgtttagagctacaactacaacagtaaacaagacagagtgtctgccaaaagccaagaagacttagactcttcatctaaggtttttgattaaaacaaaacaaaacaacacccccctcccccaaacgttagaaatcaccttatttgttattctactttcaggaaacagactcaggatgctaagtggcttatggaaaggccaggggagcagtaggcttgcgagcttggtcacctgatactgaacctgttttcccaccttatggctgatgccatctcagttcccaggattgccttgccctgcccgattgtatgtgtgtgtgcttgctagtataagggtgagcagcctctccatccagaagactgttggtgtggataatgaatactgtggccacctctcacctgaccccgtgccacatggtctccccataattctattgtctttaatgtcttagcatgggagggggcccagtctttaaggagcacagacccccttcatgcaagaggacttcttttcttttcttttcttttcttttcttttcttttcttttctttcttttctccttccttccttccttccttccttccttccttccttccttccttccttccttccttcctttaaagctggaaggggaagctcttgagttagaaatggccctctcaggcctcttgagagtataatacaaactggatagtcagcaggaacccagcttccttcgcttacacatctaaccctggctgtttactgccctggggcttccccaccactgtgtggctccagctgttgtcctcaggaaatgctggcttcttagtttctcctttgcaagttgataaaccgtggtgtggttggctctccacccaggtaggactcgagagttataaacaggcctgtgagtaagttccttaaaggattcttgactcctcagcagccttttcttcagtctattcaaaacatgatcttgtcacatgacactcctatatgcttccttcaaccttgtcagtctga

SEQ ID NO: 30234 - DNA, 2128 bp, Mus musculus
gtgctcttaaccactgggtcatgtctccagccctgacttctgacagtcttaagtagtaaacacttactaaggaggatagccagcacatgggatgctgatttaggaagctcgcacattcaaggcctgcctgagctacatcttaaggccccatctcaaaaaaggggcttctaggtttaatcagatccttgaagtgttgataaaatacatcattaactgaagggattcgaacctgctgacggataactaggctctcctggagaagcaactcctgctgcctgcttggtgtaactgagcaacaaagatcaggcatgttacaatgaggatttgatttggaggaacacaaaatatcatactatgaagtggttttgttaggaagacttggaagcaggatttaaaaagcatattcttgtgcacagtttgtttaattttcgtatattgtgacttcatgttgttaaaatcttaagatacatggtctcctttggtgtttcagtacagattttagtatataatgttcaaacaccaagagaaaaaaagcaaagaaaataatgcagaaaggttaaggatagagctcagttgggggagtgcctgcttagcattcttagttctgagtggacccccagaacatagctaacatggtgtgctagagcacacctaacacggtagcacatgcttgacatgccagtgactgggcagtaggagcagggtcatgagaggttcacggttgtccttggctacatgaggagtttaagaccgcctgaggtacctgagactgccttaaaaacaagatgtttttgataagcctgaacaaaacttttctacctagaatgtggaaattcagagaaaagctgttacaaagaataatttttttcaggttaacaagtatttcatattggtgaaaacagacattctatatctaggaaaattttagatgtagcctttttaaaagctgacaaaagtgttttactataatgctgtcttctattcttttctttccgtttaggagcctccagaattcccctttacgaatctggaccagtagaagctgtcactattgactctgtagatttggctttacttttaactttcgctttttgacaacaacaacaacaaaagcatagcactatctttctaagttcatcctgtgttgacagtagttggtgctggattgcctagtccatagtgaagatggagcagcactgtctggagctgtccactgtgctagcagagcgtataacggcttcagagttctgtgcagcttcaagctgaagcacagaatcagagcgaaagaaagcacactcataaaaacaaaaaataaagcatagctgtaatatgatttgatgtgattggccgatactcctaaaatcagtgaaatttgaatagaaatcttgtactaatttgtactgatccaacccaaaaagtctgttcatggatggtgaaaagggaaaaccaggcaagaaaggaggaggaagcttgtctgtctgtctgtctctcccgtgtccgtgcttctgcacattctgaaggcttttcttggcagttttgtcttacagctgtttgtatcagctcggctgcgactccactggttttccctttcactgtccatccgtgtgtgcgagcgatggattaatgcacacaccgtgcatacaggcgtgtgtgctctaaaaagtgaaaggtaaaagcagagcttagcagccgagtcagtactgacagctacagagccaggtccctgcctgccagccggggggtggggaggggggtgctttgccggaggacgggaggggaggacaggcgacgggcaggtgggtgccagaaagtgtgccctccccttcccctccccctctccctcctatctctctagttttggcctcctgttattgtcaagtttgatattgtgaaagagccaccccaattttgatttttctttttgcagtaaagacagagctattttgaaagaacatatacaaataaccctttgctcaaggagcgaaggtttgcacccagctaggagagtggtgattcagactaaagacttttgttcaacttagggcccaacgtagaggacgtatagaatccagtctaatctttttttgatacttttcttataagtcatgaaaaacttaaataataagaa

SEQ ID NO: 30235 - DNA, 1169 bp, Mus musculus
cgcctgttccctgctgttccttgccctacatgctattaaatgcttaacaggttactcttaccttcctcgtttttaaggttggactagtaattacagtgttatactgatgattcaagaccgtcactatggcacacacggtgacaactgtggtgaactacaggtttaaccacaagcaattgttgttgcttttgtagtggaccaaagtcagaggtcacatgctgcgatctccttctgtgatggggcaacccccaccatcaccacacccactggaggcttaacccagaacctcacacatgctaagcaagctctcaacgtaagggagctatggccaacagagccagactagcaggccatggctgttgacttgagaggatttgagcccccttcaaccccaccccacccctgggaatattgttgtttgaggaatggcattcccactagaaggctgctggggagagacagatatcagccataaccactggtcattctgcaccctggagttggagatgaggacttggtcagcaagcgggaagctgtaaaattggacacattcaagattaatcagaacctggatgctcttgagctctgacagaccagggttaagaagggggtactactcagacgtggcccttgaggaggccataagatagggaaaggaaaacaagaccatttttggtttgttttgacagggcttcttggtgtaggcctggctgtcctggaacttgctttgttgaccaggctggccttgaactcatagagagatctgcctgcctctgaatgctgagtttaaaggcttgtgccaccacacccagctcaacttcgcctttctaaaaggaaaggtaggagtaggttgtgtgtgtgtgtgtgtgtgtgtgtgtgtgtgtgtgtgtgtgcgcgcgcgcgcgcgcatatgtgtttgctgggaatccaactccacctttctcactctggctgaacaagtattgtatcactaggctatccccccaccccagaaggctggtttttgttttttgtttttgttttttccaaagtaagactatctctataatgcaaaacctaccagaagttctctttttctgataagatttttatcagacttatctggttgccccaaccagagctctgattgtaacctacttgcatcccactccttgcatttcacagtaaga

SEQ ID NO: 30236 - DNA, 1146 bp, Mus musculus
ttttggttgacttatgtaatttttgaattgcatcattgatggcatatgtgctaaggttgtaaaggaggggctgggctcatggttgagagcactgactgatcttgcagagaacccaggtttgattcccagcacccacactgtgtcttacaaccatctctaaccccagtcctagggggatccaactgacaccctctctggcttccgaaggctttgcacacatggtacacagacatacatccaggcatcaccccttctcctaaccagcacactcaggatggtaaaggagtctgtgatgggtctgacccagcacccacactaaaccgaggcatgtgctgacatcagaggcagaaagagtagcagaaagggtgacactcagacgcttttgctgcggtcaccacacaagcacacaccacactggctccgcagagggaagcgagggctaccgaagcttagattcagggttggaaaagaaaacagacatctagatttgaagtgaaatttttcccttttgaaaattttggcaacattaaacccacgtgcttggaaagaattgtgtgggacacgtaaacacatttgtaatctgactccggtaatttgaaatctgatttccattggaagaaattaatttgttttccttatatttcagtaaagagaccatcataaattggcacacctatgcatctgtttatatagacaaggtctcgggtagcccaggctcattttgagctcactgtagtgaagggtggagaactgctgatgcttcccgtgctcccacacgtgctagggcttcctgtgccaccatacctgctcttatgctggagacgtagcccagggctccttccatgctaggcaggcatcagaccaactgagttacatgtcagctctgagatgccttaaaatacgggcattgttgacatacatcattaaacccagaactcgggaggcagaggcaagtggatctctgtaagtttgaggccagcctggtctacagagtgagttccaggacagccagggcaacatgaagaaaccctttctccaaaccaaaccaaaccaaaccaaactaacaatgacaacaacaacaacaaccagaatcaaacaagaacaaaaagaatacaatagaatttgaagaactaaagcatactttgt

SEQ ID NO: 30237 - DNA, 1199 bp, Mus musculus
agccctcagcacctgtctcatagcaaagcattagatagctgggaagaacttgtttctctctcatatctgggaaagttgtttttccaaggaaatgctattgcagcagaaatctgctcattgggaagaatggtggtatttaagcactgccttgctgggctggcacagcctggagtggtagccctggggctgaccttggagccagatgttattacccagatgttgggccatcagctgcatcccaaacccggactctgcctctgcaggagaagactcaccatttggcaggcagaatgattgaaagctaaaggaaagattgtgaagcccctccctccgcagcatcaattccgccaccctcgcctgggcttccttgagcatggagggagaagctagcaagacatcctctatgctttctggaccttagatcttaagaggggtggcgacaccccctctggagcgtcaccctgcctctcagtgaagtcactactgatggccttcctctcctttgctcatttttcttgtagttgagaacgaaaaccactgtgattttgtgaagctgcgggagatgctgatccgagtgaacatggaggacctgcgagagcagacgcacactcgccactacgagttgtatcggcgctgcaagcttgaggagatgggcttcaaggacacggaccccgacagcaagcccttcaggtatgagctacacagcagacaggtgtgtctgcaccatggaaagggttgctggagagcaactatgtatctatgaggctttgttacctcagtagcttggcgtgaggtgaggtggggttaatcagcgggtgttaggaaaaccactttgttgccgggcaataaccactttgcattatcatcttagctaggtgatgctgtggatattggcattgctgcccgtgtttacaagtattagcattcaaagcgccgaaagtgtaagcaacctcctaaagtcctagtagttagggaaaggaggctgttctgaatccttgcttttttggttcctgagccctagctcctgactttgtggggtttagtgcctgtcccacaccctcacaggatgcagctgctgggtgacatttgcccccattcatttgtcttaaacagtttggactttctaaggctcttagcttttcaggtatcttttcattataaagcatgcaaggatgtctgtatgcctgtgtttgtgtgtc

SEQ ID NO: 30238 - DNA, 3597 bp, Mus musculus
tcaaggtcactcatgaatataaattccacgcagaaggaaactgagccacgtgctctctactcagggctccagggtcgctttgcttttcctgaaggctacttgggtttttcttttaatttctctcggtcccataatcattgcatgagcattcgccaccaccgaatgctggcgctggtactcctggttttctttttcatttaatttgttatcatttctaactttttttgttttgtttttttaacttgcagtgcaagcttcgcataaggcctggcaagccaaggacgcccccccgcattcacctgctttggcagtagtagcgtacctctgtcatctgtgtcctgtttgattcgttgtttcagcctttcccccaaatatcagtaacttagctcattttactgaatgttgtcaggtggtggaaaaccatagcacaagtggatggcatcagcaagcgcgcgcgtggctggactttgtttctcgaaagtcgatttgccttgtatgcctgttccaagtggcggcaggaagcatgtctgtcccttgtatgtcgctttggaccgaggaaagtggggtaaaataactacctgtacgtctggcggggaaactcaccgcctcagcagctcagctaaaaccctgagtagccatgacaacttgcattttcttagttgtgcatcccgtgcttgcacacctccagaattacctgtctcttcttcacacttgccacaagccagcggtgggctggaaagtaggcagaaacttgagtgagcatccgagatagcttttcccctcctatggctttttcatttaatcgtttgtttatttggcttgagcctatgatctggttagactgtcttagggatggagtctgcatctgaatgcctaccttcagagccaggccacagctacagactggcacgagaaacatgattacgttcacccccaccagggcgtcccggacactctcacgggtccagatctcaaagaacacctcatttggtactgcttggctaaagaatctttggttaaggaggctggattcccacttccctccagcctctctgcacacacacctgcatttgctttaagcaggctgaggggggacttggaggctgactctaggatgtggctacttctagtaagttttcatgactcaccatgagaaaacttgctctatacattgtactaccggtagcacaagtctgaaaggacgtcctcagttgaaggtggcaggggagtgaatggacagtgcagccgctactcaaagcagagatagaggcctgatagccagcctctggtccacttccttgctgacagtgtaactcagttgcctctaaggagttgtcctccctgtcccctcactgtgaccagttccatctgctatgactcttgggtccttcagttacctcacctcaccccatgaggattaactcagaagccaggacatgttgcctgctgtgtaagaactgagaggggtgcatcatttgtcctgtcatcttttccctgacgctcctgtcacctgcttggccacccccttctaaccagatcttggctcttccctctcatttctcatgaacccaggcctccgcctctgcattttcctctcacgtcaccagttacacgtgaatgggacaatgcaggctgcattcccctctgtcacacacacttaaaaaaacattgtccagccagcccctatctgaccccagccaagttttgtgttatcttttacctccccatcgtaagaagaaagcagtggcctttcataaactaaattaggcttcgttagacaaataaggacattggcttcactggggtgtagaccaggctggagagcagccacagccatcttcactggtgaaggggatagctccaacacagacatcggctttgcttccatttttctagctagctgtggagcagcagggactaatggcatgctgactaaccgacgctgcgtttgcttcttcaccgggcaccacgtaagagcttgagcactggtgtcctctgcttgttccggccactgcttgtgtgagctttattttgtgtgtgtgtatgtgccttggaatagaaaacacccctttgcattcaatttctctcatccctaaaagcttttaaagacatgctcagaaacaaacaaacaaacaaacaaaaaacccaaacaattgacttttttgatgccaaaattattgaattttttttgcattaagtttttgttctcagtaaaataaatcctctggagagtcagggaataagaagtcaagagaatcctaaagaagcttaaaaaagagaaaagcattgcttctgcaactttttcctcccactgctcccgagcctctggtagctggttattgctgctctttctttccgtatctatacctttcttcacagtagtccctggctctgcacggaataaacgatactctcaaatctaactggacgtgctttcgcctttgcatgtaagtacaggagtaagaactcggatctttctgtttcagattagggaaaacaaatggggcagatgaggtcttcttttagaaggtgtcctggatagtctgagtaatctttttttttttctttttctttttttttttctttttaaagctaaatactggccacatttctattttacccgacagtttatgcttcctcttgatgtcagaggaagttggggattgggtactgaatgttgtgtaccactgttgtgtatggcctcctggaggtcatgtagagggcctttgattgtgacagtggcaaaaagctggggaaagattcccactgtccacgggacaaaaatcctgaaaatgatgtctctgccatgctgcctttctgcttgctccctgacattccggatctcaggctagtggcttctcctttatgctcagtgcacaatggccacttctttttagtttttggttggacagctttggcctctctgcacggtgagcatcttctgctccttcaggactgtggtcccctgtaattgtcatctgtgctgtgggaggacgactgagtacttggtcagcaagtactcgggtagcagttgagaactgttttctcagcttgggctctgtatgaatcgatccagaagggtctctctcagccaggggagctcctccacctgaggttaggtgtgggtttcttgctttcgtcctcctttactttgcaactcaccagcaacagctcttgcttcctctccatcccgtgcaccttgaatgggtggacttgactctctcactttcctcacacacccctaagtgttccacagagttggttgttcaggcgtcccctacccacatcgtactgtctctgtgtggtcctcccagaactgtccatctgaatcccccagctttgccattcataagtgtctggagttgtcaggttccaaaagtcttagttctattgacaggacatttattatggagtcattaagtgaatcatgacctacagagtctagtttgtatgtaggtatgaagggaattttaaaaaataaattgaaaattaagctgtgaacagcattagaactttgtctatttcttgattttaaaatatgctgataatgccttaaactgtagttgtagaattgtcattttttgctgtttgaagata

SEQ ID NO: 30239 - DNA, 2212 bp, Mus musculus
tctgccttcatgtgagtgctcacacacaaaaccagatgtatgttggaagcgcaagcatgtgcacgtatttcagaagaaggctctgtaggtagagtaatcagtggggtggagggtgtggcggaggaaagcaagctgaagggagagaaggtccagggtgaggccagtggcagtaaagggaacagtgggccatgttactgaccagtgtggttttgtttctttccttgatccagatggacagctcccagttgatccactgtcgggagctggtggcatatcacctttctgctctgcagtctgccctgcctctaaattccgtttatgtctaccgtcccctcaagcacaccctggtaacctgtgacaaaggagcattcaaattacatccctcctctgtctcaggcccagatttctccaaggacaacagcaagccagaagtgccagtccgaggtccagcagccttccacctgcatctccccgctgccagtgggtgcaagcaaacctctgctaaacggaaagtggaggagatggaggtggatgacttctacgatgggatcaagcggctctataatgaggacaatggtcctgagaatgtgggttctgtatgtggcactgatttatcaaggcaagagggccatgcttccccctgtccacctttgcagcctgtttctgtcatgtagtttcaggtgtcagcttccagtgcacacgaaggctgactactcggggtgagactagaaacccagggaaggctgtggagaaggcatgtgctttatcagactgactgaagtgagccaggaaaaaaagaaaaccactcttaatctttcgtgcggttacttacaatccaacgtaatttaatataaaggctatatttgtagactcaagatccaaaatatatttaaaagtaaagcaaaagttctttgtactatgtcagttccaccattgttaaataagtttgccccatgtcaaaaaaaaatgtttagcggaaagttgcaaactctcagctaggaaccttgttccagtgtccttattttcctcttgccttttcttgcctcggttgaatacttaactaagctgtgtgcttgttgatctatgtattctgacttcacttgagtaccacccaccttttcttttaaagtaattcagtaagtaaattatttttgtgtggcagccatgtttaatccacagttcaagtatgttagtttgaaaagggcactttgaagctatccccatgaatcagtggcagtaggaaaagttctctttttttgtgtctcatttcagtttttagtttaaaattattattgtcctttttttgtttatcttgaagctcaataaaatggcacgtaattaggacattttaagcatttttgacatttatataaaagaatttctgataaggttaatatatccaggtgctcaccaaagaaacatgtatgtaatatacacgtagatttttgtaactgatctgttcttgctcatttataatccgtagaagcaactgtctagatactggggcagccctgatttgagtctgtaacttataatttaattcattaccctagtttcatattatgccattaggattttcttgataaggaattattcccttgtttctctctgagcaatgtctggaccctgagctccctttgcagtctgaaggcactgcagtcagaaccatgtactgctgataaagcctctggtagcaataaaatgttgtccttaacgttggtttgtgtaggagtttttgttggtctgttttgctgatgagaaggtatggtttctgacttcttggacactttgttttcaactaaggaaaccagcaaggagcctaagcacaagcttagacagggtgttgggtgtcctctcccattcctgattttaatggggcttattaatggttttattcatttaggatattggccatgagtttgtcatacataacctttattatgttggaatatgtttcctacagtcctacttgttctagggcttttattcagaatgcatgttgaagccggacagtggtggctcacgcctttaatcccagcactcaggaggcaaaggcaggcggatttctgagtacagagtgagttccaggacagccaggacttcgaaaaacaaacagaaaagaatgcatgttgaatcttaaaaaaaaaaaaaaaaaaaatttaaaaagatggagggggttgactgcaagtttcacatttgtagtattttcttc

SEQ ID NO: 30240 - DNA, 1199 bp, Mus musculus
agatgcagccggggctgtgaggccgggcggcggcggggaggtcggatgcgggtctcggggtgccgctgaggaggctggtccctgagctcggagacgggtccggacgcccccgccgcgccggtccgtgacgccggggccgacacggtgagtgggcctcccgggtggctctgggtttggtggctccgggtctggatcgcggtttgctttgatggtggagtcccccagccgcagctgagggactgacaggggctccagggtgttctgaggctatacggtgggttgacagccccggggcttcgcaccgttactgagcccaagtattaggctactgctcgctgcgggcgtactggactccccactgtctccccagcatcccccaagctactgggccgccctgtctcgagttgcggggctcgtcaaagctgcagaagctgcgggggtagcttggaggtgggctccgcgacgggctcccggggcggggctccgaagccgcctccttccagttctttgttcagtctcgagactccccctcccttctctcctattgtgcaacgccccgccccagaacccgcttcggtggcttcagtcttccggtcccccgctttcctctagggcctagagtctagttagaagtccctgctgtgctgtccaggtgatgcggacagtaggggacattacgcttcttggacacttttcctgtacgtcaaacgctgtcggccacagagctgatcagaactagccctggccagcggaggtgaccgagatactgcccccccatgccacgcctccatgtctttaggggaggattcccctgaggctggcggacgtgaccgatccccccctcacccggttctggcttgcgtgatctggggcgcccctagctggagggatcgcggccagctccttctgctctcacaccctacgtatccggattatattcttaaccggccgcggtgtatttgctgcagatgaaggatttgggggccaagcacttggcaggtggcgaaggggttcagcttttcggattgttgaacttctacctggaacaagaacagagataccaacctcgggaaaaagggctgatcttgatggaggctaccccggaggtaaatttgagaattgataggacttgggggaaggtgggaaggtaactttttggttttcctcgtaccaaatcagtaccaaaggctaaaaagtta

SEQ ID NO: 30241 - DNA, 1209 bp, Mus musculus
ggactctggtgaagacatgagttgtggagaggagagtctcagcagctccccacccagcgatcaggagtgcaccttcttctttgacttccaagtggctcagacactgtgctttccaccatagaggtcacatgtctgtgtcagggtttaaagtgtgtgtacctatttcaaagcaatacttgggggtgtgggtagttttctagtccagcccccgtctagacaggaatttcacagactggaatacctaccttctatttattattcagatcagatctggcctattttcatatttaatcctaagccatcaaatgggttagtgcctcttaacagtacttaaaacgttggcactttattttttgttgacatttatcttggggaggagggaaggtgctgattccttcattcctttcaggcctttgaaagatgaacagtgtagcctgtctgaaactgtagagccttcaggtgtctttatttaataggttgggagtgtgcaagggcttccttagcagggacagaaggcaatcctttcatggtttatcttggatttccttctcccttgttctcagaacagagactgcagtactcttgagtgtcaaacaccaattctgtttttctaatggtggtgtattgtccgatacagatcctacatgttaagaattgacatgtctgtgaattttagttcataaatgtcttgagctttctgctgaagcagaagttgccatcaagctaggactgttagttgcattcttaatacctaagtattgtcagactgtagtattattttagtgttacctaaaaaagttcataatctgctagctttgcatgcacctgtgtgaaagcagaacagggaatggagttgataagtgctgatttagctcatctcactttcttgtattaaaatatctgcatgattactttctaattgttttataattcacatttcataatgtattgtatatgggtgccaagatgtgaatatgaagtgaaagacctccagtgtttgtagtgttagtttaaagcaattctgtgtggtgatggagccataaggatgaagatgtgtacactctgtacactgaagcttttgtacagagaatttttaactttataaacctatgtgaaaatgtaaatctttaaaaatgtacataaaatactgtatttttttacctttgtgtgtgataattggtcagtgcatgtaaatataatttattgtgt

SEQ ID NO: 30242 - DNA, 1161 bp, Mus musculus
gacgagtttgactgccacatccttgatgaaggctttactgctaaggacattctggaacaaaaaaatcaatgaagtctcttcctctgacgataaggatgcgttctatgttgcggacctcggagacattctaaagaagcatctgaggtggctaaaagctcttccccgcgttactcccgtttacgcagtcaagtgtaacgatagcagagccatagtgagcaccctagctgcctttgggataggatttgactgtgcaagcaagactgaaatacagttggtacaggggcctggggtgcctccagagacgattatctatgcaaatccttgtaaacaagtctctcaaatcaagtatgctgccagtagcggagtccagatgatgacttttgacagtgaaattgaactgatgaaagtcgccagagcacatccaaaggcaaagttggttctgcggattgccactgatgattccaaagctgtctgtcgcctcagtgttaagtttggtgccacactcaaaaccagcaggcttctcttggaacgggcaaaagagctaaatattgacgtcattggtgtgagcttccatgtgggcagtggatgtactgatcctgagaccttcgtgcaggcagtgtcggatgcccgctgtgtgtttgacatggcaacagaagttggtttcagcatgcatctgcttgatattggtggtggctttcctggatctgaagatacaaagcttaaatttgaagagatcaccagtgtaatcaaaccagctctggacaagtacttcccatcagactctggagtgagaatcatagccgagccaggcagctttcacgcttgcagtcaacatcattgccaaaaaaaaaaaaaaaaaaaaaaaaacgtgtgaaaggagcagccgagttctgacgatgatgatgagtcaaatgagcaaaccttcatgtattatgtgaatgatggagtgtacggatcatttaactgcattctttatgaccatgcccatgtgaaggccctgctgcagaagagacccaagccagatgagaagtattactcatccagcatctggggaccaacatgtgatggccttgatcggatcctggagcgctgtaacctgcctgaaatgcatgtgggtgattggatgctgtttgagaacatgggtgcatacaccgttgctgc

SEQ ID NO: 30243 - DNA, 1084 bp, Mus musculus
tcaggcatcagtatcctcatagctttacacactctgatggggaatattgcagcattctcaggactgacatctggaaaaggctcaaatcacttactgctccttgcttgttgactttgttttacaatattgtgcctggtgtcaacttttaagcaacagcactgcctaaaagcaagcagagaacagaatcccagcaccattctataggcaactttttagaattcagatacagtaaatctgttcaagatttatgatgttttatgtaaaaaaaattttgtactacatagctgaatatttttgtttgatttatttgatgtaaggcgtgtgaacattcatttgaatatcacatgttaaagtcaggtatggcacaatgggctctgagaccagcttccccccgcaccccccccccatttgccttgttctaatctctttcttttcaaattgcatttctggtattcataagcagatatttaattttactaataagcatcctgtgtgaatgtactttaaaagccactatgttttagtgttatggtttgtagaattatgaaacttaccttctccccctcctttttttgtcttaaagtcataaatctctgagaagggagaaagttaaaatccaagactcatatcacttgaatctgtggcagattatgttaaaattgagggtgtggcaattaaacctagaacatggacaatattgtgctgtttaaaaattctgtctcctgagtatgtcttgtcaataggtgaaattttaagtctgtattgtacttccaagaattagtaaaactcgcaaataccacctgtatactcaatagcgaatagcaaagggaaggggagcacacaggagtggtaggtcaggtatgcgcctggaaggggttagagagcgccatctctaacacaggctacattccccagtggtaaaatttgatgttggcttaataccgatttaaaatttcatcttttatattcttgtgttttttgaaatattttaatagttttgcaaagtatactaactggttcgtagcttcagtcacagaaaacaaattgtatttcagtaatggtcctgtagcaagcaagaattctt

SEQ ID NO: 30244 - DNA, 1221 bp, Mus musculus
tgtaaatttattttatatattacatatatatggtataaaaatgactagtggttaatttaggtattggttaggaaataagaacttcaaaagtgtactgcaaatattttatttggataaatagataagcatatacttattttctcagaaagaaaccttgtactgtcagatagaaaggatcagagtgagaatcaagcaaagaataattcatgtatgtgtccccccccccccccttcacttccctttgttttggagacaagtcttgctgtgcagcacaggctgaccttgagcttctgatcctcctatatccaccttctaagtactggggttaaagtgatattttactgtttttggtgttttgccttctttaaccactgagaatagatgccattataggacagctttgtttgagaaatgtatgcagtactataagccattgaaatttctctaaaatgtaagctgacatatcatacacacatagtttttgctagcttttctatctgatgtcatcatttaatatctctgtagaaacagtatgagtttaatgatttgtattttagatttgtattgttagaagtcttcattgtgaattactcttttggtgatttgtaacattctctattactctccaacaaaatcatgctgaactacagagacaaattaatttcaacttgtgagagggtagccatggtttaatatcataagacttagatgtttacatatacttgaggctggtctcccccggattttcctccccctctcctccctctccctcttcccttttctctcccccctctccccccctctgttgtgtatatctgtactatatagtgttgtttaattagctaacagtgatagagattcaaacttgtttactttagcatagcttacataagaactaagaagtagtaatacactttcttaatcagtaatacatgactaatttcagaacttttacagggggtgtccaaaggctgcacaggtggtatagtagaggacaaaataggtgaaattcaaagcaacttgtgtagttaggatttagagaaccacattttttcctagttttttttttttcagtgtttttcctagtgtcatatacggtttaaatacttaagatcagtgttgttaaggggcttttagtttattttgttacatactcagggcctccaggttgccctaatgttattatcctttggaaattgatgtaagatattgtaaaaattg

SEQ ID NO: 30245 - DNA, 1407 bp, Mus musculus
ggtgctggggatgaagcctgtgtccttgtgtttctgcaacaggcactttaccatggagccattcccagtccacttttacattttaattatgcgtagaattggatgcaaggccatgtgcatgctaggcaagggcccaaagctattgctttatttgccaatttttctcctgactaatggagtgttaactttagaatggaaatattcgggacactaataaacaggaaaaggaatcactcacaatcctgatactcagacataatcagaaaaaaattgtttagtggatattccttttacattttcatttgaaagagacagggcaaataaaaagagcatacatgcatgcatgctggtgggttttgttttgtttttaagatttattttatgtgtattagtattcggtctacatatatgtaagtataccatggacccgtggtggtcagaggcgggctcctgatgccctagagctggagttacagatggttaagggccaccatttgggtgctaggaactgaacccaggtcttttaccaagtgctcttcacggctaagccatctctagccctgcatgtgtgctgtttgaacgtactcatttcttttattcaatcctcatggaaaatgagtaacacttcatcgctttattgtggcagtccctcaattgctagccatttaaattgtttcaggatcgccctcccattgacttaagtaagggtttaaagttttacagtaagtactgatgaatcccaaacgttagtttccatacagattacttagaaggtttgcgtagaacaaatagctggtcttcacctagtaataggagattgaccttggaattctgcagtttttatcaggtagtgggacaatggggactctagtggataccagtgctgtcaaccctgattctaataaaaagaaatctgattttcagaccagcatcagtttattctaaaattccacaagtgatctaaagtaccagagtgaaagtcactgttgtacttcactacccaatttataaaaggttgcaaaatttgtaatattttaaatattacaaattacaatattgtaattttgttaatttgtaattacaaatattaaattttttaactattaaaaatttaaatattttaaaattatctttattctattatatgtgtatgagtattttgtatgggcctatcagaagagggtattgaagcccctggaattgggattacaaatagttatgagccatcatgtgggtgccgggaattgaacctgggtcctctgcaagaacaaaagtgctcccaattccagacccatctctccagcttcaagatttttaaagatttagataacagaagcctacgttccctgaacctagatctgggacaagtttctaactttctggtttatccctgtctttaaataatta

SEQ ID NO: 30246 - DNA, 2554 bp, Mus musculus
tgtaagaccaacttcattcatgaggaaaagttcctgtccgtgagcaagggaggcatatcctgcgtgaagactctcggaggggacattatcactaagtgatcacatttaagtgcctcttcagagccagggttgctacatcctgtgttgctccgatctaagcagcacagctgagtcctcacaggtctcctcccctccccctccccccacccccccaccccctcgtgcagtctgtgagaaacgggcgcctgacttactgcccgtagccaggttctcctctccttaggaacatttagggttttgttttgtttttgctgtgatcgtttttttggttttttgtttgtttgtttttatgtttgctagcaaaaaccttaattctgcctttaagaaaggtggtgagaagagaaacaaacgtgcactactgttcttaaaaaagaatcttagatgggagactaggccatgcctgagcagcactctgtctgatagcccagtcctcagccaactaattttgctccagttatttaattccatattataattggattcttgacactgaattttgatcccagttttcccaaagaactttcatctctaattctgtagtcctaagttctatgggttcaaaactgtatgggtgctactttgaaggccatgcgatctgggtggccctttcttgaccatgcaacggaccttagagcatgcagccttagagcatgcagacggctcatgggatcacggtgaggccattcacgtcggctccagtcctgcttacgctgtaccagcgagtcacggacaacgtaagaagtgtggacaccatgggcagtggagagctgaagcattagtcttgtttaaactcagtagtagatctccctgccctgtcagagagtgtgaaccttcttcttcccacatgtgtcagtaaaatcattcacagtattcctgaaaccttctgttgtccactaaaaccagagtaccacctcagtctcctatcaggttgacaagctgttttaaatactggtatatttttttttaaatggaattaactcatgtatcatcaattttttttcttgtcattgatgtttattcccaaatgtactttgtatatgcagtatcaggaaagtagatatgcctctacagagggcttctttctagtctagtggttttggaacttacatttcccatgctggaatgttagcaggaattttccccgtgagctctgtataggacaccacctcattgccattgttatgatggaacactgtttgcaagtggctgttgtatcttagggttacaaattcagctcatatgctcaattttagatgacctggatataacaaaaataggatatttttttcagaaaatatccttgattggtcagggttgttcttgaatacacattttgtcattttggccagaagaaatatactaaatagttattaagtaaaaaaagagtaaaattcagtaattttagatgtagaaccatttttattatgaattcttctaaaaaatattgagccttttaagtttttttttttttttttttttttttccagacagggtcccactctgtagctctggaacttgctatatagaccaggctggccttgtagtcatagagagccacctgcctctcccttccaaacgctgggattaaaggtgtgtgccaccatgcccagccatataagttttactttaagtcctaaaatgcctggcttctttttgtacatgaattctgtaataactggtgaatgtataacacacataaaaagaacatactttgttcccaaacaactgttctttaaattcaagacctaagtctaactggagggacagttattccatgttctctgaaatgttcagtattgtaaaaaacaaaaaaaactattgttctcatttatccttataatgtatttattataaaggaatgactgtggattgctgtcaactctaaacacttctgtatgtcagcatttattgaccatctactgtgtgcatagcactactgataaaaaatttattcacattaaagaatatttgacagttgctttaaaatctgagctttgtagtaatgtatatttcattttgtttttattagtttattaaaataagttgaaaattgtatttccagctacagtattaaaaaaaaaaagctagtctcagtagcttatacatactaggaaagctaagactttaaaaatactgtttttaagtatctgtgactgttttaaatgataacaatttgtagagacacagttaactcacttaataaacaatcatcttcctccatggagccccttttcccgcagcaagccgttgttcatctttgtggcactaagtgcagctaagtagctgcatggcccagtgtgcatatgtaaataaacatggtttactaaatgtgtgctgcctgccttctttgtgatacattacagcctgaaatcgcatgttagcgtcaaatgatgtgtcagggactgtcgcagctgtaatcccactgggcagagtgtccattgtgacattgtgcttgaggaacgcagagctgtacaactcttcacttggcaggtat

SEQ ID NO: 30247 - DNA, 1374 bp, Mus musculus
gcgtggttcgtatccccaaggaacagggagtcctgtccttctggcgtgggaacctggccaatgtcatcagatacttccccacccaggctctcaacttttccttcaaagataaatacaagcagatctttctgggtggtgtggacaagaggacccagttctggcgctactttgcaaggaacctggcatcaggtggtgccgctggagctacatctttgtgctttgtgcaccctcttgattttgcccgtacccgtctagcagctgatgtgggcaaagctggagctgaaagggaattcaaaggccttggtgactgcctggttaagatctacaaatctgatggaattaagggcctgtaccaaggctttaatgtgtcagtacagggcattatcatctacagagctgcctactttggtatctatgacactgcaaagggaatgctcccagatcccaagaatactcacatcttcatcagctggatgattgcacagtctgtcactgctgtcgttggccagacttcctatccttttgacacggttcgccgtcgtatgatgatgcagtctggacgcaaaggaactgatatcatgtacacaggcacgcttgactgctggcggaagatcgcgcgcgatgaagggagcaaggcttttttcaagggcgcacggtccaacgttctcagaggcatgggtggcgcctttgtgcttgtcttgtacgatgagatcaagaagttcacataattaagtcctaggtgttctccccgagaacgggcatgttgtatgatataccatatcttgaacattctggacagactctctgggcttgtctgttttatcagtggcaactatttaccagttgaaaagtgagaagcaataatattcatctgacccgttttctcttaaagccatttccataatgacaatgatgatgggactcaattatattttttatttcagtcactcctgataataaaaaattgaagaaataaaaatacctaaaaccaaaaccaaaaaaaaaaaagcatccaggagaaactgttctcccctgccaggacatccaaacaatctctcgaagaaagatgggtgccgaccacccaaggaagcaggaattctgattttaggcataagcttttaaaagcatttttggtaactaacttatgtgcccaaatgctgtcattgttagctgatatgtcatctgtcaggaaataaagaccagagatggtatcaatagaaacttttaagttatcttactgttttctttggatcatgtcatccccatttagtcactggaaatggcaggtatagagttaagaggaagaggaagcaagtaatgcctacattttcctttgtccttactagtggtgtgtgtgtgtgtgtgtgtgtgtgt

SEQ ID NO: 30248 - DNA, 1425 bp, Mus musculus
tgttctgtaatccatcatcagccctgctaagtacttcttacaaatcggccccagtgtgtggagaacgcctggctaagggtaaaggcttgcctgaggcacacatataactttcttttttctccgtagaaggatttgccattttgtgtggcaacctagtcctcggtctttccaatttccttttttttttctttacaattttctcccttatctctgaaatggttttattctttccccacaagcatatgattatctctttatttttaaatattacagctttctaacatctgtctccagggcagcataatcttactgataaaatattccgtgttttccttgagcccttgtcaatatgtctttgtggtaacagcccagcagatggagaaacaggaggagcctcagcttacctgagtgatttctccaggccagcaccaagcacaccgagtctctagtaagctgatcttaatcatcgaagcaattgggaaatcagaaaggcttccgggtgtttgcagtgcccctgaacaaagccaccagtgctttgcattgtcaccaggagacatcagaaattgagcaacgcagcagcctaccgagtttgggttacaactgtttagataataaaagtaaacaatgttctaacattgtttagggcttaagttaagcaagttcccagacgattccagggatgcgctgctgatggcagagaagcagccgccttcctattcctgggggcctcggacgctgcgttcataacaacactgttcttttcacacagccaattatgattctttctctgaacagactgcttgcttttttccttgagcctggtcctagagagacccaagcaaggatgtagaataatagttcatggtatgagtgtagtgctggctgtagagtgactcacgccccttctgaattgtggctttacagaaactcgagtgaaccctgttttgtcaacaaattgttcaaagctcttagtcaccaggacataaagtcttgtgtagttgggttatcaactcgtgaatgaagcctgtggcttacatagctaaaaatctgttcttcccttggagataagagcaataagaaagagatgatatgaaatcaaataatggaatatgggagtgagggagacacacagagtagtgctggaaattaagccaaaactggtaagctttaaaaggatcaagaaataaagtactttttctcattagttctatgtaatgctgatactgactagtaatggtcatgaacatcaacttctaacccgtctaagacacttgttagattactttaaattagaccctaagtaatttaggatctcattcactcacagaaatgctatttgtgacactgtgtcaagagattggtgaccaagtcatttcaatagaaagtttcagacatatcaaaatacatacaataaaaatgtttatt

SEQ ID NO: 30249 - DNA, 1202 bp, Mus musculus
aatccctgggacccacacgttggaagataagatttctacaagttctctgacctgcacatgtaccactgcacacacatgcaggtatgcaatgagtcccataccttttaaaccgagaaggactcagctcctctcgctccgccctttcccaaatgtgaacatactgaggcctgagaacaggaagcctcacgggctgggacagcagacttccggaagcgcccttagccccgccccttccgcccgtaggccttcccgccaccggtctctgctcggcctggcccgctgaggtccattgccaaggcaacgacgccaggatgaacatccgcaatgcccggcccgacgacctgatgaacatgcagcactgcaacctgctctgcctgccggagaactaccagatgaagtactacttctaccatggcctgtcgtggccccagctctcctacatcgccgaggatgaggacggcaagatcgtgggctatgtcctggccaagatggaggaggaccccgatgatgttccccacgggcacatcacctcgctggccgtcaagcgctcacaccggcgcctcggcctggcccagaagctcatggaccaggcctcacgggcgatgatcgagaacttcggcgccaagtacgtgtccctgcacgtcaggaagagcaacagggcggccctgcacctgtattctaacaccctcaacttccaggtcagtgaggtggaacccaagtactatgctgatggtgaagatgcttacgccatgaagcgggatctctctcagatgactgatgagctgagaaggcagctggtgctgaagaagaacagatatgtggttctgggctccgaggagacccagggcggcacacttcctgatgctggggaggcctgcctgcccaagaaccccacaagcaaagacagtggcagcagtgacagcactgatgtccaggacagctcagaggacttggattccatctcctagagcatttcctgaggtattctcttccttggccccgcctcctctgtacccctttgagtcatagcttggcctgcccagtcccatcttgtcccacccttttgtacttgtgctaggtttcttcctgaatgcagtgaaggtgtccacagtgttacccttgccgcattcttgctaaaaggaagatttcttgttgaaatccaacaagtgtttctttttatagaaaataggatgtgttgaacg

SEQ ID NO: 30250 - DNA, 1383 bp, Mus musculus
tcataggtgctttataccctgactagagatagtttacacctgagatgtgagaaaatgggttttgagaaaagcagtactctccgactatctggagataatttggtaataaaaaaataaaataaaataaacagtattaattggtctttggaaccctgcacctgtagttaggaatctagtgtggctagagaagccctgctaggcactgattataaatgctgttcttatagggaccagcagcttctcaaagttctatggtaagggaacagatggctgtttttcctacaaaaattggattcatcaggtgacaaggtgctcctctcttgaaattacagctagaaaaattaagaattttgtttggtttaaatgagcaaatgtatacggccatttcatttttgtttctaaatagtttcaaaagtataaatgttttatatgtcttggttatagattagtggctcataagttattggttatgattaaaaatttgtaacattagtaacaaaaagttgacttaaaactggtaactctgggttagagtaattcagaacatgtggcatgagccaacccatgggaacaggtctctaaagatacgcctaaattgggtaatattctgtgtaattcttatcctagaaacccgattataatagatatattggcggctacaccttcttgtgtttgtgtgcaggaacggacagccaaaactttgtagcaagtaatgtttttagagttcatttttaaagaaaatagattgtttacactgttaaaattgggttttgcttctcaaaattgtggttgtgctctcatgttacaagagaaattgaaggcttctcctaaattagagccaccagctaaatcggctcctctaaaatctataaagcctcctgagtggcctagtccataaccttccccttatccacagcctcgaccccagccgccgagggaaccccaaacccctcggggcgttgagaggcggaccgctgtgagtacatggagccacagggacctgcagagcagagtccgggcggactctggtggacccacccaaactttaaacccttcagtactggtcattttcctctgctggtatttataacaaaaaaactaaccaccccctttctcaggatccccaacgcctcacagggttggcggagttccttatgttctctcatcagcctacttgagattactgtcaacagcggttacagatgcttttaacaaccgaagagcaagagaaaattctgtttagaggctaaaaaaatagcctgggagccaacgggcggtctacacagctataccttcttctcagcacctcatggtaccttctccaaaattgaccacataataggtcacaaatcaggcctcaacagattcaaaaatattgaaatt

SEQ ID NO: 30251 - DNA, 1173 bp, Mus musculus
aggctggaaaaggtatgaggcagcttttcactactggaacgaaacattgaagataattcactgaaaaggtggaggagtttcttttggcctctggtttcaaaagacgcttcttatagtctgatggttttactatactggttccatccatctagtgactccaataatatctccttagttgttgggaggatccattgatgcgtctcatcattggaaagtttcactgatgtcactcagagttgaatggccccactgatggttctcatggttgaggcaccactggcctgtggtaacatcatatatgatgattggagtcatgtggcagacaaaaataggtttacctcacaatggccaggatgtacagaagaaagaggaaaggaccacaggtccaataatttcttcaagggaatactgtgtgacctaacttgctcttgctaggagattcctccaccacctccttcagctgcttaagactccgtccctcagaactgtttgtctcaattggccatttaagtttaataaaagtaaaagactggttaatgataacaatgcatcataaaaccttcagaaggaaagaatgttgtggaccatttttttttgtgtgtggcagttttaagttattagttttcaaaatcagtactttttaatggaaacaacttgaccaaaaatctgtcacagaatttgagaccattaaaacaagtttaatgagaaaaaaaaaaaaaagactccgtccttagaaaaccatcatttcctctcttcattactgataactgattgggctcattccatttatttgctatgataaacgctgcttctcagtaaataagcactctttagatttgtgatttatgaaccatgataatgacagtagaggcgtcatgaaacatatccttccccctccacctccttgaatctgataatgtcccacagtgaaatacaggaaaaaatactggtcatgatttttttttctgctcacacatataacaaaggcaaccatattgaacttaccatgctatgaaaacttcacaccacatagaaaagctcaagtgaatgagttgtcatatgaagagagagacagaccggccactagtcagagaagttagtcacctataatgtgaatgaaggctccatctttgaagtgtatctctagccacagctgaagctacctcagatgac

SEQ ID NO: 30252 - DNA, 1665 bp, Mus musculus
tgtgtgtgtgtgtgtgtgtgtgagagagagagagagagagagagagagagagagagagagagagagagagagagagaagtttgtggaaaatcaggtaatgacagctcatccttttagaattgtacttcagaatagaaacatttggtgggctgttaggtagctttgattacttgtgggtagacctgctagtattgccagtcctcaagcaatgagctttctgtatcttgtttactagatatatactaccaggtgagtcatttcctggggttctgttttcttttaaaatctttccctaaacttaatatgtattaaaaagtctggcttttcagtccattctttgtgcactgggatggcaattgcttcattatatgacaattgctgttcccaagtcagaattcagtgtgctgatttgacatcagttcgtcccgaataagttcctgttaccaggatttacattcagcacattagaaacttgttggtgtgcttttattcttggagcattttccttagactaccttccactttgagtgctctgtttaggatgttgaggtgttaggattcttgacagccagaaagactgaacccactatctgggcacagtgttcgtgttgctctataaatgtatgctttttttgatttggggttgttttacctacattgtcaaactagatccatgcttaacagtgataatgaaggctttttgtttgttttgtttgtgggtcctccccccccccccaagacagggtttctctgtaggctgtcctagaacttgttcttttttaaccaaaatttggcaaggctgaaaatggaatcctataatcaatgctggccacattaaagttaatagttgagaagtcttgtctgaatttccttgggcaaaaagattctagccagttcaataccctgttgtgcaaattcaatttgctgttataatttgctctcagttatcagttggaaggaggttaattctaatgtacttggaagaggcctgtagaccatctataactgcatcagttgtacagcgttgttgcctgggattctctagttcacataaactcccaagtcttagccgtggtgatggctacagtgtggaagatggtgagcattctagtgagtatcgcgatgacggcagtaaagagcagcaggcagccgtggctgggctcactgaccgtggctgtaagttacggaggcagcacacacttctgtacacacctctcatcagttaccggagtcattgcattgcggactaactggctgactcaagttgtcttgctactgaagtcttgagttggtctcatgcatttaccctgttgacttgagcaccttaaagtcgaaaggatgtctggttgtggctttattgtaaacagccttaggtaaagaggggagtatatcggttaggaaggtgaaaaatgatacttccaagttcagtgggaaaccctgggtttatcccccagcttaagaaagaatgcctaacaatgtttcagaattagattctgtggaaggtgagggtgttagaacagtccaaatttgttattgtagacttgcagtgggaggaatttttaaatatacagatcagtcgacactcattaacttcactgataaaggtggaaacggatgtggcaacacttctaagttcatttgtatatgtttgtaatttgattggtt

SEQ ID NO: 30253 - DNA, 1333 bp, Mus musculus
aattcctgttgtgacaactgcctatgtatctattgattacttacaataagataactttttcttctagtcatagataactcttctataacttgtgatgaacaagagatatgctgatccagtaaaataagttaaataatagatgctcttgggtcaaaatgtccttttatcaaaaattgactggccttttatgagttctttaggtaatactttttgaaaatctttttgtaattttaaagaattttgatgagagcatatcacatcttaaaccagtggtgcacatgtggatttacagctcatggactctactgttcagctttaatttataaagcatacccacacatttaatgttatatacagtatttacatgtagtgaaacatagggataattcagttttatgtaagtttttgcttaagtatcatggcctgccccgagtgactttgtccctttttctttgtctccaggtggtgaagcagtattttccaatttgaagattcatttgaaggtggctcctgccacctgctaatagcagttcaaactaaattttttctatcaagttcctgaatggaagtatgacgttgggtccctctgaagtttaattctgagttctcattaaaagaatttgctttcattgttttatttcttaattgctatgcttcagtatcaatttgtgttttatgccccccctcccccccagtattgtagagcaagtcttgtgttaaaaaaagcccagtgtgacagtgtcatgatgtagtagtgtcttactggttttttaataaatccttttgtataaaaatgtattggctcttttatcatcagaataggaggaagtgaaatactacaaatgtttgtcttggattcaagtcactagaagcataaatttgaggggataaaaacaacggtaaactttgtctgaaagagggcatggttaaaaatgtagtgaattttaaatgtttttagcaaaatttgattttgcccaagaatccctgtctgaattggaaatgacttaatgtagtcaatgtgcttgttggttgtcttaatattacttctgtagccattaagttttatgagtaacttcccaaatacccacgtttttctttatatgtattgtgctttttaaaaacaaatctggaaaaatgggcaagaacatttgcagacaattgtttttaagcttccattaaataaaaaaaatgtggacttaaggaaatctattaatttaaatagaactgcagctagtttagagagtatttttttcttaaagctttggtgtaattagggaagattttaaaaaatgcatagtgtttatttgtatgtgtgctctttttttaagtcaat

SEQ ID NO: 30254 - DNA, 2433 bp, Mus musculus
attaccactgctgccagaaactgctttgggcattttgctgcatgttgagactttgttctaatggcctttcctggagtgttttccatttatcattttacaggcctaaacatgtattacttgttaactgaggctctcctgtaagtaaatcctctaagttagttagatgtggtttagtggtctttctgtcggagtgtttacatgatgactgtggtcgtcttgatggagtcctgcacgcgaaaaactctagttgacagtttagaggacttagcatttttccattttatatatgagttctgcaaatgggagaactattaaaagtagagaaaggagtcttgctgtagataggatgctggggctgtaatgaagatttgatagaatctagaaactaagattttatctgttaaagaaaactaatacttttatttggcatgcaaatataaatatgtatatgtatataaatatcaggaaatagcttcttgctcagtattgtatttgaacagaaggagcagtgctgagtggaactttaaacagtagggtttggtaggtgtctgtaataagaataacatttgaaaagaaggtgtgttactgatgtgtgtaaatgtaagacaaagtttaattttcttcttaacattttaatactgctttttgtctttacaggaaaatgtttataggaggccttagctgggacaccacaaagaaagatctgaaggactacttttccaaatttggtgaagttgtagactgcactctgaagttagatcctatcacagggcgatcaaggggttttggctttgtgctatttaaagagtcggagagtgtagataaggtagtgtgttatatatatatatatatacatatattctgattaatgaaacctggagagtttgatacagtaaacttgtgttatatgttctcttatattttttgttgtttgaaacaaggttctgtgtagcttaggctggcctcaagttgtgcacatggctgaggactaccctgagccgcatgcctctactttccaagtgttggggcagcagaggtgctgaacacaccctgtttgtgccagtatattttttggagagagaggtagatttatggaattatttactgatacttttcatgtgccagccttcctaaattgaaagtgacttttaaaaaggacagagatttgtctgggggcagtagcttgtggttagaatgtatattgtttatgttcagttccaagaggatagagggggtatgttataaacagtatgacaagttggcaaaaagggcccaatttaaaataatgttagataaagtttcccccctttactctgattctcagaatagagtagttctctcagtcaaatgtctacaggatgatcaacttttgattgtcattattttggttctgcactgaggggaagtagcaaccattgtttacattgttatcggttaaaggtgatggttacctagtaatcaattcagttggggtgatgtttcccctacatcaattctcagtgacttttattttatttttttatttttatttttggttggtttttcaaaacagggtttctctgtatagccctggctgtcctggaactcactttgtagaccaggctggtctcgaactcagaaatctgcctgcctctgcctcccgagtgccgctgggattaaagatgtgtgccaccaccgcccggcctcagtgatttttatacttgggcactagtttgtgttagttgatgtcataattactctgtgacttgacagttaagccagttgacatggtattggtacattgtgtgattatttgtaagtattttatttctgaacagtagttaatttttacatattaaagtgaaaaatttaatttccttaggtcatggatcagaaagaacataaattgaatgggaaagtcattgatcctaaaagggccaaagccatgaaaacaaaagagcctgtcaaaaaaatttttgttggtggcctttctccagacacacctgaagaaaaaataagagagtactttggtggttttggtgaggtatgttgtgttttgatgaaatttatgtcaacatttttgtgtgatggcacattaagtagatttggccttctgggtttttcagagttgtgaagtagttttgttttggtaataaggatattgatgtgaacagatctgaagattgggtaatttttttttcttaatttttgagtatctgtatatataaagtaacagatacaaagatgaaataaacaatccccaactgcaaagaacggtcttgttaggtaatgtaggctgtctgactttgtacttctctttttctccttgaactctggacttaagacatcttcctgcttctataccacatagactacaggaatgacccactgtgtccgagttggacagcattcttaactcggaatttagtggaaggaagagaacaggaaggcagt

SEQ ID NO: 30255 - DNA, 2299 bp, Mus musculus
agtgcataaatgcctttttacagcttaatcattttggtcttctgtttagtgttgtatttcaattgtggagcctcattttaagtgttcattctttaagatttaatgcttgctttttctttttatagctaatagtgaaatctacaaaccaaaacaagaacttttaaatctgggatataagttaaagatcatatgcacaaagtaattggctaccgtgttaccattataaacctacctggaatttgtgttggtagcatccagttggcttactagggatgcttctgttctggttggccctcacttgctagatgcagatcagggaagattgcattcccgtgttctaaattcagtccatcctgtgtcatttggaactcgagtgagtttcagtgcccaaactgtactttgctgatgaacatgcgtgtgatctttaattgaagtgaggacttaagcagtccatgaaagtggacctttgcacacttgtggggctgcacacatctaatgggtgtttcgtttttgttttaggaggtgtaaagaaaccatcttacaggacgacattgaagattgcttgatcttctgttgacctaagatgattattttgtaaaagactttgtagtgtacatgacacaattgtgtccaactgtatatagctgccaattagttcctctgttttactttgtcctttgctacctgtgttatgatgactcaatgtggatttgtgttcatacaaatttttatttgtgtggtttcatgttaaacctcaaataaatgcttccttatgtgattgttttcctgcgtcaggtactgcatagttctgtggaaatgtaattttataaagaagcaataatcaagacagacgcagcttattttgtagggggtattggtccacaggaagaaactggttgtagtatcccctggtttctgtgggtgttactgtgcttacagtctaatgcttaatttctctgttgataacttctacaccttttgaataatgtttcctccctgggtatctggagactgacactagtctgttgtgattggtgacacttcctatcacatggtgtgctttcagattatggttctaaggaaagcaccttggtgtgctagggctgtacctcactggcaagtgtcctttgcctgagcacaagtgatgctcttgtttctatctcatcaccttagaaacggacctgttggctaccacaaagctttttaattggctacctttgctctgtgcttatctaacaaaccatgtgtaattcacagatgactttaaagagagtccatggtttgtctgttagaggtaaatgcaggggggaaactggtggccagggtttcatccattctatctgcaattatccactaaggtcagtgcagtgggctgaggttttaggaaaattagcagtagtgaatccatcccaccatagtacacaagctaaatagatttaagcagtttgctatgcaggcagaggaagggagttgtggaaagtcacatggtgtatcttttggtgcattaaaaacttaaaagatttaagtaataaaggctttgagcttttccataaatgtttggcttagaggtctctccacggttccacaaaagcttctgggttggggtacatgtttagagtacttggtcttagaccagtgtaagctttttatactgatatcttttttaaatgcctacaactttgttccaatgatatttgtacttgctaggctgtcaagttaccatgccttggcctcattttcttctggccaggtaccattgttggctattaaaaagaactgtttcaacttgcaaccagagaataggaggtcatttcacatactgttagtaggtatagtatccaagaaagaaatacaattaggtgacaagttggcattgaagattgtcatttcccctgatcaaaatgaataaagtctttttaaaataaaatctcagttaagtcttgctatgtatgactttaagaaaatacaaagatttgagaattgaagggtgagaatgtacttggtcattgagagatcttgaacttaggaaatttctttagtgttgatgaacccacagaaatgtgaactcgccaaggctgagtagtgtgaacattgcttagttggatgaatagacattaaggtcagtgtccattcctaaatatttattttgacaatatcttggccactttttaaagatgaggctcatgtcattgttgggctactaacgtgagtaaccagaaccttttcctgttcaatgtgtgttgttcattagttctgacagggaacctttaataacatttcatgctatcataatcaggac

SEQ ID NO: 30256 - DNA, 1199 bp, Mus musculus
ttatttatatgtcaataatgtttacaaacttctgaatataaatggtactgttttcctttctctgaagctatatatattgtaaattcttggtgatttcattctccaagaatagaggctagaacagaactgggagagagacattaggtcagtaaggaaaccccaacaaaaagccagtcatggtctgaaacttcacctgctgtttctagtgccaagtagcagctacgtagtgatctatgaaactggattacatcctactgtcatgtaatgtgtatgagtgcacacatggtacattggttcgtgtagatgaaatgcatgttttggggagtctgtgagaggacagggagatgaccctgagtgtggtcctcacccatgctaggtctactgcgatgctttactctggaattgtgcatagcatttcatttgagaaagtattctgctgagaaacgtaacctgggtcctctcaggccttcacttccttagccaaggaaatggtttgcttttctcttcttacttttgctgctttaactttccttttttttttttttttctttcatcttttaaaagatgcctgaaaacttcatgcctcctgttcccattacgtcaccaatcatgaacccttcgggtgatccccagtcacaggggctgcagcagcagccttcaactccagggccgctgtcaagccacgcctccttcccacagcagcacctagcgggcggccagcccttccatggtgtacagcagcctcttgctcagacaggcatgccgccgtccttctcaaagcccaacactgaaggggctccaggagctcccattggaaacaccatccaggtatcagtagaactataggggtgcatgggagatggcttggtcagtgtgaactcagtccttcatgttagcttcaaaatggcaactccattttaagagactgtacatgtatattattttttaatggcattggctatacgtaagctttctagacaagagttacatatttggggagtgtatgtttactatggctcagtagctacagtgttttctaaatctagtcagtgcacaagttaagattggctgagtcaccactgtgtctgaggctgtttttataggcttttctttttaaaatgctaagtaaaaatgttacgagttatgtcatttagtgtgtactacctacccagaagttaaaaactcatagcacacacata

SEQ ID NO: 30257 - DNA, 1147 bp, Mus musculus
gggtggcaatagtgaatatgtcatttaaaagtaatttcttctgtgatgtgtttttggtcagagcagaatataaggttggcctctgctacttagtagctgtgtgaggagaaaggaccatttcctaagcctccgtggctctcagtagacattagttggaaccagtgtaattgtagcagtcaggagtattcgtccttgcaggccagggctaacttggcggctgagaagcacagaagctttcttgctggcatggatatttactgtagtgttggaagtcttgtatctgtagctcatgaggcaccactgacggtttcttctatgtgtgcgttcagagttcttcgttcctattttcccatttattctttcgaatgtacttgctggagagcagagcagttctgtagttagacataggagcatgtaggatgcttgtttctctctggtcctagactttactggctgtaaatctagtcatcttaccttgcctttctcttgattcacagatctcctgggaacccgtctggaaagagaaggagacagcctcctgcggactcaggcctgcctctgctacatctgtgcagggaatgtagagagattggttgcttgctggacaaaagctcaggacggcagcagccccttgtctctccaggctagtgtctttgcaaccaaagctgattttgtttcagcgtgccctcagctgaccgagcgctgagctagaaatgcttttgttctagaagcttgctgctttcacctgacttacagcttctggatgcatcagtgtgtgtgttcattgtcatcttcgaagaagccaggtgtgaggtggtgggctagtcagtcaggtgtggatgaagccgtcgggtcagatggtgtgtggcagtttactggagcagtaggtggcaggaaaactgaaagaagcccacggtttacctgctctccctttaagctcctacctctggcagagagcggcagtatgggctggagaatgggatgcacccaacactgaggagagtagtgatgatcagggagtgtgaggttcaagatgaactgaacccaggttagctctaccgcacaggctagagagaaagccaaactgtggagacggtcctaggcctcaagtagagcttaaaatttcccccaaggcacctagtgggca

SEQ ID NO: 30258 - DNA, 1180 bp, Mus musculus
ccttcttggaccatcccaggatcactgtgctgtacggagaacttagtcttggttttcttggctaagactctttcttatagaaaatgttcagctgcacgtattaccagccttacttattttgcttatgaccaggctatccctttttctaacgtattttatttatgttggactaggtattatatgaacttcccaccaacacacagtggtgctttgatatccagtggtgtcctcgaaatcctgctgtcctgtccgctgcttcctttgatggacggatcagtgtctattccatcatgggagggagcatagacggcttacggcagaaacaagttgacaaggtaacaggcagtattaaggcttttgatggttgcgaccgagaaagatagccatacgtgtgcaactatttttaaagtgattttaccaaccagcaatgccactttactggataattgttagatattttgttgttgaaaagttgcaacacagttcgcacaggttactgttttttggttttttttaaactagctttcatcatcttttgggaatcttgatcctttcggcacaggacagcctctccctccattacaaatcccacagcagagcgctcagcacagcatagtgctgcccctgaagaagcctcccaagtggatccggaggcctgtgggcgcttccttctcggtaggtggatttcacttatggtcagggcagcgtgctaccaggaattgtgggacagcacaaagtactgcctatccaaggtggcttgtgccaactgcacgggacagctgaaggatggatagcctgaggctctgggttgtggggggcctgtccgtggggcacagttttcacttcagcaggcttccggagccttgggagctcagattgacggctcacgagctcatttgtccttcacagtttggagggaagttggtgacttttgagagcgttgcagtgccgctgcagcagggagctgagcagcagcgacggcagcctgtgttcatcagtcaggtggtgacggagaaggactttctcaaccggtcggcgcagctgcagcatgctgtgcagtctcagggcttcatcggttactgccagaaaaagatcgaggcttcccagaccgagtttgagaaaaatgtgtggtccttcttgaaggtaaagttgggtttatttttaatttttgttcctgtgt

SEQ ID NO: 30259 - DNA, 1239 bp, Mus musculus
tattttattttattttattttattttattttattttattttattttattttttgaaacagggtttctctgtgtagaccaggctggcctggaactcacaagagatctgcctgcctctgcctcccaagatgggattaagggtgcatggcaccacagccagctatacagggcacttttatctcagtgttttctcataaaacgtagcctgtgacattatttctagtcgatgtggttgggcctttgctctcattcttaccatctacaatgctgtgcacagtgctgagctccctgtgtctgtggcatccattaccagattgctgttagcagtacgtgaatccctgagcctgcacaggccggactggaaacttgctttcctcaagatgggttttcttcgtctgtgtgtgtgtgtgtgtgtgtgtctctgtgtgtgtgtctctgtgtgtgtctctgtgtgtgtatgtgtgcctgtctttctcttccttcttttcttgcgaggttaacggtttggactagtaaacagagaagtgagttccgtcagtatactgttctcatttgttcctctctcccgcctatttttttttatagggggattttggcagttgcttggagcatggcagatcctgagttgttgttaagctgtggaaaagatgctaagattctctgctctaaccctaacacaggagaggtaggaggaggggtgcttctcagcctgtcagcccttggaatatcttacttctacctgaataagaattttccacatggatattaagcacataattataattaaaaccattggaggaaggtgacagatattaatccatcagaactctgtcaggaacattacccaggctcatttcctttaatctttaaaattaatctttctctattggaacatagattctagctacagtcttcttttaaaaatcactatttttatttttgtgcattggtgtttttatgtgaattggtgctttgcatgtatgtgtgtgtgaggacgtcagatcccatagaactggagtcacacacagtcgggagccaacatgtaggggctgggatttgaacctgggtcctctggaagaacatggagtgctctgagccatctctccagccccaagccgtagccttatatcttttcctcttctctattaaagtaagtagaccaattattgcaggtgcttttgtagttgctctgctggaaaactaagacaaatgtgaatggctggggctggaattgtggctca

SEQ ID NO: 30260 - DNA, 1154 bp, Mus musculus
tcacctcagtgatgctggtctcttcttaatcaccgctaatttcttagctccagttaaccagcatcaatagttccagtaatgcaaaggtttaactttagtagttcttgtatcttgttaatcacagctgattcttcagaaccacagaaccttcacaatccaaaatagcagtggccctgaaaaaagtctttaattttacctctgaagtttcacaagccaggcctccatttttctgcaatgttctcaacattatcttccaagctcctacacaacatctcacagagctcttaacagcgaatggatcttctggcccaaagttccaaagtccttccacagtcctccccaaaacatggtcaggttgtcataggaataccccacttccggtaccaatttctgtcttagggtttctattcctgcacaaacatgaccaagaagtaagttgggaagggaagggtttattcagcttacacttccgcattgctgttcatcaccaaggaagtcaggactggaactcaagcaggtcagaaagcaggagctgatgcagaaagctatagagggatgttccttactggctggcttcccctggcttgctcagcctgctctctgactaagactaccagccaagactaccagtccagagatggttccacccacaaggggtccttcccccttgatcactgattgagaaaatgccttacagctggatctcatgggggcatttcctcaactgaagctcctttctctgtgataactccagctgtgtcaagttgacacaaagctagccagtacacagtctctacagcaaatccctctgagtttcagagatgccaggcattttgctgtagtttgagcttttattttccacagttgtttctcacagtggccctgtgggcagaacagtcaactctactgtagggttagcgctgtgcctcttgagcatctgactattatcagattctttgctagttctctcagcaccgttaatgatgtgccctactgtaactcattcacaaggttcctgttttaaagattccatcctttgcctcatagctagtatcttggaggttgactatcagctggcttctttaaagtgtccatttcacatttatgatttggattcagtatttgaatccaggactgagtataagagcatgcat

SEQ ID NO: 30261 - DNA, 1220 bp, Mus musculus
tggcttaccgttgtacgggtcagtcctatatgctgggacagccaggcaggaaggcatggtgctggcaccgttgcttcacatcctgctttgccagcagagagcaagactcactgcatgggcttttggtttccaacaaggccacacctcctaatccttcccggacagctcacctggggacagatcatgcgaatacatgaggggccatgtcagaccaccacacgggctaagtggtttcagaaacataatctgctgagattctcacaaaagggggtgctgcagctgaggagaaagcctgggagcatctcagtgagatgcctgtttaattgggtgcctgctgctgagggtctcctaggagagatgcaggggtcctgagagtccctctgacaagccctgtggctatactgctctgaattctggtaatgtgatacattgtaatactgacagatgggggactgcaaaaggcatttacttaaatgtcatagacctttaactaaaacagcaacgttaagagacattagagaacttggtgggcatggagtgctctgagctctttgctgtttccgctagtggctgcatatccgatgattaaactcttcactgctgttcacatactgagccgttgtgattattgaggaactaatgaggatatgcaagctttcctaaaggagatgcggcagccacaggcctcagcccctggcacacgatttaaaatacaatcttttttcaggaattgtgttctcggtgatgcctggaagagatgcgtgacgttggaagatgattacgaaatacaggaaaggtagagtcatttgttttgtatatattaaatattctgagtgatacagtctgggaaagattatgaagtaaagactggaatcctaaaggctttggtgaaatcttaattacctattttcggggtggcagagaacttttatttagacaatcattgtgtccttgttggtgtggaggtcagaggacgacttggaagtttctccaacccaggcctcctgtcttaacgacaggcctttgtgtgtgtgggtgttttgtctgcaccgtgtgcatacatggtgcctgagaaggctgtaagggggcatcagatcccctgccactgcagttggagagtgaagctgccatgtgtgtgctatgaatcggaccccagtcctcttaactcttaagcagtctgtcttagtcagggtttctattcctggacaaacatcatgacc

SEQ ID NO: 30262 - DNA, 1177 bp, Mus musculus
agcaggcgggacaaaagagcgatctcaggcctcatctcgtctcttttgtaggtcacggatggcgagggggcacaggagctctcgatgtgacctggcgctgtggatgtgatgcacagcagcttgagtgggactgctccgctgtcctcatgagagaacgctttttctgaagatgggaggtggctaatgaaagaaggtgaggtctctcgggcccttgctgtctccagtgcgatgggaactgcacgggtacggaaacttagggcccacagaactttgtttgagtttgggaatagggcatcgagggtggatagctttcaggactaggcgattttattggagcccagtgattaaaacctttgacttctttgtatccttcaaatgatacaaaattcaattccaacaagttttttttacctcctattttactgagaattgaagtcatcaaggaattaatttattcatgtttttccattatatatgcttttatcttatttggatgaaatcaacattttgctgggtttttccttttatttttatttttttaaataaaacgcagcccatgaacttctggggaatcgggtgctatggtacaagtgtttgcttgactgtcaagaatacaaggctgtgtgtttatccttaggtgaggtttttcacaattggcagtgagttaagtgaagttcagtctggtctcatgtaatcagctctcagcacatcggggtttttatcttgcagtgctgggactcaagcccaggatttgtgcatgatttcagtcactgcatcaccaacctacgcttgcctttagaacagatacaattttatcttactgagctgggcttgtctcctagagtccgttttcaacctgggggtgatctttctgaatgggtctcccatgaagctgggagtaaaggttcaggccagttttagagtagaggtctaaccccaccctgtaaaaacattcattttgtttttttagacaggtctcatgtaacccgggctagattagacttgctgtgtagcttggcatgactgttctattgatcatcttgcctccacctccccagtggtgtgtgttcctgccaagcccagttaatgtgctgaaggttgaaccttagggctctgggaacactaggctttaccagctgcaccctatctcttctccaaagaaactccattcacatta

SEQ ID NO: 30263 - DNA, 2880 bp, Mus musculus
ttttgtttgttctttttacatcatatgtagtgtttactaaaatgcctttgtgtcagaaatgatagtcaaaccaggacagtgctcctgggacaggagaggtgtaagtgggaggtgtaagtggtaagaaagtcacatctttatttagctggataacattgattgggaagtaagtcatttatgttaaaggtttttcctggtaattgcttttagatttgctccctgagaccaaaccctccgagtcttaggctctctcagagctgattcccttaggctggtgcagcatacaggaccagtagagttcccaggtcaaccttgatcacctgtgtttctctctcgaaactcattgcagattgccgtttacatttgtaactaaagaagtagctgaagccacgtgtaattgccttcttgcccaggcagagcaggcagacaagaaggggaaatcaaaggcggcagcagagcggatgatacttgaggaatttggacgatgtttgatgagcgtcatcaactctgcaggaaaagccaaaagtgacccctgtgccatgcactgctaactcttgcacaaaagactgaatggaactgtacagaaaatttaaggtgccgggacacttgattttctagaagatagcttaacaattactgtattttaattcagcctttgttttaagagatctgaaactataatattgaaagagaagaaattagtacatttaaaatcttagttaattctgcctatgccccttctaaatttttttctttaaaaatttttcttttatgtattatatatttttttaatttgcttgggtttcttaagaattagatgttctgtcctgattctattgacaaagaacattcataaattatagtgatatcatttataatgtatggtgttgtatgactttgttcagtagaaaaggccaaagtagcatgggtattacccattctttggttacagatccagagtattcacaggtagaatgtccgcataaccagattctaaatgaaatatatttaggagacattttgtttagagaaacaccatccttaaaaaaaaaaaatcagatttttagagtggattctggaatgctgtctgctgtctcgttgggagtatcagaaggggaaacaatccccaccacacttttcagtataatacaaacattatgctttctttaaagaaagcaaaatattaaggggcagtaattttcagaggacaggctgtgtctctgatgaggaatggctaacatggtctggggcgtcttcattttctctgaaggaggtggtatgttttataataattgtcaaagtgattatggctaattactaaaatatgagaatgaattacattaaacattttgtgtcatgatgacagaactcatacgcagtaagtctgaagtctggctcgctggagacgcgaggactcagagctgggaggttatgtgtggtggcgctttatgcacacacttctctgcagaccttctggactgagttcagtcagtgtgtgactcctacctggtttactgagataaacgcgcctcctagcagcttctagaactgcagccagctttttataaaagaagttttaatacaacattgtttaaaacagtgatttggtaagctgaagtatgtgtgctcttagactcgcaaaaacaacctctatattcttcagtaattagaaaccgtgtgaactcgggagcctactataataggacttgagtttatgacaagcagaaaactaggttggaattgaaacattttgtaaggtaccttaatccttggtaattattagcatatgattattgcccttcctacaaggactctagcattgtaagtagtaagtatgtatatatgttcatatgaacatgaaagatatagacaatagaaattaaccccaagaggattccgttactcatttaagtatcctccatttaaaatggttttataagatgacagtgcagtaactttaaatgtagataatgcaggcatccttagcacctcggtctagagtttttaagtaaactttgtacaaatgtaaattagtctaagaggacaaaataatatctaatcaagttatttttcaaaagactgcaataagtttttggtctaaacctaaactttgttcattttgtatatattatgtgttaattctaatagcaccattgtgatgtgtatttatatacagtgtgcacaaaatgtttgtgaattttttattataattgtagattatgtatgatggcattgcttaagattgttttgcttgtaagaatttgaaggtgcaatcaaagctacgagtttggatttttaagaagcctttaacctatcagcccctttccttctgtgtggttccaactgaacaactttttgtattaggcatttgcatcaaattgctgaacaaagttaatagccacattaaatcaccaatttcaaaagattatttggggagggtttggtctataatttttaagccctatttacatcctaaggtagaaagattatatttactagagctattcaaaaagtacacttttctatattgtaaaagcagggcagaagaataaatcatacagaaaataaacatttatactattctgtaaaaaaaagttttgcattttttctttagtttaacaataccagttttaaccatttgccatgcagggagccttttaagtcacctgattttcaagttcatttgacttctgaaaaaattttaaagatgacattgccaattccttaatgtgaattgcattgaaatgagactatgtctgcttttccactgctaaggcagaaatgcctctactttcttttagctacatgaagcactctctcgcgactgactactcttagttcttgtggctctgaagaggtcaaagcagcctgtggtcttat

SEQ ID NO: 30264 - DNA, 1154 bp, Mus musculus
acactgtgtgcatgcttggtgtttgtagcagtcagaagagggcattgagtcaccaggaactggatggagttccaaaatgttctgagccaccatgagagtgctagaaactgaaccctggtcctctgcaagaacaacaattgctcttaattgctgagccatctctctagacttatataatcttgaatagtttcttctttgatactttaaatggcagaggatttgaaaatctttccaaagaaaaattcctctataagaagctacttgattagacttgggccacatagtccatttgatctccgtgaagtggattcatctagaaacccctttactgtttagtggatgtttataagtagggtaatgccatttgtagataggtcattgatacattttgttatttacatttttcttgagtgtatttttaaaatctgctttaaagcctggtaacgggtttttccgcttttcttgcagcacctgggcatctctctagaagcggtgcgatcatggaggtggtgccggccgaggtgaatagtttgcttccagacgacataatggacactgctataacgttagtggatgaggatagtattgaggctgtaattgtgtcatccccaattcccatggagacagagctggaagaaattgtcaacataaattctaccggtgactctacagccacgcccatttccacggaaccaatcacagtgtacagtaaccacactaaccaagttgcagtgaataccacagtttctaaagcagattctaataccacagtgaaaccagcatttccaagtggccttcaaaaacttggtgctcagactcctgtgactatatcagccaatcagattattttaaacaaagtatcacagacatctgatcttaaacttggcaatcagacccttaaaccagatggacagaagttaatattaacaactttgggcaagtctggttcaccaattgttttagcactaccccatagccaactaccccaggctcagaaagttacagctcaggcccagccaggagatgctaagttaccaccgcagcaaattaaagtagttaccattggagggaggccagaggtgaaacctgtcattggtgtctcagcactgaccccaggaagccaactgattaatactacaactcagccctctgtg

SEQ ID NO: 30265 - DNA, 1443 bp, Mus musculus
gactgattcttcagtaatagttgtttgcatttttctgcatcggaagatagttaggatatagtaagggcttcctatagcttaagctctgaaactaaaacctgagctgtttcccctgaatagacttgctgtgctgcctgcagtccagatgtgtcctaatgtatctccgtgctcttccttcagatttacactgtagacatccacagagccgaggactgctgggacaagttcacctccaaccgcacagtaggaatgctcctgttcttagggattgtccttggaaacctgtgcaaagaaaagacggaagaagcaaaagatgctgaagctgttagagtgggaagtgagcagacgagctgagcttggcccctcaggaagcagaggcaggaaaactgtgaggtcaaggcatcgagcggcatagtaggatcctgtctcaagcacaccggctagagtggtagctcatgggaagtgtgggcaccatgcagtgtgcccaaggctctaggttctctcctagcaaataaactcatttgtacaactttcagggcttaagactacattgttaggcttggatgagcaatctgttaaagaagtaagaagcactcgggcagcgtgtactggactttactgcagctgctttcaaccagctccctgtcacagcacctgtcccagggacctggggttgggtaggcccctgtgttagcattctgcaaccttctgtccttgttccttctcatccaaagtttcaggagcttcaggaaacaacttgcataactcatctaatggcttttatgacatggccgtgtgctttattttattcctcactaagaatctccttgtgatctgtactcactgccaaagctgtaattcaagaagccattctgattctagatgttttagaaggatgttggcaaataaagttgttatttatatccatagacgcgactcttcattacagccctgacagaaattttgatgtgtgtttatttcttctttaccttggccagtcctggtctgtgggatggtaacatgctatataacaggttacctttcattgtgtgtctgtggaagcagccagaaaacctaagtgaggtcaagtcaccccccagcccacaagccagggtctcccagtcactcaggacgtgccaagtcgactgttgccccgccagcctctaagctcttacctccagactcacactgcctgcctcactgtcccacactgagcaggaccccctcgcccagggcctgtgggcttactgttcgttggccagagtgaaaattctcacagcaggccttcaaatatcactctctcaaagacgctttgaattttcaacaaatactgcctgcgtttcttttcattcgttttagatttatttttattttatgtgatgagtgttttacgtgcatgtacaaatgtgcaccgtgtatatggccctggtgcccatggaggtc

SEQ ID NO: 30266 - DNA, 1177 bp, Mus musculus
tatttcgccaccttgcctgtgtatgggagctggatgtgggcttgctgagctgagcggctatgtatctagatctggaagacactgttagtttggaggtggggctgggaatggtgtcacagcacttagcccctttacagccactttaaactatttaaatacaccgtgttagttcttgatgggacttcactctgttcataattgttcctaagagcctgcccttagcctttaacatgcttttgtctgcatgtatgtttgcgtaccagaggagggcagcagatcctttttctattacaggtggttgagagccaccttgtggttgctgggagttgaactcaggacctctgaaaatgcagccagtgctcttaacggctgggccatctctccagccctcactttaattttgaaataacatttatttgtatgtgtgaaggaaacaccgttcacgagaggaagtcagagtaaacctggaggaagcatttctctcctgttgtgtgggttccaggtcatcagacttggaggcgagtgccagccctgactgtctcaggagcccgtggagcatctgctaatcactgtttatgtgaacgactgacttggcatataactgaagggctctcttttcctgtgttgaggttacaaggacagcaaaccgcccaatcgctgctggagacatttcgaccttccagtccttcgtcttccttgggggacagctgaccttggcactgggcgttctcctgtgtttaaactactacaggtacatcagatgaggtttcacagttgtgtgtaaaatatctcctctgacatgtaaaatgtggggatagagggggattctctttattacaaatctgcttattgacccctgtgaagggcctgagagtcagcagggcacaggacctcagcacgctgtcagatctgcttccgagacaccgcagccaagagcagcctcgctctgaagtattgtagagtttgctctaggtactcctgataggacacagagcacatccctgggttctcaggtgtgtgtgcaacaatatgtgtgcatatactacgtggcctgttattgctgagtacctggaagcagaagtggttgggctcagttagcaaaaagtggaactgaatctttcccagagactataactagtcaaaatagcagaagagaaagccaagagggcccacatgg

SEQ ID NO: 30267 - DNA, 1160 bp, Mus musculus
acggactgctggggacgcacagccagatcagccctccttccccacgccatgggctctgtcacagcagcagaaggcaagacgggactaagcagatggagcacttacctcacttaaactcttcctttcttttttctgtgtggttttggttttgtttaggaacctggctgctgtatttgccatgcacttggagcattggtctggccgctgacccaggttgttttccagactggtacatgttatcactttttggcactggagctattctgatgcgtggagcaggctgtactattaatgacatgtgggaccgtgacttcgataaaaaggtagtttcaccctgggaaggaacagagaggcctctctcatttttttcagaacacccgatgacatcacacgagtaccattgaaatcctctgtgaaaggcaggcagttgaatagccaccgtcaagaagtgctgctcacttcccttccagcagaagagtggccacaggacaggagcgtgctggagttttacaagtagtttaaaatgtgggagacaagggtgaagaagttaaaggtaggaactgcagttagagactgacctgaaccttttcgtgtctaagaggtctgtctgtcatatcctgccttcagtcagattgtagtttaaatggacctcagcagcaggcacagcagtattggctccaccacagccccgtcctccatttactctacagctccagtacccaggcagcagtggcccagcactagtaagtggaaaattccagagcttcagtgggtatgctttacattatgtaccatccgagtgttaccacagagctcttcttctgaggtagtcttacaggtcctgttttagcctcagttttatagttagtctcttactgtgccacaaaagtataagcaattgtattgaacagtttgttccctcccccctcgtgtgtgtgtgtgtgtgtgtgtgtgtgtgtgtgtgtgtgtgtctgtctgggtctgggtctggaagcaggatggagtggaagatgccagaagccatgtgattaagcacctccatgctatgcagacattggggctgtttgattggccagcaaatgcaaacctgatttgcatgttcccatttcctgggttatttttcattctgcatatgaatgagatttcagattcatgttcaa

SEQ ID NO: 30268 - DNA, 1190 bp, Mus musculus
tttacttttctggctcgtcatagaaaaaacctggcatcttcaacttagaaaactgttttaaatgtagtaataacattctctgacgtgtaaaagcacctcatttattttcacaggtctttgtggaaagaaacagagggaaataactaaagccattaagagagctcagaaaatgggtaagcactcctgcacagctgagttgaactaatttaagattttgctcattgtctttgtcaagaactttaattatcgtgtctctagctgcatatgaatcaaaaaatggcctagtcggccatcagtggaaagagaggcccattggtcatgcaaaatttatatgcctcagtacaggggaacgccagggccaagaagtgggagtgggtgggtgggggagcgtgtgggggacttttgggatagcattggaaatgtaaatgaaatacccccccctcccaaaaaaagaactttaattatctctttacagggtttatgccagttacatacaaggatcctgcatatctcaaagaccctagagtttgtaacatcagataccgagaataaattttgtatttgtgaagttcctgccaataaacctctaagtggttgtcagcagactccaactaatttgagtggaaatgtctttcagtggattaggaacaatcggtcttctccccaccagtgagtgttctctggacaccgtgcttctgatggtaatgtgatattgtacatttcggtaatagtggttccttgtggttgtcacaacttacttgtatagtatagattatgggagaagagggcttctattagaattccaacccagcccagattctgtccttacagcaggatggtttagggggatggttctagaaaggcagagtgtttgtttgaatcctgtgtgaatggctgtggcattgaatttgcttggaagcattttggtgggttttttttttttgtgtacgtgtgcacaggagtttatgaaggccagagattgatatcaggtgtcttccgtaatgtgtctctaccgattataaagttcacttaggctagaccagatgattaacaagtcccgggcagcctcctacctctgcattgacagtgctgggctccatgtgagcaccactaagcccaggtttaaacagaacaaaactctgtgtgctttatgcacatgtatgtatgtgtgagtgtgcacatgtgtgcat

SEQ ID NO: 30269 - DNA, 1167 bp, Mus musculus
tccgtgcagctcaaggtgcagtgagtggctctggccctttgctcccctctcttgagcactggacacgcccagctggagcttgtgaagagctgtctcacttctgtaaaggtggctgctcagcgcttaaagctgggtttttgggagggagtgtgtgctcactgtgcaaacggtgtgtgtgaacggtgtgtgtgaacagtgtgtgaacgggtcttctctgcttcatcaccaggggtccgaatcccagcaaagtgctccagcagctgttagtgcttcaaccagaacagcagttaaatatctacagaaccctgaagattcatctcaccgagaaagggatcctgcagcccaccttgaaggtgtagctgcccttgaggacgacgggctgctgaggaggagctcacagaccagctctgactggagccgtgcactgagccagcctggggctaaaactcagtagatgcaggctttgcagatacaaaggtttctttttctgaatttacaattactgtgaatatttaacaaacacgtggtctaaggtgagtgcagcagtcgcccacccgtgaaagatcctgtacttttctaaaatgtattttccaatgttaagttctctgccctcactggccaggttccatgatttaggtagacttgcgttttaaagagtcaaacactatcaactgaggccctcgtagggtgttgacctttgccctggtgctgccctggcgtagccatagctgaatgcactggaggcaccttgggaatcgaggtctcggggtttcctcctctaatgatctcaagcatttctgaagggctgagttagattaaaaagaaagaaaaagagcgattgtccacttttctctctcttctttttgtttgtttgttcatggtactgggctagaacccagggtccggtccacaccaggcaggtgccccactcttgggctccgccttggctgggccgcctactttcagagtagcagtcatctgccaagtgttaacgccctggtgttaaggagtttcaaaatcagaagctagaggctggtgcttagaccactgttgatttgttgaaaaagaagttatcagaatccatttctgatgcaaaagagactcagagtgggtcctgcatggcgagcccagcacgaggctcctccaccagaaatacctcaccaggga

SEQ ID NO: 30270 - DNA, 1153 bp, Mus musculus
ggagatgctgcagaggatagtttggtaatgaaaagagtaaatattttgtttaagttagaaatcacccatatttccttcccactgtggatgcgctagggttctgaggaggagcccacaggcatcagtagcagtcctgagaacaccattgttggcccccaggtgactggtgaccctgcgctggattcagcccacgccctctgcatacaagccaggggagcgctgtcaccttaggagatcccctctcagtggctgatgtcagtgtcccctgcttttgtgtgtccccccgccccgccccagatgttgaccataaatgagttgcaggcacaaaagaaatggagggaagccttgtggtaggagcatgtccaggaacaggctgtctgcagaggtaaaggatggttgaggacatggtggcttctccttacccaccatgctctcatggcttgcgaggcagaattatggaagcattacttaatacacgtattaaaaatcaatattctaaacacaaaggatgaaactaggactatctggggttacaataaaagctcttctcaattagatcttttagagctgggtgtacattatgccatataaaaacaagcgagttctttaacaacaacactctagtaatgaacattttagcctactttttatagcgtgtacattaaagtggactatagcaaacaaccaccgtgagagcgactgtgaccagcgttccatttgcactggaacaggcgtcatccagtggagtgaagtggtggatgagtggcaaccaggaaggccctccacagcagagatccatcgatggaaaatcgacctttgaactgctgtctgacctggtagcttttgggatggtgatgtctgagaaccagggcgctctccctagtcttccttgtggattcacacagacagttgctgtccgagattaaaggctgcccccacttttgtccctttgcactttgaacagaggtcatggcgacacctggtctgatgagaagaaaggtcgagacagtgtggatatactgtacggggtgagagtttattatatgtgtctatcagccctcagcgctgtggatatatatactgtagagcttatgatatgtgtcaatcagtcctctgaatctttttactgaaactgggatagaaaaataaagat

SEQ ID NO: 30271 - DNA, 1112 bp, Mus musculus
ttgctatgaatataattacagtattttaatatttagttatttaatttgttctactagttggatacagaacacacacattcaagaggaggaaagctgtcgggctaagagaagtttatagaaaaatggctttggtgggattttttaaaaatgtgtgttatgtacataaatataaatatatatatatatatgaaatcaaaacaattaatctagattttaacattttcagatacttagcactaatactatgaacaattctaaaagccctgtgatttgatgaacaacatggggtcactaatggcccaagaaagaaaggacaggccttgacaccctcatggagggagatttcacgcaaaggacagtggctttggcttccccagctctccatctttagccctggtgacaggcacacttatgcactaaaatgcacatatatgcacatgtgtccagaaacaggcatgtggtacaacagtgaccttgtaccctacgggctgaaagcagcttcggaacaaacttgttctccctgataagcaggtctccaggagaaaccgtgaaggctgctttagtgccttatgcttcctaaatttcaaccttcctttctaggtttcagcctccagtctgtgatacatatcaaaatcgaacccaacacttccatttttaaacgctcaaatacacacgtgaataaaaggattgtcagcattaacgcttctcacctgaagagctttgctttgctttccttcctttcagtgttgcccacccctgattgtttctttagaaggatgccggtgtccctccattgcagaaactgcttttgcacagtagggagcggccctgctgcctctggacgctttgcaacagtgttactttacacttttggaaagcagcgccctcctgtggcccacgaccctcatttccccatacccaatggcagaggtgttcaagacttgaatagaggaatgtgtgtgtagccacttgaagcttgctccactgtctgtctaacctgacatgctgtgggatgaacgctcttaaactttccagcccataactagtagatggaaagcaaaccctcgctcactatggcatttcctctggcagctggtgctgtgggcaactgt

SEQ ID NO: 30272 - DNA, 1069 bp, Mus musculus
aatgcagcatcttgggtcagcagcatgagtgccaaccggcctggccttgggggctggcggttccagcatggtgccctctgccagcaaacttgcccgctctccagtccagcttcacagcactcagggtgcctcgcggggatggcctggaactaatttatgttccctcttccttaggtgcagtcggtttcagtcagaaatcaagcgcctgaaaatctcgtccccagtgcgtgtctgtcagaactgttactatagcttgcagcatgagaggggggcagaagatggacctcggaactgctgagatggagggactggcgagagaccacagcctaggaggctcttcacatcctgccgggactccagaggcactgaagcagtctccgtttacacggctcttcactgagtgttggaagtgctgagtgtaaaggaatcattggatcacggcttccgaggccagtgaccggcacgggtactgtgcagtgaacagcacaagaggaagtggctcccaggagcatctcagacctgagtctcccctagtgtagctgtctccaagaacaaaccccgtgctccccaactgtctttcttgcatctcatttttatagagctattcatccttatttggaaaaattaacaaaaacttaaaaaaaggcttctagaaaatggttgtaaatctgacttctttacaaggagctgtgtatattgtaaataggtataaaggcctttttttttctaaataaggacctaattgcctgtaacatgagacttcaaactaagccactaactcaatgaaccatctaaggtctgtctaacgtctcgcaattataaatatgggttgggttttttttttttaatcctcaaagacattatctgtactatttttttttcttgttcagaccaagcctgtgtgcctgatatcatttctttcaagttgcccacagtgtctccacttaaaataggctagtaaccaaaacgatgtagccctgctttaggggccagcgtgggagaagaggtctgctcctaaggtaacgtgtaaatagccaatggtctgaggctgtgtaccgctacagtgttg

SEQ ID NO: 30273 - DNA, 1194 bp, Mus musculus
tgtttccttttcccgcttggctcctcacagcatgcacgaaccaattatccctcgaggtgccaggcaaggccccagccaactcaagagaacctgcagcatctttgcatatgaagacatcaaggaggtgcataaaaggagatatctcctccaggtaagcggacgctggtacactgaacgcctcgcccctctggtccattggtaaatggaccagtgttgtgagaactgcagcacgcattgctgcctccaatcccaggacatacagagccttagagtgcttttgtgttttcacactcacagtttgagctctgcggccccctctcatgcgcaccccttgctctccaattcaagtgcacatttgtgtcttataaaaatttacatcctcatcacttcaggaacatagtttttagttactatttatcattccatttttaaagatttctttaattttgagcagaataggaaaaaaaattgactgtgtgccttaatatagagataactcatgagtctgagtattctccattcaagaaattcaagattgtagatatctacagtgaaaaagttagcatgtgttctccaatctgtttcatcgtttgtctttctccagcctatcgctgttgaagttttctctggagatggacggaactacctcctggcttttcaaaagggaattcggaataaagtctaccaaaggtcttgttcacggggaaatccttacatgctgctttgggaagagatggcagggcggccggtgggggtggcgggggagggtgggaggaccattgcaggctgaactagcttgagctagctgcttatgtcccagagcagtgaggtgagacctttgcagaagtattcctcccatttccgggcctctaactgctttcagaacaatgtcagctccgtgattaaatagcatttctccctcctggtaacttaggaaagatagtaaagacccatttagagcaataaattatcttaagtgagcgagaactacccaaggctatttcatcacaaagtcttaagagaattaaaatgtcaccttatagaagtaaataaatgaaataaaattaaaaacagaatggtgctttgatgggcccaagaaatggctcagtgataaagggccttggtaccaaagtccagtaagagaaaagtgtatgagagcaagggttccctctaggctccacacacgtgggtctg

SEQ ID NO: 30274 - DNA, 2238 bp, Mus musculus
gctttcaggaatagtgagaggtacccagtctgtgggtgtagttctagataaaccaaaggcttcgcaattgggccaaacgctcggtcacttgcttctgctaggaaagaccacttaatatctttttagcccaggactgttgcccttgggacaagagaagactggaaccacagggtagtttcaaaggaatctcattgagtgatgcagtttagtccgatattatctaaactctcatcttttggagttttgaatcactcattcacctgtttttaaaaaatatcttccggtgcaagtagtagtgtttaatgaaacagcctaaagagtatataatacagatggtatgaaccaggaattgatcattcgtctccatcttactgggtgagggtggatacattgtttcgtctttataaacctgtcatccagcaggtcttttgtaactccctgaatttcaaggcttttgcatatcagtgattaaaagcaagaggagatgaagaaaatgaacaatggatatggttttgagcaggttctaaataagcttgcttgctttatttatttatttatttatttatttatttattcataggcatgcatttcattgcgtctcaactcccccggtgtatcctgcgaaaaatgtcactgacctgaaacttcaggtgacaagctcacctctgcagagctctgatgctgtcattatccaccctggagccatgttagccatgcttgacctgctggcctctgtgggctcagtgacacagccagaagtaagctgcgtcttggtatctctctgtttagtgaatgaagggaccgtgtgtttacctgagtaaggaccgggaagaacatgcaatgtagctggcccgttacatccacaataggagatctccctctgagccaggccttccagatacccggtctagttttgagtatggttaatgttacctgtagggtaacagaaggtggttgcttctgctctgagactttgtttcctgagagtcgtgctcagtgctggcaatgcctcagaggtgtgatacagaaggaaacaccacagtgagcctgtgttgatccgttctgttgtggagcaccaagaagtttggggtgctttcatttggagtgaccatctttgttaaaaatgttatatggtttctaagccccaaagtgtcacaaatgtgaatgaccaacttgcttaaggctagttacctaccaccatgaaaacgactttacactccagatatggtggcacacagctataataccagcacttggaaggcaaaggaaggccattctctaagttcgaggccagcctggtctgcatattaagttcctggctacgtagtgaagccccgtcttaaaaagaaaagagaacttgacacctgcagtttctatgatgggaatatgttttcagataacatgtttcatgttagaaggggtgcttcctgtcggaagaacccgtgtcactaaggatgccccggtgacacacttctctttgttaactttagcatgctttggaccttcaacttgccgtggccaatattttacaatcgctagtgcacacggagaggaaccagcaggtcatgtgtgaagcgggtcttcatgcacggctgctgcagaggtgtggtgctgccctggctgacgaggaccactccctgcacccgcccctgcagcgcatgtttgaacggttagcctcccaggccttggagcccatggtgctgaggtgagttaacgcttctccatacttactctgtaacttagtaaaggcagctccgggagtccttgcgctctgttctgaccctgtggcgaaggcctgcaacctcagggtctcgggaagctgggacagggggatcacagatgcaaggctcgactggcggtgatagtctggaggaccgattgccgtgctttctcacgaggaacagagaatggagtctgacggtgtagctcagcgcaagagtgcttgcctagctagcatgcaggaagtcttggaaccagatcccaggaccacaaaaaaataacaacttgtctttcatgggcttagtagatatttaatgtggacaaaccacaaccaaagtaaacaaactatttagaagtggcacaactccatacctagctctcatgacttctgggcaggaggattgtgagatgagctaaggccagactggtgcaccatgatgactgataccttgactcaatgaatgaatgaatgaataaataaataaggtgattggtaccttgattctaaaaatgaatgaa

SEQ ID NO: 30275 - DNA, 1173 bp, Mus musculus
agaattgggtgttctagttcagtgttcatatttattctgaatggcatcagtttgtgttggtttggaattctgttctgacaggctttagatttgttcacattctatgaataacatagcaatcaatgtatctttgctatggttgatgtgcgtgatctagaaagtgctatgctgattatctgaaactgtgatctgttggtactttgtgcattcagaaggttttggagtcaccacttgtaggtccagaacttttcattatctcaggaggactctccactgactgggcagcagcaatcctcctcctcatgcctggcccctgccagcctctgttctactcttgtcgcagacatttcatgtgtgaccttaagacatctgtccctttacatatgcctcttccattcataaggctcacaaggtttatccgtgttactgtacgcatcaagcctctttttttttttttttaatttattttaaggacagaatgatactttgtcatgtgtgtttgctatattctgttgtagatttttctcttgatagagagttagttatatctactgtttggtgacatgaaagctgctctgagggtctcaccatctgtgtctgagtctgtgttcagggctttcaaaaagagcttgctgctggatcatacagggaccagtgttttaagaagtattgagctcatgtgccacgtgagtatgtggttgacagcaacacatgagtgtgtgtgtgtgtgtgagagagaggtgggagggagaaggagagaggggccatgtattcatttcctgatgtggtacatgcttggcccagggagtggcactattaggaaatgtggccttgttggagtaggtgtgtcactatgggtgtgggtttaagaccctcaccctagctgcctggaagccagtatgttcctgtttatcttcctaacaagatatagaaccctcagctcctccagcaccatgccgcctggatgccaccatgcttcctgctttgatgataatggacctgtaacctctgaacctgtaagcccaattaaatcttgtccttataagagttgccttgatcatggtgtctgttcacagcagtaaaaccctaactaagacacttgactatttcaagattgtgttgaccttcttgttggtgagttataagacttctctttgtctactagatattaaa

SEQ ID NO: 30276 - DNA, 1158 bp, Mus musculus
gaacccccatgtttagtagcgcagggtttagtgagacagaggtgtggctaacactttagctacgtctggagttaaggtgactgcttctaatttatacaatttagtttcgaaattcaaatttttgtgtatgaacatctgtgcatttaaaaatgctcagcctttgacatcatacataccagatttatcctaagttagaggcaggcaaagcatgatataaatatatgtagacttataagggccagagtggaaattctgtctaaattttgtcctgtttaaaacttgacgccttaaaaatgtgttgtgtgtgccacagttggaatgcacctacatcatttcctaagcatttcttttggctgaacttgcactgaaatgagagcgtagaatgctccatcagctgtacggtattttatgtctgcacgtcactgtatctgtagatggcatgctgctcagaagcacggatcgaggaaaacactggcgccctagcttgctgtttgcagttgcctggcttcctgctccttccacttctacttatctgatagctacttgggcctggccgctgagaactggccgaaccagataatctgcacccaaagcctgtgtaagagaagaagaggaactcaggaaggaagggagcaaaagatagagaggcctttggccaaagggaaagcatgaattaaccaataaatagggtagaatgtgcaccatcgttgatgagcaagaagattgtggttgaatccattttatatcctaaaagtaagaaagtgaacgtgtgtggctaaatgtggactgctattgcacctacgcgtaattgctaagcacacagtggggaatccatttggtatcatcatgaaaattgaatgaagaagtcttggaactgtaatattgaatgagagtattaagtcttataagacaagacctgcttgatgtcactgacttccattcttgagttgggcctgttacctagatgttctattttgtttgtatgaggcagggagggtctcatgtagtcaaagctagcctccagttgctgagtagctgaggaaggccatgaactcttgctaagcctctgcctcccaagctgctgttcacagtggttgtggttcactgggtctcactgtgggatgaccctgtgctctgtaaacggaccccagtatagtt

SEQ ID NO: 30277 - DNA, 1116 bp, Mus musculus
ctggtaattgaaagtcaaattggtcctagtctttggaatggttgagacagagactagagtagagcctgcagaaaacaagtgaacaaacaaacaaaacaaaacaaaacaaaacaagctaacaacaaaaaaaccaaccaaccaaccaaccaaccaaccaaaccctccagaagtttgcttctaatgacttagctctgaacagggttagggtagtgaaggaggaacagatagcaacaatgtaacaatgtaacagagctaggagcggggaggaggagactctcacagcaggatgcctgtccaggttgccattcttttctgtaaagtgcgggttcagggtaagatcaaccctgagttaatcagtgaccaccctttggcatcacgagactgcccagagtgctgacatttcccattttcactggggagctggtgctcccagacagaactaagctctgcaatgcacttgcttccttgcggaatttctaggaggatgtgagaaagggctgggggcctacgaatgtggcagctctggaagtgaacctgcattgtggagagacaggaagcgaggggaaggcatggttgttaggccgctccatggtaagtgtgagtgagctttggtgctcgcacagtgcaagacttttggttccacttggcagagaaagggacccacatgggaattcggaggcaaacacatggcgcttaagcaggaacaagagctgctctggggtgttattagcaggagttacttagtcattattgagacaaagttactgctttcctgcctcagcctccaggtgttgattacaggcctgtgtttccacatggaagggtgagggggtgggggatgggcagcataactttttcggagtccctgacattaaggttgctttgctgaaaagagtgagttgtagcaaccctgtggagaatagggatacagagacgtgatagatacatggctagtagccttgtggttttttctttgtgcactgagggccattcccaaagaagcagaaatcaaagctgcacacccttcctagaaatggttagaatatctccttggtaaccccgtttttttcttgttgttccattactgcttacacttaaaaaagagacatagccctg

SEQ ID NO: 30278 - DNA, 1225 bp, Mus musculus
cccaacaaaaaaagaaaaacaaaacccttgcgtcgagacagcagattccaggctggcctctatcaagcaggtttagatcagttttcactgtcaggatgtaaagcaagtaaaaataacaaaacaatgaaaaatgtacttatttacaggaaaatgggatgtggtattagtgtagagtctaggagaaagactatagtctgttagtgtatagatctagtcaaagtaaatccctctttaaataaaactgtcatcatgggaccctgctgtgtaagaattagcttgatatgcatttaatgtttaaaaaaaatctgtatttcattaggtttgagaactaaaactttgagcagttctgcctcaagcaactagaaatacaggtttttaaatagtttctcttttccttagttgaaatctattcatgtaaaaatatgcttctcacaaaaatttctctacaaatgtgctatgagttaaggaacatgaggctttgaagtaacttggaaagacatgaaagaaagttaaaccgtagtgtaatattccaggatcagattctgtactctgaggatgctgaactccacaagtcttcactgtttacctctggtgtcctaaatatcaccaaggtgctgcattcagtggggtcttagaatttctagaaattatcctcagaatgtagcctacatcggggctcccccacccccatttgatctggaaccacaaaagatggtaaacaactgggtatcgtagtttaaaaagagtaaatatcctacctgggtatggtgactcatacctgttggccaggtactgggaggctgagaagagcgtgaacgtctaagtcttgtagatgcaggcaagtctgaggaaaaaaaattagtttgtgtactttccacctgtctctgtctaatgcttgtgatggagagtgtatcagagtaccacggaaagatggagaggatcccaggatagcatgcatgtaaagtattcatccgtgtattctcattcagacacggggaagatgctgatcccattgtacagatggggaattaggcaactttagggaaagtctaggacccagattgcctaagtttagagccagtgatgatcaatgttttaggataccaattagatgtgaagaccggaatggcatggcattttggagtcatgggctttcagtgcagagggctcagtgacgggcttgctggggtgacccaggtatgcacacagctctgcagccacaccc

SEQ ID NO: 30279 - DNA, 1175 bp, Mus musculus
gtacactttaccttctctcaatattttcccataattcttgttctaaaataagcaggaagtgaccgtctcaccatacttagagacgagatggaaggagaaaattcacttcaactaaaaataaccagtgtcactgagacgctgagaaacagagtgagaaacagagtaggaaaaggttgataatgccttccttagaagagcttttaagagagcggaagggttgtgtgcccgaaggttagcccagtaacctctccagtgcttataccctctctacatacatacatacatacgtacatacatacatactacatgtctcagatctctgaggcacctggattcttttgacatttagataacaaacacactagtttggagtagattacaaggggacacttgtagtacacaataccaaaatgtcaccatgggggcctcataaggcctttagaaaaagattcaggactcctaatgaaaaatgtagggaaggctctctaggctagttaattgataaatttaaaactttgagaataaatagacagtccctggtagacaggaagggaaagaaggtttggtgcagacctcctaagtcgggaaggatgtgggatgctggggaacagagaagagggtgatcatagggtgagtggaaacggaaaggtggaggccaaggcaaggggcttcatgcagtgtgaatcattagtcctggaagaaacagagaattgaggttgttaaaagctaaaatggtctatcgggagaccaggaatgaattggaagagcttagaaggtgtgaattagtttcctgccactgctattataaattatcaaaaatttactcgttaagtaaacctcagcttatcaccgtgcagctctagaggacagaagccttaaacttggtgctgtggaaactgcccgccttctggggctctgggggagggcagcttctacccttggccagcttttagcatccccacccaccccattcactcccatccccaacagtcctgaatacacggaccttattccatcttccaaatcatcagggtaactttgtgtctcctcctcctccctcttcttctagccctacacctctgctttgtgatgctttggtcaaactaaacaaactaaactaggcaggattcccaaccccaagcccttagtttaagtatgtcttctaagtccccttc

SEQ ID NO: 30280 - DNA, 1303 bp, Mus musculus
tatcctaaatcattccgtaggtaattgttgttctacaaacgttgctaccattagcgacttgacttcattttaaaaccacatcatttccctttgacgacagaaatactactccgtaaatgtaatatatgtaagcatcacttgtgtcttaggtattgtgatgcagtatagctcagcggctgagttattgcatggagtgtctctggcttgggttccacctcagtatgtgttcagcggccatgtttccacccttggcatccctgaggtcacctgtctcccatcctccactgcgtccgtcacttggggagctggcagcacttccgttctcagcagtgggttacatgctagctgattctctaaagattctgcgcctacatgatagattcttatcattccaggaagaagctccacttcagacgcactagacacacacgaggctccactctctcagcagacctttcttaacaaagggcttagtaagtctatgggatttctgtccatcagagacacacgagatgaggaagactatctcaaggatactccatctgataataattccaggcatgaagattctgagactttctcttccccttaccagttcaaaactagtactccacagatggatgcactctccaagaagaagacatgggcttcctccatggacttgctctgtgcagctaacagagacatttctggagagacgggcaggtaccaacgctgtgaccctgagacagtgacaggacggacgtccatcactcctagaaaaaaagaaggaaggtactctgatggaagcattgccttggatatctttggccctcagaaggtggagccggtgatccacacccgagaactgccgacctccaccgcggtatcaagcgctttggaccgaattcgagagagacaaaagaaacttcaggttctgagagaagccatgaatgtagaaggttagtgattctctgtttgtctgagagataaatgaattaaaatattaaaccatttcagcagtctaatttccatggccatctgggtcgcattgactcctgcccacttctgttcactctctgattaaaactcttatcagagtgctacagaaccctgcggcaggatgctcccaggcacctctctgcacttttaaatctgagctcttcaaggatctggcagctttgagtatgttctgcctctttggagactcctggtgctgagaagctgtgggtgagatctaacccatggattgagcaagctatgcaccagctggcctctagaccgctagctagaaggaccaggcgcacgggtgtgaggataggca

SEQ ID NO: 30281 - DNA, 1327 bp, Mus musculus
ttagccttcggtaatgtgtgtccatggcctgccctcagcaggggaagtgggttaacattgcgttccatattaagttgagggggtttttcctcactgacgttacataataacttattaattattcaaataatgtaaatataatcatatcaacttattattgctctgcttagatttgttgccgagtctgctgtctctgtttttttagactgcaaaaggcgatgagctatcaagtcggatccagaccatgctgggtgactatgaggagatgaaggagttcctgagcagcaagtcccacccccaccgcctggatggctctgaagacaggcccgggaagcccagatatcccttaggtcatgacagggggaacggggctgcatccagctccctccgcacacatgtctaccaccagcctatccacacttctgctcccggatcacgtcctgtcggtaacattagccacagtccaaagatggcacagccaaggatggagccaagtctccacaccaaaatctatgatggcccacgtctgactcaagaccacctcagtcagggacattgttccagaaagtgtgaccgaagagctgaaggagactctgctcccgagaggaagctctcgcccttgatctcctctttgccatccccggtgccccctctatcacctgtacattccaggctgcagggaaccagcaaggctcacagcagtggcgttagcagtaaaagctgctgtgtggccaagtcttccaaggacttggtggcgaaggcccaagataaagagactcctcatgacggtttggtggcagttaccagccttggatcagcccctcctcagccaccttgccagacatttccaccccctcctctcccctcaaaaagtgctgcaatgcagcagaagcccacggcatatgtccgtcccatggacggtcaggatcaggctcccagtgagtcccccgagctgaagctgccactggaggactatggtcagcaaagctttgagaaaccagaccttaaagtgcctgccaaagccaagctcaccagactaaggatgccctctcagtcggtggaggtaagtgggatttcgtgagggtttttttctcttttcctttttaatgtatattgtgtgtatgcctgcccatcctgtgtatgcatggccagaagagggcgtttatcctctaaaactagacttacacattgttgtaactgtgtagatgctaagaattaagcccaactcctctggaaaatcagccagctctcaaggctctttgttttttcaagacagggtttctctctgtagccttggctgtcctggacctctcactctgtataccag

SEQ ID NO: 30282 - DNA, 1121 bp, Mus musculus
agagtgtgttggatgaggcgcacagagtgtggtggggataccatctctgactatctgtgttatcgttttaatttgatcccgtgcacgtatttactcgagtttgacctggattctgttgcagaattcttcgctcagctcagcacaaaagtgcgtgtgttggccctcaacagcagcctggtggacctggtgcactacacaagacagggcctgcagcggctaaaacagtcacccaaaggcccctaacgtaggccggacctactcctgcctcggagtgtctctgcaccattggaagccatgatccagtgcagacaacgactgtcagatcggaatgtcagtactcaacaagagaagcacccgagagatggccgggatgcttgtccacttaaactcacaacagctgtgtggtcatcgctcagcgctggtcatctgagcagatgctgcaagatggccttgcctttgccaaccggaggacaagtacaacggagccccactggcgtatgaatggtctagaaacatttctggtttttttctgtttgtttgggcgataggataaaaattgcaaatgagaggaaaatttcagcaaactcttgtcatctcagaagccatcctagtttgcatccggaaggaattttttttttaaataataataatttctggtgaagggctttaaagattttgttttcttttcaagttttaaagaatacattgtttgatacattctgatggccatctgtggaacacaccttgtgaaggactccattgcactccccttactgcagggaaggggctctgatgacagagtactgatatttacagaattgaaggtgacaaccccactccccagtgcctagagtgctgcacattgtctagctctggtctctctggctgtcctgagaagaatccctagtcagtcctatgggggagtggcagcatttggatgcgggttctatctcacagtcttccccacaaccctagaggcctaacacttcctcctgacacacgccaccaaagggactggctaagcagcattgaccttgggcgaacacaggagcctcatgttgactttgggctgtaggcagatgcagttcatcatctgtctgctggagctggagtcccgggca

SEQ ID NO: 30283 - DNA, 1072 bp, Mus musculus
caaaactcagctttctatccaggatatccttggctatccaggggacattagctcctggagaggatgtggagtttgggggggggggcaggattaacttcaactttaaaaaacaccccactatcatacaccttcagtccagaccatcttctaaggtatcgtgacttgatgaggttgaagaagatctgtgaccttcccaggctacaccccacccacagtagaccaggttcacttagatgggaagtgaagaatacactcagaattcacacctgcccgtaaacacaggcctttccttgagacttcaaggttactactggaatactctcaagtgtttttaaaaagccagttctttttaatcccttctagaaagaaagtagaatttgcacatgttcaccatggaggtgtgttacggctccccctgcctctctttcctgccagccatgcttgtctgtgtgcatttggagattagtggagatgggagacccatctttccttagtgatgatgtctgtggtccttgtggtaacatcaggactttcttggtaccttggttaaatctacacagggtctctaggtgagtgcgataccaggtttttcagggcaaactgtctgtgatactccttggtcttctcagccttctctcctggtttgaatgaagccagaaaatggctaccttgtacatatctgagtatagaccaagacggtgatccagctaagcccttttctttattgatattctgaagccaagccatgtctgactgagtcgaagtgtatggtaggtggtccctagcacagtggggcttgtgggctcatcaggatcttttctcccacagccctgcatcccttgcagcctgttggttgtaaaatggctatgatccttgtgagaggttctggcctactgaagttttgccagagcatgtgtacatcctgccagcagatcactgtgccccttgcctggacagaatcagccagtgtaggaagaacaggctgcctcattctttaatgggtgggttttctcctcagttttatttgtaccttgaaaaccaatgcagttggacaggatccgtttgtgccagt

SEQ ID NO: 30284 - DNA, 2070 bp, Mus musculus
attttataccatctgcacagttcactgtgtgcttaaacttaccagaggcaaattttcccctgaggtgattattttgggaggactataacattagcccctttgaatatctgatgttcttaaaaccatggaagagcatccaccttatgggggggggcagcatttaatgaatgaatcttccatttgccactacaaagggtgtgtgtggcccatctgtctgggacacaaagtagaggaacacaataatgttttctcttttggaaaaaattaaaattagatacatgtaaaaaaccctgttactaaaacaggttgcccttggttaaggtgcctagagggcagaccacatggcagtagggaggagcaggagggcccagcaagtgcttgctaatggtcccttacaaagtgacatttattttgtagaggttctgacaaatgtctatccattccctggaccaccaccacccagcctcatctgtaggaagtttcaaacgggctcttccccatcttaattgaaaatgtgcctttactatgttgatgttagggacaggaccttaagtcctacgattcctgtttggtaacttataaaaggacttgtgctcttgagctgtggtctctgatgcagaagatgagagattcagctagacgtatttgtgcctttgctgaccaaacataaattctgaagttacgctgtttgttttgctgtggctttgagtgggttcatgggttttatatgtttcctttcctgctttgtgaaattcgagatgagttgggcttaaaaaatattatatatatctaagatctttccatacctcttacagattctttttcttcttaatgacttatttcccccaacactacgaaatgtctttgaaaatttaccacttcatctgttaccttcttcatcaatggttagtatttaaatcgcctcagaatgttttaggggctcctgtctaaaacacagaagtgtaggtttttctcattgaagaatgagctatggagatgcgaggatcaattttgatgcccccctccccctgcctctttcccctggttttggctcatttggaactactgggcaagaggacttttcctgtggaagggaagtgtaaggacagacgggcatgtgttgggattttgggatttctgccaggcgatcctccatatgcagtccagtttcccacttactgagagcagctgtctggtagccgtgcctcttactgatgcattgacaagcaccgcatcaccacatttctttgagcgactgtaaaatttcctggttccttgggggtgaatcacactctgttctgttccgctgtgcgtcagacatcagcagttactgtggtgggcagagaagtgcctctttccctacctaagagggagccagaggacaggaaggaagcgtagagctctctgcaagcctgtatattgctatatttgtccccataggacaccggattgaggctggcggcaggcaagccgggctgcactgttgagctggggcggggggaggggggcagaggctgacctaaggaagatgaactcactttgcttagatgttttagcaatgctcagtacaggcagtattacgtttgcctttcattcaggccatgacatgtattgctaagaacactgcacatctcatgatatcgcgggtacactgttcgtggtggggtgtgtccatgtgtgtcccgaattttaatttttttctgaatgtgatcatgctttggatgatacctgagcagggttgccttttttttttaatttattaccattatatattatattatatattatatattttctttcttaaaatgttagaagtcaaatcttggtattaaaattgctttaaaaaggagtatgttgtcaaggtgataatgagaatcactggtctgcctttaatgagtttttctttatcatggaataatgtgccagctctgatcagcacagtggttttgtgtgcaggctggggaagcagccaggctcccggtgaagatgcgcagtgcaaatacggggagcaccacagatgtaaaaatcagcatcagcagtggaacggcacccctggggcttctgtgaatg

SEQ ID NO: 30285 - DNA, 1239 bp, Mus musculus
cccagccacctcaccagcccttggtattctgctttgttgtgttgtgttgagacaggatctcctgtcaccctggcaggcatcacacttactatccaaaaaataatgtggagttacaggtatcagggttcctcagatgaagatcatattgcctcagctgaagttaactactggtgcctcataggaagaggtcagggatgctataaaacctcccactgctatagggcagccctctgcagcaagaattacctggattggactgctgccataccaggtgcaccctgccatgtgcccctcacccaagctccttgtgtgtttacacctcacagttacagtcatgccagaaatacagagagcatcactagagacaggactgccaacttccacaatgtctcaatacagttttctttacaggttggttggttttgtgtgtatgcatgcaagtgtccacggaggccagagagggcatcagatctcactgagccagacttacaggtgtttattaatgggttaccaggaattaaaccccaatcctctgcagtagcagcaagttcattcgaccactgagccatccctccagccccccacattcttgagtttctaattggttttacgaacctcctttattggctgttaatttgatactgtatgaagagaaattgaaacaggtatgacaatactcctgaccttagtggaaatgcatgtagtgtttctctcaactattatactaattatgactgaggcttattattaccttgttaagaaaatagctctctcaatttctgctttctttactgattttaagattagtgttactatactaatttttgttttgttttattttgttttgttttgttttgttttgttttgagacagagtttctctgtgtagccctggctgtcctggaactcactctgcagaccaagctggcctcgaactcagaaatctgcctgcctctgcctcccaagtgctgggattaaagacatgtgccaccactgcctggccactaattttcgtctataataaattgaactatattttgattattgaaacttatataaaggaaagattgttgattacatgattcagtaattcagcttcttgtaaatttttattaatgatttgaaatgtaacttgcaacatcctgagatgacagagcaaataaaatcatgtcatcaaaatcaggactcagaaagcagtaagcctggagatacagctctgtctgtatacagtgcttgccaa

SEQ ID NO: 30286 - DNA, 1230 bp, Mus musculus
aagatggaatgcgtctaacgtagaacctcaaaggacttaattcagtaaaataacctttgatttttgccgagtccacaaagaaagtttgtagacctacctttatagcttacttttgaagccagtgcttctgaggttaggccttttcgttgtttttgctctgaaaggtgtaatttcactgatgcagctaagtgactcaggcagtgttttgtgtaagctacagggtttctccagagatgaccagtgtggctccgtatgttgtactaatgattataatcaacaataacaccttttatctttgtgttttgttgttttttttttaatatttcagcagactgtatcgtgacattgaaggaattttgaaagatgcttcaagcttagtagccacatctattgttggtcttctcacccttaaaaagagaataaatgggatgtttcagaagagagctgtataaaaagaagagtattgcaaatggcttcagaatctaccaatgggaaacaagctaggagtcacgtgacaaaggggcggcgtcagtaccagcaccagcaccaacagcagcagcaacagcagcagcaagtgaggagcaggtcctctgtcagtgagtgtgatggcgacgactccttcatcttcgaagccaacgaggcctggaaggactttcacggctctctcctgggcttctatgaaaacggggagctctgcgacgtcaccctgaaggtgagaccgagctttcctttcccagctcctttggtgtactatgaaaaatgaggctttctgcacttacacaaacaaacgttaagtgtcatgtgtatttgttatgctaggatcactttaatgtcaatctcctgtgaatgtctccggtatagcccgagttagcctcagactcacgttctgcctcacgtctcctgagtgttagggttacaggcatgtgctgcaccataccatattttttattgaagatgtaggcacatcattacactaatttactgcggttctttctttttttttaattgaaaacattgtattctaatcacgattttcactccccccacaccccacccaaccagctccatacccttccccctctctctccctctctctcaaacaaacaaacaaacatgcaagcaaaaatacaaaagcccaacctgggggacaaaaaacaaaactatgagacacacacatatcacacacacatcacacacacacaaaaaccacacacacaaaccccacaaaat

SEQ ID NO: 30287 - DNA, 1134 bp, Mus musculus
atgtttttaatgttttctctgtatcttgtttcttcactgtctcctcttgaagctgtgaccattgtcatgaaagccagtttcatgtcctagacccaaacagccctaaggaagttgcgcctatggaaaaggctggggggggggggggacgacggtgggacggaggggtgggggagacggggggggggggggggggacaggacgggacacgacgacggggacgatgacgattgatttcgtgatgataatttccccagattctgtggctcatcaccaggttttcagagcttgtactgtcggttttcatttacagtgtctgtaactgcactttgagtttgtataattcacacttcctgttctaccccatataaaattagaaaccttaacctctcacggtggaatgaaggactgagtgtagtgtcatttcacagcggagtcatgtgctctgtaacgttccattccgtggatcagcgctatttcctgagataccagcccaagggagcttggaggaaaagcgtctgtgggattgcagtctgcgtactggaaaacacgcggacagatggacagacagaaataataaatggaccaaatctcacgctcagtgtctccatctgctgcagagaccatggcttgacctttaaataaaaggaaaatcaatgactcgataaagtatctgtctctgtccctctgtctttctctcgtgcgcatgcgcctccaatgtatgagatgtgaagttcaatgaggtgggacttcacattgaaaatgtagattttttttttttaagtataatttccgttttattttttccagggtatttttccttctgcccttatgaaaccacctctttacatgggctttggtggaggtcgtggtgcagcactagcaggtctaaaacgtggtgggggtgctccgttcttccgggcttcacaggatcgattcctgccgaccttgctatgaatggcacagctcacgcagtcatgcaccttggcaaagagcttgggaagcacgtaagcgtcgaagacgcttgcctcagatatgcccctgacagcagcggcttctacaatgttccagcaatgaacttctcaaaggtcttatccttgggcacgcacccggcgcagcgaactgactacacatggc

SEQ ID NO: 30288 - DNA, 1148 bp, Mus musculus
catctgtcctacctcacacttgctcccagcctcttagggccttgggcctgccttgtggatgcagggcgcatgcaaatgaagcagcagggttttgagagtctctcaatgagatgacagcaaacagcttgccttagaggtcagaggccttggataccctggagctggagttataggtggttgtgagctgtgtggcttaggtgttgggaatcacacttgggtcctctggaagagcagtacacacatgcaatcgtcattgccgtgttattttctgatttttacagggttttgaaattgacaaatgtttctggatctttgaactaggttctttaattcatatgcttttggaatgtctataagatgtttatcttttttttttttcctttccttagaaacacatttccaacctgtgggttccaccttaacgccaacatcatgtctggttctaatggtgccaaagagaattcccacaacaaggcccggacttctccttacccaggttcaaaagtcgagcgaagtcaggttccgaatgagaaggtgggctggctcgttgagtggcaggactacaacccagtggagtacaccgcggtctctgtcctggctggaccccagtgggcggaccctcagatcaggtgagcagacttacggaaagccagggtttttaagttatcatttgatatttgaaaaaaatcacgtcaatccatgctgggtgttgttgcaagtgagtttctgcttttgcttgaacttgtccaaactgaccagtccatgcttgcttattcttcgccaagttttgtgaggacttcccctaatgggcaaatctatttggaatcgccgctgtttgttttggagtaataacaactggtggtatctggttttttttgcatgttctttttgggttaacagttgtgcacctcttgtttctggcagagctaggcctggtattcgaggttgtggaaacatttgtcagactcttttccagatgaccataatccaaggatgagcttgtgagcatggaaagatgggcaagagagaggagggcagtgctttgattctgtccctgcgagagcttggctgcttcctattttatgattatattctctttccagctttgccgagctgtaatcacaaaaattattatgtatgtgcagctc

SEQ ID NO: 30289 - DNA, 1178 bp, Mus musculus
gatcttccggagtacaaaacagagccactgtggcccggccaacctaagctaccgaatacaaaggcaaaagggagggtctgaaagttctgccgagacagcagttttctagatttaagtaagtctgagagaatcaaattgtgtatccatgtggcctttatctgtaacttagataggagaatccatacctttcatccccattgatgtttttctactaattcagtaactataaacaaagtctctgtgagggtgatctactcttcctttccttatggatccctgatgctcttccgggattctaaatgcagtctataaatgaaaagggtagttaatgacatcgttcatcagtaatgctttgtgtgtgtttccttttcttccttttttttttttttaaccacaaaaccagaggaggaagtgtaggagcaggtgggccgggtagtggcaaaaacctcatgacacatcactccacctcctgattggtggagactgtctggaccagcatttaaattctgggaggtctgagccaccagcagctcacactgaagaagcatccttgcttgggtttgcagtcttctgcggcaggcattctcggaggaaaccagccaaggtaagcctgcagtggcccatgaggctgcagttctcctggctgaattctgagggtgagtccagagaacattctttcaacagtcgtatttgttagtcagactcgtgctgttctggtctttttgaataagctggtcaggtacattgcaggtttcccggtattttcaaagccagttggatgtagaagttaaaataaatctagttggtcctctaaaggagagagagagatctgctagtaatctctctctctctttctctctttctctccctctctctcttcctctctctccctctctccctcctctctctctccctcctctctcttcctctctctctccctcctctctctctctctccctctctccctctctccctctctctcctgtcacacacacattgtaaagttctatgtatctttggaacaaatgtctgcatcattttaaagtggctggatgactgtggagaccagtaaaggaggatcctctatattaatataaaccagatacagttatttttagaaaactgtctcacttcaaaagagaaccttccttaatttctcgcttctgcacttggctttt

SEQ ID NO: 30290 - DNA, 1461 bp, Mus musculus
ctcttgttcctgtctgtttatataattcttcaatttgttcttgattcagtatcctgatgccacagatgaggacctcacctctcacatgaagagcggtgagtctaaggagtccctcgatgtcatccctgttgcccagcttctgagcatgccctctgatcaggacaacaacggaaagggcagccatgagtcaagtcagctggatgaaccaagtctggaaacacacagacttgagcattccaaagagagccaggagagtgccgatcagtcggatgtgatcgatagtcaagcaagttccaaagccagcctggaacatcagagccacaagtttcacagccacaaggacaagctagtcctagaccctaagagtaaggaagatgataggtatctgaaattccgaatttctcatgaattagagagttcatcttctgaggtcaactaaagaagaggcaaaaacacagttccttactttgcatttagtaaaaacaagaaaaagtgttagtgagggttaagcaggaatactaactgctcatttctcagttcagtggatatatgtatgtagagaaagagaggtaatattttgggctcttagcttagtctgttgtttcatgcaaacaccgttgtaaccaaaagcttctgcactttgcttctgttcttcctgtacaagaaatgcaaacggccactgcattttaatgattgttattcttttatgaataaaatgtatgtagaaacaagcaaatttactgaaacaagcagaattaaaagagaaactgtaacagtctatatcactatacccttttagttttataattagcatatattttgttgtgattattttttttgttggtgtgaataaatcttgtaacgaatgtaaggagtctggtggtgtcaattattctttattagtttctcaaaattattttgtaatgtctaaaatataaccatttcaatggacatgcccagtttaattaaagccatttagggttttaatggtcagaggaacacagattacccgggagttgacagcagccagaacctacaaggctccctcaggaaatattctcacctaagtatgacatatactaattaatatatgagcgagcaaaagcttgaaacttgaatggaattagaagttgattgtttatgttttctatcatctttgctcagtaaatgtgtggctttcttgccctaatagaaccttgtgtctgtcttctagctattctagtaattcttaggtaagaatgtgtgcgtgcttctgtgtgtgtgtgtgtgtgtgtgtgtgtgtgtgtgtgtgtgtgtgtggtgtgtgtgtttcaattgaaaaccaacgttctcagtttcatccaaatatgaactttcagaaatattgtagtgccacatgtgactttagtctttagaactagatttcccttttagaaatcatggaaacaatctaaatatccttcaactgacaaatgaataatg

SEQ ID NO: 30291 - DNA, 1208 bp, Mus musculus
acctcttggaagggaatattgggatccaggtcattcctcccatctcctttgctcctcttccctcccgcccaccttgtgctcaccgtgggtagccttgttccaccacctgtggaagctccagtgacattcacactcacaagtctgaatgcacagagcaagtaaaccacagactgaacggacgttctgtgactgtgatccaaaataaccttttcacccttttgtcttacctcaggcattttgtcacagcactggaaaattaaccagcacaaacctcctttggctgtataagacatccatcgctatgactaatcgccctctaaagacccccacctccttttattatcatgtgacagacagacagggatttttattatcatgtgacagacagggattttggtgtatgaacttggaaaacgtcacacggtaaatgccatgtgctattagtgctacattcatgtttatgtttcaatcatattatgttaatcctattaatatgattaattgtattaatgaaagatatcaattattttttgatccaccataattattctttgttcatctccgccttagcttgacgatgtgtttgttgagaacaggggggctgtagcaaactcgaaattgtagagaaaatacttcttgagaatccagtgtgcatgagacacatatctaggagcaagacacgatctctgaaatgggcaaaatctagtccttgtgtgttaagcaacaactgaagcttaagaatcttttgtcatagagctggacctttcctggctctttggaatgggggtgagagttgtttgcttgccttttgggttattttttttccaactagaagacaactgggcactgaagaatatgttccttttttatttgtccttggcctctcttcctagtatgtgtgaagtctttgctttaaacagtgccgcatcagtggggggaaaaagtgactcagccaaggaagaaacagagcaatcgaattcactcaattactttatatttaccttgaatgtccaattctgtgtttttacttacacaataaaatgtgattcttgtttggatgggttggaaaaaaatcaattcaatttaggcagattcttcatggagttgtgttcttgttggagagattgtccccgtgaatataaataatagcatgagttatcatgtagcatctaactaatatggaagtttccagcaaagagggaatccct

SEQ ID NO: 30292 - DNA, 1156 bp, Mus musculus
ggagcacaggcccaaggatttatgtatacaggagtgcacacctgagcgtttgtttatgtgtaatggagtacacacccaagtgtttacgtgtagtggagcacacacctgagggtttatatatagtttatgttgttttaatttgtgatatccaatcttaaacaatagtcttccttaatttatagagatttataattcaccagtaaaatgagagtcttaattttcattcatgagttactcgttaaatattaccaaagcctatattcttatacagatattttacataatatatagtgtagattatagtgtttgtgcatttggtgatgtgttacacagtagagggagccatgaaatgagggatagggcttggactttctcaggtttcatggactcatggggatagcaggcatagttgaagatacctctgttagctgaccactgttatcagatacagacagcacacagaaagctaatctgatatactaactgcagtgctctgagaaggtgttgcaaacagatggaaatatccattgccactggggaagggaatgtcaggcatttgtaaacgacagcagctgtgatgatgagcaattagaacctgtcacctgttaggacctgactgagcacagcatcgattttcccattaagggaggtcctgtcacctttttcatttataaatgcaaatcgaggggttacagaggtggtttgctgggtaaagcgcttgctgctcaagtctgggagctcaagtgtgcattctcagatgccatgtaaatgtggctcagttaagggcagccagcctataatcccagggctcaggaaatagaggcaggcagaatcccttgaacaaactggccagctaaactagccaaatgagggatctctgggtttgagtgaaagaccctgtattgatacataaggtggaggtagaagtgagtggggaaggcattctgtggttgccaagatgagtgatacatacacatatctgcaggggtgagcaccacacatacatatctgcaggggtgaactccacacatacacatcttcagggatgagcactacacatacctaaagggatgagcaccacacatacccaaagggatgagcaccacacatacctgcaggggtgagcaccacacatacctgcaggggtgagcaccac

SEQ ID NO: 30293 - DNA, 1919 bp, Mus musculus
agggcctggaaggtggaggtggaaatggaagtgccaacgtccatgcctaataatccacacgtgtttgtgtgttcctgagacaccgagaggtggctgtccagtacgacaatgataagttcggtatttatataccccggctgcattatgatgctggtctttgtgaccaattgttataattttctgcactttaatttattttacgtaaacttaaacccgtggttcaaggaaggtttgtcttacttttctcatgtgagaaatctaggtgtaaatattgagttcagaaagaagaaaactttgaaagtacgctgatttgctgccctgcccgtgtcttcaggtgacagtgtttggaagttagagagccttcactagtctctgagttcgtgtggagccaccacagtctgctgcattagtccagtgcgagatgctaaggaaaaacatgacatttcattccactgaggtataactcggagcttactgcatatctttcttctaaggaaggagtagtatttcagcaacctttctggggtgcagagaaaggatatgtatgtagccactgtgctaaaatgtgtgtgaacagttgagatagatgctaagcgccataccagtttgtggcactaagcatatcatttaatttttgtgttatttagcttttgtttcagatttggcaaggaaagctcaaaagataaattataagataaagtgtaggattggagccgggcagtggtggtgaacgcctttaatcccaacacttgggaggcagaggcaggtggatttctgagttcgaggccagccagggctacacagagaaaccctgtttcgaaaacccaaaaaaataggtaggattggaaggggccttcaattcttactacatttgacttttcaattatttgttagcatagaaatttctctatttttctttcctatgtgtctcatttataaccaaatttaatattaaaaaaactaataagacaaacactgaatattttcactgtgtagtgaaagttttaactcatcaaatatgtacatgggaagcagtattttaagaaagttttgaggtgcataaaagctctgtaaaagtagaggtctggtttacgttgtatcttgaatattcttaatatctagaatattcttagtcatatatcaggatggagtcatataatgcaaatttagttcatttttatgtgaggggccttgggtattgtaggtttatatatttgcagaagagatccactaaaagttgactatcagcagtaagagagggtctcacaaaatttataggagaaatctatatctcaatatcattttggtttttgtgtctgtcaaagacaggttttcactatatactcctggccggcctggaactaactgtgtaaactaggctgccctcagactcccagagatccactggctctcagcctcttgagtgctgggattagggccagtgtgaccacagcagttgttgaataacttggccctttgagagctaggggtcagaagaaacaaagccaagctggtagagaagccagaggtagagaacaagtagaagagaatcctgggcttagtaccgtatttgaaattcacaagaattcattgacttcctagaatataccaaacctctccaacctctaacagactgctgagtagacaggccttttctcgtcagcttccacagaagcgaggcacgccatgtttccctgattctgatggctgcacatcaatcattttcttttgaatatgctacactaattttttttccttcctaggtattggattttgcattgcaggggtattattgtatgtatgtatttatgtatgcgtactgtactgttacaaagtgaacaaacttcaacttgaagtgcattaattatgtggtatccatgtgtatcgaccatgtgccgtatgcctattatggtcactag

SEQ ID NO: 30294 - DNA, 1132 bp, Mus musculus
cccaactggtactccctcctgcttctctctctctctctctctctctctctctctctctctctctctattcctccctccctctccctccccctttcttctcccttttcaataatccatggagtgcagtcagtgctgcccatgcactcattggtggaaaaaacatcccccgagtagtcaacacatcaaggaccactctcctgaagaaaaatgactttccctcccctggcagtcaccaactgtctatagttcctcagctagggttctctgtttctgtggaaggaaaacaggtctggggcaggggcagggagcacttctgtgtccctccctagtccatgctagaatgttaaaacttgttgggaagtgaaagttactctttaaccttgaacttgaacaggtgtatgatccatctgatgctattccacattgcaccatctgacccaggttaacattacatgtgtcgtcgccccaccttcttgccccctaattgcagctctttctccctggactgtactctcttcctacatcccccctccaaatgacccctaccacttctttccccatttacctcagtctcccccgagagtctattctatttctgctttgcagaaagatgactgtgtcacctctccatctcttctttttacataacctctctgggcctgtgggggatagcttcattaaaatttacctaagagctaatatccacttatgggggaatgtataacattaccatcattctaagtctgggttacctcaggtagggtgattttactctagctgcagtcatcagcctgttgtgctgcagtcatttcatgttgtcatatttttagcagctgagtgatactccattgtacagacataccacattttgtttctgcagttttcagctgtggaacatctatgttgtttttaccttgtgtctaatacaaatgaagctattatgaacataggtgtcctgggttgctggatggagtacttttttcatttatccaagactgatatagcttggtcctgaggtggatgcattcccagtctcctgcggaattgaaaggaaataaaacttgagacctgtgattcatgtaatgtatgtcaaatagcccaaagagttgtttgtgagctttgaaaccagggg

SEQ ID NO: 30295 - DNA, 1105 bp, Mus musculus
gttaaccagtcctatgttgttttctgtgcaattgcttaaatgatatctctgccttcagtgacaatgctgtgctcctttgggaaatcatcagagtgctgtagtatatatcatgaacctaatttatcactgattttaactgcttacattctacttcttaattctgtagccttacattattacctgtttgtattttatatctatggaattttgcttacatgtagacctgtgaactgcaagccagaggacgtttcagatcaactagaactagtattgcagaatgtcatgaatccccctttgagcgtgcctactataactgagccagtgccctgtggagaagcagtaattgctgttatgctctgagccaccactccagagtcatagaacatacgttagattcaagaagaattaccttgaaataatgtagaatattgatatttttagatacatgtgccaacattgcacatattcacactgtgctctgggccctccaaagctgttcattttgtaatgatgactgtgtaaatgagtgctattaattcttactaatttcttgatgacttagacattttactagggttgtttttgtaatgtagttggaaaaagtatctgtcatccataaatgacgaaactgtttatcccttgttcttcagggaacagtgcttgactgcacagtttctaatacacctttggtatcaattttgaaataagtcatttagacatagatttaatcttgctgtacttttattagattagtaataccaacaatatttctctcaatatttgtttgtcaaaaggtgtcattgtatttgttggttgatcacattagagggatttcaaattactttttttaggttctgcattctcattgtgaatattaattttttttcctgtttacttacattagtgtcaccatgtgtctcagacagtaaaaaaaatctcacccaggcagtggtggtatatgtctttaatcccagcacttgggaggcacaggcaggcggatttctgagttcgaggtcagcctggtctacaaagtgagttccaggacagccagggctatgtagagaaaccctgtcttgaaaaaacgaaaaaacaaagacataaacaa

SEQ ID NO: 30296 - DNA, 1230 bp, Mus musculus
agttcacatttaagggactatacccttaaaaagaatccatacaaccaatgccctattggttataaaacagcacagaatggggctggagagatggtcagtgggtaagagcactgactgttcttatgtaggtcctgagttcaaataccagcaaccacatggtggcttacaaccatctgtaatgacatctgatgccctctattggtgtgtctgaagacagatacagtgtacttacatataaataataattaaatcttttaaaaaaaaaacagcacagaatgagagcttaagcgatgtcctgctgactctttcttttatgacactgttatttgtcagatggatgtgagagcttcagccgacttgtctacatacattacaggttgaaattgaaaattcgggggagaaagcacagaacgtagcatcagctttcacgttcaaaatgtttttataaagttcttctggttggtgtttagggaagaaagagtgagtgtcaagctttttacaccagagttgccaggttattgagaagcaaataggtcatcgcagactggaagaatccagaaagttgttctatgtggatgcaaagaggactttctgcccatgagtcacagtggaccaaaaagtaaaaatgaggttaagaatcagactaaattgattttgtttgaatttaaataatggcaataaatgatcattgagcaaaagtgcaatactttagaaaagtgacccatttcaattcttctgagtaaataaccaggcttaggtagtcacacatttttttttttttttgtagaatatgtttgtaaatatttaagagattttttaaaaagatgttatttattcatttattttcattcatttatttttttatgtatacagtacattgcctttatgtatgtatgcaagccaggagagggaacctgatctcattatacatgactatgaactaccttatggttgctgggaattgaactcaggacttttggaagaacagccagttctcttcacctctgagccatctctccagcccaacatttaacatttttgcccaggagtgtctgttaagtgtaatatataattgtaatatcaatacccaatgatatgtatgcatttcttatttttgaatagttaatcaaatataattttcatattgataagcaagagtggttgtttagaaataaacgtgcaattatttttctaattccacagtccaaccttatgaaagataacacaaga

SEQ ID NO: 30297 - DNA, 1214 bp, Mus musculus
atcttgaaaagcataaaaaaaaccctacactggaaagactctctatgtatgtaaccattgtgataaagcctttgctcatcacagctatcttcaaatccatggaaagacacatagaggaaatagacactatgcatgtacccaatgtcgtaaagtgttttcacataacagtagtcttccatgccataaaagaacatgtactggatagaagccctatgaatgtaaccaatgtagtaaagccttttcacagaagagtttttttcagtgtcataaaagaacacatactggagagaagccctatgaatgtaaacaatgtgttaaagcctttgctctacacagccatcctcaaagccataaccggacacatactggagagaaacactatgcatgtaaccaatgtgttaaagtgttttcacatagcagtaatcttcagagtcacaaaagaacacatacttgacagaaattgtatggatgtaaacaacatggtaaagcctttgcacatgtggtcttcaagggcattaaaaacctagaatgcagtgaactcttttgaatgtagtcaacttgattaagactttgcatatcagagtctcctccttttgtatgaaacagatcattcagcagagagattttgtgtgtgtgtgtaggcttgtaactctttcatctacttgtcccatgctttttctctagtaaattaccttgcctatcttttatatgaggaattgtgcgtttgttattgtcataggtgatgtcttatttagttgatatccacaagagactgccctgctatttttcgaaggggataggcgaggagggaatcttgggatcatggtaggttgggaaagtcatggaaaactgaagcggaggggaaaacaacccaggattggaaccttcagcctataaagtttcctgcttgcaaggtgtactgggtcaatagtagcacagaacttgtggtggtaaccaaatattgactggtttaattggatgcacatgaaacaagaaggagcctgtaactgacactggttgatcaggaactagaagcaagataagcaaggatcatactttagaaccaaacatgactgtcccttgcccatcaccactatccccacaaaaaaacacagtgatgttctgctcttttcatagtttggtgattcgtccaactgtcattaatgtctgctctcattagggcatgggagtaatataaatgacccacaactaaa

SEQ ID NO: 30298 - DNA, 1237 bp, Mus musculus
cggtcctgtgacacatcagaactttttgttgactgaacgagtgaccttcgcttcattccacctgctgtcccactgcgtgagactgcacctactcatcactgcgctgacattctggcagaagaaatgatctgaaggatcaaatcagccttggcctgagtgtagtaaactcgcggttgaaggtaagcagaaggggggaacagcagtaaggtggtgaacagaaaaaaagtgatctagaccagcagcctccctgaagggacgtcggcccagaaagctgaacttgtgacaagctctatgaatggcaaaagaaaagtctacactgacagcaggtgtgcttttgccactgtatggagcaatatacagacaaagagggatgttgacatctacagaaaaagacctaagatgctgtggctaaagaaaatcagatggcagatctaatggccaaacaggtggcccaaggagcaatgatcctggcagtcaaggagcctaaagattattaaaacatcagagagaccagctttagatacacccctgagcattatcaagttatggacagtatttgacccacctgggggccaagaaattaaaaggggtggttaggtcctttgactgctatgttacaggactctctgacttggcagaagaaatagtcaaaagctgcaaggcctgtgctatgacgaggtaaaatttctaaaagaaatcttcccaaggtaattgggtccaataacggacctgattttgttgcccaggtaaatcagggactggctaagatattaaaaaatgattaaaagttacattgtgcctgcaggcctcaaagctcaggacaggtagagagaataaatagaaccattaagagatccttaccaaattgacagcggagactggcgctaatgattggatagctctcctaccctttagggttagaaacacccctggacagtctggactaaccccccccccataaattactctacagagggccccctccactggtaaaaatagcctttgtacatagtgctgacatgctgctttcccagcctttgttctctagatgtattcagcatgggtagttttgaaccatccatggctcacaaatcagtgaaatataacctgttcccaacacagaatccatgctgcctataaaggatgaccagttaagactttgtcctcaattaggaggaatggtcaccagtgtcaccctcagagttccctgaaagttcccagagcactttgttccttt

SEQ ID NO: 30299 - DNA, 1204 bp, Mus musculus
ctctccaagtccaaaaccttgctctcaacctcagggggctccgccgacatcgacgccagcaagcagtcattgccctacccacagccaggcttggagtcgcctggcatagaaagcccaacttctagcgtcctggacaagaaggagggcgaacaagccaaggccatctttgaaaaagtgaagaggttccgcctgcacgtggagcagagggatatcatctaccgggtgtacctgaagcagataatcgttaaagtcatcctgtttgtccttattataacctacgtcccctactttctcagctacataactcttgaaatcgactgttcgatcgacgtgcaggcatttacaggctataagcgctaccagtgtgtctactccttggcagaaatcttcaaggtcctagcttccttttacgtcattctggtgatgctttacggcctcacgtcctcctacagcctgtggtggatgctgaggagttccttgaagcagtactcctttgaggctctcagggagaaaagcaactacagcgacatccccgatgtcaagaacgactttgccttcatcctccacctggccgaccagtacgaccccctgtactctaagcgcttctccatcttcctgtcggaggtcagcgagaacaaactgaaacagatcaacctcaacaacgagtggaccgtggagagactgaagagcaagctcgtgaaaaactcgcaggacaaggtcgagctgcatctcttcatgctcaacggtctcccggataacgtctttgagctgacggagatggaagtgctgagcctggagctgatcccggaagtcaagctgccggctgccgtcgctcagctcgtcaacctcagggagctccacgtgtaccattcgtccctggtggtcgaccaccccgccctggcctttctagaggagaacttaagaatcctccgcctgaaatttaccgagatggggaagatcccacgctgggtgttccacctgaagaacctcaaggagctgtacctgtcgggctgcgttctcccggagcagctgagcagcttgcacctggagggcttccaggacttgaagaacctgaggaccctctacttgaagagcagcctgtcgcggatccctcaggtggtgacagacctgctgccctccctgcagaagctgtcccttgataatgagggaagcaaactggttgtgctgaacaacctgaagaaga

SEQ ID NO: 30300 - DNA, 3783 bp, Mus musculus
tgcttagataaatgttaacctgaggttcagactcgaggcaaaagcagttctaaagaggccccgggataggaggatgaactttcctaagttatcaagatgagagatggccggtgactctgacacgccataaccaaaaatattaccaaataacccagtgtccaaatcaagcagttaaatatccacaccggagttttgtgaataactgatgtttaaattattgagatgtaaaaagtatgcattgaaggtggattgaggggcgtgtcgttacagaaaccttacctttcacatcttatcttcagaaccctgtccccacccccaccccaaccctttacttatttgcatacatgttttcatagaaccttgtagtctgatatttaactccatgaagactcgtcggtataaatctccttgttgtatgctcaccactggctttgatttatattgtttcttttttttgagcagcatgcatcacgctgggcagaattccatcttggctgtcttctctgctcctttctcattttgctggaatcctcatccaggcttctctgatagtcctgggaaagtgcttacgtttggcgtttgcctagaacaggagccaggggttctaggacatgtgatcttctgagcaccctaaaaattaatgcattctcaaaatgtcttctggtctatcatcaaagccggttttaaatatgttgaagttttttatatgaaatataaaatattttctactgtatgatctcagatgctacatctacgagaacacctttttgtaagcagtgaacatgtgcatctctgtaagaatttaatgattcttagtttgggctgattatgattctcatgtttgtatgcattctgctccaaaaatttttgtactcttgcaactaattactgcaaccaatttggatgacaaaaagccttgtgttttgctccctaacatctttgagggtttcctcatgagaggacaggagggccgctgaatcacctacctctccttgctgttgtccaagagtacgggtacaacccctcaattacttaaaaactaccaccaaggggagagggcaagatctagattggaaaattgattggaaaatactctgttagatgtagcccccccccaatctgcatgatctctcaatatgactatgatagaagccatctattcagaatctaactgagcccatgaaactgacatctatctcataggctgccttgtgacccctggaatacgtcatgttcctcctgacaaagagctttgtgtttggcccttttttttaatcatgcgtattgttgaataaataaaatagattgacttacactggggaagtggacattgtagcatgtttttctctcataagtctaggcattatgaaaccacctctttttagacatagctgtcaaataatccattaactgcatctaaaaaaaaaactggaaaacacttctaaggagtcttctaaacacagaactgtggcatgttgttttctcctaattgttctagaaagatgaaaatgtctctcagtggccgtatatacctgatgtctagagaagagaatttcatggaggaaacctgagtaaagttagttacaaagaatatactgaaggccctaagctgcctaacacactatggatagactaaaagagacatcttagcaaagcttgcctttgttagaatgtccaagttctcagggacctaggcataactggctctcactggggcctcatggacaggccctggcttagccaggcttttctgatttttactgttttaataatgtgagctgatggctgacgttttccagtaaaatcatcacgtggaccaatttcaaagttgactggaattgtctgaagttttgaacataaatgtgagtgaggtttcaatactatcaatcgtgcttcatatgaactaaaaaaaatcccactctaaccagttcagactgtctaagcctccccctgatgaaggagaaatttcctgtgcctttgttttccagtatatgcatcattggctaactggtctacctcctcaaagcagttccctagatggatcaatcatgaggtgtgagccactttcaacacacaaggctgttgttactggtggaaaccatattgctcttgatacaacagtcttatagtgtctcttgtatttaacactgatgcatcaatgttgaggtagcttttcaatctaacacaaagacaatggacaacacatttcccacctgacagagatctgtgttagcactggctttactaacctaagtgttgatcgccaccttactgaagaaagtagtcttacaaattatcatgagattaaagtctcatggtaaaaatattctttccaaaaaccaaatgtagaggctcaaaaacaaaactttggcctatactaaaataatatgggctaatttgcatacacacatacaagtacagagaaagatgtatagcttcagttttgcaaatttcagttttcaatgtttttctgaaaattgcaggaggttataggttagtctgaggatagcaacttttttaattcattatttttaatcacgaagtattcagtttctataaaatcaactttagtttaagaagataccatgtgttcccacaagggcagagttttcccctcatctacatcagggtggatttctgcagcataattatactgaaattttattttaaccttctgtgtgttagcatatttctgttaataataaacaggttgaatcagggtacgtgaaattgttgggttctcagtgataatggcaagctctaatttgtgtgctgcagtgtgctaaagtggtttatgcacatgacattattctttgatgatgaaatggttctgctcgtgtttcataattctgataccatgtttaattaaaacagcacatgatattgatgggttcatgaaaatggccaacacttactctgtggagttgtcactgtttccttacatttttcaggaaatccttccatctctgcagtcacgtggcactggtccatccgcacactgttttgtcctcacccacctcactgaatctgatggacactgtacagtcgcagtctctttgtgcagaattggcagcgatgcctgtgcttgatcatccctgtttataagaatccagcttctggtctctgttctcattaaccgcatattgcattatagaatgaaaaataagagagactaattagagagaggaaggaagacttattttgcatcctgaatgaaaaaatatatatatatatatttagacagtgtaaacaaacaactgctgcagagtgtcctgtgtgtaatagtgtctggtgtgtacctgtgtgctgtgctaaatcaggggaccctttctgtctcttgtccatggtgtctatatccagtgacaagtgtctgctatgtaccttttgcaatggacttcataaactgcattctctaaaccttttttttaaacaatttcatgaacaatttcataaacactgaagtattaacagattatatgagtcagagtattgagctgagatagcttctaattgaacttaattttatatttaagttttgaatttatcacaaaatacaccatagctgagaaaaaaacaattatgaatgccttctgcatgttcgttatttctaacagacatggtgcaattttttaaatacagaaaggtgtagggttagaatggatgtgtctgcactcatctctgttgtctgtctgtctttatattcacactgtacagtaagacttaaagttctaagtttcatgctaagtaaaaggatgacccgatcttgggcggagatacttagtt

SEQ ID NO: 30301 - DNA, 1127 bp, Mus musculus
tttcaatattaatattttaaagttttatttgtcccggaagctgacgtatctgttattgattctgcccgcaggaatgggtagttccacctggctttgggttttgctttctcacttgagttcattcttgtaaaaggaaaggaatcgtaggtctcatgaattttggcatcttctaaatgggtgaagatactttgccaacaccatctttactttctttctacctgtccgagctcttggtgagtctcatcatatgtaccaagaagttgtgccagtggttttactgtcagccgccaccttggctggtcaggaggtgccactctataggaaactccagactctgagctcacacaagtacactgtcacagagtattaccctgaaaagccccctgcttctgacactgttaatcgtatcatttcctaaacaacagtttcagttagcctaggacaggcttttgaagtgggtgaagaaagcaaccccctgtggttgcgctccttgtgtgcatgtatcatttggcgtctcactgatctgtatttttttttaaccaacatcctaaaatatgtcgtcaaaaattaaacacaaccactacccccatccacctcactattgccatgtggtactgttgaacaaccttaggaaaattagattttatttcaatattctagcagataattaaattttaaatcatagaattagaagcctgttttgagtaatttaatcacttttgatgccttgatatgtggatgcatccgatggaaaacaatcttgctactaaggcactctgttagaaagctgatgtattctatgcaggccccgccccttcctttgttagaaggctgatgtattccacgcaggccctgccccttcctctgttaaaaagctgatgtattccacgcaggccccgccccttcctcagaccctgtgcagagatatcaattcactttctgcctggtgaataaaacaacccactgtgtacataagcgtagtcatcagcttcccgcaagcctgccctcagtgcgggcggatgtcagtgcagcaagcacgggaactctcagctctctgctaaagatcgcacctcacttagccaagtgctgtgactaacctctgagtgttctcacttcgcaatagttcc

SEQ ID NO: 30302 - DNA, 1092 bp, Mus musculus
tgatttgacttctgaaaccctgttttgaagaacgttttcttggcccccatgaccttgcccagacctgggttttgttgttgttttttgtttgtttgttttttggttgttttttttttttttttgtggcatgtaaacatagacaagacatacctgggaagcacatggtcctcatgtgagttaagatgggggttggggggtgcgggatagctcagtgacaaagcacttgcccagagctgagccccgtgcctgagtttagcgacctgacactacaaaacagacaagggaacaggactcatcactctgtgtgaagggccagccccgtgcaagtgcttctatttcagtcatgatttctttaaacctggaattaaaatgataataataataataatttgaagtactattatgactatacttataggaagaaatattcaattttagaatattgaatggtatgaatcatgtgtcatgttcagaaaagctctgccttaaagaacttaaaggcagattgtctgttattgagcaagagtaacttgttgttggaatgtaaattgaaccattgaatgcaccgttttgattgttaaaacttatggttatttctaatatcacccttcagaagggatctattcaagttaaacaccatagttataatgaagtctttctctggcattaactgaaaatcctgtataggttcataactgaagcaaatcgccaataattcaattttatcaagcttccaaataatttgttttatcttcataatgatttcacaggccgactcccaacctaagttgtaaataacattcaataaagcagtatagtttttagactttcttttaactaagagtaaaatactcatagatctttctattagattttataaaacttccaaagcctcaatctctgaagagtttgaactttctgattctcgtcctttttaatacagtaagtttttgttctcgttcttgagtaaaatgctttcagctactgtccagccttccaacgggaaactcgggtgcctgaaccactggcttttctaatgttctctgatctaacttagtgcagagaggctgtctgcctcctctctctctctct

SEQ ID NO: 30303 - DNA, 1159 bp, Mus musculus
tttgtttcacattactctgatgaccaaggaggcacagcatctatttatgcaaagaaaaaattactgtttttcttctttaagttctccttgagtctcagaattacaacttaagataacgaagtcctttgagaattcttgaaggagataaactgtgagccagtttataagaattggaagacgggaggggagaggcggccaccacccagccaccacaggtctgggaactgaccgttggcaggccatgagttgaggagaaggggttcggtaacctgtcatcttcaggagcctcctcctttgtagccctggagtgtggttgatccagctgctgacactccattggagaaaacttcctatgcctttgtcagcaggtattgattgcaaacagtttattggttaggggtagggtgtcatgtccacttgcccctcttagtgcaggtcttttgtgtgatgccacggcctctgtgtgacgtgccctattgggtttggaaagtactgtgtccttggtggcacccgccacctcctgttcttacggtctctatgcctcctcttccacgtagatcgctggtaacagtaactaggtgctggtagcagtaactaggtgctggtaacagtaactagaactaatggtttcattctgattgtgcactgggcattgtgctaagtggtttgtattgttgtttgcttggcactaattcgtaattcagtgaagctgttattacattagagccacattcctgaaacagaaactgagtctaacctctcagatccaacagtttgtctgtatcatacactccatggatacagcacttgaaccttttccagacaagtgtgtggaacctcttagtaccaagatcctcttgcctctgcctcctgagtgctgggactaaaggtgtgtgccttcacaccaggttaaaactgagtaatttctttaggaccctctaccttcaacgtaggcatcgaatgtgacgtggtttgtgaattgtactccaaaagcgacttcagggatgaaaagcttggtgatgcagcaccgaggtgggggcccgaggaagccagtctccagctgttccattcatgccgcaggtcacagttatgtaagctgtttaccgtgcggcccagcgaaggcaggttcattagccgctggcggggatggaccccaagc

SEQ ID NO: 30304 - DNA, 1100 bp, Mus musculus
ctcctaaaaacctttaaactcttagcacgagccagcaaatggccattgatataataccttcattgtagcaaagtctgttgataggatggaaatgagaccactccaaacatttagcaaatctgaaacagttcacaggaggaaagctagcagagtggccgacaaacacacagcccgaggaggggcatctgggatctagggtgaatatgcttgcttagcatacaagcagcttcaggttccatttccagtgccagatgtgtcagactggtggggcgagtctataatcacagtgttgccattggaggcgaaggccaggctggaaggtcttagttggctgcatgggggagtctgggggagtgcagaggggagggagggagggaaaatgaatatgagttgggggtaggattgtgcctcacagtgagaaggggaggggacctaagcattattcactaagcatcttggggtcttttagatttctcccaattctcacacactgtgaagagaacacttccctcctgtgtgtcaggagctgagactgaagatgaatcgggcaggccattagctgtggatcacacaggtagtaaatgccttcagagctgggtaccctcgacccagagtcgagcagaagacccagtctctagctccgggaagccaccagaacctcgtgccgagagggtaatgtttcagaatgatcccgggggctttattgttccttatgaaataaattaaattttaataagtatcctgaggtaaactgagtcaccatcatgcttacctgttctaaacacagaactcctaagagccttttttaggaagcctgcttcctgtggttgaaatgtttgtagaggctggaaagtctcccaggaggaggaacacttcaagtgacttagacctggagacttccatacccaaggtctttgcttaggtgtcttaagccaggcacacataggtatcaggagttctaactgcacatcttggcttaacttatagccaacaggtgagctactttgaatatacctgaggccccacttgtggctgcatagaattgatgagagctgttggaatggctagtccgcccacatacgagcacaccctaggctaac

SEQ ID NO: 30305 - DNA, 1199 bp, Mus musculus
caacagaagatgccccgcgtccagaggtgcacagagacccgttctctgcacactgttgactggtgaacgcctgtgaggcaggaatagcgctactgttctgactggtaatgtggcagactgctgctggcttagtgtgtccaggatccgggttgattcttggcaccagaaagtgttgggtgatgcacccttgtaatcaatcccaaggcttaggaaagagagacgggaggaccaggcattcaaggaaatcttcaactaaagaaaaagctcgagttatccgatcaagagatcccttaaacacacacacacaaaacaataaaaaataaaattacgactctctttctgccatcttccctcgccgccaccatggtgcgaatgaatgttctggcggatgctttcaagagcatcaacaacgctgagaagagaggcaaacgccaggtcctcatctggccatgttctaaagtcatcgttcggttcttaaccgtgatgatgaagcacggatacattggtgaattcgagatcaatgatgatcacagagctgggaagattgttgtgaacctcacaggaaggttgaacaagtgtggcgttataagccctagatttgatgttcaactcaaaggcctagagaaatggcagaacaacctgctcccttcacgtcagtttggcttcattgtgctgacaacctcggctggcattatggaccatgaagaggcaagacgaaaacatacaggagggaaaatcctgggattctttttttaaatgtaaagcataaataaaagcctttgtggactgtaaaaaaaaaataataataaaataaaattactacttctttgcttgatagtcagaaaacatgcctttaagtcttcaagttgtgtgctaaggttccatattttattttattttattttattttattttattttatatttttagaacagatggttcgtttagttggtaatggcatcaagtcaggtgttttatgtacactgacacagaactctttccagttgtaaatataaagtacgtgtggatataggttcaaggtaatgggattaaaaaatcgtattttagaagatgatatgattttaaatagatccttcaggaattctgaatagtttgtaattacagaaaagcaaaaccaaaagggaaaatactgtcccaatctcactgaaactcttgctacgatgtttcagattatcttt

SEQ ID NO: 30306 - DNA, 1851 bp, Mus musculus
ggcctgtgaagactctgaggagaacaagcagcggataacgggcgcccagaccctgccgaagcatgtgtccaccagcagcgatgaggggagccccagcgccagcacccccatgatcaacaaaactggcttcaagttctcggctgagaaaccggtgatcgaagttcccagcatgacaatcctggacaagaaagacggggagcaggccaaagccctgtttgagaaagtaaggaaattccgtgcccacgtggaagacagtgacttgatctataagctctatgtggtccaaacgctcatcaaaactgccaagttcatttttatcctctgctacactgcgaactttgtcaacgccatcagcttcgagcacgtctgcaagccaaaagtcgagcacctcacggggtacgaggtgttcgagtgcactcacaatatggcctacatgttgaaaaagctgctcatcagctacatctccatcatctgcgtctacggctttatctgcctctacactctcttctggctattcaggatccctctgaaggagtactcgtttgagaaagtccgggaggagagcagcttcagcgacatcccggatgtcaagaacgactttgcgttccttctgcacatggtcgaccagtacgaccagctctattccaagcgtttcggtgtgttcttatccgaagtcagtgagaacaaactgagggaaatcagcctgaaccatgagtggactttcgagaaactcaggcagcacgtgtcccgcaatgcccaggataagcaggagctgcacctcttcatgctgtccggggtgcccgacgctgtctttgacctcacagacctggatgtgctaaaacttgaactgatccccgaagcaaaaattcctgccaagatctctcagatgactaacctccaagagctccacctctgccactgccctgcaaaggtggaacagactgcctttagcttcctccgagatcacttgagatgccttcacgtgaagttcacggatgtggctgaaatccccgcctgggtgtatctgcttaaaaacctgcgggagctgtacttgatcggcaatttgaactcggaaaacaataagatgatcggcctcgagtcgctgcgagagctgcggcaccttaagatcctccacgtgaagagtaatctaaccaaagtcccctctaacatcaccgacgtggctccgcacctcacgaagctcgtcatccacaacgacgggaccaagctcttggtcctgaacagcctgaagaagatgatgaacgtggccgagctcgagctgcagaactgtgagctggagaggatcccacacgccatcttcagcctctctaatctgcaggagctggatttaaagtcaaacaacatccggacgatcgaggagatcatcagcttccaacatctgaagcgactgacttgcttaaagctgtggcacaataaaattgtggccatcccaccctccattacccatgtcaagaacctggagtccctctacttctccaacaacaagctcgagtctttaccgacggcagtgtttagtttacagaaactcagatgcttagacgtcagctataacaacatttccacgatccccatagagataggtttgctccagaacctgcagcatttgcacatcacagggaacaaggtggacattctgccaaaacagttgtttaagtgcgtgaagttgaggactttgaacctggggcagaactgtatcgcctccctgcctgagaaaatcagtcagctcacccagctcactcagctggagctgaagggcaactgcctagaccgcctgccagcccagctgggccagtgtcggatgctcaagaagagcgggcttgttgtagaagacca

SEQ ID NO: 30307 - DNA, 1299 bp, Mus musculus
tcccctttgcaaacgggatttgaactaagcgaatgcaggcacacccacgtgcgggggggacaccttcctagattgcagatgctcacttgcaagttattacaagataatgcattttaggagtagataagccctttaaacaggacacgatgcatagaggctggtagcagacgaaaccgaatgttccatgtttgtagcattttcagtcattcatttccagatcttttctttttgtgggttgtttttttttggggggggggtgtttcctcttccttctcttcttcttcctcttcctcctcctcctcctcctcctttttctggggaaagggaaggaaaaatcacaatcactgatctcagttctttttaaattgtaagtcggatgcggctgctggctgagtgtttacacattgcttgcctgctaaagtatatgattaaactgactttcttcttactacattgcagttttttggttttttggtttttttctttctttctttcttgaggtgtcctgatttatttttgcttagctggtgcaatattgcttaaccttggatcgttgaagacacaaggggccaaactcataatcttagatttgctaaaatattgacttctttactgttttaacttaaagcaagtgagtggagcttcctggagcatttgatggtactgtacctctgcgaatcccacagcagactttacagtcttggcggcctggaatgaagtagagcgtgtggtgtgtcaagactctttgattgtttcttaaaacaaatactaaaaataaaataacacatcctttaatagtcactttatgtgcataggctggagttttggttatacatggtacacttttgggccaatataataggatttccaatgaatagaaaatgtgttttaaaaataaatttataacaataaaatacgtttatctaaatcgtagtggttcacaacctttcttgggaccagcatttggaatataaacagatccaccttctcatggtggtgtccgtgaggggctgttggagatcgggtgtgagaggaaggacttgtaattcattgagctggaagatgcctgtctttcataaccattttagtggcaagttgtatttcctgtgtttgtctgtgaggaggagtgtgaggattgtctgctgtaggttataattctttaactcacaaaatgtctgaatcagcctgtcacctatttagattttagctgagtaatttacagaccttctacaagaatggcctttccctctcttccttcttccctccctcccatcctcctttcctttctttgacagggtc

SEQ ID NO: 30308 - DNA, 1197 bp, Mus musculus
cagagtactattctatctagatgtgttaagtgtttttttaaaatcataatggaacggtttttttttatatatatatacatatatatatatatatactaaaaagttggagcgagatttgtttaaacaagtatttctaaaagaaatattgtacatagtcctggaaattatttgtggtaaggaaatattctttaatccagttgcatttctcagacaatgaagtggtgcgtccatgctacctcctgctttgtcaacaaagatgctatttaccctttccatttgtatcataatagattttaaaaatctaatgttctttattgcaagacatacttttgttaacagatttgtttctttgtaacgttttccatacgtttgacatgcttacaggacagggttgtctttatttaacattgtagaaatgtaattaataaacaaggctcactacacaatttagaataggctttctcatttatattccaaatttgatcatttagcaaaactattgatacacaaaatatttctacatatgagaatgtttacaatttgaattttagaagttgtttttggatgtgattctatgtatgaaaattgtgtaacactatgctcatgctaagaaccgacttaacagaattactgaaataaatgtgctgtgaggaatggacagtacggtgcaggtgtcttggtcatgataaactgtgatgattcttttaaacactttccaaaaacaacttagttcctttcatcctgaatgagcgtcgtttacaaacagcagtttgtatgcaagcaccattccgcttcatttcatggtgttgctaatatagttgaaccaaggatatgcattgatacttttcataatttgtaaataaagttaaaaacagttaaaggagtgtttggtagaggtatatgtatatatacctcactgccagtgaaattactttcctatggtatatctccttgccagaaatcactaaataaaaagacttcaagaattacagtgcctctaatgtgaaacatttgttattttttttatttcatgggaaatagtccataaggttgttttatttagttaggttgtttatatttaccaagttacttttgttctctaaaaacactacattgatcaatatatttcatgtgaagaaatattttcccattatggttaataaacatcttaattaggtgctagttagtgtgtaaaat

SEQ ID NO: 30309 - DNA, 1318 bp, Mus musculus
agagaaaaatggatgtgagcaagatcactcgctacacagaggactgctacagtgactcaggccgtgcacctggaaaatcaaaaattcttcaggttgactttctagggcaaaacgaggagatgcaagcaatagactcacagaactacacattatcaaaagtgaaacccgagtcagctggtggagacttggagtctgtggacacttttcagcatctagtttataactcagataaatgtggagaggataattcacctgttcatactcgcactttaatttcaaataccttaaaaaagaaatgtgaagagagtgatcctgagtcacctgttgctttcagtactgaagagccatcattctacccctgtacaaagtgcaatgtgaattttagggagaaaaagcatctccacaggcatatgatgtatcatttagatgggaatagtcactttcgccaccttaatgtccccaggccatatgcttgtagagaatgtggacggacatttcgagatcgtaattcactactaaagcatatgatcattcaccaagaaagacggcagaagctgatggaagagattcgtgagctgaaagagctccaggatgaaggcagaagtgctcgactccagtgccctcagtgtgtgtttggtaccaattgccctaagacgtttgtgcaacatgcaaaaacccatgagaaagacaaacggtactactgctgtgaggagtgtaacttcatggcagtgacggagaatgagctggaatgccataggggcatcgcccacggagcagcagtgaagtgtcctgttgtgagttcagaagtaactcagagaaaaacacaaaagaagacttcagtgaaagactctgttataggatcatccaaaaaacctgctacttacctatgtaagatgtgtcccttcactacttcagccagaagtattctgaagaagcacacggagtatttgcattcctcggcgtgtgttgactcctttggtaatccactgggacttgacaaaagaaaaaatgacagcctcgaggagtctgtagatgtcgatagcaccaagtcattagctaagcagcagccaagtacatttccaaagaactctgctttaaaacaggatgctaaacggacatttggatcaagctcacagtcaagtaatttttcaaaatttcataagcggccacatagaatacaaaaagcccggaaaagcattgcccaatctggtgtaaattcgtgcagtcaaaacaagtctcctcacaagaacgttatggttaagagcagcactgaccaacaaccaaagtatttccatcaggccccaagagaaaaacctaa

SEQ ID NO: 30310 - DNA, 1132 bp, Mus musculus
tttgacgatttcttactgtaattgtggaggtagtaacaaattgtacttgttttacaatttaaatatcttacctcttaagtaaaaggattctggcatttgttgttatcctatgaataactggagcctaagtttataggctgttgcatatgagtataaatagttaaaagctataaaggaagctttaccaactaaacattgtgatgggactgctggccaggatgatgttggcctgttaccctagcacatgggattgggaattgaaggtcaacttctggctgcaaggttaatgaggccatcttgggccacgctagcctgtctcaaccctcctccccacccctcatctccacagaaagaaggaagaaatggagaaatgtattgtttatcatgatttttgcttacactgtttgacttttctcttcagttggaagcagtaattacatgactgttactcattaatgctaagcagtggaagtcttataataagcttatattaagtcctaaggttatattaagctggtgctttggagaaaatttctttttccctgaaatctagaagacttagaattgtaaaggtatatagtaaagaaaatatgcatctttatattttattatacttagttttgaagaatggatgttttgtatattctgtagaaattgccataaaatattttattattaatatttagattatgaatgtgtttgagctaatgaataaaaatttgtattccatgtgaaaatttttgtttttgtttttgttttttgtttttgtcttttgctttgaataaatgtatttaatatattgctgctcttgagaatttgcatagttgtcttgaagagatggctaactgtatctgctgtatgttcttagggtaggcgactagggctaatgtacagttgggtagaccagacattaaagtacatgctttgacttcaaaatgttaagatttttataaaggtgggggtctttttgtactggatttaggaattcacaaaataatttggatgccattgaagcttttgtgtagaaaacctgaagaatgtgttttatgtcactgtgttgtgtgataaccatttgtgagtttggttttgagaaagttgattttgttttcagaaacattgtttgtattatggc

SEQ ID NO: 30311 - DNA, 1204 bp, Mus musculus
aatagagctgctcaagtttgtccagtctgaggctcagcaggaagattgttcacgaaacaagtatcatggagtcgttggacacaagggcctgctgagtcgcccggcacctaaaactgtggatcagcagtgtaccccaaaaacttctgtcaaaagatcctacacacaagttcacattaagcaaggaaaagacggaaaggttctagcttttacattttcaacaagaatattagaactgtttccatcagccaacagagggagacctagtacgaggatagcactgtgattaagacgctttttacaaacctaccttacacatcttacttggctggttaattagagtgttactgaatcaatttcactcggtttcaaactaatttttttattttgtcagcttatggtttgcagttatagattacactatatgataaaacaaacattctatgttacaaaatttaagttagttgtatccacactctctttaaaaagagcattatgatgggggaaattctaaagtgtctgtctccattttggctgcccaggaaaatgaaacccctgtgctgtgcgggtggccttaggagtttttagtgttgtgagtgtggcctgtggtgacgccgtgtgggtgctgagttttgcctagactgtgtctcctttcacagtgtttggtgcctaagagtgtcttggctgtcatgtagtctttcaaaactgtggcagaggacagctggcagaaagtgttacaggtataaccctaattctccttgtttctgttggtgttgtaggagagatctgtaggcctttctgtccagcgctctgtttttggagagagaaatttcaatatacacagctccatttcacatgagagccctgcagagaaagtaagtaatgcagcttcatagctcagctgtcagtcagccacacagacgggctcagggacccagtccacgaggggagcgtggattagtttggctttggcagaaggtattgctgcttcaagcatttactcaaaaattcaatctttaatctttttctgaactctttttgatggaattttttattttgattatctattgctgttttttctctataggaacatttcagaacaaggctagacttcaccatgtgagctcccaggacctcacagttccaacacacagtcagtagtgtaaagattcctgtaaagtgccttcaggttggatggttttacgtt

SEQ ID NO: 30312 - DNA, 1276 bp, Mus musculus
atttttgtaatatatttaaatgtatatttttgagagagatactacattgccaaggactttataaataatcttaaattaacttacaaatttataagatgcaaaccaaaagacttttttttttttaaagagagagagaaaagagaaaaaagcttttatttccttggatctcattatcagaaatattattcagctcaagaaatctgaccccatattggaaaatgaatgtcctttagtattcctgaagctaaagcttgggtgtctcctcccagctcttgttacagtgtttctgactgcttcacccttcacagatttaatacaatgtataagccttactttcataacatattctacaagtttccttaagactgttgttatagtctggctgaacccatttccacctgcaaagtcttgtgttgtgtctgcaggccacaccagtggccacaggggccattttgtcttgttgatgctgaaaccatgctggactgccccaggctaaggcaggactgtctgtgcaaggcactacagctattcacgtggagttaccgctgcattttcaaaggtcggagatctttcttctgcctgagttggtcatgtagcaattttttcctaaacacaaaatggccttttgcttgtctggtaatgagattgtaaatccatttcctgcgtgtgttctccgcaggcttgcctgagtgtgtggggtgcgcaggcgcgtgcctgtctttttgtactgtaactacctcatggtttgaatgatgagcgtactgctggttgtattaacagagcacatttgtcgggtgagtcgtgtatacaaactttttttttttatcctgtttgttttatctgggggttcgttcattaaactgacagatatttttctaggaaggactattatcagtttccaaatgcaatactctattctggtttttcctgagtgagcctgattttgttcctgtttttcatctacgagggtaaaagcataccccgggaaatccctgtggccagtttgaacacccctgctgtaaccttccctctgttccatggtctttgtgaacctgcttagaggtatagttttgataaccacagttttaattcttttatctgtgcataataaagatatgtatcaattattaatttatgtcatatctggtcatcactaaaccctccccttggtctgacacagctttgatggcacctgctggaacagggcagatgaggatgaagagaaaggaggggaaagaacaaggacccaagagagcagagaggaagggagggggca

SEQ ID NO: 30313 - DNA, 1120 bp, Mus musculus
aagaggtggaaatgaaaattttgtaagatctccatttgcacagcatgtaaatactcacctgtttccatcctctctcttcagggccattttaagtgccaggtcgagttattttgctgcaatgctgagtggctgctgggctgaaagctcccaagagtgtattactcttcaagggtgagtaagcataatgtttcatgagtcagcgtgactatagaagattacagatgatacacacagcattcttcctgcgttcagaaaaaacatatcttagatggtagaacttcagaactgacgttttttctaaagctaaaggcagaggatcacttagtaatcaaggtcttatctgaatctgctcaggccctgaaacagagccgagagactgcagcaccacacaccggttctcacacttgtgaaggctgagagatcatcaaggcttccttagcttgtggacagctgctccctgtgtctcgtggggcgtttgccatttgtcttgtctgaaaggatttctgtggtatctctccaaacactactctgtcctatccaggctccagcctctgcttaatttaagcttatctctttccagtggcctcctctctgtgctgaaggctggagcttcagcgtctgatctggggaggacacagtcagttcctggtgcacacatgcatagtgcacacattccgattaagggatattttaactgtcaggcttaaagcttcattatcctgtgggtaagaggagttaaaaggcatacctgctggtgacctatgttaccactgttgaaatacagcgtgagggggctggagaaaagctcagtggttagagaccttcttgctctccacaggaccctatgagagttcccagatgtttggacagcttacagatgcctgcaactccagctatggggatctgctgtcctcttctggacttcatgggtaccagcacatatagacataaataaaaaatttaatctcaaaaaaaccccaaacaaacaaataaacaaacaacccaacttgaaagacctgtctgccagactgatgatgttttcctttgagaatggaagaggttgaacttgcagaagccacatatcttcaggagtggctgctttgtgttaattttagaaact

SEQ ID NO: 30314 - DNA, 1099 bp, Mus musculus
ttcttctcttctaccaggaaacagaccaaaggcagtggatacaagaccgcagccgcacacaaaaagcagcatcatgagaaagaaggctgctcagaacgtggactccaaggagggagagcagaccgtgtcagaggttaccgagcagctggataattgcagattagatagtcaggagaaagtggccacttgtaaacgtcctttaaagaaagaaagtactcagatttcttcacctggccctttgtgtgacagatttaacacttcagccatttctgaacataaacacggtgtatcacaagttacgcttgtaggcataagcaagaagagtgctgagcatttcaggagcaaatttgccaagtcaaatccaggttctgggtcagcctctggtttggtacacgtgcgtcctgaggttgcgaaggcaaatttactccgagttctgtcggacactctgactgaatggaagacagaagaaacactgaagtttttatatggccagaaccacgattctgtgtgtctgaaaccctcttcagcctctgagcctgatgaagaacttgatgaagatgacataagttgtgacccaggtagttgtggtcctgccctgagtcaagctcagaacaccctagatgcaacactgccctttagaggctcagacacagccattaagccactgccaagttatgagagcttgaaaaaggaaacggagatgctgaacctgagggtcagggagttctacagagggcgctgtgttttaaatgaagacactaccaagtctcaggactctaaagaggtatgtcttcatgatgggtgtcttcatgatgtcttcatgatgggtgtttcaggctgctcagactgagagaactctgcagagcagacctgggagcctctcgctctgcagtggggtaggtcggtcacttagatagtcagatgtttctctaggtgactgcagtggagtaggtcggttacttagacagatgtttctctaggttaattgcagtgtccatttgaaatgttacagatatggctgggggtggcttactggaagcttgaggacctgggttcagattcctagcactaataaaagctaagcacagcttacccactg

SEQ ID NO: 30315 - DNA, 2964 bp, Mus musculus
ctgaatcctgctttggcagatggcagtgagagcgaagcagaagacggtatgctgggacctcaggagagtgaccctgaggctccacagaagcagcccccacagagagagtcctactcaactaccgtgtgaccgtcactgtgacagccggagtcttgagggcagcagtgttacaggagaagagctggagccatcccttgtcctgtacatatgtctgtttacagtcttacctgactgtctttgccaaatgctcactgaatttccattgccacagtagactgaagtatgctaattggtaaatggggttctaacagtattactgaatataaatttttcctatttagaaaatactgctatgtctaaatgtgagaattgtttaaaaattgaggactatgggaaattggattctttttaaacaaaactgctcttgtgcaatattttatgctcattgaacaaactgtacatttgtgtttattagtttccaagtcagctgcctgtagacgtgtgaccagcacagagatgtgatttatcctgtgcttggcatgtctgtttcttcactaaaattcagttctgttagtggccattggagactgtcacacaaacaccttttctttgtataatttctaaacacaaagtaattgtctgttctgaaagttttttgttttagtttctaagttttatgtgtattatatttctgtgtgttagtcagaatagtagcaggttagctacagatatattatttgtacatatttataaatctaccacccaacacctcttacttacatgagtagcaaacattgactaggactgccttcagcattccaacagaacttgtgtaaaataacaggttaaaagacaactcaatacagatcagacactactggcttagcagctgtagtaacttgcagattcataactgattgctgtccaaacactactgatgaagccctttactccatctgtaactaataatataagttccacgattaaagaggttatagcacatgctacttcttgctaatctatttaatataatttagcactagaataaagtccaagatgcacacaaatatatctgaaaagaatgttgtgagtattgtattaaatccttcagcttctaaccgacaggtaaagccataaaaaccctttactcagttgtttccttgtgttcagactttttctctagaaagccgagtgcctgttagttgtgaattgagaaaggacactcaacctgtggagaggcggcaggctgctgctgactggatgcctccacactcttttgttagcagcctaggaaaagaagagccatagtgggaaatagaacttagtacatttatggaattacattcttagacagaatgttttatacatgaagaaaaatgttttatgaaatggagtagaagaagcaaaagtagttttcattctatgactgtgtgatgccttatgctgcattgtgggctgggctgtcccagggagactgtgcccaagctactctcttgcttgacagacaagattggaaatgccttctgtgtccagagcacccgctaaattcttgtatttaatttacctgtgatcacaagctagttatttgaggtattaattaaatcttctcaaaaggcctcactaatgagctttttagctccctgctctctggcaatacaataagtcttatttaaatatgtctgcagagactcttctgtagagatggaaattcacgagcatggagtcaagtctctcagtgagagtgggtcctgctctgagagtgacagcactgccagggtcgagtcccttcgggttctcctgtgtggctctgtactcttagttcaggaggttgtcgtagcccagcaaagtgagatgacttgtatctctgttctttatctcgattccacattaggaaacatgaatggggctagcagtacagctcgaaagttagaatgcttacttaaaatgcccatggccctgtgtccaatcccagaaccaccaaaagacaaacaaagacagagaacaacctaatactctttctggtttgaaataggtgtaaaataaccttggtaattagattttaattcattgatgctcttttggtttgtacaggggaaagctagaagcgtttaggtttttgagtcaagtcaggtgcaggggggcatgcctacatcagctactctggaagctgaggcaggaagactgcttgagtacaagaccagcctgggtaatatcaaaaaaatattttttaaaatttacatgcacctgagagaaatataaaatctttatggatatcagggtcctataggatactatgctctgatctgactccatttcactcaaactaatattaagaatctgtttaggactttaaggtgttggactgtggtctaatgatgaatttttacttcatctgatatttttgtgtttttcaaatggtatctattcacaccctaagacttgaaggatgttctaggcagaaaatgagtggatgacagaggacagaaaactttgctgtcttgggatagtgactttccttctcttgtttctgcccaggtgacacactaaaggagagcccagacattaggatccaaaaagcagttcaacaaactttttttttcagtactgggggtggaacccagggccttacacagtgggtaagctctctactgctgtgccacacccagagtctgacttctttaaaatcaatgcataaatttttttatggagaacgaggccaaagagattgttttatcaacttctactctggtttcttgctgtttgaattttttgttttggtttgtttttattttgcttgaccagttgtcagccagtcagcctttgctggttgatggaaacatcatagtccagctaactggccatttatgttgagaacaagagaaaaagccttttccagccctgagcacaatgcagcttgtgaatttccaggcagtgcctttgattgaaaataatgtctactgcttt

SEQ ID NO: 30316 - DNA, 1174 bp, Mus musculus
gaggatgggaagagagagagatctagtaaatgttgaacttggtctttgaggggtcctgtgagacgactcagtgcgaggagacagttgctgcaaggcctcggaggacctgagttgggtcccctggattcacactgtgaaagagaactgactcttgcaggttgtcctctgcgctccatgtatgtgctgtggagcatccccaccccaaaaccagtgatatgtgtaatataattttagaagaacatggcttttaaaaaatgaattttgaaaaatacccaggtttgcaacagtttaaattaagctgggcatggtggtgtgtatctggaatcgcagctcttaggaggcctgagacaggaagagcatatgtctagccaaccaggagtactaattacaaagcaaaagcgtctcttagcaaacagtgcttacacacgtgctctgtaaagtttgttcatcctctatagagtacttgttgcgatatagtaatgttttatgctttagcgtcacttagctcgaacttctggaagatggaaagacccacccaagaaaaatgctgtgaatgagttacaggatgagctgatgagcattcgccttagagaggcggaaacacaggcagaaataagagagatgaagcaaaggatgatggaaatggagacacaggtatggcgggcaggcccaggtgggtggaatacatctctagatccaagtcttacacagttgttttctcaaaagtaactgactataaagttaggaagagtgaaaatgtaggttttaaatgcgaagtttgaatgccatgccactgtgtttaagggagtggtaagtgaatgaggttcacggtggtgtaatcctgagaactgacataaaagctgaggtctagacagtagtttctagtcctcacgcagacagctaaaacctacctattgctgtctgctcctgttcttttaagacagcacctgttaccaaagcgggagctccagcaatgcaccattgttgttgttgttgtttgtttcaattaagctggctggctagcaacttcagtctgtctgtgtaaccctagagttataaatgtgagcccacctttcatatgagtgctggggatctagactcaggtctccaggcttatgcagcaggcgctctcactgggccattgcgccagtactgtttgctttgttttagcttt

SEQ ID NO: 30317 - DNA, 1175 bp, Mus musculus
ttataaaaattgcaagcttgtggtatgttgataaactttattgattaaaaacatgtttctagttgttctttagtgttctagtatatggttgaagtaatttgtttctgtcagtttgaggattctgctttcttttttaaaattttatttatttattcttctctcatactgtataccccaattacagcctcccttccgtccaatccttccagccccttctcccccgactcccaggtctactgctcctctgtttcctttcggaaaacaacatgcctcccagtgatatcaaccaaacttggcataacaagatgcaggaagataggcataaccctcatgtcaaggctggacaagacatcccgtagaagaaaaaaggcacaaggaggcagaagagtcatagaaacccccatttcccttgttaggagtcccaacaaaatccccaagctagagaagcacagaatgtatgcagaggcctggtgcagactcatgcaggcatcatggttggcacttccatctctgtgagctttgctgagttggttctgtcaaccgaggttttcctgactcccctgactcctacagtcttcccgcctcctcttctgtggaggaggattctattttgatgtgagccatttgagctttatattttcttagtgctttcctcatacaggatattggcaagctgattgagcagatcttatcagagctacatcttaagaactaacaatataggtaatgttcacagaataactgatctatgatttcattaatacatatggtacctttagcttggctgaggtcattctgaaagagtatattttgtttgacaaggtgcttactaaggatggttgcaaatgaactttctctataagcattattttaatagatccagaattactagaggtgacatgttggttacagtgccttagattgacttaggtccagtgacataagcaggaagcacaagttcagttcttacctgaccagcttagtggggccaaggtgccctgtgatgtagcttagtgatggaatccttgcctaggtacaaagcctgggggtcagtcaaccgggctagaaggaggccatgtctccatttgtacatctgttaggaaaatggagttttgtaaaattgaaatgctttcatgaaagcatttggtcatttttaatagttttaatttgatatt

SEQ ID NO: 30318 - DNA, 1172 bp, Mus musculus
acctctttgtggcaatgaatatgaattataatggggctaattgtattaaatgcttaaaatacatcttactggctcaggttttgtttttttgtttgtttgtttggttttttcaagacagggtttcctggctgttctggaatggttcagttttttaactgctatgcatagtgaaaaagtgcaagagttgctgatttcaaccaaacaaaaattgttaaaactgtaacttagagctggcatgatggtgcttacttttaagctattctggaggcagaggcatgtggatctttgtgagtttgaggccagcctggtctacagagtgagttccaggacagccagggctacaactagaatccctgtctcagcaacaacaaaagctaataattgtcgtgaagtttttaaatgctgtccttactttatctagtatcatgtgagatggtatcttaaacacctttaattctgtttagattaatagagacagacagtaagtctttaagatcagtgaatgggtcaagaagaaacagtggttcctctcttgtatcaagttcatcagcctccagcaacctcagccacctggaggaagactcttggattctctggggaagaattgtgaatgaatgggatgatgtacgcaagaagaaagaaaagcaagtgaaggtatttacattgtttacggaagttctttctcttatcccagagggtaagaggcattaggagaaatggaaggattctcctagtaacctgtgtgctgtgtaaggaacaggttgcctttatatgtcttcattgtccatgcttgatagaaagaagtctaggttgtagagattcacagttgaaaaaaaatatttttagaagttaaattctcccattttgtaaattcagaaatgaaatggagacatactgtgttagcattttgcctttttccttcagcagccctttattttttattttttttcttttctttttttttttttccattttttattaggtatttcgctcatttacatttgcaatgctataccaaaagtcccccatagccgcccaccccctctcccctacccacccactccccttttatggccctggcgttcccctgtactggggcatataaagtttgcgtgtccaatgggcctctctttccagtgatggccgactaggccatcttttgatgcatatgc

SEQ ID NO: 30319 - DNA, 1245 bp, Mus musculus
tccaattacaaaggttttgtcattttttttttcagctgcacttgagagatattcctgtcttattccttactttgttttgtaggtggaatcgtcccaaaatgtctcttgcccagaagaaagatcgggttgctcaaaagaaggcaagcttcctcagagctcaggaaagggctgctgaaagctaaagcagttttctatgaagattttttcataaagacaataaacatattgatcaagcagctttttctgtgttaagctgttattaatgagactataggaaatagtgtgaaattacaaaagcaaagaagtagatagttatttaattaattaaattaattttaccttttgtgttgcaccataacctaccactggtgggattaagggcaagtattaccatgcctagctgagagtctttctccaggaaaaaccagcttacatgggttcctgcaaatctcatgagtgtttcttgggtttctagtcttcctgggaggtgtccttatctttcagattttcagatctggtaattagcatgatcatcaggacatttattacaaacaaattgattagtgggaagaaagtatctcaaggtcaatcttggaagtgaacaactggtgctaatccatggctttaaagatttgagaacaacggtgaaatttggtttgaggagaagggggtgtctaggacgtttcatttttatggtacatgccagacatgaatgtacataggaaaataacttgaaagggtcaaatattaaaccttgaatatcaggttcacttgggaaagcattaggtgcttatgcctcttagtaaatagcccttcatcccagaaggagcaagaattgtcttcctgacttaatccagtcttagctgaggtgctgtgcatctttatcatctttgccttgcctcacagtgtcaggctctgtggtactggggctacacaggtcaggtaaacagttaactgcttacctacatccccagcaaagataatgtgacgatactaagatgaacctatcagagcttaaagataatgagtttcagtcacagtgataactgcatgctaacttcagcatgtagaatatatgccgaagctaaaagccattccacagttgactccatctgaagttaaagtgtgtaagtacacagtaaatcatgctatattaactgaactttttaataaatgagtcatttgaatttacctgtgtggcattcttaatttgtgttaatgtgcaaagttttaccatgctaaaac

SEQ ID NO: 30320 - DNA, 1192 bp, Mus musculus
gggaaattggagcggcacaatagagggatgaaagttcctactagggaggtgagtcctatttggggggtggtagctttcagcccttagattaaactacctttaatctagtctttaaacagacagttgttacaagtagtttactgactgtgtattgtttatctatgcattgtgtgtgataggtgtacgtgaggatatggtaagcaagccctacagttttctaagaacacagactgtacgtatacagggtgcagagtaaagactcatttttttattgaagaaaaataattgaaattacagattactttgttcattttttttgagaaatgatactatgctaggttcttttttttttttttttttggtttttcgagacagggtttctctgtgtagccctggctgtcctggaactcactctgtagaccaggctggcctcgaactcagaaatccgcctgcttctgcctcccaagtgctgggattaaaggtgtgcgccaccactgcctggcctatgctaggttcttaaatgtattttcacaatctgttacttttaaaaaaaatttttttttgagactttctgtgtagccctggctgtcttagagctcactctgtagaccaggttggcctcaaattcaagagctccacctgcccctggctcctgagtactgggattaaaggcgtgggccactgccatcaagctgatatcttagtcatccccaactcttctcagaccacctcacctctaattcccctactcccacttttgaactatcccactaagcctagatagattgtactggctgtgtgctccagagtgtgaaggccgtatgacttctgtgtcttgaaactgtagcctcagaaagtactttaaatgcatttttgtttgtttgttttgttttcaacacagggttttctctgtgtagccctggctgtcttgtaactgccttgaactcagagatccacctgcctctgcctccccagtgataggattaaagacatgttacacaactgcccagctacattttaaaatgcttgtttgtgtgtgtgcaggtacctgtgtatcatagcatgcatgtggaggtcagaggacaacttgttgcagttagttttttctagtttgtgggttctgaggatcaaactcatgttgtcaaatttgcagcaagatccattacttgctgaggcatattacttactggtc

SEQ ID NO: 30321 - DNA, 1140 bp, Mus musculus
gaaactcactatgtagcgtgagccttgaactcagaaagctctgcctgcctttgcttctcaagggctgtgcttcttaaaagcttttctagggatttggctttggacaggatgcaaaaagtgaggtcaaagggtaaaggtaactgttactaggatgggttcttgttcccaaacgcacatcatcaatttcaggagaagggagaaaaatgacaacgtttaatgcttgatctaagaatgtgtactgtgtaatagaagtaatacagtggagcataagacaagaacataacataaccatcacataaaagacagggtatgttgaaataatagcaaagcatataactgtgtctgaggatgtttgcctctttgattgtatggtttccattccaggattagagagcattctgctggcttatttttcataattatactattcaggtttgggttattgtagtggtttttaagttttatttattttatgtgtatgtgtacactgtagctgtacagatggttgtgagccttcttgtggttgttgggagttgaatttaggatctgtacttgctccagttggccctgctccctccagaaaagggcatcagatttcattatgggtggttgtgagctaccaagtggttgctgggatttgaactcaggacctttgggaaagcagtcagtgttcttacctgctgagccatttcaccagccctattgtagtggtttgaatagatttggcccccatagattcatgtttggaatgcttagccatacagagtggcactattagaaggtgtggccttattggaggaagtgaatcactatgtaggtgggctttgaggcaccacatttgcctgcatgctattgtacttcccaccatgatgataatggactaaacctctgaaactgtaagctagctctatttaaatggttgcctttataagagttgccttggtcatttctttacagcaatggaaatccaaagtgaaacagaaagttggtaccaggaagtgaggtattgttgccataggcctgaccatgcagctgttttgtttttttgtttttggaggaatgtgggttttgggacttttgaaagagtgggattctttaattgggatctgatgcttaataggcctcactagtagaagcatg

SEQ ID NO: 30322 - DNA, 1156 bp, Mus musculus
aaatgacttcttgagtcctggcttagggtatgcagtgagcaagtatcatgaattattgttcttttgttttagttacatctacttagaaagtacttgtcatttgagttatttgttgtttttttcacaaattaaggattttataccaaaagtttggttaacatgtgagatttatctggtataaaatcttatacgtcttctatttggtctatttcctgaacagagactctacaggagcaggtaattcactggtccacaagcggtctcctttacgtcgaaaccaaaagacctcagcatccttgaacaagctgtctttacaggatggacataaagccaaaaaaccagcatgtaaatttgaagagggtcaagatgtcttagctagatggtcagatggcttgttttatcttggaactatcaaaaaggcaagttaccttaataaatttctgctatacttgcattactcattttaataattttaaaatttaacctcatgcttagcagttttaaggggttactgatttcttgtgtattgcagataaacatattgaaacagagctgcttcatcatatttgaggacagttccaaatcctgggttctctggaaggacatccaaacaggcaggtgctatgttactcttgaacatgattgatatcgaaacttagttttcttcaacatgactttttctgatgccagtgatactgaatatactgttcttcagtggctgggtagcatgtataagacgtttaaaaatttattttataaacaaaactctatagtttaattgaatcatttaatactattttctgttattcttctacatgctgaatcagttttagcctttctactttggagattttggtaggtttgacataggtctttatgtctttctgttttttttctaaggcagtttttctgtgtggccctgggtgtcctggaactaattctgtagatcaggctggccttgaactcagatctgcctgctgcctcccaagtgctgggattaaaggcatgcaccaccacttacctacctctttttgccttttaaatcccatctttttccatttttccattctctttttttcctcttcattcatatacatacatatatatatatgtacatatgtatatgagaatggttgaatatatatatatatatata

SEQ ID NO: 30323 - DNA, 1104 bp, Mus musculus
ctaaaagcagattaaagcatgtagacggacatgttaagttagaaaggggaggaacagagctagtgaactgagcagagaatattgtatgttgttgcttgctttgttgaacattctaatatagttaacacatgctcatatgactactgagtcataaaagttctgtggagttcctcatgactttaatactgctttatgtatttcaggagccactgggagtggggaaatggtctgtacaatatgtcaagaagagtattcagaagctcccaatgaaatggttatatgtgataagtgtggtcaaggtaaacattcatttttctcaaattttattaaaaagttagcctattgaagactagtgactgtagatacttgttttgctaatttgaaacattatcataagatctattcatcatttataatatagggaacatgccttcttgaaatcctgttctgcagtacttgctaataaactagaatttgctttctgctcttttgatatgaaggatatcatcagctgtgtcacacacctcatattgactcgagtgtgattgattcagatgaaaagtggctttgtcgacagtgcgtttttgcaacaactacaaaggtatcttttaaaagtgttttggggcccattggacttgcaaactttatctgccacagccagggccaaaaagtgggagtgggtgggtaggggagtgggggagagggtatgggggacttttttttgggatagcattggaaatgtaaatgaggaaaatacctaataaaaaatataaaataaaaaaaagtgttttgggctaaacattattaaatagaatttgtaaagccttattgaaatgaccatgtttgttctgaatgaaagtagcagctaatgttggttagaattgttttattaatgatccttaaatggctcgtagggtttttttttttgtgctttctgataatggtgtggggagtaggacaataaattgaaataatatagtaaatgcattattagtaacagaccagacaatatggtatcatagaaattcagaatggaaattatttcagaagtgtcaggaatttttaaaatgtagaattaaaaattagaaaatttggttaaaaaac

SEQ ID NO: 30324 - DNA, 1101 bp, Mus musculus
gcgtgtacttttgagggttgaatgtgtgctgctttttgttatttttaaaagatttatttattttatgtatttgagtacactgctgttgtcttcagacacactggaagagggccttagatcccattacagaggttgtgagccaccatgtggttcctaggaattgaactcaggacctccaaaagcagccagtgcttttaactgctgagccatctctccagcccctttgttatttctctctatgtatctctggcatcttgaaacttactgtgtagacccgacaagcctcccaagtgctggaattaaacgcaagtgccaccaagccctgcaagcatgtgcttttgatgtgtgaggccctcaaaactccttctaaaactctgttatgggtatctaagattaggaggacaatctgatagtgacaagcataattggcctagtacagttagtactagcaccaaagtgctgatagaatatccacctgagtttaggttctggtgttctttctaatcaggagaatttgagcagtccattttacctttgtatggcctgtgtgctatgaggtgtttggcacttaggatgtccacacaagatttgtcttttgaaccctgaattatacttggtttattcacacaaacattccatataatatgctaatataaaagtcttcgaccaagtagccaacagccaagcaggctgtgcaggcttccactgggtgtccagtaaggaagctttgcaggcttgaaccatgtccactgcatgtcttcctctgaggcaggctgggagaatggcactggtagaggtctttgagaacattacctagcgtcttgcactgagcggtgggcatgcgtgagctcagcaatagtgccagaagttcagtggtcacttaacttaggccccacacaggccagtcataacgtcctcttgctaaggcagaggcttgagaagcaacatctcaggagctttgtagtgcagttctaggggctgcttttaaagttccaattttttattgttcattagactttagttttgtgctttcagggtttacagcgtggggttggttcactagcatatcaatgctaccttaaggttaacttgttagcatat

SEQ ID NO: 30325 - DNA, 3093 bp, Mus musculus
tttaattgtactgaatattatctcagcaaacacatacttaacatagccaggtggtggtagtcagtaatcccagccttggggagtctgtggcagggagagtaagagactttgctagcctagtctataagatgagaacctttgtggaaaacattacccaagtgaaaaagatcttagcagatgtgttcttttccctaccctagattatcagactctagaaaaagaactcgcacaggaagatcatggcctgctgcaataccacatttgcggagaagaagaggtcgccttccacgaagagcactccagactcagaactcagaagttgtgaaagatgatgaaggcaaagaagattatcagtttgaagaacttaacacagaaattctgaataacttagcagatcaggagttgcagctcaatcacctgaaaaactccatcactagttattttggtgccgcaggtagaatagcatgtggcgaaaaatacagagttttggctcgtcgggtgacgcttgatgggaaggtgcagtatcttgtggaatgggaaggagcgactgcatcctgactgtaggactgaacgtaatgttcactgcactcgttttctgttggtacagttaaaaaaaaaaaaaacaaaaaacagagtgtgggttttattatctttcttagaaaaacaaacaaagagaaaacacaaaaatattcacaaaaggagatgatactggccttaaaacatgttcttgtcaatgttatggatattgtcataaaaaaagatatcttttaaaaatcagaggagagacttaatttttttaaatcttaagatttgtagactgtttctaggataggctattaaacatgattcatacccatgcatggtgttagatactttttataattattccattgagtcaatttttgtgattagtggttatcagagcaaacagatcatgtagatagcacaagtatttggagaaacattgtgtgttttgttaacaaaatgttggaaagatttatttcaataccctttagatttcataaagtgcagtgtatataatgtctactgaaagactgtaaaatattgaaatttctttcaagcaaaatgtaaaaaaatatattgagcctgtaaattgctctgtgactagacttcattgtcgtcttaatatattctttgcatgtacatgtatatacacacatgtgtatatatatgtgtgtgattatgtgacctatgcaatacaaattatgggaatgggcagctttggagtatatatcccataattcttatttcaggaatagttgcagtatttacacagcagcatttcttctcaggcgtttattgggtgctgttgcttgctatgtatgaagagaaatgtgtcaagtttagtgtgtactgaagaagggtgtgaacaacagtgtacatgggcttttagagggcttttcagtccttgtaactcagctgttgaatacctaaaacaaattcgagtgataactacattatttcctattagaagtgacgttttcaagtgattgtggcacattatgattgtaaatgtctcagttttaacagcaagtctgtgggagcccagtgaagactcctgaaatgtctgtagtaactgttagtcatgtttgagtaagcgtagtatgaacaaagtcttttattgcacagggttaacaaacagtatgttgctagctgaggctaactgctgttttattacaacattacctcttgtttttataaaatgtaccaagattttaaattgatatctttattttacgtgttaaaaaaaagtttcttttatcaccagtgttagagttgtcttctgtttttttggtttgttttggtttggtttttttcttgttgttttctttcttagccaaagagtaaacagaagaatattattttggtagctcttcattttacttttataatgattggtggattttagactaaaaattggggaaatttctgccaaaatgaaaaaatatgtgacgtgtattgatgacagaatgctaaaattgtggttagtgcttatttattccattaattgattatttgcctgtttttaaagaaacatgctttatttccttaagcatcttcaaaagatgacttttcttgtcacattgtagccaaaagaagcagagaatttcttgtcctgcttttggttcctggttaaccaggtataatgagctttacaaagtgcaaattacaaactgtcacttctgttcacctccaccaaaacttgatttcccctagctattaatttaaagttgcctttcctgcagctgcaatattttgaataacacagagattgtgttaatttttgaatgtttgtttatatctaggggtaatggaaaatgtaattcccgtgtaaccttattcactccagctgtatcatatttcatttttcccaaagttctttaattttaactgaacaccagcagtatttttagtaattctttaagatacttggaagacaatttatcaagctgaactgtctctagacttaattattgtgaatgtctgttttcttttatcatggtggttcacatggctctgatgttcagtttgtatttttgaaattgctttacttagaattaaaacagaccaacattaaatgtgtgtatttttaaaagagctaatgagtttttcttctgtatctgcttgaaaatacacactggtgcagcagttaactgcttttatttagctagggaggaggaattttccaattcttttatatacttgaattagtcttgaagaactttgcttccatttccttttgtcataatgataatagtgtatgttcactgtgagtgatcttttaaaaaaggattacatgctttgtatttgaaagacagtgtttatgtcctttcctcttccaaagactgtagaaaaatcaggcttcacagttgtttcttcttcctaggtattggggcacatgtaaacagacttcccgtttttgctattttttttttttgactctaatctacagaatagaaaagttgtaaaataatataccttccttcctttttcattttaagcatttaagagaaaaagagagcacagaagctgtgaatcttggcagctgctggaataggtaagcgtaggtga

SEQ ID NO: 30326 - DNA, 1581 bp, Mus musculus
taggtttatcatgaaacagaatttaagttacactcacttgtagtgtttataataaatgtattgtcaagtagagatagtcaatagtcagatctgggtattgaacccatataaacatacacatatttttttttgctggaattcttattacgtattaatgatcttgcactaccctgctacctcacacacaaaattatgatacccagagaaatactgatttcatttacaatttatactcagaatagttcaaaaatatagtttcctctttctcaggcccttgggaggaaactagaaatttatttttccctatccagaggcttttcaaaatgtgagataaatactatatgtgatcaataactgaccaagaaaaatgccctaggcttctaaccaagctcctacaatagatgcagaaaagaggccaatgagatcgttgcctaaaaaaactctcttccctactttaagtgcaagagaagcaagctctagacagctatcctaactgataaagcagagtccactgcgtctcttctgaaagactgtgactaagaatcctacctcttagatacagctgatactgtactgtgttcttaactgcttacttaacactgtatctgttacatcatcttgtatgtatggaatttgtgccactgactttttgaattcttactcagttactcactgccatttaaaatggtcatagtagctttgctggaaaatcgaataacttaggaatgttaaaagattttatttttatagacaaaagtaaaaagatactaagaaccatgttgcctgtattaatcataaagaagtaaaattgtaagcaaaaaccaaaatgtttatttttaaatgtgtattttctgcttcatagaagttttttgaccttactgtcttaattatactaaaatcaagtaagccatcacttgctctgatttttgtcttgttaattgtataaattactacagtagcttaacaagtttagagatcattgttcttagttgcagttggactgtgtgctcttttatatgaatgtcaataaacagagactaagtaagtgtaagaagacattgttgaaacataaatcaaaatatacttaggaatatttacaattaaacatgatgttttaaacttagtaaaaaacaaaagcaaaaacaaacaagtacctgtaattttgtacctacagtgaaaattctttatctgaaattttaaaatacattgatatagcatgtaattttttttcttctggagtataatacaatgtggctcatatggcactatatactatatttgtgaacttttatcttaaatgaacaacagactatgtactgagctccatacaactaataaaaggtactatcaaggaagtcttaccaacctatcataattgttacctactccttaaagcttctttaaaaatttcaatcttaagtaaatttgtttttctttcacattttgaaaggccacagctatcaagtttttatattactgtactcacttggtttctccattgcttaaatatattttttacctaaagggtctttaatcccagcactcgggaagcagaggcaggcggatttctgagttcgaggc

SEQ ID NO: 30327 - DNA, 1167 bp, Mus musculus
ctaaagttaaaaatctttcccagatatcatatatgaattaaatgaattaacaatgttcataaacatgccaccagtttgcttttacctagaattttctctgtatatgtggcaggtacaagttaaagaagtttccaataccttacattagaaatcatttgatggccgggcagtggtggcgcacgcctttaatcccagcacttgggaggcagaggcaggtggatttctgagttcgaggccagcctggtctacaaagtgagttccaggacagccagggctatacagagaaaccctgtcttgaaaaaacaaaaataaaaataaaaataaacaaaaaaaaaaaaaaaaagaagaaagaaaagaaaaaaagaagaaatcatttgataattatataatcatggactgaatagatcagcttttctctactaaatctctccaaaaaaagtaaatacaagcataccactgaaaaaatactcctatcatttttacaaccaaatataatgtgaaatattatccacaagtattagtttttatatacttagtctatacttccaaaacctaacatttttataattaaaactggaaagggattctttctttataaaaattagacagtgtctttgtctttgatataaggtatataaagggtagttgatgtttgtgactgagatgcattctgtctagacgttagctaagattaaattagagataagatgaacttatttttatattacgcatcagcagtgttaagttggtattgataatgcattatcacaagcaggtgtgagggacatactaatgaaaagatctgacatcagtgtaaataaacagctcctttctaaattctcaaaaccatcagaaacatgaaggaaaaaaatgagataaatatgacaccagatccaacaagtttacctagagaagtgtaacatctagaatcaggtgggctcttcttgctaacccaattataataaagatcagatcaaaggagggtaatctaaaattccccagaagaaattgtatttgtcatagctttttattctaattactgtttttattataaatgttcagatagattttgtgaaatgtatattcctaccataagacttagcactaggtatgcatatttattacagtttttattatagctctcacaaaattacctctggtcattta

SEQ ID NO: 30328 - DNA, 1100 bp, Mus musculus
ttgcttctttagtattgaatcttgggctatgtgtttgtgtttttaagtctgatttattttgcttagtattccgagattttcaaaatatctttaaaacattagtcagggaacatattttatgtaattttcttatttacttttttagtagtagttattcagcccaagacttcatgtaggccttgctggcctggaacttgctatgtagaccagtctaggcttgaactcagagatcctctgcatctcattttgtggaagtctttcatgagtgcagttgactgtagaagccagcagagtgtatcagattggagctggttataagcaattgtgaattacttgacaggtgttctgtaagacctcttactgctgagccatctatccagctcctttccctatgttttaaaatatcagtcatactaggttgatggttttagttttacattttcttcatacctgatgagtttcaatatatttattgtagcaattattgagagagtagtattaaaaatcttcaaatacatttgattgctgatttatgtgttgttgtacttctgtcaggatggaacctttctagtcctaccttcctcccctacaagcaagtaggaaaaaaaacccactgttttaaaactgaggctggccttgaactggcagtgtaacaaagttggctctatcatagtactttgttttaatcacgcagctctcccagttcctccctgtgctccctgtacctctggctacttccttcctgtccctcttacactttctcagctcatgcattccattcacatgtcctctctctttcccctctcttattctaatttcatgatttacacatgtgtgttgtgcactgtcataaacatttataattgaaatctgagttgcatatattagaagacaaaacatggtacttgtctttctgagtttggcttatttcatttaacattatgatcttcatttgtacccactttccagaaaacaacataatccattctttatgcctattttgtgcagtaataaatacggatatgcaagtatcctgtgtgttgacttagaatctcttgcatatagagtggtctagctgggtcacatgtttgattgtagag

SEQ ID NO: 30329 - DNA, 1690 bp, Mus musculus
agtggagataacagaaagttgtgatcacccatgtgggtgctagaaatcaaccctgatcctctctgtaagaaacccagtactcctaactgctgagccagctctccagccgctctattaacctttcagtttcttcagttgaactaaaaatagtaaagttattgttttctcgatatgtcataattacatagtgcttggagaatatctacatttaatgattaagtctgttagttgatttaatttatattttactggaatgtatacatttgcttttatgtttttaattcttaggctagacagcaacaagcagaattggcccaacaggaatggcttcaaatgcagcaagcagctcaacaagcccagctggctgcagcctcagccagcgcgtccactcaagcaggatcttcacaagacgaagaagatgatgatgacatctgacattcaccacctgggctttcaagaaaacagtgaaagatatgcctatctgtaattctgtatgcatcttggtggacttaccattggtattctagagacgtctgttgtctggtttcaactactgtgctatacatgtaaaactgtctctttgaactattgaaaatttaaggttaagtataatatcacctttggatttgtaatggtgtttctggaatcttagaccagtgtgaaccctttatttggtcaataaacagtgttacagaaaacttcaggtttataaaatacagtgaaatttatagagatctcttaatctgtatttgtattttgtctgccctttgaactgaactaaaattgagaatttatatagcgatggggcatgatgtgatgcagaatacattgaatcaggttggtgaaaaagttcagttctatatagtatctaaattttttgtcttttaaggtgagtatatatgcaggcaacaattatatatgctcagataaatatacttgtttagaggaaatctcaaataagacattcaataactaggaaagaaatgtactcactagtagttgtataaatttggtgagttatatttttgattttgttactgttttgtgtaacagtgaagactggttttattatagtataatttatcttgaactacactatgccatttcagagactggctaatcttgaagattgtcacaattcttactgtttcactccagttcagtaattgttcatagtcttagttgtttcgtccattttttgagtgtataggtgggacttgtgagacagttgcttgggttctgttagtttaactgaggttgctggatattcaaacctttgctaggggaaataaacgaaagctaatgaacatgtttgctatgaaaaagggctttaaatttttatttaacatgtagtgtacttattgtttggttttagtgtagcatttacattttctcgactaggtggcctaaagaatccaatgctaacttttgataataacatcattgtccccgtcatcataatttagtagtagctttaaaagttttgtgtttgcttaaaaagtgtcataactgcagccctatatgaagtgttaacttgcttgttaaaaggaagcagctttaatttggttccagtgcataaagtgtggtagtgtttgtgagagggatccagtgtatttggtgaaatggcatattacttatattttggaaacaaaaaaatgccacctaagataataatataagtcattaagtt

SEQ ID NO: 30330 - DNA, 1141 bp, Mus musculus
acaaacaaacaaacaaacaagaacagactttcttttctcagtttatgccctctgccagtcacaatgcacagtggacaacggacaaattgtgggtttccacggtccgaaaggccagcataagggtctctctgtgtccacagtgattccaagaaaggacaaaaatgtaagcagaaggtttatgggggtaggaaacccgtggtctagatactccggtttcgttcctaactcatgcagttgcctgtcagcgcgcgtcctgaacaacccggcggagtttctccaggtagtgcttctgaccacgcctcctgacccacctctcacctgtgaccacacccccgagctccaccctgcctgtctcgccgagccagcttcctgagtcaattgctgcctgcacgcgcctgcgctctctggcccctcctgcaccccacccctataggctccgcctttcagaggccccgcctctctcgtttgcgaggtgggagctgagccacacactgcgcatgctccagccgcggcgcccccgactccgcactcggctgggttcgggcatttccgcctctttgttttaaactctgcacggcttttttctcctcctcttgggggggacccagagggagcggcgccccctccccctcccggcgagcccccgcgtgcgcccgctcgcccgccgcccgagacgcaggtcagtgagcccgccccgcctggcctggcccgcgcgcccgctcctcaggccgcgggcctcggcccatgggcggcagaaggctgcgagcccagcgcccccggcaggcccgggaggcgggaccctaaaagcctgcgagaaggccaggacttctcgcaggtctggaccccgggagggcagaacccagggccatgctggatcccggaacaatctggacccagggaggacagggaccttggaccagacagaacccggggaagagcctgcacaaggctggacccttgaccaggctagaccggggtgggcagaatcctagaccaggcagaacagcagccgaggtggattccgagcagtctggaccccgagaaaacaggacctagggaagacaaggagctcagtccggctagacctggcaccaggcacgattccagagaacaggaccccggaagaacaggagtctgggcc

SEQ ID NO: 30331 - DNA, 1158 bp, Mus musculus
gaagctatggtaagtgctgaatggtcctgggagcttatctctgccgtccttaccaattttggtcactttctccatcttctgagccccttaagacacactaatctaaaatctactgagtgccctaagacacataatccaaaacctgcctgacccagctgtagctagagagcctcatcccccagagttccttagttcctcagcaaacatgcagaatggttttaattgctatcactgagctcctcgtatgtatgctttcagtagagtaaatgtcaacgtcatttttagtatactgccaggtttcacaaatattataatacggtgttttcacatgtgctttgcttagccaaaatgcttgggccacaagtgtttctgaattggattccccacccccttccccatttcagaaaagttgcatttaatattttaattctgcattttagaacagtttccacttatacctcagaaagttttatatactagaacttttgaattttgggttagagatatttcaacctgtacattttctgtttgtgctaaaaggtgaaaccaaagcagacgacaattcaaataaagagacagcagaggagaagcaggaggaggacaatgactaccacaggagtgacgagcaggtgaacacacgtcctctgtggattttctggcatcagtttatcccgtgtttgcgtacttcatttgaaaatgtaacatgatcaaacaccataacgttttcctcctattaactccttaacttttctttatgttcctttcatttatttgttttaattatcagagcaacacatgctgactgtaaaacatttcaaaccttgtggacagaactacagtccacaattaggttatgttttttacagcccactgcaaatactcactattactaccttctctgctgtgcccccaagggaagtgacccatcagcaaagtgaagggaaataagcatgcaatgttgaagacaacccacatctcatttgctacattatcaggttaaaatatatagaaggatctgatacaattccgtatccctgtctatagaacttcctagtgtattgtctgagttgtcagttctaatagttgtgatgcttttgatgaaacagggagcaatgaaatgccatgactgtggctgtcactgtgcttagatgttctctc

SEQ ID NO: 30332 - DNA, 1103 bp, Mus musculus
tcccctggcttgctcagcctgctctcttatagaaccaagactaccagccctgagatggtcccacccacaaggggcctttcccccttgatcactaattgagaaaatgccttacagttggatctcatggaggcatttcctcaactgaagctcctttctctgtgataactccagctgtgccaagttgacacaaaactagccagtacactccccaagctctgtacaatgtttgaccatggtgtctgcatctgtttcagttggctgctgagtggatgttctcagaggacagttatgctagattcctgtctacaagtataacaaaatatcattattagtgtcaggttcttgcccacaggatggttctcaagttgagccagtcattggttggttattccctcagtctttgtccctgcaattcttgtaggaaggacaaatttttggtcaaaggttttgtggattggctagtgtccttatccctccactgggaatcctgactggctacaggaagtcaaactgcatatcccctactgctaatgaaaaatatcacataaacattaaaagcttgtactccttgcactcaggaggcagaggcaggtggatctctgtgagtgtgaagccagtctggtctacataatgagttccaagacagccagagctgtatacatattaagtcagtcagtctctctgtctgtctgtctgtctgtctgtctctctctctctctttcatagctactagaaaaggcagaggcaggcagacctctgtgagttcaagagcagcctggttgtacatagttccagaccaaccagagctatacgtaatgaaactatctcaagaaggaaggaaggagagaggaaagaaaatttgaaacctaagaaagctgaggatgtagttcaatggtagaacgcttgcttagcatgcacaaggccctacatttcacacactctctctgtgtcttggtttcatctcgactcgtgtcttctcttcctcctcttctctccctcctccctctctttctctttttctttttttctctctctgtaccaaaaaggaaggaaggaaaagaaaagacccaatgaaaagacaagctgcctagcctcctgtatat

SEQ ID NO: 30333 - DNA, 1238 bp, Mus musculus
gacttgctgtaagttcagccagactcagcccacacccagcactctacatggcaaaatgtgctgtggaacgttgcctctgggtgccatgcggaccagatttctgaatagagaatatttataacttttgtatgagagaatccactcccaacaagacactaccagcacgcgtttacagaggatgaaaacacttcgcagtttgctcgtctctgcttcaggtccacaggccagagaagaagtgaaacattagcacgtcccacaccacgtctgacacgcagcacctctgcttgctttccagggcttgagaatcttgagtttcagtttagttcatggattaggtttcataataagcctcaaaaatatttgtactttaagtcctttgtaagttattgaaagtcttttcatggtaaatatttatgttgcttttagcttcctgaagacttaagagatatataaaattttaatttaaagtatacccaaagaggcttgcagcaatgctatgacttagccgcggtgtttaatttctagggtactcagaagcccatccccgaggttgagtctgagactgtgcatcctgagatggcctgtgttggttgggcaagacaagaacccttccatcactccccagtgtcatgtggctgtaatctggctcccccagtaaggcaaactagaggtggtgtggccagtgcagcactggcttgttgaaaagttcttggaaagacagttttccttagagaggccatcactgaagctcctgccttttccattctgttttccttctgctggaaaaatgtagtggtggctgtgtttgtcacttaccaaccagcacatgccatccagtggggagactttataaagacacttaggaggtagcctctagcctccatgttcctggtagatcatggggttaacatgcgttctttgggtctttttcatgaaaggtaactgagcgacctgctcacttgaggaaacagctcgcttcagcagaagtggctttttcagtcatagagaggatagtatttgttaacacacacacctttctcacatacaatttattgctttgttaggttagagaatgaataagacactagcatatccaacttcattccctctgcaggggtatgagggcaagagtaaggagaacgggtcctgacctggggtcccagggacctctcagcctgggtgcccttccaggtccagtgagaattgtaggatcctataatcccagcagtacctctgct

SEQ ID NO: 30334 - DNA, 3047 bp, Mus musculus
gtgtatccctgggggtcaggctttctgagtcttcaccttagcaactggaatattttcttgagtttgctttgacagttggaattgagtttatcaacacccactttttcttctacttcctctttcacatacacagtgtcagaagcagcgattagtgagacttaatgttggtaagtaagaaaaaaaacatccaaattaactcaatctttaatgtctgaccttctaaaacaaaagcaagctctttttgttttgaattaatcaaaattcacctttctatgtaagccagtttggattattcagtttcctgagtttgctgtccattcaaatcatttctagagttactatacaagggtttatgcgtaaatattacctttctacctcagaacacacgtgctgctgaagcattctgcaagaccgtgttctcacaatgcagttacattagaacttaggtattttcccatgtggtgaaattaagcagttacaaacctccaaattcaagtaaagttaatttacagatcagatcaaacttagtatggctgtataatctcatgatatatatttgtaactttgtagctacttttagaatcacttgactctgctatggtgctaagttgatagatctaagtattcagcgaggtggacattgcaaccgatgtcttagctgggcgccaccgccccaacagccctgcttctgtcaccacgttaacctgttaaacctcagcagcaaaatacctatttttctaagattccatccccgcctgtgtgcactgcagacggtctcctgatgcccttctgccctttggtctgacctgtagccttacctcgctcagagatgaagcagagtgagctggcgtccgatggaagcttccgggcgccttatttcactcctgccaagctccacgtgacatccaaggccgaattttatttttccagcatgaacactaggatcagttagcgattggtcctgtcaagctttctcagcaggcggagctcctgcgaagttgttttcatagctgccgatgctagaaatcgggtgcggccggccggcagctctgagaccagcctcccagcacgtggtctcgctcaacaccattttcacaaaaatagaaaactcagatagaatatataatattgaatttaagatttggggggttaaaaaaaagaaaacttaactttataaaattatttattctattttaagccttctatcatattttcccatccaattgtttggtttccgtggtccagctttatttacaggcatataagataaaattgtgagatgttttgcaagcttcttttactttttgtagcctttggtttgtatgtttttatagggatgaagaggcatttttatgcttttgtgcaataggttccaacatgcgtttattagtgtttaaattgtgatctagcatctactaaattgaaagggaatataggtggaatttcaaaatctgtgcgttcagctatttggttttgcctttttcactgttattataagaatgctgttaccgggattatgtgcgtgcaagagtgagtgtgtgtgtgtttgcgtgtgtgtgtgtttgcgtttgtgtgtgtgtgtgtgtgtacgtactttctatcaatattaaaagataaacagccaggcaggaagtgacgaggttagcaccatcttaggcttgcatctctgtgggtgcacccaagtcctcgagctaaatctgtgactaagccaccctgggtgttggggtttcactgtccccacctggtagtgctaccctccactggcctgcagctcctgacacctgccctggccagcagagacttggaggctggtgtgtttcctttctaagggcatacagggtggtgtattacagtgctctgaaatgtatcattagatttaatgttccagtaatgagccaactgagttctactttgtatatggatatgttcctaaaacattgacagtaaattgagtgcagatagtgaaattcccacacacacacctacacacacacacacacacacacacacacacacaacacacgtgtctgtttcctcaggaaatcatttaagccccaacacatcacatgtgaccttaacatgaaaacaaaagttttctctgccttgatattaaatacactaagtaaataaactgagatgcgtagattaggaaatcacttaattgtaccacagtctgcatatctttgcattcctgcaggcagggattagaccatggtctcacacccagtgttcctgttgtcatttacttccatccaagagcacatttggagaaagaactaaggtgtgcctgtgagatggaactgaggtgtgcctgtgtgtcactttagccagtgactcacactcactgtttagttccagctctcaacttgtgccagacacggttttcccaagcgaaggtaacatcaggttacggacagcagcgccacctgagctctcacgctggagcgcagccacagctagcaacggtcacggtgtatgaaatgctgcagatacagagtttttgactgtttaatttgaaagtttacattttttatgattgcgttagtgtgtaatttttgtaccatcagtggctagtttttgtctaaaatcttttttggaatattgcttaatgttttgattttatgatagtgaagcttgtattcagtgttttgccaattaatattatatgcttgtaataaaagcagaagaaaaacttaactaaaatctcccagtctggcaatgtttttacctaaggtatatgttaagagtttgacagataatgtgttacagaacatgatcagccccctccagcttccaggctcagccatctggggatagaaagtatccaggaaaaccaaccaaccaaccaaaatcctccaaacaaggttttgtttgttttatttttctgttcatagtccctaactatagtataataattgcttctatagcatttgctttgttttcattggttttggtttttgagattgagtctctgtgtagtcttgatatcttggaactcactttgtagaccagacaagccttaaactctagatctgcctgactctgcc

SEQ ID NO: 30335 - DNA, 1360 bp, Mus musculus
ggattgaaggcaaggagaggaacattcgtgcactgctgtccactctgcacacggtattgtgggatggggagagccgctggacacctgtgagtatggctgacctggtgactccagagcaggtgaagaagcagtaccgccgtgcagtgctggtagtgcatcctgataaggtaggtgtatagggaggcagttcccaggatgctaggcctgggcttctggaccttgtgcttgtggttgggttgtctctgcctctcatctcctaggggccttttcctgctggctgtattacaagaaaggagctggtgggaaggtcggctgagtagtcaggctggctctcaccccattgcccacaggccacagggcagccgtatgaacagtatgccaagatgatcttcatggagctgaatgatgcatggtctgagtttgaaaaccagggctcgaggcccctcttctgaggcctgtgatggctatggctgcaggagctgttcatgaatcctgaatgctgctggcctgactgaggcacaaatgggaccataacaggtgtggcaggtgatatcgccccaggggcctggaccatctactcccaatcatccctgcattcatcatggacaaataccattccatggctgggagagaaagcattcctcagatctgatgttagttgttttgtttttctttttcttgtaccagaggaaaagtgttgatttatattccttccacagctgtcacagtttgtgatttacttggtgtctggtggctgtcacctcttggatggcacatgtcgctggcacttctctcctgtcatttcttcaaatatgggggtacatccacatcctactctgatcagtttgccaatcatctgtacataattaaactattttctgatggctggtgcagtctctggcttgtaaagcacttcttacctagtacctggtcacctatttgttcctcggtttttttacccatgatggattgtaggattgtgaagttggtctaggattggctgtaaagaccactgcagccagcaccaataccatcttcactgagcattttgctaaagaaaagttctagaaacacatcagaagggagcctgatccacaacattgggtttctcccaaggcctagagtcttaaactattttcagaaattctactgtacttgatcttagcgcataactagagttcttagaggggtgtcaggacacttgccaaaggctgcagagttgggtcatgttattctcagacccttgatctactggctggatctccgtcagcctctagggactaatgaaaactcaagccagtggctcaggcctaaaagtcactgactgaagaaatgttggggtgaatgtgagctcatgtta

SEQ ID NO: 30336 - DNA, 1172 bp, Mus musculus
tccaagcactgtgtcctgaggtaggcatttgggggccaaggcaacaggttgggagaattgagaacaatggaggaagagtatcttagggtgccttatggtggacactcacaaacttggccatatagatgtatgtactaccagatgaacagccagccagattcacacacgcacatgtttaaacgtgtaaacgtgtgcacaactgcacacacaacctgagaaaccttcaggaggatttgtggtgtgactttgcagtgacatgtagcgatggctagttgaaggaatctccctcatgtcttagtggtcatggccacttccccacccctgcccatctgtgttcctgcctggccttggtgtgcttccgtgtgccctgggtatcaggagcctatcatcaacctgactggggtgagcagtgcagccatgcctggaggtttgagccaccctccccttgctagagagaagggcctcaatatttatatttaagaaatgaaataatattaataataatgtaaggagggctgggacacagggactctggccttccctggggcctgggacctgcctggccttgtggttacattgggtaccctcactgtccatggctgcctggtctctgtaattttatatagagtttgagctgaagcctcgtatatttaatttattttgttaaacaagaaattgcctccttttctcattctggtgtttttacctggggttggtctgttcgtgtatttgccagtgagcacactgatgtgctcacttttgggtatactcacatatatgcattgataagtatgtgtgtatacatgtgctagcttgcatgtatccacatgtactgatactgtgcctgggtgtctttcctttagggaagtgcctgcctttcctttcctagaccccagagttgggttttcccaggttttgtcttctgagcttcatagtgtaccaggagtggctgcagctagctggtggtatggggtgttgtgaactactctggggcctgtttggagtgctgttgtacacatagatgagtattatccctctattctgtgcgtgaccctgcccttagccgggaacctactttttgttgtcccattttatgtggccttagcagggaagctgcttagaactgagatcgggtgagccccagaatcacagtaacctctctcctcagggtt

SEQ ID NO: 30337 - DNA, 1184 bp, Mus musculus
ccagtgagcagcctgggaggtgagcgggggtctggggaggacgtgacttctgtcccctcccaccactgactccaattcctgtggtgtcatcactgcccccacttcctgtctgatgtcatcacttcctgtatgaccccgtccatttccttatgacgtcatctgcaggcccctcccacccctgacccccactccctgtgacgtcatcaccacccctacaccctgtccaacctggccacttccttgtgacaatccgccccctgaccccacagggcgcagcccctgtgcagtgccaggaagctgggctatgctgaactcatgtggtgcctgctctcagaggaggacaagatcacgtgaggggcggtgccccagtcagccatgcctcctgcttgctccttacctcgcttctctgtggtcacgcccaccaactctggcttcaccctgacatggccacgcctataggatgctctgtctccgccccccccccccccccccccgcttgatcctggctgactgaccccaaccaccgatgctatgacccccacctcatgaactctgaccctgatctcatgaccccgccaccgtgaccctgctgacctctgacccctgatcctgcccacagacaccatgatctctgacccttaccccttgcctccactccttgactgtgaccccgcccattgacccgcccccgtgacctctgaccccccaaccccacccacccccgcagcactgagtactggttccgctgcgtggtggtcgagctcgagttctatgaggagcaggcctggcacatggccccccaaggcatggagctcctccttttctgccacctcacgcaccaggtgctcgacctcttcgccccgagcccagtgagcagacggctaggatcccggccacgggcaacctctgaccctgtgggggactcctgacccctagggttagcctgtaaattccagggtgacctctgacactacctccccattgtaagctcaggttgctttgtgggtgacccctgaccccaggtgacaacacgggcgaccccgtgtgtgaccccagtttgaccccttacaccaggtgtcgtcacgggtgaccccagcaggggcgccctgtgcgtgacccttgtgacccctgacccctaggtcggatcacgctttgtggcctgaagcgcttgagcctggcaggtg

SEQ ID NO: 30338 - DNA, 1193 bp, Mus musculus
tttccagttttgtggagtactggcttttgaagtatgacctaatggtttttaatttcttcaatttctgttgtgatgcttccttttcatttctgacttcattgatttggatgctgtctctgtgccttttatttagtttagctaagggtttgtccatcttgttgattgttctcaaggaaccagctcttgattttgcagattctttgtattgatttttttgtttctaattgactttcagcctgagtttgattctttcctgctgtctactcctctttggtttgtttgcttctttttgttcaggtgtgctgttaagttgctagtatgagatctctccaatttcctcatgaagggtctttgtggtatgaatttttcctttcatcactgctttcagtatgtcaaataagttttggtatgttgtgccttcattttcattgaattctagaaagtctttaatttctttctttatttctttcctgatcaagtaaccattgagtactgagttattcattttctatgactatgtgggctttctgttgtttctcttattgtggaaatctagccttaattgatggtgatctgatcgagtgcatgtggttctttcaatcttcttgtatatgttgagttttgattatatggtcagttttagagagggttctgtgaggtgctgagaagaaggcacatttattggtttttggattaaggattctgtagatagctgttaaatccatgtggtttataacagttctttctctgttaagtttctgttttgatggcctgtccactggtgagagtgggatgtcgatgtcctcccctattattgtgttggtttaatgtatgatttgagttttagtaatgtttctcttatgaatgtgggttcccttgcattttgtggcatagatattcagaatggagatatcatcatggtggatttttactttcatgagtatgaagtgtccttcccgtttcttttgataacttttggttgaaagtctattttgttagatattagaataggtactccggcttgttttttgggtttgtttgtgcagaaaacctttttccagccgtttatactgaggtagtgtctaactttgttgctgaggtatatttgttgcatgtagcagaatgatagatcctgtttaggtatccagtctgttagcctgtggttttttttttttaattgaggaattgagtac

SEQ ID NO: 30339 - DNA, 1243 bp, Mus musculus
tttcctttttaaattcttctacctgcttaatcatattttcctgtattactttaagggaatcatttatcttctttcaaggcctctatcatcttcatgagatggggtttaaggtcatagtcttgctctcaaggtgttaggatattcggggcttgctgtataggagagctgggttctgatggtaccataatacagtagcttctgttgattatgttcttgtgcttgcctttagccatctggttttcagtggtgttggctggcctggttatccgagttggagcaggcctcctgggatgtaggtagagccatgtgtccagggtgtgagtaggacttctgggaggtaggcaaagccatagggtggggttaagtgcagtgcaccaatcatcactgcaggtgtaggtgcagaccagaaggaggatggagctcccatagggcagggcagagtccatgactagtgggcttgttagggttccagcagataggggtgagaggatgtgccatgtgtgtgtctcaggttagagtagacctcttaggaggcaggtggtgttgtggggtggggtgcagtgcaccaatccatgactgctgagtcaggttttaatgtatgtactgactgtcctggaattcattgagcagacaattctcgaatccatgttgctgagggacacctgctgctgcctcctgagtgctgagatcaaaggcatgagccaatacacccagattacccatctttttttgtgattagtaattgttcctacaatttccctgatgtgtgcttagtactgttgatctgtttgcttctctctctctttttatgtctattagttggcatttcttttgcaaggctatatcctattcaaagagtaaagaaatgagagagatgaatctcatttagttttcttctaaaatgtcatggactacataaaacttctgcttaggaaataagtggaggatacatcagaattaaatgacaatattgtcaatgaagtatacatttattgtgttgtcgtactgtgctttctttcgtaaacatgtatgggatattttagaatgcaatgacatatgataatgtgcatgtgaacttcactcaggaagagtgggctttgctgaatccttcacagaagcgtctttataaagatgtgatgctggagacctacaagaacctcactgcttagatgagacagtaaattttattttcactctttaaaataagggcatgactgtttctttgttattgatgcttttctgc

SEQ ID NO: 30340 - DNA, 1377 bp, Mus musculus
cattggagagaaactgacaagcagatatttctctgcatgtttgataacagaaataacatgttttaaatagtctcttttttccttcccctctccttccattttccacatctatattcgtctacatctcttcctttccatttccccgcccccatgaggacagtatatattaagatagaatctcacatgtagtcgagagttgtcttgaattaaaagtcctcctactacgtctacctcttgaaggttaagattatagttgtgtgtgtcatgcctaggtttttcatggatgtcgaaccctgagctagaaaataactgtctaatcttggggaaattgctaaggtgatgacagtattgatgagtaaactcagaaagtacaaccatgcctctactaataagaggtaccaagatgaccaagatggactagagattgaagcaccgtaaagatctcttaagccagacaaggagtccagtagatgctaacagattaaatgatccttgcctgaaaaggaccaaccgcactgtgttatgaggtctaagagaaagttccaaagtgttccatgggatgtgttgctgatgcattgaagcaattcgagaaagatgactgtcatgtgactattagtttttgaaatgtttaatcccaagctgcttcacaatttgtaaggttcataggaagaacaaacacataatgaccagaatgcctttggctgggttagtgattaaaaagggaaagaaaagtcttgtgagttttcttaaaaggtttcctgcctgtgttcttctatatcatgcaaagcatgaactatgattggtctctgaggtcttgcactgtttctccttggtaatgttgcctgatgagcaggtaatgaattctggtctttactgtgcatgcagagatcatgatttcctaacaattcagtgtgttttcttagagtcaacattgtattgaatatgtaaaacatctaaactgatttactgtgtaaggaggatgtttctgggttctgtgctgttactacacaattctacatgcttgagggtagtttaacttcactacattgttttggctgctcagtattatttattgaccatataactaccagaaagcacattatacactgaaattaacttttctttttttttcttgttttttattattttctttatttacatttcaaatgcttgtatctttggtattctgtttctgggctaatatctacttatcagtgagtgcctatcaagtgagttcttttgtgattggcttgaaactaacttttcaatgtgttatttcctgaaatttgccctagcaaaccttaaactaaaaagtgttatttcggggtttgggattttgctcagtggtagagcgcttgcctagcaagcactaggccc

SEQ ID NO: 30341 - DNA, 1146 bp, Mus musculus
ccattgtctcaaggaaaccctctgcagaccagccctgagctattcttgctcctttctttgaaatgtgtctctactagaagtaaacttgaatgttactgaatagataaccttctcactgaattcctattgaattccaagtttgttggcctcaaggattttctgggatgttggaacactggcgaaggcttagctatgccagaattcaatctttaaaggcacttacaataaaataatagtaaaagaaagcacgcggatccatacaccagactaatgggggtatgagtatatgggttatgagaatgccagggttctaggaggttgagtttctgtgaaactctttgcctcgtgagtgcttccaggcctctccgcctgccaagcaggcttcactggagtgtgcatagcagcaacctgataggaggaagtctcaagatcaagcaaaagaatcagagttacacctgctcccactgttaggagtcccacaaaaacatcaagctaacaaccataacatgtcagcagaggacctgacacagacccatgctgtctctatgcttgccgtttaagtctctgtaaggttcctagaaatccagtcagtgttagtcatgggttccctctcatgtcaagggtctcaggttaaaccaaacattggttggccactcaaacaagtttcttaccatcatgccccagcacatcttgtaggaaggaccagttgtagggatgtgtgtgtgtgtgtgtgtgtgtgtgtgtgtgtttgtgtgtaagggatagtggtcctggtttctctttctgtagccttctctcctctaagagactagaacatagaggttaaggttccaagcctgcaccagcttgatttctgcattcagtgaaatgtgtggaatttgtcctgatggggccctgctgtcagttatctgagagcagaggtttgtcctagcatcagcatggattgtttaaggatctctaaaaccaccttggctaatagctcaaccaaatgtaacccatttccaacactgaagccctggctggctacaaggatagtcagttcagactccatattctccattactcggcgtcttcattagggtcaccctatagcatccaggacgcttctatcatacttggtttttactctaacccctgaataccccg

SEQ ID NO: 30342 - DNA, 1211 bp, Mus musculus
agtgttggggcattagggttagtgttaggatcaggagccaacaagctattaactagcaggtggtcttcctgagatggtttgcttcagattataaaaatccatggcagatttgctcccataggcaaggcccagtagaaaatcattttaggaaagatccctgctattaatattcttttcctgttattaaatatatatgacaatcactaggtattagctcgcccttctgagcagatctacaaagatgtactgtcttgtagtgatgctatttagacaaatagatgatttcttagtgatgatcctataagaattcctaaaattatatcagtgtttattaagatcttttatagcaggactgctactaggtcctttctgatagtcaaaactgcagtgagaactctcccagtctcccatgtgtcaattgttacttgctcttagataataaccagactttctcctactcagagcacattccaagaggttgtaaaacaatttaccaaaggtcataaaaaggtaactaatgatttattataggttctaggacagaagttaaaatattgactgggtttatctacacaaaacttcactaataacttagttatatggtttttaactcttgatgaacctgtggagctgtcacaggtgatggatgtttagccagataaatattcctaatggatatgcatgtaaacattcactgatgtaaacttcttattcaatttatgatttaaatttatgtgtaaacttgtgttgaacttttaaacatgtgatcatgtgttctgaaagatgcataaatgctgaggacaaagaggaaagtgaattttcccccttatccccctttttcattaattctgttttccccctttttcttagagagctttcataggaaactttttagaacttagtaataaatgctaaaatcactattcaaagtgttcctttttcttcctgcgccttcgactagcaggctgaaagatccacgcagttcctgctgagataaaacaaagactacattactgtctaagtcagggtttgtatacctgcacaaaacatcatgaccacgtgttgaggccggccagcggctcacatgtccgggttcgagcctggaaggcatcttggaatctggaagaaaagagggaatctaggcggcgtgagaaagatggagctaagacaagatcctgatcaaagctcaattttactattcggaaacacgg

SEQ ID NO: 30343 - DNA, 1176 bp, Mus musculus
tactagtgctatacaggaaggccacggggaattggggcggcggtgacgcctagttctggaaggggcggagtcacgagaaaggaaggagaagccgagggaggagcactgggggcagggtactatgatggacatcgggcgtacggtagagagtgtggatagtctgggatgtgctgggttcgtggctgctctcctggtggagtcggagtctggcgagcttgcgtgctgggggcgtgatctggctgagcatgtgatggtacctgggcctgcccgatgggtgaggctgcgcgtgctccgggtgggaccttggggcgggactatcctaaatttgtaggcggagtctggggggggggaacattgggcgctgggggcgagtcctagaggttctgcctttccctggtagagctttggatcatggcctggcgagcttcttagggttgtgatgtgagctgcagggtggggacatggtgtgggcgggggatgcggactctgcgcgggcgcggtttcatcccagagctaaccctgtccaccgccgtggtccgaggtcttcccgctcggcccttgactggatggacccttgtgtcctcacagcggagtggcaggtggcagaggcggccgccctggtgcgcgcacttccaggatggtcggtcgcgagtaccctggtggtgcccagcgcagcgcctggcagcaggctggtgttcggcaagggcaactttcaggacgtgacaggtgagcggtacctcacctttggccgctgggcatgcgcctcacctgcgctggtgtaggatgggtcagactgcctcccgtcctcctcctaaccccatgacgggccactccctgtgctccagaaaagatcaagggatgccaggacatcacgtccgtgttcctgaacgtggagaggatggcgccaccgaccaaggttcccttgtgtcccccctgatcctcacatgacccatgacaccatgtgacccctgactgatccctgcgtggcccccatctcctcagaaggagctggagtccgcttggggtttgcgtgtgttcgacagattcaccctagttctgcatatcttccgttgtaacgcacgcacgagggaggcccggatgcagctggcgctggcagagatcccgctcctcaggttcgcgggtgatgttccccgcatgtcctcccctcgtgttttt

SEQ ID NO: 30344 - DNA, 1302 bp, Mus musculus
tttcccttaaaagtactatataggtttttgcttaataataaataggaggggccagccgggtgtggtggcgcacacctttaatcccagcacttgggaggcagagtcaggcggatttctgagtttgaggccagcctggtctacaaagtgagtcccaggacagccagggctatatagagaaccctgtctcgaaaaacccaaaaaaaaaaaaaaaaaaaaaaaaggggcctgagtaattaaaaaaatatatatcagtcttaaatttatataaaaagaagggaatatgggcatacttattcacataaggtatgtttaaaatttcaaataggcttggcgtgattccgtcgtgcgcgtctgttctgtggaacaggaggcagttgttttccgtccggcttcccccacaccgaagtgcgcgcctccacctcatggaagactcgatggatatgtacatgagtcctcttaggcctcagaactaccttttcgctgtgaactaaaggctgacaaagactatcactttaaagtggataatgatgaaaatgagcaccagttgtcattaagaacggtcagtttaggagcaggggcaaaagatgagttacacatcgtagaggcagaagcaatggactataaggcagtccaattaaagtaacactggcaactttgaaaatgtctgtacaaccaacagtttcccttgggggctttgaaattacaccacctgtggtcttacggttgaagtgtggttcaggacctgtgcacattagtggacagcatctagtagctgtagaggaagatgcagagtctgaagatgaagatgaggaggacgtaaaactcttagccatgtctggaaagcgatctgctcctggaggtggtgacaaggttccacagaaaaaagtaaaacttgatgaagatgatgaggaggaggaagatgattttgatgaagaggaaactgaagaaaaggtcccagtgaagaaatcattacgagataccccagccaaaaatgcacaaaaatcaaacccaatggaaaagacttaaaaccatcaacaccaagatcaaagggtcaagagtccttcaaaaaacaggaaaagactcctaaaacaccgaaaggacctagttctgtagaagacattaaggcaaaaatgcaagcaagttttcttcccaaagtggaagccaagttcatcaattatgtgaagaattgtttccggatgactgaccaggaggctattcaagatctctggcagtggagaaagtctctttaagaaaagggtttaaacagtttgaaatattctgtcttacttcatttctgtaata

SEQ ID NO: 30345 - DNA, 1200 bp, Mus musculus
tcacattccaatgcatttggtgagctattgccctcacctgttttttagtagaggcattttggagagcagctgtggcctcttgtgtcagaggtggctgcccttgaatgtctaggagggttttgttcttgctgttgtttgtttttaattttaattaactttccagtatgctattcctcattctgaggattaacaagcctgtccctcaacagttcaatagctgtagcagacatttatgggtatttatcagtgtcagacccagtggtacagaatttatgttcattattttatctgtgtctcattataactcaagactggacctattattatttccattttgtaggtaaggaaactggggtttggggtttcaataattatcctaaggttgaagttagtgatgtataaagtcctgtttatatgttaagttgcagggacaaaaccttctttgaacaactaaagttaaaagcatagcttgatcctgtgaggaaacggagcactcttaagcttgtgcttaactactgagctccattcctgggttcacgtgcatgtttgctttcttgaatttaggtgaagtgacaatggatgccatgatggctcgactgaaactcttgaatccagatgaccttagaaaagaagttatgaaagctggacttaaatgtggacccattacatcaacaacaagatttatttttgagaagaaattagctcaggccttactggaacaaggtggattgctgacctcttcccttcccaagcccagcgcggttactgccatggcatttatccagggcacctcaaggactcctccatctgtggacgggaaacaaactcagcaggcctgtttttctgaagacagagattttggttacagtgtgggcttgaaccctccagaagaggaagcggtagcatccagtgtccacccagtacccttcagtgcctctaccaggaatgacaaccacaaggctggagtgacagctcctaaggagccacttgtgtactatggagtgtgtccagtatatgaggatggccctgtgagacatggtaacgtgctgtgtagtgtctccttacccaaactgggaaactataatcttaccacccaagattaattttattattcatatttgttaccctctgattcttaactgtaaggaatactattttttgttttttggtttgttttttttttcaagatagggtttctct

SEQ ID NO: 30346 - DNA, 2492 bp, Mus musculus
gaaaatacaatgttctgagtataatttgaatgtctgatattttggaagaagttaatgaaagcaaactcagatactaattgtttgaaagtgtagccgtaataatgattcagacttttcaggtggaaacttctaattttgaaatagaacaaagatgcaaaggcatagacaagtgaggtgttgctaattgggtttgttagcagcaacactgcagcacgtgcacacacccactatttctgaaacagatcaattatgtattgtctcttgggggggtgcagctttttgatatgcaatggcaaaactatgtgtttgtcatttcaccctagttattccaaccgagagaaagcaggtggcagaaaagcagatgtgccctgactcagacttcagtaacaatgctcaaaacactgccagaagttgggatggggggttaaagccatcgagaatcatgcgagtaatcatcatagaaaactcaccagcaataactaaaaccaaaactatttctcagtacttgtcagtgtagtaagttgtctagaagttgtacccaggctggagaaatggctcagcggttaagagcaccgactgctcttccaatggtcctgagttcaattcccagcaaccacatggtggctcacaaccatccataataaaatctgatgccttcttttggggtgtctgaaaacagatacagtgtacttacatataataaatacatcttttataaaaaaaagaaattgttcccaagtcttaaaatttagcctgagatttcactaagcatgattacatgacagatgtatgccgtattttagaaattaaagagctttatgctagagtttagcacttgagatctgagttcatttcagtggcttgcagtgttgacttttggctatcccaagagatgtgtaccgagtggcattgcacaccctaaggctccaagataaaaccaccttgctgaagctgggtctcagctgtctgtcagttgcttgcacagagccagtagtgttctggagacacttgcagtgcttcaccccagtacagaactataccactgattttgccaatttcagtgccttttgtgagtcattttgagatcacatagtgctaaatgggggcgttagattctcttttgtttataaaaatgttgaccaggcaagcctttaagcccagcactcattaggcagaagcagggggttctctgaatttgaggccagcctggtctagatagtgagttccaagacagccagaactacacagaggatcttgtctcaaatttaaaacaaaaacaaaaacccaccaaaatgataataaagtaattctgagctcaaatgtttaggtcttttcttttttctttttttttttttttaacttttttaaagcttattttaatgtggtaagaaataccagaattgagattttggactttggatttagtttgttttgttccccttgtaagcagctgagctctaagtacaagacagccaatcaagtgacctggaaacaatcccaaagggaatctttgttctcaaaagaaaccaaaacccacacactatattcagctatgattttgttttctctaaagtcttattgtcctgtgcggttatttttgttgttttttccatactcaaaaactgaagtactagttttgccctattttaacttttttttttttaaactcttctttcttgatatttacttaagacaacttttgggagtcagttctcaaaccatgtaggtctcaggaatccaactccagtcactggaattgagttttacccgagccatcttgctcgcccattttaaaccctaagctgcctttggactatttttccactagtatgaagggtatatacctgttagtaacacctgttgatctatgtcataaacattgtttacttgatctttcgcaaagtgttgggtaggaaacgactccttaatttgttattggacagaatccccttcttagtaaaactgtaagaaatattttcattaaaaaggacattgagtagcacattgatgtctgggagatgtcttactatgttaccccaatggcctggaactggatgagtttacttgctgggatttggcttagtctaacacagttaatagcatttgattatgtggcagtggaagacttcttttaatgtgtgacagggctgtgaaaggcatccttcctgaagtggcatagtatgaatgaacttgtaacagagacactcgctaccaccaccaccacacccacccagccaccctcatttctagagaagaacaggacaccatgtggaaagtaagttcttgcagcaccatggaaggagccaaccgcagatgctaatgaacagttgatctttaatgattttggaaggaatgaatgttaggattttgtcttcctgagttggggcttaaagtttttattaatatttctcatttatctaatagaaaaacattggagccaggcgtggtggtgcacacctttaatcccagcactcgggaggcagaggcaggca

SEQ ID NO: 30347 - DNA, 2109 bp, Mus musculus
gatactccagaagagggcatcagatttcgttatagatggttgtgagccaccatgtggttgctgggatttgaacttgggaccttcagaagagcagtcagcgctcttaaccactgagccatctcgccagcctgagaaaccccatcttaaaaaaacaagagcatgagctatgtacaaggaaccatgcaggggtaacgtgtcatacctttatcctgggggaccagccaagtcctgcctgtcagaaacggttacagtggaaaactttaaatgcggtgatctcactagccctgagcacatttctacttagttgggttaagcccttgtccccacaggttgaatacctcatttagagtactactgagacatttcccctgagaaactctcctctgttactggcttagctgactatctattccagaaggctgtcaggttgcctgaacaaagcagctggctatcaacctgacttttctgctagcatttatttttctctccccagagcgttgcagtttcccccagaaggttggctccgcctgtccctcaacaacggcagtatcacccacctggtgattcgacccaatggtcgtgtggcactcaggacccttggggacacagggttcatgcccccagacaagattactcggtcctgaggctgcctatcagactgcacgctgtcctctgctggtggcctgactacagccttcccttgtcttccacagctgtgctgtggcttcatgttgtctcaaatgtcacatttgggtgctttagttctggctcatgctgaagaaggcaacttaggagttagacggcctttgtgaaagttttctcctttaccattaccaccagcacagccctatgaggtgtgacaggaaccttcctaggtagaaggcaggcctgttatgggtactggcctggctgtactgcatcacgtgattacagtagaccagccaagcaatccataacatcgggcagagacctgactggtagtatggtggtttacaggtgacattacatttcatatactgcaatctaagacctttggttgcttatttattaaagattttcatgtggtttcttgctttgaaaaccaacttctcagctcaattaagagatcctatgtttactgcatctgaatgaaggacaaaggggctggcttcctatatgatagataaaagccatggaagaagtggccctgcaagaagactgtggtctgtataaggcaagtaggtgacagtcctgtaagcgcttctttggaggcaaagatttagcccccgctgactgacagaggaggcagcatgtacttgtaattctagcatttgggaggcagaagcaggatcaggagttactatccagcctgagttatgtttaaagacccagaaaaatatccttgttcaacagttccatcttagtttgctactggctactgttaaccttggacttgtaggttatttagaaatgatgtgtttactccagatagtctgatgacttaagaaaaaaactgtcttttatgtatgtggtttttggttttgctttttgagacagaatcttaattattgcccaggctggcttcaaacttgagacccttctccatcttgtaaatgttgggattgcatgtatatactaccatacctgcttccctctcgccccctcaaaaacccaagtacagtttctatgaagtggttgtgagcatcttctgtaatcaatgcaatgagttggaatatttgatgtacctctctgtcctctttgggaataagtatgtaataaaattttactttgttttgttgtttatttgttttaaagggaaaaagtagtgtttagaaaccctttctcagtgtcttccatcccagggctgaccctaggcatcctgcctggaggacttcctcctacaagctagaaggcacactgcttcagtccaacagcaggcctgagaggtgtcccttggagttaactttagctacccgaatgctgttttctacaagtagttgaagcaagaatggcaagctgtcaacttgactcctcacctgacctgctgggaggaaggtaaaacatttcacaggagaccgggattgctcaggattagtgtactaaggggatccccacgtggtacaaactgta

SEQ ID NO: 30348 - DNA, 1205 bp, Mus musculus
attttctcttggggttgaggacaaccgattgtttctttgctccccagggccctgaccctggttaggtctatgaggataacatcttgagtgacgcttgatagcacttcactgtttatgcagtaagtggagggtcctggtttatgacattcacaggtgtttttgcttccaggtcgggaacaggctgaactcacggggctccgacttgcaagcctgggattaaagtttaataaaattgtccattcctctatgacccgtgcagtagagaccacagacatcatcagcaagcacctgccaggtgagtgctggttgtctgctgtttggggtgtgtagattcactcttgggacaccttgctgaacaggggcctgcttttttccaggtgtctccagagtcagcacagacttgctacgggaaggtgcccccattgaaccggatccacctgtctctcactggaagccagaggctgtggtaaaaatgccatcccttgtgccactggattagggcaaggcctgcccttacccttgtctgcttccacactgacaactccttactctgctcctagcagtattatgaagatggagcccggattgaagctgccttcaggaactacatccaccgagctgatgccaggcaggaggaggacagctatgagatcttcatatgccatgccaatgtcatccgctatattgtttgtaggtaagtgccagcaaccacgcattcctcggtgtgattcggggaatgctggtgaagcctggtcagagaagtcccagtgaagctggctatgacagtgtataacatgattaaggagctgtgttctggcctccactaccttatgaaaacggtgaatgtctaaggcttttcaagacaaggtttctctgtgtagccctggctgccttaaaacttactctggctttgaactcagagattcaaacgcctgccaagtgctgggattaaaagcatgcgtagccatcgcccccttgtctgttttttacatacttgctctagttgtctgttggtagatggtgccggtagcagtcaacatggacttactcagagtttgtctccttcatccttttgctatcagaacttatgtaaggctcgtctttctccatgtttgtttgtgaaaagtttgggcaccttgggggtcgtgattcttttttgctagtcctgtacgtgagattgggcctgttgtacattctgacctgtg

SEQ ID NO: 30349 - DNA, 1141 bp, Mus musculus
caagctagggaaagattgttattgtcacagaactgtctgcctagaagagatagcacctgactgaaggtgctttcaggtaggttaagtctggatgattggagcaggtactggggtggtggtgggctaggctgatcccaagtcacaaagaacatcgttaggagagggtgatttctactcctacctctgctgaactctaacaaaccttgttacacactaaaggctctgggcatccagtagtggggaggtagatcaaacagcaaataattgaagggataaattccatctcgggtgactaatgtgtgagggatgtggtcaggattcccactcaggacttaatgattgttctcttggcagttccgggtgctctttgccaacatggcagctctgttctggtatgcctacctggcgtctctggggaagtgatgtcagatacaccgcggatggggtctggggagatccatccaccagcaggagagaacagaatccatcattaaggacaccatctggctaatatgatgtgattcacgatgccttaaaattacagagggaggaaatgtgtgggtgtcagaatcatgtgcttcagagagtcttggtggagttagtctaagttgtcactgtgagcaaagagattatcttagttgtcactgtgaacaaggagataaaaggtcaataaatggtgatgcagctgtgtctgtaatgggtgtggtttctcagcacagttgctgttgcttggagaaaaaggcatagccagatgtctttaaattctttcatgttgtaccaaagtgcaacaacacttaccacgtaagtatacagttcggtagcaggaagcacaatcatggcacgttgtaaacatttccagcatccatttctaggtgtttttcattataaaacagaactgttcctattaaacaccagctccccattcttccccttctttccatcccaacacccacctggcctctgttgtcttgagtgtgagcctacaaacctcataggatctgtcactacaaaaaagaaaaaaaaagtttcatccgtatcatcgcatgtcagaattcccttcctttttaaggctacacattccaaagtgtatctataccatgttgtgtttattcctatgttggaagacccctgcatcattttt

SEQ ID NO: 30350 - DNA, 1102 bp, Mus musculus
cagcaggtgaggcaaaagccatgggtaccatcctgggccacaaagaccagtgaacctacagaagactttcttcctggtgtgtgttatcctctcttaggtgaagaacccagttccacgtgtcaaacatccagactggctacacaaaaaactactagagaagaatgatatctacaaacagaagaagatcagtgagctctttgtgcttgaaggaaagagacaggtaacacagagcccagggtaccaaggtctgcaagctgctatccgtaaattttatttgttttggttttgtgacagggtctctatatagccttgactattttaaaattccctatgactggtgtgaaactgagatttctgcccctgtatacaccaccctgcttggcccataatttcccaatactacctctaaagagaggttttatctctaaaagtgtgcacttattctttagggccatccagtgtcattttgtgtaaaaagcatatgtgagtcatcagatgggtatgaagaactcatttgcatgtaaatgatgaggtatgcaaattagacatagtgacctcacctatctcactactgtagacttcagtttctttttttgttttttgttttttgttttgtttttcgagacagggtttctctgtgtagccctggctgtcctggaactcaatctgtagaccaggctgacctcgaactcagaaatccgcctgcctctgcctcccaagtggtgggattaaagatgttcgtcaccacgcctggctcctagacttcagtttcttaacaaaatgaagatcattcctggagacacaccaaagactgagtaatgaaagtgtgggtgaaaagctggtggtggtcttctctccagagccctcctccccttcacaggacacaagttctgcttccggcactcctatcaggtggcttacacctgcctaaaacaccagctccagggcatctaagacccttttctggcttctgcagacctctgcataatatggcattcacttacacagacatacacacaaaaataaaaagtaatctttgaaaatacaaaagacagcataacaaaaattagaggaggaggaaattttttttaaaaggttgtat

SEQ ID NO: 30351 - DNA, 1147 bp, Mus musculus
gttttagttgtagtctttgaagctggggagctaactgtcttgggtcctgaaagccctcggagttggttagtgatccactccgtaggctgtggtaggctcatcaccactttgtcaccaggtgaatcgggctcttcctcgttccaacattgtctacaatctctatgagtattcagtaccagaggacatgtaccaagaacacatcaacgagatcaacactgagttgtcagtaccagacattgagggcgtgtatgagacacaggtgattttttttctccctggccaatgacctcctggttgtaaatgaagctggatgatcagagagaatcccacagggaatccggcagtgggcagtggtggggaggtggattagatagtgatgagtgtcagcagcgtatctacctaaggtggtgtcttgtaggtgaagacagactatgatggggtatgtggccacagatagagctgtggtgctagagtctcccatttgacccaacatactaactactctcccaggtcccattgttattccgggccctcgtgcagctgggctgtgtgtgtgtggtcaacaagcagctgacaaggcacctttcgggctgggaagctgaaacttttgccctcgagcaccttgaaatgcgttctctggcccagttcagctacttggaaccaggtattgccttaccaacagccctatcacctaccttgcctcccctgctctcaggcaacgggtttattttcttctacagggagtatccgccatatctacctgtaccatcacactcagggccacaaggcactctttggggtctttatcccctcacagcgaagagcatctgtgtttgtgttggatactgtgagtcattgggcccagggcatgtgagaatttgtgggtcaggcagaatatggggaagaaagatactcctcttgccattcagttagaaatagaaaggcacagtgactgcccagctacacacacacaacaggcctaacagttggtgtctgcttaggtacgaagcaaccaaatgccagggctcagtgccctgtactcatcagaacacagcctgctgctggacaaggtggaccccaagctcctgcctcccccaaaacacacctttgaagttcgtgctgaaaccaacctgaagactatctgcag

SEQ ID NO: 30352 - DNA, 1928 bp, Mus musculus
cccacgcctggctcctggggcgctgcacggggcgctcctggcacgcaccccgccggccgccgcggtgctcggtgcgcctcctccactggtgactgcgggcggggtccccacgccgcccgcgcatcccaggacgacgctggggcctggcgaggcacgggagtactcgcccgcgtgcaaccctcccgaggtggaggcgcggtagtcccggcgtagcgagctggctcacttaaattcttgggacctgagcacagttcccctgagtcccggagcagcgccacgctgcagcctacatagtcgaggacttttcgcttttctgggggtgacttcattttccgagcttgcgattaggtcactgggaaaaatttagctttgtatcttttcccccttcacaagtgacaaaagcatttttaatggttttgtatttttcttaattttgtgctctaacgacattttaaagaacaaaaaaaaaattttttttttaagttgggatttgcagtttaacttctcagatcccatttgagccccagggtttgtcttatttatggaaagaaatggtctttctgtccagcgcactgtgaggctccgaactcaggcccggctctggccttcccttggtacttggaaccgacgttacagatatatattaaaatagtaattaataataatgtacaaaactttgggttttctgccttattctattatgcatagttgtaagaggatttccttggtttgtttttttaggaaaaaatgtaaatactctgttgatataattataaaacttattaaattcttaacctggacagtctataacaagtttctagaaacccctctggttatttgtgtacgtggtcacaaaaacccacccggctgtcagttgtgaacacactcaacagtttaactgcaacaactatccttcaactatgcaagcctgggaggcagagcgggatattcagggggagacggtctctgagcttcctaccaaggtggttgggccttccggagagccacacttgtggatgtttgcttagactcacagtgggcttcaggactggctggctctagtcacaaggaccaacctgcacccgtgtgctagtcttactgcagtgttctcagaatttgtgcaggccaggcagaatcttagacgttcaagagtctaaaggttggttaccagaagacacagtttttttcctcccagcgcccagcatctgggcgttgccctccctgtcactaagcctctcatccctcctttggttttggttttgcactcctgccctctccagctttcccgtgtgctgtgtgtgtggtgtgttgtcagcttgtcctttttggttctcaaccagcacatttatgctgaatcaacactcggcaccccgtctactactctgttccgttccttccagcctggtttccgcagtggactctggttattttaaatagtctgtcttcgtgtcagtcgacacagagagataaatacaaccttgatttggatgaaatgtggtccagtgttttgtttggctttgaggcaagtacctcactgcctgcattcctccctggggtatggggctctgggcttcaaggacatcccgagacagtgtgtggctggcatcagtccttgctgcttgtctccttcctctgcctccctaggagctgtgcttttgtggcacttctgctgcaacaaccccctccctgtctgcatggaactccactgaccttatacgttggttggccctgggtaacaggtgaccctaaccatcctggacacagcagcccatgttaccagaatctatcaggttttctgcatggaacccacccttagagtcccacttcttgtgggtggggtttgtggctcataggaacatgctaccacacggggttggttttgatccccactgtctttagcatggcccaaaatcaggttaaccctttat

SEQ ID NO: 30353 - DNA, 1176 bp, Mus musculus
gtattctacccaagggtgctcaacctcagcggggccctggccagtgtggggcagcaggctgaagtgaaggaagagcctgggaggtttgtgagccagcccttcgagtgtcgtggtggaggggatcttcgaggattctgtacatccctccctactcaggcaggcagcccctactttgcattggcctcctccacctttgctgctcccaacatccagaagaccccgagtaggccccaagtccctcctcttactcctggctggaaccttcaccagtttttaatctctgaaggatttccgagcagtcaccacccatcctgcagggccagtatcccagcctgaggccaccgagggctgtgcgctggacagggctcacagaattctctccttgcctctagatgccagtctgttgatctcattcaaccagccaatcatgtattgccagcctcattcggggattctgattggtacttggtcacaggctcctcctctcttacctccacccctgggcccgcaagtagcgagcagccaccacggcttggcctgccgaccccgggagtgccaggtgactatccgcctcgtcccgctgggagcccatggccgacgtgcctctctgtctctctctctttttctcttgtagatcacgaactgctcaggcaagagctgaacacgcggtttctggtgcagaacgcggagcggcctggcgcctccctgggcccgggggctctgctgcgggccgagttccaccagcacacgcaccagcacacacaccagcacacacaccagcaccaacacacatttgccccctttgcagggctgcccccgacgccgcttatgccgcccaccgcaccctcgccggtgcgtaggcctgagtgctggctgctggcagggcgggctgggtgggtgggacagggagtcgtacacacagatgcacgctcactctcatgcacggccctgatacctcctgccagcgtgtgcaggccccacttggccgtcatgctgggtgctggactgtgggcccgaaccccagcccaccctcaggtcttcccctgccagggcctgagcctgggctagctgcagcagtgctcagtcttaggcctgactgacatcaggtctcagagcctagacaaaactaggaccaggccattgcagacctcttgtgtgtctcttggtccatttcca

SEQ ID NO: 30354 - DNA, 1101 bp, Mus musculus
gagcagggtgccaggaatcgggggacccagaggtgagcgggtctgactagggagatgcccgtggcgtgcgagcagccgtattccagctctcagccccatctgcctgctgaaggggctggggcttaggctggaaacagaggtccaaagctactgtgtgcagagactgtggggagatgaatgtgtgcccaaatggtggacttgtggcccaaggagagcctcatagagatgggccaggatggcattcagcaagctcaggctgcaaacatcatgtgtgggcaggcatacccacgtctaccagaggggcttgacacatgctcagtgaggtccactaggggcatgacctcaggtgcaggcaagtccctccctcatctacctgagcttgtggagtggccctggcactgaccagagcagctcctgcacctcctcatggcttgcttcattttcccttaagtatgcagagaaacattaatgacatcataaaacccagagcttcgtaaaagccattcctgcggatttataggcgttttggctcattggaggactggggctgggactccgcctgcctcatccctgcagctctgatttactgccagttagggcctgcctagttcactctctaaatcacggtagcttttatgggggtatgtagttaacccatttgttacccagtggggcctatcagagcagctctcccaaccctggtgcctaccctgggattcctggacactggaaagaaaacaaggaagaaatgggccagcagctcaggctcagtagacctttcagaggccagagcaaggtggggctacctgtcttgcctggaggagaggcctggcctcttcttcatctacacttcccactccgctaacctcatctcttcttgtccacctgaggtgtagaatgccaaggctcatcagaccttgctccgcgtctagcaaggatttgactgaaaatatccaggatttgggctatggacaccctggagaggtgactcctgttggtggccatcgaaagggatctttcatggcgggacttgggcagccttgttcacacctgagcacagagaacagcggcccttgagagtgattgtgatgcccccagttt

SEQ ID NO: 30355 - DNA, 1762 bp, Mus musculus
gcctggccccccagcctcttctgaggcccctttgtcagctgagacggcagtccctgctggggctggtgccagctcgtcatccccggccttcaatattgggccatcccttcaggcccctgaggtcacagtggactcgacactctgccccaggggtggcccgccaagccccatctgtgagtcctggagcctgaggcttgtacataacttcctgggtgaatttgttaagctacagttggaccacactagtgagaacctgctctctttaagcctaagatggtttcccagactgccccaaggctgtttcctgacctctttggctgattgggcccatcgcatcagaaggagagatggactccatgtcgtcccactgtcccctccatgggtgtcaggcctcttggtgttactgtgctcctcacatgcgctgctttgtgatggacacctcctgggagacgttacacagccagtctaaggacttggagctattgggattcctcagcatcatttggtgcctctattgccaacactgtctttgcatctctgagtctctcacgcatgtgtgcaggtgtgaatggtgtgtatatgtatgcctgtatgtggtggacatgtgtgatcaagtgccagcctaggcctcactccctcttcccaccaatgtagtattccctgccctgagcacagtggcttaggtgactcggccacactgtggatttggttggccaggtttcaggtcgcagttttcttggctgtgggatgatgctagtgtctacttgaagatcttcagccacatgagagatgtgaaggggtggtgactcagtggctgcttccccacttctcagggctcttcttccaccctagaggcagggtagggcaactggaagcccttatctggactctttattcccattataacagtgttcagccctgattttgacacctgttactacagagacatctttaggcctgcacctgtcccacagcccacactacctgtgatcaggggttgtttacccccgccccagccccatctcagggcagccctgcactggagtccaagtggctaaactgagcccctgaaggggaagtgaccagagcagaggacactactagacttggaacttcagtgctggctacctggggttctctgggctgagcgggccagggcccccagtcttacctggtacctgtttaccctgactgtttaccccctttctgttgttcaactacagcctctgaactgagaatttgggacttatttttctgattgtaaaaataaaaagtgccatgccatttttataacattactagtgtcttattatttaagtagataatctgtgattatcccctgacttactccactgagtggttttatgtatctagatttgactttgcatttactaagtgctagatagagggtcctgtgggtctgggaaggcactggcctggccgtgacccaggcataggtaggcggtagagttgaggtggatgttgaattaggtggagctcttgagggcaggattcatgttcctctgaaccagaccctcccatgtcagtgttttgagaagggttggttgcatggggtggtccaaggatcctagggcctgagttaaattgccctggacctacaagggctagggaaattctacacccacataggtccttcagtcctgcccgggtccagaaagtccttttagcatcctctactgccctcttagcctaatccagggttgaaagaccggtcagttgttagcatagaaggttgaggttg

SEQ ID NO: 30356 - DNA, 1127 bp, Mus musculus
attctcacacagacacacacaggcacacagacacagacacacacaggcacacacagatatacacagagacatacacagatatatacacagacaaacacacaggcacacatacagacatacacaaatatactcacacagacacacacaagcacacagacacagacacacacaggcacagacccacacagccacacacacaaacacacagacatacacagatatacacacagacacacacaggcacacatacagacataaacaaatatactcacacagacacacacaagcacacagacacagacacacacaggcacagacccacacaggcacacacacaaacacagacatacacagatatacacacaggcacacatacagacatacacaaatatactcacacagacacatggtcacatacaggcagagagacatacacatacagacactattgattggctttgcacagagtccagcacaaaaggggtggggctcaaaggcaaactccacagaagactgatgaactcagctgatggatcagctggaggcaactaatacccacactgcctctcagagagccagggggaggacactctgctataggcagcagtggccaggtacaggcctgggctgcagcagtggccaggtgcagtcctgcagtgacagagaataggtattgtgagctattgtgggtgaagcaagtagaaagacaaggagaggtctgggttatcgggacttggaaagaaaaacaaggcccttaactccagagtctgaagcctcttggcagttgtgaatcaagaattctagttcagccaggtggtggtggtgcatgcctttaatcctagcagttgggagggagaggcaggcatatcgcaacgtttgaggccagcctgatttacagagctggttccaggacagctagtttctacaaagagaaactctgtctagaaaaacaaaacctgcccagcagtggtggcgcatgcctttaatcctagcatttgggaggcagaagcaggcagatttctgagttcaaggacagcctggtctacaaagtgagttccaggacagccagggctacacagagaaaccctgtctcaaaaataaaaaaataaaaaaataaaaaaaaaaaa

SEQ ID NO: 30357 - DNA, 1158 bp, Mus musculus
ctcctacccccactcacccactcccacctcaccgccctagcgctcccctactctggggcatcaagcctccacaggaccaagggcctcttctcccactgataacagataaggccatcctctgctacataggcagctggagccatgggttcctccatgtgtactctttggttggtggttttagtccctgggagctctgaggagtctggttggttggtattgttgttcttcctatggagttgcaaaccccttcagctccttcagtccttcccttagctcttctattggggttcccctgctcagtcccatggttggctgcgagcattcgcatctgtattggtcaggctccaggggacaaggtgtctcttttccagggcttttgaccactaggaagatagccattgaacaagcacatccatgttgctatgactgctggtaagagctactttgcgactacctagaagaacaagagtcctgacacattctgggagtgagaagggctgacatgtaaaggatgagcagtagttagcttgatgaaagggaacttcacggtttgtgtgtgtgtgtgtaggtgcagaatactgagtgtggtagcaccatctacaaaggccccatgacaagagaggaggctagaggacaggaatgggcaatgagaagggaagaggggagtgagtgagtgagtgagtgagaaaacgaaggaggcagcatggtcagactgcatggcttttggaaacaccagtctattctaaaagcagtctgggcttctagatgcagacaggtgtctcacaggacagatcagcttctctgagcaagggtggtcggactggatgagtacactgggcccgcttccgtccatggtatctgggtgagtatactgggcctgctcccaccatgatatctgggtgagtacactggtcctgctcccacccataatatctgggtcagtacactgggccttctcccatccataatagttagttgagtacactggacttgttcccatccatgatatctgggtcagtacattgggcctgatcacattcatgatatctgggtcagtacactgggcctgctcccatccataataggcgagtacactgggcctgctcccatccatgatatctgggtcagtacactgggcctgtttccatccataatagc

SEQ ID NO: 30358 - DNA, 1991 bp, Mus musculus
tgcagtggttctggtaacatgtgctttctggtcttggcttaggcttctccacagacggtgacgctcacacaggcaacggcagcagggcaacaggtacagatgatcccaacggtgactgcaacagcccagctggtgcagcagaagctcatccagcagcaggtggtgacgacagcctcagcatcactgcagacccctggtggcccaagcccagcacagcttccagccagctctgacagcccaagccagcagccaaagttgcaaatgagagttcctgctgtgaggctgaagacgcccaccaaacctccatgccagtaggatggaaattggttgatactatgttaggctgtcctggcagaactctatactgtttgtggactctgggatctgctgcctatagggtggctggctacacagttgtttgactttgtcctgtgtacatgtgacagtggcaatccatggcagtgcacagtttctcttagtgtgcacagctcagtacttggtaggactccatatcctaccattgttggataccactactgttcagcacatgcattgtagtccttcagcaggagagatccaagtctctttccagagcctccactctggtcctctctcttaaagtgcatatacccttctcagtatggcttttgttacaggcacccatcttgcccccgtgaacattagctttgatttgaatgatgctctggggctgataccatctctgtatagtaagtttgtgtttagacacattttactaggcacctccgtggatcctttacagtgttcttgtgacaagctagtgtgggtctcaggtgctgtagcctggtggagttgaaaccaacgttactttcccttacttttctcctggtctaggcttagtctgggaagcctagtatttgcttaggaaggcatcatttggtccaccccacccctggcagcactttatcaatttcagatgtcatggctgaactgttgtgcctgttacggcccattgcagttgaaggggttagttaaaatgaagccaagtcctatctgtgtttactcttcttactattgcaaggtgactatgccagagcggaaggtccatgttccacatcagtgctgatgcctgtcctctggcctgaattgcctgtgctgtcatgttagcactgcagcctggaagtggttgtgttgtgtgccatcatgtctatcccactgtttgtgtcctgtgtgggcaggaatgtgacaatacctgatgccacccagaactcacttttgagctcttaatgtgaaacatggggaaagtagcaggtgttgaaaaacagaagaggtcctgtatgcagtctcataaacaaaaccccatcattttgtcttggtgtgtgctgtgttgggaagctttggaggttcctaggtacctggtatctggctcccagcagcagctcctgttccttgtagatccatgggctcctttgtgaacaacatacctttttctccatccttctcactgtggtggcagccttcttcagtgtgcccaagccatgtttggtgggacccaaaaggcaatgtgagaagcagagtcttcatttttggcagttgcttttgtttatttttcaaccagatagctgttgtgtttttttaaaaatgtaagaaacaggactgaaattgtaaatactttgtaaacacaagcatttgtacttgaataggattttaaaaggacaagatgtcctactaagcaaaggctaataaataacctttctacacctttcttgttctgtcttaataaacaaaaggagcaatgttggcaccaaaggctttcagtctgtattgctccaaagtcatggccaaggtcttcctctttagctaccaggcaacaggactgcaccaggaatagaaatgtccttatgagcacagtcccccttctaccctagatgatcaggtgaccccagtgtagagccatacacagccctatcctggacaccttccattaggatactggaaaaactgcttcattt

SEQ ID NO: 30359 - DNA, 1120 bp, Mus musculus
gttcagcagaaggtatgggttccttgtctgaagtttgactttagtgcagctttgtgctggagaggagggtccagaacaatcgggctgtgttgggctacaggcttcacgaggtatgggttgcaagctggaggtgctaatgtgctcagtgtctcttgttttcctttcattttgatatgaatgcttatgtaactgatgatggtagggtgagtgggctcaagctagataccaggtatggatttttccactgggactgtgggttcaatcaggatacactgactcctgtatgtagtgacttgccataggtatcctccaatggcttaaaggtagggcaatgccaagatcttaggatagtcctgaccatacttcctaggagatacagaccgtggcagttgctgaggttatgagtagtgaacctagtctcacctggctgagcctctgctgtttcttttttttttttcagctgaccacccaacagatcactactcagggcccgcagcagaaggtcgcttatgctgcccagccagcccttaaaacccagtttctgaccacacccatctcccaggcccagaaactggccgggactcagcaggttcagactcagatccaggtaagcatgaggcagggaggggggtgatttttaaaaagtattaatttgtatgaatgtttgcacacatttttgaatttcagacacatgaacattgctacaacaggctttaggatcccctatatgcatgctagaggttacagaaatctgtctattaaacagatagttagaagattgttttatactgcccaggctagcactgaacgtgctgtatctatagcccatgttgacctcaaactcaccatactggccagcttcagtgtgctggaggttgtaggtgccaccacagtctgtatcgggaacttttatagtgtttgtgattctgagaattcaacctgtggcttcatgagaagaatttcattactgagccacaacttcagcttttaaaaagtaaattttgctgattgagggttgaccctgacatgctggaaaataaacctcttgtttttgcattggaaaaacaaaagtgaattttgacaacagcaagagatttacttctgcagcaactgtctgtag

SEQ ID NO: 30360 - DNA, 1194 bp, Mus musculus
gcttggtgtttctctgagccaatatccactattagaacttcagcctgcaattattctccagaagagttgaggaagcaaaggtttgacaagccaccctctttacagccacaggggttcagctacctggaaaaaccatcacccctgctgctcatttccagcttcttaggcagcagcagcaacagcagcagcagcagcagcagcaacagcagacttcccaggtgcaagttccacagctccagagccaggcccaatctcctgcacagatcaaagctgtgagcaagctaggaccggtaaatatatcctttactgtacgtcacaggcatacctagcctttcttcaattcagaacctattttgtaaaaacccagcattgtctttaggtagagaactgccttccctgtatttaaacagctttccatccagtaagcgtgtgtcatgcctctaagaagcattgggaaaccttagtttcctgctgaaagtgaatcttgaatcctatgcagtgtattgccacagatcattttcttttttcttaaaaaaaatttattaatttctttattttatgtatgtgagtacactgtagctgtacagatggttgtgggccatcatgtggttgttgggaattgaattagaacttctgccccctctggtcagctccgcttgctcagtccctgctctctatagcccaaagatttatttattattataaataagtacactgttgctgtcttcagacacactagaagagggtgtcagatctcattatgggtgtttgtgagccaccatgtggctgctggaaattgaactcaggaccttctgaagagcagtctgtgctcttgcctgctgagcctgccaaaggtctaacaagccacccctttacagccacaggggttcagtcagctacctggaaaaaccatcattttccagaggactaaaatgtaaaccattcttggaggatagtacaaagacactcctcattgctcctcttcaggagcagctaggtccagtatacttctctttgttgcttgtttaaacattgatcctagttttgccagtctgctgttatcttgctattgtttgtgctaatgtgtttcctctaggaggtaatgttatatccttgggaataatgcagaatcacgagtatgcagcatgaaaagaaaccagaaaaatacatacagtgtgaactagaacttttcct

SEQ ID NO: 30361 - DNA, 1211 bp, Mus musculus
cttacatgcattttctatggtgttcatcatcacagtcatggaaaccatgtatagttacatttgaagagaacaggccctgtgctaatgggatgatacttaaggctgtcagccaggcatgaaagtatttgtgtgttgcgtacaagtacacaggaatgctgttccgtacagaggccaaaggtttgcatggtggtctcgggagccatccactctcattttggggatgagccttcacctgggtcttgcagatctggctaagtaggctggccagtggaccccagggatcctcttgtctacatttcaccagttcagggattacaatcacacaccactacttggaggatttgcaaagcaagcactttcccaactgagacattcctcaaaccttgaattgttaacattgagctgtgatgggtttttgtatgtggttgggcaacattctcccttcgctcagatgatacatttacactgtatggttaatgtggggactttcaaagtaaggctcatgggctgtatttcctgcccattgaagtttgtcttcctatgtggaatagagtgatgatcacaagaagaatttggacagtgattggttggtaggaagatactgacgaagtggcatttgaaagttgaggcctgagggacaggaaggcattggtgagaaggaggaaaacagctggaacagaggctcgcatgtggccagcatgagggacaggatgcagggctgaagatgatgcatgtggtgagaggcagcatgggaaggggagccaagctaaagacagccctagtggtaagcagactgaaggcagccaaaggaatatgtctgggatttgcattgactgacgataattgattttgtaaagtttatgtagcagaaggcctgacctgaagttaaacctgagtttctgttttcaataggcaggaaccattaaaacatcagtcactggaacaagcatccctacaggtgaggattgtgcacaggacttgaaaaaagctcagtctttctcctctggcctcactcatgtcctcctctttagggactgtaagtggaaatgtgattgtgaacacaatagctggtgtccctgctgctactttccagtccattaacaagcgtctggcatcacctgtggctcctggaactttgactgtgagttgttcccatgctcagagagcataccattctgggaagactatttgcttcttgaatgttccataga

SEQ ID NO: 30362 - DNA, 1145 bp, Mus musculus
gactccagagcacaggagagcaaagatgggagagggagtgacagtggcttaggcaggtgctacttctctgactaccctttggacacctgtgcctggtatttaatggcttgtgtttctaggtgatgtaatttattttatctgtatatgtatacatatttttcccttttttattttataggcttgtcagtggcaattctattgaagagaaattgttaaaaaatggaactaaagatttgatccgtgaagtagctgctcaaggaaatgactattcaatggccttcttaacgcaggtagctttcatatgttaggaaccctcagtgactgcatatgactacatagggagactgtctcacttcccaactccctcacagtgaagaatgccacagtgaacagaatcatcttttttttttttttttaagtgtgaatttactaatgaggaatgattcttgggtgtgtttttatactgtccatggctcaagtcagattcaggatcgtgtctgttcctggaagttacttactgttcctattatttgtatttagcgaactatccaggagctgtttgaagtctactcacctatggatgatactggctttcctgtgaaagctgaggaattcgtggtgctttctcaggaaccatctgtcagtgaaactatcgcacccaagattgcaagacctttcatagaggtgagaggaaatctggtcttccataagacttgtttgacaatgaatgttctacttgagttgtgactatgcatactttcccagtctggttgtgtgcttttactcacctggcttctgagtgctcagtccttactctttcttgattctcccctctgttgatcctgaagcattcctgccttccttcctgctttgccccaactgtaaagaagtatcaaggcaatggaggagaaaatgctagccattgtcctcttcccactaggactttctgagccatatttgctttctagtattgaaccatgcattccatctggcccgcaagcactctcccagtaaaatacacagctgactttgaagacttagatgaggccctagaatgtgtttgctatctcatgttgggtcctcgttggggtgtaatactccggatgtatgtcagggatattactgtttcagtgcaggcacgggaa

SEQ ID NO: 30363 - DNA, 1185 bp, Mus musculus
agcttcttgtgatactttaatgcctgtcttggtgtggtttaggatctcagagtcagggccatccatgaatgtagttggtggttcttgttcccttttacacatttggtaagaaggttcaggcacgtaataggcaagtggcagacttttgaagagcagccacagagtcatgggcacctagactaagcccagatctttctggtagtttttatccctttggcaatggctacatgtgtctgtgagtgattctgtgaccctcacagccctaggacagctgtgatcaccagtggatatatacctgggtatgtgtagggttagtggtcttcttgatttagtgtaaaacatactttcctcagatggttttctgtctttatctgagatttttaaataatcccttctttgtcagagttactgagctgtacatatatttgcttgtgtaaatgaaactctgtgtgtgcagtatacagactcatttttttctataccatttggaagtggctagtatgtaactatactgtacactcacctgtcactgatgcttctggtggacatgtgattacaggtagtgtactccagatcgtgtcagcccctggacagccctaccttcgagcccctggccctgtggtgatgcagactgtgtctcaggcaggtgctgtgcatagcaccctggggagcaagcccccaaccagtggccccagccctgcacccttgaccccacaaggtagggtgttctgaacaggaagaaggcttggtgagaatttcttgcgggcttttttttgaggagcaggggttactgtcaggagtcatgcacctctggccatggccttatgcatgtcaaagccttattgggataacctggtttccacacatgtgtcatgacatcagcttggtttcttctttctttttctctcaaatgtactacttaaatatgaccaaaccccccctgtcatattctaataaaaaaacttagggggtcagagagatggctcatcagttaagagtatttgttgcattgcagaggccctgggtatctttcctatgcccacacggtggttcacagacatctacaactctagtcccaggggatctgtcacccacttctaatacccataggcaccaggcacaccagttcatgcaggcaaaacactgctacataaagttttttatttatagatatgtataggtata
